United States Patent Application Publication US 2018/0305689 A1 - sequence listing, part 146

SEQ ID NO: 2046931 - RNA, 19 nt, Artificial Sequence
  Description of Artificial Sequence: Synthetic oligonucleotide
  Antisense strand to SEQ ID NO: 2046930
uucauuggugcagacacug

SEQ ID NO: 2046932 - RNA, 19 nt, Artificial Sequence
  Description of Artificial Sequence: Synthetic oligonucleotide
  Sense strand starting at position 478 of SEQ ID NO: 1881470
ugaacucugggcggaguaa

SEQ ID NO: 2046933 - RNA, 19 nt, Artificial Sequence
  Description of Artificial Sequence: Synthetic oligonucleotide
  Antisense strand to SEQ ID NO: 2046932
uuacuccgcccagaguuca

SEQ ID NO: 2046934 - RNA, 19 nt, Artificial Sequence
  Description of Artificial Sequence: Synthetic oligonucleotide
  Sense strand starting at position 2175 of SEQ ID NO: 1881470
cccagaacugggugccaua

SEQ ID NO: 2046935 - RNA, 19 nt, Artificial Sequence
  Description of Artificial Sequence: Synthetic oligonucleotide
  Antisense strand to SEQ ID NO: 2046934
uauggcacccaguucuggg

SEQ ID NO: 2046936 - RNA, 19 nt, Artificial Sequence
  Description of Artificial Sequence: Synthetic oligonucleotide
  Sense strand starting at position 2182 of SEQ ID NO: 1881470
cugggugccauacagaaau

SEQ ID NO: 2046937 - RNA, 19 nt, Artificial Sequence
  Description of Artificial Sequence: Synthetic oligonucleotide
  Antisense strand to SEQ ID NO: 2046936
auuucuguauggcacccag

SEQ ID NO: 2046938 - RNA, 19 nt, Artificial Sequence
  Description of Artificial Sequence: Synthetic oligonucleotide
  Sense strand starting at position 2282 of SEQ ID NO: 1881470
cuucucacccagugggaau

SEQ ID NO: 2046939 - RNA, 19 nt, Artificial Sequence
  Description of Artificial Sequence: Synthetic oligonucleotide
  Antisense strand to SEQ ID NO: 2046938
auucccacugggugagaag

SEQ ID NO: 2046940 - RNA, 19 nt, Artificial Sequence
  Description of Artificial Sequence: Synthetic oligonucleotide
  Sense strand starting at position 2360 of SEQ ID NO: 1881470
ugcuucuuccaggaagcuu

SEQ ID NO: 2046941 - RNA, 19 nt, Artificial Sequence
  Description of Artificial Sequence: Synthetic oligonucleotide
  Antisense strand to SEQ ID NO: 2046940
aagcuuccuggaagaagca

SEQ ID NO: 2046942 - RNA, 19 nt, Artificial Sequence
  Description of Artificial Sequence: Synthetic oligonucleotide
  Sense strand starting at position 2480 of SEQ ID NO: 1881470
gcccuuucugagggacaaa

SEQ ID NO: 2046943 - RNA, 19 nt, Artificial Sequence
  Description of Artificial Sequence: Synthetic oligonucleotide
  Antisense strand to SEQ ID NO: 2046942
uuugucccucagaaagggc

SEQ ID NO: 2046944 - RNA, 19 nt, Artificial Sequence
  Description of Artificial Sequence: Synthetic oligonucleotide
  Sense strand starting at position 2706 of SEQ ID NO: 1881470
ggauauuaauagccagcaa

SEQ ID NO: 2046945 - RNA, 19 nt, Artificial Sequence
  Description of Artificial Sequence: Synthetic oligonucleotide
  Antisense strand to SEQ ID NO: 2046944
uugcuggcuauuaauaucc

SEQ ID NO: 2046946 - RNA, 19 nt, Artificial Sequence
  Description of Artificial Sequence: Synthetic oligonucleotide
  Sense strand starting at position 2740 of SEQ ID NO: 1881470
gugguugcuguuaggguua

SEQ ID NO: 2046947 - RNA, 19 nt, Artificial Sequence
  Description of Artificial Sequence: Synthetic oligonucleotide
  Antisense strand to SEQ ID NO: 2046946
uaacccuaacagcaaccac

SEQ ID NO: 2046948 - RNA, 19 nt, Artificial Sequence
  Description of Artificial Sequence: Synthetic oligonucleotide
  Sense strand starting at position 2745 of SEQ ID NO: 1881470
ugcuguuaggguuaaauug

SEQ ID NO: 2046949 - RNA, 19 nt, Artificial Sequence
  Description of Artificial Sequence: Synthetic oligonucleotide
  Antisense strand to SEQ ID NO: 2046948
caauuuaacccuaacagca

SEQ ID NO: 2046950 - RNA, 19 nt, Artificial Sequence
  Description of Artificial Sequence: Synthetic oligonucleotide
  Sense strand starting at position 2753 of SEQ ID NO: 1881470
ggguuaaauuggccaacau

SEQ ID NO: 2046951 - RNA, 19 nt, Artificial Sequence
  Description of Artificial Sequence: Synthetic oligonucleotide
  Antisense strand to SEQ ID NO: 2046950
auguuggccaauuuaaccc

SEQ ID NO: 2046952 - RNA, 19 nt, Artificial Sequence
  Description of Artificial Sequence: Synthetic oligonucleotide
  Sense strand starting at position 2754 of SEQ ID NO: 1881470
gguuaaauuggccaacaug

SEQ ID NO: 2046953 - RNA, 19 nt, Artificial Sequence
  Description of Artificial Sequence: Synthetic oligonucleotide
  Antisense strand to SEQ ID NO: 2046952
cauguuggccaauuuaacc

SEQ ID NO: 2046954 - RNA, 19 nt, Artificial Sequence
  Description of Artificial Sequence: Synthetic oligonucleotide
  Sense strand starting at position 2802 of SEQ ID NO: 1881470
agugaaggaucagaacaca

SEQ ID NO: 2046955 - RNA, 19 nt, Artificial Sequence
  Description of Artificial Sequence: Synthetic oligonucleotide
  Antisense strand to SEQ ID NO: 2046954
uguguucugauccuucacu

SEQ ID NO: 2046956 - RNA, 19 nt, Artificial Sequence
  Description of Artificial Sequence: Synthetic oligonucleotide
  Sense strand starting at position 2842 of SEQ ID NO: 1881470
cgucuuauaccugggcaaa

SEQ ID NO: 2046957 - RNA, 19 nt, Artificial Sequence
  Description of Artificial Sequence: Synthetic oligonucleotide
  Antisense strand to SEQ ID NO: 2046956
uuugcccagguauaagacg

SEQ ID NO: 2046958 - RNA, 19 nt, Artificial Sequence
  Description of Artificial Sequence: Synthetic oligonucleotide
  Sense strand starting at position 2843 of SEQ ID NO: 1881470
gucuuauaccugggcaaag

SEQ ID NO: 2046959 - RNA, 19 nt, Artificial Sequence
  Description of Artificial Sequence: Synthetic oligonucleotide
  Antisense strand to SEQ ID NO: 2046958
cuuugcccagguauaagac

SEQ ID NO: 2046960 - RNA, 19 nt, Artificial Sequence
  Description of Artificial Sequence: Synthetic oligonucleotide
  Sense strand starting at position 2955 of SEQ ID NO: 1881470
guccuugucauccagagag

SEQ ID NO: 2046961 - RNA, 19 nt, Artificial Sequence
  Description of Artificial Sequence: Synthetic oligonucleotide
  Antisense strand to SEQ ID NO: 2046960
cucucuggaugacaaggac

SEQ ID NO: 2046962 - RNA, 19 nt, Artificial Sequence
  Description of Artificial Sequence: Synthetic oligonucleotide
  Sense strand starting at position 3181 of SEQ ID NO: 1881470
aggugaauagcugggacaa

SEQ ID NO: 2046963 - RNA, 19 nt, Artificial Sequence
  Description of Artificial Sequence: Synthetic oligonucleotide
  Antisense strand to SEQ ID NO: 2046962
uugucccagcuauucaccu

SEQ ID NO: 2046964 - RNA, 19 nt, Artificial Sequence
  Description of Artificial Sequence: Synthetic oligonucleotide
  Sense strand starting at position 3182 of SEQ ID NO: 1881470
ggugaauagcugggacaaa

SEQ ID NO: 2046965 - RNA, 19 nt, Artificial Sequence
  Description of Artificial Sequence: Synthetic oligonucleotide
  Antisense strand to SEQ ID NO: 2046964
uuugucccagcuauucacc

SEQ ID NO: 2046966 - RNA, 19 nt, Artificial Sequence
  Description of Artificial Sequence: Synthetic oligonucleotide
  Sense strand starting at position 3193 of SEQ ID NO: 1881470
gggacaaagugauugugau

SEQ ID NO: 2046967 - RNA, 19 nt, Artificial Sequence
  Description of Artificial Sequence: Synthetic oligonucleotide
  Antisense strand to SEQ ID NO: 2046966
aucacaaucacuuuguccc

SEQ ID NO: 2046968 - RNA, 19 nt, Artificial Sequence
  Description of Artificial Sequence: Synthetic oligonucleotide
  Sense strand starting at position 3194 of SEQ ID NO: 1881470
ggacaaagugauugugaua

SEQ ID NO: 2046969 - RNA, 19 nt, Artificial Sequence
  Description of Artificial Sequence: Synthetic oligonucleotide
  Antisense strand to SEQ ID NO: 2046968
uaucacaaucacuuugucc

SEQ ID NO: 2046970 - RNA, 19 nt, Artificial Sequence
  Description of Artificial Sequence: Synthetic oligonucleotide
  Sense strand starting at position 3395 of SEQ ID NO: 1881470
cagagagcaucucuucuga

SEQ ID NO: 2046971 - RNA, 19 nt, Artificial Sequence
  Description of Artificial Sequence: Synthetic oligonucleotide
  Antisense strand to SEQ ID NO: 2046970
ucagaagagaugcucucug

SEQ ID NO: 2046972 - RNA, 19 nt, Artificial Sequence
  Description of Artificial Sequence: Synthetic oligonucleotide
  Sense strand starting at position 3397 of SEQ ID NO: 1881470
gagagcaucucuucugaga

SEQ ID NO: 2046973 - RNA, 19 nt, Artificial Sequence
  Description of Artificial Sequence: Synthetic oligonucleotide
  Antisense strand to SEQ ID NO: 2046972
ucucagaagagaugcucuc

SEQ ID NO: 2046974 - RNA, 19 nt, Artificial Sequence
  Description of Artificial Sequence: Synthetic oligonucleotide
  Sense strand starting at position 3460 of SEQ ID NO: 1881470
gccauuugcucaucugcaa

SEQ ID NO: 2046975 - RNA, 19 nt, Artificial Sequence
  Description of Artificial Sequence: Synthetic oligonucleotide
  Antisense strand to SEQ ID NO: 2046974
uugcagaugagcaaauggc

SEQ ID NO: 2046976 - RNA, 19 nt, Artificial Sequence
  Description of Artificial Sequence: Synthetic oligonucleotide
  Sense strand starting at position 3487 of SEQ ID NO: 1881470
uggacaacugcaugaauga

SEQ ID NO: 2046977 - RNA, 19 nt, Artificial Sequence
  Description of Artificial Sequence: Synthetic oligonucleotide
  Antisense strand to SEQ ID NO: 2046976
ucauucaugcaguugucca

SEQ ID NO: 2046978 - RNA, 19 nt, Artificial Sequence
  Description of Artificial Sequence: Synthetic oligonucleotide
  Sense strand starting at position 3517 of SEQ ID NO: 1881470
uggugagaucucuggacuc

SEQ ID NO: 2046979 - RNA, 19 nt, Artificial Sequence
  Description of Artificial Sequence: Synthetic oligonucleotide
  Antisense strand to SEQ ID NO: 2046978
gaguccagagaucucacca

SEQ ID NO: 2046980 - RNA, 19 nt, Artificial Sequence
  Description of Artificial Sequence: Synthetic oligonucleotide
  Sense strand starting at position 3519 of SEQ ID NO: 1881470
gugagaucucuggacucug

SEQ ID NO: 2046981 - RNA, 19 nt, Artificial Sequence
  Description of Artificial Sequence: Synthetic oligonucleotide
  Antisense strand to SEQ ID NO: 2046980
cagaguccagagaucucac

SEQ ID NO: 2046982 - RNA, 19 nt, Artificial Sequence
  Description of Artificial Sequence: Synthetic oligonucleotide
  Sense strand starting at position 3544 of SEQ ID NO: 1881470
gcaccuugauaggucuaga

SEQ ID NO: 2046983 - RNA, 19 nt, Artificial Sequence
  Description of Artificial Sequence: Synthetic oligonucleotide
  Antisense strand to SEQ ID NO: 2046982
ucuagaccuaucaaggugc

SEQ ID NO: 2046984 - RNA, 19 nt, Artificial Sequence
  Description of Artificial Sequence: Synthetic oligonucleotide
  Sense strand starting at position 3547 of SEQ ID NO: 1881470
ccuugauaggucuagaucu

SEQ ID NO: 2046985 - RNA, 19 nt, Artificial Sequence
  Description of Artificial Sequence: Synthetic oligonucleotide
  Antisense strand to SEQ ID NO: 2046984
agaucuagaccuaucaagg

SEQ ID NO: 2046986 - RNA, 19 nt, Artificial Sequence
  Description of Artificial Sequence: Synthetic oligonucleotide
  Sense strand starting at position 3549 of SEQ ID NO: 1881470
uugauaggucuagaucugu

SEQ ID NO: 2046987 - RNA, 19 nt, Artificial Sequence
  Description of Artificial Sequence: Synthetic oligonucleotide
  Antisense strand to SEQ ID NO: 2046986
acagaucuagaccuaucaa

SEQ ID NO: 2046988 - RNA, 19 nt, Artificial Sequence
  Description of Artificial Sequence: Synthetic oligonucleotide
  Sense strand starting at position 3670 of SEQ ID NO: 1881470
uggucuuaucaguauaaua

SEQ ID NO: 2046989 - RNA, 19 nt, Artificial Sequence
  Description of Artificial Sequence: Synthetic oligonucleotide
  Antisense strand to SEQ ID NO: 2046988
uauuauacugauaagacca

SEQ ID NO: 2046990 - RNA, 19 nt, Artificial Sequence
  Description of Artificial Sequence: Synthetic oligonucleotide
  Sense strand starting at position 3672 of SEQ ID NO: 1881470
gucuuaucaguauaauauc

SEQ ID NO: 2046991 - RNA, 19 nt, Artificial Sequence
  Description of Artificial Sequence: Synthetic oligonucleotide
  Antisense strand to SEQ ID NO: 2046990
gauauuauacugauaagac

SEQ ID NO: 2046992 - RNA, 19 nt, Artificial Sequence
  Description of Artificial Sequence: Synthetic oligonucleotide
  Sense strand starting at position 3732 of SEQ ID NO: 1881470
uuuaaauccucuguagggu

SEQ ID NO: 2046993 - RNA, 19 nt, Artificial Sequence
  Description of Artificial Sequence: Synthetic oligonucleotide
  Antisense strand to SEQ ID NO: 2046992
acccuacagaggauuuaaa

SEQ ID NO: 2046994 - RNA, 19 nt, Artificial Sequence
  Description of Artificial Sequence: Synthetic oligonucleotide
  Sense strand starting at position 3738 of SEQ ID NO: 1881470
uccucuguagggugaaaug

SEQ ID NO: 2046995 - RNA, 19 nt, Artificial Sequence
  Description of Artificial Sequence: Synthetic oligonucleotide
  Antisense strand to SEQ ID NO: 2046994
cauuucacccuacagagga

SEQ ID NO: 2046996 - RNA, 19 nt, Artificial Sequence
  Description of Artificial Sequence: Synthetic oligonucleotide
  Sense strand starting at position 3747 of SEQ ID NO: 1881470
gggugaaaugcuggaccua

SEQ ID NO: 2046997 - RNA, 19 nt, Artificial Sequence
  Description of Artificial Sequence: Synthetic oligonucleotide
  Antisense strand to SEQ ID NO: 2046996
uagguccagcauuucaccc

SEQ ID NO: 2046998 - RNA, 19 nt, Artificial Sequence
  Description of Artificial Sequence: Synthetic oligonucleotide
  Sense strand starting at position 3864 of SEQ ID NO: 1881470
cccauucuugcugagauac

SEQ ID NO: 2046999 - RNA, 19 nt, Artificial Sequence
  Description of Artificial Sequence: Synthetic oligonucleotide
  Antisense strand to SEQ ID NO: 2046998
guaucucagcaagaauggg

SEQ ID NO: 2047000 - RNA, 19 nt, Artificial Sequence
  Description of Artificial Sequence: Synthetic oligonucleotide
  Sense strand starting at position 3875 of SEQ ID NO: 1881470
ugagauacgcauugcaaug

SEQ ID NO: 2047001 - RNA, 19 nt, Artificial Sequence
  Description of Artificial Sequence: Synthetic oligonucleotide
  Antisense strand to SEQ ID NO: 2047000
cauugcaaugcguaucuca

SEQ ID NO: 2047002 - RNA, 19 nt, Artificial Sequence
  Description of Artificial Sequence: Synthetic oligonucleotide
  Sense strand starting at position 3904 of SEQ ID NO: 1881470
ggauuaguucccgaaggcu

SEQ ID NO: 2047003 - RNA, 19 nt, Artificial Sequence
  Description of Artificial Sequence: Synthetic oligonucleotide
  Antisense strand to SEQ ID NO: 2047002
agccuucgggaacuaaucc

SEQ ID NO: 2047004 - RNA, 19 nt, Artificial Sequence
  Description of Artificial Sequence: Synthetic oligonucleotide
  Sense strand starting at position 3961 of SEQ ID NO: 1881470
cuaugaaauuccuuagcag

SEQ ID NO: 2047005 - RNA, 19 nt, Artificial Sequence
  Description of Artificial Sequence: Synthetic oligonucleotide
  Antisense strand to SEQ ID NO: 2047004
cugcuaaggaauuucauag

SEQ ID NO: 2047006 - RNA, 19 nt, Artificial Sequence
  Description of Artificial Sequence: Synthetic oligonucleotide
  Sense strand starting at position 2206 of SEQ ID NO: 1881471
ccaacauguacguagaaga

SEQ ID NO: 2047007 - RNA, 19 nt, Artificial Sequence
  Description of Artificial Sequence: Synthetic oligonucleotide
  Antisense strand to SEQ ID NO: 2047006
ucuucuacguacauguugg

SEQ ID NO: 2047008 - RNA, 19 nt, Artificial Sequence
  Description of Artificial Sequence: Synthetic oligonucleotide
  Sense strand starting at position 2216 of SEQ ID NO: 1881471
cguagaagacucugaccuu

SEQ ID NO: 2047009 - RNA, 19 nt, Artificial Sequence
  Description of Artificial Sequence: Synthetic oligonucleotide
  Antisense strand to SEQ ID NO: 2047008
aaggucagagucuucuacg

SEQ ID NO: 2047010 - RNA, 19 nt, Artificial Sequence
  Description of Artificial Sequence: Synthetic oligonucleotide
  Sense strand starting at position 2287 of SEQ ID NO: 1881471
cgccuuucuguauucuagu

SEQ ID NO: 2047011 - RNA, 19 nt, Artificial Sequence
  Description of Artificial Sequence: Synthetic oligonucleotide
  Antisense strand to SEQ ID NO: 2047010
acuagaauacagaaaggcg

SEQ ID NO: 2047012 - RNA, 19 nt, Artificial Sequence
  Description of Artificial Sequence: Synthetic oligonucleotide
  Sense strand starting at position 2565 of SEQ ID NO: 1881471
uaguuccugcugugaagaa

SEQ ID NO: 2047013 - RNA, 19 nt, Artificial Sequence
  Description of Artificial Sequence: Synthetic oligonucleotide
  Antisense strand to SEQ ID NO: 2047012
uucuucacagcaggaacua

SEQ ID NO: 2047014 - RNA, 19 nt, Artificial Sequence
  Description of Artificial Sequence: Synthetic oligonucleotide
  Sense strand starting at position 2588 of SEQ ID NO: 1881471
aacucagcguacucuugaa

SEQ ID NO: 2047015 - RNA, 19 nt, Artificial Sequence
  Description of Artificial Sequence: Synthetic oligonucleotide
  Antisense strand to SEQ ID NO: 2047014
uucaagaguacgcugaguu

SEQ ID NO: 2047016 - RNA, 19 nt, Artificial Sequence
  Description of Artificial Sequence: Synthetic oligonucleotide
  Sense strand starting at position 2606 of SEQ ID NO: 1881471
aggagcucccucuaacuua

SEQ ID NO: 2047017 - RNA, 19 nt, Artificial Sequence
  Description of Artificial Sequence: Synthetic oligonucleotide
  Antisense strand to SEQ ID NO: 2047016
uaaguuagagggagcuccu

SEQ ID NO: 2047018 - RNA, 19 nt, Artificial Sequence
  Description of Artificial Sequence: Synthetic oligonucleotide
  Sense strand starting at position 2629 of SEQ ID NO: 1881471
acgacuauuaagggugaga

SEQ ID NO: 2047019 - RNA, 19 nt, Artificial Sequence
  Description of Artificial Sequence: Synthetic oligonucleotide
  Antisense strand to SEQ ID NO: 2047018
ucucacccuuaauagucgu

SEQ ID NO: 2047020 - RNA, 19 nt, Artificial Sequence
  Description of Artificial Sequence: Synthetic oligonucleotide
  Sense strand starting at position 2671 of SEQ ID NO: 1881471
cauuuagauugguaggagu

SEQ ID NO: 2047021 - RNA, 19 nt, Artificial Sequence
  Description of Artificial Sequence: Synthetic oligonucleotide
  Antisense strand to SEQ ID NO: 2047020
acuccuaccaaucuaaaug

SEQ ID NO: 2047022 - RNA, 19 nt, Artificial Sequence
  Description of Artificial Sequence: Synthetic oligonucleotide
  Sense strand starting at position 2673 of SEQ ID NO: 1881471
uuuagauugguaggaguau

SEQ ID NO: 2047023 - RNA, 19 nt, Artificial Sequence
  Description of Artificial Sequence: Synthetic oligonucleotide
  Antisense strand to SEQ ID NO: 2047022
auacuccuaccaaucuaaa

SEQ ID NO: 2047024 - RNA, 19 nt, Artificial Sequence
  Description of Artificial Sequence: Synthetic oligonucleotide
  Sense strand starting at position 2684 of SEQ ID NO: 1881471
aggaguauucugcaagacu

SEQ ID NO: 2047025 - RNA, 19 nt, Artificial Sequence
  Description of Artificial Sequence: Synthetic oligonucleotide
  Antisense strand to SEQ ID NO: 2047024
agucuugcagaauacuccu

SEQ ID NO: 2047026 - RNA, 19 nt, Artificial Sequence
  Description of Artificial Sequence: Synthetic oligonucleotide
  Sense strand starting at position 2687 of SEQ ID NO: 1881471
aguauucugcaagacuugu

SEQ ID NO: 2047027 - RNA, 19 nt, Artificial Sequence
  Description of Artificial Sequence: Synthetic oligonucleotide
  Antisense strand to SEQ ID NO: 2047026
acaagucuugcagaauacu

SEQ ID NO: 2047028 - RNA, 19 nt, Artificial Sequence
  Description of Artificial Sequence: Synthetic oligonucleotide
  Sense strand starting at position 2822 of SEQ ID NO: 1881471
uggaaagcauacuaagaaa

SEQ ID NO: 2047029 - RNA, 19 nt, Artificial Sequence
  Description of Artificial Sequence: Synthetic oligonucleotide
  Antisense strand to SEQ ID NO: 2047028
uuucuuaguaugcuuucca

SEQ ID NO: 2047030 - RNA, 19 nt, Artificial Sequence
  Description of Artificial Sequence: Synthetic oligonucleotide
  Sense strand starting at position 2849 of SEQ ID NO: 1881471
auccaucuacugggauuaa

SEQ ID NO: 2047031 - RNA, 19 nt, Artificial Sequence
  Description of Artificial Sequence: Synthetic oligonucleotide
  Antisense strand to SEQ ID NO: 2047030
uuaaucccaguagauggau

SEQ ID NO: 2047032 - RNA, 19 nt, Artificial Sequence
  Description of Artificial Sequence: Synthetic oligonucleotide
  Sense strand starting at position 2858 of SEQ ID NO: 1881471
cugggauuaaagggcauau

SEQ ID NO: 2047033 - RNA, 19 nt, Artificial Sequence
  Description of Artificial Sequence: Synthetic oligonucleotide
  Antisense strand to SEQ ID NO: 2047032
auaugcccuuuaaucccag

SEQ ID NO: 2047034 - RNA, 19 nt, Artificial Sequence
  Description of Artificial Sequence: Synthetic oligonucleotide
  Sense strand starting at position 2952 of SEQ ID NO: 1881471
aucugaaagucagcuaauc

SEQ ID NO: 2047035 - RNA, 19 nt, Artificial Sequence
  Description of Artificial Sequence: Synthetic oligonucleotide
  Antisense strand to SEQ ID NO: 2047034
gauuagcugacuuucagau

SEQ ID NO: 2047036 - RNA, 19 nt, Artificial Sequence
  Description of Artificial Sequence: Synthetic oligonucleotide
  Sense strand starting at position 2995 of SEQ ID NO: 1881471
caguaagaacuccgccuuu

SEQ ID NO: 2047037 - RNA, 19 nt, Artificial Sequence
  Description of Artificial Sequence: Synthetic oligonucleotide
  Antisense strand to SEQ ID NO: 2047036
aaaggcggaguucuuacug

SEQ ID NO: 2047038 - RNA, 19 nt, Artificial Sequence
  Description of Artificial Sequence: Synthetic oligonucleotide
  Sense strand starting at position 3129 of SEQ ID NO: 1881471
ucugaaggcagcuaguaau

SEQ ID NO: 2047039 - RNA, 19 nt, Artificial Sequence
  Description of Artificial Sequence: Synthetic oligonucleotide
  Antisense strand to SEQ ID NO: 2047038
auuacuagcugccuucaga

SEQ ID NO: 2047040 - RNA, 19 nt, Artificial Sequence
  Description of Artificial Sequence: Synthetic oligonucleotide
  Sense strand starting at position 3500 of SEQ ID NO: 1881471
gucacuagugugcaugaga

SEQ ID NO: 2047041 - RNA, 19 nt, Artificial Sequence
  Description of Artificial Sequence: Synthetic oligonucleotide
  Antisense strand to SEQ ID NO: 2047040
ucucaugcacacuagugac

SEQ ID NO: 2047042 - RNA, 19 nt, Artificial Sequence
  Description of Artificial Sequence: Synthetic oligonucleotide
  Sense strand starting at position 3511 of SEQ ID NO: 1881471
gcaugagacacagaagcuu

SEQ ID NO: 2047043 - RNA, 19 nt, Artificial Sequence
  Description of Artificial Sequence: Synthetic oligonucleotide
  Antisense strand to SEQ ID NO: 2047042
aagcuucugugucucaugc

SEQ ID NO: 2047044 - RNA, 19 nt, Artificial Sequence
  Description of Artificial Sequence: Synthetic oligonucleotide
  Sense strand starting at position 3553 of SEQ ID NO: 1881471
gagaaauaccgauggucua

SEQ ID NO: 2047045 - RNA, 19 nt, Artificial Sequence
  Description of Artificial Sequence: Synthetic oligonucleotide
  Antisense strand to SEQ ID NO: 2047044
uagaccaucgguauuucuc

SEQ ID NO: 2047046 - RNA, 19 nt, Artificial Sequence
  Description of Artificial Sequence: Synthetic oligonucleotide
  Sense strand starting at position 3578 of SEQ ID NO: 1881471
cagugcuuaguccuugcua

SEQ ID NO: 2047047 - RNA, 19 nt, Artificial Sequence
  Description of Artificial Sequence: Synthetic oligonucleotide
  Antisense strand to SEQ ID NO: 2047046
uagcaaggacuaagcacug

SEQ ID NO: 2047048 - RNA, 19 nt, Artificial Sequence
  Description of Artificial Sequence: Synthetic oligonucleotide
  Sense strand starting at position 3591 of SEQ ID NO: 1881471
uugcuagaauucucuaguu

SEQ ID NO: 2047049 - RNA, 19 nt, Artificial Sequence
  Description of Artificial Sequence: Synthetic oligonucleotide
  Antisense strand to SEQ ID NO: 2047048
aacuagagaauucuagcaa

SEQ ID NO: 2047050 - RNA, 19 nt, Artificial Sequence
  Description of Artificial Sequence: Synthetic oligonucleotide
  Sense strand starting at position 3633 of SEQ ID NO: 1881471
cugccaaugugucugauga

SEQ ID NO: 2047051 - RNA, 19 nt, Artificial Sequence
  Description of Artificial Sequence: Synthetic oligonucleotide
  Antisense strand to SEQ ID NO: 2047050
ucaucagacacauuggcag

SEQ ID NO: 2047052 - RNA, 19 nt, Artificial Sequence
  Description of Artificial Sequence: Synthetic oligonucleotide
  Sense strand starting at position 3634 of SEQ ID NO: 1881471
ugccaaugugucugaugag

SEQ ID NO: 2047053 - RNA, 19 nt, Artificial Sequence
  Description of Artificial Sequence: Synthetic oligonucleotide
  Antisense strand to SEQ ID NO: 2047052
cucaucagacacauuggca

SEQ ID NO: 2047054 - RNA, 19 nt, Artificial Sequence
  Description of Artificial Sequence: Synthetic oligonucleotide
  Sense strand starting at position 3641 of SEQ ID NO: 1881471
gugucugaugaguaacugu

SEQ ID NO: 2047055 - RNA, 19 nt, Artificial Sequence
  Description of Artificial Sequence: Synthetic oligonucleotide
  Antisense strand to SEQ ID NO: 2047054
acaguuacucaucagacac

SEQ ID NO: 2047056 - RNA, 19 nt, Artificial Sequence
  Description of Artificial Sequence: Synthetic oligonucleotide
  Sense strand starting at position 3659 of SEQ ID NO: 1881471
ugguauuuauugcaacuga

SEQ ID NO: 2047057 - RNA, 19 nt, Artificial Sequence
  Description of Artificial Sequence: Synthetic oligonucleotide
  Antisense strand to SEQ ID NO: 2047056
ucaguugcaauaaauacca

SEQ ID NO: 2047058 - RNA, 19 nt, Artificial Sequence
  Description of Artificial Sequence: Synthetic oligonucleotide
  Sense strand starting at position 3670 of SEQ ID NO: 1881471
gcaacugagcucuagaaag

SEQ ID NO: 2047059 - RNA, 19 nt, Artificial Sequence
  Description of Artificial Sequence: Synthetic oligonucleotide
  Antisense strand to SEQ ID NO: 2047058
cuuucuagagcucaguugc

SEQ ID NO: 2047060 - RNA, 19 nt, Artificial Sequence
  Description of Artificial Sequence: Synthetic oligonucleotide
  Sense strand starting at position 3689 of SEQ ID NO: 1881471
aggcuacuguugucuauga

SEQ ID NO: 2047061 - RNA, 19 nt, Artificial Sequence
  Description of Artificial Sequence: Synthetic oligonucleotide
  Antisense strand to SEQ ID NO: 2047060
ucauagacaacaguagccu

SEQ ID NO: 2047062 - RNA, 19 nt, Artificial Sequence
  Description of Artificial Sequence: Synthetic oligonucleotide
  Sense strand starting at position 3691 of SEQ ID NO: 1881471
gcuacuguugucuaugauc

SEQ ID NO: 2047063 - RNA, 19 nt, Artificial Sequence
  Description of Artificial Sequence: Synthetic oligonucleotide
  Antisense strand to SEQ ID NO: 2047062
gaucauagacaacaguagc

SEQ ID NO: 2047064 - RNA, 19 nt, Artificial Sequence
  Description of Artificial Sequence: Synthetic oligonucleotide
  Sense strand starting at position 3699 of SEQ ID NO: 1881471
ugucuaugaucuguccuuu

SEQ ID NO: 2047065 - RNA, 19 nt, Artificial Sequence
  Description of Artificial Sequence: Synthetic oligonucleotide
  Antisense strand to SEQ ID NO: 2047064
aaaggacagaucauagaca

SEQ ID NO: 2047066 - RNA, 19 nt, Artificial Sequence
  Description of Artificial Sequence: Synthetic oligonucleotide
  Sense strand starting at position 3738 of SEQ ID NO: 1881471
cuuuguccacuccagugau

SEQ ID NO: 2047067 - RNA, 19 nt, Artificial Sequence
  Description of Artificial Sequence: Synthetic oligonucleotide
  Antisense strand to SEQ ID NO: 2047066
aucacuggaguggacaaag

SEQ ID NO: 2047068 - RNA, 19 nt, Artificial Sequence
  Description of Artificial Sequence: Synthetic oligonucleotide
  Sense strand starting at position 3748 of SEQ ID NO: 1881471
uccagugaugucugcagac

SEQ ID NO: 2047069 - RNA, 19 nt, Artificial Sequence
  Description of Artificial Sequence: Synthetic oligonucleotide
  Antisense strand to SEQ ID NO: 2047068
gucugcagacaucacugga

SEQ ID NO: 2047070 - RNA, 19 nt, Artificial Sequence
  Description of Artificial Sequence: Synthetic oligonucleotide
  Sense strand starting at position 3750 of SEQ ID NO: 1881471
cagugaugucugcagacca

SEQ ID NO: 2047071 - RNA, 19 nt, Artificial Sequence
  Description of Artificial Sequence: Synthetic oligonucleotide
  Antisense strand to SEQ ID NO: 2047070
uggucugcagacaucacug

SEQ ID NO: 2047072 - RNA, 19 nt, Artificial Sequence
  Description of Artificial Sequence: Synthetic oligonucleotide
  Sense strand starting at position 3803 of SEQ ID NO: 1881471
uccacuggccagcauaaua

SEQ ID NO: 2047073 - RNA, 19 nt, Artificial Sequence
  Description of Artificial Sequence: Synthetic oligonucleotide
  Antisense strand to SEQ ID NO: 2047072
uauuaugcuggccagugga

SEQ ID NO: 2047074 - RNA, 19 nt, Artificial Sequence
  Description of Artificial Sequence: Synthetic oligonucleotide
  Sense strand starting at position 3814 of SEQ ID NO: 1881471
gcauaauagccuuggaguu

SEQ ID NO: 2047075 - RNA, 19 nt, Artificial Sequence
  Description of Artificial Sequence: Synthetic oligonucleotide
  Antisense strand to SEQ ID NO: 2047074
aacuccaaggcuauuaugc

SEQ ID NO: 2047076 - RNA, 19 nt, Artificial Sequence
  Description of Artificial Sequence: Synthetic oligonucleotide
  Sense strand starting at position 3815 of SEQ ID NO: 1881471
cauaauagccuuggaguuu

SEQ ID NO: 2047077 - RNA, 19 nt, Artificial Sequence
  Description of Artificial Sequence: Synthetic oligonucleotide
  Antisense strand to SEQ ID NO: 2047076
aaacuccaaggcuauuaug

SEQ ID NO: 2047078 - RNA, 19 nt, Artificial Sequence
  Description of Artificial Sequence: Synthetic oligonucleotide
  Sense strand starting at position 3870 of SEQ ID NO: 1881471
aggauuuaguuugggauga

SEQ ID NO: 2047079 - RNA, 19 nt, Artificial Sequence
  Description of Artificial Sequence: Synthetic oligonucleotide
  Antisense strand to SEQ ID NO: 2047078
ucaucccaaacuaaauccu

SEQ ID NO: 2047080 - RNA, 19 nt, Artificial Sequence
  Description of Artificial Sequence: Synthetic oligonucleotide
  Sense strand starting at position 3871 of SEQ ID NO: 1881471
ggauuuaguuugggaugaa

SEQ ID NO: 2047081 - RNA, 19 nt, Artificial Sequence
  Description of Artificial Sequence: Synthetic oligonucleotide
  Antisense strand to SEQ ID NO: 2047080
uucaucccaaacuaaaucc

SEQ ID NO: 2047082 - RNA, 19 nt, Artificial Sequence
  Description of Artificial Sequence: Synthetic oligonucleotide
  Sense strand starting at position 3872 of SEQ ID NO: 1881471
gauuuaguuugggaugaaa

SEQ ID NO: 2047083 - RNA, 19 nt, Artificial Sequence
  Description of Artificial Sequence: Synthetic oligonucleotide
  Antisense strand to SEQ ID NO: 2047082
uuucaucccaaacuaaauc

SEQ ID NO: 2047084 - RNA, 19 nt, Artificial Sequence
  Description of Artificial Sequence: Synthetic oligonucleotide
  Sense strand starting at position 3940 of SEQ ID NO: 1881471
gaggaagacuaauaaagaa

SEQ ID NO: 2047085 - RNA, 19 nt, Artificial Sequence
  Description of Artificial Sequence: Synthetic oligonucleotide
  Antisense strand to SEQ ID NO: 2047084
uucuuuauuagucuuccuc

SEQ ID NO: 2047086 - RNA, 19 nt, Artificial Sequence
  Description of Artificial Sequence: Synthetic oligonucleotide
  Sense strand starting at position 94 of SEQ ID NO: 1881472
gugcaaucuuacuuugucu

SEQ ID NO: 2047087 - RNA, 19 nt, Artificial Sequence
  Description of Artificial Sequence: Synthetic oligonucleotide
  Antisense strand to SEQ ID NO: 2047086
agacaaaguaagauugcac

SEQ ID NO: 2047088 - RNA, 19 nt, Artificial Sequence
  Description of Artificial Sequence: Synthetic oligonucleotide
  Sense strand starting at position 162 of SEQ ID NO: 1881472
cguaucaaaugucagagaa

SEQ ID NO: 2047089 - RNA, 19 nt, Artificial Sequence
  Description of Artificial Sequence: Synthetic oligonucleotide
  Antisense strand to SEQ ID NO: 2047088
uucucugacauuugauacg

SEQ ID NO: 2047090 - RNA, 19 nt, Artificial Sequence
  Description of Artificial Sequence: Synthetic oligonucleotide
  Sense strand starting at position 255 of SEQ ID NO: 1881472
cugcauucuuuccuugaag

SEQ ID NO: 2047091 - RNA, 19 nt, Artificial Sequence
  Description of Artificial Sequence: Synthetic oligonucleotide
  Antisense strand to SEQ ID NO: 2047090
cuucaaggaaagaaugcag

SEQ ID NO: 2047092 - RNA, 19 nt, Artificial Sequence
  Description of Artificial Sequence: Synthetic oligonucleotide
  Sense strand starting at position 267 of SEQ ID NO: 1881472
cuugaagaaccaggucuuu

SEQ ID NO: 2047093 - RNA, 19 nt, Artificial Sequence
  Description of Artificial Sequence: Synthetic oligonucleotide
  Antisense strand to SEQ ID NO: 2047092
aaagaccugguucuucaag

SEQ ID NO: 2047094 - RNA, 19 nt, Artificial Sequence
  Description of Artificial Sequence: Synthetic oligonucleotide
  Sense strand starting at position 287 of SEQ ID NO: 1881472
aaaggcucuccuugugcua

SEQ ID NO: 2047095 - RNA, 19 nt, Artificial Sequence
  Description of Artificial Sequence: Synthetic oligonucleotide
  Antisense strand to SEQ ID NO: 2047094
uagcacaaggagagccuuu

SEQ ID NO: 2047096 - RNA, 19 nt, Artificial Sequence
  Description of Artificial Sequence: Synthetic oligonucleotide
  Sense strand starting at position 333 of SEQ ID NO: 1881472
gguuuagagcaguagguca

SEQ ID NO: 2047097 - RNA, 19 nt, Artificial Sequence
  Description of Artificial Sequence: Synthetic oligonucleotide
  Antisense strand to SEQ ID NO: 2047096
ugaccuacugcucuaaacc

SEQ ID NO: 2047098 - RNA, 19 nt, Artificial Sequence
  Description of Artificial Sequence: Synthetic oligonucleotide
  Sense strand starting at position 338 of SEQ ID NO: 1881472
agagcaguaggucacuauu

SEQ ID NO: 2047099 - RNA, 19 nt, Artificial Sequence
  Description of Artificial Sequence: Synthetic oligonucleotide
  Antisense strand to SEQ ID NO: 2047098
aauagugaccuacugcucu

SEQ ID NO: 2047100 - RNA, 19 nt, Artificial Sequence
  Description of Artificial Sequence: Synthetic oligonucleotide
  Sense strand starting at position 551 of SEQ ID NO: 1881472
cgcggcaaaccugaaauau

SEQ ID NO: 2047101 - RNA, 19 nt, Artificial Sequence
  Description of Artificial Sequence: Synthetic oligonucleotide
  Antisense strand to SEQ ID NO: 2047100
auauuucagguuugccgcg

SEQ ID NO: 2047102 - RNA, 19 nt, Artificial Sequence
  Description of Artificial Sequence: Synthetic oligonucleotide
  Sense strand starting at position 959 of SEQ ID NO: 1881472
ucggguggaaucugcauau

SEQ ID NO: 2047103 - RNA, 19 nt, Artificial Sequence
  Description of Artificial Sequence: Synthetic oligonucleotide
  Antisense strand to SEQ ID NO: 2047102
auaugcagauuccacccga

SEQ ID NO: 2047104 - RNA, 19 nt, Artificial Sequence
  Description of Artificial Sequence: Synthetic oligonucleotide
  Sense strand starting at position 963 of SEQ ID NO: 1881472
guggaaucugcauauacac

SEQ ID NO: 2047105 - RNA, 19 nt, Artificial Sequence
  Description of Artificial Sequence: Synthetic oligonucleotide
  Antisense strand to SEQ ID NO: 2047104
guguauaugcagauuccac

SEQ ID NO: 2047106 - RNA, 19 nt, Artificial Sequence
  Description of Artificial Sequence: Synthetic oligonucleotide
  Sense strand starting at position 1058 of SEQ ID NO: 1881472
acgugagccuucucaagaa

SEQ ID NO: 2047107 - RNA, 19 nt, Artificial Sequence
  Description of Artificial Sequence: Synthetic oligonucleotide
  Antisense strand to SEQ ID NO: 2047106
uucuugagaaggcucacgu

SEQ ID NO: 2047108 - RNA, 19 nt, Artificial Sequence
  Description of Artificial Sequence: Synthetic oligonucleotide
  Sense strand starting at position 1121 of SEQ ID NO: 1881472
gugacuuacaaguggagau

SEQ ID NO: 2047109 - RNA, 19 nt, Artificial Sequence
  Description of Artificial Sequence: Synthetic oligonucleotide
  Antisense strand to SEQ ID NO: 2047108
aucuccacuuguaagucac

SEQ ID NO: 2047110 - RNA, 19 nt, Artificial Sequence
  Description of Artificial Sequence: Synthetic oligonucleotide
  Sense strand starting at position 1147 of SEQ ID NO: 1881472
ccguuauaaugcguucaag

SEQ ID NO: 2047111 - RNA, 19 nt, Artificial Sequence
  Description of Artificial Sequence: Synthetic oligonucleotide
  Antisense strand to SEQ ID NO: 2047110
cuugaacgcauuauaacgg

SEQ ID NO: 2047112 - RNA, 19 nt, Artificial Sequence
  Description of Artificial Sequence: Synthetic oligonucleotide
  Sense strand starting at position 1483 of SEQ ID NO: 1881472
acuggugucccugaaggau

SEQ ID NO: 2047113 - RNA, 19 nt, Artificial Sequence
  Description of Artificial Sequence: Synthetic oligonucleotide
  Antisense strand to SEQ ID NO: 2047112
auccuucagggacaccagu

SEQ ID NO: 2047114 - RNA, 19 nt, Artificial Sequence
  Description of Artificial Sequence: Synthetic oligonucleotide
  Sense strand starting at position 1492 of SEQ ID NO: 1881472
ccugaaggauguggaaaua

SEQ ID NO: 2047115 - RNA, 19 nt, Artificial Sequence
  Description of Artificial Sequence: Synthetic oligonucleotide
  Antisense strand to SEQ ID NO: 2047114
uauuuccacauccuucagg

SEQ ID NO: 2047116 - RNA, 19 nt, Artificial Sequence
  Description of Artificial Sequence: Synthetic oligonucleotide
  Sense strand starting at position 1514 of SEQ ID NO: 1881472
gcauuuacaaucggcuuga

SEQ ID NO: 2047117 - RNA, 19 nt, Artificial Sequence
  Description of Artificial Sequence: Synthetic oligonucleotide
  Antisense strand to SEQ ID NO: 2047116
ucaagccgauuguaaaugc

SEQ ID NO: 2047118 - RNA, 19 nt, Artificial Sequence
  Description of Artificial Sequence: Synthetic oligonucleotide
  Sense strand starting at position 1518 of SEQ ID NO: 1881472
uuacaaucggcuugacaug

SEQ ID NO: 2047119 - RNA, 19 nt, Artificial Sequence
  Description of Artificial Sequence: Synthetic oligonucleotide
  Antisense strand to SEQ ID NO: 2047118
caugucaagccgauuguaa

SEQ ID NO: 2047120 - RNA, 19 nt, Artificial Sequence
  Description of Artificial Sequence: Synthetic oligonucleotide
  Sense strand starting at position 1544 of SEQ ID NO: 1881472
ggaggacucagccgucauc

SEQ ID NO: 2047121 - RNA, 19 nt, Artificial Sequence
  Description of Artificial Sequence: Synthetic oligonucleotide
  Antisense strand to SEQ ID NO: 2047120
gaugacggcugaguccucc

SEQ ID NO: 2047122 - RNA, 19 nt, Artificial Sequence
  Description of Artificial Sequence: Synthetic oligonucleotide
  Sense strand starting at position 1553 of SEQ ID NO: 1881472
agccgucaucuccaaaguu

SEQ ID NO: 2047123 - RNA, 19 nt, Artificial Sequence
  Description of Artificial Sequence: Synthetic oligonucleotide
  Antisense strand to SEQ ID NO: 2047122
aacuuuggagaugacggcu

SEQ ID NO: 2047124 - RNA, 19 nt, Artificial Sequence
  Description of Artificial Sequence: Synthetic oligonucleotide
  Sense strand starting at position 1617 of SEQ ID NO: 1881472
cuugguggguaacucaaua

SEQ ID NO: 2047125 - RNA, 19 nt, Artificial Sequence
  Description of Artificial Sequence: Synthetic oligonucleotide
  Antisense strand to SEQ ID NO: 2047124
uauugaguuacccaccaag

SEQ ID NO: 2047126 - RNA, 19 nt, Artificial Sequence
  Description of Artificial Sequence: Synthetic oligonucleotide
  Sense strand starting at position 1647 of SEQ ID NO: 1881472
cggcguuucgagccuguaa

SEQ ID NO: 2047127 - RNA, 19 nt, Artificial Sequence
  Description of Artificial Sequence: Synthetic oligonucleotide
  Antisense strand to SEQ ID NO: 2047126
uuacaggcucgaaacgccg

SEQ ID NO: 2047128 - RNA, 19 nt, Artificial Sequence
  Description of Artificial Sequence: Synthetic oligonucleotide
  Sense strand starting at position 1648 of SEQ ID NO: 1881472
ggcguuucgagccuguaaa

SEQ ID NO: 2047129 - RNA, 19 nt, Artificial Sequence
  Description of Artificial Sequence: Synthetic oligonucleotide
  Antisense strand to SEQ ID NO: 2047128
uuuacaggcucgaaacgcc

SEQ ID NO: 2047130 - RNA, 19 nt, Artificial Sequence
  Description of Artificial Sequence: Synthetic oligonucleotide
  Sense strand starting at position 1801 of SEQ ID NO: 1881472
gaggcugccugcguauauu

SEQ ID NO: 2047131 - RNA, 19 nt, Artificial Sequence
  Description of Artificial Sequence: Synthetic oligonucleotide
  Antisense strand to SEQ ID NO: 2047130
aauauacgcaggcagccuc

SEQ ID NO: 2047132 - RNA, 19 nt, Artificial Sequence
  Description of Artificial Sequence: Synthetic oligonucleotide
  Sense strand starting at position 1992 of SEQ ID NO: 1881472
ugcauuauccucugacuga

SEQ ID NO: 2047133 - RNA, 19 nt, Artificial Sequence
  Description of Artificial Sequence: Synthetic oligonucleotide
  Antisense strand to SEQ ID NO: 2047132
ucagucagaggauaaugca

SEQ ID NO: 2047134 - RNA, 19 nt, Artificial Sequence
  Description of Artificial Sequence: Synthetic oligonucleotide
  Sense strand starting at position 1993 of SEQ ID NO: 1881472
gcauuauccucugacugau

SEQ ID NO: 2047135 - RNA, 19 nt, Artificial Sequence
  Description of Artificial Sequence: Synthetic oligonucleotide
  Antisense strand to SEQ ID NO: 2047134
aucagucagaggauaaugc

SEQ ID NO: 2047136 - RNA, 19 nt, Artificial Sequence
  Description of Artificial Sequence: Synthetic oligonucleotide
  Sense strand starting at position 2060 of SEQ ID NO: 1881472
aucuuaugguuaugaggag

SEQ ID NO: 2047137 - RNA, 19 nt, Artificial Sequence
  Description of Artificial Sequence: Synthetic oligonucleotide
  Antisense strand to SEQ ID NO: 2047136
cuccucauaaccauaagau

SEQ ID NO: 2047138 - RNA, 19 nt, Artificial Sequence
  Description of Artificial Sequence: Synthetic oligonucleotide
  Sense strand starting at position 2091 of SEQ ID NO: 1881472
ggaagaggaccucggcaau

SEQ ID NO: 2047139 - RNA, 19 nt, Artificial Sequence
  Description of Artificial Sequence: Synthetic oligonucleotide
  Antisense strand to SEQ ID NO: 2047138
auugccgagguccucuucc

SEQ ID NO: 2047140 - RNA, 19 nt, Artificial Sequence
  Description of Artificial Sequence: Synthetic oligonucleotide
  Sense strand starting at position 2104 of SEQ ID NO: 1881472
ggcaauuagcaacgugaac

SEQ ID NO: 2047141 - RNA, 19 nt, Artificial Sequence
  Description of Artificial Sequence: Synthetic oligonucleotide
  Antisense strand to SEQ ID NO: 2047140
guucacguugcuaauugcc

SEQ ID NO: 2047142 - RNA, 19 nt, Artificial Sequence
  Description of Artificial Sequence: Synthetic oligonucleotide
  Sense strand starting at position 2185 of SEQ ID NO: 1881472
ggagccucugacgacauau

SEQ ID NO: 2047143 - RNA, 19 nt, Artificial Sequence
  Description of Artificial Sequence: Synthetic oligonucleotide
  Antisense strand to SEQ ID NO: 2047142
auaugucgucagaggcucc

SEQ ID NO: 2047144 - RNA, 19 nt, Artificial Sequence
  Description of Artificial Sequence: Synthetic oligonucleotide
  Sense strand starting at position 2187 of SEQ ID NO: 1881472
agccucugacgacauauau

SEQ ID NO: 2047145 - RNA, 19 nt, Artificial Sequence
  Description of Artificial Sequence: Synthetic oligonucleotide
  Antisense strand to SEQ ID NO: 2047144
auauaugucgucagaggcu

SEQ ID NO: 2047146 - RNA, 19 nt, Artificial Sequence
  Description of Artificial Sequence: Synthetic oligonucleotide
  Sense strand starting at position 2239 of SEQ ID NO: 1881472
uggagaucuugcugggaaa

SEQ ID NO: 2047147 - RNA, 19 nt, Artificial Sequence
  Description of Artificial Sequence: Synthetic oligonucleotide
  Antisense strand to SEQ ID NO: 2047146
uuucccagcaagaucucca

SEQ ID NO: 2047148 - RNA, 19 nt, Artificial Sequence
  Description of Artificial Sequence: Synthetic oligonucleotide
  Sense strand starting at position 2619 of SEQ ID NO: 1881472
ggagguagcuuugcaguga

SEQ ID NO: 2047149 - RNA, 19 nt, Artificial Sequence
  Description of Artificial Sequence: Synthetic oligonucleotide
  Antisense strand to SEQ ID NO: 2047148
ucacugcaaagcuaccucc

SEQ ID NO: 2047150 - RNA, 19 nt, Artificial Sequence
  Description of Artificial Sequence: Synthetic oligonucleotide
  Sense strand starting at position 2798 of SEQ ID NO: 1881472
guaugagcacgagaggauu

SEQ ID NO: 2047151 - RNA, 19 nt, Artificial Sequence
  Description of Artificial Sequence: Synthetic oligonucleotide
  Antisense strand to SEQ ID NO: 2047150
aauccucucgugcucauac

SEQ ID NO: 2047152 - RNA, 19 nt, Artificial Sequence
  Description of Artificial Sequence: Synthetic oligonucleotide
  Sense strand starting at position 3682 of SEQ ID NO: 1881472
caagaagaccgacgugaaa

SEQ ID NO: 2047153 - RNA, 19 nt, Artificial Sequence
  Description of Artificial Sequence: Synthetic oligonucleotide
  Antisense strand to SEQ ID NO: 2047152
uuucacgucggucuucuug

SEQ ID NO: 2047154 - RNA, 19 nt, Artificial Sequence
  Description of Artificial Sequence: Synthetic oligonucleotide
  Sense strand starting at position 3790 of SEQ ID NO: 1881472
uuccaauugggcugagaaa

SEQ ID NO: 2047155 - RNA, 19 nt, Artificial Sequence
  Description of Artificial Sequence: Synthetic oligonucleotide
  Antisense strand to SEQ ID NO: 2047154
uuucucagcccaauuggaa

SEQ ID NO: 2047156 - RNA, 19 nt, Artificial Sequence
  Description of Artificial Sequence: Synthetic oligonucleotide
  Sense strand starting at position 3808 of SEQ ID NO: 1881472
auggcaucucguguucuuu

SEQ ID NO: 2047157 - RNA, 19 nt, Artificial Sequence
  Description of Artificial Sequence: Synthetic oligonucleotide
  Antisense strand to SEQ ID NO: 2047156
aaagaacacgagaugccau

SEQ ID NO: 2047158 - RNA, 19 nt, Artificial Sequence
  Description of Artificial Sequence: Synthetic oligonucleotide
  Sense strand starting at position 3880 of SEQ ID NO: 1881472
ggcauaagcagagaguuga

SEQ ID NO: 2047159 - RNA, 19 nt, Artificial Sequence
  Description of Artificial Sequence: Synthetic oligonucleotide
  Antisense strand to SEQ ID NO: 2047158
ucaacucucugcuuaugcc

SEQ ID NO: 2047160 - RNA, 19 nt, Artificial Sequence
  Description of Artificial Sequence: Synthetic oligonucleotide
  Sense strand starting at position 3933 of SEQ ID NO: 1881472
ggaugcuuugcgcugguga

SEQ ID NO: 2047161 - RNA, 19 nt, Artificial Sequence
  Description of Artificial Sequence: Synthetic oligonucleotide
  Antisense strand to SEQ ID NO: 2047160
ucaccagcgcaaagcaucc

SEQ ID NO: 2047162 - RNA, 19 nt, Artificial Sequence
  Description of Artificial Sequence: Synthetic oligonucleotide
  Sense strand starting at position 3934 of SEQ ID NO: 1881472
gaugcuuugcgcuggugau

SEQ ID NO: 2047163 - RNA, 19 nt, Artificial Sequence
  Description of Artificial Sequence: Synthetic oligonucleotide
  Antisense strand to SEQ ID NO: 2047162
aucaccagcgcaaagcauc

SEQ ID NO: 2047164 - RNA, 19 nt, Artificial Sequence
  Description of Artificial Sequence: Synthetic oligonucleotide
  Sense strand starting at position 3949 of SEQ ID NO: 1881472
ugaucuuaccuccggguua

SEQ ID NO: 2047165 - RNA, 19 nt, Artificial Sequence
  Description of Artificial Sequence: Synthetic oligonucleotide
  Antisense strand to SEQ ID NO: 2047164
uaacccggagguaagauca

SEQ ID NO: 2047166 - RNA, 19 nt, Artificial Sequence
  Description of Artificial Sequence: Synthetic oligonucleotide
  Sense strand starting at position 500 of SEQ ID NO: 1881473
gaguguuacgaugauacug

SEQ ID NO: 2047167 - RNA, 19 nt, Artificial Sequence
  Description of Artificial Sequence: Synthetic oligonucleotide
  Antisense strand to SEQ ID NO: 2047166
caguaucaucguaacacuc

SEQ ID NO: 2047168 - RNA, 19 nt, Artificial Sequence
  Description of Artificial Sequence: Synthetic oligonucleotide
  Sense strand starting at position 841 of SEQ ID NO: 1881473
gccagauuguaauucuuaa

SEQ ID NO: 2047169 - RNA, 19 nt, Artificial Sequence
  Description of Artificial Sequence: Synthetic oligonucleotide
  Antisense strand to SEQ ID NO: 2047168
uuaagaauuacaaucuggc

SEQ ID NO: 2047170 - RNA, 19 nt, Artificial Sequence
  Description of Artificial Sequence: Synthetic oligonucleotide
  Sense strand starting at position 884 of SEQ ID NO: 1881473
cugguagacgucuacugaa

SEQ ID NO: 2047171 - RNA, 19 nt, Artificial Sequence
  Description of Artificial Sequence: Synthetic oligonucleotide
  Antisense strand to SEQ ID NO: 2047170
uucaguagacgucuaccag

SEQ ID NO: 2047172 - RNA, 19 nt, Artificial Sequence
  Description of Artificial Sequence: Synthetic oligonucleotide
  Sense strand starting at position 909 of SEQ ID NO: 1881473
gcgcauucgaaguuucuga

SEQ ID NO: 2047173 - RNA, 19 nt, Artificial Sequence
  Description of Artificial Sequence: Synthetic oligonucleotide
  Antisense strand to SEQ ID NO: 2047172
ucagaaacuucgaaugcgc

SEQ ID NO: 2047174 - RNA, 19 nt, Artificial Sequence
  Description of Artificial Sequence: Synthetic oligonucleotide
  Sense strand starting at position 964 of SEQ ID NO: 1881473
gugacuggccucuaacaga

SEQ ID NO: 2047175 - RNA, 19 nt, Artificial Sequence
  Description of Artificial Sequence: Synthetic oligonucleotide
  Antisense strand to SEQ ID NO: 2047174
ucuguuagaggccagucac

SEQ ID NO: 2047176 - RNA, 19 nt, Artificial Sequence
  Description of Artificial Sequence: Synthetic oligonucleotide
  Sense strand starting at position 1010 of SEQ ID NO: 1881473
aggaguuccuaggaauuug

SEQ ID NO: 2047177 - RNA, 19 nt, Artificial Sequence
  Description of Artificial Sequence: Synthetic oligonucleotide
  Antisense strand to SEQ ID NO: 2047176
caaauuccuaggaacuccu

SEQ ID NO: 2047178 - RNA, 19 nt, Artificial Sequence
  Description of Artificial Sequence: Synthetic oligonucleotide
  Sense strand starting at position 1062 of SEQ ID NO: 1881473
aguggucugcuacacagaa

SEQ ID NO: 2047179 - RNA, 19 nt, Artificial Sequence
  Description of Artificial Sequence: Synthetic oligonucleotide
  Antisense strand to SEQ ID NO: 2047178
uucuguguagcagaccacu

SEQ ID NO: 2047180 - RNA, 19 nt, Artificial Sequence
  Description of Artificial Sequence: Synthetic oligonucleotide
  Sense strand starting at position 1064 of SEQ ID NO: 1881473
uggucugcuacacagaaga

SEQ ID NO: 2047181 - RNA, 19 nt, Artificial Sequence
  Description of Artificial Sequence: Synthetic oligonucleotide
  Antisense strand to SEQ ID NO: 2047180
ucuucuguguagcagacca

SEQ ID NO: 2047182 - RNA, 19 nt, Artificial Sequence
  Description of Artificial Sequence: Synthetic oligonucleotide
  Sense strand starting at position 1134 of SEQ ID NO: 1881473
uggagcaagaacuguacua

SEQ ID NO: 2047183 - RNA, 19 nt, Artificial Sequence
  Description of Artificial Sequence: Synthetic oligonucleotide
  Antisense strand to SEQ ID NO: 2047182
uaguacaguucuugcucca

SEQ ID NO: 2047184 - RNA, 19 nt, Artificial Sequence
  Description of Artificial Sequence: Synthetic oligonucleotide
  Sense strand starting at position 1136 of SEQ ID NO: 1881473
gagcaagaacuguacuauc

SEQ ID NO: 2047185 - RNA, 19 nt, Artificial Sequence
  Description of Artificial Sequence: Synthetic oligonucleotide
  Antisense strand to SEQ ID NO: 2047184
gauaguacaguucuugcuc

SEQ ID NO: 2047186 - RNA, 19 nt, Artificial Sequence
  Description of Artificial Sequence: Synthetic oligonucleotide
  Sense strand starting at position 1389 of SEQ ID NO: 1881473
cuaagugccgauuaacagu

SEQ ID NO: 2047187 - RNA, 19 nt, Artificial Sequence
  Description of Artificial Sequence: Synthetic oligonucleotide
  Antisense strand to SEQ ID NO: 2047186
acuguuaaucggcacuuag

SEQ ID NO: 2047188 - RNA, 19 nt, Artificial Sequence
  Description of Artificial Sequence: Synthetic oligonucleotide
  Sense strand starting at position 1453 of SEQ ID NO: 1881473
acucuuugcaucugggaag

SEQ ID NO: 2047189 - RNA, 19 nt, Artificial Sequence
  Description of Artificial Sequence: Synthetic oligonucleotide
  Antisense strand to SEQ ID NO: 2047188
cuucccagaugcaaagagu

SEQ ID NO: 2047190 - RNA, 19 nt, Artificial Sequence
  Description of Artificial Sequence: Synthetic oligonucleotide
  Sense strand starting at position 1831 of SEQ ID NO: 1881473
uucagacgucguucucagu

SEQ ID NO: 2047191 - RNA, 19 nt, Artificial Sequence
  Description of Artificial Sequence: Synthetic oligonucleotide
  Antisense strand to SEQ ID NO: 2047190
acugagaacgacgucugaa

SEQ ID NO: 2047192 - RNA, 19 nt, Artificial Sequence
  Description of Artificial Sequence: Synthetic oligonucleotide
  Sense strand starting at position 1857 of SEQ ID NO: 1881473
acgcuaagcccauauggaa

SEQ ID NO: 2047193 - RNA, 19 nt, Artificial Sequence
  Description of Artificial Sequence: Synthetic oligonucleotide
  Antisense strand to SEQ ID NO: 2047192
uuccauaugggcuuagcgu

SEQ ID NO: 2047194 - RNA, 19 nt, Artificial Sequence
  Description of Artificial Sequence: Synthetic oligonucleotide
  Sense strand starting at position 1903 of SEQ ID NO: 1881473
cuacauccaccuugggaaa

SEQ ID NO: 2047195 - RNA, 19 nt, Artificial Sequence
  Description of Artificial Sequence: Synthetic oligonucleotide
  Antisense strand to SEQ ID NO: 2047194
uuucccaagguggauguag

SEQ ID NO: 2047196 - RNA, 19 nt, Artificial Sequence
  Description of Artificial Sequence: Synthetic oligonucleotide
  Sense strand starting at position 2345 of SEQ ID NO: 1881473
uaguccuaaugguuagagu

SEQ ID NO: 2047197 - RNA, 19 nt, Artificial Sequence
  Description of Artificial Sequence: Synthetic oligonucleotide
  Antisense strand to SEQ ID NO: 2047196
acucuaaccauuaggacua

SEQ ID NO: 2047198 - RNA, 19 nt, Artificial Sequence
  Description of Artificial Sequence: Synthetic oligonucleotide
  Sense strand starting at position 2387 of SEQ ID NO: 1881473
ugguuucuaggcgauuaag

SEQ ID NO: 2047199 - RNA, 19 nt, Artificial Sequence
  Description of Artificial Sequence: Synthetic oligonucleotide
  Antisense strand to SEQ ID NO: 2047198
cuuaaucgccuagaaacca

SEQ ID NO: 2047200 - RNA, 19 nt, Artificial Sequence
  Description of Artificial Sequence: Synthetic oligonucleotide
  Sense strand starting at position 2390 of SEQ ID NO: 1881473
uuucuaggcgauuaaguuu

SEQ ID NO: 2047201 - RNA, 19 nt, Artificial Sequence
  Description of Artificial Sequence: Synthetic oligonucleotide
  Antisense strand to SEQ ID NO: 2047200
aaacuuaaucgccuagaaa

SEQ ID NO: 2047202 - RNA, 19 nt, Artificial Sequence
  Description of Artificial Sequence: Synthetic oligonucleotide
  Sense strand starting at position 2398 of SEQ ID NO: 1881473
cgauuaaguuucuccaaga

SEQ ID NO: 2047203 - RNA, 19 nt, Artificial Sequence
  Description of Artificial Sequence: Synthetic oligonucleotide
  Antisense strand to SEQ ID NO: 2047202
ucuuggagaaacuuaaucg

SEQ ID NO: 2047204 - RNA, 19 nt, Artificial Sequence
  Description of Artificial Sequence: Synthetic oligonucleotide
  Sense strand starting at position 2403 of SEQ ID NO: 1881473
aaguuucuccaagaugggu

SEQ ID NO: 2047205 - RNA, 19 nt, Artificial Sequence
  Description of Artificial Sequence: Synthetic oligonucleotide
  Antisense strand to SEQ ID NO: 2047204
acccaucuuggagaaacuu

SEQ ID NO: 2047206 - RNA, 19 nt, Artificial Sequence
  Description of Artificial Sequence: Synthetic oligonucleotide
  Sense strand starting at position 2409 of SEQ ID NO: 1881473
cuccaagaugggugggaau

SEQ ID NO: 2047207 - RNA, 19 nt, Artificial Sequence
  Description of Artificial Sequence: Synthetic oligonucleotide
  Antisense strand to SEQ ID NO: 2047206
auucccacccaucuuggag

SEQ ID NO: 2047208 - RNA, 19 nt, Artificial Sequence
  Description of Artificial Sequence: Synthetic oligonucleotide
  Sense strand starting at position 2422 of SEQ ID NO: 1881473
gggaaucuguaauugccuu

SEQ ID NO: 2047209 - RNA, 19 nt, Artificial Sequence
  Description of Artificial Sequence: Synthetic oligonucleotide
  Antisense strand to SEQ ID NO: 2047208
aaggcaauuacagauuccc

SEQ ID NO: 2047210 - RNA, 19 nt, Artificial Sequence
  Description of Artificial Sequence: Synthetic oligonucleotide
  Sense strand starting at position 2493 of SEQ ID NO: 1881473
ggaaguuggagugguucuu

SEQ ID NO: 2047211 - RNA, 19 nt, Artificial Sequence
  Description of Artificial Sequence: Synthetic oligonucleotide
  Antisense strand to SEQ ID NO: 2047210
aagaaccacuccaacuucc

SEQ ID NO: 2047212 - RNA, 19 nt, Artificial Sequence
  Description of Artificial Sequence: Synthetic oligonucleotide
  Sense strand starting at position 2516 of SEQ ID NO: 1881473
agcagagacuuuccuaaga

SEQ ID NO: 2047213 - RNA, 19 nt, Artificial Sequence
  Description of Artificial Sequence: Synthetic oligonucleotide
  Antisense strand to SEQ ID NO: 2047212
ucuuaggaaagucucugcu

SEQ ID NO: 2047214 - RNA, 19 nt, Artificial Sequence
  Description of Artificial Sequence: Synthetic oligonucleotide
  Sense strand starting at position 2526 of SEQ ID NO: 1881473
uuccuaagaucucuggaua

SEQ ID NO: 2047215 - RNA, 19 nt, Artificial Sequence
  Description of Artificial Sequence: Synthetic oligonucleotide
  Antisense strand to SEQ ID NO: 2047214
uauccagagaucuuaggaa

SEQ ID NO: 2047216 - RNA, 19 nt, Artificial Sequence
  Description of Artificial Sequence: Synthetic oligonucleotide
  Sense strand starting at position 2527 of SEQ ID NO: 1881473
uccuaagaucucuggauaa

SEQ ID NO: 2047217 - RNA, 19 nt, Artificial Sequence
  Description of Artificial Sequence: Synthetic oligonucleotide
  Antisense strand to SEQ ID NO: 2047216
uuauccagagaucuuagga

SEQ ID NO: 2047218 - RNA, 19 nt, Artificial Sequence
  Description of Artificial Sequence: Synthetic oligonucleotide
  Sense strand starting at position 2754 of SEQ ID NO: 1881473
uucucuaaccauggaauga

SEQ ID NO: 2047219 - RNA, 19 nt, Artificial Sequence
  Description of Artificial Sequence: Synthetic oligonucleotide
  Antisense strand to SEQ ID NO: 2047218
ucauuccaugguuagagaa

SEQ ID NO: 2047220 - RNA, 19 nt, Artificial Sequence
  Description of Artificial Sequence: Synthetic oligonucleotide
  Sense strand starting at position 3013 of SEQ ID NO: 1881473
uguuuaaucgcagugcuuu

SEQ ID NO: 2047221 - RNA, 19 nt, Artificial Sequence
  Description of Artificial Sequence: Synthetic oligonucleotide
  Antisense strand to SEQ ID NO: 2047220
aaagcacugcgauuaaaca

SEQ ID NO: 2047222 - RNA, 19 nt, Artificial Sequence
  Description of Artificial Sequence: Synthetic oligonucleotide
  Sense strand starting at position 3177 of SEQ ID NO: 1881473
uagcuacuugaauagaguu

SEQ ID NO: 2047223 - RNA, 19 nt, Artificial Sequence
  Description of Artificial Sequence: Synthetic oligonucleotide
  Antisense strand to SEQ ID NO: 2047222
aacucuauucaaguagcua

SEQ ID NO: 2047224 - RNA, 19 nt, Artificial Sequence
  Description of Artificial Sequence: Synthetic oligonucleotide
  Sense strand starting at position 3190 of SEQ ID NO: 1881473
agaguucugccguaggaca

SEQ ID NO: 2047225 - RNA, 19 nt, Artificial Sequence
  Description of Artificial Sequence: Synthetic oligonucleotide
  Antisense strand to SEQ ID NO: 2047224
uguccuacggcagaacucu

SEQ ID NO: 2047226 - RNA, 19 nt, Artificial Sequence
  Description of Artificial Sequence: Synthetic oligonucleotide
  Sense strand starting at position 3215 of SEQ ID NO: 1881473
uuugauaauuacucugagu

SEQ ID NO: 2047227 - RNA, 19 nt, Artificial Sequence
  Description of Artificial Sequence: Synthetic oligonucleotide
  Antisense strand to SEQ ID NO: 2047226
acucagaguaauuaucaaa

SEQ ID NO: 2047228 - RNA, 19 nt, Artificial Sequence
  Description of Artificial Sequence: Synthetic oligonucleotide
  Sense strand starting at position 3217 of SEQ ID NO: 1881473
ugauaauuacucugaguuc

SEQ ID NO: 2047229 - RNA, 19 nt, Artificial Sequence
  Description of Artificial Sequence: Synthetic oligonucleotide
  Antisense strand to SEQ ID NO: 2047228
gaacucagaguaauuauca

SEQ ID NO: 2047230 - RNA, 19 nt, Artificial Sequence
  Description of Artificial Sequence: Synthetic oligonucleotide
  Sense strand starting at position 3244 of SEQ ID NO: 1881473
ugaugaauugauuguaguc

SEQ ID NO: 2047231 - RNA, 19 nt, Artificial Sequence
  Description of Artificial Sequence: Synthetic oligonucleotide
  Antisense strand to SEQ ID NO: 2047230
gacuacaaucaauucauca

SEQ ID NO: 2047232 - RNA, 19 nt, Artificial Sequence
  Description of Artificial Sequence: Synthetic oligonucleotide
  Sense strand starting at position 3249 of SEQ ID NO: 1881473
aauugauuguagucaugua

SEQ ID NO: 2047233 - RNA, 19 nt, Artificial Sequence
  Description of Artificial Sequence: Synthetic oligonucleotide
  Antisense strand to SEQ ID NO: 2047232
uacaugacuacaaucaauu

SEQ ID NO: 2047234 - RNA, 19 nt, Artificial Sequence
  Description of Artificial Sequence: Synthetic oligonucleotide
  Sense strand starting at position 3250 of SEQ ID NO: 1881473
auugauuguagucauguag

SEQ ID NO: 2047235 - RNA, 19 nt, Artificial Sequence
  Description of Artificial Sequence: Synthetic oligonucleotide
  Antisense strand to SEQ ID NO: 2047234
cuacaugacuacaaucaau

SEQ ID NO: 2047236 - RNA, 19 nt, Artificial Sequence
  Description of Artificial Sequence: Synthetic oligonucleotide
  Sense strand starting at position 3431 of SEQ ID NO: 1881473
gguaguuugggugagcaga

SEQ ID NO: 2047237 - RNA, 19 nt, Artificial Sequence
  Description of Artificial Sequence: Synthetic oligonucleotide
  Antisense strand to SEQ ID NO: 2047236
ucugcucacccaaacuacc

SEQ ID NO: 2047238 - RNA, 19 nt, Artificial Sequence
  Description of Artificial Sequence: Synthetic oligonucleotide
  Sense strand starting at position 3433 of SEQ ID NO: 1881473
uaguuugggugagcagaau

SEQ ID NO: 2047239 - RNA, 19 nt, Artificial Sequence
  Description of Artificial Sequence: Synthetic oligonucleotide
  Antisense strand to SEQ ID NO: 2047238
auucugcucacccaaacua

SEQ ID NO: 2047240 - RNA, 19 nt, Artificial Sequence
  Description of Artificial Sequence: Synthetic oligonucleotide
  Sense strand starting at position 3489 of SEQ ID NO: 1881473
auagguuggcuauaguauu

SEQ ID NO: 2047241 - RNA, 19 nt, Artificial Sequence
  Description of Artificial Sequence: Synthetic oligonucleotide
  Antisense strand to SEQ ID NO: 2047240
aauacuauagccaaccuau

SEQ ID NO: 2047242 - RNA, 19 nt, Artificial Sequence
  Description of Artificial Sequence: Synthetic oligonucleotide
  Sense strand starting at position 3762 of SEQ ID NO: 1881473
cuuugucucuaaucaaagu

SEQ ID NO: 2047243 - RNA, 19 nt, Artificial Sequence
  Description of Artificial Sequence: Synthetic oligonucleotide
  Antisense strand to SEQ ID NO: 2047242
acuuugauuagagacaaag

SEQ ID NO: 2047244 - RNA, 19 nt, Artificial Sequence
  Description of Artificial Sequence: Synthetic oligonucleotide
  Sense strand starting at position 3835 of SEQ ID NO: 1881473
auacgauuacagggaguca

SEQ ID NO: 2047245 - RNA, 19 nt, Artificial Sequence
  Description of Artificial Sequence: Synthetic oligonucleotide
  Antisense strand to SEQ ID NO: 2047244
ugacucccuguaaucguau

SEQ ID NO: 2047246 - RNA, 19 nt, Artificial Sequence
  Description of Artificial Sequence: Synthetic oligonucleotide
  Sense strand starting at position 44 of SEQ ID NO: 1881474
acaggaauuuaucagagua

SEQ ID NO: 2047247 - RNA, 19 nt, Artificial Sequence
  Description of Artificial Sequence: Synthetic oligonucleotide
  Antisense strand to SEQ ID NO: 2047246
uacucugauaaauuccugu

SEQ ID NO: 2047248 - RNA, 19 nt, Artificial Sequence
  Description of Artificial Sequence: Synthetic oligonucleotide
  Sense strand starting at position 46 of SEQ ID NO: 1881474
aggaauuuaucagaguagg

SEQ ID NO: 2047249 - RNA, 19 nt, Artificial Sequence
  Description of Artificial Sequence: Synthetic oligonucleotide
  Antisense strand to SEQ ID NO: 2047248
ccuacucugauaaauuccu

SEQ ID NO: 2047250 - RNA, 19 nt, Artificial Sequence
  Description of Artificial Sequence: Synthetic oligonucleotide
  Sense strand starting at position 176 of SEQ ID NO: 1881474
ccgaguccuuauucucaaa

SEQ ID NO: 2047251 - RNA, 19 nt, Artificial Sequence
  Description of Artificial Sequence: Synthetic oligonucleotide
  Antisense strand to SEQ ID NO: 2047250
uuugagaauaaggacucgg

SEQ ID NO: 2047252 - RNA, 19 nt, Artificial Sequence
  Description of Artificial Sequence: Synthetic oligonucleotide
  Sense strand starting at position 194 of SEQ ID NO: 1881474
acuaccuaaugagaugaaa

SEQ ID NO: 2047253 - RNA, 19 nt, Artificial Sequence
  Description of Artificial Sequence: Synthetic oligonucleotide
  Antisense strand to SEQ ID NO: 2047252
uuucaucucauuagguagu

SEQ ID NO: 2047254 - RNA, 19 nt, Artificial Sequence
  Description of Artificial Sequence: Synthetic oligonucleotide
  Sense strand starting at position 202 of SEQ ID NO: 1881474
augagaugaaauugugcaa

SEQ ID NO: 2047255 - RNA, 19 nt, Artificial Sequence
  Description of Artificial Sequence: Synthetic oligonucleotide
  Antisense strand to SEQ ID NO: 2047254
uugcacaauuucaucucau

SEQ ID NO: 2047256 - RNA, 19 nt, Artificial Sequence
  Description of Artificial Sequence: Synthetic oligonucleotide
  Sense strand starting at position 206 of SEQ ID NO: 1881474
gaugaaauugugcaaguga

SEQ ID NO: 2047257 - RNA, 19 nt, Artificial Sequence
  Description of Artificial Sequence: Synthetic oligonucleotide
  Antisense strand to SEQ ID NO: 2047256
ucacuugcacaauuucauc

SEQ ID NO: 2047258 - RNA, 19 nt, Artificial Sequence
  Description of Artificial Sequence: Synthetic oligonucleotide
  Sense strand starting at position 349 of SEQ ID NO: 1881474
guaugugagauccaaagug

SEQ ID NO: 2047259 - RNA, 19 nt, Artificial Sequence
  Description of Artificial Sequence: Synthetic oligonucleotide
  Antisense strand to SEQ ID NO: 2047258
cacuuuggaucucacauac

SEQ ID NO: 2047260 - RNA, 19 nt, Artificial Sequence
  Description of Artificial Sequence: Synthetic oligonucleotide
  Sense strand starting at position 383 of SEQ ID NO: 1881474
gcaugaagaagucaugugu

SEQ ID NO: 2047261 - RNA, 19 nt, Artificial Sequence
  Description of Artificial Sequence: Synthetic oligonucleotide
  Antisense strand to SEQ ID NO: 2047260
acacaugacuucuucaugc

SEQ ID NO: 2047262 - RNA, 19 nt, Artificial Sequence
  Description of Artificial Sequence: Synthetic oligonucleotide
  Sense strand starting at position 389 of SEQ ID NO: 1881474
agaagucauguguauacaa

SEQ ID NO: 2047263 - RNA, 19 nt, Artificial Sequence
  Description of Artificial Sequence: Synthetic oligonucleotide
  Antisense strand to SEQ ID NO: 2047262
uuguauacacaugacuucu

SEQ ID NO: 2047264 - RNA, 19 nt, Artificial Sequence
  Description of Artificial Sequence: Synthetic oligonucleotide
  Sense strand starting at position 587 of SEQ ID NO: 1881474
ugugaccagaagugauuaa

SEQ ID NO: 2047265 - RNA, 19 nt, Artificial Sequence
  Description of Artificial Sequence: Synthetic oligonucleotide
  Antisense strand to SEQ ID NO: 2047264
uuaaucacuucuggucaca

SEQ ID NO: 2047266 - RNA, 19 nt, Artificial Sequence
  Description of Artificial Sequence: Synthetic oligonucleotide
  Sense strand starting at position 652 of SEQ ID NO: 1881474
uggcgaaaucaauguccaa

SEQ ID NO: 2047267 - RNA, 19 nt, Artificial Sequence
  Description of Artificial Sequence: Synthetic oligonucleotide
  Antisense strand to SEQ ID NO: 2047266
uuggacauugauuucgcca

SEQ ID NO: 2047268 - RNA, 19 nt, Artificial Sequence
  Description of Artificial Sequence: Synthetic oligonucleotide
  Sense strand starting at position 655 of SEQ ID NO: 1881474
cgaaaucaauguccaacaa

SEQ ID NO: 2047269 - RNA, 19 nt, Artificial Sequence
  Description of Artificial Sequence: Synthetic oligonucleotide
  Antisense strand to SEQ ID NO: 2047268
uuguuggacauugauuucg

SEQ ID NO: 2047270 - RNA, 19 nt, Artificial Sequence
  Description of Artificial Sequence: Synthetic oligonucleotide
  Sense strand starting at position 684 of SEQ ID NO: 1881474
cccaaauguggugaacauu

SEQ ID NO: 2047271 - RNA, 19 nt, Artificial Sequence
  Description of Artificial Sequence: Synthetic oligonucleotide
  Antisense strand to SEQ ID NO: 2047270
aauguucaccacauuuggg

SEQ ID NO: 2047272 - RNA, 19 nt, Artificial Sequence
  Description of Artificial Sequence: Synthetic oligonucleotide
  Sense strand starting at position 692 of SEQ ID NO: 1881474
uggugaacauuccuccauu

SEQ ID NO: 2047273 - RNA, 19 nt, Artificial Sequence
  Description of Artificial Sequence: Synthetic oligonucleotide
  Antisense strand to SEQ ID NO: 2047272
aauggaggaauguucacca

SEQ ID NO: 2047274 - RNA, 19 nt, Artificial Sequence
  Description of Artificial Sequence: Synthetic oligonucleotide
  Sense strand starting at position 693 of SEQ ID NO: 1881474
ggugaacauuccuccauug

SEQ ID NO: 2047275 - RNA, 19 nt, Artificial Sequence
  Description of Artificial Sequence: Synthetic oligonucleotide
  Antisense strand to SEQ ID NO: 2047274
caauggaggaauguucacc

SEQ ID NO: 2047276 - RNA, 19 nt, Artificial Sequence
  Description of Artificial Sequence: Synthetic oligonucleotide
  Sense strand starting at position 747 of SEQ ID NO: 1881474
gcccaucuucugggaaauc

SEQ ID NO: 2047277 - RNA, 19 nt, Artificial Sequence
  Description of Artificial Sequence: Synthetic oligonucleotide
  Antisense strand to SEQ ID NO: 2047276
gauuucccagaagaugggc

SEQ ID NO: 2047278 - RNA, 19 nt, Artificial Sequence
  Description of Artificial Sequence: Synthetic oligonucleotide
  Sense strand starting at position 843 of SEQ ID NO: 1881474
cuugcagggauccaguaaa

SEQ ID NO: 2047279 - RNA, 19 nt, Artificial Sequence
  Description of Artificial Sequence: Synthetic oligonucleotide
  Antisense strand to SEQ ID NO: 2047278
uuuacuggaucccugcaag

SEQ ID NO: 2047280 - RNA, 19 nt, Artificial Sequence
  Description of Artificial Sequence: Synthetic oligonucleotide
  Sense strand starting at position 853 of SEQ ID NO: 1881474
uccaguaaaccucaaguca

SEQ ID NO: 2047281 - RNA, 19 nt, Artificial Sequence
  Description of Artificial Sequence: Synthetic oligonucleotide
  Antisense strand to SEQ ID NO: 2047280
ugacuugagguuuacugga

SEQ ID NO: 2047282 - RNA, 19 nt, Artificial Sequence
  Description of Artificial Sequence: Synthetic oligonucleotide
  Sense strand starting at position 984 of SEQ ID NO: 1881474
ucuggaugcccucagacuu

SEQ ID NO: 2047283 - RNA, 19 nt, Artificial Sequence
  Description of Artificial Sequence: Synthetic oligonucleotide
  Antisense strand to SEQ ID NO: 2047282
aagucugagggcauccaga

SEQ ID NO: 2047284 - RNA, 19 nt, Artificial Sequence
  Description of Artificial Sequence: Synthetic oligonucleotide
  Sense strand starting at position 1180 of SEQ ID NO: 1881474
ccaagaacuuguguuccca

SEQ ID NO: 2047285 - RNA, 19 nt, Artificial Sequence
  Description of Artificial Sequence: Synthetic oligonucleotide
  Antisense strand to SEQ ID NO: 2047284
ugggaacacaaguucuugg

SEQ ID NO: 2047286 - RNA, 19 nt, Artificial Sequence
  Description of Artificial Sequence: Synthetic oligonucleotide
  Sense strand starting at position 1182 of SEQ ID NO: 1881474
aagaacuuguguucccaga

SEQ ID NO: 2047287 - RNA, 19 nt, Artificial Sequence
  Description of Artificial Sequence: Synthetic oligonucleotide
  Antisense strand to SEQ ID NO: 2047286
ucugggaacacaaguucuu

SEQ ID NO: 2047288 - RNA, 19 nt, Artificial Sequence
  Description of Artificial Sequence: Synthetic oligonucleotide
  Sense strand starting at position 1184 of SEQ ID NO: 1881474
gaacuuguguucccagaug

SEQ ID NO: 2047289 - RNA, 19 nt, Artificial Sequence
  Description of Artificial Sequence: Synthetic oligonucleotide
  Antisense strand to SEQ ID NO: 2047288
caucugggaacacaaguuc

SEQ ID NO: 2047290 - RNA, 19 nt, Artificial Sequence
  Description of Artificial Sequence: Synthetic oligonucleotide
  Sense strand starting at position 1217 of SEQ ID NO: 1881474
cggcuuauucccgaacaca

SEQ ID NO: 2047291 - RNA, 19 nt, Artificial Sequence
  Description of Artificial Sequence: Synthetic oligonucleotide
  Antisense strand to SEQ ID NO: 2047290
uguguucgggaauaagccg

SEQ ID NO: 2047292 - RNA, 19 nt, Artificial Sequence
  Description of Artificial Sequence: Synthetic oligonucleotide
  Sense strand starting at position 3077 of SEQ ID NO: 1881474
cgugauuccguuguguguu

SEQ ID NO: 2047293 - RNA, 19 nt, Artificial Sequence
  Description of Artificial Sequence: Synthetic oligonucleotide
  Antisense strand to SEQ ID NO: 2047292
aacacacaacggaaucacg

SEQ ID NO: 2047294 - RNA, 19 nt, Artificial Sequence
  Description of Artificial Sequence: Synthetic oligonucleotide
  Sense strand starting at position 3221 of SEQ ID NO: 1881474
aaagaaucgcgaugaacag

SEQ ID NO: 2047295 - RNA, 19 nt, Artificial Sequence
  Description of Artificial Sequence: Synthetic oligonucleotide
  Antisense strand to SEQ ID NO: 2047294
cuguucaucgcgauucuuu

SEQ ID NO: 2047296 - RNA, 19 nt, Artificial Sequence
  Description of Artificial Sequence: Synthetic oligonucleotide
  Sense strand starting at position 3227 of SEQ ID NO: 1881474
ucgcgaugaacaguguguu

SEQ ID NO: 2047297 - RNA, 19 nt, Artificial Sequence
  Description of Artificial Sequence: Synthetic oligonucleotide
  Antisense strand to SEQ ID NO: 2047296
aacacacuguucaucgcga

SEQ ID NO: 2047298 - RNA, 19 nt, Artificial Sequence
  Description of Artificial Sequence: Synthetic oligonucleotide
  Sense strand starting at position 3360 of SEQ ID NO: 1881474
gggagaggauugaaucgua

SEQ ID NO: 2047299 - RNA, 19 nt, Artificial Sequence
  Description of Artificial Sequence: Synthetic oligonucleotide
  Antisense strand to SEQ ID NO: 2047298
uacgauucaauccucuccc

SEQ ID NO: 2047300 - RNA, 19 nt, Artificial Sequence
  Description of Artificial Sequence: Synthetic oligonucleotide
  Sense strand starting at position 3372 of SEQ ID NO: 1881474
aaucguaaaggauguugaa

SEQ ID NO: 2047301 - RNA, 19 nt, Artificial Sequence
  Description of Artificial Sequence: Synthetic oligonucleotide
  Antisense strand to SEQ ID NO: 2047300
uucaacauccuuuacgauu

SEQ ID NO: 2047302 - RNA, 19 nt, Artificial Sequence
  Description of Artificial Sequence: Synthetic oligonucleotide
  Sense strand starting at position 3389 of SEQ ID NO: 1881474
aagcaugguugguuuauga

SEQ ID NO: 2047303 - RNA, 19 nt, Artificial Sequence
  Description of Artificial Sequence: Synthetic oligonucleotide
  Antisense strand to SEQ ID NO: 2047302
ucauaaaccaaccaugcuu

SEQ ID NO: 2047304 - RNA, 19 nt, Artificial Sequence
  Description of Artificial Sequence: Synthetic oligonucleotide
  Sense strand starting at position 3429 of SEQ ID NO: 1881474
ggugucuugcauuacauua

SEQ ID NO: 2047305 - RNA, 19 nt, Artificial Sequence
  Description of Artificial Sequence: Synthetic oligonucleotide
  Antisense strand to SEQ ID NO: 2047304
uaauguaaugcaagacacc

SEQ ID NO: 2047306 - RNA, 19 nt, Artificial Sequence
  Description of Artificial Sequence: Synthetic oligonucleotide
  Sense strand starting at position 3520 of SEQ ID NO: 1881474
gggcguuauuuaucacaua

SEQ ID NO: 2047307 - RNA, 19 nt, Artificial Sequence
  Description of Artificial Sequence: Synthetic oligonucleotide
  Antisense strand to SEQ ID NO: 2047306
uaugugauaaauaacgccc

SEQ ID NO: 2047308 - RNA, 19 nt, Artificial Sequence
  Description of Artificial Sequence: Synthetic oligonucleotide
  Sense strand starting at position 3545 of SEQ ID NO: 1881474
agacgauucuccgucauuu

SEQ ID NO: 2047309 - RNA, 19 nt, Artificial Sequence
  Description of Artificial Sequence: Synthetic oligonucleotide
  Antisense strand to SEQ ID NO: 2047308
aaaugacggagaaucgucu

SEQ ID NO: 2047310 - RNA, 19 nt, Artificial Sequence
  Description of Artificial Sequence: Synthetic oligonucleotide
  Sense strand starting at position 3642 of SEQ ID NO: 1881474
uggcauuuacguuauccuu

SEQ ID NO: 2047311 - RNA, 19 nt, Artificial Sequence
  Description of Artificial Sequence: Synthetic oligonucleotide
  Antisense strand to SEQ ID NO: 2047310
aaggauaacguaaaugcca

SEQ ID NO: 2047312 - RNA, 19 nt, Artificial Sequence
  Description of Artificial Sequence: Synthetic oligonucleotide
  Sense strand starting at position 3644 of SEQ ID NO: 1881474
gcauuuacguuauccuugu

SEQ ID NO: 2047313 - RNA, 19 nt, Artificial Sequence
  Description of Artificial Sequence: Synthetic oligonucleotide
  Antisense strand to SEQ ID NO: 2047312
acaaggauaacguaaaugc

SEQ ID NO: 2047314 - RNA, 19 nt, Artificial Sequence
  Description of Artificial Sequence: Synthetic oligonucleotide
  Sense strand starting at position 3744 of SEQ ID NO: 1881474
aggagaugcagucaugggu

SEQ ID NO: 2047315 - RNA, 19 nt, Artificial Sequence
  Description of Artificial Sequence: Synthetic oligonucleotide
  Antisense strand to SEQ ID NO: 2047314
acccaugacugcaucuccu

SEQ ID NO: 2047316 - RNA, 19 nt, Artificial Sequence
  Description of Artificial Sequence: Synthetic oligonucleotide
  Sense strand starting at position 3757 of SEQ ID NO: 1881474
augggugguaucuacugua

SEQ ID NO: 2047317 - RNA, 19 nt, Artificial Sequence
  Description of Artificial Sequence: Synthetic oligonucleotide
  Antisense strand to SEQ ID NO: 2047316
uacaguagauaccacccau

SEQ ID NO: 2047318 - RNA, 19 nt, Artificial Sequence
  Description of Artificial Sequence: Synthetic oligonucleotide
  Sense strand starting at position 3770 of SEQ ID NO: 1881474
acuguacuccaaggaauca

SEQ ID NO: 2047319 - RNA, 19 nt, Artificial Sequence
  Description of Artificial Sequence: Synthetic oligonucleotide
  Antisense strand to SEQ ID NO: 2047318
ugauuccuuggaguacagu

SEQ ID NO: 2047320 - RNA, 19 nt, Artificial Sequence
  Description of Artificial Sequence: Synthetic oligonucleotide
  Sense strand starting at position 3808 of SEQ ID NO: 1881474
acaaucacugcacgugaaa

SEQ ID NO: 2047321 - RNA, 19 nt, Artificial Sequence
  Description of Artificial Sequence: Synthetic oligonucleotide
  Antisense strand to SEQ ID NO: 2047320
uuucacgugcagugauugu

SEQ ID NO: 2047322 - RNA, 19 nt, Artificial Sequence
  Description of Artificial Sequence: Synthetic oligonucleotide
  Sense strand starting at position 3811 of SEQ ID NO: 1881474
aucacugcacgugaaauaa

SEQ ID NO: 2047323 - RNA, 19 nt, Artificial Sequence
  Description of Artificial Sequence: Synthetic oligonucleotide
  Antisense strand to SEQ ID NO: 2047322
uuauuucacgugcagugau

SEQ ID NO: 2047324 - RNA, 19 nt, Artificial Sequence
  Description of Artificial Sequence: Synthetic oligonucleotide
  Sense strand starting at position 3907 of SEQ ID NO: 1881474
guugucaaggucugagaga

SEQ ID NO: 2047325 - RNA, 19 nt, Artificial Sequence
  Description of Artificial Sequence: Synthetic oligonucleotide
  Antisense strand to SEQ ID NO: 2047324
ucucucagaccuugacaac

SEQ ID NO: 2047326 - RNA, 19 nt, Artificial Sequence
  Description of Artificial Sequence: Synthetic oligonucleotide
  Sense strand starting at position 156 of SEQ ID NO: 1881475
cgagacaaguacucuguca

SEQ ID NO: 2047327 - RNA, 19 nt, Artificial Sequence
  Description of Artificial Sequence: Synthetic oligonucleotide
  Antisense strand to SEQ ID NO: 2047326
ugacagaguacuugucucg

SEQ ID NO: 2047328 - RNA, 19 nt, Artificial Sequence
  Description of Artificial Sequence: Synthetic oligonucleotide
  Sense strand starting at position 158 of SEQ ID NO: 1881475
agacaaguacucugucaga

SEQ ID NO: 2047329 - RNA, 19 nt, Artificial Sequence
  Description of Artificial Sequence: Synthetic oligonucleotide
  Antisense strand to SEQ ID NO: 2047328
ucugacagaguacuugucu

SEQ ID NO: 2047330 - RNA, 19 nt, Artificial Sequence
  Description of Artificial Sequence: Synthetic oligonucleotide
  Sense strand starting at position 279 of SEQ ID NO: 1881475
cuggaauuaaaucgugaaa

SEQ ID NO: 2047331 - RNA, 19 nt, Artificial Sequence
  Description of Artificial Sequence: Synthetic oligonucleotide
  Antisense strand to SEQ ID NO: 2047330
uuucacgauuuaauuccag

SEQ ID NO: 2047332 - RNA, 19 nt, Artificial Sequence
  Description of Artificial Sequence: Synthetic oligonucleotide
  Sense strand starting at position 318 of SEQ ID NO: 1881475
cccuaaguguaggcaauuu

SEQ ID NO: 2047333 - RNA, 19 nt, Artificial Sequence
  Description of Artificial Sequence: Synthetic oligonucleotide
  Antisense strand to SEQ ID NO: 2047332
aaauugccuacacuuaggg

SEQ ID NO: 2047334 - RNA, 19 nt, Artificial Sequence
  Description of Artificial Sequence: Synthetic oligonucleotide
  Sense strand starting at position 375 of SEQ ID NO: 1881475
ccaauaucccaacgaaguu

SEQ ID NO: 2047335 - RNA, 19 nt, Artificial Sequence
  Description of Artificial Sequence: Synthetic oligonucleotide
  Antisense strand to SEQ ID NO: 2047334
aacuucguugggauauugg

SEQ ID NO: 2047336 - RNA, 19 nt, Artificial Sequence
  Description of Artificial Sequence: Synthetic oligonucleotide
  Sense strand starting at position 463 of SEQ ID NO: 1881475
aguaaagguucugcccaga

SEQ ID NO: 2047337 - RNA, 19 nt, Artificial Sequence
  Description of Artificial Sequence: Synthetic oligonucleotide
  Antisense strand to SEQ ID NO: 2047336
ucugggcagaaccuuuacu

SEQ ID NO: 2047338 - RNA, 19 nt, Artificial Sequence
  Description of Artificial Sequence: Synthetic oligonucleotide
  Sense strand starting at position 474 of SEQ ID NO: 1881475
ugcccagauuccuuuaggu

SEQ ID NO: 2047339 - RNA, 19 nt, Artificial Sequence
  Description of Artificial Sequence: Synthetic oligonucleotide
  Antisense strand to SEQ ID NO: 2047338
accuaaaggaaucugggca

SEQ ID NO: 2047340 - RNA, 19 nt, Artificial Sequence
  Description of Artificial Sequence: Synthetic oligonucleotide
  Sense strand starting at position 476 of SEQ ID NO: 1881475
cccagauuccuuuagguag

SEQ ID NO: 2047341 - RNA, 19 nt, Artificial Sequence
  Description of Artificial Sequence: Synthetic oligonucleotide
  Antisense strand to SEQ ID NO: 2047340
cuaccuaaaggaaucuggg

SEQ ID NO: 2047342 - RNA, 19 nt, Artificial Sequence
  Description of Artificial Sequence: Synthetic oligonucleotide
  Sense strand starting at position 608 of SEQ ID NO: 1881475
ugugaaucuggguaccagu

SEQ ID NO: 2047343 - RNA, 19 nt, Artificial Sequence
  Description of Artificial Sequence: Synthetic oligonucleotide
  Antisense strand to SEQ ID NO: 2047342
acugguacccagauucaca

SEQ ID NO: 2047344 - RNA, 19 nt, Artificial Sequence
  Description of Artificial Sequence: Synthetic oligonucleotide
  Sense strand starting at position 918 of SEQ ID NO: 1881475
ggaaucgacucugagaaag

SEQ ID NO: 2047345 - RNA, 19 nt, Artificial Sequence
  Description of Artificial Sequence: Synthetic oligonucleotide
  Antisense strand to SEQ ID NO: 2047344
cuuucucagagucgauucc

SEQ ID NO: 2047346 - RNA, 19 nt, Artificial Sequence
  Description of Artificial Sequence: Synthetic oligonucleotide
  Sense strand starting at position 920 of SEQ ID NO: 1881475
aaucgacucugagaaagaa

SEQ ID NO: 2047347 - RNA, 19 nt, Artificial Sequence
  Description of Artificial Sequence: Synthetic oligonucleotide
  Antisense strand to SEQ ID NO: 2047346
uucuuucucagagucgauu

SEQ ID NO: 2047348 - RNA, 19 nt, Artificial Sequence
  Description of Artificial Sequence: Synthetic oligonucleotide
  Sense strand starting at position 1035 of SEQ ID NO: 1881475
ugauucuugcucgcguuga

SEQ ID NO: 2047349 - RNA, 19 nt, Artificial Sequence
  Description of Artificial Sequence: Synthetic oligonucleotide
  Antisense strand to SEQ ID NO: 2047348
ucaacgcgagcaagaauca

SEQ ID NO: 2047350 - RNA, 19 nt, Artificial Sequence
  Description of Artificial Sequence: Synthetic oligonucleotide
  Sense strand starting at position 1055 of SEQ ID NO: 1881475
cuuggaucccucugcgaau

SEQ ID NO: 2047351 - RNA, 19 nt, Artificial Sequence
  Description of Artificial Sequence: Synthetic oligonucleotide
  Antisense strand to SEQ ID NO: 2047350
auucgcagagggauccaag

SEQ ID NO: 2047352 - RNA, 19 nt, Artificial Sequence
  Description of Artificial Sequence: Synthetic oligonucleotide
  Sense strand starting at position 1056 of SEQ ID NO: 1881475
uuggaucccucugcgaauu

SEQ ID NO: 2047353 - RNA, 19 nt, Artificial Sequence
  Description of Artificial Sequence: Synthetic oligonucleotide
  Antisense strand to SEQ ID NO: 2047352
aauucgcagagggauccaa

SEQ ID NO: 2047354 - RNA, 19 nt, Artificial Sequence
  Description of Artificial Sequence: Synthetic oligonucleotide
  Sense strand starting at position 1064 of SEQ ID NO: 1881475
cucugcgaauuccucuaua

SEQ ID NO: 2047355 - RNA, 19 nt, Artificial Sequence
  Description of Artificial Sequence: Synthetic oligonucleotide
  Antisense strand to SEQ ID NO: 2047354
uauagaggaauucgcagag

SEQ ID NO: 2047356 - RNA, 19 nt, Artificial Sequence
  Description of Artificial Sequence: Synthetic oligonucleotide
  Sense strand starting at position 1067 of SEQ ID NO: 1881475
ugcgaauuccucuauauug

SEQ ID NO: 2047357 - RNA, 19 nt, Artificial Sequence
  Description of Artificial Sequence: Synthetic oligonucleotide
  Antisense strand to SEQ ID NO: 2047356
caauauagaggaauucgca

SEQ ID NO: 2047358 - RNA, 19 nt, Artificial Sequence
  Description of Artificial Sequence: Synthetic oligonucleotide
  Sense strand starting at position 1177 of SEQ ID NO: 1881475
guuguauggagcuggauuu

SEQ ID NO: 2047359 - RNA, 19 nt, Artificial Sequence
  Description of Artificial Sequence: Synthetic oligonucleotide
  Antisense strand to SEQ ID NO: 2047358
aaauccagcuccauacaac

SEQ ID NO: 2047360 - RNA, 19 nt, Artificial Sequence
  Description of Artificial Sequence: Synthetic oligonucleotide
  Sense strand starting at position 1522 of SEQ ID NO: 1881475
agagaagaaucagaagaga

SEQ ID NO: 2047361 - RNA, 19 nt, Artificial Sequence
  Description of Artificial Sequence: Synthetic oligonucleotide
  Antisense strand to SEQ ID NO: 2047360
ucucuucugauucuucucu

SEQ ID NO: 2047362 - RNA, 19 nt, Artificial Sequence
  Description of Artificial Sequence: Synthetic oligonucleotide
  Sense strand starting at position 2036 of SEQ ID NO: 1881475
gccagaugacuguaucuau

SEQ ID NO: 2047363 - RNA, 19 nt, Artificial Sequence
  Description of Artificial Sequence: Synthetic oligonucleotide
  Antisense strand to SEQ ID NO: 2047362
auagauacagucaucuggc

SEQ ID NO: 2047364 - RNA, 19 nt, Artificial Sequence
  Description of Artificial Sequence: Synthetic oligonucleotide
  Sense strand starting at position 2673 of SEQ ID NO: 1881475
gauugcuuucgugaaggug

SEQ ID NO: 2047365 - RNA, 19 nt, Artificial Sequence
  Description of Artificial Sequence: Synthetic oligonucleotide
  Antisense strand to SEQ ID NO: 2047364
caccuucacgaaagcaauc

SEQ ID NO: 2047366 - RNA, 19 nt, Artificial Sequence
  Description of Artificial Sequence: Synthetic oligonucleotide
  Sense strand starting at position 2897 of SEQ ID NO: 1881475
gcgcuugguuggauccaga

SEQ ID NO: 2047367 - RNA, 19 nt, Artificial Sequence
  Description of Artificial Sequence: Synthetic oligonucleotide
  Antisense strand to SEQ ID NO: 2047366
ucuggauccaaccaagcgc

SEQ ID NO: 2047368 - RNA, 19 nt, Artificial Sequence
  Description of Artificial Sequence: Synthetic oligonucleotide
  Sense strand starting at position 3079 of SEQ ID NO: 1881475
gcgauuuaaugguccuuaa

SEQ ID NO: 2047369 - RNA, 19 nt, Artificial Sequence
  Description of Artificial Sequence: Synthetic oligonucleotide
  Antisense strand to SEQ ID NO: 2047368
uuaaggaccauuaaaucgc

SEQ ID NO: 2047370 - RNA, 19 nt, Artificial Sequence
  Description of Artificial Sequence: Synthetic oligonucleotide
  Sense strand starting at position 3083 of SEQ ID NO: 1881475
uuuaaugguccuuaaagcu

SEQ ID NO: 2047371 - RNA, 19 nt, Artificial Sequence
  Description of Artificial Sequence: Synthetic oligonucleotide
  Antisense strand to SEQ ID NO: 2047370
agcuuuaaggaccauuaaa

SEQ ID NO: 2047372 - RNA, 19 nt, Artificial Sequence
  Description of Artificial Sequence: Synthetic oligonucleotide
  Sense strand starting at position 3153 of SEQ ID NO: 1881475
ccuggugucgggcaaucaa

SEQ ID NO: 2047373 - RNA, 19 nt, Artificial Sequence
  Description of Artificial Sequence: Synthetic oligonucleotide
  Antisense strand to SEQ ID NO: 2047372
uugauugcccgacaccagg

SEQ ID NO: 2047374 - RNA, 19 nt, Artificial Sequence
  Description of Artificial Sequence: Synthetic oligonucleotide
  Sense strand starting at position 3198 of SEQ ID NO: 1881475
ugcuguuaguggccaaacu

SEQ ID NO: 2047375 - RNA, 19 nt, Artificial Sequence
  Description of Artificial Sequence: Synthetic oligonucleotide
  Antisense strand to SEQ ID NO: 2047374
aguuuggccacuaacagca

SEQ ID NO: 2047376 - RNA, 19 nt, Artificial Sequence
  Description of Artificial Sequence: Synthetic oligonucleotide
  Sense strand starting at position 3330 of SEQ ID NO: 1881475
agcucuuauccagagcauu

SEQ ID NO: 2047377 - RNA, 19 nt, Artificial Sequence
  Description of Artificial Sequence: Synthetic oligonucleotide
  Antisense strand to SEQ ID NO: 2047376
aaugcucuggauaagagcu

SEQ ID NO: 2047378 - RNA, 19 nt, Artificial Sequence
  Description of Artificial Sequence: Synthetic oligonucleotide
  Sense strand starting at position 3404 of SEQ ID NO: 1881475
gcggauuccuucuuuauuc

SEQ ID NO: 2047379 - RNA, 19 nt, Artificial Sequence
  Description of Artificial Sequence: Synthetic oligonucleotide
  Antisense strand to SEQ ID NO: 2047378
gaauaaagaaggaauccgc

SEQ ID NO: 2047380 - RNA, 19 nt, Artificial Sequence
  Description of Artificial Sequence: Synthetic oligonucleotide
  Sense strand starting at position 3414 of SEQ ID NO: 1881475
ucuuuauucuuugucuguu

SEQ ID NO: 2047381 - RNA, 19 nt, Artificial Sequence
  Description of Artificial Sequence: Synthetic oligonucleotide
  Antisense strand to SEQ ID NO: 2047380
aacagacaaagaauaaaga

SEQ ID NO: 2047382 - RNA, 19 nt, Artificial Sequence
  Description of Artificial Sequence: Synthetic oligonucleotide
  Sense strand starting at position 3415 of SEQ ID NO: 1881475
cuuuauucuuugucuguua

SEQ ID NO: 2047383 - RNA, 19 nt, Artificial Sequence
  Description of Artificial Sequence: Synthetic oligonucleotide
  Antisense strand to SEQ ID NO: 2047382
uaacagacaaagaauaaag

SEQ ID NO: 2047384 - RNA, 19 nt, Artificial Sequence
  Description of Artificial Sequence: Synthetic oligonucleotide
  Sense strand starting at position 3417 of SEQ ID NO: 1881475
uuauucuuugucuguuaga

SEQ ID NO: 2047385 - RNA, 19 nt, Artificial Sequence
  Description of Artificial Sequence: Synthetic oligonucleotide
  Antisense strand to SEQ ID NO: 2047384
ucuaacagacaaagaauaa

SEQ ID NO: 2047386 - RNA, 19 nt, Artificial Sequence
  Description of Artificial Sequence: Synthetic oligonucleotide
  Sense strand starting at position 3428 of SEQ ID NO: 1881475
cuguuagaauaagcaaaua

SEQ ID NO: 2047387 - RNA, 19 nt, Artificial Sequence
  Description of Artificial Sequence: Synthetic oligonucleotide
  Antisense strand to SEQ ID NO: 2047386
uauuugcuuauucuaacag

SEQ ID NO: 2047388 - RNA, 19 nt, Artificial Sequence
  Description of Artificial Sequence: Synthetic oligonucleotide
  Sense strand starting at position 3468 of SEQ ID NO: 1881475
gaaagaauuccucgggccu

SEQ ID NO: 2047389 - RNA, 19 nt, Artificial Sequence
  Description of Artificial Sequence: Synthetic oligonucleotide
  Antisense strand to SEQ ID NO: 2047388
aggcccgaggaauucuuuc

SEQ ID NO: 2047390 - RNA, 19 nt, Artificial Sequence
  Description of Artificial Sequence: Synthetic oligonucleotide
  Sense strand starting at position 3469 of SEQ ID NO: 1881475
aaagaauuccucgggccuu

SEQ ID NO: 2047391 - RNA, 19 nt, Artificial Sequence
  Description of Artificial Sequence: Synthetic oligonucleotide
  Antisense strand to SEQ ID NO: 2047390
aaggcccgaggaauucuuu

SEQ ID NO: 2047392 - RNA, 19 nt, Artificial Sequence
  Description of Artificial Sequence: Synthetic oligonucleotide
  Sense strand starting at position 3536 of SEQ ID NO: 1881475
guacuucuuagaggugcuu

SEQ ID NO: 2047393 - RNA, 19 nt, Artificial Sequence
  Description of Artificial Sequence: Synthetic oligonucleotide
  Antisense strand to SEQ ID NO: 2047392
aagcaccucuaagaaguac

SEQ ID NO: 2047394 - RNA, 19 nt, Artificial Sequence
  Description of Artificial Sequence: Synthetic oligonucleotide
  Sense strand starting at position 3548 of SEQ ID NO: 1881475
ggugcuugcaugcacaaua

SEQ ID NO: 2047395 - RNA, 19 nt, Artificial Sequence
  Description of Artificial Sequence: Synthetic oligonucleotide
  Antisense strand to SEQ ID NO: 2047394
uauugugcaugcaagcacc

SEQ ID NO: 2047396 - RNA, 19 nt, Artificial Sequence
  Description of Artificial Sequence: Synthetic oligonucleotide
  Sense strand starting at position 3559 of SEQ ID NO: 1881475
gcacaauaauagucgagau

SEQ ID NO: 2047397 - RNA, 19 nt, Artificial Sequence
  Description of Artificial Sequence: Synthetic oligonucleotide
  Antisense strand to SEQ ID NO: 2047396
aucucgacuauuauugugc

SEQ ID NO: 2047398 - RNA, 19 nt, Artificial Sequence
  Description of Artificial Sequence: Synthetic oligonucleotide
  Sense strand starting at position 3957 of SEQ ID NO: 1881475
gcgccuggccugaaugagu

SEQ ID NO: 2047399 - RNA, 19 nt, Artificial Sequence
  Description of Artificial Sequence: Synthetic oligonucleotide
  Antisense strand to SEQ ID NO: 2047398
acucauucaggccaggcgc

SEQ ID NO: 2047400 - RNA, 19 nt, Artificial Sequence
  Description of Artificial Sequence: Synthetic oligonucleotide
  Sense strand starting at position 3966 of SEQ ID NO: 1881475
cugaaugaguuucuugaug

SEQ ID NO: 2047401 - RNA, 19 nt, Artificial Sequence
  Description of Artificial Sequence: Synthetic oligonucleotide
  Antisense strand to SEQ ID NO: 2047400
caucaagaaacucauucag

SEQ ID NO: 2047402 - RNA, 19 nt, Artificial Sequence
  Description of Artificial Sequence: Synthetic oligonucleotide
  Sense strand starting at position 3975 of SEQ ID NO: 1881475
uuucuugauguagguuaua

SEQ ID NO: 2047403 - RNA, 19 nt, Artificial Sequence
  Description of Artificial Sequence: Synthetic oligonucleotide
  Antisense strand to SEQ ID NO: 2047402
uauaaccuacaucaagaaa

SEQ ID NO: 2047404 - RNA, 19 nt, Artificial Sequence
  Description of Artificial Sequence: Synthetic oligonucleotide
  Sense strand starting at position 3978 of SEQ ID NO: 1881475
cuugauguagguuauaaua

SEQ ID NO: 2047405 - RNA, 19 nt, Artificial Sequence
  Description of Artificial Sequence: Synthetic oligonucleotide
  Antisense strand to SEQ ID NO: 2047404
uauuauaaccuacaucaag

SEQ ID NO: 2047406 - RNA, 19 nt, Artificial Sequence
  Description of Artificial Sequence: Synthetic oligonucleotide
  Sense strand starting at position 26 of SEQ ID NO: 1881476
uuaugagucugcccacuga

SEQ ID NO: 2047407 - RNA, 19 nt, Artificial Sequence
  Description of Artificial Sequence: Synthetic oligonucleotide
  Antisense strand to SEQ ID NO: 2047406
ucagugggcagacucauaa

SEQ ID NO: 2047408 - RNA, 19 nt, Artificial Sequence
  Description of Artificial Sequence: Synthetic oligonucleotide
  Sense strand starting at position 30 of SEQ ID NO: 1881476
gagucugcccacugaggua

SEQ ID NO: 2047409 - RNA, 19 nt, Artificial Sequence
  Description of Artificial Sequence: Synthetic oligonucleotide
  Antisense strand to SEQ ID NO: 2047408
uaccucagugggcagacuc

SEQ ID NO: 2047410 - RNA, 19 nt, Artificial Sequence
  Description of Artificial Sequence: Synthetic oligonucleotide
  Sense strand starting at position 618 of SEQ ID NO: 1881476
uggguuucccuuuaggaca

SEQ ID NO: 2047411 - RNA, 19 nt, Artificial Sequence
  Description of Artificial Sequence: Synthetic oligonucleotide
  Antisense strand to SEQ ID NO: 2047410
uguccuaaagggaaaccca

SEQ ID NO: 2047412 - RNA, 19 nt, Artificial Sequence
  Description of Artificial Sequence: Synthetic oligonucleotide
  Sense strand starting at position 977 of SEQ ID NO: 1881476
ggugcacucccauaaagaa

SEQ ID NO: 2047413 - RNA, 19 nt, Artificial Sequence
  Description of Artificial Sequence: Synthetic oligonucleotide
  Antisense strand to SEQ ID NO: 2047412
uucuuuaugggagugcacc

SEQ ID NO: 2047414 - RNA, 19 nt, Artificial Sequence
  Description of Artificial Sequence: Synthetic oligonucleotide
  Sense strand starting at position 2949 of SEQ ID NO: 1881476
cugcguugugaagagaacu

SEQ ID NO: 2047415 - RNA, 19 nt, Artificial Sequence
  Description of Artificial Sequence: Synthetic oligonucleotide
  Antisense strand to SEQ ID NO: 2047414
aguucucuucacaacgcag

SEQ ID NO: 2047416 - RNA, 19 nt, Artificial Sequence
  Description of Artificial Sequence: Synthetic oligonucleotide
  Sense strand starting at position 2978 of SEQ ID NO: 1881476
gagauuugcucagugccac

SEQ ID NO: 2047417 - RNA, 19 nt, Artificial Sequence
  Description of Artificial Sequence: Synthetic oligonucleotide
  Antisense strand to SEQ ID NO: 2047416
guggcacugagcaaaucuc

SEQ ID NO: 2047418 - RNA, 19 nt, Artificial Sequence
  Description of Artificial Sequence: Synthetic oligonucleotide
  Sense strand starting at position 2979 of SEQ ID NO: 1881476
agauuugcucagugccacu

SEQ ID NO: 2047419 - RNA, 19 nt, Artificial Sequence
  Description of Artificial Sequence: Synthetic oligonucleotide
  Antisense strand to SEQ ID NO: 2047418
aguggcacugagcaaaucu

SEQ ID NO: 2047420 - RNA, 19 nt, Artificial Sequence
  Description of Artificial Sequence: Synthetic oligonucleotide
  Sense strand starting at position 2998 of SEQ ID NO: 1881476
ucccucuucuagucugaga

SEQ ID NO: 2047421 - RNA, 19 nt, Artificial Sequence
  Description of Artificial Sequence: Synthetic oligonucleotide
  Antisense strand to SEQ ID NO: 2047420
ucucagacuagaagaggga

SEQ ID NO: 2047422 - RNA, 19 nt, Artificial Sequence
  Description of Artificial Sequence: Synthetic oligonucleotide
  Sense strand starting at position 3246 of SEQ ID NO: 1881476
guucaugaucacgguggua

SEQ ID NO: 2047423 - RNA, 19 nt, Artificial Sequence
  Description of Artificial Sequence: Synthetic oligonucleotide
  Antisense strand to SEQ ID NO: 2047422
uaccaccgugaucaugaac

SEQ ID NO: 2047424 - RNA, 19 nt, Artificial Sequence
  Description of Artificial Sequence: Synthetic oligonucleotide
  Sense strand starting at position 3248 of SEQ ID NO: 1881476
ucaugaucacggugguagu

SEQ ID NO: 2047425 - RNA, 19 nt, Artificial Sequence
  Description of Artificial Sequence: Synthetic oligonucleotide
  Antisense strand to SEQ ID NO: 2047424
acuaccaccgugaucauga

SEQ ID NO: 2047426 - RNA, 19 nt, Artificial Sequence
  Description of Artificial Sequence: Synthetic oligonucleotide
  Sense strand starting at position 3249 of SEQ ID NO: 1881476
caugaucacggugguagua

SEQ ID NO: 2047427 - RNA, 19 nt, Artificial Sequence
  Description of Artificial Sequence: Synthetic oligonucleotide
  Antisense strand to SEQ ID NO: 2047426
uacuaccaccgugaucaug

SEQ ID NO: 2047428 - RNA, 19 nt, Artificial Sequence
  Description of Artificial Sequence: Synthetic oligonucleotide
  Sense strand starting at position 3319 of SEQ ID NO: 1881476
ucugcaggcguuugaauga

SEQ ID NO: 2047429 - RNA, 19 nt, Artificial Sequence
  Description of Artificial Sequence: Synthetic oligonucleotide
  Antisense strand to SEQ ID NO: 2047428
ucauucaaacgccugcaga

SEQ ID NO: 2047430 - RNA, 19 nt, Artificial Sequence
  Description of Artificial Sequence: Synthetic oligonucleotide
  Sense strand starting at position 3322 of SEQ ID NO: 1881476
gcaggcguuugaaugaguu

SEQ ID NO: 2047431 - RNA, 19 nt, Artificial Sequence
  Description of Artificial Sequence: Synthetic oligonucleotide
  Antisense strand to SEQ ID NO: 2047430
aacucauucaaacgccugc

SEQ ID NO: 2047432 - RNA, 19 nt, Artificial Sequence
  Description of Artificial Sequence: Synthetic oligonucleotide
  Sense strand starting at position 3328 of SEQ ID NO: 1881476
guuugaaugaguugugguu

SEQ ID NO: 2047433 - RNA, 19 nt, Artificial Sequence
  Description of Artificial Sequence: Synthetic oligonucleotide
  Antisense strand to SEQ ID NO: 2047432
aaccacaacucauucaaac

SEQ ID NO: 2047434 - RNA, 19 nt, Artificial Sequence
  Description of Artificial Sequence: Synthetic oligonucleotide
  Sense strand starting at position 3334 of SEQ ID NO: 1881476
augaguugugguugccaag

SEQ ID NO: 2047435 - RNA, 19 nt, Artificial Sequence
  Description of Artificial Sequence: Synthetic oligonucleotide
  Antisense strand to SEQ ID NO: 2047434
cuuggcaaccacaacucau

SEQ ID NO: 2047436 - RNA, 19 nt, Artificial Sequence
  Description of Artificial Sequence: Synthetic oligonucleotide
  Sense strand starting at position 3359 of SEQ ID NO: 1881476
ggugaacuuacguggugau

SEQ ID NO: 2047437 - RNA, 19 nt, Artificial Sequence
  Description of Artificial Sequence: Synthetic oligonucleotide
  Antisense strand to SEQ ID NO: 2047436
aucaccacguaaguucacc

SEQ ID NO: 2047438 - RNA, 19 nt, Artificial Sequence
  Description of Artificial Sequence: Synthetic oligonucleotide
  Sense strand starting at position 3360 of SEQ ID NO: 1881476
gugaacuuacguggugauu

SEQ ID NO: 2047439 - RNA, 19 nt, Artificial Sequence
  Description of Artificial Sequence: Synthetic oligonucleotide
  Antisense strand to SEQ ID NO: 2047438
aaucaccacguaaguucac

SEQ ID NO: 2047440 - RNA, 19 nt, Artificial Sequence
  Description of Artificial Sequence: Synthetic oligonucleotide
  Sense strand starting at position 3363 of SEQ ID NO: 1881476
aacuuacguggugauuaau

SEQ ID NO: 2047441 - RNA, 19 nt, Artificial Sequence
  Description of Artificial Sequence: Synthetic oligonucleotide
  Antisense strand to SEQ ID NO: 2047440
auuaaucaccacguaaguu

SEQ ID NO: 2047442 - RNA, 19 nt, Artificial Sequence
  Description of Artificial Sequence: Synthetic oligonucleotide
  Sense strand starting at position 3366 of SEQ ID NO: 1881476
uuacguggugauuaaugaa

SEQ ID NO: 2047443 - RNA, 19 nt, Artificial Sequence
  Description of Artificial Sequence: Synthetic oligonucleotide
  Antisense strand to SEQ ID NO: 2047442
uucauuaaucaccacguaa

SEQ ID NO: 2047444 - RNA, 19 nt, Artificial Sequence
  Description of Artificial Sequence: Synthetic oligonucleotide
  Sense strand starting at position 3390 of SEQ ID NO: 1881476
cuuaaauauuaggaagagu

SEQ ID NO: 2047445 - RNA, 19 nt, Artificial Sequence
  Description of Artificial Sequence: Synthetic oligonucleotide
  Antisense strand to SEQ ID NO: 2047444
acucuuccuaauauuuaag

SEQ ID NO: 2047446 - RNA, 19 nt, Artificial Sequence
  Description of Artificial Sequence: Synthetic oligonucleotide
  Sense strand starting at position 3401 of SEQ ID NO: 1881476
ggaagaguugauugaaguu

SEQ ID NO: 2047447 - RNA, 19 nt, Artificial Sequence
  Description of Artificial Sequence: Synthetic oligonucleotide
  Antisense strand to SEQ ID NO: 2047446
aacuucaaucaacucuucc

SEQ ID NO: 2047448 - RNA, 19 nt, Artificial Sequence
  Description of Artificial Sequence: Synthetic oligonucleotide
  Sense strand starting at position 3467 of SEQ ID NO: 1881476
agguuaauugccgagggau

SEQ ID NO: 2047449 - RNA, 19 nt, Artificial Sequence
  Description of Artificial Sequence: Synthetic oligonucleotide
  Antisense strand to SEQ ID NO: 2047448
aucccucggcaauuaaccu

SEQ ID NO: 2047450 - RNA, 19 nt, Artificial Sequence
  Description of Artificial Sequence: Synthetic oligonucleotide
  Sense strand starting at position 3469 of SEQ ID NO: 1881476
guuaauugccgagggauga

SEQ ID NO: 2047451 - RNA, 19 nt, Artificial Sequence
  Description of Artificial Sequence: Synthetic oligonucleotide
  Antisense strand to SEQ ID NO: 2047450
ucaucccucggcaauuaac

SEQ ID NO: 2047452 - RNA, 19 nt, Artificial Sequence
  Description of Artificial Sequence: Synthetic oligonucleotide
  Sense strand starting at position 3470 of SEQ ID NO: 1881476
uuaauugccgagggaugaa

SEQ ID NO: 2047453 - RNA, 19 nt, Artificial Sequence
  Description of Artificial Sequence: Synthetic oligonucleotide
  Antisense strand to SEQ ID NO: 2047452
uucaucccucggcaauuaa

SEQ ID NO: 2047454 - RNA, 19 nt, Artificial Sequence
  Description of Artificial Sequence: Synthetic oligonucleotide
  Sense strand starting at position 3482 of SEQ ID NO: 1881476
ggaugaaugagguguacau

SEQ ID NO: 2047455 - RNA, 19 nt, Artificial Sequence
  Description of Artificial Sequence: Synthetic oligonucleotide
  Antisense strand to SEQ ID NO: 2047454
auguacaccucauucaucc

SEQ ID NO: 2047456 - RNA, 19 nt, Artificial Sequence
  Description of Artificial Sequence: Synthetic oligonucleotide
  Sense strand starting at position 3514 of SEQ ID NO: 1881476
cagucaggcuugccagaau

SEQ ID NO: 2047457 - RNA, 19 nt, Artificial Sequence
  Description of Artificial Sequence: Synthetic oligonucleotide
  Antisense strand to SEQ ID NO: 2047456
auucuggcaagccugacug

SEQ ID NO: 2047458 - RNA, 19 nt, Artificial Sequence
  Description of Artificial Sequence: Synthetic oligonucleotide
  Sense strand starting at position 3708 of SEQ ID NO: 1881476
ggacuuucccuggaagucu

SEQ ID NO: 2047459 - RNA, 19 nt, Artificial Sequence
  Description of Artificial Sequence: Synthetic oligonucleotide
  Antisense strand to SEQ ID NO: 2047458
agacuuccagggaaagucc

SEQ ID NO: 2047460 - RNA, 19 nt, Artificial Sequence
  Description of Artificial Sequence: Synthetic oligonucleotide
  Sense strand starting at position 3734 of SEQ ID NO: 1881476
gaguguacaguaggaguua

SEQ ID NO: 2047461 - RNA, 19 nt, Artificial Sequence
  Description of Artificial Sequence: Synthetic oligonucleotide
  Antisense strand to SEQ ID NO: 2047460
uaacuccuacuguacacuc

SEQ ID NO: 2047462 - RNA, 19 nt, Artificial Sequence
  Description of Artificial Sequence: Synthetic oligonucleotide
  Sense strand starting at position 3813 of SEQ ID NO: 1881476
ggaugugucccagauggca

SEQ ID NO: 2047463 - RNA, 19 nt, Artificial Sequence
  Description of Artificial Sequence: Synthetic oligonucleotide
  Antisense strand to SEQ ID NO: 2047462
ugccaucugggacacaucc

SEQ ID NO: 2047464 - RNA, 19 nt, Artificial Sequence
  Description of Artificial Sequence: Synthetic oligonucleotide
  Sense strand starting at position 3815 of SEQ ID NO: 1881476
augugucccagauggcauu

SEQ ID NO: 2047465 - RNA, 19 nt, Artificial Sequence
  Description of Artificial Sequence: Synthetic oligonucleotide
  Antisense strand to SEQ ID NO: 2047464
aaugccaucugggacacau

SEQ ID NO: 2047466 - RNA, 19 nt, Artificial Sequence
  Description of Artificial Sequence: Synthetic oligonucleotide
  Sense strand starting at position 3825 of SEQ ID NO: 1881476
gauggcauuugguaagaau

SEQ ID NO: 2047467 - RNA, 19 nt, Artificial Sequence
  Description of Artificial Sequence: Synthetic oligonucleotide
  Antisense strand to SEQ ID NO: 2047466
auucuuaccaaaugccauc

SEQ ID NO: 2047468 - RNA, 19 nt, Artificial Sequence
  Description of Artificial Sequence: Synthetic oligonucleotide
  Sense strand starting at position 3828 of SEQ ID NO: 1881476
ggcauuugguaagaauauc

SEQ ID NO: 2047469 - RNA, 19 nt, Artificial Sequence
  Description of Artificial Sequence: Synthetic oligonucleotide
  Antisense strand to SEQ ID NO: 2047468
gauauucuuaccaaaugcc

SEQ ID NO: 2047470 - RNA, 19 nt, Artificial Sequence
  Description of Artificial Sequence: Synthetic oligonucleotide
  Sense strand starting at position 3834 of SEQ ID NO: 1881476
ugguaagaauaucucuguu

SEQ ID NO: 2047471 - RNA, 19 nt, Artificial Sequence
  Description of Artificial Sequence: Synthetic oligonucleotide
  Antisense strand to SEQ ID NO: 2047470
aacagagauauucuuacca

SEQ ID NO: 2047472 - RNA, 19 nt, Artificial Sequence
  Description of Artificial Sequence: Synthetic oligonucleotide
  Sense strand starting at position 3836 of SEQ ID NO: 1881476
guaagaauaucucuguuaa

SEQ ID NO: 2047473 - RNA, 19 nt, Artificial Sequence
  Description of Artificial Sequence: Synthetic oligonucleotide
  Antisense strand to SEQ ID NO: 2047472
uuaacagagauauucuuac

SEQ ID NO: 2047474 - RNA, 19 nt, Artificial Sequence
  Description of Artificial Sequence: Synthetic oligonucleotide
  Sense strand starting at position 3846 of SEQ ID NO: 1881476
cucuguuaagacugauuaa

SEQ ID NO: 2047475 - RNA, 19 nt, Artificial Sequence
  Description of Artificial Sequence: Synthetic oligonucleotide
  Antisense strand to SEQ ID NO: 2047474
uuaaucagucuuaacagag

SEQ ID NO: 2047476 - RNA, 19 nt, Artificial Sequence
  Description of Artificial Sequence: Synthetic oligonucleotide
  Sense strand starting at position 3884 of SEQ ID NO: 1881476
uucuuuguuucuguuauga

SEQ ID NO: 2047477 - RNA, 19 nt, Artificial Sequence
  Description of Artificial Sequence: Synthetic oligonucleotide
  Antisense strand to SEQ ID NO: 2047476
ucauaacagaaacaaagaa

SEQ ID NO: 2047478 - RNA, 19 nt, Artificial Sequence
  Description of Artificial Sequence: Synthetic oligonucleotide
  Sense strand starting at position 3933 of SEQ ID NO: 1881476
aaaugauucggagagcagu

SEQ ID NO: 2047479 - RNA, 19 nt, Artificial Sequence
  Description of Artificial Sequence: Synthetic oligonucleotide
  Antisense strand to SEQ ID NO: 2047478
acugcucuccgaaucauuu

SEQ ID NO: 2047480 - RNA, 19 nt, Artificial Sequence
  Description of Artificial Sequence: Synthetic oligonucleotide
  Sense strand starting at position 3944 of SEQ ID NO: 1881476
agagcaguguuagcuuauu

SEQ ID NO: 2047481 - RNA, 19 nt, Artificial Sequence
  Description of Artificial Sequence: Synthetic oligonucleotide
  Antisense strand to SEQ ID NO: 2047480
aauaagcuaacacugcucu

SEQ ID NO: 2047482 - RNA, 19 nt, Artificial Sequence
  Description of Artificial Sequence: Synthetic oligonucleotide
  Sense strand starting at position 3952 of SEQ ID NO: 1881476
guuagcuuauuuguuggaa

SEQ ID NO: 2047483 - RNA, 19 nt, Artificial Sequence
  Description of Artificial Sequence: Synthetic oligonucleotide
  Antisense strand to SEQ ID NO: 2047482
uuccaacaaauaagcuaac

SEQ ID NO: 2047484 - RNA, 19 nt, Artificial Sequence
  Description of Artificial Sequence: Synthetic oligonucleotide
  Sense strand starting at position 3956 of SEQ ID NO: 1881476
gcuuauuuguuggaauaaa

SEQ ID NO: 2047485 - RNA, 19 nt, Artificial Sequence
  Description of Artificial Sequence: Synthetic oligonucleotide
  Antisense strand to SEQ ID NO: 2047484
uuuauuccaacaaauaagc

SEQ ID NO: 2047486 - RNA, 19 nt, Artificial Sequence
  Description of Artificial Sequence: Synthetic oligonucleotide
  Sense strand starting at position 18 of SEQ ID NO: 1881477
gagagacauucugagcaga

SEQ ID NO: 2047487 - RNA, 19 nt, Artificial Sequence
  Description of Artificial Sequence: Synthetic oligonucleotide
  Antisense strand to SEQ ID NO: 2047486
ucugcucagaaugucucuc

SEQ ID NO: 2047488 - RNA, 19 nt, Artificial Sequence
  Description of Artificial Sequence: Synthetic oligonucleotide
  Sense strand starting at position 593 of SEQ ID NO: 1881477
gcacgagggucucuguguu

SEQ ID NO: 2047489 - RNA, 19 nt, Artificial Sequence
  Description of Artificial Sequence: Synthetic oligonucleotide
  Antisense strand to SEQ ID NO: 2047488
aacacagagacccucgugc

SEQ ID NO: 2047490 - RNA, 19 nt, Artificial Sequence
  Description of Artificial Sequence: Synthetic oligonucleotide
  Sense strand starting at position 599 of SEQ ID NO: 1881477
gggucucuguguuuccaga

SEQ ID NO: 2047491 - RNA, 19 nt, Artificial Sequence
  Description of Artificial Sequence: Synthetic oligonucleotide
  Antisense strand to SEQ ID NO: 2047490
ucuggaaacacagagaccc

SEQ ID NO: 2047492 - RNA, 19 nt, Artificial Sequence
  Description of Artificial Sequence: Synthetic oligonucleotide
  Sense strand starting at position 601 of SEQ ID NO: 1881477
gucucuguguuuccagaag

SEQ ID NO: 2047493 - RNA, 19 nt, Artificial Sequence
  Description of Artificial Sequence: Synthetic oligonucleotide
  Antisense strand to SEQ ID NO: 2047492
cuucuggaaacacagagac

SEQ ID NO: 2047494 - RNA, 19 nt, Artificial Sequence
  Description of Artificial Sequence: Synthetic oligonucleotide
  Sense strand starting at position 699 of SEQ ID NO: 1881477
ggugcugugaccgaugaga

SEQ ID NO: 2047495 - RNA, 19 nt, Artificial Sequence
  Description of Artificial Sequence: Synthetic oligonucleotide
  Antisense strand to SEQ ID NO: 2047494
ucucaucggucacagcacc

SEQ ID NO: 2047496 - RNA, 19 nt, Artificial Sequence
  Description of Artificial Sequence: Synthetic oligonucleotide
  Sense strand starting at position 1299 of SEQ ID NO: 1881477
ccgugcguucagugacuaa

SEQ ID NO: 2047497 - RNA, 19 nt, Artificial Sequence
  Description of Artificial Sequence: Synthetic oligonucleotide
  Antisense strand to SEQ ID NO: 2047496
uuagucacugaacgcacgg

SEQ ID NO: 2047498 - RNA, 19 nt, Artificial Sequence
  Description of Artificial Sequence: Synthetic oligonucleotide
  Sense strand starting at position 1504 of SEQ ID NO: 1881477
ggagacuccugguuuaccu

SEQ ID NO: 2047499 - RNA, 19 nt, Artificial Sequence
  Description of Artificial Sequence: Synthetic oligonucleotide
  Antisense strand to SEQ ID NO: 2047498
agguaaaccaggagucucc

SEQ ID NO: 2047500 - RNA, 19 nt, Artificial Sequence
  Description of Artificial Sequence: Synthetic oligonucleotide
  Sense strand starting at position 2152 of SEQ ID NO: 1881477
ucggaaagcgcucagaaga

SEQ ID NO: 2047501 - RNA, 19 nt, Artificial Sequence
  Description of Artificial Sequence: Synthetic oligonucleotide
  Antisense strand to SEQ ID NO: 2047500
ucuucugagcgcuuuccga

SEQ ID NO: 2047502 - RNA, 19 nt, Artificial Sequence
  Description of Artificial Sequence: Synthetic oligonucleotide
  Sense strand starting at position 2178 of SEQ ID NO: 1881477
gcccguuggugcuauguga

SEQ ID NO: 2047503 - RNA, 19 nt, Artificial Sequence
  Description of Artificial Sequence: Synthetic oligonucleotide
  Antisense strand to SEQ ID NO: 2047502
ucacauagcaccaacgggc

SEQ ID NO: 2047504 - RNA, 19 nt, Artificial Sequence
  Description of Artificial Sequence: Synthetic oligonucleotide
  Sense strand starting at position 2201 of SEQ ID NO: 1881477
agccauuacugucuuguuu

SEQ ID NO: 2047505 - RNA, 19 nt, Artificial Sequence
  Description of Artificial Sequence: Synthetic oligonucleotide
  Antisense strand to SEQ ID NO: 2047504
aaacaagacaguaauggcu

SEQ ID NO: 2047506 - RNA, 19 nt, Artificial Sequence
  Description of Artificial Sequence: Synthetic oligonucleotide
  Sense strand starting at position 2348 of SEQ ID NO: 1881477
ugaguaaagcgugcgcuuu

SEQ ID NO: 2047507 - RNA, 19 nt, Artificial Sequence
  Description of Artificial Sequence: Synthetic oligonucleotide
  Antisense strand to SEQ ID NO: 2047506
aaagcgcacgcuuuacuca

SEQ ID NO: 2047508 - RNA, 19 nt, Artificial Sequence
  Description of Artificial Sequence: Synthetic oligonucleotide
  Sense strand starting at position 2349 of SEQ ID NO: 1881477
gaguaaagcgugcgcuuua

SEQ ID NO: 2047509 - RNA, 19 nt, Artificial Sequence
  Description of Artificial Sequence: Synthetic oligonucleotide
  Antisense strand to SEQ ID NO: 2047508
uaaagcgcacgcuuuacuc

SEQ ID NO: 2047510 - RNA, 19 nt, Artificial Sequence
  Description of Artificial Sequence: Synthetic oligonucleotide
  Sense strand starting at position 2579 of SEQ ID NO: 1881477
guaggaugugcguagguaa

SEQ ID NO: 2047511 - RNA, 19 nt, Artificial Sequence
  Description of Artificial Sequence: Synthetic oligonucleotide
  Antisense strand to SEQ ID NO: 2047510
uuaccuacgcacauccuac

SEQ ID NO: 2047512 - RNA, 19 nt, Artificial Sequence
  Description of Artificial Sequence: Synthetic oligonucleotide
  Sense strand starting at position 2860 of SEQ ID NO: 1881477
uugaaaucggccugggaga

SEQ ID NO: 2047513 - RNA, 19 nt, Artificial Sequence
  Description of Artificial Sequence: Synthetic oligonucleotide
  Antisense strand to SEQ ID NO: 2047512
ucucccaggccgauuucaa

SEQ ID NO: 2047514 - RNA, 19 nt, Artificial Sequence
  Description of Artificial Sequence: Synthetic oligonucleotide
  Sense strand starting at position 2861 of SEQ ID NO: 1881477
ugaaaucggccugggagau

SEQ ID NO: 2047515 - RNA, 19 nt, Artificial Sequence
  Description of Artificial Sequence: Synthetic oligonucleotide
  Antisense strand to SEQ ID NO: 2047514
aucucccaggccgauuuca

SEQ ID NO: 2047516 - RNA, 19 nt, Artificial Sequence
  Description of Artificial Sequence: Synthetic oligonucleotide
  Sense strand starting at position 2915 of SEQ ID NO: 1881477
gccagaugcgaugguauau

SEQ ID NO: 2047517 - RNA, 19 nt, Artificial Sequence
  Description of Artificial Sequence: Synthetic oligonucleotide
  Antisense strand to SEQ ID NO: 2047516
auauaccaucgcaucuggc

SEQ ID NO: 2047518 - RNA, 19 nt, Artificial Sequence
  Description of Artificial Sequence: Synthetic oligonucleotide
  Sense strand starting at position 2944 of SEQ ID NO: 1881477
cccagcuacccacgaaauu

SEQ ID NO: 2047519 - RNA, 19 nt, Artificial Sequence
  Description of Artificial Sequence: Synthetic oligonucleotide
  Antisense strand to SEQ ID NO: 2047518
aauuucguggguagcuggg

SEQ ID NO: 2047520 - RNA, 19 nt, Artificial Sequence
  Description of Artificial Sequence: Synthetic oligonucleotide
  Sense strand starting at position 2956 of SEQ ID NO: 1881477
cgaaauugaggugggagau

SEQ ID NO: 2047521 - RNA, 19 nt, Artificial Sequence
  Description of Artificial Sequence: Synthetic oligonucleotide
  Antisense strand to SEQ ID NO: 2047520
aucucccaccucaauuucg

SEQ ID NO: 2047522 - RNA, 19 nt, Artificial Sequence
  Description of Artificial Sequence: Synthetic oligonucleotide
  Sense strand starting at position 3137 of SEQ ID NO: 1881477
gaaggauaauuagaguuac

SEQ ID NO: 2047523 - RNA, 19 nt, Artificial Sequence
  Description of Artificial Sequence: Synthetic oligonucleotide
  Antisense strand to SEQ ID NO: 2047522
guaacucuaauuauccuuc

SEQ ID NO: 2047524 - RNA, 19 nt, Artificial Sequence
  Description of Artificial Sequence: Synthetic oligonucleotide
  Sense strand starting at position 3149 of SEQ ID NO: 1881477
gaguuacaguguucugggu

SEQ ID NO: 2047525 - RNA, 19 nt, Artificial Sequence
  Description of Artificial Sequence: Synthetic oligonucleotide
  Antisense strand to SEQ ID NO: 2047524
acccagaacacuguaacuc

SEQ ID NO: 2047526 - RNA, 19 nt, Artificial Sequence
  Description of Artificial Sequence: Synthetic oligonucleotide
  Sense strand starting at position 3153 of SEQ ID NO: 1881477
uacaguguucugggucuuu

SEQ ID NO: 2047527 - RNA, 19 nt, Artificial Sequence
  Description of Artificial Sequence: Synthetic oligonucleotide
  Antisense strand to SEQ ID NO: 2047526
aaagacccagaacacugua

SEQ ID NO: 2047528 - RNA, 19 nt, Artificial Sequence
  Description of Artificial Sequence: Synthetic oligonucleotide
  Sense strand starting at position 3209 of SEQ ID NO: 1881477
uaggucuucuuauguugaa

SEQ ID NO: 2047529 - RNA, 19 nt, Artificial Sequence
  Description of Artificial Sequence: Synthetic oligonucleotide
  Antisense strand to SEQ ID NO: 2047528
uucaacauaagaagaccua

SEQ ID NO: 2047530 - RNA, 19 nt, Artificial Sequence
  Description of Artificial Sequence: Synthetic oligonucleotide
  Sense strand starting at position 3210 of SEQ ID NO: 1881477
aggucuucuuauguugaaa

SEQ ID NO: 2047531 - RNA, 19 nt, Artificial Sequence
  Description of Artificial Sequence: Synthetic oligonucleotide
  Antisense strand to SEQ ID NO: 2047530
uuucaacauaagaagaccu

SEQ ID NO: 2047532 - RNA, 19 nt, Artificial Sequence
  Description of Artificial Sequence: Synthetic oligonucleotide
  Sense strand starting at position 3257 of SEQ ID NO: 1881477
agugaaauaguguguauau

SEQ ID NO: 2047533 - RNA, 19 nt, Artificial Sequence
  Description of Artificial Sequence: Synthetic oligonucleotide
  Antisense strand to SEQ ID NO: 2047532
auauacacacuauuucacu

SEQ ID NO: 2047534 - RNA, 19 nt, Artificial Sequence
  Description of Artificial Sequence: Synthetic oligonucleotide
  Sense strand starting at position 3258 of SEQ ID NO: 1881477
gugaaauaguguguauaua

SEQ ID NO: 2047535 - RNA, 19 nt, Artificial Sequence
  Description of Artificial Sequence: Synthetic oligonucleotide
  Antisense strand to SEQ ID NO: 2047534
uauauacacacuauuucac

SEQ ID NO: 2047536 - RNA, 19 nt, Artificial Sequence
  Description of Artificial Sequence: Synthetic oligonucleotide
  Sense strand starting at position 3266 of SEQ ID NO: 1881477
guguguauauauuccaaau

SEQ ID NO: 2047537 - RNA, 19 nt, Artificial Sequence
  Description of Artificial Sequence: Synthetic oligonucleotide
  Antisense strand to SEQ ID NO: 2047536
auuuggaauauauacacac

SEQ ID NO: 2047538 - RNA, 19 nt, Artificial Sequence
  Description of Artificial Sequence: Synthetic oligonucleotide
  Sense strand starting at position 3374 of SEQ ID NO: 1881477
acagaacugucuccaggaa

SEQ ID NO: 2047539 - RNA, 19 nt, Artificial Sequence
  Description of Artificial Sequence: Synthetic oligonucleotide
  Antisense strand to SEQ ID NO: 2047538
uuccuggagacaguucugu

SEQ ID NO: 2047540 - RNA, 19 nt, Artificial Sequence
  Description of Artificial Sequence: Synthetic oligonucleotide
  Sense strand starting at position 3444 of SEQ ID NO: 1881477
auggauaacucgcuuuaaa

SEQ ID NO: 2047541 - RNA, 19 nt, Artificial Sequence
  Description of Artificial Sequence: Synthetic oligonucleotide
  Antisense strand to SEQ ID NO: 2047540
uuuaaagcgaguuauccau

SEQ ID NO: 2047542 - RNA, 19 nt, Artificial Sequence
  Description of Artificial Sequence: Synthetic oligonucleotide
  Sense strand starting at position 3469 of SEQ ID NO: 1881477
uccucaaagcgucagagaa

SEQ ID NO: 2047543 - RNA, 19 nt, Artificial Sequence
  Description of Artificial Sequence: Synthetic oligonucleotide
  Antisense strand to SEQ ID NO: 2047542
uucucugacgcuuugagga

SEQ ID NO: 2047544 - RNA, 19 nt, Artificial Sequence
  Description of Artificial Sequence: Synthetic oligonucleotide
  Sense strand starting at position 3471 of SEQ ID NO: 1881477
cucaaagcgucagagaacu

SEQ ID NO: 2047545 - RNA, 19 nt, Artificial Sequence
  Description of Artificial Sequence: Synthetic oligonucleotide
  Antisense strand to SEQ ID NO: 2047544
aguucucugacgcuuugag

SEQ ID NO: 2047546 - RNA, 19 nt, Artificial Sequence
  Description of Artificial Sequence: Synthetic oligonucleotide
  Sense strand starting at position 3477 of SEQ ID NO: 1881477
gcgucagagaacugagaaa

SEQ ID NO: 2047547 - RNA, 19 nt, Artificial Sequence
  Description of Artificial Sequence: Synthetic oligonucleotide
  Antisense strand to SEQ ID NO: 2047546
uuucucaguucucugacgc

SEQ ID NO: 2047548 - RNA, 19 nt, Artificial Sequence
  Description of Artificial Sequence: Synthetic oligonucleotide
  Sense strand starting at position 3819 of SEQ ID NO: 1881477
ugguaaagacuuuggguuu

SEQ ID NO: 2047549 - RNA, 19 nt, Artificial Sequence
  Description of Artificial Sequence: Synthetic oligonucleotide
  Antisense strand to SEQ ID NO: 2047548
aaacccaaagucuuuacca

SEQ ID NO: 2047550 - RNA, 19 nt, Artificial Sequence
  Description of Artificial Sequence: Synthetic oligonucleotide
  Sense strand starting at position 11 of SEQ ID NO: 1881478
uagggaaacucugcuguaa

SEQ ID NO: 2047551 - RNA, 19 nt, Artificial Sequence
  Description of Artificial Sequence: Synthetic oligonucleotide
  Antisense strand to SEQ ID NO: 2047550
uuacagcagaguuucccua

SEQ ID NO: 2047552 - RNA, 19 nt, Artificial Sequence
  Description of Artificial Sequence: Synthetic oligonucleotide
  Sense strand starting at position 15 of SEQ ID NO: 1881478
gaaacucugcuguaaagau

SEQ ID NO: 2047553 - RNA, 19 nt, Artificial Sequence
  Description of Artificial Sequence: Synthetic oligonucleotide
  Antisense strand to SEQ ID NO: 2047552
aucuuuacagcagaguuuc

SEQ ID NO: 2047554 - RNA, 19 nt, Artificial Sequence
  Description of Artificial Sequence: Synthetic oligonucleotide
  Sense strand starting at position 55 of SEQ ID NO: 1881478
cugucaggucaacauauga

SEQ ID NO: 2047555 - RNA, 19 nt, Artificial Sequence
  Description of Artificial Sequence: Synthetic oligonucleotide
  Antisense strand to SEQ ID NO: 2047554
ucauauguugaccugacag

SEQ ID NO: 2047556 - RNA, 19 nt, Artificial Sequence
  Description of Artificial Sequence: Synthetic oligonucleotide
  Sense strand starting at position 230 of SEQ ID NO: 1881478
uuguaagagucuguugaga

SEQ ID NO: 2047557 - RNA, 19 nt, Artificial Sequence
  Description of Artificial Sequence: Synthetic oligonucleotide
  Antisense strand to SEQ ID NO: 2047556
ucucaacagacucuuacaa

SEQ ID NO: 2047558 - RNA, 19 nt, Artificial Sequence
  Description of Artificial Sequence: Synthetic oligonucleotide
  Sense strand starting at position 241 of SEQ ID NO: 1881478
uguugagaaugaguucuuu

SEQ ID NO: 2047559 - RNA, 19 nt, Artificial Sequence
  Description of Artificial Sequence: Synthetic oligonucleotide
  Antisense strand to SEQ ID NO: 2047558
aaagaacucauucucaaca

SEQ ID NO: 2047560 - RNA, 19 nt, Artificial Sequence
  Description of Artificial Sequence: Synthetic oligonucleotide
  Sense strand starting at position 245 of SEQ ID NO: 1881478
gagaaugaguucuuuacac

SEQ ID NO: 2047561 - RNA, 19 nt, Artificial Sequence
  Description of Artificial Sequence: Synthetic oligonucleotide
  Antisense strand to SEQ ID NO: 2047560
guguaaagaacucauucuc

SEQ ID NO: 2047562 - RNA, 19 nt, Artificial Sequence
  Description of Artificial Sequence: Synthetic oligonucleotide
  Sense strand starting at position 320 of SEQ ID NO: 1881478
cuggauuuaugcuaagaaa

SEQ ID NO: 2047563 - RNA, 19 nt, Artificial Sequence
  Description of Artificial Sequence: Synthetic oligonucleotide
  Antisense strand to SEQ ID NO: 2047562
uuucuuagcauaaauccag

SEQ ID NO: 2047564 - RNA, 19 nt, Artificial Sequence
  Description of Artificial Sequence: Synthetic oligonucleotide
  Sense strand starting at position 441 of SEQ ID NO: 1881478
aggccaguguuccugggaa

SEQ ID NO: 2047565 - RNA, 19 nt, Artificial Sequence
  Description of Artificial Sequence: Synthetic oligonucleotide
  Antisense strand to SEQ ID NO: 2047564
uucccaggaacacuggccu

SEQ ID NO: 2047566 - RNA, 19 nt, Artificial Sequence
  Description of Artificial Sequence: Synthetic oligonucleotide
  Sense strand starting at position 507 of SEQ ID NO: 1881478
ggaagaguccaccguuuau

SEQ ID NO: 2047567 - RNA, 19 nt, Artificial Sequence
  Description of Artificial Sequence: Synthetic oligonucleotide
  Antisense strand to SEQ ID NO: 2047566
auaaacgguggacucuucc

SEQ ID NO: 2047568 - RNA, 19 nt, Artificial Sequence
  Description of Artificial Sequence: Synthetic oligonucleotide
  Sense strand starting at position 511 of SEQ ID NO: 1881478
gaguccaccguuuauauca

SEQ ID NO: 2047569 - RNA, 19 nt, Artificial Sequence
  Description of Artificial Sequence: Synthetic oligonucleotide
  Antisense strand to SEQ ID NO: 2047568
ugauauaaacgguggacuc

SEQ ID NO: 2047570 - RNA, 19 nt, Artificial Sequence
  Description of Artificial Sequence: Synthetic oligonucleotide
  Sense strand starting at position 705 of SEQ ID NO: 1881478
ggauuccaguacucacuga

SEQ ID NO: 2047571 - RNA, 19 nt, Artificial Sequence
  Description of Artificial Sequence: Synthetic oligonucleotide
  Antisense strand to SEQ ID NO: 2047570
ucagugaguacuggaaucc

SEQ ID NO: 2047572 - RNA, 19 nt, Artificial Sequence
  Description of Artificial Sequence: Synthetic oligonucleotide
  Sense strand starting at position 746 of SEQ ID NO: 1881478
cacagagucuuguugaaug

SEQ ID NO: 2047573 - RNA, 19 nt, Artificial Sequence
  Description of Artificial Sequence: Synthetic oligonucleotide
  Antisense strand to SEQ ID NO: 2047572
cauucaacaagacucugug

SEQ ID NO: 2047574 - RNA, 19 nt, Artificial Sequence
  Description of Artificial Sequence: Synthetic oligonucleotide
  Sense strand starting at position 997 of SEQ ID NO: 1881478
agaugaaacccuggaucgu

SEQ ID NO: 2047575 - RNA, 19 nt, Artificial Sequence
  Description of Artificial Sequence: Synthetic oligonucleotide
  Antisense strand to SEQ ID NO: 2047574
acgauccaggguuucaucu

SEQ ID NO: 2047576 - RNA, 19 nt, Artificial Sequence
  Description of Artificial Sequence: Synthetic oligonucleotide
  Sense strand starting at position 2108 of SEQ ID NO: 1881478
ugcugcgugcguccagaaa

SEQ ID NO: 2047577 - RNA, 19 nt, Artificial Sequence
  Description of Artificial Sequence: Synthetic oligonucleotide
  Antisense strand to SEQ ID NO: 2047576
uuucuggacgcacgcagca

SEQ ID NO: 2047578 - RNA, 19 nt, Artificial Sequence
  Description of Artificial Sequence: Synthetic oligonucleotide
  Sense strand starting at position 2112 of SEQ ID NO: 1881478
gcgugcguccagaaaguga

SEQ ID NO: 2047579 - RNA, 19 nt, Artificial Sequence
  Description of Artificial Sequence: Synthetic oligonucleotide
  Antisense strand to SEQ ID NO: 2047578
ucacuuucuggacgcacgc

SEQ ID NO: 2047580 - RNA, 19 nt, Artificial Sequence
  Description of Artificial Sequence: Synthetic oligonucleotide
  Sense strand starting at position 2134 of SEQ ID NO: 1881478
ccggguguauauguagaaa

SEQ ID NO: 2047581 - RNA, 19 nt, Artificial Sequence
  Description of Artificial Sequence: Synthetic oligonucleotide
  Antisense strand to SEQ ID NO: 2047580
uuucuacauauacacccgg

SEQ ID NO: 2047582 - RNA, 19 nt, Artificial Sequence
  Description of Artificial Sequence: Synthetic oligonucleotide
  Sense strand starting at position 2606 of SEQ ID NO: 1881478
agcccugauuucuuaguau

SEQ ID NO: 2047583 - RNA, 19 nt, Artificial Sequence
  Description of Artificial Sequence: Synthetic oligonucleotide
  Antisense strand to SEQ ID NO: 2047582
auacuaagaaaucagggcu

SEQ ID NO: 2047584 - RNA, 19 nt, Artificial Sequence
  Description of Artificial Sequence: Synthetic oligonucleotide
  Sense strand starting at position 2610 of SEQ ID NO: 1881478
cugauuucuuaguauugaa

SEQ ID NO: 2047585 - RNA, 19 nt, Artificial Sequence
  Description of Artificial Sequence: Synthetic oligonucleotide
  Antisense strand to SEQ ID NO: 2047584
uucaauacuaagaaaucag

SEQ ID NO: 2047586 - RNA, 19 nt, Artificial Sequence
  Description of Artificial Sequence: Synthetic oligonucleotide
  Sense strand starting at position 2658 of SEQ ID NO: 1881478
guucucaaacaguaaucua

SEQ ID NO: 2047587 - RNA, 19 nt, Artificial Sequence
  Description of Artificial Sequence: Synthetic oligonucleotide
  Antisense strand to SEQ ID NO: 2047586
uagauuacuguuugagaac

SEQ ID NO: 2047588 - RNA, 19 nt, Artificial Sequence
  Description of Artificial Sequence: Synthetic oligonucleotide
  Sense strand starting at position 2777 of SEQ ID NO: 1881478
uccuauuucuuugauuugu

SEQ ID NO: 2047589 - RNA, 19 nt, Artificial Sequence
  Description of Artificial Sequence: Synthetic oligonucleotide
  Antisense strand to SEQ ID NO: 2047588
acaaaucaaagaaauagga

SEQ ID NO: 2047590 - RNA, 19 nt, Artificial Sequence
  Description of Artificial Sequence: Synthetic oligonucleotide
  Sense strand starting at position 2834 of SEQ ID NO: 1881478
gcagaaaugucuuugagau

SEQ ID NO: 2047591 - RNA, 19 nt, Artificial Sequence
  Description of Artificial Sequence: Synthetic oligonucleotide
  Antisense strand to SEQ ID NO: 2047590
aucucaaagacauuucugc

SEQ ID NO: 2047592 - RNA, 19 nt, Artificial Sequence
  Description of Artificial Sequence: Synthetic oligonucleotide
  Sense strand starting at position 2841 of SEQ ID NO: 1881478
ugucuuugagauuauguuu

SEQ ID NO: 2047593 - RNA, 19 nt, Artificial Sequence
  Description of Artificial Sequence: Synthetic oligonucleotide
  Antisense strand to SEQ ID NO: 2047592
aaacauaaucucaaagaca

SEQ ID NO: 2047594 - RNA, 19 nt, Artificial Sequence
  Description of Artificial Sequence: Synthetic oligonucleotide
  Sense strand starting at position 2844 of SEQ ID NO: 1881478
cuuugagauuauguuugau

SEQ ID NO: 2047595 - RNA, 19 nt, Artificial Sequence
  Description of Artificial Sequence: Synthetic oligonucleotide
  Antisense strand to SEQ ID NO: 2047594
aucaaacauaaucucaaag

SEQ ID NO: 2047596 - RNA, 19 nt, Artificial Sequence
  Description of Artificial Sequence: Synthetic oligonucleotide
  Sense strand starting at position 2846 of SEQ ID NO: 1881478
uugagauuauguuugauug

SEQ ID NO: 2047597 - RNA, 19 nt, Artificial Sequence
  Description of Artificial Sequence: Synthetic oligonucleotide
  Antisense strand to SEQ ID NO: 2047596
caaucaaacauaaucucaa

SEQ ID NO: 2047598 - RNA, 19 nt, Artificial Sequence
  Description of Artificial Sequence: Synthetic oligonucleotide
  Sense strand starting at position 2847 of SEQ ID NO: 1881478
ugagauuauguuugauugu

SEQ ID NO: 2047599 - RNA, 19 nt, Artificial Sequence
  Description of Artificial Sequence: Synthetic oligonucleotide
  Antisense strand to SEQ ID NO: 2047598
acaaucaaacauaaucuca

SEQ ID NO: 2047600 - RNA, 19 nt, Artificial Sequence
  Description of Artificial Sequence: Synthetic oligonucleotide
  Sense strand starting at position 2886 of SEQ ID NO: 1881478
ccaagcuugcuguaaauga

SEQ ID NO: 2047601 - RNA, 19 nt, Artificial Sequence
  Description of Artificial Sequence: Synthetic oligonucleotide
  Antisense strand to SEQ ID NO: 2047600
ucauuuacagcaagcuugg

SEQ ID NO: 2047602 - RNA, 19 nt, Artificial Sequence
  Description of Artificial Sequence: Synthetic oligonucleotide
  Sense strand starting at position 3347 of SEQ ID NO: 1881478
uuggcagcuccugaucuua

SEQ ID NO: 2047603 - RNA, 19 nt, Artificial Sequence
  Description of Artificial Sequence: Synthetic oligonucleotide
  Antisense strand to SEQ ID NO: 2047602
uaagaucaggagcugccaa

SEQ ID NO: 2047604 - RNA, 19 nt, Artificial Sequence
  Description of Artificial Sequence: Synthetic oligonucleotide
  Sense strand starting at position 3359 of SEQ ID NO: 1881478
gaucuuagccaagguagaa

SEQ ID NO: 2047605 - RNA, 19 nt, Artificial Sequence
  Description of Artificial Sequence: Synthetic oligonucleotide
  Antisense strand to SEQ ID NO: 2047604
uucuaccuuggcuaagauc

SEQ ID NO: 2047606 - RNA, 19 nt, Artificial Sequence
  Description of Artificial Sequence: Synthetic oligonucleotide
  Sense strand starting at position 3498 of SEQ ID NO: 1881478
gguuguaugucaucaauuu

SEQ ID NO: 2047607 - RNA, 19 nt, Artificial Sequence
  Description of Artificial Sequence: Synthetic oligonucleotide
  Antisense strand to SEQ ID NO: 2047606
aaauugaugacauacaacc

SEQ ID NO: 2047608 - RNA, 19 nt, Artificial Sequence
  Description of Artificial Sequence: Synthetic oligonucleotide
  Sense strand starting at position 3536 of SEQ ID NO: 1881478
ccuuaaauuguguaacuca

SEQ ID NO: 2047609 - RNA, 19 nt, Artificial Sequence
  Description of Artificial Sequence: Synthetic oligonucleotide
  Antisense strand to SEQ ID NO: 2047608
ugaguuacacaauuuaagg

SEQ ID NO: 2047610 - RNA, 19 nt, Artificial Sequence
  Description of Artificial Sequence: Synthetic oligonucleotide
  Sense strand starting at position 3543 of SEQ ID NO: 1881478
uuguguaacucacuaguaa

SEQ ID NO: 2047611 - RNA, 19 nt, Artificial Sequence
  Description of Artificial Sequence: Synthetic oligonucleotide
  Antisense strand to SEQ ID NO: 2047610
uuacuagugaguuacacaa

SEQ ID NO: 2047612 - RNA, 19 nt, Artificial Sequence
  Description of Artificial Sequence: Synthetic oligonucleotide
  Sense strand starting at position 3544 of SEQ ID NO: 1881478
uguguaacucacuaguaac

SEQ ID NO: 2047613 - RNA, 19 nt, Artificial Sequence
  Description of Artificial Sequence: Synthetic oligonucleotide
  Antisense strand to SEQ ID NO: 2047612
guuacuagugaguuacaca

SEQ ID NO: 2047614 - RNA, 19 nt, Artificial Sequence
  Description of Artificial Sequence: Synthetic oligonucleotide
  Sense strand starting at position 3652 of SEQ ID NO: 1881478
ggaucucauuugucgguca

SEQ ID NO: 2047615 - RNA, 19 nt, Artificial Sequence
  Description of Artificial Sequence: Synthetic oligonucleotide
  Antisense strand to SEQ ID NO: 2047614
ugaccgacaaaugagaucc

SEQ ID NO: 2047616 - RNA, 19 nt, Artificial Sequence
  Description of Artificial Sequence: Synthetic oligonucleotide
  Sense strand starting at position 3654 of SEQ ID NO: 1881478
aucucauuugucggucaca

SEQ ID NO: 2047617 - RNA, 19 nt, Artificial Sequence
  Description of Artificial Sequence: Synthetic oligonucleotide
  Antisense strand to SEQ ID NO: 2047616
ugugaccgacaaaugagau

SEQ ID NO: 2047618 - RNA, 19 nt, Artificial Sequence
  Description of Artificial Sequence: Synthetic oligonucleotide
  Sense strand starting at position 3655 of SEQ ID NO: 1881478
ucucauuugucggucacau

SEQ ID NO: 2047619 - RNA, 19 nt, Artificial Sequence
  Description of Artificial Sequence: Synthetic oligonucleotide
  Antisense strand to SEQ ID NO: 2047618
augugaccgacaaaugaga

SEQ ID NO: 2047620 - RNA, 19 nt, Artificial Sequence
  Description of Artificial Sequence: Synthetic oligonucleotide
  Sense strand starting at position 3679 of SEQ ID NO: 1881478
aaagauaaaugugcguuau

SEQ ID NO: 2047621 - RNA, 19 nt, Artificial Sequence
  Description of Artificial Sequence: Synthetic oligonucleotide
  Antisense strand to SEQ ID NO: 2047620
auaacgcacauuuaucuuu

SEQ ID NO: 2047622 - RNA, 19 nt, Artificial Sequence
  Description of Artificial Sequence: Synthetic oligonucleotide
  Sense strand starting at position 3685 of SEQ ID NO: 1881478
aaaugugcguuauuuaaga

SEQ ID NO: 2047623 - RNA, 19 nt, Artificial Sequence
  Description of Artificial Sequence: Synthetic oligonucleotide
  Antisense strand to SEQ ID NO: 2047622
ucuuaaauaacgcacauuu

SEQ ID NO: 2047624 - RNA, 19 nt, Artificial Sequence
  Description of Artificial Sequence: Synthetic oligonucleotide
  Sense strand starting at position 3774 of SEQ ID NO: 1881478
agauacuugccuuaucaga

SEQ ID NO: 2047625 - RNA, 19 nt, Artificial Sequence
  Description of Artificial Sequence: Synthetic oligonucleotide
  Antisense strand to SEQ ID NO: 2047624
ucugauaaggcaaguaucu

SEQ ID NO: 2047626 - RNA, 19 nt, Artificial Sequence
  Description of Artificial Sequence: Synthetic oligonucleotide
  Sense strand starting at position 3822 of SEQ ID NO: 1881478
uguugucaauuucuaguuu

SEQ ID NO: 2047627 - RNA, 19 nt, Artificial Sequence
  Description of Artificial Sequence: Synthetic oligonucleotide
  Antisense strand to SEQ ID NO: 2047626
aaacuagaaauugacaaca

SEQ ID NO: 2047628 - RNA, 19 nt, Artificial Sequence
  Description of Artificial Sequence: Synthetic oligonucleotide
  Sense strand starting at position 3886 of SEQ ID NO: 1881478
acucacacagucugauuau

SEQ ID NO: 2047629 - RNA, 19 nt, Artificial Sequence
  Description of Artificial Sequence: Synthetic oligonucleotide
  Antisense strand to SEQ ID NO: 2047628
auaaucagacugugugagu

SEQ ID NO: 2047630 - RNA, 19 nt, Artificial Sequence
  Description of Artificial Sequence: Synthetic oligonucleotide
  Sense strand starting at position 39 of SEQ ID NO: 1881479
accaguagucugcaggaaa

SEQ ID NO: 2047631 - RNA, 19 nt, Artificial Sequence
  Description of Artificial Sequence: Synthetic oligonucleotide
  Antisense strand to SEQ ID NO: 2047630
uuuccugcagacuacuggu

SEQ ID NO: 2047632 - RNA, 19 nt, Artificial Sequence
  Description of Artificial Sequence: Synthetic oligonucleotide
  Sense strand starting at position 161 of SEQ ID NO: 1881479
guuccagaccaauggucaa

SEQ ID NO: 2047633 - RNA, 19 nt, Artificial Sequence
  Description of Artificial Sequence: Synthetic oligonucleotide
  Antisense strand to SEQ ID NO: 2047632
uugaccauuggucuggaac

SEQ ID NO: 2047634 - RNA, 19 nt, Artificial Sequence
  Description of Artificial Sequence: Synthetic oligonucleotide
  Sense strand starting at position 266 of SEQ ID NO: 1881479
cgaauaaggacccgaaacu

SEQ ID NO: 2047635 - RNA, 19 nt, Artificial Sequence
  Description of Artificial Sequence: Synthetic oligonucleotide
  Antisense strand to SEQ ID NO: 2047634
aguuucggguccuuauucg

SEQ ID NO: 2047636 - RNA, 19 nt, Artificial Sequence
  Description of Artificial Sequence: Synthetic oligonucleotide
  Sense strand starting at position 390 of SEQ ID NO: 1881479
aguucuucucuuuauaugu

SEQ ID NO: 2047637 - RNA, 19 nt, Artificial Sequence
  Description of Artificial Sequence: Synthetic oligonucleotide
  Antisense strand to SEQ ID NO: 2047636
acauauaaagagaagaacu

SEQ ID NO: 2047638 - RNA, 19 nt, Artificial Sequence
  Description of Artificial Sequence: Synthetic oligonucleotide
  Sense strand starting at position 414 of SEQ ID NO: 1881479
uguuccuucccauguauuu

SEQ ID NO: 2047639 - RNA, 19 nt, Artificial Sequence
  Description of Artificial Sequence: Synthetic oligonucleotide
  Antisense strand to SEQ ID NO: 2047638
aaauacaugggaaggaaca

SEQ ID NO: 2047640 - RNA, 19 nt, Artificial Sequence
  Description of Artificial Sequence: Synthetic oligonucleotide
  Sense strand starting at position 423 of SEQ ID NO: 1881479
ccauguauuuccuugcucu

SEQ ID NO: 2047641 - RNA, 19 nt, Artificial Sequence
  Description of Artificial Sequence: Synthetic oligonucleotide
  Antisense strand to SEQ ID NO: 2047640
agagcaaggaaauacaugg

SEQ ID NO: 2047642 - RNA, 19 nt, Artificial Sequence
  Description of Artificial Sequence: Synthetic oligonucleotide
  Sense strand starting at position 617 of SEQ ID NO: 1881479
aguguauuguaucuugaug

SEQ ID NO: 2047643 - RNA, 19 nt, Artificial Sequence
  Description of Artificial Sequence: Synthetic oligonucleotide
  Antisense strand to SEQ ID NO: 2047642
caucaagauacaauacacu

SEQ ID NO: 2047644 - RNA, 19 nt, Artificial Sequence
  Description of Artificial Sequence: Synthetic oligonucleotide
  Sense strand starting at position 689 of SEQ ID NO: 1881479
ccaguuuauucuguaauac

SEQ ID NO: 2047645 - RNA, 19 nt, Artificial Sequence
  Description of Artificial Sequence: Synthetic oligonucleotide
  Antisense strand to SEQ ID NO: 2047644
guauuacagaauaaacugg

SEQ ID NO: 2047646 - RNA, 19 nt, Artificial Sequence
  Description of Artificial Sequence: Synthetic oligonucleotide
  Sense strand starting at position 698 of SEQ ID NO: 1881479
ucuguaauaccugagcaaa

SEQ ID NO: 2047647 - RNA, 19 nt, Artificial Sequence
  Description of Artificial Sequence: Synthetic oligonucleotide
  Antisense strand to SEQ ID NO: 2047646
uuugcucagguauuacaga

SEQ ID NO: 2047648 - RNA, 19 nt, Artificial Sequence
  Description of Artificial Sequence: Synthetic oligonucleotide
  Sense strand starting at position 783 of SEQ ID NO: 1881479
ggccaccaccaguaucaua

SEQ ID NO: 2047649 - RNA, 19 nt, Artificial Sequence
  Description of Artificial Sequence: Synthetic oligonucleotide
  Antisense strand to SEQ ID NO: 2047648
uaugauacuggugguggcc

SEQ ID NO: 2047650 - RNA, 19 nt, Artificial Sequence
  Description of Artificial Sequence: Synthetic oligonucleotide
  Sense strand starting at position 867 of SEQ ID NO: 1881479
uuugaaauugcugacucau

SEQ ID NO: 2047651 - RNA, 19 nt, Artificial Sequence
  Description of Artificial Sequence: Synthetic oligonucleotide
  Antisense strand to SEQ ID NO: 2047650
augagucagcaauuucaaa

SEQ ID NO: 2047652 - RNA, 19 nt, Artificial Sequence
  Description of Artificial Sequence: Synthetic oligonucleotide
  Sense strand starting at position 918 of SEQ ID NO: 1881479
agaauuaguuugguuuaga

SEQ ID NO: 2047653 - RNA, 19 nt, Artificial Sequence
  Description of Artificial Sequence: Synthetic oligonucleotide
  Antisense strand to SEQ ID NO: 2047652
ucuaaaccaaacuaauucu

SEQ ID NO: 2047654 - RNA, 19 nt, Artificial Sequence
  Description of Artificial Sequence: Synthetic oligonucleotide
  Sense strand starting at position 919 of SEQ ID NO: 1881479
gaauuaguuugguuuagac

SEQ ID NO: 2047655 - RNA, 19 nt, Artificial Sequence
  Description of Artificial Sequence: Synthetic oligonucleotide
  Antisense strand to SEQ ID NO: 2047654
gucuaaaccaaacuaauuc

SEQ ID NO: 2047656 - RNA, 19 nt, Artificial Sequence
  Description of Artificial Sequence: Synthetic oligonucleotide
  Sense strand starting at position 921 of SEQ ID NO: 1881479
auuaguuugguuuagacau

SEQ ID NO: 2047657 - RNA, 19 nt, Artificial Sequence
  Description of Artificial Sequence: Synthetic oligonucleotide
  Antisense strand to SEQ ID NO: 2047656
augucuaaaccaaacuaau

SEQ ID NO: 2047658 - RNA, 19 nt, Artificial Sequence
  Description of Artificial Sequence: Synthetic oligonucleotide
  Sense strand starting at position 941 of SEQ ID NO: 1881479
cuuugaagucaacauaguu

SEQ ID NO: 2047659 - RNA, 19 nt, Artificial Sequence
  Description of Artificial Sequence: Synthetic oligonucleotide
  Antisense strand to SEQ ID NO: 2047658
aacuauguugacuucaaag

SEQ ID NO: 2047660 - RNA, 19 nt, Artificial Sequence
  Description of Artificial Sequence: Synthetic oligonucleotide
  Sense strand starting at position 1086 of SEQ ID NO: 1881479
gugaaauucgcucguauuu

SEQ ID NO: 2047661 - RNA, 19 nt, Artificial Sequence
  Description of Artificial Sequence: Synthetic oligonucleotide
  Antisense strand to SEQ ID NO: 2047660
aaauacgagcgaauuucac

SEQ ID NO: 2047662 - RNA, 19 nt, Artificial Sequence
  Description of Artificial Sequence: Synthetic oligonucleotide
  Sense strand starting at position 1105 of SEQ ID NO: 1881479
uuuccaaguuccuucgaca

SEQ ID NO: 2047663 - RNA, 19 nt, Artificial Sequence
  Description of Artificial Sequence: Synthetic oligonucleotide
  Antisense strand to SEQ ID NO: 2047662
ugucgaaggaacuuggaaa

SEQ ID NO: 2047664 - RNA, 19 nt, Artificial Sequence
  Description of Artificial Sequence: Synthetic oligonucleotide
  Sense strand starting at position 2363 of SEQ ID NO: 1881479
auccaagucuuccugagga

SEQ ID NO: 2047665 - RNA, 19 nt, Artificial Sequence
  Description of Artificial Sequence: Synthetic oligonucleotide
  Antisense strand to SEQ ID NO: 2047664
uccucaggaagacuuggau

SEQ ID NO: 2047666 - RNA, 19 nt, Artificial Sequence
  Description of Artificial Sequence: Synthetic oligonucleotide
  Sense strand starting at position 2510 of SEQ ID NO: 1881479
ggcagcuuugugcaagaca

SEQ ID NO: 2047667 - RNA, 19 nt, Artificial Sequence
  Description of Artificial Sequence: Synthetic oligonucleotide
  Antisense strand to SEQ ID NO: 2047666
ugucuugcacaaagcugcc

SEQ ID NO: 2047668 - RNA, 19 nt, Artificial Sequence
  Description of Artificial Sequence: Synthetic oligonucleotide
  Sense strand starting at position 2513 of SEQ ID NO: 1881479
agcuuugugcaagacaguu

SEQ ID NO: 2047669 - RNA, 19 nt, Artificial Sequence
  Description of Artificial Sequence: Synthetic oligonucleotide
  Antisense strand to SEQ ID NO: 2047668
aacugucuugcacaaagcu

SEQ ID NO: 2047670 - RNA, 19 nt, Artificial Sequence
  Description of Artificial Sequence: Synthetic oligonucleotide
  Sense strand starting at position 2636 of SEQ ID NO: 1881479
gcgugagauguuguucuug

SEQ ID NO: 2047671 - RNA, 19 nt, Artificial Sequence
  Description of Artificial Sequence: Synthetic oligonucleotide
  Antisense strand to SEQ ID NO: 2047670
caagaacaacaucucacgc

SEQ ID NO: 2047672 - RNA, 19 nt, Artificial Sequence
  Description of Artificial Sequence: Synthetic oligonucleotide
  Sense strand starting at position 2681 of SEQ ID NO: 1881479
cugaguugaggcugaguga

SEQ ID NO: 2047673 - RNA, 19 nt, Artificial Sequence
  Description of Artificial Sequence: Synthetic oligonucleotide
  Antisense strand to SEQ ID NO: 2047672
ucacucagccucaacucag

SEQ ID NO: 2047674 - RNA, 19 nt, Artificial Sequence
  Description of Artificial Sequence: Synthetic oligonucleotide
  Sense strand starting at position 2682 of SEQ ID NO: 1881479
ugaguugaggcugagugau

SEQ ID NO: 2047675 - RNA, 19 nt, Artificial Sequence
  Description of Artificial Sequence: Synthetic oligonucleotide
  Antisense strand to SEQ ID NO: 2047674
aucacucagccucaacuca

SEQ ID NO: 2047676 - RNA, 19 nt, Artificial Sequence
  Description of Artificial Sequence: Synthetic oligonucleotide
  Sense strand starting at position 2688 of SEQ ID NO: 1881479
gaggcugagugauuugcau

SEQ ID NO: 2047677 - RNA, 19 nt, Artificial Sequence
  Description of Artificial Sequence: Synthetic oligonucleotide
  Antisense strand to SEQ ID NO: 2047676
augcaaaucacucagccuc

SEQ ID NO: 2047678 - RNA, 19 nt, Artificial Sequence
  Description of Artificial Sequence: Synthetic oligonucleotide
  Sense strand starting at position 2694 of SEQ ID NO: 1881479
gagugauuugcaugccaua

SEQ ID NO: 2047679 - RNA, 19 nt, Artificial Sequence
  Description of Artificial Sequence: Synthetic oligonucleotide
  Antisense strand to SEQ ID NO: 2047678
uauggcaugcaaaucacuc

SEQ ID NO: 2047680 - RNA, 19 nt, Artificial Sequence
  Description of Artificial Sequence: Synthetic oligonucleotide
  Sense strand starting at position 2954 of SEQ ID NO: 1881479
acauaaaguuccguauaau

SEQ ID NO: 2047681 - RNA, 19 nt, Artificial Sequence
  Description of Artificial Sequence: Synthetic oligonucleotide
  Antisense strand to SEQ ID NO: 2047680
auuauacggaacuuuaugu

SEQ ID NO: 2047682 - RNA, 19 nt, Artificial Sequence
  Description of Artificial Sequence: Synthetic oligonucleotide
  Sense strand starting at position 3069 of SEQ ID NO: 1881479
ugaugagaauuacaucaaa

SEQ ID NO: 2047683 - RNA, 19 nt, Artificial Sequence
  Description of Artificial Sequence: Synthetic oligonucleotide
  Antisense strand to SEQ ID NO: 2047682
uuugauguaauucucauca

SEQ ID NO: 2047684 - RNA, 19 nt, Artificial Sequence
  Description of Artificial Sequence: Synthetic oligonucleotide
  Sense strand starting at position 3387 of SEQ ID NO: 1881479
gacugauaugcauaugugu

SEQ ID NO: 2047685 - RNA, 19 nt, Artificial Sequence
  Description of Artificial Sequence: Synthetic oligonucleotide
  Antisense strand to SEQ ID NO: 2047684
acacauaugcauaucaguc

SEQ ID NO: 2047686 - RNA, 19 nt, Artificial Sequence
  Description of Artificial Sequence: Synthetic oligonucleotide
  Sense strand starting at position 3389 of SEQ ID NO: 1881479
cugauaugcauauguguga

SEQ ID NO: 2047687 - RNA, 19 nt, Artificial Sequence
  Description of Artificial Sequence: Synthetic oligonucleotide
  Antisense strand to SEQ ID NO: 2047686
ucacacauaugcauaucag

SEQ ID NO: 2047688 - RNA, 19 nt, Artificial Sequence
  Description of Artificial Sequence: Synthetic oligonucleotide
  Sense strand starting at position 3390 of SEQ ID NO: 1881479
ugauaugcauaugugugaa

SEQ ID NO: 2047689 - RNA, 19 nt, Artificial Sequence
  Description of Artificial Sequence: Synthetic oligonucleotide
  Antisense strand to SEQ ID NO: 2047688
uucacacauaugcauauca

SEQ ID NO: 2047690 - RNA, 19 nt, Artificial Sequence
  Description of Artificial Sequence: Synthetic oligonucleotide
  Sense strand starting at position 3392 of SEQ ID NO: 1881479
auaugcauaugugugaaga

SEQ ID NO: 2047691 - RNA, 19 nt, Artificial Sequence
  Description of Artificial Sequence: Synthetic oligonucleotide
  Antisense strand to SEQ ID NO: 2047690
ucuucacacauaugcauau

SEQ ID NO: 2047692 - RNA, 19 nt, Artificial Sequence
  Description of Artificial Sequence: Synthetic oligonucleotide
  Sense strand starting at position 3393 of SEQ ID NO: 1881479
uaugcauaugugugaagau

SEQ ID NO: 2047693 - RNA, 19 nt, Artificial Sequence
  Description of Artificial Sequence: Synthetic oligonucleotide
  Antisense strand to SEQ ID NO: 2047692
aucuucacacauaugcaua

SEQ ID NO: 2047694 - RNA, 19 nt, Artificial Sequence
  Description of Artificial Sequence: Synthetic oligonucleotide
  Sense strand starting at position 3478 of SEQ ID NO: 1881479
ggacuccugccauguaaac

SEQ ID NO: 2047695 - RNA, 19 nt, Artificial Sequence
  Description of Artificial Sequence: Synthetic oligonucleotide
  Antisense strand to SEQ ID NO: 2047694
guuuacauggcaggagucc

SEQ ID NO: 2047696 - RNA, 19 nt, Artificial Sequence
  Description of Artificial Sequence: Synthetic oligonucleotide
  Sense strand starting at position 3585 of SEQ ID NO: 1881479
agcagagcucaauaucaga

SEQ ID NO: 2047697 - RNA, 19 nt, Artificial Sequence
  Description of Artificial Sequence: Synthetic oligonucleotide
  Antisense strand to SEQ ID NO: 2047696
ucugauauugagcucugcu

SEQ ID NO: 2047698 - RNA, 19 nt, Artificial Sequence
  Description of Artificial Sequence: Synthetic oligonucleotide
  Sense strand starting at position 3748 of SEQ ID NO: 1881479
aucaguaucugacugcaua

SEQ ID NO: 2047699 - RNA, 19 nt, Artificial Sequence
  Description of Artificial Sequence: Synthetic oligonucleotide
  Antisense strand to SEQ ID NO: 2047698
uaugcagucagauacugau

SEQ ID NO: 2047700 - RNA, 19 nt, Artificial Sequence
  Description of Artificial Sequence: Synthetic oligonucleotide
  Sense strand starting at position 3826 of SEQ ID NO: 1881479
uaugaaauugacggaaagu

SEQ ID NO: 2047701 - RNA, 19 nt, Artificial Sequence
  Description of Artificial Sequence: Synthetic oligonucleotide
  Antisense strand to SEQ ID NO: 2047700
acuuuccgucaauuucaua

SEQ ID NO: 2047702 - RNA, 19 nt, Artificial Sequence
  Description of Artificial Sequence: Synthetic oligonucleotide
  Sense strand starting at position 3842 of SEQ ID NO: 1881479
aguuuacuuguagggugaa

SEQ ID NO: 2047703 - RNA, 19 nt, Artificial Sequence
  Description of Artificial Sequence: Synthetic oligonucleotide
  Antisense strand to SEQ ID NO: 2047702
uucacccuacaaguaaacu

SEQ ID NO: 2047704 - RNA, 19 nt, Artificial Sequence
  Description of Artificial Sequence: Synthetic oligonucleotide
  Sense strand starting at position 3845 of SEQ ID NO: 1881479
uuacuuguagggugaacuu

SEQ ID NO: 2047705 - RNA, 19 nt, Artificial Sequence
  Description of Artificial Sequence: Synthetic oligonucleotide
  Antisense strand to SEQ ID NO: 2047704
aaguucacccuacaaguaa

SEQ ID NO: 2047706 - RNA, 19 nt, Artificial Sequence
  Description of Artificial Sequence: Synthetic oligonucleotide
  Sense strand starting at position 3866 of SEQ ID NO: 1881479
ggcauaaucugaguauaua

SEQ ID NO: 2047707 - RNA, 19 nt, Artificial Sequence
  Description of Artificial Sequence: Synthetic oligonucleotide
  Antisense strand to SEQ ID NO: 2047706
uauauacucagauuaugcc

SEQ ID NO: 2047708 - RNA, 19 nt, Artificial Sequence
  Description of Artificial Sequence: Synthetic oligonucleotide
  Sense strand starting at position 3867 of SEQ ID NO: 1881479
gcauaaucugaguauauaa

SEQ ID NO: 2047709 - RNA, 19 nt, Artificial Sequence
  Description of Artificial Sequence: Synthetic oligonucleotide
  Antisense strand to SEQ ID NO: 2047708
uuauauacucagauuaugc

SEQ ID NO: 2047710 - RNA, 19 nt, Artificial Sequence
  Description of Artificial Sequence: Synthetic oligonucleotide
  Sense strand starting at position 102 of SEQ ID NO: 1881480
gauauuguugaucagcuga

SEQ ID NO: 2047711 - RNA, 19 nt, Artificial Sequence
  Description of Artificial Sequence: Synthetic oligonucleotide
  Antisense strand to SEQ ID NO: 2047710
ucagcugaucaacaauauc

SEQ ID NO: 2047712 - RNA, 19 nt, Artificial Sequence
  Description of Artificial Sequence: Synthetic oligonucleotide
  Sense strand starting at position 104 of SEQ ID NO: 1881480
uauuguugaucagcugaaa

SEQ ID NO: 2047713 - RNA, 19 nt, Artificial Sequence
  Description of Artificial Sequence: Synthetic oligonucleotide
  Antisense strand to SEQ ID NO: 2047712
uuucagcugaucaacaaua

SEQ ID NO: 2047714 - RNA, 19 nt, Artificial Sequence
  Description of Artificial Sequence: Synthetic oligonucleotide
  Sense strand starting at position 125 of SEQ ID NO: 1881480
uuaugugaaugacuuggua

SEQ ID NO: 2047715 - RNA, 19 nt, Artificial Sequence
  Description of Artificial Sequence: Synthetic oligonucleotide
  Antisense strand to SEQ ID NO: 2047714
uaccaagucauucacauaa

SEQ ID NO: 2047716 - RNA, 19 nt, Artificial Sequence
  Description of Artificial Sequence: Synthetic oligonucleotide
  Sense strand starting at position 127 of SEQ ID NO: 1881480
augugaaugacuugguaag

SEQ ID NO: 2047717 - RNA, 19 nt, Artificial Sequence
  Description of Artificial Sequence: Synthetic oligonucleotide
  Antisense strand to SEQ ID NO: 2047716
cuuaccaagucauucacau

SEQ ID NO: 2047718 - RNA, 19 nt, Artificial Sequence
  Description of Artificial Sequence: Synthetic oligonucleotide
  Sense strand starting at position 128 of SEQ ID NO: 1881480
ugugaaugacuugguaaga

SEQ ID NO: 2047719 - RNA, 19 nt, Artificial Sequence
  Description of Artificial Sequence: Synthetic oligonucleotide
  Antisense strand to SEQ ID NO: 2047718
ucuuaccaagucauucaca

SEQ ID NO: 2047720 - RNA, 19 nt, Artificial Sequence
  Description of Artificial Sequence: Synthetic oligonucleotide
  Sense strand starting at position 129 of SEQ ID NO: 1881480
gugaaugacuugguaagac

SEQ ID NO: 2047721 - RNA, 19 nt, Artificial Sequence
  Description of Artificial Sequence: Synthetic oligonucleotide
  Antisense strand to SEQ ID NO: 2047720
gucuuaccaagucauucac

SEQ ID NO: 2047722 - RNA, 19 nt, Artificial Sequence
  Description of Artificial Sequence: Synthetic oligonucleotide
  Sense strand starting at position 396 of SEQ ID NO: 1881480
cggucuaauaauugaugaa

SEQ ID NO: 2047723 - RNA, 19 nt, Artificial Sequence
  Description of Artificial Sequence: Synthetic oligonucleotide
  Antisense strand to SEQ ID NO: 2047722
uucaucaauuauuagaccg

SEQ ID NO: 2047724 - RNA, 19 nt, Artificial Sequence
  Description of Artificial Sequence: Synthetic oligonucleotide
  Sense strand starting at position 513 of SEQ ID NO: 1881480
cucuaagaguacuccuaag

SEQ ID NO: 2047725 - RNA, 19 nt, Artificial Sequence
  Description of Artificial Sequence: Synthetic oligonucleotide
  Antisense strand to SEQ ID NO: 2047724
cuuaggaguacucuuagag

SEQ ID NO: 2047726 - RNA, 19 nt, Artificial Sequence
  Description of Artificial Sequence: Synthetic oligonucleotide
  Sense strand starting at position 530 of SEQ ID NO: 1881480
aguaguauugcugagacag

SEQ ID NO: 2047727 - RNA, 19 nt, Artificial Sequence
  Description of Artificial Sequence: Synthetic oligonucleotide
  Antisense strand to SEQ ID NO: 2047726
cugucucagcaauacuacu

SEQ ID NO: 2047728 - RNA, 19 nt, Artificial Sequence
  Description of Artificial Sequence: Synthetic oligonucleotide
  Sense strand starting at position 566 of SEQ ID NO: 1881480
cgaaaucuauacucugauc

SEQ ID NO: 2047729 - RNA, 19 nt, Artificial Sequence
  Description of Artificial Sequence: Synthetic oligonucleotide
  Antisense strand to SEQ ID NO: 2047728
gaucagaguauagauuucg

SEQ ID NO: 2047730 - RNA, 19 nt, Artificial Sequence
  Description of Artificial Sequence: Synthetic oligonucleotide
  Sense strand starting at position 571 of SEQ ID NO: 1881480
ucuauacucugaucaguuu

SEQ ID NO: 2047731 - RNA, 19 nt, Artificial Sequence
  Description of Artificial Sequence: Synthetic oligonucleotide
  Antisense strand to SEQ ID NO: 2047730
aaacugaucagaguauaga

SEQ ID NO: 2047732 - RNA, 19 nt, Artificial Sequence
  Description of Artificial Sequence: Synthetic oligonucleotide
  Sense strand starting at position 578 of SEQ ID NO: 1881480
ucugaucaguuucugaaca

SEQ ID NO: 2047733 - RNA, 19 nt, Artificial Sequence
  Description of Artificial Sequence: Synthetic oligonucleotide
  Antisense strand to SEQ ID NO: 2047732
uguucagaaacugaucaga

SEQ ID NO: 2047734 - RNA, 19 nt, Artificial Sequence
  Description of Artificial Sequence: Synthetic oligonucleotide
  Sense strand starting at position 605 of SEQ ID NO: 1881480
cuaguuacucuuuaagagc

SEQ ID NO: 2047735 - RNA, 19 nt, Artificial Sequence
  Description of Artificial Sequence: Synthetic oligonucleotide
  Antisense strand to SEQ ID NO: 2047734
gcucuuaaagaguaacuag

SEQ ID NO: 2047736 - RNA, 19 nt, Artificial Sequence
  Description of Artificial Sequence: Synthetic oligonucleotide
  Sense strand starting at position 1163 of SEQ ID NO: 1881480
guaaaugacuauguguaaa

SEQ ID NO: 2047737 - RNA, 19 nt, Artificial Sequence
  Description of Artificial Sequence: Synthetic oligonucleotide
  Antisense strand to SEQ ID NO: 2047736
uuuacacauagucauuuac

SEQ ID NO: 2047738 - RNA, 19 nt, Artificial Sequence
  Description of Artificial Sequence: Synthetic oligonucleotide
  Sense strand starting at position 1185 of SEQ ID NO: 1881480
uuagaaagugaaugaguca

SEQ ID NO: 2047739 - RNA, 19 nt, Artificial Sequence
  Description of Artificial Sequence: Synthetic oligonucleotide
  Antisense strand to SEQ ID NO: 2047738
ugacucauucacuuucuaa

SEQ ID NO: 2047740 - RNA, 19 nt, Artificial Sequence
  Description of Artificial Sequence: Synthetic oligonucleotide
  Sense strand starting at position 1409 of SEQ ID NO: 1881480
aacuguuaugguuagaguu

SEQ ID NO: 2047741 - RNA, 19 nt, Artificial Sequence
  Description of Artificial Sequence: Synthetic oligonucleotide
  Antisense strand to SEQ ID NO: 2047740
aacucuaaccauaacaguu

SEQ ID NO: 2047742 - RNA, 19 nt, Artificial Sequence
  Description of Artificial Sequence: Synthetic oligonucleotide
  Sense strand starting at position 1423 of SEQ ID NO: 1881480
gaguucuuuccagaguuuc

SEQ ID NO: 2047743 - RNA, 19 nt, Artificial Sequence
  Description of Artificial Sequence: Synthetic oligonucleotide
  Antisense strand to SEQ ID NO: 2047742
gaaacucuggaaagaacuc

SEQ ID NO: 2047744 - RNA, 19 nt, Artificial Sequence
  Description of Artificial Sequence: Synthetic oligonucleotide
  Sense strand starting at position 2014 of SEQ ID NO: 1881480
guagaagccagguacuaaa

SEQ ID NO: 2047745 - RNA, 19 nt, Artificial Sequence
  Description of Artificial Sequence: Synthetic oligonucleotide
  Antisense strand to SEQ ID NO: 2047744
uuuaguaccuggcuucuac

SEQ ID NO: 2047746 - RNA, 19 nt, Artificial Sequence
  Description of Artificial Sequence: Synthetic oligonucleotide
  Sense strand starting at position 2093 of SEQ ID NO: 1881480
gguaucaccguugagaaac

SEQ ID NO: 2047747 - RNA, 19 nt, Artificial Sequence
  Description of Artificial Sequence: Synthetic oligonucleotide
  Antisense strand to SEQ ID NO: 2047746
guuucucaacggugauacc

SEQ ID NO: 2047748 - RNA, 19 nt, Artificial Sequence
  Description of Artificial Sequence: Synthetic oligonucleotide
  Sense strand starting at position 2487 of SEQ ID NO: 1881480
caagacuucuuagugugaa

SEQ ID NO: 2047749 - RNA, 19 nt, Artificial Sequence
  Description of Artificial Sequence: Synthetic oligonucleotide
  Antisense strand to SEQ ID NO: 2047748
uucacacuaagaagucuug

SEQ ID NO: 2047750 - RNA, 19 nt, Artificial Sequence
  Description of Artificial Sequence: Synthetic oligonucleotide
  Sense strand starting at position 2499 of SEQ ID NO: 1881480
gugugaauggccagggcuu

SEQ ID NO: 2047751 - RNA, 19 nt, Artificial Sequence
  Description of Artificial Sequence: Synthetic oligonucleotide
  Antisense strand to SEQ ID NO: 2047750
aagcccuggccauucacac

SEQ ID NO: 2047752 - RNA, 19 nt, Artificial Sequence
  Description of Artificial Sequence: Synthetic oligonucleotide
  Sense strand starting at position 2800 of SEQ ID NO: 1881480
agaggaaugguuuguuaau

SEQ ID NO: 2047753 - RNA, 19 nt, Artificial Sequence
  Description of Artificial Sequence: Synthetic oligonucleotide
  Antisense strand to SEQ ID NO: 2047752
auuaacaaaccauuccucu

SEQ ID NO: 2047754 - RNA, 19 nt, Artificial Sequence
  Description of Artificial Sequence: Synthetic oligonucleotide
  Sense strand starting at position 2801 of SEQ ID NO: 1881480
gaggaaugguuuguuaauu

SEQ ID NO: 2047755 - RNA, 19 nt, Artificial Sequence
  Description of Artificial Sequence: Synthetic oligonucleotide
  Antisense strand to SEQ ID NO: 2047754
aauuaacaaaccauuccuc

SEQ ID NO: 2047756 - RNA, 19 nt, Artificial Sequence
  Description of Artificial Sequence: Synthetic oligonucleotide
  Sense strand starting at position 2802 of SEQ ID NO: 1881480
aggaaugguuuguuaauuc

SEQ ID NO: 2047757 - RNA, 19 nt, Artificial Sequence
  Description of Artificial Sequence: Synthetic oligonucleotide
  Antisense strand to SEQ ID NO: 2047756
gaauuaacaaaccauuccu

SEQ ID NO: 2047758 - RNA, 19 nt, Artificial Sequence
  Description of Artificial Sequence: Synthetic oligonucleotide
  Sense strand starting at position 2885 of SEQ ID NO: 1881480
auguucucauauguuaaag

SEQ ID NO: 2047759 - RNA, 19 nt, Artificial Sequence
  Description of Artificial Sequence: Synthetic oligonucleotide
  Antisense strand to SEQ ID NO: 2047758
cuuuaacauaugagaacau

SEQ ID NO: 2047760 - RNA, 19 nt, Artificial Sequence
  Description of Artificial Sequence: Synthetic oligonucleotide
  Sense strand starting at position 2894 of SEQ ID NO: 1881480
uauguuaaagcaugaggga

SEQ ID NO: 2047761 - RNA, 19 nt, Artificial Sequence
  Description of Artificial Sequence: Synthetic oligonucleotide
  Antisense strand to SEQ ID NO: 2047760
ucccucaugcuuuaacaua

SEQ ID NO: 2047762 - RNA, 19 nt, Artificial Sequence
  Description of Artificial Sequence: Synthetic oligonucleotide
  Sense strand starting at position 3011 of SEQ ID NO: 1881480
guagacuccugagugauag

SEQ ID NO: 2047763 - RNA, 19 nt, Artificial Sequence
  Description of Artificial Sequence: Synthetic oligonucleotide
  Antisense strand to SEQ ID NO: 2047762
cuaucacucaggagucuac

SEQ ID NO: 2047764 - RNA, 19 nt, Artificial Sequence
  Description of Artificial Sequence: Synthetic oligonucleotide
  Sense strand starting at position 3042 of SEQ ID NO: 1881480
ugccuaaaucaagguuaau

SEQ ID NO: 2047765 - RNA, 19 nt, Artificial Sequence
  Description of Artificial Sequence: Synthetic oligonucleotide
  Antisense strand to SEQ ID NO: 2047764
auuaaccuugauuuaggca

SEQ ID NO: 2047766 - RNA, 19 nt, Artificial Sequence
  Description of Artificial Sequence: Synthetic oligonucleotide
  Sense strand starting at position 3137 of SEQ ID NO: 1881480
gcugccuuugaugugcaua

SEQ ID NO: 2047767 - RNA, 19 nt, Artificial Sequence
  Description of Artificial Sequence: Synthetic oligonucleotide
  Antisense strand to SEQ ID NO: 2047766
uaugcacaucaaaggcagc

SEQ ID NO: 2047768 - RNA, 19 nt, Artificial Sequence
  Description of Artificial Sequence: Synthetic oligonucleotide
  Sense strand starting at position 3142 of SEQ ID NO: 1881480
cuuugaugugcauauaaag

SEQ ID NO: 2047769 - RNA, 19 nt, Artificial Sequence
  Description of Artificial Sequence: Synthetic oligonucleotide
  Antisense strand to SEQ ID NO: 2047768
cuuuauaugcacaucaaag

SEQ ID NO: 2047770 - RNA, 19 nt, Artificial Sequence
  Description of Artificial Sequence: Synthetic oligonucleotide
  Sense strand starting at position 3169 of SEQ ID NO: 1881480
cgcaguuauuuauccugga

SEQ ID NO: 2047771 - RNA, 19 nt, Artificial Sequence
  Description of Artificial Sequence: Synthetic oligonucleotide
  Antisense strand to SEQ ID NO: 2047770
uccaggauaaauaacugcg

SEQ ID NO: 2047772 - RNA, 19 nt, Artificial Sequence
  Description of Artificial Sequence: Synthetic oligonucleotide
  Sense strand starting at position 3410 of SEQ ID NO: 1881480
cugaccauuccuggcaaua

SEQ ID NO: 2047773 - RNA, 19 nt, Artificial Sequence
  Description of Artificial Sequence: Synthetic oligonucleotide
  Antisense strand to SEQ ID NO: 2047772
uauugccaggaauggucag

SEQ ID NO: 2047774 - RNA, 19 nt, Artificial Sequence
  Description of Artificial Sequence: Synthetic oligonucleotide
  Sense strand starting at position 3426 of SEQ ID NO: 1881480
auauuaucucaagggaguu

SEQ ID NO: 2047775 - RNA, 19 nt, Artificial Sequence
  Description of Artificial Sequence: Synthetic oligonucleotide
  Antisense strand to SEQ ID NO: 2047774
aacucccuugagauaauau

SEQ ID NO: 2047776 - RNA, 19 nt, Artificial Sequence
  Description of Artificial Sequence: Synthetic oligonucleotide
  Sense strand starting at position 3523 of SEQ ID NO: 1881480
aaaugagccucugugagaa

SEQ ID NO: 2047777 - RNA, 19 nt, Artificial Sequence
  Description of Artificial Sequence: Synthetic oligonucleotide
  Antisense strand to SEQ ID NO: 2047776
uucucacagaggcucauuu

SEQ ID NO: 2047778 - RNA, 19 nt, Artificial Sequence
  Description of Artificial Sequence: Synthetic oligonucleotide
  Sense strand starting at position 3553 of SEQ ID NO: 1881480
ucagaucaucacggaugaa

SEQ ID NO: 2047779 - RNA, 19 nt, Artificial Sequence
  Description of Artificial Sequence: Synthetic oligonucleotide
  Antisense strand to SEQ ID NO: 2047778
uucauccgugaugaucuga

SEQ ID NO: 2047780 - RNA, 19 nt, Artificial Sequence
  Description of Artificial Sequence: Synthetic oligonucleotide
  Sense strand starting at position 3565 of SEQ ID NO: 1881480
ggaugaagcagucaguauu

SEQ ID NO: 2047781 - RNA, 19 nt, Artificial Sequence
  Description of Artificial Sequence: Synthetic oligonucleotide
  Antisense strand to SEQ ID NO: 2047780
aauacugacugcuucaucc

SEQ ID NO: 2047782 - RNA, 19 nt, Artificial Sequence
  Description of Artificial Sequence: Synthetic oligonucleotide
  Sense strand starting at position 3789 of SEQ ID NO: 1881480
ccaccuugcccuuaugaga

SEQ ID NO: 2047783 - RNA, 19 nt, Artificial Sequence
  Description of Artificial Sequence: Synthetic oligonucleotide
  Antisense strand to SEQ ID NO: 2047782
ucucauaagggcaaggugg

SEQ ID NO: 2047784 - RNA, 19 nt, Artificial Sequence
  Description of Artificial Sequence: Synthetic oligonucleotide
  Sense strand starting at position 3809 of SEQ ID NO: 1881480
gcaaucugccuugauauaa

SEQ ID NO: 2047785 - RNA, 19 nt, Artificial Sequence
  Description of Artificial Sequence: Synthetic oligonucleotide
  Antisense strand to SEQ ID NO: 2047784
uuauaucaaggcagauugc

SEQ ID NO: 2047786 - RNA, 19 nt, Artificial Sequence
  Description of Artificial Sequence: Synthetic oligonucleotide
  Sense strand starting at position 3894 of SEQ ID NO: 1881480
cuuagagaugcauauuauu

SEQ ID NO: 2047787 - RNA, 19 nt, Artificial Sequence
  Description of Artificial Sequence: Synthetic oligonucleotide
  Antisense strand to SEQ ID NO: 2047786
aauaauaugcaucucuaag

SEQ ID NO: 2047788 - RNA, 19 nt, Artificial Sequence
  Description of Artificial Sequence: Synthetic oligonucleotide
  Sense strand starting at position 3979 of SEQ ID NO: 1881480
gcugauuguccauaagaag

SEQ ID NO: 2047789 - RNA, 19 nt, Artificial Sequence
  Description of Artificial Sequence: Synthetic oligonucleotide
  Antisense strand to SEQ ID NO: 2047788
cuucuuauggacaaucagc

SEQ ID NO: 2047790 - RNA, 19 nt, Artificial Sequence
  Description of Artificial Sequence: Synthetic oligonucleotide
  Sense strand starting at position 20 of SEQ ID NO: 1881481
gguugagagucccucagga

SEQ ID NO: 2047791 - RNA, 19 nt, Artificial Sequence
  Description of Artificial Sequence: Synthetic oligonucleotide
  Antisense strand to SEQ ID NO: 2047790
uccugagggacucucaacc

SEQ ID NO: 2047792 - RNA, 19 nt, Artificial Sequence
  Description of Artificial Sequence: Synthetic oligonucleotide
  Sense strand starting at position 276 of SEQ ID NO: 1881481
acauuaugcaagugauggu

SEQ ID NO: 2047793 - RNA, 19 nt, Artificial Sequence
  Description of Artificial Sequence: Synthetic oligonucleotide
  Antisense strand to SEQ ID NO: 2047792
accaucacuugcauaaugu

SEQ ID NO: 2047794 - RNA, 19 nt, Artificial Sequence
  Description of Artificial Sequence: Synthetic oligonucleotide
  Sense strand starting at position 283 of SEQ ID NO: 1881481
gcaagugauggucacucua

SEQ ID NO: 2047795 - RNA, 19 nt, Artificial Sequence
  Description of Artificial Sequence: Synthetic oligonucleotide
  Antisense strand to SEQ ID NO: 2047794
uagagugaccaucacuugc

SEQ ID NO: 2047796 - RNA, 19 nt, Artificial Sequence
  Description of Artificial Sequence: Synthetic oligonucleotide
  Sense strand starting at position 285 of SEQ ID NO: 1881481
aagugauggucacucuaaa

SEQ ID NO: 2047797 - RNA, 19 nt, Artificial Sequence
  Description of Artificial Sequence: Synthetic oligonucleotide
  Antisense strand to SEQ ID NO: 2047796
uuuagagugaccaucacuu

SEQ ID NO: 2047798 - RNA, 19 nt, Artificial Sequence
  Description of Artificial Sequence: Synthetic oligonucleotide
  Sense strand starting at position 434 of SEQ ID NO: 1881481
gcuuuaucccaagguaagg

SEQ ID NO: 2047799 - RNA, 19 nt, Artificial Sequence
  Description of Artificial Sequence: Synthetic oligonucleotide
  Antisense strand to SEQ ID NO: 2047798
ccuuaccuugggauaaagc

SEQ ID NO: 2047800 - RNA, 19 nt, Artificial Sequence
  Description of Artificial Sequence: Synthetic oligonucleotide
  Sense strand starting at position 737 of SEQ ID NO: 1881481
cuauaugcugucuauggua

SEQ ID NO: 2047801 - RNA, 19 nt, Artificial Sequence
  Description of Artificial Sequence: Synthetic oligonucleotide
  Antisense strand to SEQ ID NO: 2047800
uaccauagacagcauauag

SEQ ID NO: 2047802 - RNA, 19 nt, Artificial Sequence
  Description of Artificial Sequence: Synthetic oligonucleotide
  Sense strand starting at position 938 of SEQ ID NO: 1881481
ccaauaaggucacugucaa

SEQ ID NO: 2047803 - RNA, 19 nt, Artificial Sequence
  Description of Artificial Sequence: Synthetic oligonucleotide
  Antisense strand to SEQ ID NO: 2047802
uugacagugaccuuauugg

SEQ ID NO: 2047804 - RNA, 19 nt, Artificial Sequence
  Description of Artificial Sequence: Synthetic oligonucleotide
  Sense strand starting at position 939 of SEQ ID NO: 1881481
caauaaggucacugucaag

SEQ ID NO: 2047805 - RNA, 19 nt, Artificial Sequence
  Description of Artificial Sequence: Synthetic oligonucleotide
  Antisense strand to SEQ ID NO: 2047804
cuugacagugaccuuauug

SEQ ID NO: 2047806 - RNA, 19 nt, Artificial Sequence
  Description of Artificial Sequence: Synthetic oligonucleotide
  Sense strand starting at position 945 of SEQ ID NO: 1881481
ggucacugucaagauaagu

SEQ ID NO: 2047807 - RNA, 19 nt, Artificial Sequence
  Description of Artificial Sequence: Synthetic oligonucleotide
  Antisense strand to SEQ ID NO: 2047806
acuuaucuugacagugacc

SEQ ID NO: 2047808 - RNA, 19 nt, Artificial Sequence
  Description of Artificial Sequence: Synthetic oligonucleotide
  Sense strand starting at position 1083 of SEQ ID NO: 1881481
aagcuuuguccucauugag

SEQ ID NO: 2047809 - RNA, 19 nt, Artificial Sequence
  Description of Artificial Sequence: Synthetic oligonucleotide
  Antisense strand to SEQ ID NO: 2047808
cucaaugaggacaaagcuu

SEQ ID NO: 2047810 - RNA, 19 nt, Artificial Sequence
  Description of Artificial Sequence: Synthetic oligonucleotide
  Sense strand starting at position 1288 of SEQ ID NO: 1881481
uaaauugaacuucggcaga

SEQ ID NO: 2047811 - RNA, 19 nt, Artificial Sequence
  Description of Artificial Sequence: Synthetic oligonucleotide
  Antisense strand to SEQ ID NO: 2047810
ucugccgaaguucaauuua

SEQ ID NO: 2047812 - RNA, 19 nt, Artificial Sequence
  Description of Artificial Sequence: Synthetic oligonucleotide
  Sense strand starting at position 1293 of SEQ ID NO: 1881481
ugaacuucggcagagcaaa

SEQ ID NO: 2047813 - RNA, 19 nt, Artificial Sequence
  Description of Artificial Sequence: Synthetic oligonucleotide
  Antisense strand to SEQ ID NO: 2047812
uuugcucugccgaaguuca

SEQ ID NO: 2047814 - RNA, 19 nt, Artificial Sequence
  Description of Artificial Sequence: Synthetic oligonucleotide
  Sense strand starting at position 1350 of SEQ ID NO: 1881481
guagauuuaagucgauguu

SEQ ID NO: 2047815 - RNA, 19 nt, Artificial Sequence
  Description of Artificial Sequence: Synthetic oligonucleotide
  Antisense strand to SEQ ID NO: 2047814
aacaucgacuuaaaucuac

SEQ ID NO: 2047816 - RNA, 19 nt, Artificial Sequence
  Description of Artificial Sequence: Synthetic oligonucleotide
  Sense strand starting at position 1353 of SEQ ID NO: 1881481
gauuuaagucgauguucuc

SEQ ID NO: 2047817 - RNA, 19 nt, Artificial Sequence
  Description of Artificial Sequence: Synthetic oligonucleotide
  Antisense strand to SEQ ID NO: 2047816
gagaacaucgacuuaaauc

SEQ ID NO: 2047818 - RNA, 19 nt, Artificial Sequence
  Description of Artificial Sequence: Synthetic oligonucleotide
  Sense strand starting at position 1360 of SEQ ID NO: 1881481
gucgauguucucuaacaca

SEQ ID NO: 2047819 - RNA, 19 nt, Artificial Sequence
  Description of Artificial Sequence: Synthetic oligonucleotide
  Antisense strand to SEQ ID NO: 2047818
uguguuagagaacaucgac

SEQ ID NO: 2047820 - RNA, 19 nt, Artificial Sequence
  Description of Artificial Sequence: Synthetic oligonucleotide
  Sense strand starting at position 1730 of SEQ ID NO: 1881481
gaaucaggucauuguuacu

SEQ ID NO: 2047821 - RNA, 19 nt, Artificial Sequence
  Description of Artificial Sequence: Synthetic oligonucleotide
  Antisense strand to SEQ ID NO: 2047820
aguaacaaugaccugauuc

SEQ ID NO: 2047822 - RNA, 19 nt, Artificial Sequence
  Description of Artificial Sequence: Synthetic oligonucleotide
  Sense strand starting at position 1737 of SEQ ID NO: 1881481
gucauuguuacuuaaguga

SEQ ID NO: 2047823 - RNA, 19 nt, Artificial Sequence
  Description of Artificial Sequence: Synthetic oligonucleotide
  Antisense strand to SEQ ID NO: 2047822
ucacuuaaguaacaaugac

SEQ ID NO: 2047824 - RNA, 19 nt, Artificial Sequence
  Description of Artificial Sequence: Synthetic oligonucleotide
  Sense strand starting at position 1751 of SEQ ID NO: 1881481
agugauaaguaccuuagag

SEQ ID NO: 2047825 - RNA, 19 nt, Artificial Sequence
  Description of Artificial Sequence: Synthetic oligonucleotide
  Antisense strand to SEQ ID NO: 2047824
cucuaagguacuuaucacu

SEQ ID NO: 2047826 - RNA, 19 nt, Artificial Sequence
  Description of Artificial Sequence: Synthetic oligonucleotide
  Sense strand starting at position 1791 of SEQ ID NO: 1881481
acagaucccuuguugaaga

SEQ ID NO: 2047827 - RNA, 19 nt, Artificial Sequence
  Description of Artificial Sequence: Synthetic oligonucleotide
  Antisense strand to SEQ ID NO: 2047826
ucuucaacaagggaucugu

SEQ ID NO: 2047828 - RNA, 19 nt, Artificial Sequence
  Description of Artificial Sequence: Synthetic oligonucleotide
  Sense strand starting at position 1869 of SEQ ID NO: 1881481
uaguaagauugaccagguu

SEQ ID NO: 2047829 - RNA, 19 nt, Artificial Sequence
  Description of Artificial Sequence: Synthetic oligonucleotide
  Antisense strand to SEQ ID NO: 2047828
aaccuggucaaucuuacua

SEQ ID NO: 2047830 - RNA, 19 nt, Artificial Sequence
  Description of Artificial Sequence: Synthetic oligonucleotide
  Sense strand starting at position 1872 of SEQ ID NO: 1881481
uaagauugaccagguuucu

SEQ ID NO: 2047831 - RNA, 19 nt, Artificial Sequence
  Description of Artificial Sequence: Synthetic oligonucleotide
  Antisense strand to SEQ ID NO: 2047830
agaaaccuggucaaucuua

SEQ ID NO: 2047832 - RNA, 19 nt, Artificial Sequence
  Description of Artificial Sequence: Synthetic oligonucleotide
  Sense strand starting at position 1938 of SEQ ID NO: 1881481
cuuaaauccugagucuuga

SEQ ID NO: 2047833 - RNA, 19 nt, Artificial Sequence
  Description of Artificial Sequence: Synthetic oligonucleotide
  Antisense strand to SEQ ID NO: 2047832
ucaagacucaggauuuaag

SEQ ID NO: 2047834 - RNA, 19 nt, Artificial Sequence
  Description of Artificial Sequence: Synthetic oligonucleotide
  Sense strand starting at position 1949 of SEQ ID NO: 1881481
agucuugauugccuaauuu

SEQ ID NO: 2047835 - RNA, 19 nt, Artificial Sequence
  Description of Artificial Sequence: Synthetic oligonucleotide
  Antisense strand to SEQ ID NO: 2047834
aaauuaggcaaucaagacu

SEQ ID NO: 2047836 - RNA, 19 nt, Artificial Sequence
  Description of Artificial Sequence: Synthetic oligonucleotide
  Sense strand starting at position 2150 of SEQ ID NO: 1881481
cggucugggaaaugaaaga

SEQ ID NO: 2047837 - RNA, 19 nt, Artificial Sequence
  Description of Artificial Sequence: Synthetic oligonucleotide
  Antisense strand to SEQ ID NO: 2047836
ucuuucauuucccagaccg

SEQ ID NO: 2047838 - RNA, 19 nt, Artificial Sequence
  Description of Artificial Sequence: Synthetic oligonucleotide
  Sense strand starting at position 2207 of SEQ ID NO: 1881481
cugauugaccuuugaauaa

SEQ ID NO: 2047839 - RNA, 19 nt, Artificial Sequence
  Description of Artificial Sequence: Synthetic oligonucleotide
  Antisense strand to SEQ ID NO: 2047838
uuauucaaaggucaaucag

SEQ ID NO: 2047840 - RNA, 19 nt, Artificial Sequence
  Description of Artificial Sequence: Synthetic oligonucleotide
  Sense strand starting at position 2308 of SEQ ID NO: 1881481
agaaaucaguguuuccaug

SEQ ID NO: 2047841 - RNA, 19 nt, Artificial Sequence
  Description of Artificial Sequence: Synthetic oligonucleotide
  Antisense strand to SEQ ID NO: 2047840
cauggaaacacugauuucu

SEQ ID NO: 2047842 - RNA, 19 nt, Artificial Sequence
  Description of Artificial Sequence: Synthetic oligonucleotide
  Sense strand starting at position 2422 of SEQ ID NO: 1881481
acacaugaauuggaaggau

SEQ ID NO: 2047843 - RNA, 19 nt, Artificial Sequence
  Description of Artificial Sequence: Synthetic oligonucleotide
  Antisense strand to SEQ ID NO: 2047842
auccuuccaauucaugugu

SEQ ID NO: 2047844 - RNA, 19 nt, Artificial Sequence
  Description of Artificial Sequence: Synthetic oligonucleotide
  Sense strand starting at position 2548 of SEQ ID NO: 1881481
aagcuaucugucuagggua

SEQ ID NO: 2047845 - RNA, 19 nt, Artificial Sequence
  Description of Artificial Sequence: Synthetic oligonucleotide
  Antisense strand to SEQ ID NO: 2047844
uacccuagacagauagcuu

SEQ ID NO: 2047846 - RNA, 19 nt, Artificial Sequence
  Description of Artificial Sequence: Synthetic oligonucleotide
  Sense strand starting at position 2579 of SEQ ID NO: 1881481
caagguuaagcaugaagau

SEQ ID NO: 2047847 - RNA, 19 nt, Artificial Sequence
  Description of Artificial Sequence: Synthetic oligonucleotide
  Antisense strand to SEQ ID NO: 2047846
aucuucaugcuuaaccuug

SEQ ID NO: 2047848 - RNA, 19 nt, Artificial Sequence
  Description of Artificial Sequence: Synthetic oligonucleotide
  Sense strand starting at position 3206 of SEQ ID NO: 1881481
auauuaauugcagagcaga

SEQ ID NO: 2047849 - RNA, 19 nt, Artificial Sequence
  Description of Artificial Sequence: Synthetic oligonucleotide
  Antisense strand to SEQ ID NO: 2047848
ucugcucugcaauuaauau

SEQ ID NO: 2047850 - RNA, 19 nt, Artificial Sequence
  Description of Artificial Sequence: Synthetic oligonucleotide
  Sense strand starting at position 3334 of SEQ ID NO: 1881481
caguguacaggugaagaau

SEQ ID NO: 2047851 - RNA, 19 nt, Artificial Sequence
  Description of Artificial Sequence: Synthetic oligonucleotide
  Antisense strand to SEQ ID NO: 2047850
auucuucaccuguacacug

SEQ ID NO: 2047852 - RNA, 19 nt, Artificial Sequence
  Description of Artificial Sequence: Synthetic oligonucleotide
  Sense strand starting at position 3352 of SEQ ID NO: 1881481
ugacaaaggcauugccuau

SEQ ID NO: 2047853 - RNA, 19 nt, Artificial Sequence
  Description of Artificial Sequence: Synthetic oligonucleotide
  Antisense strand to SEQ ID NO: 2047852
auaggcaaugccuuuguca

SEQ ID NO: 2047854 - RNA, 19 nt, Artificial Sequence
  Description of Artificial Sequence: Synthetic oligonucleotide
  Sense strand starting at position 3409 of SEQ ID NO: 1881481
gauaauugucugggcucua

SEQ ID NO: 2047855 - RNA, 19 nt, Artificial Sequence
  Description of Artificial Sequence: Synthetic oligonucleotide
  Antisense strand to SEQ ID NO: 2047854
uagagcccagacaauuauc

SEQ ID NO: 2047856 - RNA, 19 nt, Artificial Sequence
  Description of Artificial Sequence: Synthetic oligonucleotide
  Sense strand starting at position 3475 of SEQ ID NO: 1881481
accagucaucucuaauguu

SEQ ID NO: 2047857 - RNA, 19 nt, Artificial Sequence
  Description of Artificial Sequence: Synthetic oligonucleotide
  Antisense strand to SEQ ID NO: 2047856
aacauuagagaugacuggu

SEQ ID NO: 2047858 - RNA, 19 nt, Artificial Sequence
  Description of Artificial Sequence: Synthetic oligonucleotide
  Sense strand starting at position 3487 of SEQ ID NO: 1881481
uaauguuugcuagaauuga

SEQ ID NO: 2047859 - RNA, 19 nt, Artificial Sequence
  Description of Artificial Sequence: Synthetic oligonucleotide
  Antisense strand to SEQ ID NO: 2047858
ucaauucuagcaaacauua

SEQ ID NO: 2047860 - RNA, 19 nt, Artificial Sequence
  Description of Artificial Sequence: Synthetic oligonucleotide
  Sense strand starting at position 3513 of SEQ ID NO: 1881481
accauauucuaagcgauug

SEQ ID NO: 2047861 - RNA, 19 nt, Artificial Sequence
  Description of Artificial Sequence: Synthetic oligonucleotide
  Antisense strand to SEQ ID NO: 2047860
caaucgcuuagaauauggu

SEQ ID NO: 2047862 - RNA, 19 nt, Artificial Sequence
  Description of Artificial Sequence: Synthetic oligonucleotide
  Sense strand starting at position 3628 of SEQ ID NO: 1881481
gcucacccucucuaagagu

SEQ ID NO: 2047863 - RNA, 19 nt, Artificial Sequence
  Description of Artificial Sequence: Synthetic oligonucleotide
  Antisense strand to SEQ ID NO: 2047862
acucuuagagagggugagc

SEQ ID NO: 2047864 - RNA, 19 nt, Artificial Sequence
  Description of Artificial Sequence: Synthetic oligonucleotide
  Sense strand starting at position 3759 of SEQ ID NO: 1881481
aucugacaguuuccaauga

SEQ ID NO: 2047865 - RNA, 19 nt, Artificial Sequence
  Description of Artificial Sequence: Synthetic oligonucleotide
  Antisense strand to SEQ ID NO: 2047864
ucauuggaaacugucagau

SEQ ID NO: 2047866 - RNA, 19 nt, Artificial Sequence
  Description of Artificial Sequence: Synthetic oligonucleotide
  Sense strand starting at position 3787 of SEQ ID NO: 1881481
aauggaaauggcuguugau

SEQ ID NO: 2047867 - RNA, 19 nt, Artificial Sequence
  Description of Artificial Sequence: Synthetic oligonucleotide
  Antisense strand to SEQ ID NO: 2047866
aucaacagccauuuccauu

SEQ ID NO: 2047868 - RNA, 19 nt, Artificial Sequence
  Description of Artificial Sequence: Synthetic oligonucleotide
  Sense strand starting at position 3981 of SEQ ID NO: 1881481
guaucaagcuaacucagaa

SEQ ID NO: 2047869 - RNA, 19 nt, Artificial Sequence
  Description of Artificial Sequence: Synthetic oligonucleotide
  Antisense strand to SEQ ID NO: 2047868
uucugaguuagcuugauac

SEQ ID NO: 2047870 - RNA, 19 nt, Artificial Sequence
  Description of Artificial Sequence: Synthetic oligonucleotide
  Sense strand starting at position 59 of SEQ ID NO: 1881482
gagguuaccgaguacuaau

SEQ ID NO: 2047871 - RNA, 19 nt, Artificial Sequence
  Description of Artificial Sequence: Synthetic oligonucleotide
  Antisense strand to SEQ ID NO: 2047870
auuaguacucgguaaccuc

SEQ ID NO: 2047872 - RNA, 19 nt, Artificial Sequence
  Description of Artificial Sequence: Synthetic oligonucleotide
  Sense strand starting at position 79 of SEQ ID NO: 1881482
uuacaauacuguguagcua

SEQ ID NO: 2047873 - RNA, 19 nt, Artificial Sequence
  Description of Artificial Sequence: Synthetic oligonucleotide
  Antisense strand to SEQ ID NO: 2047872
uagcuacacaguauuguaa

SEQ ID NO: 2047874 - RNA, 19 nt, Artificial Sequence
  Description of Artificial Sequence: Synthetic oligonucleotide
  Sense strand starting at position 103 of SEQ ID NO: 1881482
agcggcucgaaauauacua

SEQ ID NO: 2047875 - RNA, 19 nt, Artificial Sequence
  Description of Artificial Sequence: Synthetic oligonucleotide
  Antisense strand to SEQ ID NO: 2047874
uaguauauuucgagccgcu

SEQ ID NO: 2047876 - RNA, 19 nt, Artificial Sequence
  Description of Artificial Sequence: Synthetic oligonucleotide
  Sense strand starting at position 105 of SEQ ID NO: 1881482
cggcucgaaauauacuauu

SEQ ID NO: 2047877 - RNA, 19 nt, Artificial Sequence
  Description of Artificial Sequence: Synthetic oligonucleotide
  Antisense strand to SEQ ID NO: 2047876
aauaguauauuucgagccg

SEQ ID NO: 2047878 - RNA, 19 nt, Artificial Sequence
  Description of Artificial Sequence: Synthetic oligonucleotide
  Sense strand starting at position 116 of SEQ ID NO: 1881482
auacuauuaucacuccguu

SEQ ID NO: 2047879 - RNA, 19 nt, Artificial Sequence
  Description of Artificial Sequence: Synthetic oligonucleotide
  Antisense strand to SEQ ID NO: 2047878
aacggagugauaauaguau

SEQ ID NO: 2047880 - RNA, 19 nt, Artificial Sequence
  Description of Artificial Sequence: Synthetic oligonucleotide
  Sense strand starting at position 142 of SEQ ID NO: 1881482
gcacgaugucuggaugaag

SEQ ID NO: 2047881 - RNA, 19 nt, Artificial Sequence
  Description of Artificial Sequence: Synthetic oligonucleotide
  Antisense strand to SEQ ID NO: 2047880
cuucauccagacaucgugc

SEQ ID NO: 2047882 - RNA, 19 nt, Artificial Sequence
  Description of Artificial Sequence: Synthetic oligonucleotide
  Sense strand starting at position 145 of SEQ ID NO: 1881482
cgaugucuggaugaagcau

SEQ ID NO: 2047883 - RNA, 19 nt, Artificial Sequence
  Description of Artificial Sequence: Synthetic oligonucleotide
  Antisense strand to SEQ ID NO: 2047882
augcuucauccagacaucg

SEQ ID NO: 2047884 - RNA, 19 nt, Artificial Sequence
  Description of Artificial Sequence: Synthetic oligonucleotide
  Sense strand starting at position 472 of SEQ ID NO: 1881482
cuagaagcgacuugaaaug

SEQ ID NO: 2047885 - RNA, 19 nt, Artificial Sequence
  Description of Artificial Sequence: Synthetic oligonucleotide
  Antisense strand to SEQ ID NO: 2047884
cauuucaagucgcuucuag

SEQ ID NO: 2047886 - RNA, 19 nt, Artificial Sequence
  Description of Artificial Sequence: Synthetic oligonucleotide
  Sense strand starting at position 534 of SEQ ID NO: 1881482
gaccaaaguuugccaaguu

SEQ ID NO: 2047887 - RNA, 19 nt, Artificial Sequence
  Description of Artificial Sequence: Synthetic oligonucleotide
  Antisense strand to SEQ ID NO: 2047886
aacuuggcaaacuuugguc

SEQ ID NO: 2047888 - RNA, 19 nt, Artificial Sequence
  Description of Artificial Sequence: Synthetic oligonucleotide
  Sense strand starting at position 1303 of SEQ ID NO: 1881482
gggaauaaugagugucugu

SEQ ID NO: 2047889 - RNA, 19 nt, Artificial Sequence
  Description of Artificial Sequence: Synthetic oligonucleotide
  Antisense strand to SEQ ID NO: 2047888
acagacacucauuauuccc

SEQ ID NO: 2047890 - RNA, 19 nt, Artificial Sequence
  Description of Artificial Sequence: Synthetic oligonucleotide
  Sense strand starting at position 2194 of SEQ ID NO: 1881482
gcucacgauucccuccaaa

SEQ ID NO: 2047891 - RNA, 19 nt, Artificial Sequence
  Description of Artificial Sequence: Synthetic oligonucleotide
  Antisense strand to SEQ ID NO: 2047890
uuuggagggaaucgugagc

SEQ ID NO: 2047892 - RNA, 19 nt, Artificial Sequence
  Description of Artificial Sequence: Synthetic oligonucleotide
  Sense strand starting at position 2739 of SEQ ID NO: 1881482
ggcuuucuuagagauggca

SEQ ID NO: 2047893 - RNA, 19 nt, Artificial Sequence
  Description of Artificial Sequence: Synthetic oligonucleotide
  Antisense strand to SEQ ID NO: 2047892
ugccaucucuaagaaagcc

SEQ ID NO: 2047894 - RNA, 19 nt, Artificial Sequence
  Description of Artificial Sequence: Synthetic oligonucleotide
  Sense strand starting at position 2741 of SEQ ID NO: 1881482
cuuucuuagagauggcaga

SEQ ID NO: 2047895 - RNA, 19 nt, Artificial Sequence
  Description of Artificial Sequence: Synthetic oligonucleotide
  Antisense strand to SEQ ID NO: 2047894
ucugccaucucuaagaaag

SEQ ID NO: 2047896 - RNA, 19 nt, Artificial Sequence
  Description of Artificial Sequence: Synthetic oligonucleotide
  Sense strand starting at position 2742 of SEQ ID NO: 1881482
uuucuuagagauggcagau

SEQ ID NO: 2047897 - RNA, 19 nt, Artificial Sequence
  Description of Artificial Sequence: Synthetic oligonucleotide
  Antisense strand to SEQ ID NO: 2047896
aucugccaucucuaagaaa

SEQ ID NO: 2047898 - RNA, 19 nt, Artificial Sequence
  Description of Artificial Sequence: Synthetic oligonucleotide
  Sense strand starting at position 2755 of SEQ ID NO: 1881482
gcagaugagaucuggaauu

SEQ ID NO: 2047899 - RNA, 19 nt, Artificial Sequence
  Description of Artificial Sequence: Synthetic oligonucleotide
  Antisense strand to SEQ ID NO: 2047898
aauuccagaucucaucugc

SEQ ID NO: 2047900 - RNA, 19 nt, Artificial Sequence
  Description of Artificial Sequence: Synthetic oligonucleotide
  Sense strand starting at position 2891 of SEQ ID NO: 1881482
agucaaguuaaacggaaau

SEQ ID NO: 2047901 - RNA, 19 nt, Artificial Sequence
  Description of Artificial Sequence: Synthetic oligonucleotide
  Antisense strand to SEQ ID NO: 2047900
auuuccguuuaacuugacu

SEQ ID NO: 2047902 - RNA, 19 nt, Artificial Sequence
  Description of Artificial Sequence: Synthetic oligonucleotide
  Sense strand starting at position 2908 of SEQ ID NO: 1881482
auuggaaauugcucaccuu

SEQ ID NO: 2047903 - RNA, 19 nt, Artificial Sequence
  Description of Artificial Sequence: Synthetic oligonucleotide
  Antisense strand to SEQ ID NO: 2047902
aaggugagcaauuuccaau

SEQ ID NO: 2047904 - RNA, 19 nt, Artificial Sequence
  Description of Artificial Sequence: Synthetic oligonucleotide
  Sense strand starting at position 2911 of SEQ ID NO: 1881482
ggaaauugcucaccuucuu

SEQ ID NO: 2047905 - RNA, 19 nt, Artificial Sequence
  Description of Artificial Sequence: Synthetic oligonucleotide
  Antisense strand to SEQ ID NO: 2047904
aagaaggugagcaauuucc

SEQ ID NO: 2047906 - RNA, 19 nt, Artificial Sequence
  Description of Artificial Sequence: Synthetic oligonucleotide
  Sense strand starting at position 3036 of SEQ ID NO: 1881482
cucacaagagucugguaua

SEQ ID NO: 2047907 - RNA, 19 nt, Artificial Sequence
  Description of Artificial Sequence: Synthetic oligonucleotide
  Antisense strand to SEQ ID NO: 2047906
uauaccagacucuugugag

SEQ ID NO: 2047908 - RNA, 19 nt, Artificial Sequence
  Description of Artificial Sequence: Synthetic oligonucleotide
  Sense strand starting at position 3043 of SEQ ID NO: 1881482
gagucugguauaugggaaa

SEQ ID NO: 2047909 - RNA, 19 nt, Artificial Sequence
  Description of Artificial Sequence: Synthetic oligonucleotide
  Antisense strand to SEQ ID NO: 2047908
uuucccauauaccagacuc

SEQ ID NO: 2047910 - RNA, 19 nt, Artificial Sequence
  Description of Artificial Sequence: Synthetic oligonucleotide
  Sense strand starting at position 3078 of SEQ ID NO: 1881482
ucugacaaguaccugaaau

SEQ ID NO: 2047911 - RNA, 19 nt, Artificial Sequence
  Description of Artificial Sequence: Synthetic oligonucleotide
  Antisense strand to SEQ ID NO: 2047910
auuucagguacuugucaga

SEQ ID NO: 2047912 - RNA, 19 nt, Artificial Sequence
  Description of Artificial Sequence: Synthetic oligonucleotide
  Sense strand starting at position 3306 of SEQ ID NO: 1881482
uaguaauaguguuuaagga

SEQ ID NO: 2047913 - RNA, 19 nt, Artificial Sequence
  Description of Artificial Sequence: Synthetic oligonucleotide
  Antisense strand to SEQ ID NO: 2047912
uccuuaaacacuauuacua

SEQ ID NO: 2047914 - RNA, 19 nt, Artificial Sequence
  Description of Artificial Sequence: Synthetic oligonucleotide
  Sense strand starting at position 3320 of SEQ ID NO: 1881482
aaggaaaguguccacgagu

SEQ ID NO: 2047915 - RNA, 19 nt, Artificial Sequence
  Description of Artificial Sequence: Synthetic oligonucleotide
  Antisense strand to SEQ ID NO: 2047914
acucguggacacuuuccuu

SEQ ID NO: 2047916 - RNA, 19 nt, Artificial Sequence
  Description of Artificial Sequence: Synthetic oligonucleotide
  Sense strand starting at position 3323 of SEQ ID NO: 1881482
gaaaguguccacgagugau

SEQ ID NO: 2047917 - RNA, 19 nt, Artificial Sequence
  Description of Artificial Sequence: Synthetic oligonucleotide
  Antisense strand to SEQ ID NO: 2047916
aucacucguggacacuuuc

SEQ ID NO: 2047918 - RNA, 19 nt, Artificial Sequence
  Description of Artificial Sequence: Synthetic oligonucleotide
  Sense strand starting at position 3333 of SEQ ID NO: 1881482
acgagugauuucuucuggu

SEQ ID NO: 2047919 - RNA, 19 nt, Artificial Sequence
  Description of Artificial Sequence: Synthetic oligonucleotide
  Antisense strand to SEQ ID NO: 2047918
accagaagaaaucacucgu

SEQ ID NO: 2047920 - RNA, 19 nt, Artificial Sequence
  Description of Artificial Sequence: Synthetic oligonucleotide
  Sense strand starting at position 3359 of SEQ ID NO: 1881482
gagguauguuaguugaccu

SEQ ID NO: 2047921 - RNA, 19 nt, Artificial Sequence
  Description of Artificial Sequence: Synthetic oligonucleotide
  Antisense strand to SEQ ID NO: 2047920
aggucaacuaacauaccuc

SEQ ID NO: 2047922 - RNA, 19 nt, Artificial Sequence
  Description of Artificial Sequence: Synthetic oligonucleotide
  Sense strand starting at position 3360 of SEQ ID NO: 1881482
agguauguuaguugaccuu

SEQ ID NO: 2047923 - RNA, 19 nt, Artificial Sequence
  Description of Artificial Sequence: Synthetic oligonucleotide
  Antisense strand to SEQ ID NO: 2047922
aaggucaacuaacauaccu

SEQ ID NO: 2047924 - RNA, 19 nt, Artificial Sequence
  Description of Artificial Sequence: Synthetic oligonucleotide
  Sense strand starting at position 3371 of SEQ ID NO: 1881482
uugaccuuaggcuguuaau

SEQ ID NO: 2047925 - RNA, 19 nt, Artificial Sequence
  Description of Artificial Sequence: Synthetic oligonucleotide
  Antisense strand to SEQ ID NO: 2047924
auuaacagccuaaggucaa

SEQ ID NO: 2047926 - RNA, 19 nt, Artificial Sequence
  Description of Artificial Sequence: Synthetic oligonucleotide
  Sense strand starting at position 3395 of SEQ ID NO: 1881482
ccugaaauuagauguucga

SEQ ID NO: 2047927 - RNA, 19 nt, Artificial Sequence
  Description of Artificial Sequence: Synthetic oligonucleotide
  Antisense strand to SEQ ID NO: 2047926
ucgaacaucuaauuucagg

SEQ ID NO: 2047928 - RNA, 19 nt, Artificial Sequence
  Description of Artificial Sequence: Synthetic oligonucleotide
  Sense strand starting at position 3398 of SEQ ID NO: 1881482
gaaauuagauguucgauua

SEQ ID NO: 2047929 - RNA, 19 nt, Artificial Sequence
  Description of Artificial Sequence: Synthetic oligonucleotide
  Antisense strand to SEQ ID NO: 2047928
uaaucgaacaucuaauuuc

SEQ ID NO: 2047930 - RNA, 19 nt, Artificial Sequence
  Description of Artificial Sequence: Synthetic oligonucleotide
  Sense strand starting at position 3464 of SEQ ID NO: 1881482
ggcuuugcugcagaacuau

SEQ ID NO: 2047931 - RNA, 19 nt, Artificial Sequence
  Description of Artificial Sequence: Synthetic oligonucleotide
  Antisense strand to SEQ ID NO: 2047930
auaguucugcagcaaagcc

SEQ ID NO: 2047932 - RNA, 19 nt, Artificial Sequence
  Description of Artificial Sequence: Synthetic oligonucleotide
  Sense strand starting at position 3504 of SEQ ID NO: 1881482
auguacuaucgguaaguuc

SEQ ID NO: 2047933 - RNA, 19 nt, Artificial Sequence
  Description of Artificial Sequence: Synthetic oligonucleotide
  Antisense strand to SEQ ID NO: 2047932
gaacuuaccgauaguacau

SEQ ID NO: 2047934 - RNA, 19 nt, Artificial Sequence
  Description of Artificial Sequence: Synthetic oligonucleotide
  Sense strand starting at position 3513 of SEQ ID NO: 1881482
cgguaaguucaaugaugau

SEQ ID NO: 2047935 - RNA, 19 nt, Artificial Sequence
  Description of Artificial Sequence: Synthetic oligonucleotide
  Antisense strand to SEQ ID NO: 2047934
aucaucauugaacuuaccg

SEQ ID NO: 2047936 - RNA, 19 nt, Artificial Sequence
  Description of Artificial Sequence: Synthetic oligonucleotide
  Sense strand starting at position 3719 of SEQ ID NO: 1881482
uugcuaugggcacagugau

SEQ ID NO: 2047937 - RNA, 19 nt, Artificial Sequence
  Description of Artificial Sequence: Synthetic oligonucleotide
  Antisense strand to SEQ ID NO: 2047936
aucacugugcccauagcaa

SEQ ID NO: 2047938 - RNA, 19 nt, Artificial Sequence
  Description of Artificial Sequence: Synthetic oligonucleotide
  Sense strand starting at position 3818 of SEQ ID NO: 1881482
uaacguaagcuugaguuaa

SEQ ID NO: 2047939 - RNA, 19 nt, Artificial Sequence
  Description of Artificial Sequence: Synthetic oligonucleotide
  Antisense strand to SEQ ID NO: 2047938
uuaacucaagcuuacguua

SEQ ID NO: 2047940 - RNA, 19 nt, Artificial Sequence
  Description of Artificial Sequence: Synthetic oligonucleotide
  Sense strand starting at position 3822 of SEQ ID NO: 1881482
guaagcuugaguuaaacag

SEQ ID NO: 2047941 - RNA, 19 nt, Artificial Sequence
  Description of Artificial Sequence: Synthetic oligonucleotide
  Antisense strand to SEQ ID NO: 2047940
cuguuuaacucaagcuuac

SEQ ID NO: 2047942 - RNA, 19 nt, Artificial Sequence
  Description of Artificial Sequence: Synthetic oligonucleotide
  Sense strand starting at position 3860 of SEQ ID NO: 1881482
gagaaauaaugggaaagga

SEQ ID NO: 2047943 - RNA, 19 nt, Artificial Sequence
  Description of Artificial Sequence: Synthetic oligonucleotide
  Antisense strand to SEQ ID NO: 2047942
uccuuucccauuauuucuc

SEQ ID NO: 2047944 - RNA, 19 nt, Artificial Sequence
  Description of Artificial Sequence: Synthetic oligonucleotide
  Sense strand starting at position 3948 of SEQ ID NO: 1881482
aaauuaguacucuggugua

SEQ ID NO: 2047945 - RNA, 19 nt, Artificial Sequence
  Description of Artificial Sequence: Synthetic oligonucleotide
  Antisense strand to SEQ ID NO: 2047944
uacaccagaguacuaauuu

SEQ ID NO: 2047946 - RNA, 19 nt, Artificial Sequence
  Description of Artificial Sequence: Synthetic oligonucleotide
  Sense strand starting at position 3953 of SEQ ID NO: 1881482
aguacucugguguacagau

SEQ ID NO: 2047947 - RNA, 19 nt, Artificial Sequence
  Description of Artificial Sequence: Synthetic oligonucleotide
  Antisense strand to SEQ ID NO: 2047946
aucuguacaccagaguacu

SEQ ID NO: 2047948 - RNA, 19 nt, Artificial Sequence
  Description of Artificial Sequence: Synthetic oligonucleotide
  Sense strand starting at position 3960 of SEQ ID NO: 1881482
ugguguacagauugcauaa

SEQ ID NO: 2047949 - RNA, 19 nt, Artificial Sequence
  Description of Artificial Sequence: Synthetic oligonucleotide
  Antisense strand to SEQ ID NO: 2047948
uuaugcaaucuguacacca

SEQ ID NO: 2047950 - RNA, 19 nt, Artificial Sequence
  Description of Artificial Sequence: Synthetic oligonucleotide
  Sense strand starting at position 85 of SEQ ID NO: 1881483
gaagcuaagugcucauaug

SEQ ID NO: 2047951 - RNA, 19 nt, Artificial Sequence
  Description of Artificial Sequence: Synthetic oligonucleotide
  Antisense strand to SEQ ID NO: 2047950
cauaugagcacuuagcuuc

SEQ ID NO: 2047952 - RNA, 19 nt, Artificial Sequence
  Description of Artificial Sequence: Synthetic oligonucleotide
  Sense strand starting at position 86 of SEQ ID NO: 1881483
aagcuaagugcucauaugu

SEQ ID NO: 2047953 - RNA, 19 nt, Artificial Sequence
  Description of Artificial Sequence: Synthetic oligonucleotide
  Antisense strand to SEQ ID NO: 2047952
acauaugagcacuuagcuu

SEQ ID NO: 2047954 - RNA, 19 nt, Artificial Sequence
  Description of Artificial Sequence: Synthetic oligonucleotide
  Sense strand starting at position 95 of SEQ ID NO: 1881483
gcucauauguaguugaaua

SEQ ID NO: 2047955 - RNA, 19 nt, Artificial Sequence
  Description of Artificial Sequence: Synthetic oligonucleotide
  Antisense strand to SEQ ID NO: 2047954
uauucaacuacauaugagc

SEQ ID NO: 2047956 - RNA, 19 nt, Artificial Sequence
  Description of Artificial Sequence: Synthetic oligonucleotide
  Sense strand starting at position 100 of SEQ ID NO: 1881483
uauguaguugaauagagua

SEQ ID NO: 2047957 - RNA, 19 nt, Artificial Sequence
  Description of Artificial Sequence: Synthetic oligonucleotide
  Antisense strand to SEQ ID NO: 2047956
uacucuauucaacuacaua

SEQ ID NO: 2047958 - RNA, 19 nt, Artificial Sequence
  Description of Artificial Sequence: Synthetic oligonucleotide
  Sense strand starting at position 105 of SEQ ID NO: 1881483
aguugaauagaguauccuu

SEQ ID NO: 2047959 - RNA, 19 nt, Artificial Sequence
  Description of Artificial Sequence: Synthetic oligonucleotide
  Antisense strand to SEQ ID NO: 2047958
aaggauacucuauucaacu

SEQ ID NO: 2047960 - RNA, 19 nt, Artificial Sequence
  Description of Artificial Sequence: Synthetic oligonucleotide
  Sense strand starting at position 108 of SEQ ID NO: 1881483
ugaauagaguauccuuaga

SEQ ID NO: 2047961 - RNA, 19 nt, Artificial Sequence
  Description of Artificial Sequence: Synthetic oligonucleotide
  Antisense strand to SEQ ID NO: 2047960
ucuaaggauacucuauuca

SEQ ID NO: 2047962 - RNA, 19 nt, Artificial Sequence
  Description of Artificial Sequence: Synthetic oligonucleotide
  Sense strand starting at position 527 of SEQ ID NO: 1881483
ugaaguuugaacuggguca

SEQ ID NO: 2047963 - RNA, 19 nt, Artificial Sequence
  Description of Artificial Sequence: Synthetic oligonucleotide
  Antisense strand to SEQ ID NO: 2047962
ugacccaguucaaacuuca

SEQ ID NO: 2047964 - RNA, 19 nt, Artificial Sequence
  Description of Artificial Sequence: Synthetic oligonucleotide
  Sense strand starting at position 529 of SEQ ID NO: 1881483
aaguuugaacugggucagu

SEQ ID NO: 2047965 - RNA, 19 nt, Artificial Sequence
  Description of Artificial Sequence: Synthetic oligonucleotide
  Antisense strand to SEQ ID NO: 2047964
acugacccaguucaaacuu

SEQ ID NO: 2047966 - RNA, 19 nt, Artificial Sequence
  Description of Artificial Sequence: Synthetic oligonucleotide
  Sense strand starting at position 709 of SEQ ID NO: 1881483
aggauuuccuucuagagag

SEQ ID NO: 2047967 - RNA, 19 nt, Artificial Sequence
  Description of Artificial Sequence: Synthetic oligonucleotide
  Antisense strand to SEQ ID NO: 2047966
cucucuagaaggaaauccu

SEQ ID NO: 2047968 - RNA, 19 nt, Artificial Sequence
  Description of Artificial Sequence: Synthetic oligonucleotide
  Sense strand starting at position 898 of SEQ ID NO: 1881483
gaagaaaguuaugccauua

SEQ ID NO: 2047969 - RNA, 19 nt, Artificial Sequence
  Description of Artificial Sequence: Synthetic oligonucleotide
  Antisense strand to SEQ ID NO: 2047968
uaauggcauaacuuucuuc

SEQ ID NO: 2047970 - RNA, 19 nt, Artificial Sequence
  Description of Artificial Sequence: Synthetic oligonucleotide
  Sense strand starting at position 1095 of SEQ ID NO: 1881483
cguaaagagcugucaucgu

SEQ ID NO: 2047971 - RNA, 19 nt, Artificial Sequence
  Description of Artificial Sequence: Synthetic oligonucleotide
  Antisense strand to SEQ ID NO: 2047970
acgaugacagcucuuuacg

SEQ ID NO: 2047972 - RNA, 19 nt, Artificial Sequence
  Description of Artificial Sequence: Synthetic oligonucleotide
  Sense strand starting at position 1103 of SEQ ID NO: 1881483
gcugucaucguggcgguaa

SEQ ID NO: 2047973 - RNA, 19 nt, Artificial Sequence
  Description of Artificial Sequence: Synthetic oligonucleotide
  Antisense strand to SEQ ID NO: 2047972
uuaccgccacgaugacagc

SEQ ID NO: 2047974 - RNA, 19 nt, Artificial Sequence
  Description of Artificial Sequence: Synthetic oligonucleotide
  Sense strand starting at position 1134 of SEQ ID NO: 1881483
gcggcugagcgucuagaaa

SEQ ID NO: 2047975 - RNA, 19 nt, Artificial Sequence
  Description of Artificial Sequence: Synthetic oligonucleotide
  Antisense strand to SEQ ID NO: 2047974
uuucuagacgcucagccgc

SEQ ID NO: 2047976 - RNA, 19 nt, Artificial Sequence
  Description of Artificial Sequence: Synthetic oligonucleotide
  Sense strand starting at position 2277 of SEQ ID NO: 1881483
uucuuuguauguccaucaa

SEQ ID NO: 2047977 - RNA, 19 nt, Artificial Sequence
  Description of Artificial Sequence: Synthetic oligonucleotide
  Antisense strand to SEQ ID NO: 2047976
uugauggacauacaaagaa

SEQ ID NO: 2047978 - RNA, 19 nt, Artificial Sequence
  Description of Artificial Sequence: Synthetic oligonucleotide
  Sense strand starting at position 2310 of SEQ ID NO: 1881483
uugugaguguuccugggau

SEQ ID NO: 2047979 - RNA, 19 nt, Artificial Sequence
  Description of Artificial Sequence: Synthetic oligonucleotide
  Antisense strand to SEQ ID NO: 2047978
aucccaggaacacucacaa

SEQ ID NO: 2047980 - RNA, 19 nt, Artificial Sequence
  Description of Artificial Sequence: Synthetic oligonucleotide
  Sense strand starting at position 2312 of SEQ ID NO: 1881483
gugaguguuccugggauuu

SEQ ID NO: 2047981 - RNA, 19 nt, Artificial Sequence
  Description of Artificial Sequence: Synthetic oligonucleotide
  Antisense strand to SEQ ID NO: 2047980
aaaucccaggaacacucac

SEQ ID NO: 2047982 - RNA, 19 nt, Artificial Sequence
  Description of Artificial Sequence: Synthetic oligonucleotide
  Sense strand starting at position 2314 of SEQ ID NO: 1881483
gaguguuccugggauuuau

SEQ ID NO: 2047983 - RNA, 19 nt, Artificial Sequence
  Description of Artificial Sequence: Synthetic oligonucleotide
  Antisense strand to SEQ ID NO: 2047982
auaaaucccaggaacacuc

SEQ ID NO: 2047984 - RNA, 19 nt, Artificial Sequence
  Description of Artificial Sequence: Synthetic oligonucleotide
  Sense strand starting at position 2367 of SEQ ID NO: 1881483
auuuauuccugugucacuu

SEQ ID NO: 2047985 - RNA, 19 nt, Artificial Sequence
  Description of Artificial Sequence: Synthetic oligonucleotide
  Antisense strand to SEQ ID NO: 2047984
aagugacacaggaauaaau

SEQ ID NO: 2047986 - RNA, 19 nt, Artificial Sequence
  Description of Artificial Sequence: Synthetic oligonucleotide
  Sense strand starting at position 2389 of SEQ ID NO: 1881483
ccacgugcucuacaaagga

SEQ ID NO: 2047987 - RNA, 19 nt, Artificial Sequence
  Description of Artificial Sequence: Synthetic oligonucleotide
  Antisense strand to SEQ ID NO: 2047986
uccuuuguagagcacgugg

SEQ ID NO: 2047988 - RNA, 19 nt, Artificial Sequence
  Description of Artificial Sequence: Synthetic oligonucleotide
  Sense strand starting at position 2463 of SEQ ID NO: 1881483
gcaguugauugaccugaga

SEQ ID NO: 2047989 - RNA, 19 nt, Artificial Sequence
  Description of Artificial Sequence: Synthetic oligonucleotide
  Antisense strand to SEQ ID NO: 2047988
ucucaggucaaucaacugc

SEQ ID NO: 2047990 - RNA, 19 nt, Artificial Sequence
  Description of Artificial Sequence: Synthetic oligonucleotide
  Sense strand starting at position 2465 of SEQ ID NO: 1881483
aguugauugaccugagagc

SEQ ID NO: 2047991 - RNA, 19 nt, Artificial Sequence
  Description of Artificial Sequence: Synthetic oligonucleotide
  Antisense strand to SEQ ID NO: 2047990
gcucucaggucaaucaacu

SEQ ID NO: 2047992 - RNA, 19 nt, Artificial Sequence
  Description of Artificial Sequence: Synthetic oligonucleotide
  Sense strand starting at position 2466 of SEQ ID NO: 1881483
guugauugaccugagagcu

SEQ ID NO: 2047993 - RNA, 19 nt, Artificial Sequence
  Description of Artificial Sequence: Synthetic oligonucleotide
  Antisense strand to SEQ ID NO: 2047992
agcucucaggucaaucaac

SEQ ID NO: 2047994 - RNA, 19 nt, Artificial Sequence
  Description of Artificial Sequence: Synthetic oligonucleotide
  Sense strand starting at position 3208 of SEQ ID NO: 1881483
uccucuuuagagcauuagu

SEQ ID NO: 2047995 - RNA, 19 nt, Artificial Sequence
  Description of Artificial Sequence: Synthetic oligonucleotide
  Antisense strand to SEQ ID NO: 2047994
acuaaugcucuaaagagga

SEQ ID NO: 2047996 - RNA, 19 nt, Artificial Sequence
  Description of Artificial Sequence: Synthetic oligonucleotide
  Sense strand starting at position 3211 of SEQ ID NO: 1881483
ucuuuagagcauuaguauu

SEQ ID NO: 2047997 - RNA, 19 nt, Artificial Sequence
  Description of Artificial Sequence: Synthetic oligonucleotide
  Antisense strand to SEQ ID NO: 2047996
aauacuaaugcucuaaaga

SEQ ID NO: 2047998 - RNA, 19 nt, Artificial Sequence
  Description of Artificial Sequence: Synthetic oligonucleotide
  Sense strand starting at position 3282 of SEQ ID NO: 1881483
agaaguaugcagugaagaa

SEQ ID NO: 2047999 - RNA, 19 nt, Artificial Sequence
  Description of Artificial Sequence: Synthetic oligonucleotide
  Antisense strand to SEQ ID NO: 2047998
uucuucacugcauacuucu

SEQ ID NO: 2048000 - RNA, 19 nt, Artificial Sequence
  Description of Artificial Sequence: Synthetic oligonucleotide
  Sense strand starting at position 3474 of SEQ ID NO: 1881483
gaugucguucucugaauuu

SEQ ID NO: 2048001 - RNA, 19 nt, Artificial Sequence
  Description of Artificial Sequence: Synthetic oligonucleotide
  Antisense strand to SEQ ID NO: 2048000
aaauucagagaacgacauc

SEQ ID NO: 2048002 - RNA, 19 nt, Artificial Sequence
  Description of Artificial Sequence: Synthetic oligonucleotide
  Sense strand starting at position 3595 of SEQ ID NO: 1881483
gucaacacucuuggacaga

SEQ ID NO: 2048003 - RNA, 19 nt, Artificial Sequence
  Description of Artificial Sequence: Synthetic oligonucleotide
  Antisense strand to SEQ ID NO: 2048002
ucuguccaagaguguugac

SEQ ID NO: 2048004 - RNA, 19 nt, Artificial Sequence
  Description of Artificial Sequence: Synthetic oligonucleotide
  Sense strand starting at position 3636 of SEQ ID NO: 1881483
gcuguaugggcucaacaca

SEQ ID NO: 2048005 - RNA, 19 nt, Artificial Sequence
  Description of Artificial Sequence: Synthetic oligonucleotide
  Antisense strand to SEQ ID NO: 2048004
uguguugagcccauacagc

SEQ ID NO: 2048006 - RNA, 19 nt, Artificial Sequence
  Description of Artificial Sequence: Synthetic oligonucleotide
  Sense strand starting at position 3776 of SEQ ID NO: 1881483
cccauugagucauugggua

SEQ ID NO: 2048007 - RNA, 19 nt, Artificial Sequence
  Description of Artificial Sequence: Synthetic oligonucleotide
  Antisense strand to SEQ ID NO: 2048006
uacccaaugacucaauggg

SEQ ID NO: 2048008 - RNA, 19 nt, Artificial Sequence
  Description of Artificial Sequence: Synthetic oligonucleotide
  Sense strand starting at position 3780 of SEQ ID NO: 1881483
uugagucauuggguaauca

SEQ ID NO: 2048009 - RNA, 19 nt, Artificial Sequence
  Description of Artificial Sequence: Synthetic oligonucleotide
  Antisense strand to SEQ ID NO: 2048008
ugauuacccaaugacucaa

SEQ ID NO: 2048010 - RNA, 19 nt, Artificial Sequence
  Description of Artificial Sequence: Synthetic oligonucleotide
  Sense strand starting at position 3781 of SEQ ID NO: 1881483
ugagucauuggguaaucau

SEQ ID NO: 2048011 - RNA, 19 nt, Artificial Sequence
  Description of Artificial Sequence: Synthetic oligonucleotide
  Antisense strand to SEQ ID NO: 2048010
augauuacccaaugacuca

SEQ ID NO: 2048012 - RNA, 19 nt, Artificial Sequence
  Description of Artificial Sequence: Synthetic oligonucleotide
  Sense strand starting at position 3790 of SEQ ID NO: 1881483
ggguaaucauucuccugaa

SEQ ID NO: 2048013 - RNA, 19 nt, Artificial Sequence
  Description of Artificial Sequence: Synthetic oligonucleotide
  Antisense strand to SEQ ID NO: 2048012
uucaggagaaugauuaccc

SEQ ID NO: 2048014 - RNA, 19 nt, Artificial Sequence
  Description of Artificial Sequence: Synthetic oligonucleotide
  Sense strand starting at position 3791 of SEQ ID NO: 1881483
gguaaucauucuccugaaa

SEQ ID NO: 2048015 - RNA, 19 nt, Artificial Sequence
  Description of Artificial Sequence: Synthetic oligonucleotide
  Antisense strand to SEQ ID NO: 2048014
uuucaggagaaugauuacc

SEQ ID NO: 2048016 - RNA, 19 nt, Artificial Sequence
  Description of Artificial Sequence: Synthetic oligonucleotide
  Sense strand starting at position 3803 of SEQ ID NO: 1881483
ccugaaaucucccuguguu

SEQ ID NO: 2048017 - RNA, 19 nt, Artificial Sequence
  Description of Artificial Sequence: Synthetic oligonucleotide
  Antisense strand to SEQ ID NO: 2048016
aacacagggagauuucagg

SEQ ID NO: 2048018 - RNA, 19 nt, Artificial Sequence
  Description of Artificial Sequence: Synthetic oligonucleotide
  Sense strand starting at position 3804 of SEQ ID NO: 1881483
cugaaaucucccuguguua

SEQ ID NO: 2048019 - RNA, 19 nt, Artificial Sequence
  Description of Artificial Sequence: Synthetic oligonucleotide
  Antisense strand to SEQ ID NO: 2048018
uaacacagggagauuucag

SEQ ID NO: 2048020 - RNA, 19 nt, Artificial Sequence
  Description of Artificial Sequence: Synthetic oligonucleotide
  Sense strand starting at position 3806 of SEQ ID NO: 1881483
gaaaucucccuguguuaug

SEQ ID NO: 2048021 - RNA, 19 nt, Artificial Sequence
  Description of Artificial Sequence: Synthetic oligonucleotide
  Antisense strand to SEQ ID NO: 2048020
cauaacacagggagauuuc

SEQ ID NO: 2048022 - RNA, 19 nt, Artificial Sequence
  Description of Artificial Sequence: Synthetic oligonucleotide
  Sense strand starting at position 3815 of SEQ ID NO: 1881483
cuguguuaugcacauuaaa

SEQ ID NO: 2048023 - RNA, 19 nt, Artificial Sequence
  Description of Artificial Sequence: Synthetic oligonucleotide
  Antisense strand to SEQ ID NO: 2048022
uuuaaugugcauaacacag

SEQ ID NO: 2048024 - RNA, 19 nt, Artificial Sequence
  Description of Artificial Sequence: Synthetic oligonucleotide
  Sense strand starting at position 3855 of SEQ ID NO: 1881483
uccuauuagucugccauuu

SEQ ID NO: 2048025 - RNA, 19 nt, Artificial Sequence
  Description of Artificial Sequence: Synthetic oligonucleotide
  Antisense strand to SEQ ID NO: 2048024
aaauggcagacuaauagga

SEQ ID NO: 2048026 - RNA, 19 nt, Artificial Sequence
  Description of Artificial Sequence: Synthetic oligonucleotide
  Sense strand starting at position 3909 of SEQ ID NO: 1881483
agggaaagcuucccuguau

SEQ ID NO: 2048027 - RNA, 19 nt, Artificial Sequence
  Description of Artificial Sequence: Synthetic oligonucleotide
  Antisense strand to SEQ ID NO: 2048026
auacagggaagcuuucccu

SEQ ID NO: 2048028 - RNA, 19 nt, Artificial Sequence
  Description of Artificial Sequence: Synthetic oligonucleotide
  Sense strand starting at position 3910 of SEQ ID NO: 1881483
gggaaagcuucccuguauu

SEQ ID NO: 2048029 - RNA, 19 nt, Artificial Sequence
  Description of Artificial Sequence: Synthetic oligonucleotide
  Antisense strand to SEQ ID NO: 2048028
aauacagggaagcuuuccc

SEQ ID NO: 2048030 - RNA, 19 nt, Artificial Sequence
  Description of Artificial Sequence: Synthetic oligonucleotide
  Sense strand starting at position 47 of SEQ ID NO: 1881484
caguguaaggcauauuauu

SEQ ID NO: 2048031 - RNA, 19 nt, Artificial Sequence
  Description of Artificial Sequence: Synthetic oligonucleotide
  Antisense strand to SEQ ID NO: 2048030
aauaauaugccuuacacug

SEQ ID NO: 2048032 - RNA, 19 nt, Artificial Sequence
  Description of Artificial Sequence: Synthetic oligonucleotide
  Sense strand starting at position 755 of SEQ ID NO: 1881484
ccgcauuggccagaagacu

SEQ ID NO: 2048033 - RNA, 19 nt, Artificial Sequence
  Description of Artificial Sequence: Synthetic oligonucleotide
  Antisense strand to SEQ ID NO: 2048032
agucuucuggccaaugcgg

SEQ ID NO: 2048034 - RNA, 19 nt, Artificial Sequence
  Description of Artificial Sequence: Synthetic oligonucleotide
  Sense strand starting at position 838 of SEQ ID NO: 1881484
uugaccucacauggauuaa

SEQ ID NO: 2048035 - RNA, 19 nt, Artificial Sequence
  Description of Artificial Sequence: Synthetic oligonucleotide
  Antisense strand to SEQ ID NO: 2048034
uuaauccaugugaggucaa

SEQ ID NO: 2048036 - RNA, 19 nt, Artificial Sequence
  Description of Artificial Sequence: Synthetic oligonucleotide
  Sense strand starting at position 945 of SEQ ID NO: 1881484
guuaccauguuucuaaaga

SEQ ID NO: 2048037 - RNA, 19 nt, Artificial Sequence
  Description of Artificial Sequence: Synthetic oligonucleotide
  Antisense strand to SEQ ID NO: 2048036
ucuuuagaaacaugguaac

SEQ ID NO: 2048038 - RNA, 19 nt, Artificial Sequence
  Description of Artificial Sequence: Synthetic oligonucleotide
  Sense strand starting at position 956 of SEQ ID NO: 1881484
ucuaaagaggcauggguua

SEQ ID NO: 2048039 - RNA, 19 nt, Artificial Sequence
  Description of Artificial Sequence: Synthetic oligonucleotide
  Antisense strand to SEQ ID NO: 2048038
uaacccaugccucuuuaga

SEQ ID NO: 2048040 - RNA, 19 nt, Artificial Sequence
  Description of Artificial Sequence: Synthetic oligonucleotide
  Sense strand starting at position 958 of SEQ ID NO: 1881484
uaaagaggcauggguuaga

SEQ ID NO: 2048041 - RNA, 19 nt, Artificial Sequence
  Description of Artificial Sequence: Synthetic oligonucleotide
  Antisense strand to SEQ ID NO: 2048040
ucuaacccaugccucuuua

SEQ ID NO: 2048042 - RNA, 19 nt, Artificial Sequence
  Description of Artificial Sequence: Synthetic oligonucleotide
  Sense strand starting at position 968 of SEQ ID NO: 1881484
uggguuagaaaucaucgua

SEQ ID NO: 2048043 - RNA, 19 nt, Artificial Sequence
  Description of Artificial Sequence: Synthetic oligonucleotide
  Antisense strand to SEQ ID NO: 2048042
uacgaugauuucuaaccca

SEQ ID NO: 2048044 - RNA, 19 nt, Artificial Sequence
  Description of Artificial Sequence: Synthetic oligonucleotide
  Sense strand starting at position 971 of SEQ ID NO: 1881484
guuagaaaucaucguaaau

SEQ ID NO: 2048045 - RNA, 19 nt, Artificial Sequence
  Description of Artificial Sequence: Synthetic oligonucleotide
  Antisense strand to SEQ ID NO: 2048044
auuuacgaugauuucuaac

SEQ ID NO: 2048046 - RNA, 19 nt, Artificial Sequence
  Description of Artificial Sequence: Synthetic oligonucleotide
  Sense strand starting at position 983 of SEQ ID NO: 1881484
cguaaauugcuacaauaaa

SEQ ID NO: 2048047 - RNA, 19 nt, Artificial Sequence
  Description of Artificial Sequence: Synthetic oligonucleotide
  Antisense strand to SEQ ID NO: 2048046
uuuauuguagcaauuuacg

SEQ ID NO: 2048048 - RNA, 19 nt, Artificial Sequence
  Description of Artificial Sequence: Synthetic oligonucleotide
  Sense strand starting at position 1015 of SEQ ID NO: 1881484
uguuaucacuuacuggaaa

SEQ ID NO: 2048049 - RNA, 19 nt, Artificial Sequence
  Description of Artificial Sequence: Synthetic oligonucleotide
  Antisense strand to SEQ ID NO: 2048048
uuuccaguaagugauaaca

SEQ ID NO: 2048050 - RNA, 19 nt, Artificial Sequence
  Description of Artificial Sequence: Synthetic oligonucleotide
  Sense strand starting at position 1034 of SEQ ID NO: 1881484
aaaguauuguggguacaug

SEQ ID NO: 2048051 - RNA, 19 nt, Artificial Sequence
  Description of Artificial Sequence: Synthetic oligonucleotide
  Antisense strand to SEQ ID NO: 2048050
cauguacccacaauacuuu

SEQ ID NO: 2048052 - RNA, 19 nt, Artificial Sequence
  Description of Artificial Sequence: Synthetic oligonucleotide
  Sense strand starting at position 1035 of SEQ ID NO: 1881484
aaguauuguggguacaugu

SEQ ID NO: 2048053 - RNA, 19 nt, Artificial Sequence
  Description of Artificial Sequence: Synthetic oligonucleotide
  Antisense strand to SEQ ID NO: 2048052
acauguacccacaauacuu

SEQ ID NO: 2048054 - RNA, 19 nt, Artificial Sequence
  Description of Artificial Sequence: Synthetic oligonucleotide
  Sense strand starting at position 1061 of SEQ ID NO: 1881484
accaaauucugacaggaaa

SEQ ID NO: 2048055 - RNA, 19 nt, Artificial Sequence
  Description of Artificial Sequence: Synthetic oligonucleotide
  Antisense strand to SEQ ID NO: 2048054
uuuccugucagaauuuggu

SEQ ID NO: 2048056 - RNA, 19 nt, Artificial Sequence
  Description of Artificial Sequence: Synthetic oligonucleotide
  Sense strand starting at position 1405 of SEQ ID NO: 1881484
ucacauccgccaugaugaa

SEQ ID NO: 2048057 - RNA, 19 nt, Artificial Sequence
  Description of Artificial Sequence: Synthetic oligonucleotide
  Antisense strand to SEQ ID NO: 2048056
uucaucauggcggauguga

SEQ ID NO: 2048058 - RNA, 19 nt, Artificial Sequence
  Description of Artificial Sequence: Synthetic oligonucleotide
  Sense strand starting at position 1428 of SEQ ID NO: 1881484
cuucucucgcaggaucaau

SEQ ID NO: 2048059 - RNA, 19 nt, Artificial Sequence
  Description of Artificial Sequence: Synthetic oligonucleotide
  Antisense strand to SEQ ID NO: 2048058
auugauccugcgagagaag

SEQ ID NO: 2048060 - RNA, 19 nt, Artificial Sequence
  Description of Artificial Sequence: Synthetic oligonucleotide
  Sense strand starting at position 1460 of SEQ ID NO: 1881484
agagaaacucccggugacu

SEQ ID NO: 2048061 - RNA, 19 nt, Artificial Sequence
  Description of Artificial Sequence: Synthetic oligonucleotide
  Antisense strand to SEQ ID NO: 2048060
agucaccgggaguuucucu

SEQ ID NO: 2048062 - RNA, 19 nt, Artificial Sequence
  Description of Artificial Sequence: Synthetic oligonucleotide
  Sense strand starting at position 1512 of SEQ ID NO: 1881484
acaacuuaauacgcgagau

SEQ ID NO: 2048063 - RNA, 19 nt, Artificial Sequence
  Description of Artificial Sequence: Synthetic oligonucleotide
  Antisense strand to SEQ ID NO: 2048062
aucucgcguauuaaguugu

SEQ ID NO: 2048064 - RNA, 19 nt, Artificial Sequence
  Description of Artificial Sequence: Synthetic oligonucleotide
  Sense strand starting at position 1514 of SEQ ID NO: 1881484
aacuuaauacgcgagauca

SEQ ID NO: 2048065 - RNA, 19 nt, Artificial Sequence
  Description of Artificial Sequence: Synthetic oligonucleotide
  Antisense strand to SEQ ID NO: 2048064
ugaucucgcguauuaaguu

SEQ ID NO: 2048066 - RNA, 19 nt, Artificial Sequence
  Description of Artificial Sequence: Synthetic oligonucleotide
  Sense strand starting at position 1526 of SEQ ID NO: 1881484
gagaucagcccuggucaga

SEQ ID NO: 2048067 - RNA, 19 nt, Artificial Sequence
  Description of Artificial Sequence: Synthetic oligonucleotide
  Antisense strand to SEQ ID NO: 2048066
ucugaccagggcugaucuc

SEQ ID NO: 2048068 - RNA, 19 nt, Artificial Sequence
  Description of Artificial Sequence: Synthetic oligonucleotide
  Sense strand starting at position 2164 of SEQ ID NO: 1881484
agacauucuugugcagaga

SEQ ID NO: 2048069 - RNA, 19 nt, Artificial Sequence
  Description of Artificial Sequence: Synthetic oligonucleotide
  Antisense strand to SEQ ID NO: 2048068
ucucugcacaagaaugucu

SEQ ID NO: 2048070 - RNA, 19 nt, Artificial Sequence
  Description of Artificial Sequence: Synthetic oligonucleotide
  Sense strand starting at position 2165 of SEQ ID NO: 1881484
gacauucuugugcagagag

SEQ ID NO: 2048071 - RNA, 19 nt, Artificial Sequence
  Description of Artificial Sequence: Synthetic oligonucleotide
  Antisense strand to SEQ ID NO: 2048070
cucucugcacaagaauguc

SEQ ID NO: 2048072 - RNA, 19 nt, Artificial Sequence
  Description of Artificial Sequence: Synthetic oligonucleotide
  Sense strand starting at position 2208 of SEQ ID NO: 1881484
cagggucuguuaucuuaaa

SEQ ID NO: 2048073 - RNA, 19 nt, Artificial Sequence
  Description of Artificial Sequence: Synthetic oligonucleotide
  Antisense strand to SEQ ID NO: 2048072
uuuaagauaacagacccug

SEQ ID NO: 2048074 - RNA, 19 nt, Artificial Sequence
  Description of Artificial Sequence: Synthetic oligonucleotide
  Sense strand starting at position 2359 of SEQ ID NO: 1881484
augggugcucuuuacugaa

SEQ ID NO: 2048075 - RNA, 19 nt, Artificial Sequence
  Description of Artificial Sequence: Synthetic oligonucleotide
  Antisense strand to SEQ ID NO: 2048074
uucaguaaagagcacccau

SEQ ID NO: 2048076 - RNA, 19 nt, Artificial Sequence
  Description of Artificial Sequence: Synthetic oligonucleotide
  Sense strand starting at position 2683 of SEQ ID NO: 1881484
uuaagaauuauccgaacgu

SEQ ID NO: 2048077 - RNA, 19 nt, Artificial Sequence
  Description of Artificial Sequence: Synthetic oligonucleotide
  Antisense strand to SEQ ID NO: 2048076
acguucggauaauucuuaa

SEQ ID NO: 2048078 - RNA, 19 nt, Artificial Sequence
  Description of Artificial Sequence: Synthetic oligonucleotide
  Sense strand starting at position 2958 of SEQ ID NO: 1881484
cagaguucuguugauucua

SEQ ID NO: 2048079 - RNA, 19 nt, Artificial Sequence
  Description of Artificial Sequence: Synthetic oligonucleotide
  Antisense strand to SEQ ID NO: 2048078
uagaaucaacagaacucug

SEQ ID NO: 2048080 - RNA, 19 nt, Artificial Sequence
  Description of Artificial Sequence: Synthetic oligonucleotide
  Sense strand starting at position 2966 of SEQ ID NO: 1881484
uguugauucuaccuccuau

SEQ ID NO: 2048081 - RNA, 19 nt, Artificial Sequence
  Description of Artificial Sequence: Synthetic oligonucleotide
  Antisense strand to SEQ ID NO: 2048080
auaggagguagaaucaaca

SEQ ID NO: 2048082 - RNA, 19 nt, Artificial Sequence
  Description of Artificial Sequence: Synthetic oligonucleotide
  Sense strand starting at position 3161 of SEQ ID NO: 1881484
caaguuuauugacuuagga

SEQ ID NO: 2048083 - RNA, 19 nt, Artificial Sequence
  Description of Artificial Sequence: Synthetic oligonucleotide
  Antisense strand to SEQ ID NO: 2048082
uccuaagucaauaaacuug

SEQ ID NO: 2048084 - RNA, 19 nt, Artificial Sequence
  Description of Artificial Sequence: Synthetic oligonucleotide
  Sense strand starting at position 3192 of SEQ ID NO: 1881484
ucagcaucaugguuuauau

SEQ ID NO: 2048085 - RNA, 19 nt, Artificial Sequence
  Description of Artificial Sequence: Synthetic oligonucleotide
  Antisense strand to SEQ ID NO: 2048084
auauaaaccaugaugcuga

SEQ ID NO: 2048086 - RNA, 19 nt, Artificial Sequence
  Description of Artificial Sequence: Synthetic oligonucleotide
  Sense strand starting at position 3194 of SEQ ID NO: 1881484
agcaucaugguuuauauau

SEQ ID NO: 2048087 - RNA, 19 nt, Artificial Sequence
  Description of Artificial Sequence: Synthetic oligonucleotide
  Antisense strand to SEQ ID NO: 2048086
auauauaaaccaugaugcu

SEQ ID NO: 2048088 - RNA, 19 nt, Artificial Sequence
  Description of Artificial Sequence: Synthetic oligonucleotide
  Sense strand starting at position 3332 of SEQ ID NO: 1881484
cacguucugccugagauau

SEQ ID NO: 2048089 - RNA, 19 nt, Artificial Sequence
  Description of Artificial Sequence: Synthetic oligonucleotide
  Antisense strand to SEQ ID NO: 2048088
auaucucaggcagaacgug

SEQ ID NO: 2048090 - RNA, 19 nt, Artificial Sequence
  Description of Artificial Sequence: Synthetic oligonucleotide
  Sense strand starting at position 3441 of SEQ ID NO: 1881484
uaguuuaggucuucuagau

SEQ ID NO: 2048091 - RNA, 19 nt, Artificial Sequence
  Description of Artificial Sequence: Synthetic oligonucleotide
  Antisense strand to SEQ ID NO: 2048090
aucuagaagaccuaaacua

SEQ ID NO: 2048092 - RNA, 19 nt, Artificial Sequence
  Description of Artificial Sequence: Synthetic oligonucleotide
  Sense strand starting at position 3544 of SEQ ID NO: 1881484
gauguaaacucuuuaaggu

SEQ ID NO: 2048093 - RNA, 19 nt, Artificial Sequence
  Description of Artificial Sequence: Synthetic oligonucleotide
  Antisense strand to SEQ ID NO: 2048092
accuuaaagaguuuacauc

SEQ ID NO: 2048094 - RNA, 19 nt, Artificial Sequence
  Description of Artificial Sequence: Synthetic oligonucleotide
  Sense strand starting at position 3545 of SEQ ID NO: 1881484
auguaaacucuuuaagguu

SEQ ID NO: 2048095 - RNA, 19 nt, Artificial Sequence
  Description of Artificial Sequence: Synthetic oligonucleotide
  Antisense strand to SEQ ID NO: 2048094
aaccuuaaagaguuuacau

SEQ ID NO: 2048096 - RNA, 19 nt, Artificial Sequence
  Description of Artificial Sequence: Synthetic oligonucleotide
  Sense strand starting at position 3628 of SEQ ID NO: 1881484
uugacauacuuguugaaua

SEQ ID NO: 2048097 - RNA, 19 nt, Artificial Sequence
  Description of Artificial Sequence: Synthetic oligonucleotide
  Antisense strand to SEQ ID NO: 2048096
uauucaacaaguaugucaa

SEQ ID NO: 2048098 - RNA, 19 nt, Artificial Sequence
  Description of Artificial Sequence: Synthetic oligonucleotide
  Sense strand starting at position 3630 of SEQ ID NO: 1881484
gacauacuuguugaauagu

SEQ ID NO: 2048099 - RNA, 19 nt, Artificial Sequence
  Description of Artificial Sequence: Synthetic oligonucleotide
  Antisense strand to SEQ ID NO: 2048098
acuauucaacaaguauguc

SEQ ID NO: 2048100 - RNA, 19 nt, Artificial Sequence
  Description of Artificial Sequence: Synthetic oligonucleotide
  Sense strand starting at position 3633 of SEQ ID NO: 1881484
auacuuguugaauaguuga

SEQ ID NO: 2048101 - RNA, 19 nt, Artificial Sequence
  Description of Artificial Sequence: Synthetic oligonucleotide
  Antisense strand to SEQ ID NO: 2048100
ucaacuauucaacaaguau

SEQ ID NO: 2048102 - RNA, 19 nt, Artificial Sequence
  Description of Artificial Sequence: Synthetic oligonucleotide
  Sense strand starting at position 3656 of SEQ ID NO: 1881484
augaaagaguggccauauu

SEQ ID NO: 2048103 - RNA, 19 nt, Artificial Sequence
  Description of Artificial Sequence: Synthetic oligonucleotide
  Antisense strand to SEQ ID NO: 2048102
aauauggccacucuuucau

SEQ ID NO: 2048104 - RNA, 19 nt, Artificial Sequence
  Description of Artificial Sequence: Synthetic oligonucleotide
  Sense strand starting at position 3663 of SEQ ID NO: 1881484
aguggccauauugaguaua

SEQ ID NO: 2048105 - RNA, 19 nt, Artificial Sequence
  Description of Artificial Sequence: Synthetic oligonucleotide
  Antisense strand to SEQ ID NO: 2048104
uauacucaauauggccacu

SEQ ID NO: 2048106 - RNA, 19 nt, Artificial Sequence
  Description of Artificial Sequence: Synthetic oligonucleotide
  Sense strand starting at position 3665 of SEQ ID NO: 1881484
uggccauauugaguauaaa

SEQ ID NO: 2048107 - RNA, 19 nt, Artificial Sequence
  Description of Artificial Sequence: Synthetic oligonucleotide
  Antisense strand to SEQ ID NO: 2048106
uuuauacucaauauggcca

SEQ ID NO: 2048108 - RNA, 19 nt, Artificial Sequence
  Description of Artificial Sequence: Synthetic oligonucleotide
  Sense strand starting at position 3899 of SEQ ID NO: 1881484
uccugaaugcauuauagac

SEQ ID NO: 2048109 - RNA, 19 nt, Artificial Sequence
  Description of Artificial Sequence: Synthetic oligonucleotide
  Antisense strand to SEQ ID NO: 2048108
gucuauaaugcauucagga

SEQ ID NO: 2048110 - RNA, 19 nt, Artificial Sequence
  Description of Artificial Sequence: Synthetic oligonucleotide
  Sense strand starting at position 59 of SEQ ID NO: 1881485
ucuagugggcuccauuaaa

SEQ ID NO: 2048111 - RNA, 19 nt, Artificial Sequence
  Description of Artificial Sequence: Synthetic oligonucleotide
  Antisense strand to SEQ ID NO: 2048110
uuuaauggagcccacuaga

SEQ ID NO: 2048112 - RNA, 19 nt, Artificial Sequence
  Description of Artificial Sequence: Synthetic oligonucleotide
  Sense strand starting at position 217 of SEQ ID NO: 1881485
guaaguacaucauugagua

SEQ ID NO: 2048113 - RNA, 19 nt, Artificial Sequence
  Description of Artificial Sequence: Synthetic oligonucleotide
  Antisense strand to SEQ ID NO: 2048112
uacucaaugauguacuuac

SEQ ID NO: 2048114 - RNA, 19 nt, Artificial Sequence
  Description of Artificial Sequence: Synthetic oligonucleotide
  Sense strand starting at position 230 of SEQ ID NO: 1881485
ugaguauguaguuauucua

SEQ ID NO: 2048115 - RNA, 19 nt, Artificial Sequence
  Description of Artificial Sequence: Synthetic oligonucleotide
  Antisense strand to SEQ ID NO: 2048114
uagaauaacuacauacuca

SEQ ID NO: 2048116 - RNA, 19 nt, Artificial Sequence
  Description of Artificial Sequence: Synthetic oligonucleotide
  Sense strand starting at position 270 of SEQ ID NO: 1881485
gguacuauugccuauuacu

SEQ ID NO: 2048117 - RNA, 19 nt, Artificial Sequence
  Description of Artificial Sequence: Synthetic oligonucleotide
  Antisense strand to SEQ ID NO: 2048116
aguaauaggcaauaguacc

SEQ ID NO: 2048118 - RNA, 19 nt, Artificial Sequence
  Description of Artificial Sequence: Synthetic oligonucleotide
  Sense strand starting at position 339 of SEQ ID NO: 1881485
ggugcuugacuguaaauaa

SEQ ID NO: 2048119 - RNA, 19 nt, Artificial Sequence
  Description of Artificial Sequence: Synthetic oligonucleotide
  Antisense strand to SEQ ID NO: 2048118
uuauuuacagucaagcacc

SEQ ID NO: 2048120 - RNA, 19 nt, Artificial Sequence
  Description of Artificial Sequence: Synthetic oligonucleotide
  Sense strand starting at position 474 of SEQ ID NO: 1881485
gcaucuuuacuggacaaac

SEQ ID NO: 2048121 - RNA, 19 nt, Artificial Sequence
  Description of Artificial Sequence: Synthetic oligonucleotide
  Antisense strand to SEQ ID NO: 2048120
guuuguccaguaaagaugc

SEQ ID NO: 2048122 - RNA, 19 nt, Artificial Sequence
  Description of Artificial Sequence: Synthetic oligonucleotide
  Sense strand starting at position 987 of SEQ ID NO: 1881485
cugagaagcuaauccauau

SEQ ID NO: 2048123 - RNA, 19 nt, Artificial Sequence
  Description of Artificial Sequence: Synthetic oligonucleotide
  Antisense strand to SEQ ID NO: 2048122
auauggauuagcuucucag

SEQ ID NO: 2048124 - RNA, 19 nt, Artificial Sequence
  Description of Artificial Sequence: Synthetic oligonucleotide
  Sense strand starting at position 1038 of SEQ ID NO: 1881485
gguuaagaaucauuguucu

SEQ ID NO: 2048125 - RNA, 19 nt, Artificial Sequence
  Description of Artificial Sequence: Synthetic oligonucleotide
  Antisense strand to SEQ ID NO: 2048124
agaacaaugauucuuaacc

SEQ ID NO: 2048126 - RNA, 19 nt, Artificial Sequence
  Description of Artificial Sequence: Synthetic oligonucleotide
  Sense strand starting at position 1041 of SEQ ID NO: 1881485
uaagaaucauuguucuggu

SEQ ID NO: 2048127 - RNA, 19 nt, Artificial Sequence
  Description of Artificial Sequence: Synthetic oligonucleotide
  Antisense strand to SEQ ID NO: 2048126
accagaacaaugauucuua

SEQ ID NO: 2048128 - RNA, 19 nt, Artificial Sequence
  Description of Artificial Sequence: Synthetic oligonucleotide
  Sense strand starting at position 1166 of SEQ ID NO: 1881485
auggcaucuuacucuuuga

SEQ ID NO: 2048129 - RNA, 19 nt, Artificial Sequence
  Description of Artificial Sequence: Synthetic oligonucleotide
  Antisense strand to SEQ ID NO: 2048128
ucaaagaguaagaugccau

SEQ ID NO: 2048130 - RNA, 19 nt, Artificial Sequence
  Description of Artificial Sequence: Synthetic oligonucleotide
  Sense strand starting at position 1169 of SEQ ID NO: 1881485
gcaucuuacucuuugagau

SEQ ID NO: 2048131 - RNA, 19 nt, Artificial Sequence
  Description of Artificial Sequence: Synthetic oligonucleotide
  Antisense strand to SEQ ID NO: 2048130
aucucaaagaguaagaugc

SEQ ID NO: 2048132 - RNA, 19 nt, Artificial Sequence
  Description of Artificial Sequence: Synthetic oligonucleotide
  Sense strand starting at position 2039 of SEQ ID NO: 1881485
uggugaggucccgcguuaa

SEQ ID NO: 2048133 - RNA, 19 nt, Artificial Sequence
  Description of Artificial Sequence: Synthetic oligonucleotide
  Antisense strand to SEQ ID NO: 2048132
uuaacgcgggaccucacca

SEQ ID NO: 2048134 - RNA, 19 nt, Artificial Sequence
  Description of Artificial Sequence: Synthetic oligonucleotide
  Sense strand starting at position 2041 of SEQ ID NO: 1881485
gugaggucccgcguuaaug

SEQ ID NO: 2048135 - RNA, 19 nt, Artificial Sequence
  Description of Artificial Sequence: Synthetic oligonucleotide
  Antisense strand to SEQ ID NO: 2048134
cauuaacgcgggaccucac

SEQ ID NO: 2048136 - RNA, 19 nt, Artificial Sequence
  Description of Artificial Sequence: Synthetic oligonucleotide
  Sense strand starting at position 2051 of SEQ ID NO: 1881485
gcguuaaugacgucacguu

SEQ ID NO: 2048137 - RNA, 19 nt, Artificial Sequence
  Description of Artificial Sequence: Synthetic oligonucleotide
  Antisense strand to SEQ ID NO: 2048136
aacgugacgucauuaacgc

SEQ ID NO: 2048138 - RNA, 19 nt, Artificial Sequence
  Description of Artificial Sequence: Synthetic oligonucleotide
  Sense strand starting at position 2068 of SEQ ID NO: 1881485
uuguuucgcgggagaaauu

SEQ ID NO: 2048139 - RNA, 19 nt, Artificial Sequence
  Description of Artificial Sequence: Synthetic oligonucleotide
  Antisense strand to SEQ ID NO: 2048138
aauuucucccgcgaaacaa

SEQ ID NO: 2048140 - RNA, 19 nt, Artificial Sequence
  Description of Artificial Sequence: Synthetic oligonucleotide
  Sense strand starting at position 2134 of SEQ ID NO: 1881485
gggauuuccuaggaaugac

SEQ ID NO: 2048141 - RNA, 19 nt, Artificial Sequence
  Description of Artificial Sequence: Synthetic oligonucleotide
  Antisense strand to SEQ ID NO: 2048140
gucauuccuaggaaauccc

SEQ ID NO: 2048142 - RNA, 19 nt, Artificial Sequence
  Description of Artificial Sequence: Synthetic oligonucleotide
  Sense strand starting at position 2142 of SEQ ID NO: 1881485
cuaggaaugacuugagcga

SEQ ID NO: 2048143 - RNA, 19 nt, Artificial Sequence
  Description of Artificial Sequence: Synthetic oligonucleotide
  Antisense strand to SEQ ID NO: 2048142
ucgcucaagucauuccuag

SEQ ID NO: 2048144 - RNA, 19 nt, Artificial Sequence
  Description of Artificial Sequence: Synthetic oligonucleotide
  Sense strand starting at position 2180 of SEQ ID NO: 1881485
agacucugcuccuuaagaa

SEQ ID NO: 2048145 - RNA, 19 nt, Artificial Sequence
  Description of Artificial Sequence: Synthetic oligonucleotide
  Antisense strand to SEQ ID NO: 2048144
uucuuaaggagcagagucu

SEQ ID NO: 2048146 - RNA, 19 nt, Artificial Sequence
  Description of Artificial Sequence: Synthetic oligonucleotide
  Sense strand starting at position 2208 of SEQ ID NO: 1881485
gaaggaugcuguuuggaac

SEQ ID NO: 2048147 - RNA, 19 nt, Artificial Sequence
  Description of Artificial Sequence: Synthetic oligonucleotide
  Antisense strand to SEQ ID NO: 2048146
guuccaaacagcauccuuc

SEQ ID NO: 2048148 - RNA, 19 nt, Artificial Sequence
  Description of Artificial Sequence: Synthetic oligonucleotide
  Sense strand starting at position 2215 of SEQ ID NO: 1881485
gcuguuuggaaccaggauu

SEQ ID NO: 2048149 - RNA, 19 nt, Artificial Sequence
  Description of Artificial Sequence: Synthetic oligonucleotide
  Antisense strand to SEQ ID NO: 2048148
aauccugguuccaaacagc

SEQ ID NO: 2048150 - RNA, 19 nt, Artificial Sequence
  Description of Artificial Sequence: Synthetic oligonucleotide
  Sense strand starting at position 2401 of SEQ ID NO: 1881485
acaggauuaugguucuuag

SEQ ID NO: 2048151 - RNA, 19 nt, Artificial Sequence
  Description of Artificial Sequence: Synthetic oligonucleotide
  Antisense strand to SEQ ID NO: 2048150
cuaagaaccauaauccugu

SEQ ID NO: 2048152 - RNA, 19 nt, Artificial Sequence
  Description of Artificial Sequence: Synthetic oligonucleotide
  Sense strand starting at position 2404 of SEQ ID NO: 1881485
ggauuaugguucuuagaau

SEQ ID NO: 2048153 - RNA, 19 nt, Artificial Sequence
  Description of Artificial Sequence: Synthetic oligonucleotide
  Antisense strand to SEQ ID NO: 2048152
auucuaagaaccauaaucc

SEQ ID NO: 2048154 - RNA, 19 nt, Artificial Sequence
  Description of Artificial Sequence: Synthetic oligonucleotide
  Sense strand starting at position 2415 of SEQ ID NO: 1881485
cuuagaaucuuggcaaaug

SEQ ID NO: 2048155 - RNA, 19 nt, Artificial Sequence
  Description of Artificial Sequence: Synthetic oligonucleotide
  Antisense strand to SEQ ID NO: 2048154
cauuugccaagauucuaag

SEQ ID NO: 2048156 - RNA, 19 nt, Artificial Sequence
  Description of Artificial Sequence: Synthetic oligonucleotide
  Sense strand starting at position 2440 of SEQ ID NO: 1881485
ggguuuccuuuguuuauuu

SEQ ID NO: 2048157 - RNA, 19 nt, Artificial Sequence
  Description of Artificial Sequence: Synthetic oligonucleotide
  Antisense strand to SEQ ID NO: 2048156
aaauaaacaaaggaaaccc

SEQ ID NO: 2048158 - RNA, 19 nt, Artificial Sequence
  Description of Artificial Sequence: Synthetic oligonucleotide
  Sense strand starting at position 2461 of SEQ ID NO: 1881485
acuggaugguuuguuaaca

SEQ ID NO: 2048159 - RNA, 19 nt, Artificial Sequence
  Description of Artificial Sequence: Synthetic oligonucleotide
  Antisense strand to SEQ ID NO: 2048158
uguuaacaaaccauccagu

SEQ ID NO: 2048160 - RNA, 19 nt, Artificial Sequence
  Description of Artificial Sequence: Synthetic oligonucleotide
  Sense strand starting at position 2462 of SEQ ID NO: 1881485
cuggaugguuuguuaacaa

SEQ ID NO: 2048161 - RNA, 19 nt, Artificial Sequence
  Description of Artificial Sequence: Synthetic oligonucleotide
  Antisense strand to SEQ ID NO: 2048160
uuguuaacaaaccauccag

SEQ ID NO: 2048162 - RNA, 19 nt, Artificial Sequence
  Description of Artificial Sequence: Synthetic oligonucleotide
  Sense strand starting at position 2592 of SEQ ID NO: 1881485
ugaauaauggcucauacuu

SEQ ID NO: 2048163 - RNA, 19 nt, Artificial Sequence
  Description of Artificial Sequence: Synthetic oligonucleotide
  Antisense strand to SEQ ID NO: 2048162
aaguaugagccauuauuca

SEQ ID NO: 2048164 - RNA, 19 nt, Artificial Sequence
  Description of Artificial Sequence: Synthetic oligonucleotide
  Sense strand starting at position 2601 of SEQ ID NO: 1881485
gcucauacuuuacugagaa

SEQ ID NO: 2048165 - RNA, 19 nt, Artificial Sequence
  Description of Artificial Sequence: Synthetic oligonucleotide
  Antisense strand to SEQ ID NO: 2048164
uucucaguaaaguaugagc

SEQ ID NO: 2048166 - RNA, 19 nt, Artificial Sequence
  Description of Artificial Sequence: Synthetic oligonucleotide
  Sense strand starting at position 2800 of SEQ ID NO: 1881485
acaggugaauugucuggua

SEQ ID NO: 2048167 - RNA, 19 nt, Artificial Sequence
  Description of Artificial Sequence: Synthetic oligonucleotide
  Antisense strand to SEQ ID NO: 2048166
uaccagacaauucaccugu

SEQ ID NO: 2048168 - RNA, 19 nt, Artificial Sequence
  Description of Artificial Sequence: Synthetic oligonucleotide
  Sense strand starting at position 2802 of SEQ ID NO: 1881485
aggugaauugucugguaga

SEQ ID NO: 2048169 - RNA, 19 nt, Artificial Sequence
  Description of Artificial Sequence: Synthetic oligonucleotide
  Antisense strand to SEQ ID NO: 2048168
ucuaccagacaauucaccu

SEQ ID NO: 2048170 - RNA, 19 nt, Artificial Sequence
  Description of Artificial Sequence: Synthetic oligonucleotide
  Sense strand starting at position 3063 of SEQ ID NO: 1881485
cuguacauuccagaaguaa

SEQ ID NO: 2048171 - RNA, 19 nt, Artificial Sequence
  Description of Artificial Sequence: Synthetic oligonucleotide
  Antisense strand to SEQ ID NO: 2048170
uuacuucuggaauguacag

SEQ ID NO: 2048172 - RNA, 19 nt, Artificial Sequence
  Description of Artificial Sequence: Synthetic oligonucleotide
  Sense strand starting at position 3123 of SEQ ID NO: 1881485
ugugaaauagcauauaagu

SEQ ID NO: 2048173 - RNA, 19 nt, Artificial Sequence
  Description of Artificial Sequence: Synthetic oligonucleotide
  Antisense strand to SEQ ID NO: 2048172
acuuauaugcuauuucaca

SEQ ID NO: 2048174 - RNA, 19 nt, Artificial Sequence
  Description of Artificial Sequence: Synthetic oligonucleotide
  Sense strand starting at position 3153 of SEQ ID NO: 1881485
aguaaauacuggguuccua

SEQ ID NO: 2048175 - RNA, 19 nt, Artificial Sequence
  Description of Artificial Sequence: Synthetic oligonucleotide
  Antisense strand to SEQ ID NO: 2048174
uaggaacccaguauuuacu

SEQ ID NO: 2048176 - RNA, 19 nt, Artificial Sequence
  Description of Artificial Sequence: Synthetic oligonucleotide
  Sense strand starting at position 3164 of SEQ ID NO: 1881485
gguuccuaaucuguaaauu

SEQ ID NO: 2048177 - RNA, 19 nt, Artificial Sequence
  Description of Artificial Sequence: Synthetic oligonucleotide
  Antisense strand to SEQ ID NO: 2048176
aauuuacagauuaggaacc

SEQ ID NO: 2048178 - RNA, 19 nt, Artificial Sequence
  Description of Artificial Sequence: Synthetic oligonucleotide
  Sense strand starting at position 3165 of SEQ ID NO: 1881485
guuccuaaucuguaaauug

SEQ ID NO: 2048179 - RNA, 19 nt, Artificial Sequence
  Description of Artificial Sequence: Synthetic oligonucleotide
  Antisense strand to SEQ ID NO: 2048178
caauuuacagauuaggaac

SEQ ID NO: 2048180 - RNA, 19 nt, Artificial Sequence
  Description of Artificial Sequence: Synthetic oligonucleotide
  Sense strand starting at position 3256 of SEQ ID NO: 1881485
ugauacauaguauguaauc

SEQ ID NO: 2048181 - RNA, 19 nt, Artificial Sequence
  Description of Artificial Sequence: Synthetic oligonucleotide
  Antisense strand to SEQ ID NO: 2048180
gauuacauacuauguauca

SEQ ID NO: 2048182 - RNA, 19 nt, Artificial Sequence
  Description of Artificial Sequence: Synthetic oligonucleotide
  Sense strand starting at position 3585 of SEQ ID NO: 1881485
caguuucuagcauauggua

SEQ ID NO: 2048183 - RNA, 19 nt, Artificial Sequence
  Description of Artificial Sequence: Synthetic oligonucleotide
  Antisense strand to SEQ ID NO: 2048182
uaccauaugcuagaaacug

SEQ ID NO: 2048184 - RNA, 19 nt, Artificial Sequence
  Description of Artificial Sequence: Synthetic oligonucleotide
  Sense strand starting at position 3701 of SEQ ID NO: 1881485
gcauaucuagcccaggagu

SEQ ID NO: 2048185 - RNA, 19 nt, Artificial Sequence
  Description of Artificial Sequence: Synthetic oligonucleotide
  Antisense strand to SEQ ID NO: 2048184
acuccugggcuagauaugc

SEQ ID NO: 2048186 - RNA, 19 nt, Artificial Sequence
  Description of Artificial Sequence: Synthetic oligonucleotide
  Sense strand starting at position 3752 of SEQ ID NO: 1881485
auucuuaggcaucagcaau

SEQ ID NO: 2048187 - RNA, 19 nt, Artificial Sequence
  Description of Artificial Sequence: Synthetic oligonucleotide
  Antisense strand to SEQ ID NO: 2048186
auugcugaugccuaagaau

SEQ ID NO: 2048188 - RNA, 19 nt, Artificial Sequence
  Description of Artificial Sequence: Synthetic oligonucleotide
  Sense strand starting at position 3766 of SEQ ID NO: 1881485
gcaauuuauguacgccgga

SEQ ID NO: 2048189 - RNA, 19 nt, Artificial Sequence
  Description of Artificial Sequence: Synthetic oligonucleotide
  Antisense strand to SEQ ID NO: 2048188
uccggcguacauaaauugc

SEQ ID NO: 2048190 - RNA, 19 nt, Artificial Sequence
  Description of Artificial Sequence: Synthetic oligonucleotide
  Sense strand starting at position 8 of SEQ ID NO: 1881487
gugaguggccucuaggaaa

SEQ ID NO: 2048191 - RNA, 19 nt, Artificial Sequence
  Description of Artificial Sequence: Synthetic oligonucleotide
  Antisense strand to SEQ ID NO: 2048190
uuuccuagaggccacucac

SEQ ID NO: 2048192 - RNA, 19 nt, Artificial Sequence
  Description of Artificial Sequence: Synthetic oligonucleotide
  Sense strand starting at position 66 of SEQ ID NO: 1881487
agagaucaacugugacagu

SEQ ID NO: 2048193 - RNA, 19 nt, Artificial Sequence
  Description of Artificial Sequence: Synthetic oligonucleotide
  Antisense strand to SEQ ID NO: 2048192
acugucacaguugaucucu

SEQ ID NO: 2048194 - RNA, 19 nt, Artificial Sequence
  Description of Artificial Sequence: Synthetic oligonucleotide
  Sense strand starting at position 79 of SEQ ID NO: 1881487
gacaguaaguacuuugaua

SEQ ID NO: 2048195 - RNA, 19 nt, Artificial Sequence
  Description of Artificial Sequence: Synthetic oligonucleotide
  Antisense strand to SEQ ID NO: 2048194
uaucaaaguacuuacuguc

SEQ ID NO: 2048196 - RNA, 19 nt, Artificial Sequence
  Description of Artificial Sequence: Synthetic oligonucleotide
  Sense strand starting at position 123 of SEQ ID NO: 1881487
aucuaacuucugugaaaga

SEQ ID NO: 2048197 - RNA, 19 nt, Artificial Sequence
  Description of Artificial Sequence: Synthetic oligonucleotide
  Antisense strand to SEQ ID NO: 2048196
ucuuucacagaaguuagau

SEQ ID NO: 2048198 - RNA, 19 nt, Artificial Sequence
  Description of Artificial Sequence: Synthetic oligonucleotide
  Sense strand starting at position 156 of SEQ ID NO: 1881487
accauaucauguguagaaa

SEQ ID NO: 2048199 - RNA, 19 nt, Artificial Sequence
  Description of Artificial Sequence: Synthetic oligonucleotide
  Antisense strand to SEQ ID NO: 2048198
uuucuacacaugauauggu

SEQ ID NO: 2048200 - RNA, 19 nt, Artificial Sequence
  Description of Artificial Sequence: Synthetic oligonucleotide
  Sense strand starting at position 195 of SEQ ID NO: 1881487
cgaacauauccacacgugu

SEQ ID NO: 2048201 - RNA, 19 nt, Artificial Sequence
  Description of Artificial Sequence: Synthetic oligonucleotide
  Antisense strand to SEQ ID NO: 2048200
acacguguggauauguucg

SEQ ID NO: 2048202 - RNA, 19 nt, Artificial Sequence
  Description of Artificial Sequence: Synthetic oligonucleotide
  Sense strand starting at position 206 of SEQ ID NO: 1881487
acacguguugugucaacgu

SEQ ID NO: 2048203 - RNA, 19 nt, Artificial Sequence
  Description of Artificial Sequence: Synthetic oligonucleotide
  Antisense strand to SEQ ID NO: 2048202
acguugacacaacacgugu

SEQ ID NO: 2048204 - RNA, 19 nt, Artificial Sequence
  Description of Artificial Sequence: Synthetic oligonucleotide
  Sense strand starting at position 368 of SEQ ID NO: 1881487
gagaaacuguuucccuaug

SEQ ID NO: 2048205 - RNA, 19 nt, Artificial Sequence
  Description of Artificial Sequence: Synthetic oligonucleotide
  Antisense strand to SEQ ID NO: 2048204
cauagggaaacaguuucuc

SEQ ID NO: 2048206 - RNA, 19 nt, Artificial Sequence
  Description of Artificial Sequence: Synthetic oligonucleotide
  Sense strand starting at position 400 of SEQ ID NO: 1881487
auaccaugugcucaagaau

SEQ ID NO: 2048207 - RNA, 19 nt, Artificial Sequence
  Description of Artificial Sequence: Synthetic oligonucleotide
  Antisense strand to SEQ ID NO: 2048206
auucuugagcacaugguau

SEQ ID NO: 2048208 - RNA, 19 nt, Artificial Sequence
  Description of Artificial Sequence: Synthetic oligonucleotide
  Sense strand starting at position 403 of SEQ ID NO: 1881487
ccaugugcucaagaauggu

SEQ ID NO: 2048209 - RNA, 19 nt, Artificial Sequence
  Description of Artificial Sequence: Synthetic oligonucleotide
  Antisense strand to SEQ ID NO: 2048208
accauucuugagcacaugg

SEQ ID NO: 2048210 - RNA, 19 nt, Artificial Sequence
  Description of Artificial Sequence: Synthetic oligonucleotide
  Sense strand starting at position 409 of SEQ ID NO: 1881487
gcucaagaauggucacaga

SEQ ID NO: 2048211 - RNA, 19 nt, Artificial Sequence
  Description of Artificial Sequence: Synthetic oligonucleotide
  Antisense strand to SEQ ID NO: 2048210
ucugugaccauucuugagc

SEQ ID NO: 2048212 - RNA, 19 nt, Artificial Sequence
  Description of Artificial Sequence: Synthetic oligonucleotide
  Sense strand starting at position 512 of SEQ ID NO: 1881487
cuggaauguguccaggcuu

SEQ ID NO: 2048213 - RNA, 19 nt, Artificial Sequence
  Description of Artificial Sequence: Synthetic oligonucleotide
  Antisense strand to SEQ ID NO: 2048212
aagccuggacacauuccag

SEQ ID NO: 2048214 - RNA, 19 nt, Artificial Sequence
  Description of Artificial Sequence: Synthetic oligonucleotide
  Sense strand starting at position 1994 of SEQ ID NO: 1881487
ucguccuuguaauuaagga

SEQ ID NO: 2048215 - RNA, 19 nt, Artificial Sequence
  Description of Artificial Sequence: Synthetic oligonucleotide
  Antisense strand to SEQ ID NO: 2048214
uccuuaauuacaaggacga

SEQ ID NO: 2048216 - RNA, 19 nt, Artificial Sequence
  Description of Artificial Sequence: Synthetic oligonucleotide
  Sense strand starting at position 2240 of SEQ ID NO: 1881487
uguagaaggaaguguugau

SEQ ID NO: 2048217 - RNA, 19 nt, Artificial Sequence
  Description of Artificial Sequence: Synthetic oligonucleotide
  Antisense strand to SEQ ID NO: 2048216
aucaacacuuccuucuaca

SEQ ID NO: 2048218 - RNA, 19 nt, Artificial Sequence
  Description of Artificial Sequence: Synthetic oligonucleotide
  Sense strand starting at position 2264 of SEQ ID NO: 1881487
acaaguuuguucccaaacu

SEQ ID NO: 2048219 - RNA, 19 nt, Artificial Sequence
  Description of Artificial Sequence: Synthetic oligonucleotide
  Antisense strand to SEQ ID NO: 2048218
aguuugggaacaaacuugu

SEQ ID NO: 2048220 - RNA, 19 nt, Artificial Sequence
  Description of Artificial Sequence: Synthetic oligonucleotide
  Sense strand starting at position 2433 of SEQ ID NO: 1881487
ccagucguucgcucgaguu

SEQ ID NO: 2048221 - RNA, 19 nt, Artificial Sequence
  Description of Artificial Sequence: Synthetic oligonucleotide
  Antisense strand to SEQ ID NO: 2048220
aacucgagcgaacgacugg

SEQ ID NO: 2048222 - RNA, 19 nt, Artificial Sequence
  Description of Artificial Sequence: Synthetic oligonucleotide
  Sense strand starting at position 2609 of SEQ ID NO: 1881487
cggugacagaauugcuuau

SEQ ID NO: 2048223 - RNA, 19 nt, Artificial Sequence
  Description of Artificial Sequence: Synthetic oligonucleotide
  Antisense strand to SEQ ID NO: 2048222
auaagcaauucugucaccg

SEQ ID NO: 2048224 - RNA, 19 nt, Artificial Sequence
  Description of Artificial Sequence: Synthetic oligonucleotide
  Sense strand starting at position 2620 of SEQ ID NO: 1881487
uugcuuaugccaggaacua

SEQ ID NO: 2048225 - RNA, 19 nt, Artificial Sequence
  Description of Artificial Sequence: Synthetic oligonucleotide
  Antisense strand to SEQ ID NO: 2048224
uaguuccuggcauaagcaa

SEQ ID NO: 2048226 - RNA, 19 nt, Artificial Sequence
  Description of Artificial Sequence: Synthetic oligonucleotide
  Sense strand starting at position 2805 of SEQ ID NO: 1881487
aagugcugcucaucagaag

SEQ ID NO: 2048227 - RNA, 19 nt, Artificial Sequence
  Description of Artificial Sequence: Synthetic oligonucleotide
  Antisense strand to SEQ ID NO: 2048226
cuucugaugagcagcacuu

SEQ ID NO: 2048228 - RNA, 19 nt, Artificial Sequence
  Description of Artificial Sequence: Synthetic oligonucleotide
  Sense strand starting at position 2806 of SEQ ID NO: 1881487
agugcugcucaucagaaga

SEQ ID NO: 2048229 - RNA, 19 nt, Artificial Sequence
  Description of Artificial Sequence: Synthetic oligonucleotide
  Antisense strand to SEQ ID NO: 2048228
ucuucugaugagcagcacu

SEQ ID NO: 2048230 - RNA, 19 nt, Artificial Sequence
  Description of Artificial Sequence: Synthetic oligonucleotide
  Sense strand starting at position 3106 of SEQ ID NO: 1881487
aggagaaagugggaucuga

SEQ ID NO: 2048231 - RNA, 19 nt, Artificial Sequence
  Description of Artificial Sequence: Synthetic oligonucleotide
  Antisense strand to SEQ ID NO: 2048230
ucagaucccacuuucuccu

SEQ ID NO: 2048232 - RNA, 19 nt, Artificial Sequence
  Description of Artificial Sequence: Synthetic oligonucleotide
  Sense strand starting at position 3294 of SEQ ID NO: 1881487
uuuccuauuggucaaauug

SEQ ID NO: 2048233 - RNA, 19 nt, Artificial Sequence
  Description of Artificial Sequence: Synthetic oligonucleotide
  Antisense strand to SEQ ID NO: 2048232
caauuugaccaauaggaaa

SEQ ID NO: 2048234 - RNA, 19 nt, Artificial Sequence
  Description of Artificial Sequence: Synthetic oligonucleotide
  Sense strand starting at position 3304 of SEQ ID NO: 1881487
gucaaauuggugcaguuau

SEQ ID NO: 2048235 - RNA, 19 nt, Artificial Sequence
  Description of Artificial Sequence: Synthetic oligonucleotide
  Antisense strand to SEQ ID NO: 2048234
auaacugcaccaauuugac

SEQ ID NO: 2048236 - RNA, 19 nt, Artificial Sequence
  Description of Artificial Sequence: Synthetic oligonucleotide
  Sense strand starting at position 3315 of SEQ ID NO: 1881487
gcaguuaugggaggacuuu

SEQ ID NO: 2048237 - RNA, 19 nt, Artificial Sequence
  Description of Artificial Sequence: Synthetic oligonucleotide
  Antisense strand to SEQ ID NO: 2048236
aaaguccucccauaacugc

SEQ ID NO: 2048238 - RNA, 19 nt, Artificial Sequence
  Description of Artificial Sequence: Synthetic oligonucleotide
  Sense strand starting at position 3367 of SEQ ID NO: 1881487
gcuauaaaugucugacaca

SEQ ID NO: 2048239 - RNA, 19 nt, Artificial Sequence
  Description of Artificial Sequence: Synthetic oligonucleotide
  Antisense strand to SEQ ID NO: 2048238
ugugucagacauuuauagc

SEQ ID NO: 2048240 - RNA, 19 nt, Artificial Sequence
  Description of Artificial Sequence: Synthetic oligonucleotide
  Sense strand starting at position 3514 of SEQ ID NO: 1881487
ucucuugaggcauagcauu

SEQ ID NO: 2048241 - RNA, 19 nt, Artificial Sequence
  Description of Artificial Sequence: Synthetic oligonucleotide
  Antisense strand to SEQ ID NO: 2048240
aaugcuaugccucaagaga

SEQ ID NO: 2048242 - RNA, 19 nt, Artificial Sequence
  Description of Artificial Sequence: Synthetic oligonucleotide
  Sense strand starting at position 3638 of SEQ ID NO: 1881487
ccauguuguagggaccaau

SEQ ID NO: 2048243 - RNA, 19 nt, Artificial Sequence
  Description of Artificial Sequence: Synthetic oligonucleotide
  Antisense strand to SEQ ID NO: 2048242
auuggucccuacaacaugg

SEQ ID NO: 2048244 - RNA, 19 nt, Artificial Sequence
  Description of Artificial Sequence: Synthetic oligonucleotide
  Sense strand starting at position 3652 of SEQ ID NO: 1881487
ccaauuggauccuuuguaa

SEQ ID NO: 2048245 - RNA, 19 nt, Artificial Sequence
  Description of Artificial Sequence: Synthetic oligonucleotide
  Antisense strand to SEQ ID NO: 2048244
uuacaaaggauccaauugg

SEQ ID NO: 2048246 - RNA, 19 nt, Artificial Sequence
  Description of Artificial Sequence: Synthetic oligonucleotide
  Sense strand starting at position 3655 of SEQ ID NO: 1881487
auuggauccuuuguaaagu

SEQ ID NO: 2048247 - RNA, 19 nt, Artificial Sequence
  Description of Artificial Sequence: Synthetic oligonucleotide
  Antisense strand to SEQ ID NO: 2048246
acuuuacaaaggauccaau

SEQ ID NO: 2048248 - RNA, 19 nt, Artificial Sequence
  Description of Artificial Sequence: Synthetic oligonucleotide
  Sense strand starting at position 3709 of SEQ ID NO: 1881487
agaaguagucguuauuagu

SEQ ID NO: 2048249 - RNA, 19 nt, Artificial Sequence
  Description of Artificial Sequence: Synthetic oligonucleotide
  Antisense strand to SEQ ID NO: 2048248
acuaauaacgacuacuucu

SEQ ID NO: 2048250 - RNA, 19 nt, Artificial Sequence
  Description of Artificial Sequence: Synthetic oligonucleotide
  Sense strand starting at position 3720 of SEQ ID NO: 1881487
uuauuaguaggugaaguca

SEQ ID NO: 2048251 - RNA, 19 nt, Artificial Sequence
  Description of Artificial Sequence: Synthetic oligonucleotide
  Antisense strand to SEQ ID NO: 2048250
ugacuucaccuacuaauaa

SEQ ID NO: 2048252 - RNA, 19 nt, Artificial Sequence
  Description of Artificial Sequence: Synthetic oligonucleotide
  Sense strand starting at position 3728 of SEQ ID NO: 1881487
aggugaagucauuagugcu

SEQ ID NO: 2048253 - RNA, 19 nt, Artificial Sequence
  Description of Artificial Sequence: Synthetic oligonucleotide
  Antisense strand to SEQ ID NO: 2048252
agcacuaaugacuucaccu

SEQ ID NO: 2048254 - RNA, 19 nt, Artificial Sequence
  Description of Artificial Sequence: Synthetic oligonucleotide
  Sense strand starting at position 3735 of SEQ ID NO: 1881487
gucauuagugcucacuuag

SEQ ID NO: 2048255 - RNA, 19 nt, Artificial Sequence
  Description of Artificial Sequence: Synthetic oligonucleotide
  Antisense strand to SEQ ID NO: 2048254
cuaagugagcacuaaugac

SEQ ID NO: 2048256 - RNA, 19 nt, Artificial Sequence
  Description of Artificial Sequence: Synthetic oligonucleotide
  Sense strand starting at position 3823 of SEQ ID NO: 1881487
gagggaucuuugccagaca

SEQ ID NO: 2048257 - RNA, 19 nt, Artificial Sequence
  Description of Artificial Sequence: Synthetic oligonucleotide
  Antisense strand to SEQ ID NO: 2048256
ugucuggcaaagaucccuc

SEQ ID NO: 2048258 - RNA, 19 nt, Artificial Sequence
  Description of Artificial Sequence: Synthetic oligonucleotide
  Sense strand starting at position 3826 of SEQ ID NO: 1881487
ggaucuuugccagacaauu

SEQ ID NO: 2048259 - RNA, 19 nt, Artificial Sequence
  Description of Artificial Sequence: Synthetic oligonucleotide
  Antisense strand to SEQ ID NO: 2048258
aauugucuggcaaagaucc

SEQ ID NO: 2048260 - RNA, 19 nt, Artificial Sequence
  Description of Artificial Sequence: Synthetic oligonucleotide
  Sense strand starting at position 3861 of SEQ ID NO: 1881487
aaaucugauucuguagugu

SEQ ID NO: 2048261 - RNA, 19 nt, Artificial Sequence
  Description of Artificial Sequence: Synthetic oligonucleotide
  Antisense strand to SEQ ID NO: 2048260
acacuacagaaucagauuu

SEQ ID NO: 2048262 - RNA, 19 nt, Artificial Sequence
  Description of Artificial Sequence: Synthetic oligonucleotide
  Sense strand starting at position 3929 of SEQ ID NO: 1881487
uuuguuuacuguucugaag

SEQ ID NO: 2048263 - RNA, 19 nt, Artificial Sequence
  Description of Artificial Sequence: Synthetic oligonucleotide
  Antisense strand to SEQ ID NO: 2048262
cuucagaacaguaaacaaa

SEQ ID NO: 2048264 - RNA, 19 nt, Artificial Sequence
  Description of Artificial Sequence: Synthetic oligonucleotide
  Sense strand starting at position 3949 of SEQ ID NO: 1881487
uuuacagaugguuacugua

SEQ ID NO: 2048265 - RNA, 19 nt, Artificial Sequence
  Description of Artificial Sequence: Synthetic oligonucleotide
  Antisense strand to SEQ ID NO: 2048264
uacaguaaccaucuguaaa

SEQ ID NO: 2048266 - RNA, 19 nt, Artificial Sequence
  Description of Artificial Sequence: Synthetic oligonucleotide
  Sense strand starting at position 3951 of SEQ ID NO: 1881487
uacagaugguuacuguauu

SEQ ID NO: 2048267 - RNA, 19 nt, Artificial Sequence
  Description of Artificial Sequence: Synthetic oligonucleotide
  Antisense strand to SEQ ID NO: 2048266
aauacaguaaccaucugua

SEQ ID NO: 2048268 - RNA, 19 nt, Artificial Sequence
  Description of Artificial Sequence: Synthetic oligonucleotide
  Sense strand starting at position 3958 of SEQ ID NO: 1881487
gguuacuguauuggauaua

SEQ ID NO: 2048269 - RNA, 19 nt, Artificial Sequence
  Description of Artificial Sequence: Synthetic oligonucleotide
  Antisense strand to SEQ ID NO: 2048268
uauauccaauacaguaacc

SEQ ID NO: 2048270 - RNA, 19 nt, Artificial Sequence
  Description of Artificial Sequence: Synthetic oligonucleotide
  Sense strand starting at position 75 of SEQ ID NO: 1881486
caaugugguguccaucaca

SEQ ID NO: 2048271 - RNA, 19 nt, Artificial Sequence
  Description of Artificial Sequence: Synthetic oligonucleotide
  Antisense strand to SEQ ID NO: 2048270
ugugauggacaccacauug

SEQ ID NO: 2048272 - RNA, 19 nt, Artificial Sequence
  Description of Artificial Sequence: Synthetic oligonucleotide
  Sense strand starting at position 757 of SEQ ID NO: 1881486
agcucuuugcuuugacaga

SEQ ID NO: 2048273 - RNA, 19 nt, Artificial Sequence
  Description of Artificial Sequence: Synthetic oligonucleotide
  Antisense strand to SEQ ID NO: 2048272
ucugucaaagcaaagagcu

SEQ ID NO: 2048274 - RNA, 19 nt, Artificial Sequence
  Description of Artificial Sequence: Synthetic oligonucleotide
  Sense strand starting at position 1055 of SEQ ID NO: 1881486
uuaaaugagccucgagaag

SEQ ID NO: 2048275 - RNA, 19 nt, Artificial Sequence
  Description of Artificial Sequence: Synthetic oligonucleotide
  Antisense strand to SEQ ID NO: 2048274
cuucucgaggcucauuuaa

SEQ ID NO: 2048276 - RNA, 19 nt, Artificial Sequence
  Description of Artificial Sequence: Synthetic oligonucleotide
  Sense strand starting at position 1180 of SEQ ID NO: 1881486
cguuucguuaucuucugau

SEQ ID NO: 2048277 - RNA, 19 nt, Artificial Sequence
  Description of Artificial Sequence: Synthetic oligonucleotide
  Antisense strand to SEQ ID NO: 2048276
aucagaagauaacgaaacg

SEQ ID NO: 2048278 - RNA, 19 nt, Artificial Sequence
  Description of Artificial Sequence: Synthetic oligonucleotide
  Sense strand starting at position 1300 of SEQ ID NO: 1881486
gagaggguuuccgcggaga

SEQ ID NO: 2048279 - RNA, 19 nt, Artificial Sequence
  Description of Artificial Sequence: Synthetic oligonucleotide
  Antisense strand to SEQ ID NO: 2048278
ucuccgcggaaacccucuc

SEQ ID NO: 2048280 - RNA, 19 nt, Artificial Sequence
  Description of Artificial Sequence: Synthetic oligonucleotide
  Sense strand starting at position 2195 of SEQ ID NO: 1881486
aggguaacuuauuccaaau

SEQ ID NO: 2048281 - RNA, 19 nt, Artificial Sequence
  Description of Artificial Sequence: Synthetic oligonucleotide
  Antisense strand to SEQ ID NO: 2048280
auuuggaauaaguuacccu

SEQ ID NO: 2048282 - RNA, 19 nt, Artificial Sequence
  Description of Artificial Sequence: Synthetic oligonucleotide
  Sense strand starting at position 2308 of SEQ ID NO: 1881486
ccgugcuuuaaagcgagua

SEQ ID NO: 2048283 - RNA, 19 nt, Artificial Sequence
  Description of Artificial Sequence: Synthetic oligonucleotide
  Antisense strand to SEQ ID NO: 2048282
uacucgcuuuaaagcacgg

SEQ ID NO: 2048284 - RNA, 19 nt, Artificial Sequence
  Description of Artificial Sequence: Synthetic oligonucleotide
  Sense strand starting at position 2320 of SEQ ID NO: 1881486
gcgaguagggcugaauaac

SEQ ID NO: 2048285 - RNA, 19 nt, Artificial Sequence
  Description of Artificial Sequence: Synthetic oligonucleotide
  Antisense strand to SEQ ID NO: 2048284
guuauucagcccuacucgc

SEQ ID NO: 2048286 - RNA, 19 nt, Artificial Sequence
  Description of Artificial Sequence: Synthetic oligonucleotide
  Sense strand starting at position 2329 of SEQ ID NO: 1881486
gcugaauaacgcuacugau

SEQ ID NO: 2048287 - RNA, 19 nt, Artificial Sequence
  Description of Artificial Sequence: Synthetic oligonucleotide
  Antisense strand to SEQ ID NO: 2048286
aucaguagcguuauucagc

SEQ ID NO: 2048288 - RNA, 19 nt, Artificial Sequence
  Description of Artificial Sequence: Synthetic oligonucleotide
  Sense strand starting at position 2381 of SEQ ID NO: 1881486
acgcuaucucuugguagau

SEQ ID NO: 2048289 - RNA, 19 nt, Artificial Sequence
  Description of Artificial Sequence: Synthetic oligonucleotide
  Antisense strand to SEQ ID NO: 2048288
aucuaccaagagauagcgu

SEQ ID NO: 2048290 - RNA, 19 nt, Artificial Sequence
  Description of Artificial Sequence: Synthetic oligonucleotide
  Sense strand starting at position 2382 of SEQ ID NO: 1881486
cgcuaucucuugguagaug

SEQ ID NO: 2048291 - RNA, 19 nt, Artificial Sequence
  Description of Artificial Sequence: Synthetic oligonucleotide
  Antisense strand to SEQ ID NO: 2048290
caucuaccaagagauagcg

SEQ ID NO: 2048292 - RNA, 19 nt, Artificial Sequence
  Description of Artificial Sequence: Synthetic oligonucleotide
  Sense strand starting at position 2700 of SEQ ID NO: 1881486
ccgccaucacuuggaaaca

SEQ ID NO: 2048293 - RNA, 19 nt, Artificial Sequence
  Description of Artificial Sequence: Synthetic oligonucleotide
  Antisense strand to SEQ ID NO: 2048292
uguuuccaagugauggcgg

SEQ ID NO: 2048294 - RNA, 19 nt, Artificial Sequence
  Description of Artificial Sequence: Synthetic oligonucleotide
  Sense strand starting at position 2749 of SEQ ID NO: 1881486
cggaucaggccuuaaaucu

SEQ ID NO: 2048295 - RNA, 19 nt, Artificial Sequence
  Description of Artificial Sequence: Synthetic oligonucleotide
  Antisense strand to SEQ ID NO: 2048294
agauuuaaggccugauccg

SEQ ID NO: 2048296 - RNA, 19 nt, Artificial Sequence
  Description of Artificial Sequence: Synthetic oligonucleotide
  Sense strand starting at position 2757 of SEQ ID NO: 1881486
gccuuaaaucuacgcagaa

SEQ ID NO: 2048297 - RNA, 19 nt, Artificial Sequence
  Description of Artificial Sequence: Synthetic oligonucleotide
  Antisense strand to SEQ ID NO: 2048296
uucugcguagauuuaaggc

SEQ ID NO: 2048298 - RNA, 19 nt, Artificial Sequence
  Description of Artificial Sequence: Synthetic oligonucleotide
  Sense strand starting at position 2758 of SEQ ID NO: 1881486
ccuuaaaucuacgcagaag

SEQ ID NO: 2048299 - RNA, 19 nt, Artificial Sequence
  Description of Artificial Sequence: Synthetic oligonucleotide
  Antisense strand to SEQ ID NO: 2048298
cuucugcguagauuuaagg

SEQ ID NO: 2048300 - RNA, 19 nt, Artificial Sequence
  Description of Artificial Sequence: Synthetic oligonucleotide
  Sense strand starting at position 2866 of SEQ ID NO: 1881486
cugguaaccugaguagagu

SEQ ID NO: 2048301 - RNA, 19 nt, Artificial Sequence
  Description of Artificial Sequence: Synthetic oligonucleotide
  Antisense strand to SEQ ID NO: 2048300
acucuacucagguuaccag

SEQ ID NO: 2048302 - RNA, 19 nt, Artificial Sequence
  Description of Artificial Sequence: Synthetic oligonucleotide
  Sense strand starting at position 2867 of SEQ ID NO: 1881486
ugguaaccugaguagagua

SEQ ID NO: 2048303 - RNA, 19 nt, Artificial Sequence
  Description of Artificial Sequence: Synthetic oligonucleotide
  Antisense strand to SEQ ID NO: 2048302
uacucuacucagguuacca

SEQ ID NO: 2048304 - RNA, 19 nt, Artificial Sequence
  Description of Artificial Sequence: Synthetic oligonucleotide
  Sense strand starting at position 2897 of SEQ ID NO: 1881486
gugggugcuggcuagagaa

SEQ ID NO: 2048305 - RNA, 19 nt, Artificial Sequence
  Description of Artificial Sequence: Synthetic oligonucleotide
  Antisense strand to SEQ ID NO: 2048304
uucucuagccagcacccac

SEQ ID NO: 2048306 - RNA, 19 nt, Artificial Sequence
  Description of Artificial Sequence: Synthetic oligonucleotide
  Sense strand starting at position 3029 of SEQ ID NO: 1881486
gggaaacccucuggaggaa

SEQ ID NO: 2048307 - RNA, 19 nt, Artificial Sequence
  Description of Artificial Sequence: Synthetic oligonucleotide
  Antisense strand to SEQ ID NO: 2048306
uuccuccagaggguuuccc

SEQ ID NO: 2048308 - RNA, 19 nt, Artificial Sequence
  Description of Artificial Sequence: Synthetic oligonucleotide
  Sense strand starting at position 3101 of SEQ ID NO: 1881486
caaagaaacuuggaggaua

SEQ ID NO: 2048309 - RNA, 19 nt, Artificial Sequence
  Description of Artificial Sequence: Synthetic oligonucleotide
  Antisense strand to SEQ ID NO: 2048308
uauccuccaaguuucuuug

SEQ ID NO: 2048310 - RNA, 19 nt, Artificial Sequence
  Description of Artificial Sequence: Synthetic oligonucleotide
  Sense strand starting at position 3235 of SEQ ID NO: 1881486
ucucuaucccaauggcaga

SEQ ID NO: 2048311 - RNA, 19 nt, Artificial Sequence
  Description of Artificial Sequence: Synthetic oligonucleotide
  Antisense strand to SEQ ID NO: 2048310
ucugccauugggauagaga

SEQ ID NO: 2048312 - RNA, 19 nt, Artificial Sequence
  Description of Artificial Sequence: Synthetic oligonucleotide
  Sense strand starting at position 3248 of SEQ ID NO: 1881486
ggcagaggugaguacgaau

SEQ ID NO: 2048313 - RNA, 19 nt, Artificial Sequence
  Description of Artificial Sequence: Synthetic oligonucleotide
  Antisense strand to SEQ ID NO: 2048312
auucguacucaccucugcc

SEQ ID NO: 2048314 - RNA, 19 nt, Artificial Sequence
  Description of Artificial Sequence: Synthetic oligonucleotide
  Sense strand starting at position 3297 of SEQ ID NO: 1881486
acagaaugguguucuuuac

SEQ ID NO: 2048315 - RNA, 19 nt, Artificial Sequence
  Description of Artificial Sequence: Synthetic oligonucleotide
  Antisense strand to SEQ ID NO: 2048314
guaaagaacaccauucugu

SEQ ID NO: 2048316 - RNA, 19 nt, Artificial Sequence
  Description of Artificial Sequence: Synthetic oligonucleotide
  Sense strand starting at position 3511 of SEQ ID NO: 1881486
uugcuaguccugccuuagu

SEQ ID NO: 2048317 - RNA, 19 nt, Artificial Sequence
  Description of Artificial Sequence: Synthetic oligonucleotide
  Antisense strand to SEQ ID NO: 2048316
acuaaggcaggacuagcaa

SEQ ID NO: 2048318 - RNA, 19 nt, Artificial Sequence
  Description of Artificial Sequence: Synthetic oligonucleotide
  Sense strand starting at position 3596 of SEQ ID NO: 1881486
guucgaauccgagagcacu

SEQ ID NO: 2048319 - RNA, 19 nt, Artificial Sequence
  Description of Artificial Sequence: Synthetic oligonucleotide
  Antisense strand to SEQ ID NO: 2048318
agugcucucggauucgaac

SEQ ID NO: 2048320 - RNA, 19 nt, Artificial Sequence
  Description of Artificial Sequence: Synthetic oligonucleotide
  Sense strand starting at position 3607 of SEQ ID NO: 1881486
agagcacucggguguuaag

SEQ ID NO: 2048321 - RNA, 19 nt, Artificial Sequence
  Description of Artificial Sequence: Synthetic oligonucleotide
  Antisense strand to SEQ ID NO: 2048320
cuuaacacccgagugcucu

SEQ ID NO: 2048322 - RNA, 19 nt, Artificial Sequence
  Description of Artificial Sequence: Synthetic oligonucleotide
  Sense strand starting at position 3616 of SEQ ID NO: 1881486
ggguguuaagugggcauga

SEQ ID NO: 2048323 - RNA, 19 nt, Artificial Sequence
  Description of Artificial Sequence: Synthetic oligonucleotide
  Antisense strand to SEQ ID NO: 2048322
ucaugcccacuuaacaccc

SEQ ID NO: 2048324 - RNA, 19 nt, Artificial Sequence
  Description of Artificial Sequence: Synthetic oligonucleotide
  Sense strand starting at position 3662 of SEQ ID NO: 1881486
cacugauuugcacguguuu

SEQ ID NO: 2048325 - RNA, 19 nt, Artificial Sequence
  Description of Artificial Sequence: Synthetic oligonucleotide
  Antisense strand to SEQ ID NO: 2048324
aaacacgugcaaaucagug

SEQ ID NO: 2048326 - RNA, 19 nt, Artificial Sequence
  Description of Artificial Sequence: Synthetic oligonucleotide
  Sense strand starting at position 3664 of SEQ ID NO: 1881486
cugauuugcacguguuuga

SEQ ID NO: 2048327 - RNA, 19 nt, Artificial Sequence
  Description of Artificial Sequence: Synthetic oligonucleotide
  Antisense strand to SEQ ID NO: 2048326
ucaaacacgugcaaaucag

SEQ ID NO: 2048328 - RNA, 19 nt, Artificial Sequence
  Description of Artificial Sequence: Synthetic oligonucleotide
  Sense strand starting at position 3692 of SEQ ID NO: 1881486
gguggauggugauuaccaa

SEQ ID NO: 2048329 - RNA, 19 nt, Artificial Sequence
  Description of Artificial Sequence: Synthetic oligonucleotide
  Antisense strand to SEQ ID NO: 2048328
uugguaaucaccauccacc

SEQ ID NO: 2048330 - RNA, 19 nt, Artificial Sequence
  Description of Artificial Sequence: Synthetic oligonucleotide
  Sense strand starting at position 3734 of SEQ ID NO: 1881486
uuuagaugucuauaaccug

SEQ ID NO: 2048331 - RNA, 19 nt, Artificial Sequence
  Description of Artificial Sequence: Synthetic oligonucleotide
  Antisense strand to SEQ ID NO: 2048330
cagguuauagacaucuaaa

SEQ ID NO: 2048332 - RNA, 19 nt, Artificial Sequence
  Description of Artificial Sequence: Synthetic oligonucleotide
  Sense strand starting at position 3776 of SEQ ID NO: 1881486
accacagaaucguucuacu

SEQ ID NO: 2048333 - RNA, 19 nt, Artificial Sequence
  Description of Artificial Sequence: Synthetic oligonucleotide
  Antisense strand to SEQ ID NO: 2048332
aguagaacgauucuguggu

SEQ ID NO: 2048334 - RNA, 19 nt, Artificial Sequence
  Description of Artificial Sequence: Synthetic oligonucleotide
  Sense strand starting at position 3815 of SEQ ID NO: 1881486
cagccauaguagguuauaa

SEQ ID NO: 2048335 - RNA, 19 nt, Artificial Sequence
  Description of Artificial Sequence: Synthetic oligonucleotide
  Antisense strand to SEQ ID NO: 2048334
uuauaaccuacuauggcug

SEQ ID NO: 2048336 - RNA, 19 nt, Artificial Sequence
  Description of Artificial Sequence: Synthetic oligonucleotide
  Sense strand starting at position 3826 of SEQ ID NO: 1881486
gguuauaagcucgagugga

SEQ ID NO: 2048337 - RNA, 19 nt, Artificial Sequence
  Description of Artificial Sequence: Synthetic oligonucleotide
  Antisense strand to SEQ ID NO: 2048336
uccacucgagcuuauaacc

SEQ ID NO: 2048338 - RNA, 19 nt, Artificial Sequence
  Description of Artificial Sequence: Synthetic oligonucleotide
  Sense strand starting at position 3875 of SEQ ID NO: 1881486
gccuuaagaccgcaucuga

SEQ ID NO: 2048339 - RNA, 19 nt, Artificial Sequence
  Description of Artificial Sequence: Synthetic oligonucleotide
  Antisense strand to SEQ ID NO: 2048338
ucagaugcggucuuaaggc

SEQ ID NO: 2048340 - RNA, 19 nt, Artificial Sequence
  Description of Artificial Sequence: Synthetic oligonucleotide
  Sense strand starting at position 3899 of SEQ ID NO: 1881486
uggcuuguuuauguuuaaa

SEQ ID NO: 2048341 - RNA, 19 nt, Artificial Sequence
  Description of Artificial Sequence: Synthetic oligonucleotide
  Antisense strand to SEQ ID NO: 2048340
uuuaaacauaaacaagcca

SEQ ID NO: 2048342 - RNA, 19 nt, Artificial Sequence
  Description of Artificial Sequence: Synthetic oligonucleotide
  Sense strand starting at position 3901 of SEQ ID NO: 1881486
gcuuguuuauguuuaaaug

SEQ ID NO: 2048343 - RNA, 19 nt, Artificial Sequence
  Description of Artificial Sequence: Synthetic oligonucleotide
  Antisense strand to SEQ ID NO: 2048342
cauuuaaacauaaacaagc

SEQ ID NO: 2048344 - RNA, 19 nt, Artificial Sequence
  Description of Artificial Sequence: Synthetic oligonucleotide
  Sense strand starting at position 3956 of SEQ ID NO: 1881486
uuaaucagaucugauugaa

SEQ ID NO: 2048345 - RNA, 19 nt, Artificial Sequence
  Description of Artificial Sequence: Synthetic oligonucleotide
  Antisense strand to SEQ ID NO: 2048344
uucaaucagaucugauuaa

SEQ ID NO: 2048346 - RNA, 19 nt, Artificial Sequence
  Description of Artificial Sequence: Synthetic oligonucleotide
  Sense strand starting at position 3959 of SEQ ID NO: 1881486
aucagaucugauugaagug

SEQ ID NO: 2048347 - RNA, 19 nt, Artificial Sequence
  Description of Artificial Sequence: Synthetic oligonucleotide
  Antisense strand to SEQ ID NO: 2048346
cacuucaaucagaucugau

SEQ ID NO: 2048348 - RNA, 19 nt, Artificial Sequence
  Description of Artificial Sequence: Synthetic oligonucleotide
  Sense strand starting at position 3974 of SEQ ID NO: 1881486
agugaacagugguugaaga

SEQ ID NO: 2048349 - RNA, 19 nt, Artificial Sequence
  Description of Artificial Sequence: Synthetic oligonucleotide
  Antisense strand to SEQ ID NO: 2048348
ucuucaaccacuguucacu

SEQ ID NO: 2048350 - RNA, 19 nt, Artificial Sequence
  Description of Artificial Sequence: Synthetic oligonucleotide
  Sense strand starting at position 27 of SEQ ID NO: 1881488
acaauagcccucugugauu

SEQ ID NO: 2048351 - RNA, 19 nt, Artificial Sequence
  Description of Artificial Sequence: Synthetic oligonucleotide
  Antisense strand to SEQ ID NO: 2048350
aaucacagagggcuauugu

SEQ ID NO: 2048352 - RNA, 19 nt, Artificial Sequence
  Description of Artificial Sequence: Synthetic oligonucleotide
  Sense strand starting at position 101 of SEQ ID NO: 1881488
uucuuagucuuacuacuga

SEQ ID NO: 2048353 - RNA, 19 nt, Artificial Sequence
  Description of Artificial Sequence: Synthetic oligonucleotide
  Antisense strand to SEQ ID NO: 2048352
ucaguaguaagacuaagaa

SEQ ID NO: 2048354 - RNA, 19 nt, Artificial Sequence
  Description of Artificial Sequence: Synthetic oligonucleotide
  Sense strand starting at position 127 of SEQ ID NO: 1881488
gcuauaaggcaugggucaa

SEQ ID NO: 2048355 - RNA, 19 nt, Artificial Sequence
  Description of Artificial Sequence: Synthetic oligonucleotide
  Antisense strand to SEQ ID NO: 2048354
uugacccaugccuuauagc

SEQ ID NO: 2048356 - RNA, 19 nt, Artificial Sequence
  Description of Artificial Sequence: Synthetic oligonucleotide
  Sense strand starting at position 128 of SEQ ID NO: 1881488
cuauaaggcaugggucaaa

SEQ ID NO: 2048357 - RNA, 19 nt, Artificial Sequence
  Description of Artificial Sequence: Synthetic oligonucleotide
  Antisense strand to SEQ ID NO: 2048356
uuugacccaugccuuauag

SEQ ID NO: 2048358 - RNA, 19 nt, Artificial Sequence
  Description of Artificial Sequence: Synthetic oligonucleotide
  Sense strand starting at position 428 of SEQ ID NO: 1881488
acauauacucuuuguagac

SEQ ID NO: 2048359 - RNA, 19 nt, Artificial Sequence
  Description of Artificial Sequence: Synthetic oligonucleotide
  Antisense strand to SEQ ID NO: 2048358
gucuacaaagaguauaugu

SEQ ID NO: 2048360 - RNA, 19 nt, Artificial Sequence
  Description of Artificial Sequence: Synthetic oligonucleotide
  Sense strand starting at position 470 of SEQ ID NO: 1881488
acauauacucucuguagac

SEQ ID NO: 2048361 - RNA, 19 nt, Artificial Sequence
  Description of Artificial Sequence: Synthetic oligonucleotide
  Antisense strand to SEQ ID NO: 2048360
gucuacagagaguauaugu

SEQ ID NO: 2048362 - RNA, 19 nt, Artificial Sequence
  Description of Artificial Sequence: Synthetic oligonucleotide
  Sense strand starting at position 531 of SEQ ID NO: 1881488
augggcauuccucaauacu

SEQ ID NO: 2048363 - RNA, 19 nt, Artificial Sequence
  Description of Artificial Sequence: Synthetic oligonucleotide
  Antisense strand to SEQ ID NO: 2048362
aguauugaggaaugcccau

SEQ ID NO: 2048364 - RNA, 19 nt, Artificial Sequence
  Description of Artificial Sequence: Synthetic oligonucleotide
  Sense strand starting at position 701 of SEQ ID NO: 1881488
gagacagacuccuuacgga

SEQ ID NO: 2048365 - RNA, 19 nt, Artificial Sequence
  Description of Artificial Sequence: Synthetic oligonucleotide
  Antisense strand to SEQ ID NO: 2048364
uccguaaggagucugucuc

SEQ ID NO: 2048366 - RNA, 19 nt, Artificial Sequence
  Description of Artificial Sequence: Synthetic oligonucleotide
  Sense strand starting at position 819 of SEQ ID NO: 1881488
ggcuaaucacuccagcauu

SEQ ID NO: 2048367 - RNA, 19 nt, Artificial Sequence
  Description of Artificial Sequence: Synthetic oligonucleotide
  Antisense strand to SEQ ID NO: 2048366
aaugcuggagugauuagcc

SEQ ID NO: 2048368 - RNA, 19 nt, Artificial Sequence
  Description of Artificial Sequence: Synthetic oligonucleotide
  Sense strand starting at position 829 of SEQ ID NO: 1881488
uccagcauuuagugauuua

SEQ ID NO: 2048369 - RNA, 19 nt, Artificial Sequence
  Description of Artificial Sequence: Synthetic oligonucleotide
  Antisense strand to SEQ ID NO: 2048368
uaaaucacuaaaugcugga

SEQ ID NO: 2048370 - RNA, 19 nt, Artificial Sequence
  Description of Artificial Sequence: Synthetic oligonucleotide
  Sense strand starting at position 927 of SEQ ID NO: 1881488
ccuucuuaacaaugaaggu

SEQ ID NO: 2048371 - RNA, 19 nt, Artificial Sequence
  Description of Artificial Sequence: Synthetic oligonucleotide
  Antisense strand to SEQ ID NO: 2048370
accuucauuguuaagaagg

SEQ ID NO: 2048372 - RNA, 19 nt, Artificial Sequence
  Description of Artificial Sequence: Synthetic oligonucleotide
  Sense strand starting at position 1065 of SEQ ID NO: 1881488
gggugaguauagagaagaa

SEQ ID NO: 2048373 - RNA, 19 nt, Artificial Sequence
  Description of Artificial Sequence: Synthetic oligonucleotide
  Antisense strand to SEQ ID NO: 2048372
uucuucucuauacucaccc

SEQ ID NO: 2048374 - RNA, 19 nt, Artificial Sequence
  Description of Artificial Sequence: Synthetic oligonucleotide
  Sense strand starting at position 1121 of SEQ ID NO: 1881488
guaucucaauuguuauaug

SEQ ID NO: 2048375 - RNA, 19 nt, Artificial Sequence
  Description of Artificial Sequence: Synthetic oligonucleotide
  Antisense strand to SEQ ID NO: 2048374
cauauaacaauugagauac

SEQ ID NO: 2048376 - RNA, 19 nt, Artificial Sequence
  Description of Artificial Sequence: Synthetic oligonucleotide
  Sense strand starting at position 1154 of SEQ ID NO: 1881488
caaagagguuaguuacucu

SEQ ID NO: 2048377 - RNA, 19 nt, Artificial Sequence
  Description of Artificial Sequence: Synthetic oligonucleotide
  Antisense strand to SEQ ID NO: 2048376
agaguaacuaaccucuuug

SEQ ID NO: 2048378 - RNA, 19 nt, Artificial Sequence
  Description of Artificial Sequence: Synthetic oligonucleotide
  Sense strand starting at position 1157 of SEQ ID NO: 1881488
agagguuaguuacucuaag

SEQ ID NO: 2048379 - RNA, 19 nt, Artificial Sequence
  Description of Artificial Sequence: Synthetic oligonucleotide
  Antisense strand to SEQ ID NO: 2048378
cuuagaguaacuaaccucu

SEQ ID NO: 2048380 - RNA, 19 nt, Artificial Sequence
  Description of Artificial Sequence: Synthetic oligonucleotide
  Sense strand starting at position 1447 of SEQ ID NO: 1881488
agcagccuuagguauaaga

SEQ ID NO: 2048381 - RNA, 19 nt, Artificial Sequence
  Description of Artificial Sequence: Synthetic oligonucleotide
  Antisense strand to SEQ ID NO: 2048380
ucuuauaccuaaggcugcu

SEQ ID NO: 2048382 - RNA, 19 nt, Artificial Sequence
  Description of Artificial Sequence: Synthetic oligonucleotide
  Sense strand starting at position 1503 of SEQ ID NO: 1881488
ugaugucaugacgaggcua

SEQ ID NO: 2048383 - RNA, 19 nt, Artificial Sequence
  Description of Artificial Sequence: Synthetic oligonucleotide
  Antisense strand to SEQ ID NO: 2048382
uagccucgucaugacauca

SEQ ID NO: 2048384 - RNA, 19 nt, Artificial Sequence
  Description of Artificial Sequence: Synthetic oligonucleotide
  Sense strand starting at position 1698 of SEQ ID NO: 1881488
ccagaagguccugggcaau

SEQ ID NO: 2048385 - RNA, 19 nt, Artificial Sequence
  Description of Artificial Sequence: Synthetic oligonucleotide
  Antisense strand to SEQ ID NO: 2048384
auugcccaggaccuucugg

SEQ ID NO: 2048386 - RNA, 19 nt, Artificial Sequence
  Description of Artificial Sequence: Synthetic oligonucleotide
  Sense strand starting at position 1880 of SEQ ID NO: 1881488
gggauuguauuucgaaaga

SEQ ID NO: 2048387 - RNA, 19 nt, Artificial Sequence
  Description of Artificial Sequence: Synthetic oligonucleotide
  Antisense strand to SEQ ID NO: 2048386
ucuuucgaaauacaauccc

SEQ ID NO: 2048388 - RNA, 19 nt, Artificial Sequence
  Description of Artificial Sequence: Synthetic oligonucleotide
  Sense strand starting at position 1890 of SEQ ID NO: 1881488
uucgaaagauccgccauuu

SEQ ID NO: 2048389 - RNA, 19 nt, Artificial Sequence
  Description of Artificial Sequence: Synthetic oligonucleotide
  Antisense strand to SEQ ID NO: 2048388
aaauggcggaucuuucgaa

SEQ ID NO: 2048390 - RNA, 19 nt, Artificial Sequence
  Description of Artificial Sequence: Synthetic oligonucleotide
  Sense strand starting at position 2358 of SEQ ID NO: 1881488
gugaaagaccuuuaauguc

SEQ ID NO: 2048391 - RNA, 19 nt, Artificial Sequence
  Description of Artificial Sequence: Synthetic oligonucleotide
  Antisense strand to SEQ ID NO: 2048390
gacauuaaaggucuuucac

SEQ ID NO: 2048392 - RNA, 19 nt, Artificial Sequence
  Description of Artificial Sequence: Synthetic oligonucleotide
  Sense strand starting at position 2491 of SEQ ID NO: 1881488
ugcagaugaaguggucaaa

SEQ ID NO: 2048393 - RNA, 19 nt, Artificial Sequence
  Description of Artificial Sequence: Synthetic oligonucleotide
  Antisense strand to SEQ ID NO: 2048392
uuugaccacuucaucugca

SEQ ID NO: 2048394 - RNA, 19 nt, Artificial Sequence
  Description of Artificial Sequence: Synthetic oligonucleotide
  Sense strand starting at position 2608 of SEQ ID NO: 1881488
aucgguuuaagacgucaaa

SEQ ID NO: 2048395 - RNA, 19 nt, Artificial Sequence
  Description of Artificial Sequence: Synthetic oligonucleotide
  Antisense strand to SEQ ID NO: 2048394
uuugacgucuuaaaccgau

SEQ ID NO: 2048396 - RNA, 19 nt, Artificial Sequence
  Description of Artificial Sequence: Synthetic oligonucleotide
  Sense strand starting at position 2629 of SEQ ID NO: 1881488
gcaacuagauuugaaauga

SEQ ID NO: 2048397 - RNA, 19 nt, Artificial Sequence
  Description of Artificial Sequence: Synthetic oligonucleotide
  Antisense strand to SEQ ID NO: 2048396
ucauuucaaaucuaguugc

SEQ ID NO: 2048398 - RNA, 19 nt, Artificial Sequence
  Description of Artificial Sequence: Synthetic oligonucleotide
  Sense strand starting at position 2741 of SEQ ID NO: 1881488
ggaucuaagucaucaaauu

SEQ ID NO: 2048399 - RNA, 19 nt, Artificial Sequence
  Description of Artificial Sequence: Synthetic oligonucleotide
  Antisense strand to SEQ ID NO: 2048398
aauuugaugacuuagaucc

SEQ ID NO: 2048400 - RNA, 19 nt, Artificial Sequence
  Description of Artificial Sequence: Synthetic oligonucleotide
  Sense strand starting at position 2769 of SEQ ID NO: 1881488
ccaucugcugcugauauau

SEQ ID NO: 2048401 - RNA, 19 nt, Artificial Sequence
  Description of Artificial Sequence: Synthetic oligonucleotide
  Antisense strand to SEQ ID NO: 2048400
auauaucagcagcagaugg

SEQ ID NO: 2048402 - RNA, 19 nt, Artificial Sequence
  Description of Artificial Sequence: Synthetic oligonucleotide
  Sense strand starting at position 2778 of SEQ ID NO: 1881488
gcugauauauuuguucugu

SEQ ID NO: 2048403 - RNA, 19 nt, Artificial Sequence
  Description of Artificial Sequence: Synthetic oligonucleotide
  Antisense strand to SEQ ID NO: 2048402
acagaacaaauauaucagc

SEQ ID NO: 2048404 - RNA, 19 nt, Artificial Sequence
  Description of Artificial Sequence: Synthetic oligonucleotide
  Sense strand starting at position 2783 of SEQ ID NO: 1881488
uauauuuguucuguacagu

SEQ ID NO: 2048405 - RNA, 19 nt, Artificial Sequence
  Description of Artificial Sequence: Synthetic oligonucleotide
  Antisense strand to SEQ ID NO: 2048404
acuguacagaacaaauaua

SEQ ID NO: 2048406 - RNA, 19 nt, Artificial Sequence
  Description of Artificial Sequence: Synthetic oligonucleotide
  Sense strand starting at position 2843 of SEQ ID NO: 1881488
cuacuagguagguaagagu

SEQ ID NO: 2048407 - RNA, 19 nt, Artificial Sequence
  Description of Artificial Sequence: Synthetic oligonucleotide
  Antisense strand to SEQ ID NO: 2048406
acucuuaccuaccuaguag

SEQ ID NO: 2048408 - RNA, 19 nt, Artificial Sequence
  Description of Artificial Sequence: Synthetic oligonucleotide
  Sense strand starting at position 2870 of SEQ ID NO: 1881488
cuugucaucagucaguuga

SEQ ID NO: 2048409 - RNA, 19 nt, Artificial Sequence
  Description of Artificial Sequence: Synthetic oligonucleotide
  Antisense strand to SEQ ID NO: 2048408
ucaacugacugaugacaag

SEQ ID NO: 2048410 - RNA, 19 nt, Artificial Sequence
  Description of Artificial Sequence: Synthetic oligonucleotide
  Sense strand starting at position 2872 of SEQ ID NO: 1881488
ugucaucagucaguugaau

SEQ ID NO: 2048411 - RNA, 19 nt, Artificial Sequence
  Description of Artificial Sequence: Synthetic oligonucleotide
  Antisense strand to SEQ ID NO: 2048410
auucaacugacugaugaca

SEQ ID NO: 2048412 - RNA, 19 nt, Artificial Sequence
  Description of Artificial Sequence: Synthetic oligonucleotide
  Sense strand starting at position 2878 of SEQ ID NO: 1881488
cagucaguugaauaaguaa

SEQ ID NO: 2048413 - RNA, 19 nt, Artificial Sequence
  Description of Artificial Sequence: Synthetic oligonucleotide
  Antisense strand to SEQ ID NO: 2048412
uuacuuauucaacugacug

SEQ ID NO: 2048414 - RNA, 19 nt, Artificial Sequence
  Description of Artificial Sequence: Synthetic oligonucleotide
  Sense strand starting at position 3040 of SEQ ID NO: 1881488
agcugaauucuguaucauu

SEQ ID NO: 2048415 - RNA, 19 nt, Artificial Sequence
  Description of Artificial Sequence: Synthetic oligonucleotide
  Antisense strand to SEQ ID NO: 2048414
aaugauacagaauucagcu

SEQ ID NO: 2048416 - RNA, 19 nt, Artificial Sequence
  Description of Artificial Sequence: Synthetic oligonucleotide
  Sense strand starting at position 3110 of SEQ ID NO: 1881488
ccacucuacugucuaaguu

SEQ ID NO: 2048417 - RNA, 19 nt, Artificial Sequence
  Description of Artificial Sequence: Synthetic oligonucleotide
  Antisense strand to SEQ ID NO: 2048416
aacuuagacaguagagugg

SEQ ID NO: 2048418 - RNA, 19 nt, Artificial Sequence
  Description of Artificial Sequence: Synthetic oligonucleotide
  Sense strand starting at position 3280 of SEQ ID NO: 1881488
cuaccagaugcugagagua

SEQ ID NO: 2048419 - RNA, 19 nt, Artificial Sequence
  Description of Artificial Sequence: Synthetic oligonucleotide
  Antisense strand to SEQ ID NO: 2048418
uacucucagcaucugguag

SEQ ID NO: 2048420 - RNA, 19 nt, Artificial Sequence
  Description of Artificial Sequence: Synthetic oligonucleotide
  Sense strand starting at position 3295 of SEQ ID NO: 1881488
aguauaaaguguucucaau

SEQ ID NO: 2048421 - RNA, 19 nt, Artificial Sequence
  Description of Artificial Sequence: Synthetic oligonucleotide
  Antisense strand to SEQ ID NO: 2048420
auugagaacacuuuauacu

SEQ ID NO: 2048422 - RNA, 19 nt, Artificial Sequence
  Description of Artificial Sequence: Synthetic oligonucleotide
  Sense strand starting at position 3422 of SEQ ID NO: 1881488
cgugcaccucgggaacauu

SEQ ID NO: 2048423 - RNA, 19 nt, Artificial Sequence
  Description of Artificial Sequence: Synthetic oligonucleotide
  Antisense strand to SEQ ID NO: 2048422
aauguucccgaggugcacg

SEQ ID NO: 2048424 - RNA, 19 nt, Artificial Sequence
  Description of Artificial Sequence: Synthetic oligonucleotide
  Sense strand starting at position 3431 of SEQ ID NO: 1881488
cgggaacauuaugacauuu

SEQ ID NO: 2048425 - RNA, 19 nt, Artificial Sequence
  Description of Artificial Sequence: Synthetic oligonucleotide
  Antisense strand to SEQ ID NO: 2048424
aaaugucauaauguucccg

SEQ ID NO: 2048426 - RNA, 19 nt, Artificial Sequence
  Description of Artificial Sequence: Synthetic oligonucleotide
  Sense strand starting at position 3454 of SEQ ID NO: 1881488
ggugggcuucgcgaggaaa

SEQ ID NO: 2048427 - RNA, 19 nt, Artificial Sequence
  Description of Artificial Sequence: Synthetic oligonucleotide
  Antisense strand to SEQ ID NO: 2048426
uuuccucgcgaagcccacc

SEQ ID NO: 2048428 - RNA, 19 nt, Artificial Sequence
  Description of Artificial Sequence: Synthetic oligonucleotide
  Sense strand starting at position 3622 of SEQ ID NO: 1881488
cgcagugugcgugucaaca

SEQ ID NO: 2048429 - RNA, 19 nt, Artificial Sequence
  Description of Artificial Sequence: Synthetic oligonucleotide
  Antisense strand to SEQ ID NO: 2048428
uguugacacgcacacugcg

SEQ ID NO: 2048430 - RNA, 19 nt, Artificial Sequence
  Description of Artificial Sequence: Synthetic oligonucleotide
  Sense strand starting at position 393 of SEQ ID NO: 1881489
ucuuuaucuguaggaaauu

SEQ ID NO: 2048431 - RNA, 19 nt, Artificial Sequence
  Description of Artificial Sequence: Synthetic oligonucleotide
  Antisense strand to SEQ ID NO: 2048430
aauuuccuacagauaaaga

SEQ ID NO: 2048432 - RNA, 19 nt, Artificial Sequence
  Description of Artificial Sequence: Synthetic oligonucleotide
  Sense strand starting at position 431 of SEQ ID NO: 1881489
guaaaugggaguugcagau

SEQ ID NO: 2048433 - RNA, 19 nt, Artificial Sequence
  Description of Artificial Sequence: Synthetic oligonucleotide
  Antisense strand to SEQ ID NO: 2048432
aucugcaacucccauuuac

SEQ ID NO: 2048434 - RNA, 19 nt, Artificial Sequence
  Description of Artificial Sequence: Synthetic oligonucleotide
  Sense strand starting at position 584 of SEQ ID NO: 1881489
uaguaaagacaguguauaa

SEQ ID NO: 2048435 - RNA, 19 nt, Artificial Sequence
  Description of Artificial Sequence: Synthetic oligonucleotide
  Antisense strand to SEQ ID NO: 2048434
uuauacacugucuuuacua

SEQ ID NO: 2048436 - RNA, 19 nt, Artificial Sequence
  Description of Artificial Sequence: Synthetic oligonucleotide
  Sense strand starting at position 637 of SEQ ID NO: 1881489
gagacacauggcugaaacu

SEQ ID NO: 2048437 - RNA, 19 nt, Artificial Sequence
  Description of Artificial Sequence: Synthetic oligonucleotide
  Antisense strand to SEQ ID NO: 2048436
aguuucagccaugugucuc

SEQ ID NO: 2048438 - RNA, 19 nt, Artificial Sequence
  Description of Artificial Sequence: Synthetic oligonucleotide
  Sense strand starting at position 657 of SEQ ID NO: 1881489
cuauuaauaccuugagguu

SEQ ID NO: 2048439 - RNA, 19 nt, Artificial Sequence
  Description of Artificial Sequence: Synthetic oligonucleotide
  Antisense strand to SEQ ID NO: 2048438
aaccucaagguauuaauag

SEQ ID NO: 2048440 - RNA, 19 nt, Artificial Sequence
  Description of Artificial Sequence: Synthetic oligonucleotide
  Sense strand starting at position 788 of SEQ ID NO: 1881489
cucucagagaagugguaaa

SEQ ID NO: 2048441 - RNA, 19 nt, Artificial Sequence
  Description of Artificial Sequence: Synthetic oligonucleotide
  Antisense strand to SEQ ID NO: 2048440
uuuaccacuucucugagag

SEQ ID NO: 2048442 - RNA, 19 nt, Artificial Sequence
  Description of Artificial Sequence: Synthetic oligonucleotide
  Sense strand starting at position 801 of SEQ ID NO: 1881489
gguaaaucauagucauuaa

SEQ ID NO: 2048443 - RNA, 19 nt, Artificial Sequence
  Description of Artificial Sequence: Synthetic oligonucleotide
  Antisense strand to SEQ ID NO: 2048442
uuaaugacuaugauuuacc

SEQ ID NO: 2048444 - RNA, 19 nt, Artificial Sequence
  Description of Artificial Sequence: Synthetic oligonucleotide
  Sense strand starting at position 968 of SEQ ID NO: 1881489
gcaugugauuucuaaauuu

SEQ ID NO: 2048445 - RNA, 19 nt, Artificial Sequence
  Description of Artificial Sequence: Synthetic oligonucleotide
  Antisense strand to SEQ ID NO: 2048444
aaauuuagaaaucacaugc

SEQ ID NO: 2048446 - RNA, 19 nt, Artificial Sequence
  Description of Artificial Sequence: Synthetic oligonucleotide
  Sense strand starting at position 1179 of SEQ ID NO: 1881489
uucuuuauuucuguuccga

SEQ ID NO: 2048447 - RNA, 19 nt, Artificial Sequence
  Description of Artificial Sequence: Synthetic oligonucleotide
  Antisense strand to SEQ ID NO: 2048446
ucggaacagaaauaaagaa

SEQ ID NO: 2048448 - RNA, 19 nt, Artificial Sequence
  Description of Artificial Sequence: Synthetic oligonucleotide
  Sense strand starting at position 1181 of SEQ ID NO: 1881489
cuuuauuucuguuccgagu

SEQ ID NO: 2048449 - RNA, 19 nt, Artificial Sequence
  Description of Artificial Sequence: Synthetic oligonucleotide
  Antisense strand to SEQ ID NO: 2048448
acucggaacagaaauaaag

SEQ ID NO: 2048450 - RNA, 19 nt, Artificial Sequence
  Description of Artificial Sequence: Synthetic oligonucleotide
  Sense strand starting at position 1208 of SEQ ID NO: 1881489
gcaagaauugcgcugcccu

SEQ ID NO: 2048451 - RNA, 19 nt, Artificial Sequence
  Description of Artificial Sequence: Synthetic oligonucleotide
  Antisense strand to SEQ ID NO: 2048450
agggcagcgcaauucuugc

SEQ ID NO: 2048452 - RNA, 19 nt, Artificial Sequence
  Description of Artificial Sequence: Synthetic oligonucleotide
  Sense strand starting at position 1323 of SEQ ID NO: 1881489
gggcuagcugaauaugauc

SEQ ID NO: 2048453 - RNA, 19 nt, Artificial Sequence
  Description of Artificial Sequence: Synthetic oligonucleotide
  Antisense strand to SEQ ID NO: 2048452
gaucauauucagcuagccc

SEQ ID NO: 2048454 - RNA, 19 nt, Artificial Sequence
  Description of Artificial Sequence: Synthetic oligonucleotide
  Sense strand starting at position 1409 of SEQ ID NO: 1881489
acacaaaggucacugcuua

SEQ ID NO: 2048455 - RNA, 19 nt, Artificial Sequence
  Description of Artificial Sequence: Synthetic oligonucleotide
  Antisense strand to SEQ ID NO: 2048454
uaagcagugaccuuugugu

SEQ ID NO: 2048456 - RNA, 19 nt, Artificial Sequence
  Description of Artificial Sequence: Synthetic oligonucleotide
  Sense strand starting at position 1704 of SEQ ID NO: 1881489
cuuugcuagcaugacaauu

SEQ ID NO: 2048457 - RNA, 19 nt, Artificial Sequence
  Description of Artificial Sequence: Synthetic oligonucleotide
  Antisense strand to SEQ ID NO: 2048456
aauugucaugcuagcaaag

SEQ ID NO: 2048458 - RNA, 19 nt, Artificial Sequence
  Description of Artificial Sequence: Synthetic oligonucleotide
  Sense strand starting at position 1827 of SEQ ID NO: 1881489
cccaaaggacuuugauuau

SEQ ID NO: 2048459 - RNA, 19 nt, Artificial Sequence
  Description of Artificial Sequence: Synthetic oligonucleotide
  Antisense strand to SEQ ID NO: 2048458
auaaucaaaguccuuuggg

SEQ ID NO: 2048460 - RNA, 19 nt, Artificial Sequence
  Description of Artificial Sequence: Synthetic oligonucleotide
  Sense strand starting at position 1833 of SEQ ID NO: 1881489
ggacuuugauuauaauuug

SEQ ID NO: 2048461 - RNA, 19 nt, Artificial Sequence
  Description of Artificial Sequence: Synthetic oligonucleotide
  Antisense strand to SEQ ID NO: 2048460
caaauuauaaucaaagucc

SEQ ID NO: 2048462 - RNA, 19 nt, Artificial Sequence
  Description of Artificial Sequence: Synthetic oligonucleotide
  Sense strand starting at position 1933 of SEQ ID NO: 1881489
aguuuauagcacugaaaug

SEQ ID NO: 2048463 - RNA, 19 nt, Artificial Sequence
  Description of Artificial Sequence: Synthetic oligonucleotide
  Antisense strand to SEQ ID NO: 2048462
cauuucagugcuauaaacu

SEQ ID NO: 2048464 - RNA, 19 nt, Artificial Sequence
  Description of Artificial Sequence: Synthetic oligonucleotide
  Sense strand starting at position 1945 of SEQ ID NO: 1881489
ugaaaugucuggcuuauaa

SEQ ID NO: 2048465 - RNA, 19 nt, Artificial Sequence
  Description of Artificial Sequence: Synthetic oligonucleotide
  Antisense strand to SEQ ID NO: 2048464
uuauaagccagacauuuca

SEQ ID NO: 2048466 - RNA, 19 nt, Artificial Sequence
  Description of Artificial Sequence: Synthetic oligonucleotide
  Sense strand starting at position 1947 of SEQ ID NO: 1881489
aaaugucuggcuuauaaag

SEQ ID NO: 2048467 - RNA, 19 nt, Artificial Sequence
  Description of Artificial Sequence: Synthetic oligonucleotide
  Antisense strand to SEQ ID NO: 2048466
cuuuauaagccagacauuu

SEQ ID NO: 2048468 - RNA, 19 nt, Artificial Sequence
  Description of Artificial Sequence: Synthetic oligonucleotide
  Sense strand starting at position 1962 of SEQ ID NO: 1881489
aaagacgaucugugacaga

SEQ ID NO: 2048469 - RNA, 19 nt, Artificial Sequence
  Description of Artificial Sequence: Synthetic oligonucleotide
  Antisense strand to SEQ ID NO: 2048468
ucugucacagaucgucuuu

SEQ ID NO: 2048470 - RNA, 19 nt, Artificial Sequence
  Description of Artificial Sequence: Synthetic oligonucleotide
  Sense strand starting at position 2454 of SEQ ID NO: 1881489
acuugagauuuauaagauc

SEQ ID NO: 2048471 - RNA, 19 nt, Artificial Sequence
  Description of Artificial Sequence: Synthetic oligonucleotide
  Antisense strand to SEQ ID NO: 2048470
gaucuuauaaaucucaagu

SEQ ID NO: 2048472 - RNA, 19 nt, Artificial Sequence
  Description of Artificial Sequence: Synthetic oligonucleotide
  Sense strand starting at position 2457 of SEQ ID NO: 1881489
ugagauuuauaagaucucu

SEQ ID NO: 2048473 - RNA, 19 nt, Artificial Sequence
  Description of Artificial Sequence: Synthetic oligonucleotide
  Antisense strand to SEQ ID NO: 2048472
agagaucuuauaaaucuca

SEQ ID NO: 2048474 - RNA, 19 nt, Artificial Sequence
  Description of Artificial Sequence: Synthetic oligonucleotide
  Sense strand starting at position 2578 of SEQ ID NO: 1881489
ggcuauuuaccuugccaug

SEQ ID NO: 2048475 - RNA, 19 nt, Artificial Sequence
  Description of Artificial Sequence: Synthetic oligonucleotide
  Antisense strand to SEQ ID NO: 2048474
cauggcaagguaaauagcc

SEQ ID NO: 2048476 - RNA, 19 nt, Artificial Sequence
  Description of Artificial Sequence: Synthetic oligonucleotide
  Sense strand starting at position 2602 of SEQ ID NO: 1881489
gguuaauacuauguaagua

SEQ ID NO: 2048477 - RNA, 19 nt, Artificial Sequence
  Description of Artificial Sequence: Synthetic oligonucleotide
  Antisense strand to SEQ ID NO: 2048476
uacuuacauaguauuaacc

SEQ ID NO: 2048478 - RNA, 19 nt, Artificial Sequence
  Description of Artificial Sequence: Synthetic oligonucleotide
  Sense strand starting at position 2730 of SEQ ID NO: 1881489
cuggaagaguaguuauauu

SEQ ID NO: 2048479 - RNA, 19 nt, Artificial Sequence
  Description of Artificial Sequence: Synthetic oligonucleotide
  Antisense strand to SEQ ID NO: 2048478
aauauaacuacucuuccag

SEQ ID NO: 2048480 - RNA, 19 nt, Artificial Sequence
  Description of Artificial Sequence: Synthetic oligonucleotide
  Sense strand starting at position 2872 of SEQ ID NO: 1881489
acaguuucaggugggaauu

SEQ ID NO: 2048481 - RNA, 19 nt, Artificial Sequence
  Description of Artificial Sequence: Synthetic oligonucleotide
  Antisense strand to SEQ ID NO: 2048480
aauucccaccugaaacugu

SEQ ID NO: 2048482 - RNA, 19 nt, Artificial Sequence
  Description of Artificial Sequence: Synthetic oligonucleotide
  Sense strand starting at position 2882 of SEQ ID NO: 1881489
gugggaauucuauauguga

SEQ ID NO: 2048483 - RNA, 19 nt, Artificial Sequence
  Description of Artificial Sequence: Synthetic oligonucleotide
  Antisense strand to SEQ ID NO: 2048482
ucacauauagaauucccac

SEQ ID NO: 2048484 - RNA, 19 nt, Artificial Sequence
  Description of Artificial Sequence: Synthetic oligonucleotide
  Sense strand starting at position 2884 of SEQ ID NO: 1881489
gggaauucuauaugugagc

SEQ ID NO: 2048485 - RNA, 19 nt, Artificial Sequence
  Description of Artificial Sequence: Synthetic oligonucleotide
  Antisense strand to SEQ ID NO: 2048484
gcucacauauagaauuccc

SEQ ID NO: 2048486 - RNA, 19 nt, Artificial Sequence
  Description of Artificial Sequence: Synthetic oligonucleotide
  Sense strand starting at position 2909 of SEQ ID NO: 1881489
acucguugacauuauaacu

SEQ ID NO: 2048487 - RNA, 19 nt, Artificial Sequence
  Description of Artificial Sequence: Synthetic oligonucleotide
  Antisense strand to SEQ ID NO: 2048486
aguuauaaugucaacgagu

SEQ ID NO: 2048488 - RNA, 19 nt, Artificial Sequence
  Description of Artificial Sequence: Synthetic oligonucleotide
  Sense strand starting at position 3094 of SEQ ID NO: 1881489
gacuguggccuuuaauauu

SEQ ID NO: 2048489 - RNA, 19 nt, Artificial Sequence
  Description of Artificial Sequence: Synthetic oligonucleotide
  Antisense strand to SEQ ID NO: 2048488
aauauuaaaggccacaguc

SEQ ID NO: 2048490 - RNA, 19 nt, Artificial Sequence
  Description of Artificial Sequence: Synthetic oligonucleotide
  Sense strand starting at position 3391 of SEQ ID NO: 1881489
cgugguuugaauuacaaag

SEQ ID NO: 2048491 - RNA, 19 nt, Artificial Sequence
  Description of Artificial Sequence: Synthetic oligonucleotide
  Antisense strand to SEQ ID NO: 2048490
cuuuguaauucaaaccacg

SEQ ID NO: 2048492 - RNA, 19 nt, Artificial Sequence
  Description of Artificial Sequence: Synthetic oligonucleotide
  Sense strand starting at position 3408 of SEQ ID NO: 1881489
aguuauuaaugccuaauag

SEQ ID NO: 2048493 - RNA, 19 nt, Artificial Sequence
  Description of Artificial Sequence: Synthetic oligonucleotide
  Antisense strand to SEQ ID NO: 2048492
cuauuaggcauuaauaacu

SEQ ID NO: 2048494 - RNA, 19 nt, Artificial Sequence
  Description of Artificial Sequence: Synthetic oligonucleotide
  Sense strand starting at position 3409 of SEQ ID NO: 1881489
guuauuaaugccuaauaga

SEQ ID NO: 2048495 - RNA, 19 nt, Artificial Sequence
  Description of Artificial Sequence: Synthetic oligonucleotide
  Antisense strand to SEQ ID NO: 2048494
ucuauuaggcauuaauaac

SEQ ID NO: 2048496 - RNA, 19 nt, Artificial Sequence
  Description of Artificial Sequence: Synthetic oligonucleotide
  Sense strand starting at position 3425 of SEQ ID NO: 1881489
agaugauauuaaguguuac

SEQ ID NO: 2048497 - RNA, 19 nt, Artificial Sequence
  Description of Artificial Sequence: Synthetic oligonucleotide
  Antisense strand to SEQ ID NO: 2048496
guaacacuuaauaucaucu

SEQ ID NO: 2048498 - RNA, 19 nt, Artificial Sequence
  Description of Artificial Sequence: Synthetic oligonucleotide
  Sense strand starting at position 3502 of SEQ ID NO: 1881489
ugacuaaauuaugcagaau

SEQ ID NO: 2048499 - RNA, 19 nt, Artificial Sequence
  Description of Artificial Sequence: Synthetic oligonucleotide
  Antisense strand to SEQ ID NO: 2048498
auucugcauaauuuaguca

SEQ ID NO: 2048500 - RNA, 19 nt, Artificial Sequence
  Description of Artificial Sequence: Synthetic oligonucleotide
  Sense strand starting at position 3687 of SEQ ID NO: 1881489
ugaauuggccuuuauguag

SEQ ID NO: 2048501 - RNA, 19 nt, Artificial Sequence
  Description of Artificial Sequence: Synthetic oligonucleotide
  Antisense strand to SEQ ID NO: 2048500
cuacauaaaggccaauuca

SEQ ID NO: 2048502 - RNA, 19 nt, Artificial Sequence
  Description of Artificial Sequence: Synthetic oligonucleotide
  Sense strand starting at position 3889 of SEQ ID NO: 1881489
auauuaaaucuguggguua

SEQ ID NO: 2048503 - RNA, 19 nt, Artificial Sequence
  Description of Artificial Sequence: Synthetic oligonucleotide
  Antisense strand to SEQ ID NO: 2048502
uaacccacagauuuaauau

SEQ ID NO: 2048504 - RNA, 19 nt, Artificial Sequence
  Description of Artificial Sequence: Synthetic oligonucleotide
  Sense strand starting at position 3891 of SEQ ID NO: 1881489
auuaaaucuguggguuaaa

SEQ ID NO: 2048505 - RNA, 19 nt, Artificial Sequence
  Description of Artificial Sequence: Synthetic oligonucleotide
  Antisense strand to SEQ ID NO: 2048504
uuuaacccacagauuuaau

SEQ ID NO: 2048506 - RNA, 19 nt, Artificial Sequence
  Description of Artificial Sequence: Synthetic oligonucleotide
  Sense strand starting at position 3892 of SEQ ID NO: 1881489
uuaaaucuguggguuaaac

SEQ ID NO: 2048507 - RNA, 19 nt, Artificial Sequence
  Description of Artificial Sequence: Synthetic oligonucleotide
  Antisense strand to SEQ ID NO: 2048506
guuuaacccacagauuuaa

SEQ ID NO: 2048508 - RNA, 19 nt, Artificial Sequence
  Description of Artificial Sequence: Synthetic oligonucleotide
  Sense strand starting at position 3894 of SEQ ID NO: 1881489
aaaucuguggguuaaacuu

SEQ ID NO: 2048509 - RNA, 19 nt, Artificial Sequence
  Description of Artificial Sequence: Synthetic oligonucleotide
  Antisense strand to SEQ ID NO: 2048508
aaguuuaacccacagauuu

SEQ ID NO: 2048510 - RNA, 19 nt, Artificial Sequence
  Description of Artificial Sequence: Synthetic oligonucleotide
  Sense strand starting at position 94 of SEQ ID NO: 1881490
aauuccuacguuuaaugga

SEQ ID NO: 2048511 - RNA, 19 nt, Artificial Sequence
  Description of Artificial Sequence: Synthetic oligonucleotide
  Antisense strand to SEQ ID NO: 2048510
uccauuaaacguaggaauu

SEQ ID NO: 2048512 - RNA, 19 nt, Artificial Sequence
  Description of Artificial Sequence: Synthetic oligonucleotide
  Sense strand starting at position 519 of SEQ ID NO: 1881490
cacugacauguuuggaaug

SEQ ID NO: 2048513 - RNA, 19 nt, Artificial Sequence
  Description of Artificial Sequence: Synthetic oligonucleotide
  Antisense strand to SEQ ID NO: 2048512
cauuccaaacaugucagug

SEQ ID NO: 2048514 - RNA, 19 nt, Artificial Sequence
  Description of Artificial Sequence: Synthetic oligonucleotide
  Sense strand starting at position 529 of SEQ ID NO: 1881490
uuuggaauggugugggaaa

SEQ ID NO: 2048515 - RNA, 19 nt, Artificial Sequence
  Description of Artificial Sequence: Synthetic oligonucleotide
  Antisense strand to SEQ ID NO: 2048514
uuucccacaccauuccaaa

SEQ ID NO: 2048516 - RNA, 19 nt, Artificial Sequence
  Description of Artificial Sequence: Synthetic oligonucleotide
  Sense strand starting at position 850 of SEQ ID NO: 1881490
guucuaaccucacugauag

SEQ ID NO: 2048517 - RNA, 19 nt, Artificial Sequence
  Description of Artificial Sequence: Synthetic oligonucleotide
  Antisense strand to SEQ ID NO: 2048516
cuaucagugagguuagaac

SEQ ID NO: 2048518 - RNA, 19 nt, Artificial Sequence
  Description of Artificial Sequence: Synthetic oligonucleotide
  Sense strand starting at position 902 of SEQ ID NO: 1881490
gaugcacaucaugaugagu

SEQ ID NO: 2048519 - RNA, 19 nt, Artificial Sequence
  Description of Artificial Sequence: Synthetic oligonucleotide
  Antisense strand to SEQ ID NO: 2048518
acucaucaugaugugcauc

SEQ ID NO: 2048520 - RNA, 19 nt, Artificial Sequence
  Description of Artificial Sequence: Synthetic oligonucleotide
  Sense strand starting at position 908 of SEQ ID NO: 1881490
caucaugaugagugacgga

SEQ ID NO: 2048521 - RNA, 19 nt, Artificial Sequence
  Description of Artificial Sequence: Synthetic oligonucleotide
  Antisense strand to SEQ ID NO: 2048520
uccgucacucaucaugaug

SEQ ID NO: 2048522 - RNA, 19 nt, Artificial Sequence
  Description of Artificial Sequence: Synthetic oligonucleotide
  Sense strand starting at position 921 of SEQ ID NO: 1881490
gacggaucaccucaguaug

SEQ ID NO: 2048523 - RNA, 19 nt, Artificial Sequence
  Description of Artificial Sequence: Synthetic oligonucleotide
  Antisense strand to SEQ ID NO: 2048522
cauacugaggugauccguc

SEQ ID NO: 2048524 - RNA, 19 nt, Artificial Sequence
  Description of Artificial Sequence: Synthetic oligonucleotide
  Sense strand starting at position 1054 of SEQ ID NO: 1881490
ggaauugugcaacagacga

SEQ ID NO: 2048525 - RNA, 19 nt, Artificial Sequence
  Description of Artificial Sequence: Synthetic oligonucleotide
  Antisense strand to SEQ ID NO: 2048524
ucgucuguugcacaauucc

SEQ ID NO: 2048526 - RNA, 19 nt, Artificial Sequence
  Description of Artificial Sequence: Synthetic oligonucleotide
  Sense strand starting at position 1095 of SEQ ID NO: 1881490
gcaauaaugcuggauguga

SEQ ID NO: 2048527 - RNA, 19 nt, Artificial Sequence
  Description of Artificial Sequence: Synthetic oligonucleotide
  Antisense strand to SEQ ID NO: 2048526
ucacauccagcauuauugc

SEQ ID NO: 2048528 - RNA, 19 nt, Artificial Sequence
  Description of Artificial Sequence: Synthetic oligonucleotide
  Sense strand starting at position 1097 of SEQ ID NO: 1881490
aauaaugcuggaugugaaa

SEQ ID NO: 2048529 - RNA, 19 nt, Artificial Sequence
  Description of Artificial Sequence: Synthetic oligonucleotide
  Antisense strand to SEQ ID NO: 2048528
uuucacauccagcauuauu

SEQ ID NO: 2048530 - RNA, 19 nt, Artificial Sequence
  Description of Artificial Sequence: Synthetic oligonucleotide
  Sense strand starting at position 1132 of SEQ ID NO: 1881490
gacagcugacuauggaaua

SEQ ID NO: 2048531 - RNA, 19 nt, Artificial Sequence
  Description of Artificial Sequence: Synthetic oligonucleotide
  Antisense strand to SEQ ID NO: 2048530
uauuccauagucagcuguc

SEQ ID NO: 2048532 - RNA, 19 nt, Artificial Sequence
  Description of Artificial Sequence: Synthetic oligonucleotide
  Sense strand starting at position 1252 of SEQ ID NO: 1881490
agauguccuagaggaagua

SEQ ID NO: 2048533 - RNA, 19 nt, Artificial Sequence
  Description of Artificial Sequence: Synthetic oligonucleotide
  Antisense strand to SEQ ID NO: 2048532
uacuuccucuaggacaucu

SEQ ID NO: 2048534 - RNA, 19 nt, Artificial Sequence
  Description of Artificial Sequence: Synthetic oligonucleotide
  Sense strand starting at position 1380 of SEQ ID NO: 1881490
gauaauucgccagugcgua

SEQ ID NO: 2048535 - RNA, 19 nt, Artificial Sequence
  Description of Artificial Sequence: Synthetic oligonucleotide
  Antisense strand to SEQ ID NO: 2048534
uacgcacuggcgaauuauc

SEQ ID NO: 2048536 - RNA, 19 nt, Artificial Sequence
  Description of Artificial Sequence: Synthetic oligonucleotide
  Sense strand starting at position 1441 of SEQ ID NO: 1881490
gcaagcaugguuuaaacua

SEQ ID NO: 2048537 - RNA, 19 nt, Artificial Sequence
  Description of Artificial Sequence: Synthetic oligonucleotide
  Antisense strand to SEQ ID NO: 2048536
uaguuuaaaccaugcuugc

SEQ ID NO: 2048538 - RNA, 19 nt, Artificial Sequence
  Description of Artificial Sequence: Synthetic oligonucleotide
  Sense strand starting at position 1658 of SEQ ID NO: 1881490
ugcuuugcgcaaucaucuu

SEQ ID NO: 2048539 - RNA, 19 nt, Artificial Sequence
  Description of Artificial Sequence: Synthetic oligonucleotide
  Antisense strand to SEQ ID NO: 2048538
aagaugauugcgcaaagca

SEQ ID NO: 2048540 - RNA, 19 nt, Artificial Sequence
  Description of Artificial Sequence: Synthetic oligonucleotide
  Sense strand starting at position 1696 of SEQ ID NO: 1881490
gcuuguacugaggauuauc

SEQ ID NO: 2048541 - RNA, 19 nt, Artificial Sequence
  Description of Artificial Sequence: Synthetic oligonucleotide
  Antisense strand to SEQ ID NO: 2048540
gauaauccucaguacaagc

SEQ ID NO: 2048542 - RNA, 19 nt, Artificial Sequence
  Description of Artificial Sequence: Synthetic oligonucleotide
  Sense strand starting at position 1704 of SEQ ID NO: 1881490
ugaggauuaucuguaccuu

SEQ ID NO: 2048543 - RNA, 19 nt, Artificial Sequence
  Description of Artificial Sequence: Synthetic oligonucleotide
  Antisense strand to SEQ ID NO: 2048542
aagguacagauaauccuca

SEQ ID NO: 2048544 - RNA, 19 nt, Artificial Sequence
  Description of Artificial Sequence: Synthetic oligonucleotide
  Sense strand starting at position 1784 of SEQ ID NO: 1881490
ugaagcaugcauuauuauu

SEQ ID NO: 2048545 - RNA, 19 nt, Artificial Sequence
  Description of Artificial Sequence: Synthetic oligonucleotide
  Antisense strand to SEQ ID NO: 2048544
aauaauaaugcaugcuuca

SEQ ID NO: 2048546 - RNA, 19 nt, Artificial Sequence
  Description of Artificial Sequence: Synthetic oligonucleotide
  Sense strand starting at position 2252 of SEQ ID NO: 1881490
uccagugaccauuggaauc

SEQ ID NO: 2048547 - RNA, 19 nt, Artificial Sequence
  Description of Artificial Sequence: Synthetic oligonucleotide
  Antisense strand to SEQ ID NO: 2048546
gauuccaauggucacugga

SEQ ID NO: 2048548 - RNA, 19 nt, Artificial Sequence
  Description of Artificial Sequence: Synthetic oligonucleotide
  Sense strand starting at position 2342 of SEQ ID NO: 1881490
ggauuugucucugcucuca

SEQ ID NO: 2048549 - RNA, 19 nt, Artificial Sequence
  Description of Artificial Sequence: Synthetic oligonucleotide
  Antisense strand to SEQ ID NO: 2048548
ugagagcagagacaaaucc

SEQ ID NO: 2048550 - RNA, 19 nt, Artificial Sequence
  Description of Artificial Sequence: Synthetic oligonucleotide
  Sense strand starting at position 2422 of SEQ ID NO: 1881490
uuuauaaacgcugauaaca

SEQ ID NO: 2048551 - RNA, 19 nt, Artificial Sequence
  Description of Artificial Sequence: Synthetic oligonucleotide
  Antisense strand to SEQ ID NO: 2048550
uguuaucagcguuuauaaa

SEQ ID NO: 2048552 - RNA, 19 nt, Artificial Sequence
  Description of Artificial Sequence: Synthetic oligonucleotide
  Sense strand starting at position 2597 of SEQ ID NO: 1881490
acaccugguaagugauaga

SEQ ID NO: 2048553 - RNA, 19 nt, Artificial Sequence
  Description of Artificial Sequence: Synthetic oligonucleotide
  Antisense strand to SEQ ID NO: 2048552
ucuaucacuuaccaggugu

SEQ ID NO: 2048554 - RNA, 19 nt, Artificial Sequence
  Description of Artificial Sequence: Synthetic oligonucleotide
  Sense strand starting at position 2811 of SEQ ID NO: 1881490
aucacaggucaggguuaaa

SEQ ID NO: 2048555 - RNA, 19 nt, Artificial Sequence
  Description of Artificial Sequence: Synthetic oligonucleotide
  Antisense strand to SEQ ID NO: 2048554
uuuaacccugaccugugau

SEQ ID NO: 2048556 - RNA, 19 nt, Artificial Sequence
  Description of Artificial Sequence: Synthetic oligonucleotide
  Sense strand starting at position 2814 of SEQ ID NO: 1881490
acaggucaggguuaaagua

SEQ ID NO: 2048557 - RNA, 19 nt, Artificial Sequence
  Description of Artificial Sequence: Synthetic oligonucleotide
  Antisense strand to SEQ ID NO: 2048556
uacuuuaacccugaccugu

SEQ ID NO: 2048558 - RNA, 19 nt, Artificial Sequence
  Description of Artificial Sequence: Synthetic oligonucleotide
  Sense strand starting at position 2896 of SEQ ID NO: 1881490
ugagucuugaaauaugugu

SEQ ID NO: 2048559 - RNA, 19 nt, Artificial Sequence
  Description of Artificial Sequence: Synthetic oligonucleotide
  Antisense strand to SEQ ID NO: 2048558
acacauauuucaagacuca

SEQ ID NO: 2048560 - RNA, 19 nt, Artificial Sequence
  Description of Artificial Sequence: Synthetic oligonucleotide
  Sense strand starting at position 2916 of SEQ ID NO: 1881490
ggcaguuaccugggaaaca

SEQ ID NO: 2048561 - RNA, 19 nt, Artificial Sequence
  Description of Artificial Sequence: Synthetic oligonucleotide
  Antisense strand to SEQ ID NO: 2048560
uguuucccagguaacugcc

SEQ ID NO: 2048562 - RNA, 19 nt, Artificial Sequence
  Description of Artificial Sequence: Synthetic oligonucleotide
  Sense strand starting at position 3001 of SEQ ID NO: 1881490
gcaugaauaaacugguaug

SEQ ID NO: 2048563 - RNA, 19 nt, Artificial Sequence
  Description of Artificial Sequence: Synthetic oligonucleotide
  Antisense strand to SEQ ID NO: 2048562
cauaccaguuuauucaugc

SEQ ID NO: 2048564 - RNA, 19 nt, Artificial Sequence
  Description of Artificial Sequence: Synthetic oligonucleotide
  Sense strand starting at position 3048 of SEQ ID NO: 1881490
aggauugagguaggguuua

SEQ ID NO: 2048565 - RNA, 19 nt, Artificial Sequence
  Description of Artificial Sequence: Synthetic oligonucleotide
  Antisense strand to SEQ ID NO: 2048564
uaaacccuaccucaauccu

SEQ ID NO: 2048566 - RNA, 19 nt, Artificial Sequence
  Description of Artificial Sequence: Synthetic oligonucleotide
  Sense strand starting at position 3126 of SEQ ID NO: 1881490
gguucuggcaaugaaacuu

SEQ ID NO: 2048567 - RNA, 19 nt, Artificial Sequence
  Description of Artificial Sequence: Synthetic oligonucleotide
  Antisense strand to SEQ ID NO: 2048566
aaguuucauugccagaacc

SEQ ID NO: 2048568 - RNA, 19 nt, Artificial Sequence
  Description of Artificial Sequence: Synthetic oligonucleotide
  Sense strand starting at position 3135 of SEQ ID NO: 1881490
aaugaaacuugaguguaca

SEQ ID NO: 2048569 - RNA, 19 nt, Artificial Sequence
  Description of Artificial Sequence: Synthetic oligonucleotide
  Antisense strand to SEQ ID NO: 2048568
uguacacucaaguuucauu

SEQ ID NO: 2048570 - RNA, 19 nt, Artificial Sequence
  Description of Artificial Sequence: Synthetic oligonucleotide
  Sense strand starting at position 3136 of SEQ ID NO: 1881490
augaaacuugaguguacau

SEQ ID NO: 2048571 - RNA, 19 nt, Artificial Sequence
  Description of Artificial Sequence: Synthetic oligonucleotide
  Antisense strand to SEQ ID NO: 2048570
auguacacucaaguuucau

SEQ ID NO: 2048572 - RNA, 19 nt, Artificial Sequence
  Description of Artificial Sequence: Synthetic oligonucleotide
  Sense strand starting at position 3138 of SEQ ID NO: 1881490
gaaacuugaguguacaucu

SEQ ID NO: 2048573 - RNA, 19 nt, Artificial Sequence
  Description of Artificial Sequence: Synthetic oligonucleotide
  Antisense strand to SEQ ID NO: 2048572
agauguacacucaaguuuc

SEQ ID NO: 2048574 - RNA, 19 nt, Artificial Sequence
  Description of Artificial Sequence: Synthetic oligonucleotide
  Sense strand starting at position 3212 of SEQ ID NO: 1881490
gggaacuuguauucuaaac

SEQ ID NO: 2048575 - RNA, 19 nt, Artificial Sequence
  Description of Artificial Sequence: Synthetic oligonucleotide
  Antisense strand to SEQ ID NO: 2048574
guuuagaauacaaguuccc

SEQ ID NO: 2048576 - RNA, 19 nt, Artificial Sequence
  Description of Artificial Sequence: Synthetic oligonucleotide
  Sense strand starting at position 3466 of SEQ ID NO: 1881490
agagaagcauaucuugguu

SEQ ID NO: 2048577 - RNA, 19 nt, Artificial Sequence
  Description of Artificial Sequence: Synthetic oligonucleotide
  Antisense strand to SEQ ID NO: 2048576
aaccaagauaugcuucucu

SEQ ID NO: 2048578 - RNA, 19 nt, Artificial Sequence
  Description of Artificial Sequence: Synthetic oligonucleotide
  Sense strand starting at position 3603 of SEQ ID NO: 1881490
auuauaagagugugaucau

SEQ ID NO: 2048579 - RNA, 19 nt, Artificial Sequence
  Description of Artificial Sequence: Synthetic oligonucleotide
  Antisense strand to SEQ ID NO: 2048578
augaucacacucuuauaau

SEQ ID NO: 2048580 - RNA, 19 nt, Artificial Sequence
  Description of Artificial Sequence: Synthetic oligonucleotide
  Sense strand starting at position 3703 of SEQ ID NO: 1881490
ugcauucacggaugggaaa

SEQ ID NO: 2048581 - RNA, 19 nt, Artificial Sequence
  Description of Artificial Sequence: Synthetic oligonucleotide
  Antisense strand to SEQ ID NO: 2048580
uuucccauccgugaaugca

SEQ ID NO: 2048582 - RNA, 19 nt, Artificial Sequence
  Description of Artificial Sequence: Synthetic oligonucleotide
  Sense strand starting at position 3704 of SEQ ID NO: 1881490
gcauucacggaugggaaau

SEQ ID NO: 2048583 - RNA, 19 nt, Artificial Sequence
  Description of Artificial Sequence: Synthetic oligonucleotide
  Antisense strand to SEQ ID NO: 2048582
auuucccauccgugaaugc

SEQ ID NO: 2048584 - RNA, 19 nt, Artificial Sequence
  Description of Artificial Sequence: Synthetic oligonucleotide
  Sense strand starting at position 3730 of SEQ ID NO: 1881490
acuacuuaauggcuacaga

SEQ ID NO: 2048585 - RNA, 19 nt, Artificial Sequence
  Description of Artificial Sequence: Synthetic oligonucleotide
  Antisense strand to SEQ ID NO: 2048584
ucuguagccauuaaguagu

SEQ ID NO: 2048586 - RNA, 19 nt, Artificial Sequence
  Description of Artificial Sequence: Synthetic oligonucleotide
  Sense strand starting at position 3743 of SEQ ID NO: 1881490
uacagaaggucuccugacu

SEQ ID NO: 2048587 - RNA, 19 nt, Artificial Sequence
  Description of Artificial Sequence: Synthetic oligonucleotide
  Antisense strand to SEQ ID NO: 2048586
agucaggagaccuucugua

SEQ ID NO: 2048588 - RNA, 19 nt, Artificial Sequence
  Description of Artificial Sequence: Synthetic oligonucleotide
  Sense strand starting at position 3899 of SEQ ID NO: 1881490
gugaacuacuaaccaugua

SEQ ID NO: 2048589 - RNA, 19 nt, Artificial Sequence
  Description of Artificial Sequence: Synthetic oligonucleotide
  Antisense strand to SEQ ID NO: 2048588
uacaugguuaguaguucac

SEQ ID NO: 2048590 - RNA, 19 nt, Artificial Sequence
  Description of Artificial Sequence: Synthetic oligonucleotide
  Sense strand starting at position 78 of SEQ ID NO: 1881491
uugguacugcauuaccaua

SEQ ID NO: 2048591 - RNA, 19 nt, Artificial Sequence
  Description of Artificial Sequence: Synthetic oligonucleotide
  Antisense strand to SEQ ID NO: 2048590
uaugguaaugcaguaccaa

SEQ ID NO: 2048592 - RNA, 19 nt, Artificial Sequence
  Description of Artificial Sequence: Synthetic oligonucleotide
  Sense strand starting at position 83 of SEQ ID NO: 1881491
acugcauuaccauaguuua

SEQ ID NO: 2048593 - RNA, 19 nt, Artificial Sequence
  Description of Artificial Sequence: Synthetic oligonucleotide
  Antisense strand to SEQ ID NO: 2048592
uaaacuaugguaaugcagu

SEQ ID NO: 2048594 - RNA, 19 nt, Artificial Sequence
  Description of Artificial Sequence: Synthetic oligonucleotide
  Sense strand starting at position 214 of SEQ ID NO: 1881491
uggguuuaugcagaggaau

SEQ ID NO: 2048595 - RNA, 19 nt, Artificial Sequence
  Description of Artificial Sequence: Synthetic oligonucleotide
  Antisense strand to SEQ ID NO: 2048594
auuccucugcauaaaccca

SEQ ID NO: 2048596 - RNA, 19 nt, Artificial Sequence
  Description of Artificial Sequence: Synthetic oligonucleotide
  Sense strand starting at position 216 of SEQ ID NO: 1881491
gguuuaugcagaggaauca

SEQ ID NO: 2048597 - RNA, 19 nt, Artificial Sequence
  Description of Artificial Sequence: Synthetic oligonucleotide
  Antisense strand to SEQ ID NO: 2048596
ugauuccucugcauaaacc

SEQ ID NO: 2048598 - RNA, 19 nt, Artificial Sequence
  Description of Artificial Sequence: Synthetic oligonucleotide
  Sense strand starting at position 366 of SEQ ID NO: 1881491
uggaaagacuucucuggcu

SEQ ID NO: 2048599 - RNA, 19 nt, Artificial Sequence
  Description of Artificial Sequence: Synthetic oligonucleotide
  Antisense strand to SEQ ID NO: 2048598
agccagagaagucuuucca

SEQ ID NO: 2048600 - RNA, 19 nt, Artificial Sequence
  Description of Artificial Sequence: Synthetic oligonucleotide
  Sense strand starting at position 386 of SEQ ID NO: 1881491
cugugcaaugacuacauua

SEQ ID NO: 2048601 - RNA, 19 nt, Artificial Sequence
  Description of Artificial Sequence: Synthetic oligonucleotide
  Antisense strand to SEQ ID NO: 2048600
uaauguagucauugcacag

SEQ ID NO: 2048602 - RNA, 19 nt, Artificial Sequence
  Description of Artificial Sequence: Synthetic oligonucleotide
  Sense strand starting at position 388 of SEQ ID NO: 1881491
gugcaaugacuacauuaga

SEQ ID NO: 2048603 - RNA, 19 nt, Artificial Sequence
  Description of Artificial Sequence: Synthetic oligonucleotide
  Antisense strand to SEQ ID NO: 2048602
ucuaauguagucauugcac

SEQ ID NO: 2048604 - RNA, 19 nt, Artificial Sequence
  Description of Artificial Sequence: Synthetic oligonucleotide
  Sense strand starting at position 430 of SEQ ID NO: 1881491
aggccauuggguuaguaca

SEQ ID NO: 2048605 - RNA, 19 nt, Artificial Sequence
  Description of Artificial Sequence: Synthetic oligonucleotide
  Antisense strand to SEQ ID NO: 2048604
uguacuaacccaauggccu

SEQ ID NO: 2048606 - RNA, 19 nt, Artificial Sequence
  Description of Artificial Sequence: Synthetic oligonucleotide
  Sense strand starting at position 450 of SEQ ID NO: 1881491
ggaggagaaaugugaguuc

SEQ ID NO: 2048607 - RNA, 19 nt, Artificial Sequence
  Description of Artificial Sequence: Synthetic oligonucleotide
  Antisense strand to SEQ ID NO: 2048606
gaacucacauuucuccucc

SEQ ID NO: 2048608 - RNA, 19 nt, Artificial Sequence
  Description of Artificial Sequence: Synthetic oligonucleotide
  Sense strand starting at position 453 of SEQ ID NO: 1881491
ggagaaaugugaguuccaa

SEQ ID NO: 2048609 - RNA, 19 nt, Artificial Sequence
  Description of Artificial Sequence: Synthetic oligonucleotide
  Antisense strand to SEQ ID NO: 2048608
uuggaacucacauuucucc

SEQ ID NO: 2048610 - RNA, 19 nt, Artificial Sequence
  Description of Artificial Sequence: Synthetic oligonucleotide
  Sense strand starting at position 511 of SEQ ID NO: 1881491
ugagcaauuuaggaggaaa

SEQ ID NO: 2048611 - RNA, 19 nt, Artificial Sequence
  Description of Artificial Sequence: Synthetic oligonucleotide
  Antisense strand to SEQ ID NO: 2048610
uuuccuccuaaauugcuca

SEQ ID NO: 2048612 - RNA, 19 nt, Artificial Sequence
  Description of Artificial Sequence: Synthetic oligonucleotide
  Sense strand starting at position 592 of SEQ ID NO: 1881491
acagaaagagugugcuaau

SEQ ID NO: 2048613 - RNA, 19 nt, Artificial Sequence
  Description of Artificial Sequence: Synthetic oligonucleotide
  Antisense strand to SEQ ID NO: 2048612
auuagcacacucuuucugu

SEQ ID NO: 2048614 - RNA, 19 nt, Artificial Sequence
  Description of Artificial Sequence: Synthetic oligonucleotide
  Sense strand starting at position 593 of SEQ ID NO: 1881491
cagaaagagugugcuaauu

SEQ ID NO: 2048615 - RNA, 19 nt, Artificial Sequence
  Description of Artificial Sequence: Synthetic oligonucleotide
  Antisense strand to SEQ ID NO: 2048614
aauuagcacacucuuucug

SEQ ID NO: 2048616 - RNA, 19 nt, Artificial Sequence
  Description of Artificial Sequence: Synthetic oligonucleotide
  Sense strand starting at position 619 of SEQ ID NO: 1881491
agguguggcagggagauua

SEQ ID NO: 2048617 - RNA, 19 nt, Artificial Sequence
  Description of Artificial Sequence: Synthetic oligonucleotide
  Antisense strand to SEQ ID NO: 2048616
uaaucucccugccacaccu

SEQ ID NO: 2048618 - RNA, 19 nt, Artificial Sequence
  Description of Artificial Sequence: Synthetic oligonucleotide
  Sense strand starting at position 630 of SEQ ID NO: 1881491
ggagauuacuccuaauuua

SEQ ID NO: 2048619 - RNA, 19 nt, Artificial Sequence
  Description of Artificial Sequence: Synthetic oligonucleotide
  Antisense strand to SEQ ID NO: 2048618
uaaauuaggaguaaucucc

SEQ ID NO: 2048620 - RNA, 19 nt, Artificial Sequence
  Description of Artificial Sequence: Synthetic oligonucleotide
  Sense strand starting at position 666 of SEQ ID NO: 1881491
aggaguucuuucucccaag

SEQ ID NO: 2048621 - RNA, 19 nt, Artificial Sequence
  Description of Artificial Sequence: Synthetic oligonucleotide
  Antisense strand to SEQ ID NO: 2048620
cuugggagaaagaacuccu

SEQ ID NO: 2048622 - RNA, 19 nt, Artificial Sequence
  Description of Artificial Sequence: Synthetic oligonucleotide
  Sense strand starting at position 850 of SEQ ID NO: 1881491
uuaaucgucacgcuugcua

SEQ ID NO: 2048623 - RNA, 19 nt, Artificial Sequence
  Description of Artificial Sequence: Synthetic oligonucleotide
  Antisense strand to SEQ ID NO: 2048622
uagcaagcgugacgauuaa

SEQ ID NO: 2048624 - RNA, 19 nt, Artificial Sequence
  Description of Artificial Sequence: Synthetic oligonucleotide
  Sense strand starting at position 1282 of SEQ ID NO: 1881491
aucauaugaccuugaguaa

SEQ ID NO: 2048625 - RNA, 19 nt, Artificial Sequence
  Description of Artificial Sequence: Synthetic oligonucleotide
  Antisense strand to SEQ ID NO: 2048624
uuacucaaggucauaugau

SEQ ID NO: 2048626 - RNA, 19 nt, Artificial Sequence
  Description of Artificial Sequence: Synthetic oligonucleotide
  Sense strand starting at position 1382 of SEQ ID NO: 1881491
gccaguuagcuauacaaca

SEQ ID NO: 2048627 - RNA, 19 nt, Artificial Sequence
  Description of Artificial Sequence: Synthetic oligonucleotide
  Antisense strand to SEQ ID NO: 2048626
uguuguauagcuaacuggc

SEQ ID NO: 2048628 - RNA, 19 nt, Artificial Sequence
  Description of Artificial Sequence: Synthetic oligonucleotide
  Sense strand starting at position 2184 of SEQ ID NO: 1881491
aguugagauuuggaugaga

SEQ ID NO: 2048629 - RNA, 19 nt, Artificial Sequence
  Description of Artificial Sequence: Synthetic oligonucleotide
  Antisense strand to SEQ ID NO: 2048628
ucucauccaaaucucaacu

SEQ ID NO: 2048630 - RNA, 19 nt, Artificial Sequence
  Description of Artificial Sequence: Synthetic oligonucleotide
  Sense strand starting at position 2275 of SEQ ID NO: 1881491
gugaaagcucaccauagcu

SEQ ID NO: 2048631 - RNA, 19 nt, Artificial Sequence
  Description of Artificial Sequence: Synthetic oligonucleotide
  Antisense strand to SEQ ID NO: 2048630
agcuauggugagcuuucac

SEQ ID NO: 2048632 - RNA, 19 nt, Artificial Sequence
  Description of Artificial Sequence: Synthetic oligonucleotide
  Sense strand starting at position 2294 of SEQ ID NO: 1881491
gucauuucugcugagccuu

SEQ ID NO: 2048633 - RNA, 19 nt, Artificial Sequence
  Description of Artificial Sequence: Synthetic oligonucleotide
  Antisense strand to SEQ ID NO: 2048632
aaggcucagcagaaaugac

SEQ ID NO: 2048634 - RNA, 19 nt, Artificial Sequence
  Description of Artificial Sequence: Synthetic oligonucleotide
  Sense strand starting at position 2307 of SEQ ID NO: 1881491
agccuuugacaguaggagu

SEQ ID NO: 2048635 - RNA, 19 nt, Artificial Sequence
  Description of Artificial Sequence: Synthetic oligonucleotide
  Antisense strand to SEQ ID NO: 2048634
acuccuacugucaaaggcu

SEQ ID NO: 2048636 - RNA, 19 nt, Artificial Sequence
  Description of Artificial Sequence: Synthetic oligonucleotide
  Sense strand starting at position 2352 of SEQ ID NO: 1881491
augcuuugcagugagaacu

SEQ ID NO: 2048637 - RNA, 19 nt, Artificial Sequence
  Description of Artificial Sequence: Synthetic oligonucleotide
  Antisense strand to SEQ ID NO: 2048636
aguucucacugcaaagcau

SEQ ID NO: 2048638 - RNA, 19 nt, Artificial Sequence
  Description of Artificial Sequence: Synthetic oligonucleotide
  Sense strand starting at position 2387 of SEQ ID NO: 1881491
gcaagccugcaggauaaau

SEQ ID NO: 2048639 - RNA, 19 nt, Artificial Sequence
  Description of Artificial Sequence: Synthetic oligonucleotide
  Antisense strand to SEQ ID NO: 2048638
auuuauccugcaggcuugc

SEQ ID NO: 2048640 - RNA, 19 nt, Artificial Sequence
  Description of Artificial Sequence: Synthetic oligonucleotide
  Sense strand starting at position 2613 of SEQ ID NO: 1881491
ugaagaauuguuuggcaaa

SEQ ID NO: 2048641 - RNA, 19 nt, Artificial Sequence
  Description of Artificial Sequence: Synthetic oligonucleotide
  Antisense strand to SEQ ID NO: 2048640
uuugccaaacaauucuuca

SEQ ID NO: 2048642 - RNA, 19 nt, Artificial Sequence
  Description of Artificial Sequence: Synthetic oligonucleotide
  Sense strand starting at position 2662 of SEQ ID NO: 1881491
cagagaauggcuugccaau

SEQ ID NO: 2048643 - RNA, 19 nt, Artificial Sequence
  Description of Artificial Sequence: Synthetic oligonucleotide
  Antisense strand to SEQ ID NO: 2048642
auuggcaagccauucucug

SEQ ID NO: 2048644 - RNA, 19 nt, Artificial Sequence
  Description of Artificial Sequence: Synthetic oligonucleotide
  Sense strand starting at position 2751 of SEQ ID NO: 1881491
cucugauugccacaugaug

SEQ ID NO: 2048645 - RNA, 19 nt, Artificial Sequence
  Description of Artificial Sequence: Synthetic oligonucleotide
  Antisense strand to SEQ ID NO: 2048644
caucauguggcaaucagag

SEQ ID NO: 2048646 - RNA, 19 nt, Artificial Sequence
  Description of Artificial Sequence: Synthetic oligonucleotide
  Sense strand starting at position 2866 of SEQ ID NO: 1881491
agugaaugauagguauaau

SEQ ID NO: 2048647 - RNA, 19 nt, Artificial Sequence
  Description of Artificial Sequence: Synthetic oligonucleotide
  Antisense strand to SEQ ID NO: 2048646
auuauaccuaucauucacu

SEQ ID NO: 2048648 - RNA, 19 nt, Artificial Sequence
  Description of Artificial Sequence: Synthetic oligonucleotide
  Sense strand starting at position 2905 of SEQ ID NO: 1881491
agcuuaggugcugagagaa

SEQ ID NO: 2048649 - RNA, 19 nt, Artificial Sequence
  Description of Artificial Sequence: Synthetic oligonucleotide
  Antisense strand to SEQ ID NO: 2048648
uucucucagcaccuaagcu

SEQ ID NO: 2048650 - RNA, 19 nt, Artificial Sequence
  Description of Artificial Sequence: Synthetic oligonucleotide
  Sense strand starting at position 2939 of SEQ ID NO: 1881491
gagcuugauguugaaacua

SEQ ID NO: 2048651 - RNA, 19 nt, Artificial Sequence
  Description of Artificial Sequence: Synthetic oligonucleotide
  Antisense strand to SEQ ID NO: 2048650
uaguuucaacaucaagcuc

SEQ ID NO: 2048652 - RNA, 19 nt, Artificial Sequence
  Description of Artificial Sequence: Synthetic oligonucleotide
  Sense strand starting at position 3246 of SEQ ID NO: 1881491
auauuacuucgucauucca

SEQ ID NO: 2048653 - RNA, 19 nt, Artificial Sequence
  Description of Artificial Sequence: Synthetic oligonucleotide
  Antisense strand to SEQ ID NO: 2048652
uggaaugacgaaguaauau

SEQ ID NO: 2048654 - RNA, 19 nt, Artificial Sequence
  Description of Artificial Sequence: Synthetic oligonucleotide
  Sense strand starting at position 3338 of SEQ ID NO: 1881491
cuguuuguugaaugaugag

SEQ ID NO: 2048655 - RNA, 19 nt, Artificial Sequence
  Description of Artificial Sequence: Synthetic oligonucleotide
  Antisense strand to SEQ ID NO: 2048654
cucaucauucaacaaacag

SEQ ID NO: 2048656 - RNA, 19 nt, Artificial Sequence
  Description of Artificial Sequence: Synthetic oligonucleotide
  Sense strand starting at position 3544 of SEQ ID NO: 1881491
ucugauguaucacugaauu

SEQ ID NO: 2048657 - RNA, 19 nt, Artificial Sequence
  Description of Artificial Sequence: Synthetic oligonucleotide
  Antisense strand to SEQ ID NO: 2048656
aauucagugauacaucaga

SEQ ID NO: 2048658 - RNA, 19 nt, Artificial Sequence
  Description of Artificial Sequence: Synthetic oligonucleotide
  Sense strand starting at position 3594 of SEQ ID NO: 1881491
ugggauuugugagaguaac

SEQ ID NO: 2048659 - RNA, 19 nt, Artificial Sequence
  Description of Artificial Sequence: Synthetic oligonucleotide
  Antisense strand to SEQ ID NO: 2048658
guuacucucacaaauccca

SEQ ID NO: 2048660 - RNA, 19 nt, Artificial Sequence
  Description of Artificial Sequence: Synthetic oligonucleotide
  Sense strand starting at position 3772 of SEQ ID NO: 1881491
gucugauuauuugauaaca

SEQ ID NO: 2048661 - RNA, 19 nt, Artificial Sequence
  Description of Artificial Sequence: Synthetic oligonucleotide
  Antisense strand to SEQ ID NO: 2048660
uguuaucaaauaaucagac

SEQ ID NO: 2048662 - RNA, 19 nt, Artificial Sequence
  Description of Artificial Sequence: Synthetic oligonucleotide
  Sense strand starting at position 3831 of SEQ ID NO: 1881491
uauguucuggacugacaca

SEQ ID NO: 2048663 - RNA, 19 nt, Artificial Sequence
  Description of Artificial Sequence: Synthetic oligonucleotide
  Antisense strand to SEQ ID NO: 2048662
ugugucaguccagaacaua

SEQ ID NO: 2048664 - RNA, 19 nt, Artificial Sequence
  Description of Artificial Sequence: Synthetic oligonucleotide
  Sense strand starting at position 3948 of SEQ ID NO: 1881491
agaauuaucugguccacua

SEQ ID NO: 2048665 - RNA, 19 nt, Artificial Sequence
  Description of Artificial Sequence: Synthetic oligonucleotide
  Antisense strand to SEQ ID NO: 2048664
uaguggaccagauaauucu

SEQ ID NO: 2048666 - RNA, 19 nt, Artificial Sequence
  Description of Artificial Sequence: Synthetic oligonucleotide
  Sense strand starting at position 3980 of SEQ ID NO: 1881491
auuagucuuggccauagga

SEQ ID NO: 2048667 - RNA, 19 nt, Artificial Sequence
  Description of Artificial Sequence: Synthetic oligonucleotide
  Antisense strand to SEQ ID NO: 2048666
uccuauggccaagacuaau

SEQ ID NO: 2048668 - RNA, 19 nt, Artificial Sequence
  Description of Artificial Sequence: Synthetic oligonucleotide
  Sense strand starting at position 3982 of SEQ ID NO: 1881491
uagucuuggccauaggaaa

SEQ ID NO: 2048669 - RNA, 19 nt, Artificial Sequence
  Description of Artificial Sequence: Synthetic oligonucleotide
  Antisense strand to SEQ ID NO: 2048668
uuuccuauggccaagacua

SEQ ID NO: 2048670 - RNA, 19 nt, Artificial Sequence
  Description of Artificial Sequence: Synthetic oligonucleotide
  Sense strand starting at position 128 of SEQ ID NO: 1881492
aacagcuuguugguauaau

SEQ ID NO: 2048671 - RNA, 19 nt, Artificial Sequence
  Description of Artificial Sequence: Synthetic oligonucleotide
  Antisense strand to SEQ ID NO: 2048670
auuauaccaacaagcuguu

SEQ ID NO: 2048672 - RNA, 19 nt, Artificial Sequence
  Description of Artificial Sequence: Synthetic oligonucleotide
  Sense strand starting at position 274 of SEQ ID NO: 1881492
gccugagacaggcagagau

SEQ ID NO: 2048673 - RNA, 19 nt, Artificial Sequence
  Description of Artificial Sequence: Synthetic oligonucleotide
  Antisense strand to SEQ ID NO: 2048672
aucucugccugucucaggc

SEQ ID NO: 2048674 - RNA, 19 nt, Artificial Sequence
  Description of Artificial Sequence: Synthetic oligonucleotide
  Sense strand starting at position 286 of SEQ ID NO: 1881492
cagagauguuucuuugucu

SEQ ID NO: 2048675 - RNA, 19 nt, Artificial Sequence
  Description of Artificial Sequence: Synthetic oligonucleotide
  Antisense strand to SEQ ID NO: 2048674
agacaaagaaacaucucug

SEQ ID NO: 2048676 - RNA, 19 nt, Artificial Sequence
  Description of Artificial Sequence: Synthetic oligonucleotide
  Sense strand starting at position 287 of SEQ ID NO: 1881492
agagauguuucuuugucuu

SEQ ID NO: 2048677 - RNA, 19 nt, Artificial Sequence
  Description of Artificial Sequence: Synthetic oligonucleotide
  Antisense strand to SEQ ID NO: 2048676
aagacaaagaaacaucucu

SEQ ID NO: 2048678 - RNA, 19 nt, Artificial Sequence
  Description of Artificial Sequence: Synthetic oligonucleotide
  Sense strand starting at position 601 of SEQ ID NO: 1881492
uuuccugggccuuauacau

SEQ ID NO: 2048679 - RNA, 19 nt, Artificial Sequence
  Description of Artificial Sequence: Synthetic oligonucleotide
  Antisense strand to SEQ ID NO: 2048678
auguauaaggcccaggaaa

SEQ ID NO: 2048680 - RNA, 19 nt, Artificial Sequence
  Description of Artificial Sequence: Synthetic oligonucleotide
  Sense strand starting at position 607 of SEQ ID NO: 1881492
gggccuuauacaugagggu

SEQ ID NO: 2048681 - RNA, 19 nt, Artificial Sequence
  Description of Artificial Sequence: Synthetic oligonucleotide
  Antisense strand to SEQ ID NO: 2048680
acccucauguauaaggccc

SEQ ID NO: 2048682 - RNA, 19 nt, Artificial Sequence
  Description of Artificial Sequence: Synthetic oligonucleotide
  Sense strand starting at position 648 of SEQ ID NO: 1881492
gucugaauccagcagcauu

SEQ ID NO: 2048683 - RNA, 19 nt, Artificial Sequence
  Description of Artificial Sequence: Synthetic oligonucleotide
  Antisense strand to SEQ ID NO: 2048682
aaugcugcuggauucagac

SEQ ID NO: 2048684 - RNA, 19 nt, Artificial Sequence
  Description of Artificial Sequence: Synthetic oligonucleotide
  Sense strand starting at position 771 of SEQ ID NO: 1881492
gcaugugacccuuaggucu

SEQ ID NO: 2048685 - RNA, 19 nt, Artificial Sequence
  Description of Artificial Sequence: Synthetic oligonucleotide
  Antisense strand to SEQ ID NO: 2048684
agaccuaagggucacaugc

SEQ ID NO: 2048686 - RNA, 19 nt, Artificial Sequence
  Description of Artificial Sequence: Synthetic oligonucleotide
  Sense strand starting at position 846 of SEQ ID NO: 1881492
guaggcauuuaucuuguga

SEQ ID NO: 2048687 - RNA, 19 nt, Artificial Sequence
  Description of Artificial Sequence: Synthetic oligonucleotide
  Antisense strand to SEQ ID NO: 2048686
ucacaagauaaaugccuac

SEQ ID NO: 2048688 - RNA, 19 nt, Artificial Sequence
  Description of Artificial Sequence: Synthetic oligonucleotide
  Sense strand starting at position 920 of SEQ ID NO: 1881492
uggacaaugcugggcaaau

SEQ ID NO: 2048689 - RNA, 19 nt, Artificial Sequence
  Description of Artificial Sequence: Synthetic oligonucleotide
  Antisense strand to SEQ ID NO: 2048688
auuugcccagcauugucca

SEQ ID NO: 2048690 - RNA, 19 nt, Artificial Sequence
  Description of Artificial Sequence: Synthetic oligonucleotide
  Sense strand starting at position 921 of SEQ ID NO: 1881492
ggacaaugcugggcaaauu

SEQ ID NO: 2048691 - RNA, 19 nt, Artificial Sequence
  Description of Artificial Sequence: Synthetic oligonucleotide
  Antisense strand to SEQ ID NO: 2048690
aauuugcccagcauugucc

SEQ ID NO: 2048692 - RNA, 19 nt, Artificial Sequence
  Description of Artificial Sequence: Synthetic oligonucleotide
  Sense strand starting at position 922 of SEQ ID NO: 1881492
gacaaugcugggcaaauua

SEQ ID NO: 2048693 - RNA, 19 nt, Artificial Sequence
  Description of Artificial Sequence: Synthetic oligonucleotide
  Antisense strand to SEQ ID NO: 2048692
uaauuugcccagcauuguc

SEQ ID NO: 2048694 - RNA, 19 nt, Artificial Sequence
  Description of Artificial Sequence: Synthetic oligonucleotide
  Sense strand starting at position 1063 of SEQ ID NO: 1881492
guuugacugagugagacau

SEQ ID NO: 2048695 - RNA, 19 nt, Artificial Sequence
  Description of Artificial Sequence: Synthetic oligonucleotide
  Antisense strand to SEQ ID NO: 2048694
augucucacucagucaaac

SEQ ID NO: 2048696 - RNA, 19 nt, Artificial Sequence
  Description of Artificial Sequence: Synthetic oligonucleotide
  Sense strand starting at position 1065 of SEQ ID NO: 1881492
uugacugagugagacauuu

SEQ ID NO: 2048697 - RNA, 19 nt, Artificial Sequence
  Description of Artificial Sequence: Synthetic oligonucleotide
  Antisense strand to SEQ ID NO: 2048696
aaaugucucacucagucaa

SEQ ID NO: 2048698 - RNA, 19 nt, Artificial Sequence
  Description of Artificial Sequence: Synthetic oligonucleotide
  Sense strand starting at position 1231 of SEQ ID NO: 1881492
aggccaauuucuuaaguga

SEQ ID NO: 2048699 - RNA, 19 nt, Artificial Sequence
  Description of Artificial Sequence: Synthetic oligonucleotide
  Antisense strand to SEQ ID NO: 2048698
ucacuuaagaaauuggccu

SEQ ID NO: 2048700 - RNA, 19 nt, Artificial Sequence
  Description of Artificial Sequence: Synthetic oligonucleotide
  Sense strand starting at position 1315 of SEQ ID NO: 1881492
uccaaaugacgugagugua

SEQ ID NO: 2048701 - RNA, 19 nt, Artificial Sequence
  Description of Artificial Sequence: Synthetic oligonucleotide
  Antisense strand to SEQ ID NO: 2048700
uacacucacgucauuugga

SEQ ID NO: 2048702 - RNA, 19 nt, Artificial Sequence
  Description of Artificial Sequence: Synthetic oligonucleotide
  Sense strand starting at position 1323 of SEQ ID NO: 1881492
acgugaguguauuuggaca

SEQ ID NO: 2048703 - RNA, 19 nt, Artificial Sequence
  Description of Artificial Sequence: Synthetic oligonucleotide
  Antisense strand to SEQ ID NO: 2048702
uguccaaauacacucacgu

SEQ ID NO: 2048704 - RNA, 19 nt, Artificial Sequence
  Description of Artificial Sequence: Synthetic oligonucleotide
  Sense strand starting at position 1433 of SEQ ID NO: 1881492
cuaagugaauucuuguuga

SEQ ID NO: 2048705 - RNA, 19 nt, Artificial Sequence
  Description of Artificial Sequence: Synthetic oligonucleotide
  Antisense strand to SEQ ID NO: 2048704
ucaacaagaauucacuuag

SEQ ID NO: 2048706 - RNA, 19 nt, Artificial Sequence
  Description of Artificial Sequence: Synthetic oligonucleotide
  Sense strand starting at position 1436 of SEQ ID NO: 1881492
agugaauucuuguugauug

SEQ ID NO: 2048707 - RNA, 19 nt, Artificial Sequence
  Description of Artificial Sequence: Synthetic oligonucleotide
  Antisense strand to SEQ ID NO: 2048706
caaucaacaagaauucacu

SEQ ID NO: 2048708 - RNA, 19 nt, Artificial Sequence
  Description of Artificial Sequence: Synthetic oligonucleotide
  Sense strand starting at position 1438 of SEQ ID NO: 1881492
ugaauucuuguugauuguu

SEQ ID NO: 2048709 - RNA, 19 nt, Artificial Sequence
  Description of Artificial Sequence: Synthetic oligonucleotide
  Antisense strand to SEQ ID NO: 2048708
aacaaucaacaagaauuca

SEQ ID NO: 2048710 - RNA, 19 nt, Artificial Sequence
  Description of Artificial Sequence: Synthetic oligonucleotide
  Sense strand starting at position 1510 of SEQ ID NO: 1881492
gaugcugaucuguaaggca

SEQ ID NO: 2048711 - RNA, 19 nt, Artificial Sequence
  Description of Artificial Sequence: Synthetic oligonucleotide
  Antisense strand to SEQ ID NO: 2048710
ugccuuacagaucagcauc

SEQ ID NO: 2048712 - RNA, 19 nt, Artificial Sequence
  Description of Artificial Sequence: Synthetic oligonucleotide
  Sense strand starting at position 1553 of SEQ ID NO: 1881492
ccucgcauccagggagaau

SEQ ID NO: 2048713 - RNA, 19 nt, Artificial Sequence
  Description of Artificial Sequence: Synthetic oligonucleotide
  Antisense strand to SEQ ID NO: 2048712
auucucccuggaugcgagg

SEQ ID NO: 2048714 - RNA, 19 nt, Artificial Sequence
  Description of Artificial Sequence: Synthetic oligonucleotide
  Sense strand starting at position 1554 of SEQ ID NO: 1881492
cucgcauccagggagaauu

SEQ ID NO: 2048715 - RNA, 19 nt, Artificial Sequence
  Description of Artificial Sequence: Synthetic oligonucleotide
  Antisense strand to SEQ ID NO: 2048714
aauucucccuggaugcgag

SEQ ID NO: 2048716 - RNA, 19 nt, Artificial Sequence
  Description of Artificial Sequence: Synthetic oligonucleotide
  Sense strand starting at position 1756 of SEQ ID NO: 1881492
ggaagacauuuccacuuac

SEQ ID NO: 2048717 - RNA, 19 nt, Artificial Sequence
  Description of Artificial Sequence: Synthetic oligonucleotide
  Antisense strand to SEQ ID NO: 2048716
guaaguggaaaugucuucc

SEQ ID NO: 2048718 - RNA, 19 nt, Artificial Sequence
  Description of Artificial Sequence: Synthetic oligonucleotide
  Sense strand starting at position 1932 of SEQ ID NO: 1881492
ugccuuaucccagggacuu

SEQ ID NO: 2048719 - RNA, 19 nt, Artificial Sequence
  Description of Artificial Sequence: Synthetic oligonucleotide
  Antisense strand to SEQ ID NO: 2048718
aagucccugggauaaggca

SEQ ID NO: 2048720 - RNA, 19 nt, Artificial Sequence
  Description of Artificial Sequence: Synthetic oligonucleotide
  Sense strand starting at position 1933 of SEQ ID NO: 1881492
gccuuaucccagggacuuc

SEQ ID NO: 2048721 - RNA, 19 nt, Artificial Sequence
  Description of Artificial Sequence: Synthetic oligonucleotide
  Antisense strand to SEQ ID NO: 2048720
gaagucccugggauaaggc

SEQ ID NO: 2048722 - RNA, 19 nt, Artificial Sequence
  Description of Artificial Sequence: Synthetic oligonucleotide
  Sense strand starting at position 2018 of SEQ ID NO: 1881492
uggauuagcgcccauccua

SEQ ID NO: 2048723 - RNA, 19 nt, Artificial Sequence
  Description of Artificial Sequence: Synthetic oligonucleotide
  Antisense strand to SEQ ID NO: 2048722
uaggaugggcgcuaaucca

SEQ ID NO: 2048724 - RNA, 19 nt, Artificial Sequence
  Description of Artificial Sequence: Synthetic oligonucleotide
  Sense strand starting at position 2066 of SEQ ID NO: 1881492
ugaagaccuuaucucuagu

SEQ ID NO: 2048725 - RNA, 19 nt, Artificial Sequence
  Description of Artificial Sequence: Synthetic oligonucleotide
  Antisense strand to SEQ ID NO: 2048724
acuagagauaaggucuuca

SEQ ID NO: 2048726 - RNA, 19 nt, Artificial Sequence
  Description of Artificial Sequence: Synthetic oligonucleotide
  Sense strand starting at position 2253 of SEQ ID NO: 1881492
uggaaauggcucugugauu

SEQ ID NO: 2048727 - RNA, 19 nt, Artificial Sequence
  Description of Artificial Sequence: Synthetic oligonucleotide
  Antisense strand to SEQ ID NO: 2048726
aaucacagagccauuucca

SEQ ID NO: 2048728 - RNA, 19 nt, Artificial Sequence
  Description of Artificial Sequence: Synthetic oligonucleotide
  Sense strand starting at position 2254 of SEQ ID NO: 1881492
ggaaauggcucugugauug

SEQ ID NO: 2048729 - RNA, 19 nt, Artificial Sequence
  Description of Artificial Sequence: Synthetic oligonucleotide
  Antisense strand to SEQ ID NO: 2048728
caaucacagagccauuucc

SEQ ID NO: 2048730 - RNA, 19 nt, Artificial Sequence
  Description of Artificial Sequence: Synthetic oligonucleotide
  Sense strand starting at position 2774 of SEQ ID NO: 1881492
ccaggcuugggucaacaau

SEQ ID NO: 2048731 - RNA, 19 nt, Artificial Sequence
  Description of Artificial Sequence: Synthetic oligonucleotide
  Antisense strand to SEQ ID NO: 2048730
auuguugacccaagccugg

SEQ ID NO: 2048732 - RNA, 19 nt, Artificial Sequence
  Description of Artificial Sequence: Synthetic oligonucleotide
  Sense strand starting at position 2851 of SEQ ID NO: 1881492
gaggucuugcuacauggua

SEQ ID NO: 2048733 - RNA, 19 nt, Artificial Sequence
  Description of Artificial Sequence: Synthetic oligonucleotide
  Antisense strand to SEQ ID NO: 2048732
uaccauguagcaagaccuc

SEQ ID NO: 2048734 - RNA, 19 nt, Artificial Sequence
  Description of Artificial Sequence: Synthetic oligonucleotide
  Sense strand starting at position 3234 of SEQ ID NO: 1881492
uugucaugugggcagggaa

SEQ ID NO: 2048735 - RNA, 19 nt, Artificial Sequence
  Description of Artificial Sequence: Synthetic oligonucleotide
  Antisense strand to SEQ ID NO: 2048734
uucccugcccacaugacaa

SEQ ID NO: 2048736 - RNA, 19 nt, Artificial Sequence
  Description of Artificial Sequence: Synthetic oligonucleotide
  Sense strand starting at position 3286 of SEQ ID NO: 1881492
ggcucuuacauaugaguug

SEQ ID NO: 2048737 - RNA, 19 nt, Artificial Sequence
  Description of Artificial Sequence: Synthetic oligonucleotide
  Antisense strand to SEQ ID NO: 2048736
caacucauauguaagagcc

SEQ ID NO: 2048738 - RNA, 19 nt, Artificial Sequence
  Description of Artificial Sequence: Synthetic oligonucleotide
  Sense strand starting at position 3289 of SEQ ID NO: 1881492
ucuuacauaugaguuguga

SEQ ID NO: 2048739 - RNA, 19 nt, Artificial Sequence
  Description of Artificial Sequence: Synthetic oligonucleotide
  Antisense strand to SEQ ID NO: 2048738
ucacaacucauauguaaga

SEQ ID NO: 2048740 - RNA, 19 nt, Artificial Sequence
  Description of Artificial Sequence: Synthetic oligonucleotide
  Sense strand starting at position 3300 of SEQ ID NO: 1881492
aguugugaauuauuagcau

SEQ ID NO: 2048741 - RNA, 19 nt, Artificial Sequence
  Description of Artificial Sequence: Synthetic oligonucleotide
  Antisense strand to SEQ ID NO: 2048740
augcuaauaauucacaacu

SEQ ID NO: 2048742 - RNA, 19 nt, Artificial Sequence
  Description of Artificial Sequence: Synthetic oligonucleotide
  Sense strand starting at position 3377 of SEQ ID NO: 1881492
cuagguguaguuugggaaa

SEQ ID NO: 2048743 - RNA, 19 nt, Artificial Sequence
  Description of Artificial Sequence: Synthetic oligonucleotide
  Antisense strand to SEQ ID NO: 2048742
uuucccaaacuacaccuag

SEQ ID NO: 2048744 - RNA, 19 nt, Artificial Sequence
  Description of Artificial Sequence: Synthetic oligonucleotide
  Sense strand starting at position 3717 of SEQ ID NO: 1881492
auaagugcuguauauccau

SEQ ID NO: 2048745 - RNA, 19 nt, Artificial Sequence
  Description of Artificial Sequence: Synthetic oligonucleotide
  Antisense strand to SEQ ID NO: 2048744
auggauauacagcacuuau

SEQ ID NO: 2048746 - RNA, 19 nt, Artificial Sequence
  Description of Artificial Sequence: Synthetic oligonucleotide
  Sense strand starting at position 3739 of SEQ ID NO: 1881492
ccaggaacauucgucuauu

SEQ ID NO: 2048747 - RNA, 19 nt, Artificial Sequence
  Description of Artificial Sequence: Synthetic oligonucleotide
  Antisense strand to SEQ ID NO: 2048746
aauagacgaauguuccugg

SEQ ID NO: 2048748 - RNA, 19 nt, Artificial Sequence
  Description of Artificial Sequence: Synthetic oligonucleotide
  Sense strand starting at position 3965 of SEQ ID NO: 1881492
caagacaaguuuguugaga

SEQ ID NO: 2048749 - RNA, 19 nt, Artificial Sequence
  Description of Artificial Sequence: Synthetic oligonucleotide
  Antisense strand to SEQ ID NO: 2048748
ucucaacaaacuugucuug

SEQ ID NO: 2048750 - RNA, 19 nt, Artificial Sequence
  Description of Artificial Sequence: Synthetic oligonucleotide
  Sense strand starting at position 27 of SEQ ID NO: 1881493
aucacuaagcuugguaaau

SEQ ID NO: 2048751 - RNA, 19 nt, Artificial Sequence
  Description of Artificial Sequence: Synthetic oligonucleotide
  Antisense strand to SEQ ID NO: 2048750
auuuaccaagcuuagugau

SEQ ID NO: 2048752 - RNA, 19 nt, Artificial Sequence
  Description of Artificial Sequence: Synthetic oligonucleotide
  Sense strand starting at position 28 of SEQ ID NO: 1881493
ucacuaagcuugguaaaua

SEQ ID NO: 2048753 - RNA, 19 nt, Artificial Sequence
  Description of Artificial Sequence: Synthetic oligonucleotide
  Antisense strand to SEQ ID NO: 2048752
uauuuaccaagcuuaguga

SEQ ID NO: 2048754 - RNA, 19 nt, Artificial Sequence
  Description of Artificial Sequence: Synthetic oligonucleotide
  Sense strand starting at position 191 of SEQ ID NO: 1881493
acaggaucuugagaaagaa

SEQ ID NO: 2048755 - RNA, 19 nt, Artificial Sequence
  Description of Artificial Sequence: Synthetic oligonucleotide
  Antisense strand to SEQ ID NO: 2048754
uucuuucucaagauccugu

SEQ ID NO: 2048756 - RNA, 19 nt, Artificial Sequence
  Description of Artificial Sequence: Synthetic oligonucleotide
  Sense strand starting at position 290 of SEQ ID NO: 1881493
cuagcagaacaguguuaaa

SEQ ID NO: 2048757 - RNA, 19 nt, Artificial Sequence
  Description of Artificial Sequence: Synthetic oligonucleotide
  Antisense strand to SEQ ID NO: 2048756
uuuaacacuguucugcuag

SEQ ID NO: 2048758 - RNA, 19 nt, Artificial Sequence
  Description of Artificial Sequence: Synthetic oligonucleotide
  Sense strand starting at position 331 of SEQ ID NO: 1881493
auguauagaugucugaaau

SEQ ID NO: 2048759 - RNA, 19 nt, Artificial Sequence
  Description of Artificial Sequence: Synthetic oligonucleotide
  Antisense strand to SEQ ID NO: 2048758
auuucagacaucuauacau

SEQ ID NO: 2048760 - RNA, 19 nt, Artificial Sequence
  Description of Artificial Sequence: Synthetic oligonucleotide
  Sense strand starting at position 332 of SEQ ID NO: 1881493
uguauagaugucugaaaua

SEQ ID NO: 2048761 - RNA, 19 nt, Artificial Sequence
  Description of Artificial Sequence: Synthetic oligonucleotide
  Antisense strand to SEQ ID NO: 2048760
uauuucagacaucuauaca

SEQ ID NO: 2048762 - RNA, 19 nt, Artificial Sequence
  Description of Artificial Sequence: Synthetic oligonucleotide
  Sense strand starting at position 344 of SEQ ID NO: 1881493
ugaaauaucuuugugucca

SEQ ID NO: 2048763 - RNA, 19 nt, Artificial Sequence
  Description of Artificial Sequence: Synthetic oligonucleotide
  Antisense strand to SEQ ID NO: 2048762
uggacacaaagauauuuca

SEQ ID NO: 2048764 - RNA, 19 nt, Artificial Sequence
  Description of Artificial Sequence: Synthetic oligonucleotide
  Sense strand starting at position 348 of SEQ ID NO: 1881493
auaucuuuguguccaagaa

SEQ ID NO: 2048765 - RNA, 19 nt, Artificial Sequence
  Description of Artificial Sequence: Synthetic oligonucleotide
  Antisense strand to SEQ ID NO: 2048764
uucuuggacacaaagauau

SEQ ID NO: 2048766 - RNA, 19 nt, Artificial Sequence
  Description of Artificial Sequence: Synthetic oligonucleotide
  Sense strand starting at position 439 of SEQ ID NO: 1881493
gugugaucaugggcaaaua

SEQ ID NO: 2048767 - RNA, 19 nt, Artificial Sequence
  Description of Artificial Sequence: Synthetic oligonucleotide
  Antisense strand to SEQ ID NO: 2048766
uauuugcccaugaucacac

SEQ ID NO: 2048768 - RNA, 19 nt, Artificial Sequence
  Description of Artificial Sequence: Synthetic oligonucleotide
  Sense strand starting at position 530 of SEQ ID NO: 1881493
gugaaauauuucuaagaac

SEQ ID NO: 2048769 - RNA, 19 nt, Artificial Sequence
  Description of Artificial Sequence: Synthetic oligonucleotide
  Antisense strand to SEQ ID NO: 2048768
guucuuagaaauauuucac

SEQ ID NO: 2048770 - RNA, 19 nt, Artificial Sequence
  Description of Artificial Sequence: Synthetic oligonucleotide
  Sense strand starting at position 919 of SEQ ID NO: 1881493
accagaaauguuuaaguuc

SEQ ID NO: 2048771 - RNA, 19 nt, Artificial Sequence
  Description of Artificial Sequence: Synthetic oligonucleotide
  Antisense strand to SEQ ID NO: 2048770
gaacuuaaacauuucuggu

SEQ ID NO: 2048772 - RNA, 19 nt, Artificial Sequence
  Description of Artificial Sequence: Synthetic oligonucleotide
  Sense strand starting at position 1102 of SEQ ID NO: 1881493
cagaauugugcugaaauua

SEQ ID NO: 2048773 - RNA, 19 nt, Artificial Sequence
  Description of Artificial Sequence: Synthetic oligonucleotide
  Antisense strand to SEQ ID NO: 2048772
uaauuucagcacaauucug

SEQ ID NO: 2048774 - RNA, 19 nt, Artificial Sequence
  Description of Artificial Sequence: Synthetic oligonucleotide
  Sense strand starting at position 1302 of SEQ ID NO: 1881493
ggcauaauggauugguuga

SEQ ID NO: 2048775 - RNA, 19 nt, Artificial Sequence
  Description of Artificial Sequence: Synthetic oligonucleotide
  Antisense strand to SEQ ID NO: 2048774
ucaaccaauccauuaugcc

SEQ ID NO: 2048776 - RNA, 19 nt, Artificial Sequence
  Description of Artificial Sequence: Synthetic oligonucleotide
  Sense strand starting at position 1340 of SEQ ID NO: 1881493
agaauugaaacgugauauu

SEQ ID NO: 2048777 - RNA, 19 nt, Artificial Sequence
  Description of Artificial Sequence: Synthetic oligonucleotide
  Antisense strand to SEQ ID NO: 2048776
aauaucacguuucaauucu

SEQ ID NO: 2048778 - RNA, 19 nt, Artificial Sequence
  Description of Artificial Sequence: Synthetic oligonucleotide
  Sense strand starting at position 1400 of SEQ ID NO: 1881493
augagaguauugguuggau

SEQ ID NO: 2048779 - RNA, 19 nt, Artificial Sequence
  Description of Artificial Sequence: Synthetic oligonucleotide
  Antisense strand to SEQ ID NO: 2048778
auccaaccaauacucucau

SEQ ID NO: 2048780 - RNA, 19 nt, Artificial Sequence
  Description of Artificial Sequence: Synthetic oligonucleotide
  Sense strand starting at position 1402 of SEQ ID NO: 1881493
gagaguauugguuggauag

SEQ ID NO: 2048781 - RNA, 19 nt, Artificial Sequence
  Description of Artificial Sequence: Synthetic oligonucleotide
  Antisense strand to SEQ ID NO: 2048780
cuauccaaccaauacucuc

SEQ ID NO: 2048782 - RNA, 19 nt, Artificial Sequence
  Description of Artificial Sequence: Synthetic oligonucleotide
  Sense strand starting at position 1678 of SEQ ID NO: 1881493
guaauuaugguagaucuuu

SEQ ID NO: 2048783 - RNA, 19 nt, Artificial Sequence
  Description of Artificial Sequence: Synthetic oligonucleotide
  Antisense strand to SEQ ID NO: 2048782
aaagaucuaccauaauuac

SEQ ID NO: 2048784 - RNA, 19 nt, Artificial Sequence
  Description of Artificial Sequence: Synthetic oligonucleotide
  Sense strand starting at position 1700 of SEQ ID NO: 1881493
augagaguauugguuagau

SEQ ID NO: 2048785 - RNA, 19 nt, Artificial Sequence
  Description of Artificial Sequence: Synthetic oligonucleotide
  Antisense strand to SEQ ID NO: 2048784
aucuaaccaauacucucau

SEQ ID NO: 2048786 - RNA, 19 nt, Artificial Sequence
  Description of Artificial Sequence: Synthetic oligonucleotide
  Sense strand starting at position 1787 of SEQ ID NO: 1881493
gcaguaacaguuuaccaca

SEQ ID NO: 2048787 - RNA, 19 nt, Artificial Sequence
  Description of Artificial Sequence: Synthetic oligonucleotide
  Antisense strand to SEQ ID NO: 2048786
ugugguaaacuguuacugc

SEQ ID NO: 2048788 - RNA, 19 nt, Artificial Sequence
  Description of Artificial Sequence: Synthetic oligonucleotide
  Sense strand starting at position 1801 of SEQ ID NO: 1881493
ccacaacuuggaugguuua

SEQ ID NO: 2048789 - RNA, 19 nt, Artificial Sequence
  Description of Artificial Sequence: Synthetic oligonucleotide
  Antisense strand to SEQ ID NO: 2048788
uaaaccauccaaguugugg

SEQ ID NO: 2048790 - RNA, 19 nt, Artificial Sequence
  Description of Artificial Sequence: Synthetic oligonucleotide
  Sense strand starting at position 1936 of SEQ ID NO: 1881493
gcuucugagaguuaccagu

SEQ ID NO: 2048791 - RNA, 19 nt, Artificial Sequence
  Description of Artificial Sequence: Synthetic oligonucleotide
  Antisense strand to SEQ ID NO: 2048790
acugguaacucucagaagc

SEQ ID NO: 2048792 - RNA, 19 nt, Artificial Sequence
  Description of Artificial Sequence: Synthetic oligonucleotide
  Sense strand starting at position 1938 of SEQ ID NO: 1881493
uucugagaguuaccaguua

SEQ ID NO: 2048793 - RNA, 19 nt, Artificial Sequence
  Description of Artificial Sequence: Synthetic oligonucleotide
  Antisense strand to SEQ ID NO: 2048792
uaacugguaacucucagaa

SEQ ID NO: 2048794 - RNA, 19 nt, Artificial Sequence
  Description of Artificial Sequence: Synthetic oligonucleotide
  Sense strand starting at position 2067 of SEQ ID NO: 1881493
ucauuaagggcuuacucua

SEQ ID NO: 2048795 - RNA, 19 nt, Artificial Sequence
  Description of Artificial Sequence: Synthetic oligonucleotide
  Antisense strand to SEQ ID NO: 2048794
uagaguaagcccuuaauga

SEQ ID NO: 2048796 - RNA, 19 nt, Artificial Sequence
  Description of Artificial Sequence: Synthetic oligonucleotide
  Sense strand starting at position 2164 of SEQ ID NO: 1881493
ugguuaggacuuuaagugu

SEQ ID NO: 2048797 - RNA, 19 nt, Artificial Sequence
  Description of Artificial Sequence: Synthetic oligonucleotide
  Antisense strand to SEQ ID NO: 2048796
acacuuaaaguccuaacca

SEQ ID NO: 2048798 - RNA, 19 nt, Artificial Sequence
  Description of Artificial Sequence: Synthetic oligonucleotide
  Sense strand starting at position 2412 of SEQ ID NO: 1881493
accagucucuuguuaaaga

SEQ ID NO: 2048799 - RNA, 19 nt, Artificial Sequence
  Description of Artificial Sequence: Synthetic oligonucleotide
  Antisense strand to SEQ ID NO: 2048798
ucuuuaacaagagacuggu

SEQ ID NO: 2048800 - RNA, 19 nt, Artificial Sequence
  Description of Artificial Sequence: Synthetic oligonucleotide
  Sense strand starting at position 2515 of SEQ ID NO: 1881493
ugcaucuaucaaugauaug

SEQ ID NO: 2048801 - RNA, 19 nt, Artificial Sequence
  Description of Artificial Sequence: Synthetic oligonucleotide
  Antisense strand to SEQ ID NO: 2048800
cauaucauugauagaugca

SEQ ID NO: 2048802 - RNA, 19 nt, Artificial Sequence
  Description of Artificial Sequence: Synthetic oligonucleotide
  Sense strand starting at position 2658 of SEQ ID NO: 1881493
uguagaaacugacuuuaug

SEQ ID NO: 2048803 - RNA, 19 nt, Artificial Sequence
  Description of Artificial Sequence: Synthetic oligonucleotide
  Antisense strand to SEQ ID NO: 2048802
cauaaagucaguuucuaca

SEQ ID NO: 2048804 - RNA, 19 nt, Artificial Sequence
  Description of Artificial Sequence: Synthetic oligonucleotide
  Sense strand starting at position 2675 of SEQ ID NO: 1881493
ugggaaaucugauagaaga

SEQ ID NO: 2048805 - RNA, 19 nt, Artificial Sequence
  Description of Artificial Sequence: Synthetic oligonucleotide
  Antisense strand to SEQ ID NO: 2048804
ucuucuaucagauuuccca

SEQ ID NO: 2048806 - RNA, 19 nt, Artificial Sequence
  Description of Artificial Sequence: Synthetic oligonucleotide
  Sense strand starting at position 2729 of SEQ ID NO: 1881493
cucuuaguaugacugugaa

SEQ ID NO: 2048807 - RNA, 19 nt, Artificial Sequence
  Description of Artificial Sequence: Synthetic oligonucleotide
  Antisense strand to SEQ ID NO: 2048806
uucacagucauacuaagag

SEQ ID NO: 2048808 - RNA, 19 nt, Artificial Sequence
  Description of Artificial Sequence: Synthetic oligonucleotide
  Sense strand starting at position 2732 of SEQ ID NO: 1881493
uuaguaugacugugaacua

SEQ ID NO: 2048809 - RNA, 19 nt, Artificial Sequence
  Description of Artificial Sequence: Synthetic oligonucleotide
  Antisense strand to SEQ ID NO: 2048808
uaguucacagucauacuaa

SEQ ID NO: 2048810 - RNA, 19 nt, Artificial Sequence
  Description of Artificial Sequence: Synthetic oligonucleotide
  Sense strand starting at position 2877 of SEQ ID NO: 1881493
uguugaaaugcugauggua

SEQ ID NO: 2048811 - RNA, 19 nt, Artificial Sequence
  Description of Artificial Sequence: Synthetic oligonucleotide
  Antisense strand to SEQ ID NO: 2048810
uaccaucagcauuucaaca

SEQ ID NO: 2048812 - RNA, 19 nt, Artificial Sequence
  Description of Artificial Sequence: Synthetic oligonucleotide
  Sense strand starting at position 3040 of SEQ ID NO: 1881493
gccaaagaaaguuguagaa

SEQ ID NO: 2048813 - RNA, 19 nt, Artificial Sequence
  Description of Artificial Sequence: Synthetic oligonucleotide
  Antisense strand to SEQ ID NO: 2048812
uucuacaacuuucuuuggc

SEQ ID NO: 2048814 - RNA, 19 nt, Artificial Sequence
  Description of Artificial Sequence: Synthetic oligonucleotide
  Sense strand starting at position 3181 of SEQ ID NO: 1881493
ggguaauacuucucuccug

SEQ ID NO: 2048815 - RNA, 19 nt, Artificial Sequence
  Description of Artificial Sequence: Synthetic oligonucleotide
  Antisense strand to SEQ ID NO: 2048814
caggagagaaguauuaccc

SEQ ID NO: 2048816 - RNA, 19 nt, Artificial Sequence
  Description of Artificial Sequence: Synthetic oligonucleotide
  Sense strand starting at position 3182 of SEQ ID NO: 1881493
gguaauacuucucuccuga

SEQ ID NO: 2048817 - RNA, 19 nt, Artificial Sequence
  Description of Artificial Sequence: Synthetic oligonucleotide
  Antisense strand to SEQ ID NO: 2048816
ucaggagagaaguauuacc

SEQ ID NO: 2048818 - RNA, 19 nt, Artificial Sequence
  Description of Artificial Sequence: Synthetic oligonucleotide
  Sense strand starting at position 3442 of SEQ ID NO: 1881493
guuacaggauuuguucgua

SEQ ID NO: 2048819 - RNA, 19 nt, Artificial Sequence
  Description of Artificial Sequence: Synthetic oligonucleotide
  Antisense strand to SEQ ID NO: 2048818
uacgaacaaauccuguaac

SEQ ID NO: 2048820 - RNA, 19 nt, Artificial Sequence
  Description of Artificial Sequence: Synthetic oligonucleotide
  Sense strand starting at position 3446 of SEQ ID NO: 1881493
caggauuuguucguauacu

SEQ ID NO: 2048821 - RNA, 19 nt, Artificial Sequence
  Description of Artificial Sequence: Synthetic oligonucleotide
  Antisense strand to SEQ ID NO: 2048820
aguauacgaacaaauccug

SEQ ID NO: 2048822 - RNA, 19 nt, Artificial Sequence
  Description of Artificial Sequence: Synthetic oligonucleotide
  Sense strand starting at position 3513 of SEQ ID NO: 1881493
uuaugauuguuucuagaca

SEQ ID NO: 2048823 - RNA, 19 nt, Artificial Sequence
  Description of Artificial Sequence: Synthetic oligonucleotide
  Antisense strand to SEQ ID NO: 2048822
ugucuagaaacaaucauaa

SEQ ID NO: 2048824 - RNA, 19 nt, Artificial Sequence
  Description of Artificial Sequence: Synthetic oligonucleotide
  Sense strand starting at position 3533 of SEQ ID NO: 1881493
aaaguugagguuugaugca

SEQ ID NO: 2048825 - RNA, 19 nt, Artificial Sequence
  Description of Artificial Sequence: Synthetic oligonucleotide
  Antisense strand to SEQ ID NO: 2048824
ugcaucaaaccucaacuuu

SEQ ID NO: 2048826 - RNA, 19 nt, Artificial Sequence
  Description of Artificial Sequence: Synthetic oligonucleotide
  Sense strand starting at position 3764 of SEQ ID NO: 1881493
uaaucuuugguagagucaa

SEQ ID NO: 2048827 - RNA, 19 nt, Artificial Sequence
  Description of Artificial Sequence: Synthetic oligonucleotide
  Antisense strand to SEQ ID NO: 2048826
uugacucuaccaaagauua

SEQ ID NO: 2048828 - RNA, 19 nt, Artificial Sequence
  Description of Artificial Sequence: Synthetic oligonucleotide
  Sense strand starting at position 3793 of SEQ ID NO: 1881493
uuauuagugucucuugaaa

SEQ ID NO: 2048829 - RNA, 19 nt, Artificial Sequence
  Description of Artificial Sequence: Synthetic oligonucleotide
  Antisense strand to SEQ ID NO: 2048828
uuucaagagacacuaauaa

SEQ ID NO: 2048830 - RNA, 19 nt, Artificial Sequence
  Description of Artificial Sequence: Synthetic oligonucleotide
  Sense strand starting at position 56 of SEQ ID NO: 1881494
augugagaaguugguuuga

SEQ ID NO: 2048831 - RNA, 19 nt, Artificial Sequence
  Description of Artificial Sequence: Synthetic oligonucleotide
  Antisense strand to SEQ ID NO: 2048830
ucaaaccaacuucucacau

SEQ ID NO: 2048832 - RNA, 19 nt, Artificial Sequence
  Description of Artificial Sequence: Synthetic oligonucleotide
  Sense strand starting at position 58 of SEQ ID NO: 1881494
gugagaaguugguuugaaa

SEQ ID NO: 2048833 - RNA, 19 nt, Artificial Sequence
  Description of Artificial Sequence: Synthetic oligonucleotide
  Antisense strand to SEQ ID NO: 2048832
uuucaaaccaacuucucac

SEQ ID NO: 2048834 - RNA, 19 nt, Artificial Sequence
  Description of Artificial Sequence: Synthetic oligonucleotide
  Sense strand starting at position 65 of SEQ ID NO: 1881494
guugguuugaaaugauuga

SEQ ID NO: 2048835 - RNA, 19 nt, Artificial Sequence
  Description of Artificial Sequence: Synthetic oligonucleotide
  Antisense strand to SEQ ID NO: 2048834
ucaaucauuucaaaccaac

SEQ ID NO: 2048836 - RNA, 19 nt, Artificial Sequence
  Description of Artificial Sequence: Synthetic oligonucleotide
  Sense strand starting at position 524 of SEQ ID NO: 1881494
gaguauggacaauguuaug

SEQ ID NO: 2048837 - RNA, 19 nt, Artificial Sequence
  Description of Artificial Sequence: Synthetic oligonucleotide
  Antisense strand to SEQ ID NO: 2048836
cauaacauuguccauacuc

SEQ ID NO: 2048838 - RNA, 19 nt, Artificial Sequence
  Description of Artificial Sequence: Synthetic oligonucleotide
  Sense strand starting at position 681 of SEQ ID NO: 1881494
acgguuucaccagagagca

SEQ ID NO: 2048839 - RNA, 19 nt, Artificial Sequence
  Description of Artificial Sequence: Synthetic oligonucleotide
  Antisense strand to SEQ ID NO: 2048838
ugcucucuggugaaaccgu

SEQ ID NO: 2048840 - RNA, 19 nt, Artificial Sequence
  Description of Artificial Sequence: Synthetic oligonucleotide
  Sense strand starting at position 793 of SEQ ID NO: 1881494
ugguauauugcuuacuuaa

SEQ ID NO: 2048841 - RNA, 19 nt, Artificial Sequence
  Description of Artificial Sequence: Synthetic oligonucleotide
  Antisense strand to SEQ ID NO: 2048840
uuaaguaagcaauauacca

SEQ ID NO: 2048842 - RNA, 19 nt, Artificial Sequence
  Description of Artificial Sequence: Synthetic oligonucleotide
  Sense strand starting at position 853 of SEQ ID NO: 1881494
guaaaugagucauucuuua

SEQ ID NO: 2048843 - RNA, 19 nt, Artificial Sequence
  Description of Artificial Sequence: Synthetic oligonucleotide
  Antisense strand to SEQ ID NO: 2048842
uaaagaaugacucauuuac

SEQ ID NO: 2048844 - RNA, 19 nt, Artificial Sequence
  Description of Artificial Sequence: Synthetic oligonucleotide
  Sense strand starting at position 913 of SEQ ID NO: 1881494
ggaauccuaguuugaauua

SEQ ID NO: 2048845 - RNA, 19 nt, Artificial Sequence
  Description of Artificial Sequence: Synthetic oligonucleotide
  Antisense strand to SEQ ID NO: 2048844
uaauucaaacuaggauucc

SEQ ID NO: 2048846 - RNA, 19 nt, Artificial Sequence
  Description of Artificial Sequence: Synthetic oligonucleotide
  Sense strand starting at position 926 of SEQ ID NO: 1881494
gaauuaaaugugugacaua

SEQ ID NO: 2048847 - RNA, 19 nt, Artificial Sequence
  Description of Artificial Sequence: Synthetic oligonucleotide
  Antisense strand to SEQ ID NO: 2048846
uaugucacacauuuaauuc

SEQ ID NO: 2048848 - RNA, 19 nt, Artificial Sequence
  Description of Artificial Sequence: Synthetic oligonucleotide
  Sense strand starting at position 948 of SEQ ID NO: 1881494
ucaagacaguguuuaaauu

SEQ ID NO: 2048849 - RNA, 19 nt, Artificial Sequence
  Description of Artificial Sequence: Synthetic oligonucleotide
  Antisense strand to SEQ ID NO: 2048848
aauuuaaacacugucuuga

SEQ ID NO: 2048850 - RNA, 19 nt, Artificial Sequence
  Description of Artificial Sequence: Synthetic oligonucleotide
  Sense strand starting at position 1267 of SEQ ID NO: 1881494
augugacaguaauuguaaa

SEQ ID NO: 2048851 - RNA, 19 nt, Artificial Sequence
  Description of Artificial Sequence: Synthetic oligonucleotide
  Antisense strand to SEQ ID NO: 2048850
uuuacaauuacugucacau

SEQ ID NO: 2048852 - RNA, 19 nt, Artificial Sequence
  Description of Artificial Sequence: Synthetic oligonucleotide
  Sense strand starting at position 1281 of SEQ ID NO: 1881494
guaaaucuuguugacauga

SEQ ID NO: 2048853 - RNA, 19 nt, Artificial Sequence
  Description of Artificial Sequence: Synthetic oligonucleotide
  Antisense strand to SEQ ID NO: 2048852
ucaugucaacaagauuuac

SEQ ID NO: 2048854 - RNA, 19 nt, Artificial Sequence
  Description of Artificial Sequence: Synthetic oligonucleotide
  Sense strand starting at position 1315 of SEQ ID NO: 1881494
gcaaauauuugagcuugua

SEQ ID NO: 2048855 - RNA, 19 nt, Artificial Sequence
  Description of Artificial Sequence: Synthetic oligonucleotide
  Antisense strand to SEQ ID NO: 2048854
uacaagcucaaauauuugc

SEQ ID NO: 2048856 - RNA, 19 nt, Artificial Sequence
  Description of Artificial Sequence: Synthetic oligonucleotide
  Sense strand starting at position 1414 of SEQ ID NO: 1881494
gggucauucuaacuaauag

SEQ ID NO: 2048857 - RNA, 19 nt, Artificial Sequence
  Description of Artificial Sequence: Synthetic oligonucleotide
  Antisense strand to SEQ ID NO: 2048856
cuauuaguuagaaugaccc

SEQ ID NO: 2048858 - RNA, 19 nt, Artificial Sequence
  Description of Artificial Sequence: Synthetic oligonucleotide
  Sense strand starting at position 1523 of SEQ ID NO: 1881494
agguaagaauucuuaagua

SEQ ID NO: 2048859 - RNA, 19 nt, Artificial Sequence
  Description of Artificial Sequence: Synthetic oligonucleotide
  Antisense strand to SEQ ID NO: 2048858
uacuuaagaauucuuaccu

SEQ ID NO: 2048860 - RNA, 19 nt, Artificial Sequence
  Description of Artificial Sequence: Synthetic oligonucleotide
  Sense strand starting at position 1539 of SEQ ID NO: 1881494
guauuauaggauuagcagu

SEQ ID NO: 2048861 - RNA, 19 nt, Artificial Sequence
  Description of Artificial Sequence: Synthetic oligonucleotide
  Antisense strand to SEQ ID NO: 2048860
acugcuaauccuauaauac

SEQ ID NO: 2048862 - RNA, 19 nt, Artificial Sequence
  Description of Artificial Sequence: Synthetic oligonucleotide
  Sense strand starting at position 1541 of SEQ ID NO: 1881494
auuauaggauuagcaguaa

SEQ ID NO: 2048863 - RNA, 19 nt, Artificial Sequence
  Description of Artificial Sequence: Synthetic oligonucleotide
  Antisense strand to SEQ ID NO: 2048862
uuacugcuaauccuauaau

SEQ ID NO: 2048864 - RNA, 19 nt, Artificial Sequence
  Description of Artificial Sequence: Synthetic oligonucleotide
  Sense strand starting at position 1668 of SEQ ID NO: 1881494
agauccucacuagguaaga

SEQ ID NO: 2048865 - RNA, 19 nt, Artificial Sequence
  Description of Artificial Sequence: Synthetic oligonucleotide
  Antisense strand to SEQ ID NO: 2048864
ucuuaccuagugaggaucu

SEQ ID NO: 2048866 - RNA, 19 nt, Artificial Sequence
  Description of Artificial Sequence: Synthetic oligonucleotide
  Sense strand starting at position 1689 of SEQ ID NO: 1881494
cugcauccagccuaugaua

SEQ ID NO: 2048867 - RNA, 19 nt, Artificial Sequence
  Description of Artificial Sequence: Synthetic oligonucleotide
  Antisense strand to SEQ ID NO: 2048866
uaucauaggcuggaugcag

SEQ ID NO: 2048868 - RNA, 19 nt, Artificial Sequence
  Description of Artificial Sequence: Synthetic oligonucleotide
  Sense strand starting at position 1744 of SEQ ID NO: 1881494
cacaguaucccagauguug

SEQ ID NO: 2048869 - RNA, 19 nt, Artificial Sequence
  Description of Artificial Sequence: Synthetic oligonucleotide
  Antisense strand to SEQ ID NO: 2048868
caacaucugggauacugug

SEQ ID NO: 2048870 - RNA, 19 nt, Artificial Sequence
  Description of Artificial Sequence: Synthetic oligonucleotide
  Sense strand starting at position 1871 of SEQ ID NO: 1881494
cuucuaauugaaugaugac

SEQ ID NO: 2048871 - RNA, 19 nt, Artificial Sequence
  Description of Artificial Sequence: Synthetic oligonucleotide
  Antisense strand to SEQ ID NO: 2048870
gucaucauucaauuagaag

SEQ ID NO: 2048872 - RNA, 19 nt, Artificial Sequence
  Description of Artificial Sequence: Synthetic oligonucleotide
  Sense strand starting at position 1942 of SEQ ID NO: 1881494
cagguuuggcugcagauga

SEQ ID NO: 2048873 - RNA, 19 nt, Artificial Sequence
  Description of Artificial Sequence: Synthetic oligonucleotide
  Antisense strand to SEQ ID NO: 2048872
ucaucugcagccaaaccug

SEQ ID NO: 2048874 - RNA, 19 nt, Artificial Sequence
  Description of Artificial Sequence: Synthetic oligonucleotide
  Sense strand starting at position 2179 of SEQ ID NO: 1881494
auaccaauccuaggucagu

SEQ ID NO: 2048875 - RNA, 19 nt, Artificial Sequence
  Description of Artificial Sequence: Synthetic oligonucleotide
  Antisense strand to SEQ ID NO: 2048874
acugaccuaggauugguau

SEQ ID NO: 2048876 - RNA, 19 nt, Artificial Sequence
  Description of Artificial Sequence: Synthetic oligonucleotide
  Sense strand starting at position 2185 of SEQ ID NO: 1881494
auccuaggucaguaagcaa

SEQ ID NO: 2048877 - RNA, 19 nt, Artificial Sequence
  Description of Artificial Sequence: Synthetic oligonucleotide
  Antisense strand to SEQ ID NO: 2048876
uugcuuacugaccuaggau

SEQ ID NO: 2048878 - RNA, 19 nt, Artificial Sequence
  Description of Artificial Sequence: Synthetic oligonucleotide
  Sense strand starting at position 2239 of SEQ ID NO: 1881494
gugagauaugagugggaau

SEQ ID NO: 2048879 - RNA, 19 nt, Artificial Sequence
  Description of Artificial Sequence: Synthetic oligonucleotide
  Antisense strand to SEQ ID NO: 2048878
auucccacucauaucucac

SEQ ID NO: 2048880 - RNA, 19 nt, Artificial Sequence
  Description of Artificial Sequence: Synthetic oligonucleotide
  Sense strand starting at position 2252 of SEQ ID NO: 1881494
gggaauuauugauuaggcu

SEQ ID NO: 2048881 - RNA, 19 nt, Artificial Sequence
  Description of Artificial Sequence: Synthetic oligonucleotide
  Antisense strand to SEQ ID NO: 2048880
agccuaaucaauaauuccc

SEQ ID NO: 2048882 - RNA, 19 nt, Artificial Sequence
  Description of Artificial Sequence: Synthetic oligonucleotide
  Sense strand starting at position 2256 of SEQ ID NO: 1881494
auuauugauuaggcucaau

SEQ ID NO: 2048883 - RNA, 19 nt, Artificial Sequence
  Description of Artificial Sequence: Synthetic oligonucleotide
  Antisense strand to SEQ ID NO: 2048882
auugagccuaaucaauaau

SEQ ID NO: 2048884 - RNA, 19 nt, Artificial Sequence
  Description of Artificial Sequence: Synthetic oligonucleotide
  Sense strand starting at position 2468 of SEQ ID NO: 1881494
aagugcaucuuauugaaag

SEQ ID NO: 2048885 - RNA, 19 nt, Artificial Sequence
  Description of Artificial Sequence: Synthetic oligonucleotide
  Antisense strand to SEQ ID NO: 2048884
cuuucaauaagaugcacuu

SEQ ID NO: 2048886 - RNA, 19 nt, Artificial Sequence
  Description of Artificial Sequence: Synthetic oligonucleotide
  Sense strand starting at position 2470 of SEQ ID NO: 1881494
gugcaucuuauugaaagga

SEQ ID NO: 2048887 - RNA, 19 nt, Artificial Sequence
  Description of Artificial Sequence: Synthetic oligonucleotide
  Antisense strand to SEQ ID NO: 2048886
uccuuucaauaagaugcac

SEQ ID NO: 2048888 - RNA, 19 nt, Artificial Sequence
  Description of Artificial Sequence: Synthetic oligonucleotide
  Sense strand starting at position 2540 of SEQ ID NO: 1881494
uuggaacaaucuguacauu

SEQ ID NO: 2048889 - RNA, 19 nt, Artificial Sequence
  Description of Artificial Sequence: Synthetic oligonucleotide
  Antisense strand to SEQ ID NO: 2048888
aauguacagauuguuccaa

SEQ ID NO: 2048890 - RNA, 19 nt, Artificial Sequence
  Description of Artificial Sequence: Synthetic oligonucleotide
  Sense strand starting at position 2590 of SEQ ID NO: 1881494
auguaaugcaguuguauuu

SEQ ID NO: 2048891 - RNA, 19 nt, Artificial Sequence
  Description of Artificial Sequence: Synthetic oligonucleotide
  Antisense strand to SEQ ID NO: 2048890
aaauacaacugcauuacau

SEQ ID NO: 2048892 - RNA, 19 nt, Artificial Sequence
  Description of Artificial Sequence: Synthetic oligonucleotide
  Sense strand starting at position 2802 of SEQ ID NO: 1881494
ucaguauagggucaauauu

SEQ ID NO: 2048893 - RNA, 19 nt, Artificial Sequence
  Description of Artificial Sequence: Synthetic oligonucleotide
  Antisense strand to SEQ ID NO: 2048892
aauauugacccuauacuga

SEQ ID NO: 2048894 - RNA, 19 nt, Artificial Sequence
  Description of Artificial Sequence: Synthetic oligonucleotide
  Sense strand starting at position 3022 of SEQ ID NO: 1881494
guauuuaucuagucucagc

SEQ ID NO: 2048895 - RNA, 19 nt, Artificial Sequence
  Description of Artificial Sequence: Synthetic oligonucleotide
  Antisense strand to SEQ ID NO: 2048894
gcugagacuagauaaauac

SEQ ID NO: 2048896 - RNA, 19 nt, Artificial Sequence
  Description of Artificial Sequence: Synthetic oligonucleotide
  Sense strand starting at position 3266 of SEQ ID NO: 1881494
ccuugugugcuugcauuga

SEQ ID NO: 2048897 - RNA, 19 nt, Artificial Sequence
  Description of Artificial Sequence: Synthetic oligonucleotide
  Antisense strand to SEQ ID NO: 2048896
ucaaugcaagcacacaagg

SEQ ID NO: 2048898 - RNA, 19 nt, Artificial Sequence
  Description of Artificial Sequence: Synthetic oligonucleotide
  Sense strand starting at position 3307 of SEQ ID NO: 1881494
cgaccauuauuugugucau

SEQ ID NO: 2048899 - RNA, 19 nt, Artificial Sequence
  Description of Artificial Sequence: Synthetic oligonucleotide
  Antisense strand to SEQ ID NO: 2048898
augacacaaauaauggucg

SEQ ID NO: 2048900 - RNA, 19 nt, Artificial Sequence
  Description of Artificial Sequence: Synthetic oligonucleotide
  Sense strand starting at position 3356 of SEQ ID NO: 1881494
ucuauuuaguugucagcaa

SEQ ID NO: 2048901 - RNA, 19 nt, Artificial Sequence
  Description of Artificial Sequence: Synthetic oligonucleotide
  Antisense strand to SEQ ID NO: 2048900
uugcugacaacuaaauaga

SEQ ID NO: 2048902 - RNA, 19 nt, Artificial Sequence
  Description of Artificial Sequence: Synthetic oligonucleotide
  Sense strand starting at position 3380 of SEQ ID NO: 1881494
uuacaauaugucuaggugu

SEQ ID NO: 2048903 - RNA, 19 nt, Artificial Sequence
  Description of Artificial Sequence: Synthetic oligonucleotide
  Antisense strand to SEQ ID NO: 2048902
acaccuagacauauuguaa

SEQ ID NO: 2048904 - RNA, 19 nt, Artificial Sequence
  Description of Artificial Sequence: Synthetic oligonucleotide
  Sense strand starting at position 3407 of SEQ ID NO: 1881494
uugcauuuggccugcuaaa

SEQ ID NO: 2048905 - RNA, 19 nt, Artificial Sequence
  Description of Artificial Sequence: Synthetic oligonucleotide
  Antisense strand to SEQ ID NO: 2048904
uuuagcaggccaaaugcaa

SEQ ID NO: 2048906 - RNA, 19 nt, Artificial Sequence
  Description of Artificial Sequence: Synthetic oligonucleotide
  Sense strand starting at position 3474 of SEQ ID NO: 1881494
ugggacaucuuugccauua

SEQ ID NO: 2048907 - RNA, 19 nt, Artificial Sequence
  Description of Artificial Sequence: Synthetic oligonucleotide
  Antisense strand to SEQ ID NO: 2048906
uaauggcaaagauguccca

SEQ ID NO: 2048908 - RNA, 19 nt, Artificial Sequence
  Description of Artificial Sequence: Synthetic oligonucleotide
  Sense strand starting at position 3475 of SEQ ID NO: 1881494
gggacaucuuugccauuac

SEQ ID NO: 2048909 - RNA, 19 nt, Artificial Sequence
  Description of Artificial Sequence: Synthetic oligonucleotide
  Antisense strand to SEQ ID NO: 2048908
guaauggcaaagauguccc

SEQ ID NO: 2048910 - RNA, 19 nt, Artificial Sequence
  Description of Artificial Sequence: Synthetic oligonucleotide
  Sense strand starting at position 69 of SEQ ID NO: 1881495
uuuaaugguguauagcaua

SEQ ID NO: 2048911 - RNA, 19 nt, Artificial Sequence
  Description of Artificial Sequence: Synthetic oligonucleotide
  Antisense strand to SEQ ID NO: 2048910
uaugcuauacaccauuaaa

SEQ ID NO: 2048912 - RNA, 19 nt, Artificial Sequence
  Description of Artificial Sequence: Synthetic oligonucleotide
  Sense strand starting at position 627 of SEQ ID NO: 1881495
ugaccuuaaugguuguaaa

SEQ ID NO: 2048913 - RNA, 19 nt, Artificial Sequence
  Description of Artificial Sequence: Synthetic oligonucleotide
  Antisense strand to SEQ ID NO: 2048912
uuuacaaccauuaagguca

SEQ ID NO: 2048914 - RNA, 19 nt, Artificial Sequence
  Description of Artificial Sequence: Synthetic oligonucleotide
  Sense strand starting at position 628 of SEQ ID NO: 1881495
gaccuuaaugguuguaaac

SEQ ID NO: 2048915 - RNA, 19 nt, Artificial Sequence
  Description of Artificial Sequence: Synthetic oligonucleotide
  Antisense strand to SEQ ID NO: 2048914
guuuacaaccauuaagguc

SEQ ID NO: 2048916 - RNA, 19 nt, Artificial Sequence
  Description of Artificial Sequence: Synthetic oligonucleotide
  Sense strand starting at position 637 of SEQ ID NO: 1881495
gguuguaaacaaugaaucu

SEQ ID NO: 2048917 - RNA, 19 nt, Artificial Sequence
  Description of Artificial Sequence: Synthetic oligonucleotide
  Antisense strand to SEQ ID NO: 2048916
agauucauuguuuacaacc

SEQ ID NO: 2048918 - RNA, 19 nt, Artificial Sequence
  Description of Artificial Sequence: Synthetic oligonucleotide
  Sense strand starting at position 689 of SEQ ID NO: 1881495
uguguuccuggagaaagua

SEQ ID NO: 2048919 - RNA, 19 nt, Artificial Sequence
  Description of Artificial Sequence: Synthetic oligonucleotide
  Antisense strand to SEQ ID NO: 2048918
uacuuucuccaggaacaca

SEQ ID NO: 2048920 - RNA, 19 nt, Artificial Sequence
  Description of Artificial Sequence: Synthetic oligonucleotide
  Sense strand starting at position 698 of SEQ ID NO: 1881495
ggagaaaguagaugccauu

SEQ ID NO: 2048921 - RNA, 19 nt, Artificial Sequence
  Description of Artificial Sequence: Synthetic oligonucleotide
  Antisense strand to SEQ ID NO: 2048920
aauggcaucuacuuucucc

SEQ ID NO: 2048922 - RNA, 19 nt, Artificial Sequence
  Description of Artificial Sequence: Synthetic oligonucleotide
  Sense strand starting at position 704 of SEQ ID NO: 1881495
aguagaugccauuaagauc

SEQ ID NO: 2048923 - RNA, 19 nt, Artificial Sequence
  Description of Artificial Sequence: Synthetic oligonucleotide
  Antisense strand to SEQ ID NO: 2048922
gaucuuaauggcaucuacu

SEQ ID NO: 2048924 - RNA, 19 nt, Artificial Sequence
  Description of Artificial Sequence: Synthetic oligonucleotide
  Sense strand starting at position 715 of SEQ ID NO: 1881495
uuaagaucuuguuugagaa

SEQ ID NO: 2048925 - RNA, 19 nt, Artificial Sequence
  Description of Artificial Sequence: Synthetic oligonucleotide
  Antisense strand to SEQ ID NO: 2048924
uucucaaacaagaucuuaa

SEQ ID NO: 2048926 - RNA, 19 nt, Artificial Sequence
  Description of Artificial Sequence: Synthetic oligonucleotide
  Sense strand starting at position 716 of SEQ ID NO: 1881495
uaagaucuuguuugagaau

SEQ ID NO: 2048927 - RNA, 19 nt, Artificial Sequence
  Description of Artificial Sequence: Synthetic oligonucleotide
  Antisense strand to SEQ ID NO: 2048926
auucucaaacaagaucuua

SEQ ID NO: 2048928 - RNA, 19 nt, Artificial Sequence
  Description of Artificial Sequence: Synthetic oligonucleotide
  Sense strand starting at position 722 of SEQ ID NO: 1881495
cuuguuugagaauauugua

SEQ ID NO: 2048929 - RNA, 19 nt, Artificial Sequence
  Description of Artificial Sequence: Synthetic oligonucleotide
  Antisense strand to SEQ ID NO: 2048928
uacaauauucucaaacaag

SEQ ID NO: 2048930 - RNA, 19 nt, Artificial Sequence
  Description of Artificial Sequence: Synthetic oligonucleotide
  Sense strand starting at position 730 of SEQ ID NO: 1881495
agaauauuguaugugauga

SEQ ID NO: 2048931 - RNA, 19 nt, Artificial Sequence
  Description of Artificial Sequence: Synthetic oligonucleotide
  Antisense strand to SEQ ID NO: 2048930
ucaucacauacaauauucu

SEQ ID NO: 2048932 - RNA, 19 nt, Artificial Sequence
  Description of Artificial Sequence: Synthetic oligonucleotide
  Sense strand starting at position 761 of SEQ ID NO: 1881495
gaaguaucccauugguaac

SEQ ID NO: 2048933 - RNA, 19 nt, Artificial Sequence
  Description of Artificial Sequence: Synthetic oligonucleotide
  Antisense strand to SEQ ID NO: 2048932
guuaccaaugggauacuuc

SEQ ID NO: 2048934 - RNA, 19 nt, Artificial Sequence
  Description of Artificial Sequence: Synthetic oligonucleotide
  Sense strand starting at position 898 of SEQ ID NO: 1881495
gauguugauuggguugaau

SEQ ID NO: 2048935 - RNA, 19 nt, Artificial Sequence
  Description of Artificial Sequence: Synthetic oligonucleotide
  Antisense strand to SEQ ID NO: 2048934
auucaacccaaucaacauc

SEQ ID NO: 2048936 - RNA, 19 nt, Artificial Sequence
  Description of Artificial Sequence: Synthetic oligonucleotide
  Sense strand starting at position 901 of SEQ ID NO: 1881495
guugauuggguugaaucaa

SEQ ID NO: 2048937 - RNA, 19 nt, Artificial Sequence
  Description of Artificial Sequence: Synthetic oligonucleotide
  Antisense strand to SEQ ID NO: 2048936
uugauucaacccaaucaac

SEQ ID NO: 2048938 - RNA, 19 nt, Artificial Sequence
  Description of Artificial Sequence: Synthetic oligonucleotide
  Sense strand starting at position 960 of SEQ ID NO: 1881495
ugaauaggaucaccguauu

SEQ ID NO: 2048939 - RNA, 19 nt, Artificial Sequence
  Description of Artificial Sequence: Synthetic oligonucleotide
  Antisense strand to SEQ ID NO: 2048938
aauacggugauccuauuca

SEQ ID NO: 2048940 - RNA, 19 nt, Artificial Sequence
  Description of Artificial Sequence: Synthetic oligonucleotide
  Sense strand starting at position 981 of SEQ ID NO: 1881495
gguuguaguagucuguagu

SEQ ID NO: 2048941 - RNA, 19 nt, Artificial Sequence
  Description of Artificial Sequence: Synthetic oligonucleotide
  Antisense strand to SEQ ID NO: 2048940
acuacagacuacuacaacc

SEQ ID NO: 2048942 - RNA, 19 nt, Artificial Sequence
  Description of Artificial Sequence: Synthetic oligonucleotide
  Sense strand starting at position 1064 of SEQ ID NO: 1881495
gagaaagauugguugcuaa

SEQ ID NO: 2048943 - RNA, 19 nt, Artificial Sequence
  Description of Artificial Sequence: Synthetic oligonucleotide
  Antisense strand to SEQ ID NO: 2048942
uuagcaaccaaucuuucuc

SEQ ID NO: 2048944 - RNA, 19 nt, Artificial Sequence
  Description of Artificial Sequence: Synthetic oligonucleotide
  Sense strand starting at position 1067 of SEQ ID NO: 1881495
aaagauugguugcuaaaug

SEQ ID NO: 2048945 - RNA, 19 nt, Artificial Sequence
  Description of Artificial Sequence: Synthetic oligonucleotide
  Antisense strand to SEQ ID NO: 2048944
cauuuagcaaccaaucuuu

SEQ ID NO: 2048946 - RNA, 19 nt, Artificial Sequence
  Description of Artificial Sequence: Synthetic oligonucleotide
  Sense strand starting at position 1164 of SEQ ID NO: 1881495
cuuauauugggccauauua

SEQ ID NO: 2048947 - RNA, 19 nt, Artificial Sequence
  Description of Artificial Sequence: Synthetic oligonucleotide
  Antisense strand to SEQ ID NO: 2048946
uaauauggcccaauauaag

SEQ ID NO: 2048948 - RNA, 19 nt, Artificial Sequence
  Description of Artificial Sequence: Synthetic oligonucleotide
  Sense strand starting at position 1172 of SEQ ID NO: 1881495
gggccauauuaacuauuaa

SEQ ID NO: 2048949 - RNA, 19 nt, Artificial Sequence
  Description of Artificial Sequence: Synthetic oligonucleotide
  Antisense strand to SEQ ID NO: 2048948
uuaauaguuaauauggccc

SEQ ID NO: 2048950 - RNA, 19 nt, Artificial Sequence
  Description of Artificial Sequence: Synthetic oligonucleotide
  Sense strand starting at position 1316 of SEQ ID NO: 1881495
auaugauuacgggaagugu

SEQ ID NO: 2048951 - RNA, 19 nt, Artificial Sequence
  Description of Artificial Sequence: Synthetic oligonucleotide
  Antisense strand to SEQ ID NO: 2048950
acacuucccguaaucauau

SEQ ID NO: 2048952 - RNA, 19 nt, Artificial Sequence
  Description of Artificial Sequence: Synthetic oligonucleotide
  Sense strand starting at position 1334 of SEQ ID NO: 1881495
uaggcauggccauaguuaa

SEQ ID NO: 2048953 - RNA, 19 nt, Artificial Sequence
  Description of Artificial Sequence: Synthetic oligonucleotide
  Antisense strand to SEQ ID NO: 2048952
uuaacuauggccaugccua

SEQ ID NO: 2048954 - RNA, 19 nt, Artificial Sequence
  Description of Artificial Sequence: Synthetic oligonucleotide
  Sense strand starting at position 1846 of SEQ ID NO: 1881495
gucuauaaccugugaaaug

SEQ ID NO: 2048955 - RNA, 19 nt, Artificial Sequence
  Description of Artificial Sequence: Synthetic oligonucleotide
  Antisense strand to SEQ ID NO: 2048954
cauuucacagguuauagac

SEQ ID NO: 2048956 - RNA, 19 nt, Artificial Sequence
  Description of Artificial Sequence: Synthetic oligonucleotide
  Sense strand starting at position 2090 of SEQ ID NO: 1881495
gggacuugcucucugacag

SEQ ID NO: 2048957 - RNA, 19 nt, Artificial Sequence
  Description of Artificial Sequence: Synthetic oligonucleotide
  Antisense strand to SEQ ID NO: 2048956
cugucagagagcaaguccc

SEQ ID NO: 2048958 - RNA, 19 nt, Artificial Sequence
  Description of Artificial Sequence: Synthetic oligonucleotide
  Sense strand starting at position 2207 of SEQ ID NO: 1881495
gcgaaauagcuugauugaa

SEQ ID NO: 2048959 - RNA, 19 nt, Artificial Sequence
  Description of Artificial Sequence: Synthetic oligonucleotide
  Antisense strand to SEQ ID NO: 2048958
uucaaucaagcuauuucgc

SEQ ID NO: 2048960 - RNA, 19 nt, Artificial Sequence
  Description of Artificial Sequence: Synthetic oligonucleotide
  Sense strand starting at position 2263 of SEQ ID NO: 1881495
ccaucugauacgggaaaua

SEQ ID NO: 2048961 - RNA, 19 nt, Artificial Sequence
  Description of Artificial Sequence: Synthetic oligonucleotide
  Antisense strand to SEQ ID NO: 2048960
uauuucccguaucagaugg

SEQ ID NO: 2048962 - RNA, 19 nt, Artificial Sequence
  Description of Artificial Sequence: Synthetic oligonucleotide
  Sense strand starting at position 2275 of SEQ ID NO: 1881495
ggaaauaagucauccauuc

SEQ ID NO: 2048963 - RNA, 19 nt, Artificial Sequence
  Description of Artificial Sequence: Synthetic oligonucleotide
  Antisense strand to SEQ ID NO: 2048962
gaauggaugacuuauuucc

SEQ ID NO: 2048964 - RNA, 19 nt, Artificial Sequence
  Description of Artificial Sequence: Synthetic oligonucleotide
  Sense strand starting at position 2297 of SEQ ID NO: 1881495
gugggcagacaaugauauu

SEQ ID NO: 2048965 - RNA, 19 nt, Artificial Sequence
  Description of Artificial Sequence: Synthetic oligonucleotide
  Antisense strand to SEQ ID NO: 2048964
aauaucauugucugcccac

SEQ ID NO: 2048966 - RNA, 19 nt, Artificial Sequence
  Description of Artificial Sequence: Synthetic oligonucleotide
  Sense strand starting at position 2435 of SEQ ID NO: 1881495
gggauucaccugcaugagu

SEQ ID NO: 2048967 - RNA, 19 nt, Artificial Sequence
  Description of Artificial Sequence: Synthetic oligonucleotide
  Antisense strand to SEQ ID NO: 2048966
acucaugcaggugaauccc

SEQ ID NO: 2048968 - RNA, 19 nt, Artificial Sequence
  Description of Artificial Sequence: Synthetic oligonucleotide
  Sense strand starting at position 3075 of SEQ ID NO: 1881495
guauaucucuuggcaauuu

SEQ ID NO: 2048969 - RNA, 19 nt, Artificial Sequence
  Description of Artificial Sequence: Synthetic oligonucleotide
  Antisense strand to SEQ ID NO: 2048968
aaauugccaagagauauac

SEQ ID NO: 2048970 - RNA, 19 nt, Artificial Sequence
  Description of Artificial Sequence: Synthetic oligonucleotide
  Sense strand starting at position 3408 of SEQ ID NO: 1881495
agacuuuggcuguaucauu

SEQ ID NO: 2048971 - RNA, 19 nt, Artificial Sequence
  Description of Artificial Sequence: Synthetic oligonucleotide
  Antisense strand to SEQ ID NO: 2048970
aaugauacagccaaagucu

SEQ ID NO: 2048972 - RNA, 19 nt, Artificial Sequence
  Description of Artificial Sequence: Synthetic oligonucleotide
  Sense strand starting at position 3433 of SEQ ID NO: 1881495
ucuccugaccuuuaggauu

SEQ ID NO: 2048973 - RNA, 19 nt, Artificial Sequence
  Description of Artificial Sequence: Synthetic oligonucleotide
  Antisense strand to SEQ ID NO: 2048972
aauccuaaaggucaggaga

SEQ ID NO: 2048974 - RNA, 19 nt, Artificial Sequence
  Description of Artificial Sequence: Synthetic oligonucleotide
  Sense strand starting at position 3471 of SEQ ID NO: 1881495
auccacugauagucauauu

SEQ ID NO: 2048975 - RNA, 19 nt, Artificial Sequence
  Description of Artificial Sequence: Synthetic oligonucleotide
  Antisense strand to SEQ ID NO: 2048974
aauaugacuaucaguggau

SEQ ID NO: 2048976 - RNA, 19 nt, Artificial Sequence
  Description of Artificial Sequence: Synthetic oligonucleotide
  Sense strand starting at position 3790 of SEQ ID NO: 1881495
uugucuauuugcucuucua

SEQ ID NO: 2048977 - RNA, 19 nt, Artificial Sequence
  Description of Artificial Sequence: Synthetic oligonucleotide
  Antisense strand to SEQ ID NO: 2048976
uagaagagcaaauagacaa

SEQ ID NO: 2048978 - RNA, 19 nt, Artificial Sequence
  Description of Artificial Sequence: Synthetic oligonucleotide
  Sense strand starting at position 3956 of SEQ ID NO: 1881495
ugucucuauuucuuuguca

SEQ ID NO: 2048979 - RNA, 19 nt, Artificial Sequence
  Description of Artificial Sequence: Synthetic oligonucleotide
  Antisense strand to SEQ ID NO: 2048978
ugacaaagaaauagagaca

SEQ ID NO: 2048980 - RNA, 19 nt, Artificial Sequence
  Description of Artificial Sequence: Synthetic oligonucleotide
  Sense strand starting at position 3958 of SEQ ID NO: 1881495
ucucuauuucuuugucagu

SEQ ID NO: 2048981 - RNA, 19 nt, Artificial Sequence
  Description of Artificial Sequence: Synthetic oligonucleotide
  Antisense strand to SEQ ID NO: 2048980
acugacaaagaaauagaga

SEQ ID NO: 2048982 - RNA, 19 nt, Artificial Sequence
  Description of Artificial Sequence: Synthetic oligonucleotide
  Sense strand starting at position 3960 of SEQ ID NO: 1881495
ucuauuucuuugucagugu

SEQ ID NO: 2048983 - RNA, 19 nt, Artificial Sequence
  Description of Artificial Sequence: Synthetic oligonucleotide
  Antisense strand to SEQ ID NO: 2048982
acacugacaaagaaauaga

SEQ ID NO: 2048984 - RNA, 19 nt, Artificial Sequence
  Description of Artificial Sequence: Synthetic oligonucleotide
  Sense strand starting at position 3963 of SEQ ID NO: 1881495
auuucuuugucaguguuau

SEQ ID NO: 2048985 - RNA, 19 nt, Artificial Sequence
  Description of Artificial Sequence: Synthetic oligonucleotide
  Antisense strand to SEQ ID NO: 2048984
auaacacugacaaagaaau

SEQ ID NO: 2048986 - RNA, 19 nt, Artificial Sequence
  Description of Artificial Sequence: Synthetic oligonucleotide
  Sense strand starting at position 3971 of SEQ ID NO: 1881495
gucaguguuauugcuguuu

SEQ ID NO: 2048987 - RNA, 19 nt, Artificial Sequence
  Description of Artificial Sequence: Synthetic oligonucleotide
  Antisense strand to SEQ ID NO: 2048986
aaacagcaauaacacugac

SEQ ID NO: 2048988 - RNA, 19 nt, Artificial Sequence
  Description of Artificial Sequence: Synthetic oligonucleotide
  Sense strand starting at position 3975 of SEQ ID NO: 1881495
guguuauugcuguuuccau

SEQ ID NO: 2048989 - RNA, 19 nt, Artificial Sequence
  Description of Artificial Sequence: Synthetic oligonucleotide
  Antisense strand to SEQ ID NO: 2048988
auggaaacagcaauaacac

SEQ ID NO: 2048990 - RNA, 19 nt, Artificial Sequence
  Description of Artificial Sequence: Synthetic oligonucleotide
  Sense strand starting at position 60 of SEQ ID NO: 1881496
aaaggauucccgugcucag

SEQ ID NO: 2048991 - RNA, 19 nt, Artificial Sequence
  Description of Artificial Sequence: Synthetic oligonucleotide
  Antisense strand to SEQ ID NO: 2048990
cugagcacgggaauccuuu

SEQ ID NO: 2048992 - RNA, 19 nt, Artificial Sequence
  Description of Artificial Sequence: Synthetic oligonucleotide
  Sense strand starting at position 100 of SEQ ID NO: 1881496
gguggauaggcgcgaauaa

SEQ ID NO: 2048993 - RNA, 19 nt, Artificial Sequence
  Description of Artificial Sequence: Synthetic oligonucleotide
  Antisense strand to SEQ ID NO: 2048992
uuauucgcgccuauccacc

SEQ ID NO: 2048994 - RNA, 19 nt, Artificial Sequence
  Description of Artificial Sequence: Synthetic oligonucleotide
  Sense strand starting at position 182 of SEQ ID NO: 1881496
ugcgaauaaucuccaaaua

SEQ ID NO: 2048995 - RNA, 19 nt, Artificial Sequence
  Description of Artificial Sequence: Synthetic oligonucleotide
  Antisense strand to SEQ ID NO: 2048994
uauuuggagauuauucgca

SEQ ID NO: 2048996 - RNA, 19 nt, Artificial Sequence
  Description of Artificial Sequence: Synthetic oligonucleotide
  Sense strand starting at position 183 of SEQ ID NO: 1881496
gcgaauaaucuccaaauac

SEQ ID NO: 2048997 - RNA, 19 nt, Artificial Sequence
  Description of Artificial Sequence: Synthetic oligonucleotide
  Antisense strand to SEQ ID NO: 2048996
guauuuggagauuauucgc

SEQ ID NO: 2048998 - RNA, 19 nt, Artificial Sequence
  Description of Artificial Sequence: Synthetic oligonucleotide
  Sense strand starting at position 195 of SEQ ID NO: 1881496
caaauacccugguuggaga

SEQ ID NO: 2048999 - RNA, 19 nt, Artificial Sequence
  Description of Artificial Sequence: Synthetic oligonucleotide
  Antisense strand to SEQ ID NO: 2048998
ucuccaaccaggguauuug

SEQ ID NO: 2049000 - RNA, 19 nt, Artificial Sequence
  Description of Artificial Sequence: Synthetic oligonucleotide
  Sense strand starting at position 271 of SEQ ID NO: 1881496
guguuagugagcguaaucu

SEQ ID NO: 2049001 - RNA, 19 nt, Artificial Sequence
  Description of Artificial Sequence: Synthetic oligonucleotide
  Antisense strand to SEQ ID NO: 2049000
agauuacgcucacuaacac

SEQ ID NO: 2049002 - RNA, 19 nt, Artificial Sequence
  Description of Artificial Sequence: Synthetic oligonucleotide
  Sense strand starting at position 580 of SEQ ID NO: 1881496
aguugucacuccucucauu

SEQ ID NO: 2049003 - RNA, 19 nt, Artificial Sequence
  Description of Artificial Sequence: Synthetic oligonucleotide
  Antisense strand to SEQ ID NO: 2049002
aaugagaggagugacaacu

SEQ ID NO: 2049004 - RNA, 19 nt, Artificial Sequence
  Description of Artificial Sequence: Synthetic oligonucleotide
  Sense strand starting at position 659 of SEQ ID NO: 1881496
ccgcauucuuugccuauuu

SEQ ID NO: 2049005 - RNA, 19 nt, Artificial Sequence
  Description of Artificial Sequence: Synthetic oligonucleotide
  Antisense strand to SEQ ID NO: 2049004
aaauaggcaaagaaugcgg

SEQ ID NO: 2049006 - RNA, 19 nt, Artificial Sequence
  Description of Artificial Sequence: Synthetic oligonucleotide
  Sense strand starting at position 695 of SEQ ID NO: 1881496
ccuuguugaggccaagaaa

SEQ ID NO: 2049007 - RNA, 19 nt, Artificial Sequence
  Description of Artificial Sequence: Synthetic oligonucleotide
  Antisense strand to SEQ ID NO: 2049006
uuucuuggccucaacaagg

SEQ ID NO: 2049008 - RNA, 19 nt, Artificial Sequence
  Description of Artificial Sequence: Synthetic oligonucleotide
  Sense strand starting at position 742 of SEQ ID NO: 1881496
ggauccguauucccaguua

SEQ ID NO: 2049009 - RNA, 19 nt, Artificial Sequence
  Description of Artificial Sequence: Synthetic oligonucleotide
  Antisense strand to SEQ ID NO: 2049008
uaacugggaauacggaucc

SEQ ID NO: 2049010 - RNA, 19 nt, Artificial Sequence
  Description of Artificial Sequence: Synthetic oligonucleotide
  Sense strand starting at position 791 of SEQ ID NO: 1881496
uuugacuggucagcugaau

SEQ ID NO: 2049011 - RNA, 19 nt, Artificial Sequence
  Description of Artificial Sequence: Synthetic oligonucleotide
  Antisense strand to SEQ ID NO: 2049010
auucagcugaccagucaaa

SEQ ID NO: 2049012 - RNA, 19 nt, Artificial Sequence
  Description of Artificial Sequence: Synthetic oligonucleotide
  Sense strand starting at position 933 of SEQ ID NO: 1881496
cuuaguaaucgcgcgggca

SEQ ID NO: 2049013 - RNA, 19 nt, Artificial Sequence
  Description of Artificial Sequence: Synthetic oligonucleotide
  Antisense strand to SEQ ID NO: 2049012
ugcccgcgcgauuacuaag

SEQ ID NO: 2049014 - RNA, 19 nt, Artificial Sequence
  Description of Artificial Sequence: Synthetic oligonucleotide
  Sense strand starting at position 1726 of SEQ ID NO: 1881496
gggcgauuccgccagaaau

SEQ ID NO: 2049015 - RNA, 19 nt, Artificial Sequence
  Description of Artificial Sequence: Synthetic oligonucleotide
  Antisense strand to SEQ ID NO: 2049014
auuucuggcggaaucgccc

SEQ ID NO: 2049016 - RNA, 19 nt, Artificial Sequence
  Description of Artificial Sequence: Synthetic oligonucleotide
  Sense strand starting at position 1927 of SEQ ID NO: 1881496
uauacauuucucggcgaua

SEQ ID NO: 2049017 - RNA, 19 nt, Artificial Sequence
  Description of Artificial Sequence: Synthetic oligonucleotide
  Antisense strand to SEQ ID NO: 2049016
uaucgccgagaaauguaua

SEQ ID NO: 2049018 - RNA, 19 nt, Artificial Sequence
  Description of Artificial Sequence: Synthetic oligonucleotide
  Sense strand starting at position 1928 of SEQ ID NO: 1881496
auacauuucucggcgauac

SEQ ID NO: 2049019 - RNA, 19 nt, Artificial Sequence
  Description of Artificial Sequence: Synthetic oligonucleotide
  Antisense strand to SEQ ID NO: 2049018
guaucgccgagaaauguau

SEQ ID NO: 2049020 - RNA, 19 nt, Artificial Sequence
  Description of Artificial Sequence: Synthetic oligonucleotide
  Sense strand starting at position 1929 of SEQ ID NO: 1881496
uacauuucucggcgauaca

SEQ ID NO: 2049021 - RNA, 19 nt, Artificial Sequence
  Description of Artificial Sequence: Synthetic oligonucleotide
  Antisense strand to SEQ ID NO: 2049020
uguaucgccgagaaaugua

SEQ ID NO: 2049022 - RNA, 19 nt, Artificial Sequence
  Description of Artificial Sequence: Synthetic oligonucleotide
  Sense strand starting at position 1938 of SEQ ID NO: 1881496
cggcgauacacuuauaaac

SEQ ID NO: 2049023 - RNA, 19 nt, Artificial Sequence
  Description of Artificial Sequence: Synthetic oligonucleotide
  Antisense strand to SEQ ID NO: 2049022
guuuauaaguguaucgccg

SEQ ID NO: 2049024 - RNA, 19 nt, Artificial Sequence
  Description of Artificial Sequence: Synthetic oligonucleotide
  Sense strand starting at position 2002 of SEQ ID NO: 1881496
ccgucaguaauaggauuau

SEQ ID NO: 2049025 - RNA, 19 nt, Artificial Sequence
  Description of Artificial Sequence: Synthetic oligonucleotide
  Antisense strand to SEQ ID NO: 2049024
auaauccuauuacugacgg

SEQ ID NO: 2049026 - RNA, 19 nt, Artificial Sequence
  Description of Artificial Sequence: Synthetic oligonucleotide
  Sense strand starting at position 2384 of SEQ ID NO: 1881496
ugguuaaaugaaugguaac

SEQ ID NO: 2049027 - RNA, 19 nt, Artificial Sequence
  Description of Artificial Sequence: Synthetic oligonucleotide
  Antisense strand to SEQ ID NO: 2049026
guuaccauucauuuaacca

SEQ ID NO: 2049028 - RNA, 19 nt, Artificial Sequence
  Description of Artificial Sequence: Synthetic oligonucleotide
  Sense strand starting at position 2385 of SEQ ID NO: 1881496
gguuaaaugaaugguaaca

SEQ ID NO: 2049029 - RNA, 19 nt, Artificial Sequence
  Description of Artificial Sequence: Synthetic oligonucleotide
  Antisense strand to SEQ ID NO: 2049028
uguuaccauucauuuaacc

SEQ ID NO: 2049030 - RNA, 19 nt, Artificial Sequence
  Description of Artificial Sequence: Synthetic oligonucleotide
  Sense strand starting at position 2461 of SEQ ID NO: 1881496
ucguguuuauuuccuacua

SEQ ID NO: 2049031 - RNA, 19 nt, Artificial Sequence
  Description of Artificial Sequence: Synthetic oligonucleotide
  Antisense strand to SEQ ID NO: 2049030
uaguaggaaauaaacacga

SEQ ID NO: 2049032 - RNA, 19 nt, Artificial Sequence
  Description of Artificial Sequence: Synthetic oligonucleotide
  Sense strand starting at position 2486 of SEQ ID NO: 1881496
agaguaguagcucgugaca

SEQ ID NO: 2049033 - RNA, 19 nt, Artificial Sequence
  Description of Artificial Sequence: Synthetic oligonucleotide
  Antisense strand to SEQ ID NO: 2049032
ugucacgagcuacuacucu

SEQ ID NO: 2049034 - RNA, 19 nt, Artificial Sequence
  Description of Artificial Sequence: Synthetic oligonucleotide
  Sense strand starting at position 2497 of SEQ ID NO: 1881496
ucgugacagccuuaagcau

SEQ ID NO: 2049035 - RNA, 19 nt, Artificial Sequence
  Description of Artificial Sequence: Synthetic oligonucleotide
  Antisense strand to SEQ ID NO: 2049034
augcuuaaggcugucacga

SEQ ID NO: 2049036 - RNA, 19 nt, Artificial Sequence
  Description of Artificial Sequence: Synthetic oligonucleotide
  Sense strand starting at position 2580 of SEQ ID NO: 1881496
uggaaagucagguguccaa

SEQ ID NO: 2049037 - RNA, 19 nt, Artificial Sequence
  Description of Artificial Sequence: Synthetic oligonucleotide
  Antisense strand to SEQ ID NO: 2049036
uuggacaccugacuuucca

SEQ ID NO: 2049038 - RNA, 19 nt, Artificial Sequence
  Description of Artificial Sequence: Synthetic oligonucleotide
  Sense strand starting at position 2745 of SEQ ID NO: 1881496
ccacauauccaguaggcua

SEQ ID NO: 2049039 - RNA, 19 nt, Artificial Sequence
  Description of Artificial Sequence: Synthetic oligonucleotide
  Antisense strand to SEQ ID NO: 2049038
uagccuacuggauaugugg

SEQ ID NO: 2049040 - RNA, 19 nt, Artificial Sequence
  Description of Artificial Sequence: Synthetic oligonucleotide
  Sense strand starting at position 2752 of SEQ ID NO: 1881496
uccaguaggcuagauacua

SEQ ID NO: 2049041 - RNA, 19 nt, Artificial Sequence
  Description of Artificial Sequence: Synthetic oligonucleotide
  Antisense strand to SEQ ID NO: 2049040
uaguaucuagccuacugga

SEQ ID NO: 2049042 - RNA, 19 nt, Artificial Sequence
  Description of Artificial Sequence: Synthetic oligonucleotide
  Sense strand starting at position 2773 of SEQ ID NO: 1881496
uagagaguauucccacguu

SEQ ID NO: 2049043 - RNA, 19 nt, Artificial Sequence
  Description of Artificial Sequence: Synthetic oligonucleotide
  Antisense strand to SEQ ID NO: 2049042
aacgugggaauacucucua

SEQ ID NO: 2049044 - RNA, 19 nt, Artificial Sequence
  Description of Artificial Sequence: Synthetic oligonucleotide
  Sense strand starting at position 2776 of SEQ ID NO: 1881496
agaguauucccacguuguc

SEQ ID NO: 2049045 - RNA, 19 nt, Artificial Sequence
  Description of Artificial Sequence: Synthetic oligonucleotide
  Antisense strand to SEQ ID NO: 2049044
gacaacgugggaauacucu

SEQ ID NO: 2049046 - RNA, 19 nt, Artificial Sequence
  Description of Artificial Sequence: Synthetic oligonucleotide
  Sense strand starting at position 2912 of SEQ ID NO: 1881496
gcucuuugccuagagguaa

SEQ ID NO: 2049047 - RNA, 19 nt, Artificial Sequence
  Description of Artificial Sequence: Synthetic oligonucleotide
  Antisense strand to SEQ ID NO: 2049046
uuaccucuaggcaaagagc

SEQ ID NO: 2049048 - RNA, 19 nt, Artificial Sequence
  Description of Artificial Sequence: Synthetic oligonucleotide
  Sense strand starting at position 2944 of SEQ ID NO: 1881496
gccagauguucuucuauug

SEQ ID NO: 2049049 - RNA, 19 nt, Artificial Sequence
  Description of Artificial Sequence: Synthetic oligonucleotide
  Antisense strand to SEQ ID NO: 2049048
caauagaagaacaucuggc

SEQ ID NO: 2049050 - RNA, 19 nt, Artificial Sequence
  Description of Artificial Sequence: Synthetic oligonucleotide
  Sense strand starting at position 2982 of SEQ ID NO: 1881496
ggagccuugcuuuagggau

SEQ ID NO: 2049051 - RNA, 19 nt, Artificial Sequence
  Description of Artificial Sequence: Synthetic oligonucleotide
  Antisense strand to SEQ ID NO: 2049050
aucccuaaagcaaggcucc

SEQ ID NO: 2049052 - RNA, 19 nt, Artificial Sequence
  Description of Artificial Sequence: Synthetic oligonucleotide
  Sense strand starting at position 2988 of SEQ ID NO: 1881496
uugcuuuagggauaggauc

SEQ ID NO: 2049053 - RNA, 19 nt, Artificial Sequence
  Description of Artificial Sequence: Synthetic oligonucleotide
  Antisense strand to SEQ ID NO: 2049052
gauccuaucccuaaagcaa

SEQ ID NO: 2049054 - RNA, 19 nt, Artificial Sequence
  Description of Artificial Sequence: Synthetic oligonucleotide
  Sense strand starting at position 3166 of SEQ ID NO: 1881496
aagagauuauuugaggugu

SEQ ID NO: 2049055 - RNA, 19 nt, Artificial Sequence
  Description of Artificial Sequence: Synthetic oligonucleotide
  Antisense strand to SEQ ID NO: 2049054
acaccucaaauaaucucuu

SEQ ID NO: 2049056 - RNA, 19 nt, Artificial Sequence
  Description of Artificial Sequence: Synthetic oligonucleotide
  Sense strand starting at position 3168 of SEQ ID NO: 1881496
gagauuauuugagguguua

SEQ ID NO: 2049057 - RNA, 19 nt, Artificial Sequence
  Description of Artificial Sequence: Synthetic oligonucleotide
  Antisense strand to SEQ ID NO: 2049056
uaacaccucaaauaaucuc

SEQ ID NO: 2049058 - RNA, 19 nt, Artificial Sequence
  Description of Artificial Sequence: Synthetic oligonucleotide
  Sense strand starting at position 3265 of SEQ ID NO: 1881496
ccugucccauacuuguaua

SEQ ID NO: 2049059 - RNA, 19 nt, Artificial Sequence
  Description of Artificial Sequence: Synthetic oligonucleotide
  Antisense strand to SEQ ID NO: 2049058
uauacaaguaugggacagg

SEQ ID NO: 2049060 - RNA, 19 nt, Artificial Sequence
  Description of Artificial Sequence: Synthetic oligonucleotide
  Sense strand starting at position 3492 of SEQ ID NO: 1881496
auguuaugcaagugaaaga

SEQ ID NO: 2049061 - RNA, 19 nt, Artificial Sequence
  Description of Artificial Sequence: Synthetic oligonucleotide
  Antisense strand to SEQ ID NO: 2049060
ucuuucacuugcauaacau

SEQ ID NO: 2049062 - RNA, 19 nt, Artificial Sequence
  Description of Artificial Sequence: Synthetic oligonucleotide
  Sense strand starting at position 3788 of SEQ ID NO: 1881496
cauuaaagagucuggcagu

SEQ ID NO: 2049063 - RNA, 19 nt, Artificial Sequence
  Description of Artificial Sequence: Synthetic oligonucleotide
  Antisense strand to SEQ ID NO: 2049062
acugccagacucuuuaaug

SEQ ID NO: 2049064 - RNA, 19 nt, Artificial Sequence
  Description of Artificial Sequence: Synthetic oligonucleotide
  Sense strand starting at position 3852 of SEQ ID NO: 1881496
uuugguaguguguaguaua

SEQ ID NO: 2049065 - RNA, 19 nt, Artificial Sequence
  Description of Artificial Sequence: Synthetic oligonucleotide
  Antisense strand to SEQ ID NO: 2049064
uauacuacacacuaccaaa

SEQ ID NO: 2049066 - RNA, 19 nt, Artificial Sequence
  Description of Artificial Sequence: Synthetic oligonucleotide
  Sense strand starting at position 3885 of SEQ ID NO: 1881496
gugugauuacccuauggua

SEQ ID NO: 2049067 - RNA, 19 nt, Artificial Sequence
  Description of Artificial Sequence: Synthetic oligonucleotide
  Antisense strand to SEQ ID NO: 2049066
uaccauaggguaaucacac

SEQ ID NO: 2049068 - RNA, 19 nt, Artificial Sequence
  Description of Artificial Sequence: Synthetic oligonucleotide
  Sense strand starting at position 3956 of SEQ ID NO: 1881496
augugaucugcacagccau

SEQ ID NO: 2049069 - RNA, 19 nt, Artificial Sequence
  Description of Artificial Sequence: Synthetic oligonucleotide
  Antisense strand to SEQ ID NO: 2049068
auggcugugcagaucacau

SEQ ID NO: 2049070 - RNA, 19 nt, Artificial Sequence
  Description of Artificial Sequence: Synthetic oligonucleotide
  Sense strand starting at position 1 of SEQ ID NO: 1881497
auggguagauggguugaua

SEQ ID NO: 2049071 - RNA, 19 nt, Artificial Sequence
  Description of Artificial Sequence: Synthetic oligonucleotide
  Antisense strand to SEQ ID NO: 2049070
uaucaacccaucuacccau

SEQ ID NO: 2049072 - RNA, 19 nt, Artificial Sequence
  Description of Artificial Sequence: Synthetic oligonucleotide
  Sense strand starting at position 4 of SEQ ID NO: 1881497
gguagauggguugauaggu

SEQ ID NO: 2049073 - RNA, 19 nt, Artificial Sequence
  Description of Artificial Sequence: Synthetic oligonucleotide
  Antisense strand to SEQ ID NO: 2049072
accuaucaacccaucuacc

SEQ ID NO: 2049074 - RNA, 19 nt, Artificial Sequence
  Description of Artificial Sequence: Synthetic oligonucleotide
  Sense strand starting at position 25 of SEQ ID NO: 1881497
uuguuugaguagguggaua

SEQ ID NO: 2049075 - RNA, 19 nt, Artificial Sequence
  Description of Artificial Sequence: Synthetic oligonucleotide
  Antisense strand to SEQ ID NO: 2049074
uauccaccuacucaaacaa

SEQ ID NO: 2049076 - RNA, 19 nt, Artificial Sequence
  Description of Artificial Sequence: Synthetic oligonucleotide
  Sense strand starting at position 27 of SEQ ID NO: 1881497
guuugaguagguggauaga

SEQ ID NO: 2049077 - RNA, 19 nt, Artificial Sequence
  Description of Artificial Sequence: Synthetic oligonucleotide
  Antisense strand to SEQ ID NO: 2049076
ucuauccaccuacucaaac

SEQ ID NO: 2049078 - RNA, 19 nt, Artificial Sequence
  Description of Artificial Sequence: Synthetic oligonucleotide
  Sense strand starting at position 92 of SEQ ID NO: 1881497
uggauaaguaggugaagca

SEQ ID NO: 2049079 - RNA, 19 nt, Artificial Sequence
  Description of Artificial Sequence: Synthetic oligonucleotide
  Antisense strand to SEQ ID NO: 2049078
ugcuucaccuacuuaucca

SEQ ID NO: 2049080 - RNA, 19 nt, Artificial Sequence
  Description of Artificial Sequence: Synthetic oligonucleotide
  Sense strand starting at position 104 of SEQ ID NO: 1881497
ugaagcagucaauggguaa

SEQ ID NO: 2049081 - RNA, 19 nt, Artificial Sequence
  Description of Artificial Sequence: Synthetic oligonucleotide
  Antisense strand to SEQ ID NO: 2049080
uuacccauugacugcuuca

SEQ ID NO: 2049082 - RNA, 19 nt, Artificial Sequence
  Description of Artificial Sequence: Synthetic oligonucleotide
  Sense strand starting at position 108 of SEQ ID NO: 1881497
gcagucaauggguaaguga

SEQ ID NO: 2049083 - RNA, 19 nt, Artificial Sequence
  Description of Artificial Sequence: Synthetic oligonucleotide
  Antisense strand to SEQ ID NO: 2049082
ucacuuacccauugacugc

SEQ ID NO: 2049084 - RNA, 19 nt, Artificial Sequence
  Description of Artificial Sequence: Synthetic oligonucleotide
  Sense strand starting at position 126 of SEQ ID NO: 1881497
agugaauguguaggaggau

SEQ ID NO: 2049085 - RNA, 19 nt, Artificial Sequence
  Description of Artificial Sequence: Synthetic oligonucleotide
  Antisense strand to SEQ ID NO: 2049084
auccuccuacacauucacu

SEQ ID NO: 2049086 - RNA, 19 nt, Artificial Sequence
  Description of Artificial Sequence: Synthetic oligonucleotide
  Sense strand starting at position 129 of SEQ ID NO: 1881497
gaauguguaggaggaucau

SEQ ID NO: 2049087 - RNA, 19 nt, Artificial Sequence
  Description of Artificial Sequence: Synthetic oligonucleotide
  Antisense strand to SEQ ID NO: 2049086
augauccuccuacacauuc

SEQ ID NO: 2049088 - RNA, 19 nt, Artificial Sequence
  Description of Artificial Sequence: Synthetic oligonucleotide
  Sense strand starting at position 161 of SEQ ID NO: 1881497
aguggaugucauggguaua

SEQ ID NO: 2049089 - RNA, 19 nt, Artificial Sequence
  Description of Artificial Sequence: Synthetic oligonucleotide
  Antisense strand to SEQ ID NO: 2049088
uauacccaugacauccacu

SEQ ID NO: 2049090 - RNA, 19 nt, Artificial Sequence
  Description of Artificial Sequence: Synthetic oligonucleotide
  Sense strand starting at position 191 of SEQ ID NO: 1881497
gagguagauaaguaugugu

SEQ ID NO: 2049091 - RNA, 19 nt, Artificial Sequence
  Description of Artificial Sequence: Synthetic oligonucleotide
  Antisense strand to SEQ ID NO: 2049090
acacauacuuaucuaccuc

SEQ ID NO: 2049092 - RNA, 19 nt, Artificial Sequence
  Description of Artificial Sequence: Synthetic oligonucleotide
  Sense strand starting at position 196 of SEQ ID NO: 1881497
agauaaguauguguacaga

SEQ ID NO: 2049093 - RNA, 19 nt, Artificial Sequence
  Description of Artificial Sequence: Synthetic oligonucleotide
  Antisense strand to SEQ ID NO: 2049092
ucuguacacauacuuaucu

SEQ ID NO: 2049094 - RNA, 19 nt, Artificial Sequence
  Description of Artificial Sequence: Synthetic oligonucleotide
  Sense strand starting at position 285 of SEQ ID NO: 1881497
uauuguguuacaugggaga

SEQ ID NO: 2049095 - RNA, 19 nt, Artificial Sequence
  Description of Artificial Sequence: Synthetic oligonucleotide
  Antisense strand to SEQ ID NO: 2049094
ucucccauguaacacaaua

SEQ ID NO: 2049096 - RNA, 19 nt, Artificial Sequence
  Description of Artificial Sequence: Synthetic oligonucleotide
  Sense strand starting at position 287 of SEQ ID NO: 1881497
uuguguuacaugggagaaa

SEQ ID NO: 2049097 - RNA, 19 nt, Artificial Sequence
  Description of Artificial Sequence: Synthetic oligonucleotide
  Antisense strand to SEQ ID NO: 2049096
uuucucccauguaacacaa

SEQ ID NO: 2049098 - RNA, 19 nt, Artificial Sequence
  Description of Artificial Sequence: Synthetic oligonucleotide
  Sense strand starting at position 304 of SEQ ID NO: 1881497
aaacaaguuuaguuagguu

SEQ ID NO: 2049099 - RNA, 19 nt, Artificial Sequence
  Description of Artificial Sequence: Synthetic oligonucleotide
  Antisense strand to SEQ ID NO: 2049098
aaccuaacuaaacuuguuu

SEQ ID NO: 2049100 - RNA, 19 nt, Artificial Sequence
  Description of Artificial Sequence: Synthetic oligonucleotide
  Sense strand starting at position 336 of SEQ ID NO: 1881497
augagugaguaguuggaua

SEQ ID NO: 2049101 - RNA, 19 nt, Artificial Sequence
  Description of Artificial Sequence: Synthetic oligonucleotide
  Antisense strand to SEQ ID NO: 2049100
uauccaacuacucacucau

SEQ ID NO: 2049102 - RNA, 19 nt, Artificial Sequence
  Description of Artificial Sequence: Synthetic oligonucleotide
  Sense strand starting at position 338 of SEQ ID NO: 1881497
gagugaguaguuggauaua

SEQ ID NO: 2049103 - RNA, 19 nt, Artificial Sequence
  Description of Artificial Sequence: Synthetic oligonucleotide
  Antisense strand to SEQ ID NO: 2049102
uauauccaacuacucacuc

SEQ ID NO: 2049104 - RNA, 19 nt, Artificial Sequence
  Description of Artificial Sequence: Synthetic oligonucleotide
  Sense strand starting at position 383 of SEQ ID NO: 1881497
auggaugaugggugaguga

SEQ ID NO: 2049105 - RNA, 19 nt, Artificial Sequence
  Description of Artificial Sequence: Synthetic oligonucleotide
  Antisense strand to SEQ ID NO: 2049104
ucacucacccaucauccau

SEQ ID NO: 2049106 - RNA, 19 nt, Artificial Sequence
  Description of Artificial Sequence: Synthetic oligonucleotide
  Sense strand starting at position 468 of SEQ ID NO: 1881497
aauggauaggugggugaau

SEQ ID NO: 2049107 - RNA, 19 nt, Artificial Sequence
  Description of Artificial Sequence: Synthetic oligonucleotide
  Antisense strand to SEQ ID NO: 2049106
auucacccaccuauccauu

SEQ ID NO: 2049108 - RNA, 19 nt, Artificial Sequence
  Description of Artificial Sequence: Synthetic oligonucleotide
  Sense strand starting at position 946 of SEQ ID NO: 1881497
gguggauggugaaggaauu

SEQ ID NO: 2049109 - RNA, 19 nt, Artificial Sequence
  Description of Artificial Sequence: Synthetic oligonucleotide
  Antisense strand to SEQ ID NO: 2049108
aauuccuucaccauccacc

SEQ ID NO: 2049110 - RNA, 19 nt, Artificial Sequence
  Description of Artificial Sequence: Synthetic oligonucleotide
  Sense strand starting at position 947 of SEQ ID NO: 1881497
guggauggugaaggaauua

SEQ ID NO: 2049111 - RNA, 19 nt, Artificial Sequence
  Description of Artificial Sequence: Synthetic oligonucleotide
  Antisense strand to SEQ ID NO: 2049110
uaauuccuucaccauccac

SEQ ID NO: 2049112 - RNA, 19 nt, Artificial Sequence
  Description of Artificial Sequence: Synthetic oligonucleotide
  Sense strand starting at position 1004 of SEQ ID NO: 1881497
auaaguuucugguuuagaa

SEQ ID NO: 2049113 - RNA, 19 nt, Artificial Sequence
  Description of Artificial Sequence: Synthetic oligonucleotide
  Antisense strand to SEQ ID NO: 2049112
uucuaaaccagaaacuuau

SEQ ID NO: 2049114 - RNA, 19 nt, Artificial Sequence
  Description of Artificial Sequence: Synthetic oligonucleotide
  Sense strand starting at position 1011 of SEQ ID NO: 1881497
ucugguuuagaagacuagu

SEQ ID NO: 2049115 - RNA, 19 nt, Artificial Sequence
  Description of Artificial Sequence: Synthetic oligonucleotide
  Antisense strand to SEQ ID NO: 2049114
acuagucuucuaaaccaga

SEQ ID NO: 2049116 - RNA, 19 nt, Artificial Sequence
  Description of Artificial Sequence: Synthetic oligonucleotide
  Sense strand starting at position 1022 of SEQ ID NO: 1881497
agacuaguauccuucugag

SEQ ID NO: 2049117 - RNA, 19 nt, Artificial Sequence
  Description of Artificial Sequence: Synthetic oligonucleotide
  Antisense strand to SEQ ID NO: 2049116
cucagaaggauacuagucu

SEQ ID NO: 2049118 - RNA, 19 nt, Artificial Sequence
  Description of Artificial Sequence: Synthetic oligonucleotide
  Sense strand starting at position 1052 of SEQ ID NO: 1881497
agugucaggcucuacaaau

SEQ ID NO: 2049119 - RNA, 19 nt, Artificial Sequence
  Description of Artificial Sequence: Synthetic oligonucleotide
  Antisense strand to SEQ ID NO: 2049118
auuuguagagccugacacu

SEQ ID NO: 2049120 - RNA, 19 nt, Artificial Sequence
  Description of Artificial Sequence: Synthetic oligonucleotide
  Sense strand starting at position 1107 of SEQ ID NO: 1881497
ccauuugcuccaugagugu

SEQ ID NO: 2049121 - RNA, 19 nt, Artificial Sequence
  Description of Artificial Sequence: Synthetic oligonucleotide
  Antisense strand to SEQ ID NO: 2049120
acacucauggagcaaaugg

SEQ ID NO: 2049122 - RNA, 19 nt, Artificial Sequence
  Description of Artificial Sequence: Synthetic oligonucleotide
  Sense strand starting at position 1113 of SEQ ID NO: 1881497
gcuccaugagugugaagga

SEQ ID NO: 2049123 - RNA, 19 nt, Artificial Sequence
  Description of Artificial Sequence: Synthetic oligonucleotide
  Antisense strand to SEQ ID NO: 2049122
uccuucacacucauggagc

SEQ ID NO: 2049124 - RNA, 19 nt, Artificial Sequence
  Description of Artificial Sequence: Synthetic oligonucleotide
  Sense strand starting at position 1129 of SEQ ID NO: 1881497
ggaguagauuggccagauu

SEQ ID NO: 2049125 - RNA, 19 nt, Artificial Sequence
  Description of Artificial Sequence: Synthetic oligonucleotide
  Antisense strand to SEQ ID NO: 2049124
aaucuggccaaucuacucc

SEQ ID NO: 2049126 - RNA, 19 nt, Artificial Sequence
  Description of Artificial Sequence: Synthetic oligonucleotide
  Sense strand starting at position 1338 of SEQ ID NO: 1881497
uuucuccucgacugauuaa

SEQ ID NO: 2049127 - RNA, 19 nt, Artificial Sequence
  Description of Artificial Sequence: Synthetic oligonucleotide
  Antisense strand to SEQ ID NO: 2049126
uuaaucagucgaggagaaa

SEQ ID NO: 2049128 - RNA, 19 nt, Artificial Sequence
  Description of Artificial Sequence: Synthetic oligonucleotide
  Sense strand starting at position 1341 of SEQ ID NO: 1881497
cuccucgacugauuaagaa

SEQ ID NO: 2049129 - RNA, 19 nt, Artificial Sequence
  Description of Artificial Sequence: Synthetic oligonucleotide
  Antisense strand to SEQ ID NO: 2049128
uucuuaaucagucgaggag

SEQ ID NO: 2049130 - RNA, 19 nt, Artificial Sequence
  Description of Artificial Sequence: Synthetic oligonucleotide
  Sense strand starting at position 1487 of SEQ ID NO: 1881497
gcagucuagccugaacaga

SEQ ID NO: 2049131 - RNA, 19 nt, Artificial Sequence
  Description of Artificial Sequence: Synthetic oligonucleotide
  Antisense strand to SEQ ID NO: 2049130
ucuguucaggcuagacugc

SEQ ID NO: 2049132 - RNA, 19 nt, Artificial Sequence
  Description of Artificial Sequence: Synthetic oligonucleotide
  Sense strand starting at position 1723 of SEQ ID NO: 1881497
uguguucccaggcaugaca

SEQ ID NO: 2049133 - RNA, 19 nt, Artificial Sequence
  Description of Artificial Sequence: Synthetic oligonucleotide
  Antisense strand to SEQ ID NO: 2049132
ugucaugccugggaacaca

SEQ ID NO: 2049134 - RNA, 19 nt, Artificial Sequence
  Description of Artificial Sequence: Synthetic oligonucleotide
  Sense strand starting at position 2063 of SEQ ID NO: 1881497
uggucucagccucaggaua

SEQ ID NO: 2049135 - RNA, 19 nt, Artificial Sequence
  Description of Artificial Sequence: Synthetic oligonucleotide
  Antisense strand to SEQ ID NO: 2049134
uauccugaggcugagacca

SEQ ID NO: 2049136 - RNA, 19 nt, Artificial Sequence
  Description of Artificial Sequence: Synthetic oligonucleotide
  Sense strand starting at position 2291 of SEQ ID NO: 1881497
gaggguucacugggugaau

SEQ ID NO: 2049137 - RNA, 19 nt, Artificial Sequence
  Description of Artificial Sequence: Synthetic oligonucleotide
  Antisense strand to SEQ ID NO: 2049136
auucacccagugaacccuc

SEQ ID NO: 2049138 - RNA, 19 nt, Artificial Sequence
  Description of Artificial Sequence: Synthetic oligonucleotide
  Sense strand starting at position 2314 of SEQ ID NO: 1881497
gagccuguacagugaauga

SEQ ID NO: 2049139 - RNA, 19 nt, Artificial Sequence
  Description of Artificial Sequence: Synthetic oligonucleotide
  Antisense strand to SEQ ID NO: 2049138
ucauucacuguacaggcuc

SEQ ID NO: 2049140 - RNA, 19 nt, Artificial Sequence
  Description of Artificial Sequence: Synthetic oligonucleotide
  Sense strand starting at position 3342 of SEQ ID NO: 1881497
uccugauggcacuggaaga

SEQ ID NO: 2049141 - RNA, 19 nt, Artificial Sequence
  Description of Artificial Sequence: Synthetic oligonucleotide
  Antisense strand to SEQ ID NO: 2049140
ucuuccagugccaucagga

SEQ ID NO: 2049142 - RNA, 19 nt, Artificial Sequence
  Description of Artificial Sequence: Synthetic oligonucleotide
  Sense strand starting at position 3363 of SEQ ID NO: 1881497
ggcagcaucccagaaacau

SEQ ID NO: 2049143 - RNA, 19 nt, Artificial Sequence
  Description of Artificial Sequence: Synthetic oligonucleotide
  Antisense strand to SEQ ID NO: 2049142
auguuucugggaugcugcc

SEQ ID NO: 2049144 - RNA, 19 nt, Artificial Sequence
  Description of Artificial Sequence: Synthetic oligonucleotide
  Sense strand starting at position 3732 of SEQ ID NO: 1881497
gaaugccugcaugagacau

SEQ ID NO: 2049145 - RNA, 19 nt, Artificial Sequence
  Description of Artificial Sequence: Synthetic oligonucleotide
  Antisense strand to SEQ ID NO: 2049144
augucucaugcaggcauuc

SEQ ID NO: 2049146 - RNA, 19 nt, Artificial Sequence
  Description of Artificial Sequence: Synthetic oligonucleotide
  Sense strand starting at position 3820 of SEQ ID NO: 1881497
acacauuucugggaaauaa

SEQ ID NO: 2049147 - RNA, 19 nt, Artificial Sequence
  Description of Artificial Sequence: Synthetic oligonucleotide
  Antisense strand to SEQ ID NO: 2049146
uuauuucccagaaaugugu

SEQ ID NO: 2049148 - RNA, 19 nt, Artificial Sequence
  Description of Artificial Sequence: Synthetic oligonucleotide
  Sense strand starting at position 3870 of SEQ ID NO: 1881497
guuuaucuuccagggcaaa

SEQ ID NO: 2049149 - RNA, 19 nt, Artificial Sequence
  Description of Artificial Sequence: Synthetic oligonucleotide
  Antisense strand to SEQ ID NO: 2049148
uuugcccuggaagauaaac

SEQ ID NO: 2049150 - RNA, 19 nt, Artificial Sequence
  Description of Artificial Sequence: Synthetic oligonucleotide
  Sense strand starting at position 1 of SEQ ID NO: 1881498
uaauaugaggaguguaaug

SEQ ID NO: 2049151 - RNA, 19 nt, Artificial Sequence
  Description of Artificial Sequence: Synthetic oligonucleotide
  Antisense strand to SEQ ID NO: 2049150
cauuacacuccucauauua

SEQ ID NO: 2049152 - RNA, 19 nt, Artificial Sequence
  Description of Artificial Sequence: Synthetic oligonucleotide
  Sense strand starting at position 3 of SEQ ID NO: 1881498
auaugaggaguguaauguu

SEQ ID NO: 2049153 - RNA, 19 nt, Artificial Sequence
  Description of Artificial Sequence: Synthetic oligonucleotide
  Antisense strand to SEQ ID NO: 2049152
aacauuacacuccucauau

SEQ ID NO: 2049154 - RNA, 19 nt, Artificial Sequence
  Description of Artificial Sequence: Synthetic oligonucleotide
  Sense strand starting at position 158 of SEQ ID NO: 1881498
ggcccugugaauuagacua

SEQ ID NO: 2049155 - RNA, 19 nt, Artificial Sequence
  Description of Artificial Sequence: Synthetic oligonucleotide
  Antisense strand to SEQ ID NO: 2049154
uagucuaauucacagggcc

SEQ ID NO: 2049156 - RNA, 19 nt, Artificial Sequence
  Description of Artificial Sequence: Synthetic oligonucleotide
  Sense strand starting at position 163 of SEQ ID NO: 1881498
ugugaauuagacuagccaa

SEQ ID NO: 2049157 - RNA, 19 nt, Artificial Sequence
  Description of Artificial Sequence: Synthetic oligonucleotide
  Antisense strand to SEQ ID NO: 2049156
uuggcuagucuaauucaca

SEQ ID NO: 2049158 - RNA, 19 nt, Artificial Sequence
  Description of Artificial Sequence: Synthetic oligonucleotide
  Sense strand starting at position 184 of SEQ ID NO: 1881498
acagauuaauuagagacaa

SEQ ID NO: 2049159 - RNA, 19 nt, Artificial Sequence
  Description of Artificial Sequence: Synthetic oligonucleotide
  Antisense strand to SEQ ID NO: 2049158
uugucucuaauuaaucugu

SEQ ID NO: 2049160 - RNA, 19 nt, Artificial Sequence
  Description of Artificial Sequence: Synthetic oligonucleotide
  Sense strand starting at position 218 of SEQ ID NO: 1881498
cucaguggccuuuaacaaa

SEQ ID NO: 2049161 - RNA, 19 nt, Artificial Sequence
  Description of Artificial Sequence: Synthetic oligonucleotide
  Antisense strand to SEQ ID NO: 2049160
uuuguuaaaggccacugag

SEQ ID NO: 2049162 - RNA, 19 nt, Artificial Sequence
  Description of Artificial Sequence: Synthetic oligonucleotide
  Sense strand starting at position 308 of SEQ ID NO: 1881498
agaauacauuucugucgua

SEQ ID NO: 2049163 - RNA, 19 nt, Artificial Sequence
  Description of Artificial Sequence: Synthetic oligonucleotide
  Antisense strand to SEQ ID NO: 2049162
uacgacagaaauguauucu

SEQ ID NO: 2049164 - RNA, 19 nt, Artificial Sequence
  Description of Artificial Sequence: Synthetic oligonucleotide
  Sense strand starting at position 309 of SEQ ID NO: 1881498
gaauacauuucugucguau

SEQ ID NO: 2049165 - RNA, 19 nt, Artificial Sequence
  Description of Artificial Sequence: Synthetic oligonucleotide
  Antisense strand to SEQ ID NO: 2049164
auacgacagaaauguauuc

SEQ ID NO: 2049166 - RNA, 19 nt, Artificial Sequence
  Description of Artificial Sequence: Synthetic oligonucleotide
  Sense strand starting at position 313 of SEQ ID NO: 1881498
acauuucugucguaugaaa

SEQ ID NO: 2049167 - RNA, 19 nt, Artificial Sequence
  Description of Artificial Sequence: Synthetic oligonucleotide
  Antisense strand to SEQ ID NO: 2049166
uuucauacgacagaaaugu

SEQ ID NO: 2049168 - RNA, 19 nt, Artificial Sequence
  Description of Artificial Sequence: Synthetic oligonucleotide
  Sense strand starting at position 361 of SEQ ID NO: 1881498
aacagaaugucuguagauc

SEQ ID NO: 2049169 - RNA, 19 nt, Artificial Sequence
  Description of Artificial Sequence: Synthetic oligonucleotide
  Antisense strand to SEQ ID NO: 2049168
gaucuacagacauucuguu

SEQ ID NO: 2049170 - RNA, 19 nt, Artificial Sequence
  Description of Artificial Sequence: Synthetic oligonucleotide
  Sense strand starting at position 488 of SEQ ID NO: 1881498
gcuagagcgacagaaaguu

SEQ ID NO: 2049171 - RNA, 19 nt, Artificial Sequence
  Description of Artificial Sequence: Synthetic oligonucleotide
  Antisense strand to SEQ ID NO: 2049170
aacuuucugucgcucuagc

SEQ ID NO: 2049172 - RNA, 19 nt, Artificial Sequence
  Description of Artificial Sequence: Synthetic oligonucleotide
  Sense strand starting at position 567 of SEQ ID NO: 1881498
uuugacuagucacuuaagu

SEQ ID NO: 2049173 - RNA, 19 nt, Artificial Sequence
  Description of Artificial Sequence: Synthetic oligonucleotide
  Antisense strand to SEQ ID NO: 2049172
acuuaagugacuagucaaa

SEQ ID NO: 2049174 - RNA, 19 nt, Artificial Sequence
  Description of Artificial Sequence: Synthetic oligonucleotide
  Sense strand starting at position 624 of SEQ ID NO: 1881498
uucuuagcucuauagagug

SEQ ID NO: 2049175 - RNA, 19 nt, Artificial Sequence
  Description of Artificial Sequence: Synthetic oligonucleotide
  Antisense strand to SEQ ID NO: 2049174
cacucuauagagcuaagaa

SEQ ID NO: 2049176 - RNA, 19 nt, Artificial Sequence
  Description of Artificial Sequence: Synthetic oligonucleotide
  Sense strand starting at position 629 of SEQ ID NO: 1881498
agcucuauagagugauuag

SEQ ID NO: 2049177 - RNA, 19 nt, Artificial Sequence
  Description of Artificial Sequence: Synthetic oligonucleotide
  Antisense strand to SEQ ID NO: 2049176
cuaaucacucuauagagcu

SEQ ID NO: 2049178 - RNA, 19 nt, Artificial Sequence
  Description of Artificial Sequence: Synthetic oligonucleotide
  Sense strand starting at position 632 of SEQ ID NO: 1881498
ucuauagagugauuagcuu

SEQ ID NO: 2049179 - RNA, 19 nt, Artificial Sequence
  Description of Artificial Sequence: Synthetic oligonucleotide
  Antisense strand to SEQ ID NO: 2049178
aagcuaaucacucuauaga

SEQ ID NO: 2049180 - RNA, 19 nt, Artificial Sequence
  Description of Artificial Sequence: Synthetic oligonucleotide
  Sense strand starting at position 636 of SEQ ID NO: 1881498
uagagugauuagcuuuaaa

SEQ ID NO: 2049181 - RNA, 19 nt, Artificial Sequence
  Description of Artificial Sequence: Synthetic oligonucleotide
  Antisense strand to SEQ ID NO: 2049180
uuuaaagcuaaucacucua

SEQ ID NO: 2049182 - RNA, 19 nt, Artificial Sequence
  Description of Artificial Sequence: Synthetic oligonucleotide
  Sense strand starting at position 722 of SEQ ID NO: 1881498
ucugaaaucugagauuaua

SEQ ID NO: 2049183 - RNA, 19 nt, Artificial Sequence
  Description of Artificial Sequence: Synthetic oligonucleotide
  Antisense strand to SEQ ID NO: 2049182
uauaaucucagauuucaga

SEQ ID NO: 2049184 - RNA, 19 nt, Artificial Sequence
  Description of Artificial Sequence: Synthetic oligonucleotide
  Sense strand starting at position 730 of SEQ ID NO: 1881498
cugagauuauaucagcaaa

SEQ ID NO: 2049185 - RNA, 19 nt, Artificial Sequence
  Description of Artificial Sequence: Synthetic oligonucleotide
  Antisense strand to SEQ ID NO: 2049184
uuugcugauauaaucucag

SEQ ID NO: 2049186 - RNA, 19 nt, Artificial Sequence
  Description of Artificial Sequence: Synthetic oligonucleotide
  Sense strand starting at position 802 of SEQ ID NO: 1881498
gcuggagggaugugaauga

SEQ ID NO: 2049187 - RNA, 19 nt, Artificial Sequence
  Description of Artificial Sequence: Synthetic oligonucleotide
  Antisense strand to SEQ ID NO: 2049186
ucauucacaucccuccagc

SEQ ID NO: 2049188 - RNA, 19 nt, Artificial Sequence
  Description of Artificial Sequence: Synthetic oligonucleotide
  Sense strand starting at position 809 of SEQ ID NO: 1881498
ggaugugaaugauaauagu

SEQ ID NO: 2049189 - RNA, 19 nt, Artificial Sequence
  Description of Artificial Sequence: Synthetic oligonucleotide
  Antisense strand to SEQ ID NO: 2049188
acuauuaucauucacaucc

SEQ ID NO: 2049190 - RNA, 19 nt, Artificial Sequence
  Description of Artificial Sequence: Synthetic oligonucleotide
  Sense strand starting at position 815 of SEQ ID NO: 1881498
gaaugauaauaguuacugu

SEQ ID NO: 2049191 - RNA, 19 nt, Artificial Sequence
  Description of Artificial Sequence: Synthetic oligonucleotide
  Antisense strand to SEQ ID NO: 2049190
acaguaacuauuaucauuc

SEQ ID NO: 2049192 - RNA, 19 nt, Artificial Sequence
  Description of Artificial Sequence: Synthetic oligonucleotide
  Sense strand starting at position 842 of SEQ ID NO: 1881498
guucauagaugaugagaga

SEQ ID NO: 2049193 - RNA, 19 nt, Artificial Sequence
  Description of Artificial Sequence: Synthetic oligonucleotide
  Antisense strand to SEQ ID NO: 2049192
ucucucaucaucuaugaac

SEQ ID NO: 2049194 - RNA, 19 nt, Artificial Sequence
  Description of Artificial Sequence: Synthetic oligonucleotide
  Sense strand starting at position 907 of SEQ ID NO: 1881498
gaacuuucuguguaucugu

SEQ ID NO: 2049195 - RNA, 19 nt, Artificial Sequence
  Description of Artificial Sequence: Synthetic oligonucleotide
  Antisense strand to SEQ ID NO: 2049194
acagauacacagaaaguuc

SEQ ID NO: 2049196 - RNA, 19 nt, Artificial Sequence
  Description of Artificial Sequence: Synthetic oligonucleotide
  Sense strand starting at position 1524 of SEQ ID NO: 1881498
cugacaagaucagaaagaa

SEQ ID NO: 2049197 - RNA, 19 nt, Artificial Sequence
  Description of Artificial Sequence: Synthetic oligonucleotide
  Antisense strand to SEQ ID NO: 2049196
uucuuucugaucuugucag

SEQ ID NO: 2049198 - RNA, 19 nt, Artificial Sequence
  Description of Artificial Sequence: Synthetic oligonucleotide
  Sense strand starting at position 1643 of SEQ ID NO: 1881498
aaagucaaaugucagagaa

SEQ ID NO: 2049199 - RNA, 19 nt, Artificial Sequence
  Description of Artificial Sequence: Synthetic oligonucleotide
  Antisense strand to SEQ ID NO: 2049198
uucucugacauuugacuuu

SEQ ID NO: 2049200 - RNA, 19 nt, Artificial Sequence
  Description of Artificial Sequence: Synthetic oligonucleotide
  Sense strand starting at position 1645 of SEQ ID NO: 1881498
agucaaaugucagagaagu

SEQ ID NO: 2049201 - RNA, 19 nt, Artificial Sequence
  Description of Artificial Sequence: Synthetic oligonucleotide
  Antisense strand to SEQ ID NO: 2049200
acuucucugacauuugacu

SEQ ID NO: 2049202 - RNA, 19 nt, Artificial Sequence
  Description of Artificial Sequence: Synthetic oligonucleotide
  Sense strand starting at position 1716 of SEQ ID NO: 1881498
aggaaauaauagcaaucau

SEQ ID NO: 2049203 - RNA, 19 nt, Artificial Sequence
  Description of Artificial Sequence: Synthetic oligonucleotide
  Antisense strand to SEQ ID NO: 2049202
augauugcuauuauuuccu

SEQ ID NO: 2049204 - RNA, 19 nt, Artificial Sequence
  Description of Artificial Sequence: Synthetic oligonucleotide
  Sense strand starting at position 2349 of SEQ ID NO: 1881498
accagaggccuggguauaa

SEQ ID NO: 2049205 - RNA, 19 nt, Artificial Sequence
  Description of Artificial Sequence: Synthetic oligonucleotide
  Antisense strand to SEQ ID NO: 2049204
uuauacccaggccucuggu

SEQ ID NO: 2049206 - RNA, 19 nt, Artificial Sequence
  Description of Artificial Sequence: Synthetic oligonucleotide
  Sense strand starting at position 2362 of SEQ ID NO: 1881498
guauaaauugggcacuguu

SEQ ID NO: 2049207 - RNA, 19 nt, Artificial Sequence
  Description of Artificial Sequence: Synthetic oligonucleotide
  Antisense strand to SEQ ID NO: 2049206
aacagugcccaauuuauac

SEQ ID NO: 2049208 - RNA, 19 nt, Artificial Sequence
  Description of Artificial Sequence: Synthetic oligonucleotide
  Sense strand starting at position 2390 of SEQ ID NO: 1881498
gggaguauggcaggaauga

SEQ ID NO: 2049209 - RNA, 19 nt, Artificial Sequence
  Description of Artificial Sequence: Synthetic oligonucleotide
  Antisense strand to SEQ ID NO: 2049208
ucauuccugccauacuccc

SEQ ID NO: 2049210 - RNA, 19 nt, Artificial Sequence
  Description of Artificial Sequence: Synthetic oligonucleotide
  Sense strand starting at position 2526 of SEQ ID NO: 1881498
acuccauuggccugagaca

SEQ ID NO: 2049211 - RNA, 19 nt, Artificial Sequence
  Description of Artificial Sequence: Synthetic oligonucleotide
  Antisense strand to SEQ ID NO: 2049210
ugucucaggccaauggagu

SEQ ID NO: 2049212 - RNA, 19 nt, Artificial Sequence
  Description of Artificial Sequence: Synthetic oligonucleotide
  Sense strand starting at position 2679 of SEQ ID NO: 1881498
gcucuauggccucaccuau

SEQ ID NO: 2049213 - RNA, 19 nt, Artificial Sequence
  Description of Artificial Sequence: Synthetic oligonucleotide
  Antisense strand to SEQ ID NO: 2049212
auaggugaggccauagagc

SEQ ID NO: 2049214 - RNA, 19 nt, Artificial Sequence
  Description of Artificial Sequence: Synthetic oligonucleotide
  Sense strand starting at position 2699 of SEQ ID NO: 1881498
accugagacgacugaauau

SEQ ID NO: 2049215 - RNA, 19 nt, Artificial Sequence
  Description of Artificial Sequence: Synthetic oligonucleotide
  Antisense strand to SEQ ID NO: 2049214
auauucagucgucucaggu

SEQ ID NO: 2049216 - RNA, 19 nt, Artificial Sequence
  Description of Artificial Sequence: Synthetic oligonucleotide
  Sense strand starting at position 3069 of SEQ ID NO: 1881498
aggaucacaucacagaaau

SEQ ID NO: 2049217 - RNA, 19 nt, Artificial Sequence
  Description of Artificial Sequence: Synthetic oligonucleotide
  Antisense strand to SEQ ID NO: 2049216
auuucugugaugugauccu

SEQ ID NO: 2049218 - RNA, 19 nt, Artificial Sequence
  Description of Artificial Sequence: Synthetic oligonucleotide
  Sense strand starting at position 3080 of SEQ ID NO: 1881498
acagaaaucuuugcagaca

SEQ ID NO: 2049219 - RNA, 19 nt, Artificial Sequence
  Description of Artificial Sequence: Synthetic oligonucleotide
  Antisense strand to SEQ ID NO: 2049218
ugucugcaaagauuucugu

SEQ ID NO: 2049220 - RNA, 19 nt, Artificial Sequence
  Description of Artificial Sequence: Synthetic oligonucleotide
  Sense strand starting at position 3565 of SEQ ID NO: 1881498
guaucugcgucuucaagag

SEQ ID NO: 2049221 - RNA, 19 nt, Artificial Sequence
  Description of Artificial Sequence: Synthetic oligonucleotide
  Antisense strand to SEQ ID NO: 2049220
cucuugaagacgcagauac

SEQ ID NO: 2049222 - RNA, 19 nt, Artificial Sequence
  Description of Artificial Sequence: Synthetic oligonucleotide
  Sense strand starting at position 3670 of SEQ ID NO: 1881498
agaaguagcuauucguuua

SEQ ID NO: 2049223 - RNA, 19 nt, Artificial Sequence
  Description of Artificial Sequence: Synthetic oligonucleotide
  Antisense strand to SEQ ID NO: 2049222
uaaacgaauagcuacuucu

SEQ ID NO: 2049224 - RNA, 19 nt, Artificial Sequence
  Description of Artificial Sequence: Synthetic oligonucleotide
  Sense strand starting at position 3673 of SEQ ID NO: 1881498
aguagcuauucguuuauca

SEQ ID NO: 2049225 - RNA, 19 nt, Artificial Sequence
  Description of Artificial Sequence: Synthetic oligonucleotide
  Antisense strand to SEQ ID NO: 2049224
ugauaaacgaauagcuacu

SEQ ID NO: 2049226 - RNA, 19 nt, Artificial Sequence
  Description of Artificial Sequence: Synthetic oligonucleotide
  Sense strand starting at position 3675 of SEQ ID NO: 1881498
uagcuauucguuuaucaga

SEQ ID NO: 2049227 - RNA, 19 nt, Artificial Sequence
  Description of Artificial Sequence: Synthetic oligonucleotide
  Antisense strand to SEQ ID NO: 2049226
ucugauaaacgaauagcua

SEQ ID NO: 2049228 - RNA, 19 nt, Artificial Sequence
  Description of Artificial Sequence: Synthetic oligonucleotide
  Sense strand starting at position 3677 of SEQ ID NO: 1881498
gcuauucguuuaucagaca

SEQ ID NO: 2049229 - RNA, 19 nt, Artificial Sequence
  Description of Artificial Sequence: Synthetic oligonucleotide
  Antisense strand to SEQ ID NO: 2049228
ugucugauaaacgaauagc

SEQ ID NO: 2049230 - RNA, 19 nt, Artificial Sequence
  Description of Artificial Sequence: Synthetic oligonucleotide
  Sense strand starting at position 342 of SEQ ID NO: 1881499
ccaagcuaacuucggaaua

SEQ ID NO: 2049231 - RNA, 19 nt, Artificial Sequence
  Description of Artificial Sequence: Synthetic oligonucleotide
  Antisense strand to SEQ ID NO: 2049230
uauuccgaaguuagcuugg

SEQ ID NO: 2049232 - RNA, 19 nt, Artificial Sequence
  Description of Artificial Sequence: Synthetic oligonucleotide
  Sense strand starting at position 378 of SEQ ID NO: 1881499
ucagauuucccucguuaac

SEQ ID NO: 2049233 - RNA, 19 nt, Artificial Sequence
  Description of Artificial Sequence: Synthetic oligonucleotide
  Antisense strand to SEQ ID NO: 2049232
guuaacgagggaaaucuga

SEQ ID NO: 2049234 - RNA, 19 nt, Artificial Sequence
  Description of Artificial Sequence: Synthetic oligonucleotide
  Sense strand starting at position 466 of SEQ ID NO: 1881499
aguagauagccucaucuag

SEQ ID NO: 2049235 - RNA, 19 nt, Artificial Sequence
  Description of Artificial Sequence: Synthetic oligonucleotide
  Antisense strand to SEQ ID NO: 2049234
cuagaugaggcuaucuacu

SEQ ID NO: 2049236 - RNA, 19 nt, Artificial Sequence
  Description of Artificial Sequence: Synthetic oligonucleotide
  Sense strand starting at position 544 of SEQ ID NO: 1881499
aaaccuggcuugucuugaa

SEQ ID NO: 2049237 - RNA, 19 nt, Artificial Sequence
  Description of Artificial Sequence: Synthetic oligonucleotide
  Antisense strand to SEQ ID NO: 2049236
uucaagacaagccagguuu

SEQ ID NO: 2049238 - RNA, 19 nt, Artificial Sequence
  Description of Artificial Sequence: Synthetic oligonucleotide
  Sense strand starting at position 548 of SEQ ID NO: 1881499
cuggcuugucuugaaacua

SEQ ID NO: 2049239 - RNA, 19 nt, Artificial Sequence
  Description of Artificial Sequence: Synthetic oligonucleotide
  Antisense strand to SEQ ID NO: 2049238
uaguuucaagacaagccag

SEQ ID NO: 2049240 - RNA, 19 nt, Artificial Sequence
  Description of Artificial Sequence: Synthetic oligonucleotide
  Sense strand starting at position 606 of SEQ ID NO: 1881499
acuuacuaccaguguaaag

SEQ ID NO: 2049241 - RNA, 19 nt, Artificial Sequence
  Description of Artificial Sequence: Synthetic oligonucleotide
  Antisense strand to SEQ ID NO: 2049240
cuuuacacugguaguaagu

SEQ ID NO: 2049242 - RNA, 19 nt, Artificial Sequence
  Description of Artificial Sequence: Synthetic oligonucleotide
  Sense strand starting at position 626 of SEQ ID NO: 1881499
cuuaacucguucucagaua

SEQ ID NO: 2049243 - RNA, 19 nt, Artificial Sequence
  Description of Artificial Sequence: Synthetic oligonucleotide
  Antisense strand to SEQ ID NO: 2049242
uaucugagaacgaguuaag

SEQ ID NO: 2049244 - RNA, 19 nt, Artificial Sequence
  Description of Artificial Sequence: Synthetic oligonucleotide
  Sense strand starting at position 679 of SEQ ID NO: 1881499
agcuuauugcacggaggaa

SEQ ID NO: 2049245 - RNA, 19 nt, Artificial Sequence
  Description of Artificial Sequence: Synthetic oligonucleotide
  Antisense strand to SEQ ID NO: 2049244
uuccuccgugcaauaagcu

SEQ ID NO: 2049246 - RNA, 19 nt, Artificial Sequence
  Description of Artificial Sequence: Synthetic oligonucleotide
  Sense strand starting at position 680 of SEQ ID NO: 1881499
gcuuauugcacggaggaag

SEQ ID NO: 2049247 - RNA, 19 nt, Artificial Sequence
  Description of Artificial Sequence: Synthetic oligonucleotide
  Antisense strand to SEQ ID NO: 2049246
cuuccuccgugcaauaagc

SEQ ID NO: 2049248 - RNA, 19 nt, Artificial Sequence
  Description of Artificial Sequence: Synthetic oligonucleotide
  Sense strand starting at position 720 of SEQ ID NO: 1881499
gugaauaucaugcaaguag

SEQ ID NO: 2049249 - RNA, 19 nt, Artificial Sequence
  Description of Artificial Sequence: Synthetic oligonucleotide
  Antisense strand to SEQ ID NO: 2049248
cuacuugcaugauauucac

SEQ ID NO: 2049250 - RNA, 19 nt, Artificial Sequence
  Description of Artificial Sequence: Synthetic oligonucleotide
  Sense strand starting at position 762 of SEQ ID NO: 1881499
guauuaaucgaagauguga

SEQ ID NO: 2049251 - RNA, 19 nt, Artificial Sequence
  Description of Artificial Sequence: Synthetic oligonucleotide
  Antisense strand to SEQ ID NO: 2049250
ucacaucuucgauuaauac

SEQ ID NO: 2049252 - RNA, 19 nt, Artificial Sequence
  Description of Artificial Sequence: Synthetic oligonucleotide
  Sense strand starting at position 764 of SEQ ID NO: 1881499
auuaaucgaagaugugauu

SEQ ID NO: 2049253 - RNA, 19 nt, Artificial Sequence
  Description of Artificial Sequence: Synthetic oligonucleotide
  Antisense strand to SEQ ID NO: 2049252
aaucacaucuucgauuaau

SEQ ID NO: 2049254 - RNA, 19 nt, Artificial Sequence
  Description of Artificial Sequence: Synthetic oligonucleotide
  Sense strand starting at position 953 of SEQ ID NO: 1881499
ugaaguugucaauagccca

SEQ ID NO: 2049255 - RNA, 19 nt, Artificial Sequence
  Description of Artificial Sequence: Synthetic oligonucleotide
  Antisense strand to SEQ ID NO: 2049254
ugggcuauugacaacuuca

SEQ ID NO: 2049256 - RNA, 19 nt, Artificial Sequence
  Description of Artificial Sequence: Synthetic oligonucleotide
  Sense strand starting at position 1093 of SEQ ID NO: 1881499
guccuugaccuguaauacu

SEQ ID NO: 2049257 - RNA, 19 nt, Artificial Sequence
  Description of Artificial Sequence: Synthetic oligonucleotide
  Antisense strand to SEQ ID NO: 2049256
aguauuacaggucaaggac

SEQ ID NO: 2049258 - RNA, 19 nt, Artificial Sequence
  Description of Artificial Sequence: Synthetic oligonucleotide
  Sense strand starting at position 1217 of SEQ ID NO: 1881499
aauggccugcaguauaaua

SEQ ID NO: 2049259 - RNA, 19 nt, Artificial Sequence
  Description of Artificial Sequence: Synthetic oligonucleotide
  Antisense strand to SEQ ID NO: 2049258
uauuauacugcaggccauu

SEQ ID NO: 2049260 - RNA, 19 nt, Artificial Sequence
  Description of Artificial Sequence: Synthetic oligonucleotide
  Sense strand starting at position 1219 of SEQ ID NO: 1881499
uggccugcaguauaauaau

SEQ ID NO: 2049261 - RNA, 19 nt, Artificial Sequence
  Description of Artificial Sequence: Synthetic oligonucleotide
  Antisense strand to SEQ ID NO: 2049260
auuauuauacugcaggcca

SEQ ID NO: 2049262 - RNA, 19 nt, Artificial Sequence
  Description of Artificial Sequence: Synthetic oligonucleotide
  Sense strand starting at position 1275 of SEQ ID NO: 1881499
ccugaaugaucuguuccaa

SEQ ID NO: 2049263 - RNA, 19 nt, Artificial Sequence
  Description of Artificial Sequence: Synthetic oligonucleotide
  Antisense strand to SEQ ID NO: 2049262
uuggaacagaucauucagg

SEQ ID NO: 2049264 - RNA, 19 nt, Artificial Sequence
  Description of Artificial Sequence: Synthetic oligonucleotide
  Sense strand starting at position 1865 of SEQ ID NO: 1881499
gguauaucacaacaugcau

SEQ ID NO: 2049265 - RNA, 19 nt, Artificial Sequence
  Description of Artificial Sequence: Synthetic oligonucleotide
  Antisense strand to SEQ ID NO: 2049264
augcauguugugauauacc

SEQ ID NO: 2049266 - RNA, 19 nt, Artificial Sequence
  Description of Artificial Sequence: Synthetic oligonucleotide
  Sense strand starting at position 2083 of SEQ ID NO: 1881499
augcuaaggcuguaauucu

SEQ ID NO: 2049267 - RNA, 19 nt, Artificial Sequence
  Description of Artificial Sequence: Synthetic oligonucleotide
  Antisense strand to SEQ ID NO: 2049266
agaauuacagccuuagcau

SEQ ID NO: 2049268 - RNA, 19 nt, Artificial Sequence
  Description of Artificial Sequence: Synthetic oligonucleotide
  Sense strand starting at position 2141 of SEQ ID NO: 1881499
gguaaacagucaguuguag

SEQ ID NO: 2049269 - RNA, 19 nt, Artificial Sequence
  Description of Artificial Sequence: Synthetic oligonucleotide
  Antisense strand to SEQ ID NO: 2049268
cuacaacugacuguuuacc

SEQ ID NO: 2049270 - RNA, 19 nt, Artificial Sequence
  Description of Artificial Sequence: Synthetic oligonucleotide
  Sense strand starting at position 2149 of SEQ ID NO: 1881499
gucaguuguaggcaauaau

SEQ ID NO: 2049271 - RNA, 19 nt, Artificial Sequence
  Description of Artificial Sequence: Synthetic oligonucleotide
  Antisense strand to SEQ ID NO: 2049270
auuauugccuacaacugac

SEQ ID NO: 2049272 - RNA, 19 nt, Artificial Sequence
  Description of Artificial Sequence: Synthetic oligonucleotide
  Sense strand starting at position 2451 of SEQ ID NO: 1881499
aguuuauguguugaacaca

SEQ ID NO: 2049273 - RNA, 19 nt, Artificial Sequence
  Description of Artificial Sequence: Synthetic oligonucleotide
  Antisense strand to SEQ ID NO: 2049272
uguguucaacacauaaacu

SEQ ID NO: 2049274 - RNA, 19 nt, Artificial Sequence
  Description of Artificial Sequence: Synthetic oligonucleotide
  Sense strand starting at position 2693 of SEQ ID NO: 1881499
cugauauagcagcgagaaa

SEQ ID NO: 2049275 - RNA, 19 nt, Artificial Sequence
  Description of Artificial Sequence: Synthetic oligonucleotide
  Antisense strand to SEQ ID NO: 2049274
uuucucgcugcuauaucag

SEQ ID NO: 2049276 - RNA, 19 nt, Artificial Sequence
  Description of Artificial Sequence: Synthetic oligonucleotide
  Sense strand starting at position 2960 of SEQ ID NO: 1881499
caaguugugagaugaggga

SEQ ID NO: 2049277 - RNA, 19 nt, Artificial Sequence
  Description of Artificial Sequence: Synthetic oligonucleotide
  Antisense strand to SEQ ID NO: 2049276
ucccucaucucacaacuug

SEQ ID NO: 2049278 - RNA, 19 nt, Artificial Sequence
  Description of Artificial Sequence: Synthetic oligonucleotide
  Sense strand starting at position 2994 of SEQ ID NO: 1881499
uuguauuucugggaaacug

SEQ ID NO: 2049279 - RNA, 19 nt, Artificial Sequence
  Description of Artificial Sequence: Synthetic oligonucleotide
  Antisense strand to SEQ ID NO: 2049278
caguuucccagaaauacaa

SEQ ID NO: 2049280 - RNA, 19 nt, Artificial Sequence
  Description of Artificial Sequence: Synthetic oligonucleotide
  Sense strand starting at position 3079 of SEQ ID NO: 1881499
gugcaaguauuugaaagaa

SEQ ID NO: 2049281 - RNA, 19 nt, Artificial Sequence
  Description of Artificial Sequence: Synthetic oligonucleotide
  Antisense strand to SEQ ID NO: 2049280
uucuuucaaauacuugcac

SEQ ID NO: 2049282 - RNA, 19 nt, Artificial Sequence
  Description of Artificial Sequence: Synthetic oligonucleotide
  Sense strand starting at position 3245 of SEQ ID NO: 1881499
gacuuaaugguaggaaagu

SEQ ID NO: 2049283 - RNA, 19 nt, Artificial Sequence
  Description of Artificial Sequence: Synthetic oligonucleotide
  Antisense strand to SEQ ID NO: 2049282
acuuuccuaccauuaaguc

SEQ ID NO: 2049284 - RNA, 19 nt, Artificial Sequence
  Description of Artificial Sequence: Synthetic oligonucleotide
  Sense strand starting at position 3356 of SEQ ID NO: 1881499
gaagguucucccuaaaugu

SEQ ID NO: 2049285 - RNA, 19 nt, Artificial Sequence
  Description of Artificial Sequence: Synthetic oligonucleotide
  Antisense strand to SEQ ID NO: 2049284
acauuuagggagaaccuuc

SEQ ID NO: 2049286 - RNA, 19 nt, Artificial Sequence
  Description of Artificial Sequence: Synthetic oligonucleotide
  Sense strand starting at position 3395 of SEQ ID NO: 1881499
agggauaaguagcuguuau

SEQ ID NO: 2049287 - RNA, 19 nt, Artificial Sequence
  Description of Artificial Sequence: Synthetic oligonucleotide
  Antisense strand to SEQ ID NO: 2049286
auaacagcuacuuaucccu

SEQ ID NO: 2049288 - RNA, 19 nt, Artificial Sequence
  Description of Artificial Sequence: Synthetic oligonucleotide
  Sense strand starting at position 3396 of SEQ ID NO: 1881499
gggauaaguagcuguuaug

SEQ ID NO: 2049289 - RNA, 19 nt, Artificial Sequence
  Description of Artificial Sequence: Synthetic oligonucleotide
  Antisense strand to SEQ ID NO: 2049288
cauaacagcuacuuauccc

SEQ ID NO: 2049290 - RNA, 19 nt, Artificial Sequence
  Description of Artificial Sequence: Synthetic oligonucleotide
  Sense strand starting at position 3406 of SEQ ID NO: 1881499
gcuguuaugagagggagga

SEQ ID NO: 2049291 - RNA, 19 nt, Artificial Sequence
  Description of Artificial Sequence: Synthetic oligonucleotide
  Antisense strand to SEQ ID NO: 2049290
uccucccucucauaacagc

SEQ ID NO: 2049292 - RNA, 19 nt, Artificial Sequence
  Description of Artificial Sequence: Synthetic oligonucleotide
  Sense strand starting at position 3811 of SEQ ID NO: 1881499
gugguuggagcagaaagua

SEQ ID NO: 2049293 - RNA, 19 nt, Artificial Sequence
  Description of Artificial Sequence: Synthetic oligonucleotide
  Antisense strand to SEQ ID NO: 2049292
uacuuucugcuccaaccac

SEQ ID NO: 2049294 - RNA, 19 nt, Artificial Sequence
  Description of Artificial Sequence: Synthetic oligonucleotide
  Sense strand starting at position 3873 of SEQ ID NO: 1881499
gaagcuguucuggaaugga

SEQ ID NO: 2049295 - RNA, 19 nt, Artificial Sequence
  Description of Artificial Sequence: Synthetic oligonucleotide
  Antisense strand to SEQ ID NO: 2049294
uccauuccagaacagcuuc

SEQ ID NO: 2049296 - RNA, 19 nt, Artificial Sequence
  Description of Artificial Sequence: Synthetic oligonucleotide
  Sense strand starting at position 3894 of SEQ ID NO: 1881499
uggucugcauccuugagga

SEQ ID NO: 2049297 - RNA, 19 nt, Artificial Sequence
  Description of Artificial Sequence: Synthetic oligonucleotide
  Antisense strand to SEQ ID NO: 2049296
uccucaaggaugcagacca

SEQ ID NO: 2049298 - RNA, 19 nt, Artificial Sequence
  Description of Artificial Sequence: Synthetic oligonucleotide
  Sense strand starting at position 3896 of SEQ ID NO: 1881499
gucugcauccuugaggaca

SEQ ID NO: 2049299 - RNA, 19 nt, Artificial Sequence
  Description of Artificial Sequence: Synthetic oligonucleotide
  Antisense strand to SEQ ID NO: 2049298
uguccucaaggaugcagac

SEQ ID NO: 2049300 - RNA, 19 nt, Artificial Sequence
  Description of Artificial Sequence: Synthetic oligonucleotide
  Sense strand starting at position 3919 of SEQ ID NO: 1881499
ggccaauagagaugcuuag

SEQ ID NO: 2049301 - RNA, 19 nt, Artificial Sequence
  Description of Artificial Sequence: Synthetic oligonucleotide
  Antisense strand to SEQ ID NO: 2049300
cuaagcaucucuauuggcc

SEQ ID NO: 2049302 - RNA, 19 nt, Artificial Sequence
  Description of Artificial Sequence: Synthetic oligonucleotide
  Sense strand starting at position 3925 of SEQ ID NO: 1881499
uagagaugcuuagcaggga

SEQ ID NO: 2049303 - RNA, 19 nt, Artificial Sequence
  Description of Artificial Sequence: Synthetic oligonucleotide
  Antisense strand to SEQ ID NO: 2049302
ucccugcuaagcaucucua

SEQ ID NO: 2049304 - RNA, 19 nt, Artificial Sequence
  Description of Artificial Sequence: Synthetic oligonucleotide
  Sense strand starting at position 3928 of SEQ ID NO: 1881499
agaugcuuagcagggaaau

SEQ ID NO: 2049305 - RNA, 19 nt, Artificial Sequence
  Description of Artificial Sequence: Synthetic oligonucleotide
  Antisense strand to SEQ ID NO: 2049304
auuucccugcuaagcaucu

SEQ ID NO: 2049306 - RNA, 19 nt, Artificial Sequence
  Description of Artificial Sequence: Synthetic oligonucleotide
  Sense strand starting at position 3929 of SEQ ID NO: 1881499
gaugcuuagcagggaaaug

SEQ ID NO: 2049307 - RNA, 19 nt, Artificial Sequence
  Description of Artificial Sequence: Synthetic oligonucleotide
  Antisense strand to SEQ ID NO: 2049306
cauuucccugcuaagcauc

SEQ ID NO: 2049308 - RNA, 19 nt, Artificial Sequence
  Description of Artificial Sequence: Synthetic oligonucleotide
  Sense strand starting at position 3973 of SEQ ID NO: 1881499
gcuaaaucacuauagcaag

SEQ ID NO: 2049309 - RNA, 19 nt, Artificial Sequence
  Description of Artificial Sequence: Synthetic oligonucleotide
  Antisense strand to SEQ ID NO: 2049308
cuugcuauagugauuuagc

SEQ ID NO: 2049310 - RNA, 19 nt, Artificial Sequence
  Description of Artificial Sequence: Synthetic oligonucleotide
  Sense strand starting at position 130 of SEQ ID NO: 1881500
aggagcuuugccugaggau

SEQ ID NO: 2049311 - RNA, 19 nt, Artificial Sequence
  Description of Artificial Sequence: Synthetic oligonucleotide
  Antisense strand to SEQ ID NO: 2049310
auccucaggcaaagcuccu

SEQ ID NO: 2049312 - RNA, 19 nt, Artificial Sequence
  Description of Artificial Sequence: Synthetic oligonucleotide
  Sense strand starting at position 131 of SEQ ID NO: 1881500
ggagcuuugccugaggaug

SEQ ID NO: 2049313 - RNA, 19 nt, Artificial Sequence
  Description of Artificial Sequence: Synthetic oligonucleotide
  Antisense strand to SEQ ID NO: 2049312
cauccucaggcaaagcucc

SEQ ID NO: 2049314 - RNA, 19 nt, Artificial Sequence
  Description of Artificial Sequence: Synthetic oligonucleotide
  Sense strand starting at position 530 of SEQ ID NO: 1881500
guaugacuugaggaaguuu

SEQ ID NO: 2049315 - RNA, 19 nt, Artificial Sequence
  Description of Artificial Sequence: Synthetic oligonucleotide
  Antisense strand to SEQ ID NO: 2049314
aaacuuccucaagucauac

SEQ ID NO: 2049316 - RNA, 19 nt, Artificial Sequence
  Description of Artificial Sequence: Synthetic oligonucleotide
  Sense strand starting at position 787 of SEQ ID NO: 1881500
ggcugacuugaguaaguuu

SEQ ID NO: 2049317 - RNA, 19 nt, Artificial Sequence
  Description of Artificial Sequence: Synthetic oligonucleotide
  Antisense strand to SEQ ID NO: 2049316
aaacuuacucaagucagcc

SEQ ID NO: 2049318 - RNA, 19 nt, Artificial Sequence
  Description of Artificial Sequence: Synthetic oligonucleotide
  Sense strand starting at position 947 of SEQ ID NO: 1881500
gaagguugccaugagacga

SEQ ID NO: 2049319 - RNA, 19 nt, Artificial Sequence
  Description of Artificial Sequence: Synthetic oligonucleotide
  Antisense strand to SEQ ID NO: 2049318
ucgucucauggcaaccuuc

SEQ ID NO: 2049320 - RNA, 19 nt, Artificial Sequence
  Description of Artificial Sequence: Synthetic oligonucleotide
  Sense strand starting at position 952 of SEQ ID NO: 1881500
uugccaugagacgaaaguu

SEQ ID NO: 2049321 - RNA, 19 nt, Artificial Sequence
  Description of Artificial Sequence: Synthetic oligonucleotide
  Antisense strand to SEQ ID NO: 2049320
aacuuucgucucauggcaa

SEQ ID NO: 2049322 - RNA, 19 nt, Artificial Sequence
  Description of Artificial Sequence: Synthetic oligonucleotide
  Sense strand starting at position 964 of SEQ ID NO: 1881500
gaaaguugggccuggaaag

SEQ ID NO: 2049323 - RNA, 19 nt, Artificial Sequence
  Description of Artificial Sequence: Synthetic oligonucleotide
  Antisense strand to SEQ ID NO: 2049322
cuuuccaggcccaacuuuc

SEQ ID NO: 2049324 - RNA, 19 nt, Artificial Sequence
  Description of Artificial Sequence: Synthetic oligonucleotide
  Sense strand starting at position 1037 of SEQ ID NO: 1881500
guguguagaagcugcuaaa

SEQ ID NO: 2049325 - RNA, 19 nt, Artificial Sequence
  Description of Artificial Sequence: Synthetic oligonucleotide
  Antisense strand to SEQ ID NO: 2049324
uuuagcagcuucuacacac

SEQ ID NO: 2049326 - RNA, 19 nt, Artificial Sequence
  Description of Artificial Sequence: Synthetic oligonucleotide
  Sense strand starting at position 1102 of SEQ ID NO: 1881500
ccucaagaaucugcuauga

SEQ ID NO: 2049327 - RNA, 19 nt, Artificial Sequence
  Description of Artificial Sequence: Synthetic oligonucleotide
  Antisense strand to SEQ ID NO: 2049326
ucauagcagauucuugagg

SEQ ID NO: 2049328 - RNA, 19 nt, Artificial Sequence
  Description of Artificial Sequence: Synthetic oligonucleotide
  Sense strand starting at position 1104 of SEQ ID NO: 1881500
ucaagaaucugcuaugagg

SEQ ID NO: 2049329 - RNA, 19 nt, Artificial Sequence
  Description of Artificial Sequence: Synthetic oligonucleotide
  Antisense strand to SEQ ID NO: 2049328
ccucauagcagauucuuga

SEQ ID NO: 2049330 - RNA, 19 nt, Artificial Sequence
  Description of Artificial Sequence: Synthetic oligonucleotide
  Sense strand starting at position 1515 of SEQ ID NO: 1881500
ggcacuucguuuccauuau

SEQ ID NO: 2049331 - RNA, 19 nt, Artificial Sequence
  Description of Artificial Sequence: Synthetic oligonucleotide
  Antisense strand to SEQ ID NO: 2049330
auaauggaaacgaagugcc

SEQ ID NO: 2049332 - RNA, 19 nt, Artificial Sequence
  Description of Artificial Sequence: Synthetic oligonucleotide
  Sense strand starting at position 1516 of SEQ ID NO: 1881500
gcacuucguuuccauuauu

SEQ ID NO: 2049333 - RNA, 19 nt, Artificial Sequence
  Description of Artificial Sequence: Synthetic oligonucleotide
  Antisense strand to SEQ ID NO: 2049332
aauaauggaaacgaagugc

SEQ ID NO: 2049334 - RNA, 19 nt, Artificial Sequence
  Description of Artificial Sequence: Synthetic oligonucleotide
  Sense strand starting at position 1519 of SEQ ID NO: 1881500
cuucguuuccauuauuaca

SEQ ID NO: 2049335 - RNA, 19 nt, Artificial Sequence
  Description of Artificial Sequence: Synthetic oligonucleotide
  Antisense strand to SEQ ID NO: 2049334
uguaauaauggaaacgaag

SEQ ID NO: 2049336 - RNA, 19 nt, Artificial Sequence
  Description of Artificial Sequence: Synthetic oligonucleotide
  Sense strand starting at position 1724 of SEQ ID NO: 1881500
ggugcauucuccuaugaga

SEQ ID NO: 2049337 - RNA, 19 nt, Artificial Sequence
  Description of Artificial Sequence: Synthetic oligonucleotide
  Antisense strand to SEQ ID NO: 2049336
ucucauaggagaaugcacc

SEQ ID NO: 2049338 - RNA, 19 nt, Artificial Sequence
  Description of Artificial Sequence: Synthetic oligonucleotide
  Sense strand starting at position 1726 of SEQ ID NO: 1881500
ugcauucuccuaugagaau

SEQ ID NO: 2049339 - RNA, 19 nt, Artificial Sequence
  Description of Artificial Sequence: Synthetic oligonucleotide
  Antisense strand to SEQ ID NO: 2049338
auucucauaggagaaugca

SEQ ID NO: 2049340 - RNA, 19 nt, Artificial Sequence
  Description of Artificial Sequence: Synthetic oligonucleotide
  Sense strand starting at position 1727 of SEQ ID NO: 1881500
gcauucuccuaugagaauc

SEQ ID NO: 2049341 - RNA, 19 nt, Artificial Sequence
  Description of Artificial Sequence: Synthetic oligonucleotide
  Antisense strand to SEQ ID NO: 2049340
gauucucauaggagaaugc

SEQ ID NO: 2049342 - RNA, 19 nt, Artificial Sequence
  Description of Artificial Sequence: Synthetic oligonucleotide
  Sense strand starting at position 2780 of SEQ ID NO: 1881500
cgggcacuuucuuguacua

SEQ ID NO: 2049343 - RNA, 19 nt, Artificial Sequence
  Description of Artificial Sequence: Synthetic oligonucleotide
  Antisense strand to SEQ ID NO: 2049342
uaguacaagaaagugcccg

SEQ ID NO: 2049344 - RNA, 19 nt, Artificial Sequence
  Description of Artificial Sequence: Synthetic oligonucleotide
  Sense strand starting at position 2782 of SEQ ID NO: 1881500
ggcacuuucuuguacuaug

SEQ ID NO: 2049345 - RNA, 19 nt, Artificial Sequence
  Description of Artificial Sequence: Synthetic oligonucleotide
  Antisense strand to SEQ ID NO: 2049344
cauaguacaagaaagugcc

SEQ ID NO: 2049346 - RNA, 19 nt, Artificial Sequence
  Description of Artificial Sequence: Synthetic oligonucleotide
  Sense strand starting at position 3262 of SEQ ID NO: 1881500
aggccugaucaugacucau

SEQ ID NO: 2049347 - RNA, 19 nt, Artificial Sequence
  Description of Artificial Sequence: Synthetic oligonucleotide
  Antisense strand to SEQ ID NO: 2049346
augagucaugaucaggccu

SEQ ID NO: 2049348 - RNA, 19 nt, Artificial Sequence
  Description of Artificial Sequence: Synthetic oligonucleotide
  Sense strand starting at position 3264 of SEQ ID NO: 1881500
gccugaucaugacucauug

SEQ ID NO: 2049349 - RNA, 19 nt, Artificial Sequence
  Description of Artificial Sequence: Synthetic oligonucleotide
  Antisense strand to SEQ ID NO: 2049348
caaugagucaugaucaggc

SEQ ID NO: 2049350 - RNA, 19 nt, Artificial Sequence
  Description of Artificial Sequence: Synthetic oligonucleotide
  Sense strand starting at position 3268 of SEQ ID NO: 1881500
gaucaugacucauugcagu

SEQ ID NO: 2049351 - RNA, 19 nt, Artificial Sequence
  Description of Artificial Sequence: Synthetic oligonucleotide
  Antisense strand to SEQ ID NO: 2049350
acugcaaugagucaugauc

SEQ ID NO: 2049352 - RNA, 19 nt, Artificial Sequence
  Description of Artificial Sequence: Synthetic oligonucleotide
  Sense strand starting at position 3471 of SEQ ID NO: 1881500
aagaguugcgauuaccagu

SEQ ID NO: 2049353 - RNA, 19 nt, Artificial Sequence
  Description of Artificial Sequence: Synthetic oligonucleotide
  Antisense strand to SEQ ID NO: 2049352
acugguaaucgcaacucuu

SEQ ID NO: 2049354 - RNA, 19 nt, Artificial Sequence
  Description of Artificial Sequence: Synthetic oligonucleotide
  Sense strand starting at position 3711 of SEQ ID NO: 1881500
ggaauccacuuauaugaaa

SEQ ID NO: 2049355 - RNA, 19 nt, Artificial Sequence
  Description of Artificial Sequence: Synthetic oligonucleotide
  Antisense strand to SEQ ID NO: 2049354
uuucauauaaguggauucc

SEQ ID NO: 2049356 - RNA, 19 nt, Artificial Sequence
  Description of Artificial Sequence: Synthetic oligonucleotide
  Sense strand starting at position 3911 of SEQ ID NO: 1881500
uagaaauuguacugagguc

SEQ ID NO: 2049357 - RNA, 19 nt, Artificial Sequence
  Description of Artificial Sequence: Synthetic oligonucleotide
  Antisense strand to SEQ ID NO: 2049356
gaccucaguacaauuucua

SEQ ID NO: 2049358 - RNA, 19 nt, Artificial Sequence
  Description of Artificial Sequence: Synthetic oligonucleotide
  Sense strand starting at position 249 of SEQ ID NO: 1881501
gcaucauauguacaucaga

SEQ ID NO: 2049359 - RNA, 19 nt, Artificial Sequence
  Description of Artificial Sequence: Synthetic oligonucleotide
  Antisense strand to SEQ ID NO: 2049358
ucugauguacauaugaugc

SEQ ID NO: 2049360 - RNA, 19 nt, Artificial Sequence
  Description of Artificial Sequence: Synthetic oligonucleotide
  Sense strand starting at position 342 of SEQ ID NO: 1881501
acucguagcauauauguga

SEQ ID NO: 2049361 - RNA, 19 nt, Artificial Sequence
  Description of Artificial Sequence: Synthetic oligonucleotide
  Antisense strand to SEQ ID NO: 2049360
ucacauauaugcuacgagu

SEQ ID NO: 2049362 - RNA, 19 nt, Artificial Sequence
  Description of Artificial Sequence: Synthetic oligonucleotide
  Sense strand starting at position 449 of SEQ ID NO: 1881501
aguagaguugccuagcaag

SEQ ID NO: 2049363 - RNA, 19 nt, Artificial Sequence
  Description of Artificial Sequence: Synthetic oligonucleotide
  Antisense strand to SEQ ID NO: 2049362
cuugcuaggcaacucuacu

SEQ ID NO: 2049364 - RNA, 19 nt, Artificial Sequence
  Description of Artificial Sequence: Synthetic oligonucleotide
  Sense strand starting at position 460 of SEQ ID NO: 1881501
cuagcaagccaaggauaua

SEQ ID NO: 2049365 - RNA, 19 nt, Artificial Sequence
  Description of Artificial Sequence: Synthetic oligonucleotide
  Antisense strand to SEQ ID NO: 2049364
uauauccuuggcuugcuag

SEQ ID NO: 2049366 - RNA, 19 nt, Artificial Sequence
  Description of Artificial Sequence: Synthetic oligonucleotide
  Sense strand starting at position 518 of SEQ ID NO: 1881501
gagacugauguguacuagu

SEQ ID NO: 2049367 - RNA, 19 nt, Artificial Sequence
  Description of Artificial Sequence: Synthetic oligonucleotide
  Antisense strand to SEQ ID NO: 2049366
acuaguacacaucagucuc

SEQ ID NO: 2049368 - RNA, 19 nt, Artificial Sequence
  Description of Artificial Sequence: Synthetic oligonucleotide
  Sense strand starting at position 1301 of SEQ ID NO: 1881501
auauguaucccggaacuuc

SEQ ID NO: 2049369 - RNA, 19 nt, Artificial Sequence
  Description of Artificial Sequence: Synthetic oligonucleotide
  Antisense strand to SEQ ID NO: 2049368
gaaguuccgggauacauau

SEQ ID NO: 2049370 - RNA, 19 nt, Artificial Sequence
  Description of Artificial Sequence: Synthetic oligonucleotide
  Sense strand starting at position 1489 of SEQ ID NO: 1881501
aucagugggcaucaucauu

SEQ ID NO: 2049371 - RNA, 19 nt, Artificial Sequence
  Description of Artificial Sequence: Synthetic oligonucleotide
  Antisense strand to SEQ ID NO: 2049370
aaugaugaugcccacugau

SEQ ID NO: 2049372 - RNA, 19 nt, Artificial Sequence
  Description of Artificial Sequence: Synthetic oligonucleotide
  Sense strand starting at position 2021 of SEQ ID NO: 1881501
uccugcagauauucugauu

SEQ ID NO: 2049373 - RNA, 19 nt, Artificial Sequence
  Description of Artificial Sequence: Synthetic oligonucleotide
  Antisense strand to SEQ ID NO: 2049372
aaucagaauaucugcagga

SEQ ID NO: 2049374 - RNA, 19 nt, Artificial Sequence
  Description of Artificial Sequence: Synthetic oligonucleotide
  Sense strand starting at position 2131 of SEQ ID NO: 1881501
uuugucauucuuuggauga

SEQ ID NO: 2049375 - RNA, 19 nt, Artificial Sequence
  Description of Artificial Sequence: Synthetic oligonucleotide
  Antisense strand to SEQ ID NO: 2049374
ucauccaaagaaugacaaa

SEQ ID NO: 2049376 - RNA, 19 nt, Artificial Sequence
  Description of Artificial Sequence: Synthetic oligonucleotide
  Sense strand starting at position 2135 of SEQ ID NO: 1881501
ucauucuuuggaugacugu

SEQ ID NO: 2049377 - RNA, 19 nt, Artificial Sequence
  Description of Artificial Sequence: Synthetic oligonucleotide
  Antisense strand to SEQ ID NO: 2049376
acagucauccaaagaauga

SEQ ID NO: 2049378 - RNA, 19 nt, Artificial Sequence
  Description of Artificial Sequence: Synthetic oligonucleotide
  Sense strand starting at position 2136 of SEQ ID NO: 1881501
cauucuuuggaugacugua

SEQ ID NO: 2049379 - RNA, 19 nt, Artificial Sequence
  Description of Artificial Sequence: Synthetic oligonucleotide
  Antisense strand to SEQ ID NO: 2049378
uacagucauccaaagaaug

SEQ ID NO: 2049380 - RNA, 19 nt, Artificial Sequence
  Description of Artificial Sequence: Synthetic oligonucleotide
  Sense strand starting at position 2326 of SEQ ID NO: 1881501
aaagaauugacccgaggug

SEQ ID NO: 2049381 - RNA, 19 nt, Artificial Sequence
  Description of Artificial Sequence: Synthetic oligonucleotide
  Antisense strand to SEQ ID NO: 2049380
caccucgggucaauucuuu

SEQ ID NO: 2049382 - RNA, 19 nt, Artificial Sequence
  Description of Artificial Sequence: Synthetic oligonucleotide
  Sense strand starting at position 2411 of SEQ ID NO: 1881501
gugccuaucacccaggagu

SEQ ID NO: 2049383 - RNA, 19 nt, Artificial Sequence
  Description of Artificial Sequence: Synthetic oligonucleotide
  Antisense strand to SEQ ID NO: 2049382
acuccugggugauaggcac

SEQ ID NO: 2049384 - RNA, 19 nt, Artificial Sequence
  Description of Artificial Sequence: Synthetic oligonucleotide
  Sense strand starting at position 2413 of SEQ ID NO: 1881501
gccuaucacccaggaguaa

SEQ ID NO: 2049385 - RNA, 19 nt, Artificial Sequence
  Description of Artificial Sequence: Synthetic oligonucleotide
  Antisense strand to SEQ ID NO: 2049384
uuacuccugggugauaggc

SEQ ID NO: 2049386 - RNA, 19 nt, Artificial Sequence
  Description of Artificial Sequence: Synthetic oligonucleotide
  Sense strand starting at position 2483 of SEQ ID NO: 1881501
guuccauagucagcaagga

SEQ ID NO: 2049387 - RNA, 19 nt, Artificial Sequence
  Description of Artificial Sequence: Synthetic oligonucleotide
  Antisense strand to SEQ ID NO: 2049386
uccuugcugacuauggaac

SEQ ID NO: 2049388 - RNA, 19 nt, Artificial Sequence
  Description of Artificial Sequence: Synthetic oligonucleotide
  Sense strand starting at position 2484 of SEQ ID NO: 1881501
uuccauagucagcaaggau

SEQ ID NO: 2049389 - RNA, 19 nt, Artificial Sequence
  Description of Artificial Sequence: Synthetic oligonucleotide
  Antisense strand to SEQ ID NO: 2049388
auccuugcugacuauggaa

SEQ ID NO: 2049390 - RNA, 19 nt, Artificial Sequence
  Description of Artificial Sequence: Synthetic oligonucleotide
  Sense strand starting at position 2487 of SEQ ID NO: 1881501
cauagucagcaaggauaca

SEQ ID NO: 2049391 - RNA, 19 nt, Artificial Sequence
  Description of Artificial Sequence: Synthetic oligonucleotide
  Antisense strand to SEQ ID NO: 2049390
uguauccuugcugacuaug

SEQ ID NO: 2049392 - RNA, 19 nt, Artificial Sequence
  Description of Artificial Sequence: Synthetic oligonucleotide
  Sense strand starting at position 2539 of SEQ ID NO: 1881501
guauccuugccuuagaaga

SEQ ID NO: 2049393 - RNA, 19 nt, Artificial Sequence
  Description of Artificial Sequence: Synthetic oligonucleotide
  Antisense strand to SEQ ID NO: 2049392
ucuucuaaggcaaggauac

SEQ ID NO: 2049394 - RNA, 19 nt, Artificial Sequence
  Description of Artificial Sequence: Synthetic oligonucleotide
  Sense strand starting at position 2549 of SEQ ID NO: 1881501
cuuagaagagcucagucuu

SEQ ID NO: 2049395 - RNA, 19 nt, Artificial Sequence
  Description of Artificial Sequence: Synthetic oligonucleotide
  Antisense strand to SEQ ID NO: 2049394
aagacugagcucuucuaag

SEQ ID NO: 2049396 - RNA, 19 nt, Artificial Sequence
  Description of Artificial Sequence: Synthetic oligonucleotide
  Sense strand starting at position 2568 of SEQ ID NO: 1881501
uuuagaaagacagguaagu

SEQ ID NO: 2049397 - RNA, 19 nt, Artificial Sequence
  Description of Artificial Sequence: Synthetic oligonucleotide
  Antisense strand to SEQ ID NO: 2049396
acuuaccugucuuucuaaa

SEQ ID NO: 2049398 - RNA, 19 nt, Artificial Sequence
  Description of Artificial Sequence: Synthetic oligonucleotide
  Sense strand starting at position 2740 of SEQ ID NO: 1881501
guguucuuucuauagacag

SEQ ID NO: 2049399 - RNA, 19 nt, Artificial Sequence
  Description of Artificial Sequence: Synthetic oligonucleotide
  Antisense strand to SEQ ID NO: 2049398
cugucuauagaaagaacac

SEQ ID NO: 2049400 - RNA, 19 nt, Artificial Sequence
  Description of Artificial Sequence: Synthetic oligonucleotide
  Sense strand starting at position 2835 of SEQ ID NO: 1881501
uugagucuccuggacauau

SEQ ID NO: 2049401 - RNA, 19 nt, Artificial Sequence
  Description of Artificial Sequence: Synthetic oligonucleotide
  Antisense strand to SEQ ID NO: 2049400
auauguccaggagacucaa

SEQ ID NO: 2049402 - RNA, 19 nt, Artificial Sequence
  Description of Artificial Sequence: Synthetic oligonucleotide
  Sense strand starting at position 3133 of SEQ ID NO: 1881501
auccaaauauggucaaguu

SEQ ID NO: 2049403 - RNA, 19 nt, Artificial Sequence
  Description of Artificial Sequence: Synthetic oligonucleotide
  Antisense strand to SEQ ID NO: 2049402
aacuugaccauauuuggau

SEQ ID NO: 2049404 - RNA, 19 nt, Artificial Sequence
  Description of Artificial Sequence: Synthetic oligonucleotide
  Sense strand starting at position 3134 of SEQ ID NO: 1881501
uccaaauauggucaaguua

SEQ ID NO: 2049405 - RNA, 19 nt, Artificial Sequence
  Description of Artificial Sequence: Synthetic oligonucleotide
  Antisense strand to SEQ ID NO: 2049404
uaacuugaccauauuugga

SEQ ID NO: 2049406 - RNA, 19 nt, Artificial Sequence
  Description of Artificial Sequence: Synthetic oligonucleotide
  Sense strand starting at position 3147 of SEQ ID NO: 1881501
aaguuaaugcuaggauuga

SEQ ID NO: 2049407 - RNA, 19 nt, Artificial Sequence
  Description of Artificial Sequence: Synthetic oligonucleotide
  Antisense strand to SEQ ID NO: 2049406
ucaauccuagcauuaacuu

SEQ ID NO: 2049408 - RNA, 19 nt, Artificial Sequence
  Description of Artificial Sequence: Synthetic oligonucleotide
  Sense strand starting at position 3192 of SEQ ID NO: 1881501
agggcaugaucagugccaa

SEQ ID NO: 2049409 - RNA, 19 nt, Artificial Sequence
  Description of Artificial Sequence: Synthetic oligonucleotide
  Antisense strand to SEQ ID NO: 2049408
uuggcacugaucaugcccu

SEQ ID NO: 2049410 - RNA, 19 nt, Artificial Sequence
  Description of Artificial Sequence: Synthetic oligonucleotide
  Sense strand starting at position 3217 of SEQ ID NO: 1881501
gggcuauggccucagacuu

SEQ ID NO: 2049411 - RNA, 19 nt, Artificial Sequence
  Description of Artificial Sequence: Synthetic oligonucleotide
  Antisense strand to SEQ ID NO: 2049410
aagucugaggccauagccc

SEQ ID NO: 2049412 - RNA, 19 nt, Artificial Sequence
  Description of Artificial Sequence: Synthetic oligonucleotide
  Sense strand starting at position 3403 of SEQ ID NO: 1881501
ggagguuccaucugaguaa

SEQ ID NO: 2049413 - RNA, 19 nt, Artificial Sequence
  Description of Artificial Sequence: Synthetic oligonucleotide
  Antisense strand to SEQ ID NO: 2049412
uuacucagauggaaccucc

SEQ ID NO: 2049414 - RNA, 19 nt, Artificial Sequence
  Description of Artificial Sequence: Synthetic oligonucleotide
  Sense strand starting at position 3448 of SEQ ID NO: 1881501
aaauguuccuggguuuauu

SEQ ID NO: 2049415 - RNA, 19 nt, Artificial Sequence
  Description of Artificial Sequence: Synthetic oligonucleotide
  Antisense strand to SEQ ID NO: 2049414
aauaaacccaggaacauuu

SEQ ID NO: 2049416 - RNA, 19 nt, Artificial Sequence
  Description of Artificial Sequence: Synthetic oligonucleotide
  Sense strand starting at position 3551 of SEQ ID NO: 1881501
augggagaagcguguuaga

SEQ ID NO: 2049417 - RNA, 19 nt, Artificial Sequence
  Description of Artificial Sequence: Synthetic oligonucleotide
  Antisense strand to SEQ ID NO: 2049416
ucuaacacgcuucucccau

SEQ ID NO: 2049418 - RNA, 19 nt, Artificial Sequence
  Description of Artificial Sequence: Synthetic oligonucleotide
  Sense strand starting at position 3561 of SEQ ID NO: 1881501
cguguuagaauguauugag

SEQ ID NO: 2049419 - RNA, 19 nt, Artificial Sequence
  Description of Artificial Sequence: Synthetic oligonucleotide
  Antisense strand to SEQ ID NO: 2049418
cucaauacauucuaacacg

SEQ ID NO: 2049420 - RNA, 19 nt, Artificial Sequence
  Description of Artificial Sequence: Synthetic oligonucleotide
  Sense strand starting at position 3580 of SEQ ID NO: 1881501
uuguguaagcuguuucuuu

SEQ ID NO: 2049421 - RNA, 19 nt, Artificial Sequence
  Description of Artificial Sequence: Synthetic oligonucleotide
  Antisense strand to SEQ ID NO: 2049420
aaagaaacagcuuacacaa

SEQ ID NO: 2049422 - RNA, 19 nt, Artificial Sequence
  Description of Artificial Sequence: Synthetic oligonucleotide
  Sense strand starting at position 3584 of SEQ ID NO: 1881501
guaagcuguuucuuuauuu

SEQ ID NO: 2049423 - RNA, 19 nt, Artificial Sequence
  Description of Artificial Sequence: Synthetic oligonucleotide
  Antisense strand to SEQ ID NO: 2049422
aaauaaagaaacagcuuac

SEQ ID NO: 2049424 - RNA, 19 nt, Artificial Sequence
  Description of Artificial Sequence: Synthetic oligonucleotide
  Sense strand starting at position 3662 of SEQ ID NO: 1881501
ugaaguuugugaguagaaa

SEQ ID NO: 2049425 - RNA, 19 nt, Artificial Sequence
  Description of Artificial Sequence: Synthetic oligonucleotide
  Antisense strand to SEQ ID NO: 2049424
uuucuacucacaaacuuca

SEQ ID NO: 2049426 - RNA, 19 nt, Artificial Sequence
  Description of Artificial Sequence: Synthetic oligonucleotide
  Sense strand starting at position 3754 of SEQ ID NO: 1881501
acugcaauucugugagaaa

SEQ ID NO: 2049427 - RNA, 19 nt, Artificial Sequence
  Description of Artificial Sequence: Synthetic oligonucleotide
  Antisense strand to SEQ ID NO: 2049426
uuucucacagaauugcagu

SEQ ID NO: 2049428 - RNA, 19 nt, Artificial Sequence
  Description of Artificial Sequence: Synthetic oligonucleotide
  Sense strand starting at position 3885 of SEQ ID NO: 1881501
uguguuguucccuaagaua

SEQ ID NO: 2049429 - RNA, 19 nt, Artificial Sequence
  Description of Artificial Sequence: Synthetic oligonucleotide
  Antisense strand to SEQ ID NO: 2049428
uaucuuagggaacaacaca

SEQ ID NO: 2049430 - RNA, 19 nt, Artificial Sequence
  Description of Artificial Sequence: Synthetic oligonucleotide
  Sense strand starting at position 3910 of SEQ ID NO: 1881501
cuccuaagauuguuaaguu

SEQ ID NO: 2049431 - RNA, 19 nt, Artificial Sequence
  Description of Artificial Sequence: Synthetic oligonucleotide
  Antisense strand to SEQ ID NO: 2049430
aacuuaacaaucuuaggag

SEQ ID NO: 2049432 - RNA, 19 nt, Artificial Sequence
  Description of Artificial Sequence: Synthetic oligonucleotide
  Sense strand starting at position 3925 of SEQ ID NO: 1881501
aguucuuccguggaaagga

SEQ ID NO: 2049433 - RNA, 19 nt, Artificial Sequence
  Description of Artificial Sequence: Synthetic oligonucleotide
  Antisense strand to SEQ ID NO: 2049432
uccuuuccacggaagaacu

SEQ ID NO: 2049434 - RNA, 19 nt, Artificial Sequence
  Description of Artificial Sequence: Synthetic oligonucleotide
  Sense strand starting at position 3959 of SEQ ID NO: 1881501
cugccucauuuguccauau

SEQ ID NO: 2049435 - RNA, 19 nt, Artificial Sequence
  Description of Artificial Sequence: Synthetic oligonucleotide
  Antisense strand to SEQ ID NO: 2049434
auauggacaaaugaggcag

SEQ ID NO: 2049436 - RNA, 19 nt, Artificial Sequence
  Description of Artificial Sequence: Synthetic oligonucleotide
  Sense strand starting at position 3960 of SEQ ID NO: 1881501
ugccucauuuguccauauu

SEQ ID NO: 2049437 - RNA, 19 nt, Artificial Sequence
  Description of Artificial Sequence: Synthetic oligonucleotide
  Antisense strand to SEQ ID NO: 2049436
aauauggacaaaugaggca

SEQ ID NO: 2049438 - RNA, 19 nt, Artificial Sequence
  Description of Artificial Sequence: Synthetic oligonucleotide
  Sense strand starting at position 30 of SEQ ID NO: 1881502
ugggaaaguguccaguaca

SEQ ID NO: 2049439 - RNA, 19 nt, Artificial Sequence
  Description of Artificial Sequence: Synthetic oligonucleotide
  Antisense strand to SEQ ID NO: 2049438
uguacuggacacuuuccca

SEQ ID NO: 2049440 - RNA, 19 nt, Artificial Sequence
  Description of Artificial Sequence: Synthetic oligonucleotide
  Sense strand starting at position 33 of SEQ ID NO: 1881502
gaaaguguccaguacauag

SEQ ID NO: 2049441 - RNA, 19 nt, Artificial Sequence
  Description of Artificial Sequence: Synthetic oligonucleotide
  Antisense strand to SEQ ID NO: 2049440
cuauguacuggacacuuuc

SEQ ID NO: 2049442 - RNA, 19 nt, Artificial Sequence
  Description of Artificial Sequence: Synthetic oligonucleotide
  Sense strand starting at position 49 of SEQ ID NO: 1881502
uaguaaguucuauacaggu

SEQ ID NO: 2049443 - RNA, 19 nt, Artificial Sequence
  Description of Artificial Sequence: Synthetic oligonucleotide
  Antisense strand to SEQ ID NO: 2049442
accuguauagaacuuacua

SEQ ID NO: 2049444 - RNA, 19 nt, Artificial Sequence
  Description of Artificial Sequence: Synthetic oligonucleotide
  Sense strand starting at position 51 of SEQ ID NO: 1881502
guaaguucuauacagguau

SEQ ID NO: 2049445 - RNA, 19 nt, Artificial Sequence
  Description of Artificial Sequence: Synthetic oligonucleotide
  Antisense strand to SEQ ID NO: 2049444
auaccuguauagaacuuac

SEQ ID NO: 2049446 - RNA, 19 nt, Artificial Sequence
  Description of Artificial Sequence: Synthetic oligonucleotide
  Sense strand starting at position 81 of SEQ ID NO: 1881502
auuuaucagcugugagcau

SEQ ID NO: 2049447 - RNA, 19 nt, Artificial Sequence
  Description of Artificial Sequence: Synthetic oligonucleotide
  Antisense strand to SEQ ID NO: 2049446
augcucacagcugauaaau

SEQ ID NO: 2049448 - RNA, 19 nt, Artificial Sequence
  Description of Artificial Sequence: Synthetic oligonucleotide
  Sense strand starting at position 88 of SEQ ID NO: 1881502
agcugugagcaucacucau

SEQ ID NO: 2049449 - RNA, 19 nt, Artificial Sequence
  Description of Artificial Sequence: Synthetic oligonucleotide
  Antisense strand to SEQ ID NO: 2049448
augagugaugcucacagcu

SEQ ID NO: 2049450 - RNA, 19 nt, Artificial Sequence
  Description of Artificial Sequence: Synthetic oligonucleotide
  Sense strand starting at position 90 of SEQ ID NO: 1881502
cugugagcaucacucauua

SEQ ID NO: 2049451 - RNA, 19 nt, Artificial Sequence
  Description of Artificial Sequence: Synthetic oligonucleotide
  Antisense strand to SEQ ID NO: 2049450
uaaugagugaugcucacag

SEQ ID NO: 2049452 - RNA, 19 nt, Artificial Sequence
  Description of Artificial Sequence: Synthetic oligonucleotide
  Sense strand starting at position 129 of SEQ ID NO: 1881502
cuggaauuguuucuguauu

SEQ ID NO: 2049453 - RNA, 19 nt, Artificial Sequence
  Description of Artificial Sequence: Synthetic oligonucleotide
  Antisense strand to SEQ ID NO: 2049452
aauacagaaacaauuccag

SEQ ID NO: 2049454 - RNA, 19 nt, Artificial Sequence
  Description of Artificial Sequence: Synthetic oligonucleotide
  Sense strand starting at position 364 of SEQ ID NO: 1881502
cagaaagaagagugcuaau

SEQ ID NO: 2049455 - RNA, 19 nt, Artificial Sequence
  Description of Artificial Sequence: Synthetic oligonucleotide
  Antisense strand to SEQ ID NO: 2049454
auuagcacucuucuuucug

SEQ ID NO: 2049456 - RNA, 19 nt, Artificial Sequence
  Description of Artificial Sequence: Synthetic oligonucleotide
  Sense strand starting at position 487 of SEQ ID NO: 1881502
gagcuuacgcuccagaaga

SEQ ID NO: 2049457 - RNA, 19 nt, Artificial Sequence
  Description of Artificial Sequence: Synthetic oligonucleotide
  Antisense strand to SEQ ID NO: 2049456
ucuucuggagcguaagcuc

SEQ ID NO: 2049458 - RNA, 19 nt, Artificial Sequence
  Description of Artificial Sequence: Synthetic oligonucleotide
  Sense strand starting at position 489 of SEQ ID NO: 1881502
gcuuacgcuccagaagaaa

SEQ ID NO: 2049459 - RNA, 19 nt, Artificial Sequence
  Description of Artificial Sequence: Synthetic oligonucleotide
  Antisense strand to SEQ ID NO: 2049458
uuucuucuggagcguaagc

SEQ ID NO: 2049460 - RNA, 19 nt, Artificial Sequence
  Description of Artificial Sequence: Synthetic oligonucleotide
  Sense strand starting at position 629 of SEQ ID NO: 1881502
cagagucgucaugagcaca

SEQ ID NO: 2049461 - RNA, 19 nt, Artificial Sequence
  Description of Artificial Sequence: Synthetic oligonucleotide
  Antisense strand to SEQ ID NO: 2049460
ugugcucaugacgacucug

SEQ ID NO: 2049462 - RNA, 19 nt, Artificial Sequence
  Description of Artificial Sequence: Synthetic oligonucleotide
  Sense strand starting at position 632 of SEQ ID NO: 1881502
agucgucaugagcacaaga

SEQ ID NO: 2049463 - RNA, 19 nt, Artificial Sequence
  Description of Artificial Sequence: Synthetic oligonucleotide
  Antisense strand to SEQ ID NO: 2049462
ucuugugcucaugacgacu

SEQ ID NO: 2049464 - RNA, 19 nt, Artificial Sequence
  Description of Artificial Sequence: Synthetic oligonucleotide
  Sense strand starting at position 901 of SEQ ID NO: 1881502
acagacauaucucaaagga

SEQ ID NO: 2049465 - RNA, 19 nt, Artificial Sequence
  Description of Artificial Sequence: Synthetic oligonucleotide
  Antisense strand to SEQ ID NO: 2049464
uccuuugagauaugucugu

SEQ ID NO: 2049466 - RNA, 19 nt, Artificial Sequence
  Description of Artificial Sequence: Synthetic oligonucleotide
  Sense strand starting at position 1094 of SEQ ID NO: 1881502
gacuauuaccuguguuaag

SEQ ID NO: 2049467 - RNA, 19 nt, Artificial Sequence
  Description of Artificial Sequence: Synthetic oligonucleotide
  Antisense strand to SEQ ID NO: 2049466
cuuaacacagguaauaguc

SEQ ID NO: 2049468 - RNA, 19 nt, Artificial Sequence
  Description of Artificial Sequence: Synthetic oligonucleotide
  Sense strand starting at position 1095 of SEQ ID NO: 1881502
acuauuaccuguguuaaga

SEQ ID NO: 2049469 - RNA, 19 nt, Artificial Sequence
  Description of Artificial Sequence: Synthetic oligonucleotide
  Antisense strand to SEQ ID NO: 2049468
ucuuaacacagguaauagu

SEQ ID NO: 2049470 - RNA, 19 nt, Artificial Sequence
  Description of Artificial Sequence: Synthetic oligonucleotide
  Sense strand starting at position 1104 of SEQ ID NO: 1881502
uguguuaagacagguaucu

SEQ ID NO: 2049471 - RNA, 19 nt, Artificial Sequence
  Description of Artificial Sequence: Synthetic oligonucleotide
  Antisense strand to SEQ ID NO: 2049470
agauaccugucuuaacaca

SEQ ID NO: 2049472 - RNA, 19 nt, Artificial Sequence
  Description of Artificial Sequence: Synthetic oligonucleotide
  Sense strand starting at position 1210 of SEQ ID NO: 1881502
aaucgaggcuuucuguaag

SEQ ID NO: 2049473 - RNA, 19 nt, Artificial Sequence
  Description of Artificial Sequence: Synthetic oligonucleotide
  Antisense strand to SEQ ID NO: 2049472
cuuacagaaagccucgauu

SEQ ID NO: 2049474 - RNA, 19 nt, Artificial Sequence
  Description of Artificial Sequence: Synthetic oligonucleotide
  Sense strand starting at position 1213 of SEQ ID NO: 1881502
cgaggcuuucuguaagaag

SEQ ID NO: 2049475 - RNA, 19 nt, Artificial Sequence
  Description of Artificial Sequence: Synthetic oligonucleotide
  Antisense strand to SEQ ID NO: 2049474
cuucuuacagaaagccucg

SEQ ID NO: 2049476 - RNA, 19 nt, Artificial Sequence
  Description of Artificial Sequence: Synthetic oligonucleotide
  Sense strand starting at position 1344 of SEQ ID NO: 1881502
caauuucugucugagagac

SEQ ID NO: 2049477 - RNA, 19 nt, Artificial Sequence
  Description of Artificial Sequence: Synthetic oligonucleotide
  Antisense strand to SEQ ID NO: 2049476
gucucucagacagaaauug

SEQ ID NO: 2049478 - RNA, 19 nt, Artificial Sequence
  Description of Artificial Sequence: Synthetic oligonucleotide
  Sense strand starting at position 1346 of SEQ ID NO: 1881502
auuucugucugagagacau

SEQ ID NO: 2049479 - RNA, 19 nt, Artificial Sequence
  Description of Artificial Sequence: Synthetic oligonucleotide
  Antisense strand to SEQ ID NO: 2049478
augucucucagacagaaau

SEQ ID NO: 2049480 - RNA, 19 nt, Artificial Sequence
  Description of Artificial Sequence: Synthetic oligonucleotide
  Sense strand starting at position 1428 of SEQ ID NO: 1881502
gaaguaguuuauccaagga

SEQ ID NO: 2049481 - RNA, 19 nt, Artificial Sequence
  Description of Artificial Sequence: Synthetic oligonucleotide
  Antisense strand to SEQ ID NO: 2049480
uccuuggauaaacuacuuc

SEQ ID NO: 2049482 - RNA, 19 nt, Artificial Sequence
  Description of Artificial Sequence: Synthetic oligonucleotide
  Sense strand starting at position 1530 of SEQ ID NO: 1881502
ucaagaaguuuggaauuua

SEQ ID NO: 2049483 - RNA, 19 nt, Artificial Sequence
  Description of Artificial Sequence: Synthetic oligonucleotide
  Antisense strand to SEQ ID NO: 2049482
uaaauuccaaacuucuuga

SEQ ID NO: 2049484 - RNA, 19 nt, Artificial Sequence
  Description of Artificial Sequence: Synthetic oligonucleotide
  Sense strand starting at position 1554 of SEQ ID NO: 1881502
cauggagaugauugggcaa

SEQ ID NO: 2049485 - RNA, 19 nt, Artificial Sequence
  Description of Artificial Sequence: Synthetic oligonucleotide
  Antisense strand to SEQ ID NO: 2049484
uugcccaaucaucuccaug

SEQ ID NO: 2049486 - RNA, 19 nt, Artificial Sequence
  Description of Artificial Sequence: Synthetic oligonucleotide
  Sense strand starting at position 1794 of SEQ ID NO: 1881502
acuauuaagaccugugugu

SEQ ID NO: 2049487 - RNA, 19 nt, Artificial Sequence
  Description of Artificial Sequence: Synthetic oligonucleotide
  Antisense strand to SEQ ID NO: 2049486
acacacaggucuuaauagu

SEQ ID NO: 2049488 - RNA, 19 nt, Artificial Sequence
  Description of Artificial Sequence: Synthetic oligonucleotide
  Sense strand starting at position 1997 of SEQ ID NO: 1881502
gcagcaucccagugaagac

SEQ ID NO: 2049489 - RNA, 19 nt, Artificial Sequence
  Description of Artificial Sequence: Synthetic oligonucleotide
  Antisense strand to SEQ ID NO: 2049488
gucuucacugggaugcugc

SEQ ID NO: 2049490 - RNA, 19 nt, Artificial Sequence
  Description of Artificial Sequence: Synthetic oligonucleotide
  Sense strand starting at position 2119 of SEQ ID NO: 1881502
gagaacaguugcucagagu

SEQ ID NO: 2049491 - RNA, 19 nt, Artificial Sequence
  Description of Artificial Sequence: Synthetic oligonucleotide
  Antisense strand to SEQ ID NO: 2049490
acucugagcaacuguucuc

SEQ ID NO: 2049492 - RNA, 19 nt, Artificial Sequence
  Description of Artificial Sequence: Synthetic oligonucleotide
  Sense strand starting at position 2315 of SEQ ID NO: 1881502
gaucacaagcccuagugau

SEQ ID NO: 2049493 - RNA, 19 nt, Artificial Sequence
  Description of Artificial Sequence: Synthetic oligonucleotide
  Antisense strand to SEQ ID NO: 2049492
aucacuagggcuugugauc

SEQ ID NO: 2049494 - RNA, 19 nt, Artificial Sequence
  Description of Artificial Sequence: Synthetic oligonucleotide
  Sense strand starting at position 2373 of SEQ ID NO: 1881502
gugguaaacuaauccaacu

SEQ ID NO: 2049495 - RNA, 19 nt, Artificial Sequence
  Description of Artificial Sequence: Synthetic oligonucleotide
  Antisense strand to SEQ ID NO: 2049494
aguuggauuaguuuaccac

SEQ ID NO: 2049496 - RNA, 19 nt, Artificial Sequence
  Description of Artificial Sequence: Synthetic oligonucleotide
  Sense strand starting at position 2638 of SEQ ID NO: 1881502
uuagauuuaucagggagua

SEQ ID NO: 2049497 - RNA, 19 nt, Artificial Sequence
  Description of Artificial Sequence: Synthetic oligonucleotide
  Antisense strand to SEQ ID NO: 2049496
uacucccugauaaaucuaa

SEQ ID NO: 2049498 - RNA, 19 nt, Artificial Sequence
  Description of Artificial Sequence: Synthetic oligonucleotide
  Sense strand starting at position 2827 of SEQ ID NO: 1881502
aggagucuaacaggccaua

SEQ ID NO: 2049499 - RNA, 19 nt, Artificial Sequence
  Description of Artificial Sequence: Synthetic oligonucleotide
  Antisense strand to SEQ ID NO: 2049498
uauggccuguuagacuccu

SEQ ID NO: 2049500 - RNA, 19 nt, Artificial Sequence
  Description of Artificial Sequence: Synthetic oligonucleotide
  Sense strand starting at position 2957 of SEQ ID NO: 1881502
agucuaugaucucuaggac

SEQ ID NO: 2049501 - RNA, 19 nt, Artificial Sequence
  Description of Artificial Sequence: Synthetic oligonucleotide
  Antisense strand to SEQ ID NO: 2049500
guccuagagaucauagacu

SEQ ID NO: 2049502 - RNA, 19 nt, Artificial Sequence
  Description of Artificial Sequence: Synthetic oligonucleotide
  Sense strand starting at position 2960 of SEQ ID NO: 1881502
cuaugaucucuaggacaau

SEQ ID NO: 2049503 - RNA, 19 nt, Artificial Sequence
  Description of Artificial Sequence: Synthetic oligonucleotide
  Antisense strand to SEQ ID NO: 2049502
auuguccuagagaucauag

SEQ ID NO: 2049504 - RNA, 19 nt, Artificial Sequence
  Description of Artificial Sequence: Synthetic oligonucleotide
  Sense strand starting at position 2992 of SEQ ID NO: 1881502
guaaauauguaauugcauc

SEQ ID NO: 2049505 - RNA, 19 nt, Artificial Sequence
  Description of Artificial Sequence: Synthetic oligonucleotide
  Antisense strand to SEQ ID NO: 2049504
gaugcaauuacauauuuac

SEQ ID NO: 2049506 - RNA, 19 nt, Artificial Sequence
  Description of Artificial Sequence: Synthetic oligonucleotide
  Sense strand starting at position 2999 of SEQ ID NO: 1881502
uguaauugcaucugugaga

SEQ ID NO: 2049507 - RNA, 19 nt, Artificial Sequence
  Description of Artificial Sequence: Synthetic oligonucleotide
  Antisense strand to SEQ ID NO: 2049506
ucucacagaugcaauuaca

SEQ ID NO: 2049508 - RNA, 19 nt, Artificial Sequence
  Description of Artificial Sequence: Synthetic oligonucleotide
  Sense strand starting at position 3000 of SEQ ID NO: 1881502
guaauugcaucugugagag

SEQ ID NO: 2049509 - RNA, 19 nt, Artificial Sequence
  Description of Artificial Sequence: Synthetic oligonucleotide
  Antisense strand to SEQ ID NO: 2049508
cucucacagaugcaauuac

SEQ ID NO: 2049510 - RNA, 19 nt, Artificial Sequence
  Description of Artificial Sequence: Synthetic oligonucleotide
  Sense strand starting at position 3157 of SEQ ID NO: 1881502
ccauacucacucuguugau

SEQ ID NO: 2049511 - RNA, 19 nt, Artificial Sequence
  Description of Artificial Sequence: Synthetic oligonucleotide
  Antisense strand to SEQ ID NO: 2049510
aucaacagagugaguaugg

SEQ ID NO: 2049512 - RNA, 19 nt, Artificial Sequence
  Description of Artificial Sequence: Synthetic oligonucleotide
  Sense strand starting at position 3323 of SEQ ID NO: 1881502
gaaacauguuagucuggaa

SEQ ID NO: 2049513 - RNA, 19 nt, Artificial Sequence
  Description of Artificial Sequence: Synthetic oligonucleotide
  Antisense strand to SEQ ID NO: 2049512
uuccagacuaacauguuuc

SEQ ID NO: 2049514 - RNA, 19 nt, Artificial Sequence
  Description of Artificial Sequence: Synthetic oligonucleotide
  Sense strand starting at position 3376 of SEQ ID NO: 1881502
auuguagcauaguccuaua

SEQ ID NO: 2049515 - RNA, 19 nt, Artificial Sequence
  Description of Artificial Sequence: Synthetic oligonucleotide
  Antisense strand to SEQ ID NO: 2049514
uauaggacuaugcuacaau

SEQ ID NO: 2049516 - RNA, 19 nt, Artificial Sequence
  Description of Artificial Sequence: Synthetic oligonucleotide
  Sense strand starting at position 3381 of SEQ ID NO: 1881502
agcauaguccuauauccua

SEQ ID NO: 2049517 - RNA, 19 nt, Artificial Sequence
  Description of Artificial Sequence: Synthetic oligonucleotide
  Antisense strand to SEQ ID NO: 2049516
uaggauauaggacuaugcu

SEQ ID NO: 2049518 - RNA, 19 nt, Artificial Sequence
  Description of Artificial Sequence: Synthetic oligonucleotide
  Sense strand starting at position 10 of SEQ ID NO: 1881503
ucccucugauauguguuaa

SEQ ID NO: 2049519 - RNA, 19 nt, Artificial Sequence
  Description of Artificial Sequence: Synthetic oligonucleotide
  Antisense strand to SEQ ID NO: 2049518
uuaacacauaucagaggga

SEQ ID NO: 2049520 - RNA, 19 nt, Artificial Sequence
  Description of Artificial Sequence: Synthetic oligonucleotide
  Sense strand starting at position 273 of SEQ ID NO: 1881503
cgugaagaccuacauguau

SEQ ID NO: 2049521 - RNA, 19 nt, Artificial Sequence
  Description of Artificial Sequence: Synthetic oligonucleotide
  Antisense strand to SEQ ID NO: 2049520
auacauguaggucuucacg

SEQ ID NO: 2049522 - RNA, 19 nt, Artificial Sequence
  Description of Artificial Sequence: Synthetic oligonucleotide
  Sense strand starting at position 291 of SEQ ID NO: 1881503
uuauuaguccguuaucaca

SEQ ID NO: 2049523 - RNA, 19 nt, Artificial Sequence
  Description of Artificial Sequence: Synthetic oligonucleotide
  Antisense strand to SEQ ID NO: 2049522
ugugauaacggacuaauaa

SEQ ID NO: 2049524 - RNA, 19 nt, Artificial Sequence
  Description of Artificial Sequence: Synthetic oligonucleotide
  Sense strand starting at position 447 of SEQ ID NO: 1881503
ggcagcagucaaggagaaa

SEQ ID NO: 2049525 - RNA, 19 nt, Artificial Sequence
  Description of Artificial Sequence: Synthetic oligonucleotide
  Antisense strand to SEQ ID NO: 2049524
uuucuccuugacugcugcc

SEQ ID NO: 2049526 - RNA, 19 nt, Artificial Sequence
  Description of Artificial Sequence: Synthetic oligonucleotide
  Sense strand starting at position 483 of SEQ ID NO: 1881503
guggaaacugcucaaacca

SEQ ID NO: 2049527 - RNA, 19 nt, Artificial Sequence
  Description of Artificial Sequence: Synthetic oligonucleotide
  Antisense strand to SEQ ID NO: 2049526
ugguuugagcaguuuccac

SEQ ID NO: 2049528 - RNA, 19 nt, Artificial Sequence
  Description of Artificial Sequence: Synthetic oligonucleotide
  Sense strand starting at position 678 of SEQ ID NO: 1881503
ugaguauuauaagcaaugu

SEQ ID NO: 2049529 - RNA, 19 nt, Artificial Sequence
  Description of Artificial Sequence: Synthetic oligonucleotide
  Antisense strand to SEQ ID NO: 2049528
acauugcuuauaauacuca

SEQ ID NO: 2049530 - RNA, 19 nt, Artificial Sequence
  Description of Artificial Sequence: Synthetic oligonucleotide
  Sense strand starting at position 697 of SEQ ID NO: 1881503
ccuuuaagugccuaguaua

SEQ ID NO: 2049531 - RNA, 19 nt, Artificial Sequence
  Description of Artificial Sequence: Synthetic oligonucleotide
  Antisense strand to SEQ ID NO: 2049530
uauacuaggcacuuaaagg

SEQ ID NO: 2049532 - RNA, 19 nt, Artificial Sequence
  Description of Artificial Sequence: Synthetic oligonucleotide
  Sense strand starting at position 750 of SEQ ID NO: 1881503
ucauuacugcaaugguuaa

SEQ ID NO: 2049533 - RNA, 19 nt, Artificial Sequence
  Description of Artificial Sequence: Synthetic oligonucleotide
  Antisense strand to SEQ ID NO: 2049532
uuaaccauugcaguaauga

SEQ ID NO: 2049534 - RNA, 19 nt, Artificial Sequence
  Description of Artificial Sequence: Synthetic oligonucleotide
  Sense strand starting at position 1106 of SEQ ID NO: 1881503
cuuuguggucgugugaguu

SEQ ID NO: 2049535 - RNA, 19 nt, Artificial Sequence
  Description of Artificial Sequence: Synthetic oligonucleotide
  Antisense strand to SEQ ID NO: 2049534
aacucacacgaccacaaag

SEQ ID NO: 2049536 - RNA, 19 nt, Artificial Sequence
  Description of Artificial Sequence: Synthetic oligonucleotide
  Sense strand starting at position 1164 of SEQ ID NO: 1881503
ggcagacuccuauauaacc

SEQ ID NO: 2049537 - RNA, 19 nt, Artificial Sequence
  Description of Artificial Sequence: Synthetic oligonucleotide
  Antisense strand to SEQ ID NO: 2049536
gguuauauaggagucugcc

SEQ ID NO: 2049538 - RNA, 19 nt, Artificial Sequence
  Description of Artificial Sequence: Synthetic oligonucleotide
  Sense strand starting at position 1326 of SEQ ID NO: 1881503
ggacaugucaugugaaaga

SEQ ID NO: 2049539 - RNA, 19 nt, Artificial Sequence
  Description of Artificial Sequence: Synthetic oligonucleotide
  Antisense strand to SEQ ID NO: 2049538
ucuuucacaugacaugucc

SEQ ID NO: 2049540 - RNA, 19 nt, Artificial Sequence
  Description of Artificial Sequence: Synthetic oligonucleotide
  Sense strand starting at position 1399 of SEQ ID NO: 1881503
gacaauuuguuagacugau

SEQ ID NO: 2049541 - RNA, 19 nt, Artificial Sequence
  Description of Artificial Sequence: Synthetic oligonucleotide
  Antisense strand to SEQ ID NO: 2049540
aucagucuaacaaauuguc

SEQ ID NO: 2049542 - RNA, 19 nt, Artificial Sequence
  Description of Artificial Sequence: Synthetic oligonucleotide
  Sense strand starting at position 1463 of SEQ ID NO: 1881503
ggaagaaagucucuuccuu

SEQ ID NO: 2049543 - RNA, 19 nt, Artificial Sequence
  Description of Artificial Sequence: Synthetic oligonucleotide
  Antisense strand to SEQ ID NO: 2049542
aaggaagagacuuucuucc

SEQ ID NO: 2049544 - RNA, 19 nt, Artificial Sequence
  Description of Artificial Sequence: Synthetic oligonucleotide
  Sense strand starting at position 1992 of SEQ ID NO: 1881503
agaucuggcuggguacaaa

SEQ ID NO: 2049545 - RNA, 19 nt, Artificial Sequence
  Description of Artificial Sequence: Synthetic oligonucleotide
  Antisense strand to SEQ ID NO: 2049544
uuuguacccagccagaucu

SEQ ID NO: 2049546 - RNA, 19 nt, Artificial Sequence
  Description of Artificial Sequence: Synthetic oligonucleotide
  Sense strand starting at position 2139 of SEQ ID NO: 1881503
cagauauagucuuugguuu

SEQ ID NO: 2049547 - RNA, 19 nt, Artificial Sequence
  Description of Artificial Sequence: Synthetic oligonucleotide
  Antisense strand to SEQ ID NO: 2049546
aaaccaaagacuauaucug

SEQ ID NO: 2049548 - RNA, 19 nt, Artificial Sequence
  Description of Artificial Sequence: Synthetic oligonucleotide
  Sense strand starting at position 2165 of SEQ ID NO: 1881503
auaacaaguuacguucuua

SEQ ID NO: 2049549 - RNA, 19 nt, Artificial Sequence
  Description of Artificial Sequence: Synthetic oligonucleotide
  Antisense strand to SEQ ID NO: 2049548
uaagaacguaacuuguuau

SEQ ID NO: 2049550 - RNA, 19 nt, Artificial Sequence
  Description of Artificial Sequence: Synthetic oligonucleotide
  Sense strand starting at position 2252 of SEQ ID NO: 1881503
auugauguuucugucauuu

SEQ ID NO: 2049551 - RNA, 19 nt, Artificial Sequence
  Description of Artificial Sequence: Synthetic oligonucleotide
  Antisense strand to SEQ ID NO: 2049550
aaaugacagaaacaucaau

SEQ ID NO: 2049552 - RNA, 19 nt, Artificial Sequence
  Description of Artificial Sequence: Synthetic oligonucleotide
  Sense strand starting at position 2256 of SEQ ID NO: 1881503
auguuucugucauuucuag

SEQ ID NO: 2049553 - RNA, 19 nt, Artificial Sequence
  Description of Artificial Sequence: Synthetic oligonucleotide
  Antisense strand to SEQ ID NO: 2049552
cuagaaaugacagaaacau

SEQ ID NO: 2049554 - RNA, 19 nt, Artificial Sequence
  Description of Artificial Sequence: Synthetic oligonucleotide
  Sense strand starting at position 2263 of SEQ ID NO: 1881503
ugucauuucuaguugucag

SEQ ID NO: 2049555 - RNA, 19 nt, Artificial Sequence
  Description of Artificial Sequence: Synthetic oligonucleotide
  Antisense strand to SEQ ID NO: 2049554
cugacaacuagaaaugaca

SEQ ID NO: 2049556 - RNA, 19 nt, Artificial Sequence
  Description of Artificial Sequence: Synthetic oligonucleotide
  Sense strand starting at position 2264 of SEQ ID NO: 1881503
gucauuucuaguugucaga

SEQ ID NO: 2049557 - RNA, 19 nt, Artificial Sequence
  Description of Artificial Sequence: Synthetic oligonucleotide
  Antisense strand to SEQ ID NO: 2049556
ucugacaacuagaaaugac

SEQ ID NO: 2049558 - RNA, 19 nt, Artificial Sequence
  Description of Artificial Sequence: Synthetic oligonucleotide
  Sense strand starting at position 2266 of SEQ ID NO: 1881503
cauuucuaguugucagagu

SEQ ID NO: 2049559 - RNA, 19 nt, Artificial Sequence
  Description of Artificial Sequence: Synthetic oligonucleotide
  Antisense strand to SEQ ID NO: 2049558
acucugacaacuagaaaug

SEQ ID NO: 2049560 - RNA, 19 nt, Artificial Sequence
  Description of Artificial Sequence: Synthetic oligonucleotide
  Sense strand starting at position 2392 of SEQ ID NO: 1881503
agaggcucuucucccuaua

SEQ ID NO: 2049561 - RNA, 19 nt, Artificial Sequence
  Description of Artificial Sequence: Synthetic oligonucleotide
  Antisense strand to SEQ ID NO: 2049560
uauagggagaagagccucu

SEQ ID NO: 2049562 - RNA, 19 nt, Artificial Sequence
  Description of Artificial Sequence: Synthetic oligonucleotide
  Sense strand starting at position 2452 of SEQ ID NO: 1881503
aguggaucacuuuauggua

SEQ ID NO: 2049563 - RNA, 19 nt, Artificial Sequence
  Description of Artificial Sequence: Synthetic oligonucleotide
  Antisense strand to SEQ ID NO: 2049562
uaccauaaagugauccacu

SEQ ID NO: 2049564 - RNA, 19 nt, Artificial Sequence
  Description of Artificial Sequence: Synthetic oligonucleotide
  Sense strand starting at position 2593 of SEQ ID NO: 1881503
ucauuucugcauggcauaa

SEQ ID NO: 2049565 - RNA, 19 nt, Artificial Sequence
  Description of Artificial Sequence: Synthetic oligonucleotide
  Antisense strand to SEQ ID NO: 2049564
uuaugccaugcagaaauga

SEQ ID NO: 2049566 - RNA, 19 nt, Artificial Sequence
  Description of Artificial Sequence: Synthetic oligonucleotide
  Sense strand starting at position 2597 of SEQ ID NO: 1881503
uucugcauggcauaagaga

SEQ ID NO: 2049567 - RNA, 19 nt, Artificial Sequence
  Description of Artificial Sequence: Synthetic oligonucleotide
  Antisense strand to SEQ ID NO: 2049566
ucucuuaugccaugcagaa

SEQ ID NO: 2049568 - RNA, 19 nt, Artificial Sequence
  Description of Artificial Sequence: Synthetic oligonucleotide
  Sense strand starting at position 2626 of SEQ ID NO: 1881503
ggauuaagaggcugcaagu

SEQ ID NO: 2049569 - RNA, 19 nt, Artificial Sequence
  Description of Artificial Sequence: Synthetic oligonucleotide
  Antisense strand to SEQ ID NO: 2049568
acuugcagccucuuaaucc

SEQ ID NO: 2049570 - RNA, 19 nt, Artificial Sequence
  Description of Artificial Sequence: Synthetic oligonucleotide
  Sense strand starting at position 2871 of SEQ ID NO: 1881503
agccauguuuggguuaaca

SEQ ID NO: 2049571 - RNA, 19 nt, Artificial Sequence
  Description of Artificial Sequence: Synthetic oligonucleotide
  Antisense strand to SEQ ID NO: 2049570
uguuaacccaaacauggcu

SEQ ID NO: 2049572 - RNA, 19 nt, Artificial Sequence
  Description of Artificial Sequence: Synthetic oligonucleotide
  Sense strand starting at position 2873 of SEQ ID NO: 1881503
ccauguuuggguuaacauu

SEQ ID NO: 2049573 - RNA, 19 nt, Artificial Sequence
  Description of Artificial Sequence: Synthetic oligonucleotide
  Antisense strand to SEQ ID NO: 2049572
aauguuaacccaaacaugg

SEQ ID NO: 2049574 - RNA, 19 nt, Artificial Sequence
  Description of Artificial Sequence: Synthetic oligonucleotide
  Sense strand starting at position 3010 of SEQ ID NO: 1881503
uccacauucccacauggua

SEQ ID NO: 2049575 - RNA, 19 nt, Artificial Sequence
  Description of Artificial Sequence: Synthetic oligonucleotide
  Antisense strand to SEQ ID NO: 2049574
uaccaugugggaaugugga

SEQ ID NO: 2049576 - RNA, 19 nt, Artificial Sequence
  Description of Artificial Sequence: Synthetic oligonucleotide
  Sense strand starting at position 3212 of SEQ ID NO: 1881503
auaaauauacaguguguca

SEQ ID NO: 2049577 - RNA, 19 nt, Artificial Sequence
  Description of Artificial Sequence: Synthetic oligonucleotide
  Antisense strand to SEQ ID NO: 2049576
ugacacacuguauauuuau

SEQ ID NO: 2049578 - RNA, 19 nt, Artificial Sequence
  Description of Artificial Sequence: Synthetic oligonucleotide
  Sense strand starting at position 3241 of SEQ ID NO: 1881503
gaaagaauguaacuuguac

SEQ ID NO: 2049579 - RNA, 19 nt, Artificial Sequence
  Description of Artificial Sequence: Synthetic oligonucleotide
  Antisense strand to SEQ ID NO: 2049578
guacaaguuacauucuuuc

SEQ ID NO: 2049580 - RNA, 19 nt, Artificial Sequence
  Description of Artificial Sequence: Synthetic oligonucleotide
  Sense strand starting at position 3351 of SEQ ID NO: 1881503
uugguuacuaccggaauaa

SEQ ID NO: 2049581 - RNA, 19 nt, Artificial Sequence
  Description of Artificial Sequence: Synthetic oligonucleotide
  Antisense strand to SEQ ID NO: 2049580
uuauuccgguaguaaccaa

SEQ ID NO: 2049582 - RNA, 19 nt, Artificial Sequence
  Description of Artificial Sequence: Synthetic oligonucleotide
  Sense strand starting at position 3419 of SEQ ID NO: 1881503
ugggauggcagagguuuau

SEQ ID NO: 2049583 - RNA, 19 nt, Artificial Sequence
  Description of Artificial Sequence: Synthetic oligonucleotide
  Antisense strand to SEQ ID NO: 2049582
auaaaccucugccauccca

SEQ ID NO: 2049584 - RNA, 19 nt, Artificial Sequence
  Description of Artificial Sequence: Synthetic oligonucleotide
  Sense strand starting at position 3423 of SEQ ID NO: 1881503
auggcagagguuuaugacu

SEQ ID NO: 2049585 - RNA, 19 nt, Artificial Sequence
  Description of Artificial Sequence: Synthetic oligonucleotide
  Antisense strand to SEQ ID NO: 2049584
agucauaaaccucugccau

SEQ ID NO: 2049586 - RNA, 19 nt, Artificial Sequence
  Description of Artificial Sequence: Synthetic oligonucleotide
  Sense strand starting at position 3493 of SEQ ID NO: 1881503
cuuuauugccauggaagca

SEQ ID NO: 2049587 - RNA, 19 nt, Artificial Sequence
  Description of Artificial Sequence: Synthetic oligonucleotide
  Antisense strand to SEQ ID NO: 2049586
ugcuuccauggcaauaaag

SEQ ID NO: 2049588 - RNA, 19 nt, Artificial Sequence
  Description of Artificial Sequence: Synthetic oligonucleotide
  Sense strand starting at position 3529 of SEQ ID NO: 1881503
cauggaaagcuuugcuaga

SEQ ID NO: 2049589 - RNA, 19 nt, Artificial Sequence
  Description of Artificial Sequence: Synthetic oligonucleotide
  Antisense strand to SEQ ID NO: 2049588
ucuagcaaagcuuuccaug

SEQ ID NO: 2049590 - RNA, 19 nt, Artificial Sequence
  Description of Artificial Sequence: Synthetic oligonucleotide
  Sense strand starting at position 3560 of SEQ ID NO: 1881503
ucagacuuucugcaagaca

SEQ ID NO: 2049591 - RNA, 19 nt, Artificial Sequence
  Description of Artificial Sequence: Synthetic oligonucleotide
  Antisense strand to SEQ ID NO: 2049590
ugucuugcagaaagucuga

SEQ ID NO: 2049592 - RNA, 19 nt, Artificial Sequence
  Description of Artificial Sequence: Synthetic oligonucleotide
  Sense strand starting at position 3912 of SEQ ID NO: 1881503
uuaaauggaccuuguugua

SEQ ID NO: 2049593 - RNA, 19 nt, Artificial Sequence
  Description of Artificial Sequence: Synthetic oligonucleotide
  Antisense strand to SEQ ID NO: 2049592
uacaacaagguccauuuaa

SEQ ID NO: 2049594 - RNA, 19 nt, Artificial Sequence
  Description of Artificial Sequence: Synthetic oligonucleotide
  Sense strand starting at position 3919 of SEQ ID NO: 1881503
gaccuuguuguauaaaugu

SEQ ID NO: 2049595 - RNA, 19 nt, Artificial Sequence
  Description of Artificial Sequence: Synthetic oligonucleotide
  Antisense strand to SEQ ID NO: 2049594
acauuuauacaacaagguc

SEQ ID NO: 2049596 - RNA, 19 nt, Artificial Sequence
  Description of Artificial Sequence: Synthetic oligonucleotide
  Sense strand starting at position 3934 of SEQ ID NO: 1881503
auguuuaagcaccaaaugu

SEQ ID NO: 2049597 - RNA, 19 nt, Artificial Sequence
  Description of Artificial Sequence: Synthetic oligonucleotide
  Antisense strand to SEQ ID NO: 2049596
acauuuggugcuuaaacau

SEQ ID NO: 2049598 - RNA, 19 nt, Artificial Sequence
  Description of Artificial Sequence: Synthetic oligonucleotide
  Sense strand starting at position 103 of SEQ ID NO: 1881504
guacaacguacuugggaua

SEQ ID NO: 2049599 - RNA, 19 nt, Artificial Sequence
  Description of Artificial Sequence: Synthetic oligonucleotide
  Antisense strand to SEQ ID NO: 2049598
uaucccaaguacguuguac

SEQ ID NO: 2049600 - RNA, 19 nt, Artificial Sequence
  Description of Artificial Sequence: Synthetic oligonucleotide
  Sense strand starting at position 116 of SEQ ID NO: 1881504
gggauagaauaguaaagaa

SEQ ID NO: 2049601 - RNA, 19 nt, Artificial Sequence
  Description of Artificial Sequence: Synthetic oligonucleotide
  Antisense strand to SEQ ID NO: 2049600
uucuuuacuauucuauccc

SEQ ID NO: 2049602 - RNA, 19 nt, Artificial Sequence
  Description of Artificial Sequence: Synthetic oligonucleotide
  Sense strand starting at position 239 of SEQ ID NO: 1881504
aacucaguucccugggauu

SEQ ID NO: 2049603 - RNA, 19 nt, Artificial Sequence
  Description of Artificial Sequence: Synthetic oligonucleotide
  Antisense strand to SEQ ID NO: 2049602
aaucccagggaacugaguu

SEQ ID NO: 2049604 - RNA, 19 nt, Artificial Sequence
  Description of Artificial Sequence: Synthetic oligonucleotide
  Sense strand starting at position 278 of SEQ ID NO: 1881504
cuuggcccuccugagaaau

SEQ ID NO: 2049605 - RNA, 19 nt, Artificial Sequence
  Description of Artificial Sequence: Synthetic oligonucleotide
  Antisense strand to SEQ ID NO: 2049604
auuucucaggagggccaag

SEQ ID NO: 2049606 - RNA, 19 nt, Artificial Sequence
  Description of Artificial Sequence: Synthetic oligonucleotide
  Sense strand starting at position 305 of SEQ ID NO: 1881504
aggauauauuugcagagug

SEQ ID NO: 2049607 - RNA, 19 nt, Artificial Sequence
  Description of Artificial Sequence: Synthetic oligonucleotide
  Antisense strand to SEQ ID NO: 2049606
cacucugcaaauauauccu

SEQ ID NO: 2049608 - RNA, 19 nt, Artificial Sequence
  Description of Artificial Sequence: Synthetic oligonucleotide
  Sense strand starting at position 317 of SEQ ID NO: 1881504
cagagugagaauggaguuu

SEQ ID NO: 2049609 - RNA, 19 nt, Artificial Sequence
  Description of Artificial Sequence: Synthetic oligonucleotide
  Antisense strand to SEQ ID NO: 2049608
aaacuccauucucacucug

SEQ ID NO: 2049610 - RNA, 19 nt, Artificial Sequence
  Description of Artificial Sequence: Synthetic oligonucleotide
  Sense strand starting at position 323 of SEQ ID NO: 1881504
gagaauggaguuugaagca

SEQ ID NO: 2049611 - RNA, 19 nt, Artificial Sequence
  Description of Artificial Sequence: Synthetic oligonucleotide
  Antisense strand to SEQ ID NO: 2049610
ugcuucaaacuccauucuc

SEQ ID NO: 2049612 - RNA, 19 nt, Artificial Sequence
  Description of Artificial Sequence: Synthetic oligonucleotide
  Sense strand starting at position 374 of SEQ ID NO: 1881504
ccuaucaugguguggaaca

SEQ ID NO: 2049613 - RNA, 19 nt, Artificial Sequence
  Description of Artificial Sequence: Synthetic oligonucleotide
  Antisense strand to SEQ ID NO: 2049612
uguuccacaccaugauagg

SEQ ID NO: 2049614 - RNA, 19 nt, Artificial Sequence
  Description of Artificial Sequence: Synthetic oligonucleotide
  Sense strand starting at position 385 of SEQ ID NO: 1881504
guggaacagaguugggauu

SEQ ID NO: 2049615 - RNA, 19 nt, Artificial Sequence
  Description of Artificial Sequence: Synthetic oligonucleotide
  Antisense strand to SEQ ID NO: 2049614
aaucccaacucuguuccac

SEQ ID NO: 2049616 - RNA, 19 nt, Artificial Sequence
  Description of Artificial Sequence: Synthetic oligonucleotide
  Sense strand starting at position 583 of SEQ ID NO: 1881504
uuaugaguuuggcuuauaa

SEQ ID NO: 2049617 - RNA, 19 nt, Artificial Sequence
  Description of Artificial Sequence: Synthetic oligonucleotide
  Antisense strand to SEQ ID NO: 2049616
uuauaagccaaacucauaa

SEQ ID NO: 2049618 - RNA, 19 nt, Artificial Sequence
  Description of Artificial Sequence: Synthetic oligonucleotide
  Sense strand starting at position 585 of SEQ ID NO: 1881504
augaguuuggcuuauaauu

SEQ ID NO: 2049619 - RNA, 19 nt, Artificial Sequence
  Description of Artificial Sequence: Synthetic oligonucleotide
  Antisense strand to SEQ ID NO: 2049618
aauuauaagccaaacucau

SEQ ID NO: 2049620 - RNA, 19 nt, Artificial Sequence
  Description of Artificial Sequence: Synthetic oligonucleotide
  Sense strand starting at position 1116 of SEQ ID NO: 1881504
auugaaagcuaaucucaga

SEQ ID NO: 2049621 - RNA, 19 nt, Artificial Sequence
  Description of Artificial Sequence: Synthetic oligonucleotide
  Antisense strand to SEQ ID NO: 2049620
ucugagauuagcuuucaau

SEQ ID NO: 2049622 - RNA, 19 nt, Artificial Sequence
  Description of Artificial Sequence: Synthetic oligonucleotide
  Sense strand starting at position 1718 of SEQ ID NO: 1881504
ugugaagauucuguuuaug

SEQ ID NO: 2049623 - RNA, 19 nt, Artificial Sequence
  Description of Artificial Sequence: Synthetic oligonucleotide
  Antisense strand to SEQ ID NO: 2049622
cauaaacagaaucuucaca

SEQ ID NO: 2049624 - RNA, 19 nt, Artificial Sequence
  Description of Artificial Sequence: Synthetic oligonucleotide
  Sense strand starting at position 1721 of SEQ ID NO: 1881504
gaagauucuguuuauguca

SEQ ID NO: 2049625 - RNA, 19 nt, Artificial Sequence
  Description of Artificial Sequence: Synthetic oligonucleotide
  Antisense strand to SEQ ID NO: 2049624
ugacauaaacagaaucuuc

SEQ ID NO: 2049626 - RNA, 19 nt, Artificial Sequence
  Description of Artificial Sequence: Synthetic oligonucleotide
  Sense strand starting at position 1728 of SEQ ID NO: 1881504
cuguuuaugucauuuguag

SEQ ID NO: 2049627 - RNA, 19 nt, Artificial Sequence
  Description of Artificial Sequence: Synthetic oligonucleotide
  Antisense strand to SEQ ID NO: 2049626
cuacaaaugacauaaacag

SEQ ID NO: 2049628 - RNA, 19 nt, Artificial Sequence
  Description of Artificial Sequence: Synthetic oligonucleotide
  Sense strand starting at position 1730 of SEQ ID NO: 1881504
guuuaugucauuuguagag

SEQ ID NO: 2049629 - RNA, 19 nt, Artificial Sequence
  Description of Artificial Sequence: Synthetic oligonucleotide
  Antisense strand to SEQ ID NO: 2049628
cucuacaaaugacauaaac

SEQ ID NO: 2049630 - RNA, 19 nt, Artificial Sequence
  Description of Artificial Sequence: Synthetic oligonucleotide
  Sense strand starting at position 1742 of SEQ ID NO: 1881504
uguagagucuuacuuaaua

SEQ ID NO: 2049631 - RNA, 19 nt, Artificial Sequence
  Description of Artificial Sequence: Synthetic oligonucleotide
  Antisense strand to SEQ ID NO: 2049630
uauuaaguaagacucuaca

SEQ ID NO: 2049632 - RNA, 19 nt, Artificial Sequence
  Description of Artificial Sequence: Synthetic oligonucleotide
  Sense strand starting at position 1817 of SEQ ID NO: 1881504
aaagguugccaauagucuu

SEQ ID NO: 2049633 - RNA, 19 nt, Artificial Sequence
  Description of Artificial Sequence: Synthetic oligonucleotide
  Antisense strand to SEQ ID NO: 2049632
aagacuauuggcaaccuuu

SEQ ID NO: 2049634 - RNA, 19 nt, Artificial Sequence
  Description of Artificial Sequence: Synthetic oligonucleotide
  Sense strand starting at position 1830 of SEQ ID NO: 1881504
agucuuaacugagcuuaau

SEQ ID NO: 2049635 - RNA, 19 nt, Artificial Sequence
  Description of Artificial Sequence: Synthetic oligonucleotide
  Antisense strand to SEQ ID NO: 2049634
auuaagcucaguuaagacu

SEQ ID NO: 2049636 - RNA, 19 nt, Artificial Sequence
  Description of Artificial Sequence: Synthetic oligonucleotide
  Sense strand starting at position 2042 of SEQ ID NO: 1881504
gguguucucaaccauggca

SEQ ID NO: 2049637 - RNA, 19 nt, Artificial Sequence
  Description of Artificial Sequence: Synthetic oligonucleotide
  Antisense strand to SEQ ID NO: 2049636
ugccaugguugagaacacc

SEQ ID NO: 2049638 - RNA, 19 nt, Artificial Sequence
  Description of Artificial Sequence: Synthetic oligonucleotide
  Sense strand starting at position 2107 of SEQ ID NO: 1881504
uggagaugccucugucaag

SEQ ID NO: 2049639 - RNA, 19 nt, Artificial Sequence
  Description of Artificial Sequence: Synthetic oligonucleotide
  Antisense strand to SEQ ID NO: 2049638
cuugacagaggcaucucca

SEQ ID NO: 2049640 - RNA, 19 nt, Artificial Sequence
  Description of Artificial Sequence: Synthetic oligonucleotide
  Sense strand starting at position 2128 of SEQ ID NO: 1881504
auggcucuugggugaacau

SEQ ID NO: 2049641 - RNA, 19 nt, Artificial Sequence
  Description of Artificial Sequence: Synthetic oligonucleotide
  Antisense strand to SEQ ID NO: 2049640
auguucacccaagagccau

SEQ ID NO: 2049642 - RNA, 19 nt, Artificial Sequence
  Description of Artificial Sequence: Synthetic oligonucleotide
  Sense strand starting at position 2138 of SEQ ID NO: 1881504
ggugaacauguaugauaca

SEQ ID NO: 2049643 - RNA, 19 nt, Artificial Sequence
  Description of Artificial Sequence: Synthetic oligonucleotide
  Antisense strand to SEQ ID NO: 2049642
uguaucauacauguucacc

SEQ ID NO: 2049644 - RNA, 19 nt, Artificial Sequence
  Description of Artificial Sequence: Synthetic oligonucleotide
  Sense strand starting at position 2350 of SEQ ID NO: 1881504
caaacauaguuuccggaua

SEQ ID NO: 2049645 - RNA, 19 nt, Artificial Sequence
  Description of Artificial Sequence: Synthetic oligonucleotide
  Antisense strand to SEQ ID NO: 2049644
uauccggaaacuauguuug

SEQ ID NO: 2049646 - RNA, 19 nt, Artificial Sequence
  Description of Artificial Sequence: Synthetic oligonucleotide
  Sense strand starting at position 2355 of SEQ ID NO: 1881504
auaguuuccggauaauaau

SEQ ID NO: 2049647 - RNA, 19 nt, Artificial Sequence
  Description of Artificial Sequence: Synthetic oligonucleotide
  Antisense strand to SEQ ID NO: 2049646
auuauuauccggaaacuau

SEQ ID NO: 2049648 - RNA, 19 nt, Artificial Sequence
  Description of Artificial Sequence: Synthetic oligonucleotide
  Sense strand starting at position 2506 of SEQ ID NO: 1881504
guccuuccucacugagaau

SEQ ID NO: 2049649 - RNA, 19 nt, Artificial Sequence
  Description of Artificial Sequence: Synthetic oligonucleotide
  Antisense strand to SEQ ID NO: 2049648
auucucagugaggaaggac

SEQ ID NO: 2049650 - RNA, 19 nt, Artificial Sequence
  Description of Artificial Sequence: Synthetic oligonucleotide
  Sense strand starting at position 2543 of SEQ ID NO: 1881504
gaauacagauagucuuuga

SEQ ID NO: 2049651 - RNA, 19 nt, Artificial Sequence
  Description of Artificial Sequence: Synthetic oligonucleotide
  Antisense strand to SEQ ID NO: 2049650
ucaaagacuaucuguauuc

SEQ ID NO: 2049652 - RNA, 19 nt, Artificial Sequence
  Description of Artificial Sequence: Synthetic oligonucleotide
  Sense strand starting at position 2547 of SEQ ID NO: 1881504
acagauagucuuugaauuc

SEQ ID NO: 2049653 - RNA, 19 nt, Artificial Sequence
  Description of Artificial Sequence: Synthetic oligonucleotide
  Antisense strand to SEQ ID NO: 2049652
gaauucaaagacuaucugu

SEQ ID NO: 2049654 - RNA, 19 nt, Artificial Sequence
  Description of Artificial Sequence: Synthetic oligonucleotide
  Sense strand starting at position 2999 of SEQ ID NO: 1881504
ugcacugaauaauugugaa

SEQ ID NO: 2049655 - RNA, 19 nt, Artificial Sequence
  Description of Artificial Sequence: Synthetic oligonucleotide
  Antisense strand to SEQ ID NO: 2049654
uucacaauuauucagugca

SEQ ID NO: 2049656 - RNA, 19 nt, Artificial Sequence
  Description of Artificial Sequence: Synthetic oligonucleotide
  Sense strand starting at position 3071 of SEQ ID NO: 1881504
gguagcuaucaucacuauu

SEQ ID NO: 2049657 - RNA, 19 nt, Artificial Sequence
  Description of Artificial Sequence: Synthetic oligonucleotide
  Antisense strand to SEQ ID NO: 2049656
aauagugaugauagcuacc

SEQ ID NO: 2049658 - RNA, 19 nt, Artificial Sequence
  Description of Artificial Sequence: Synthetic oligonucleotide
  Sense strand starting at position 3261 of SEQ ID NO: 1881504
gggacuaugugacucugga

SEQ ID NO: 2049659 - RNA, 19 nt, Artificial Sequence
  Description of Artificial Sequence: Synthetic oligonucleotide
  Antisense strand to SEQ ID NO: 2049658
uccagagucacauaguccc

SEQ ID NO: 2049660 - RNA, 19 nt, Artificial Sequence
  Description of Artificial Sequence: Synthetic oligonucleotide
  Sense strand starting at position 3309 of SEQ ID NO: 1881504
gguguaaauuucucuaugu

SEQ ID NO: 2049661 - RNA, 19 nt, Artificial Sequence
  Description of Artificial Sequence: Synthetic oligonucleotide
  Antisense strand to SEQ ID NO: 2049660
acauagagaaauuuacacc

SEQ ID NO: 2049662 - RNA, 19 nt, Artificial Sequence
  Description of Artificial Sequence: Synthetic oligonucleotide
  Sense strand starting at position 3310 of SEQ ID NO: 1881504
guguaaauuucucuauguc

SEQ ID NO: 2049663 - RNA, 19 nt, Artificial Sequence
  Description of Artificial Sequence: Synthetic oligonucleotide
  Antisense strand to SEQ ID NO: 2049662
gacauagagaaauuuacac

SEQ ID NO: 2049664 - RNA, 19 nt, Artificial Sequence
  Description of Artificial Sequence: Synthetic oligonucleotide
  Sense strand starting at position 3381 of SEQ ID NO: 1881504
cucacagagcacugacauu

SEQ ID NO: 2049665 - RNA, 19 nt, Artificial Sequence
  Description of Artificial Sequence: Synthetic oligonucleotide
  Antisense strand to SEQ ID NO: 2049664
aaugucagugcucugugag

SEQ ID NO: 2049666 - RNA, 19 nt, Artificial Sequence
  Description of Artificial Sequence: Synthetic oligonucleotide
  Sense strand starting at position 3687 of SEQ ID NO: 1881504
auggauaacggaugucuaa

SEQ ID NO: 2049667 - RNA, 19 nt, Artificial Sequence
  Description of Artificial Sequence: Synthetic oligonucleotide
  Antisense strand to SEQ ID NO: 2049666
uuagacauccguuauccau

SEQ ID NO: 2049668 - RNA, 19 nt, Artificial Sequence
  Description of Artificial Sequence: Synthetic oligonucleotide
  Sense strand starting at position 3690 of SEQ ID NO: 1881504
gauaacggaugucuaauaa

SEQ ID NO: 2049669 - RNA, 19 nt, Artificial Sequence
  Description of Artificial Sequence: Synthetic oligonucleotide
  Antisense strand to SEQ ID NO: 2049668
uuauuagacauccguuauc

SEQ ID NO: 2049670 - RNA, 19 nt, Artificial Sequence
  Description of Artificial Sequence: Synthetic oligonucleotide
  Sense strand starting at position 3718 of SEQ ID NO: 1881504
auggcuugagauuauaucu

SEQ ID NO: 2049671 - RNA, 19 nt, Artificial Sequence
  Description of Artificial Sequence: Synthetic oligonucleotide
  Antisense strand to SEQ ID NO: 2049670
agauauaaucucaagccau

SEQ ID NO: 2049672 - RNA, 19 nt, Artificial Sequence
  Description of Artificial Sequence: Synthetic oligonucleotide
  Sense strand starting at position 3723 of SEQ ID NO: 1881504
uugagauuauaucugcucu

SEQ ID NO: 2049673 - RNA, 19 nt, Artificial Sequence
  Description of Artificial Sequence: Synthetic oligonucleotide
  Antisense strand to SEQ ID NO: 2049672
agagcagauauaaucucaa

SEQ ID NO: 2049674 - RNA, 19 nt, Artificial Sequence
  Description of Artificial Sequence: Synthetic oligonucleotide
  Sense strand starting at position 3725 of SEQ ID NO: 1881504
gagauuauaucugcucuug

SEQ ID NO: 2049675 - RNA, 19 nt, Artificial Sequence
  Description of Artificial Sequence: Synthetic oligonucleotide
  Antisense strand to SEQ ID NO: 2049674
caagagcagauauaaucuc

SEQ ID NO: 2049676 - RNA, 19 nt, Artificial Sequence
  Description of Artificial Sequence: Synthetic oligonucleotide
  Sense strand starting at position 3727 of SEQ ID NO: 1881504
gauuauaucugcucuugag

SEQ ID NO: 2049677 - RNA, 19 nt, Artificial Sequence
  Description of Artificial Sequence: Synthetic oligonucleotide
  Antisense strand to SEQ ID NO: 2049676
cucaagagcagauauaauc

SEQ ID NO: 2049678 - RNA, 19 nt, Artificial Sequence
  Description of Artificial Sequence: Synthetic oligonucleotide
  Sense strand starting at position 132 of SEQ ID NO: 1881505
agacaaauguugguuaugu

SEQ ID NO: 2049679 - RNA, 19 nt, Artificial Sequence
  Description of Artificial Sequence: Synthetic oligonucleotide
  Antisense strand to SEQ ID NO: 2049678
acauaaccaacauuugucu

SEQ ID NO: 2049680 - RNA, 19 nt, Artificial Sequence
  Description of Artificial Sequence: Synthetic oligonucleotide
  Sense strand starting at position 133 of SEQ ID NO: 1881505
gacaaauguugguuauguu

SEQ ID NO: 2049681 - RNA, 19 nt, Artificial Sequence
  Description of Artificial Sequence: Synthetic oligonucleotide
  Antisense strand to SEQ ID NO: 2049680
aacauaaccaacauuuguc

SEQ ID NO: 2049682 - RNA, 19 nt, Artificial Sequence
  Description of Artificial Sequence: Synthetic oligonucleotide
  Sense strand starting at position 141 of SEQ ID NO: 1881505
uugguuauguucucugaag

SEQ ID NO: 2049683 - RNA, 19 nt, Artificial Sequence
  Description of Artificial Sequence: Synthetic oligonucleotide
  Antisense strand to SEQ ID NO: 2049682
cuucagagaacauaaccaa

SEQ ID NO: 2049684 - RNA, 19 nt, Artificial Sequence
  Description of Artificial Sequence: Synthetic oligonucleotide
  Sense strand starting at position 142 of SEQ ID NO: 1881505
ugguuauguucucugaaga

SEQ ID NO: 2049685 - RNA, 19 nt, Artificial Sequence
  Description of Artificial Sequence: Synthetic oligonucleotide
  Antisense strand to SEQ ID NO: 2049684
ucuucagagaacauaacca

SEQ ID NO: 2049686 - RNA, 19 nt, Artificial Sequence
  Description of Artificial Sequence: Synthetic oligonucleotide
  Sense strand starting at position 143 of SEQ ID NO: 1881505
gguuauguucucugaagac

SEQ ID NO: 2049687 - RNA, 19 nt, Artificial Sequence
  Description of Artificial Sequence: Synthetic oligonucleotide
  Antisense strand to SEQ ID NO: 2049686
gucuucagagaacauaacc

SEQ ID NO: 2049688 - RNA, 19 nt, Artificial Sequence
  Description of Artificial Sequence: Synthetic oligonucleotide
  Sense strand starting at position 361 of SEQ ID NO: 1881505
uggagcucuuucuuauaac

SEQ ID NO: 2049689 - RNA, 19 nt, Artificial Sequence
  Description of Artificial Sequence: Synthetic oligonucleotide
  Antisense strand to SEQ ID NO: 2049688
guuauaagaaagagcucca

SEQ ID NO: 2049690 - RNA, 19 nt, Artificial Sequence
  Description of Artificial Sequence: Synthetic oligonucleotide
  Sense strand starting at position 413 of SEQ ID NO: 1881505
acaguuucuucugucauau

SEQ ID NO: 2049691 - RNA, 19 nt, Artificial Sequence
  Description of Artificial Sequence: Synthetic oligonucleotide
  Antisense strand to SEQ ID NO: 2049690
auaugacagaagaaacugu

SEQ ID NO: 2049692 - RNA, 19 nt, Artificial Sequence
  Description of Artificial Sequence: Synthetic oligonucleotide
  Sense strand starting at position 479 of SEQ ID NO: 1881505
cccagauaugcuggaaugu

SEQ ID NO: 2049693 - RNA, 19 nt, Artificial Sequence
  Description of Artificial Sequence: Synthetic oligonucleotide
  Antisense strand to SEQ ID NO: 2049692
acauuccagcauaucuggg

SEQ ID NO: 2049694 - RNA, 19 nt, Artificial Sequence
  Description of Artificial Sequence: Synthetic oligonucleotide
  Sense strand starting at position 488 of SEQ ID NO: 1881505
gcuggaauguggagacaga

SEQ ID NO: 2049695 - RNA, 19 nt, Artificial Sequence
  Description of Artificial Sequence: Synthetic oligonucleotide
  Antisense strand to SEQ ID NO: 2049694
ucugucuccacauuccagc

SEQ ID NO: 2049696 - RNA, 19 nt, Artificial Sequence
  Description of Artificial Sequence: Synthetic oligonucleotide
  Sense strand starting at position 619 of SEQ ID NO: 1881505
gcuugcacauauucugaca

SEQ ID NO: 2049697 - RNA, 19 nt, Artificial Sequence
  Description of Artificial Sequence: Synthetic oligonucleotide
  Antisense strand to SEQ ID NO: 2049696
ugucagaauaugugcaagc

SEQ ID NO: 2049698 - RNA, 19 nt, Artificial Sequence
  Description of Artificial Sequence: Synthetic oligonucleotide
  Sense strand starting at position 845 of SEQ ID NO: 1881505
ggagaauacuuguaaagaa

SEQ ID NO: 2049699 - RNA, 19 nt, Artificial Sequence
  Description of Artificial Sequence: Synthetic oligonucleotide
  Antisense strand to SEQ ID NO: 2049698
uucuuuacaaguauucucc

SEQ ID NO: 2049700 - RNA, 19 nt, Artificial Sequence
  Description of Artificial Sequence: Synthetic oligonucleotide
  Sense strand starting at position 902 of SEQ ID NO: 1881505
gcauaaggagacugcuaaa

SEQ ID NO: 2049701 - RNA, 19 nt, Artificial Sequence
  Description of Artificial Sequence: Synthetic oligonucleotide
  Antisense strand to SEQ ID NO: 2049700
uuuagcagucuccuuaugc

SEQ ID NO: 2049702 - RNA, 19 nt, Artificial Sequence
  Description of Artificial Sequence: Synthetic oligonucleotide
  Sense strand starting at position 1126 of SEQ ID NO: 1881505
ggaagcagcuggguuauuu

SEQ ID NO: 2049703 - RNA, 19 nt, Artificial Sequence
  Description of Artificial Sequence: Synthetic oligonucleotide
  Antisense strand to SEQ ID NO: 2049702
aaauaacccagcugcuucc

SEQ ID NO: 2049704 - RNA, 19 nt, Artificial Sequence
  Description of Artificial Sequence: Synthetic oligonucleotide
  Sense strand starting at position 1248 of SEQ ID NO: 1881505
ucaggugaugcuugauaaa

SEQ ID NO: 2049705 - RNA, 19 nt, Artificial Sequence
  Description of Artificial Sequence: Synthetic oligonucleotide
  Antisense strand to SEQ ID NO: 2049704
uuuaucaagcaucaccuga

SEQ ID NO: 2049706 - RNA, 19 nt, Artificial Sequence
  Description of Artificial Sequence: Synthetic oligonucleotide
  Sense strand starting at position 1475 of SEQ ID NO: 1881505
gacacuguguucuugacau

SEQ ID NO: 2049707 - RNA, 19 nt, Artificial Sequence
  Description of Artificial Sequence: Synthetic oligonucleotide
  Antisense strand to SEQ ID NO: 2049706
augucaagaacacaguguc

SEQ ID NO: 2049708 - RNA, 19 nt, Artificial Sequence
  Description of Artificial Sequence: Synthetic oligonucleotide
  Sense strand starting at position 1503 of SEQ ID NO: 1881505
uggcaucauuaugucauuu

SEQ ID NO: 2049709 - RNA, 19 nt, Artificial Sequence
  Description of Artificial Sequence: Synthetic oligonucleotide
  Antisense strand to SEQ ID NO: 2049708
aaaugacauaaugaugcca

SEQ ID NO: 2049710 - RNA, 19 nt, Artificial Sequence
  Description of Artificial Sequence: Synthetic oligonucleotide
  Sense strand starting at position 1511 of SEQ ID NO: 1881505
uuaugucauuucuuuggca

SEQ ID NO: 2049711 - RNA, 19 nt, Artificial Sequence
  Description of Artificial Sequence: Synthetic oligonucleotide
  Antisense strand to SEQ ID NO: 2049710
ugccaaagaaaugacauaa

SEQ ID NO: 2049712 - RNA, 19 nt, Artificial Sequence
  Description of Artificial Sequence: Synthetic oligonucleotide
  Sense strand starting at position 1612 of SEQ ID NO: 1881505
gucuguuucucaucucaag

SEQ ID NO: 2049713 - RNA, 19 nt, Artificial Sequence
  Description of Artificial Sequence: Synthetic oligonucleotide
  Antisense strand to SEQ ID NO: 2049712
cuugagaugagaaacagac

SEQ ID NO: 2049714 - RNA, 19 nt, Artificial Sequence
  Description of Artificial Sequence: Synthetic oligonucleotide
  Sense strand starting at position 1754 of SEQ ID NO: 1881505
uccuguaagcaaugagaca

SEQ ID NO: 2049715 - RNA, 19 nt, Artificial Sequence
  Description of Artificial Sequence: Synthetic oligonucleotide
  Antisense strand to SEQ ID NO: 2049714
ugucucauugcuuacagga

SEQ ID NO: 2049716 - RNA, 19 nt, Artificial Sequence
  Description of Artificial Sequence: Synthetic oligonucleotide
  Sense strand starting at position 1839 of SEQ ID NO: 1881505
cucuuaccucagugucaca

SEQ ID NO: 2049717 - RNA, 19 nt, Artificial Sequence
  Description of Artificial Sequence: Synthetic oligonucleotide
  Antisense strand to SEQ ID NO: 2049716
ugugacacugagguaagag

SEQ ID NO: 2049718 - RNA, 19 nt, Artificial Sequence
  Description of Artificial Sequence: Synthetic oligonucleotide
  Sense strand starting at position 1873 of SEQ ID NO: 1881505
agcucuugcccagacagau

SEQ ID NO: 2049719 - RNA, 19 nt, Artificial Sequence
  Description of Artificial Sequence: Synthetic oligonucleotide
  Antisense strand to SEQ ID NO: 2049718
aucugucugggcaagagcu

SEQ ID NO: 2049720 - RNA, 19 nt, Artificial Sequence
  Description of Artificial Sequence: Synthetic oligonucleotide
  Sense strand starting at position 1969 of SEQ ID NO: 1881505
gccugaacauucccagaau

SEQ ID NO: 2049721 - RNA, 19 nt, Artificial Sequence
  Description of Artificial Sequence: Synthetic oligonucleotide
  Antisense strand to SEQ ID NO: 2049720
auucugggaauguucaggc

SEQ ID NO: 2049722 - RNA, 19 nt, Artificial Sequence
  Description of Artificial Sequence: Synthetic oligonucleotide
  Sense strand starting at position 1981 of SEQ ID NO: 1881505
ccagaauugcauugcucac

SEQ ID NO: 2049723 - RNA, 19 nt, Artificial Sequence
  Description of Artificial Sequence: Synthetic oligonucleotide
  Antisense strand to SEQ ID NO: 2049722
gugagcaaugcaauucugg

SEQ ID NO: 2049724 - RNA, 19 nt, Artificial Sequence
  Description of Artificial Sequence: Synthetic oligonucleotide
  Sense strand starting at position 1983 of SEQ ID NO: 1881505
agaauugcauugcucacua

SEQ ID NO: 2049725 - RNA, 19 nt, Artificial Sequence
  Description of Artificial Sequence: Synthetic oligonucleotide
  Antisense strand to SEQ ID NO: 2049724
uagugagcaaugcaauucu

SEQ ID NO: 2049726 - RNA, 19 nt, Artificial Sequence
  Description of Artificial Sequence: Synthetic oligonucleotide
  Sense strand starting at position 1988 of SEQ ID NO: 1881505
ugcauugcucacuagccaa

SEQ ID NO: 2049727 - RNA, 19 nt, Artificial Sequence
  Description of Artificial Sequence: Synthetic oligonucleotide
  Antisense strand to SEQ ID NO: 2049726
uuggcuagugagcaaugca

SEQ ID NO: 2049728 - RNA, 19 nt, Artificial Sequence
  Description of Artificial Sequence: Synthetic oligonucleotide
  Sense strand starting at position 2009 of SEQ ID NO: 1881505
uguggcuuccuugacacau

SEQ ID NO: 2049729 - RNA, 19 nt, Artificial Sequence
  Description of Artificial Sequence: Synthetic oligonucleotide
  Antisense strand to SEQ ID NO: 2049728
augugucaaggaagccaca

SEQ ID NO: 2049730 - RNA, 19 nt, Artificial Sequence
  Description of Artificial Sequence: Synthetic oligonucleotide
  Sense strand starting at position 2100 of SEQ ID NO: 1881505
aguuauuguguugauccaa

SEQ ID NO: 2049731 - RNA, 19 nt, Artificial Sequence
  Description of Artificial Sequence: Synthetic oligonucleotide
  Antisense strand to SEQ ID NO: 2049730
uuggaucaacacaauaacu

SEQ ID NO: 2049732 - RNA, 19 nt, Artificial Sequence
  Description of Artificial Sequence: Synthetic oligonucleotide
  Sense strand starting at position 2419 of SEQ ID NO: 1881505
agguguccuaaacauguuu

SEQ ID NO: 2049733 - RNA, 19 nt, Artificial Sequence
  Description of Artificial Sequence: Synthetic oligonucleotide
  Antisense strand to SEQ ID NO: 2049732
aaacauguuuaggacaccu

SEQ ID NO: 2049734 - RNA, 19 nt, Artificial Sequence
  Description of Artificial Sequence: Synthetic oligonucleotide
  Sense strand starting at position 2437 of SEQ ID NO: 1881505
uuagucaucuuucuagaga

SEQ ID NO: 2049735 - RNA, 19 nt, Artificial Sequence
  Description of Artificial Sequence: Synthetic oligonucleotide
  Antisense strand to SEQ ID NO: 2049734
ucucuagaaagaugacuaa

SEQ ID NO: 2049736 - RNA, 19 nt, Artificial Sequence
  Description of Artificial Sequence: Synthetic oligonucleotide
  Sense strand starting at position 2459 of SEQ ID NO: 1881505
uagagacuaugguuauagu

SEQ ID NO: 2049737 - RNA, 19 nt, Artificial Sequence
  Description of Artificial Sequence: Synthetic oligonucleotide
  Antisense strand to SEQ ID NO: 2049736
acuauaaccauagucucua

SEQ ID NO: 2049738 - RNA, 19 nt, Artificial Sequence
  Description of Artificial Sequence: Synthetic oligonucleotide
  Sense strand starting at position 2604 of SEQ ID NO: 1881505
ucagaucuuucugcuauga

SEQ ID NO: 2049739 - RNA, 19 nt, Artificial Sequence
  Description of Artificial Sequence: Synthetic oligonucleotide
  Antisense strand to SEQ ID NO: 2049738
ucauagcagaaagaucuga

SEQ ID NO: 2049740 - RNA, 19 nt, Artificial Sequence
  Description of Artificial Sequence: Synthetic oligonucleotide
  Sense strand starting at position 2617 of SEQ ID NO: 1881505
cuaugagucccucaucguu

SEQ ID NO: 2049741 - RNA, 19 nt, Artificial Sequence
  Description of Artificial Sequence: Synthetic oligonucleotide
  Antisense strand to SEQ ID NO: 2049740
aacgaugagggacucauag

SEQ ID NO: 2049742 - RNA, 19 nt, Artificial Sequence
  Description of Artificial Sequence: Synthetic oligonucleotide
  Sense strand starting at position 2658 of SEQ ID NO: 1881505
cuagaaagcucacugucau

SEQ ID NO: 2049743 - RNA, 19 nt, Artificial Sequence
  Description of Artificial Sequence: Synthetic oligonucleotide
  Antisense strand to SEQ ID NO: 2049742
augacagugagcuuucuag

SEQ ID NO: 2049744 - RNA, 19 nt, Artificial Sequence
  Description of Artificial Sequence: Synthetic oligonucleotide
  Sense strand starting at position 2659 of SEQ ID NO: 1881505
uagaaagcucacugucaug

SEQ ID NO: 2049745 - RNA, 19 nt, Artificial Sequence
  Description of Artificial Sequence: Synthetic oligonucleotide
  Antisense strand to SEQ ID NO: 2049744
caugacagugagcuuucua

SEQ ID NO: 2049746 - RNA, 19 nt, Artificial Sequence
  Description of Artificial Sequence: Synthetic oligonucleotide
  Sense strand starting at position 2789 of SEQ ID NO: 1881505
guagaagugugcccagaag

SEQ ID NO: 2049747 - RNA, 19 nt, Artificial Sequence
  Description of Artificial Sequence: Synthetic oligonucleotide
  Antisense strand to SEQ ID NO: 2049746
cuucugggcacacuucuac

SEQ ID NO: 2049748 - RNA, 19 nt, Artificial Sequence
  Description of Artificial Sequence: Synthetic oligonucleotide
  Sense strand starting at position 3045 of SEQ ID NO: 1881505
auggaaaugugggagaaga

SEQ ID NO: 2049749 - RNA, 19 nt, Artificial Sequence
  Description of Artificial Sequence: Synthetic oligonucleotide
  Antisense strand to SEQ ID NO: 2049748
ucuucucccacauuuccau

SEQ ID NO: 2049750 - RNA, 19 nt, Artificial Sequence
  Description of Artificial Sequence: Synthetic oligonucleotide
  Sense strand starting at position 3064 of SEQ ID NO: 1881505
gaggcuauuuaagaggauu

SEQ ID NO: 2049751 - RNA, 19 nt, Artificial Sequence
  Description of Artificial Sequence: Synthetic oligonucleotide
  Antisense strand to SEQ ID NO: 2049750
aauccucuuaaauagccuc

SEQ ID NO: 2049752 - RNA, 19 nt, Artificial Sequence
  Description of Artificial Sequence: Synthetic oligonucleotide
  Sense strand starting at position 3707 of SEQ ID NO: 1881505
gggcuuuagugauuccaug

SEQ ID NO: 2049753 - RNA, 19 nt, Artificial Sequence
  Description of Artificial Sequence: Synthetic oligonucleotide
  Antisense strand to SEQ ID NO: 2049752
cauggaaucacuaaagccc

SEQ ID NO: 2049754 - RNA, 19 nt, Artificial Sequence
  Description of Artificial Sequence: Synthetic oligonucleotide
  Sense strand starting at position 3724 of SEQ ID NO: 1881505
uguuccaugugaccaagaa

SEQ ID NO: 2049755 - RNA, 19 nt, Artificial Sequence
  Description of Artificial Sequence: Synthetic oligonucleotide
  Antisense strand to SEQ ID NO: 2049754
uucuuggucacauggaaca

SEQ ID NO: 2049756 - RNA, 19 nt, Artificial Sequence
  Description of Artificial Sequence: Synthetic oligonucleotide
  Sense strand starting at position 3922 of SEQ ID NO: 1881505
gacagaugccagugguuac

SEQ ID NO: 2049757 - RNA, 19 nt, Artificial Sequence
  Description of Artificial Sequence: Synthetic oligonucleotide
  Antisense strand to SEQ ID NO: 2049756
guaaccacuggcaucuguc

SEQ ID NO: 2049758 - RNA, 19 nt, Artificial Sequence
  Description of Artificial Sequence: Synthetic oligonucleotide
  Sense strand starting at position 224 of SEQ ID NO: 1881506
ugcuaagguaagugaagaa

SEQ ID NO: 2049759 - RNA, 19 nt, Artificial Sequence
  Description of Artificial Sequence: Synthetic oligonucleotide
  Antisense strand to SEQ ID NO: 2049758
uucuucacuuaccuuagca

SEQ ID NO: 2049760 - RNA, 19 nt, Artificial Sequence
  Description of Artificial Sequence: Synthetic oligonucleotide
  Sense strand starting at position 322 of SEQ ID NO: 1881506
gcggguuuggccagauacu

SEQ ID NO: 2049761 - RNA, 19 nt, Artificial Sequence
  Description of Artificial Sequence: Synthetic oligonucleotide
  Antisense strand to SEQ ID NO: 2049760
aguaucuggccaaacccgc

SEQ ID NO: 2049762 - RNA, 19 nt, Artificial Sequence
  Description of Artificial Sequence: Synthetic oligonucleotide
  Sense strand starting at position 323 of SEQ ID NO: 1881506
cggguuuggccagauacua

SEQ ID NO: 2049763 - RNA, 19 nt, Artificial Sequence
  Description of Artificial Sequence: Synthetic oligonucleotide
  Antisense strand to SEQ ID NO: 2049762
uaguaucuggccaaacccg

SEQ ID NO: 2049764 - RNA, 19 nt, Artificial Sequence
  Description of Artificial Sequence: Synthetic oligonucleotide
  Sense strand starting at position 538 of SEQ ID NO: 1881506
agcuaauuagaaugcuuua

SEQ ID NO: 2049765 - RNA, 19 nt, Artificial Sequence
  Description of Artificial Sequence: Synthetic oligonucleotide
  Antisense strand to SEQ ID NO: 2049764
uaaagcauucuaauuagcu

SEQ ID NO: 2049766 - RNA, 19 nt, Artificial Sequence
  Description of Artificial Sequence: Synthetic oligonucleotide
  Sense strand starting at position 739 of SEQ ID NO: 1881506
auuauuugucaguggucga

SEQ ID NO: 2049767 - RNA, 19 nt, Artificial Sequence
  Description of Artificial Sequence: Synthetic oligonucleotide
  Antisense strand to SEQ ID NO: 2049766
ucgaccacugacaaauaau

SEQ ID NO: 2049768 - RNA, 19 nt, Artificial Sequence
  Description of Artificial Sequence: Synthetic oligonucleotide
  Sense strand starting at position 740 of SEQ ID NO: 1881506
uuauuugucaguggucgac

SEQ ID NO: 2049769 - RNA, 19 nt, Artificial Sequence
  Description of Artificial Sequence: Synthetic oligonucleotide
  Antisense strand to SEQ ID NO: 2049768
gucgaccacugacaaauaa

SEQ ID NO: 2049770 - RNA, 19 nt, Artificial Sequence
  Description of Artificial Sequence: Synthetic oligonucleotide
  Sense strand starting at position 742 of SEQ ID NO: 1881506
auuugucaguggucgacuu

SEQ ID NO: 2049771 - RNA, 19 nt, Artificial Sequence
  Description of Artificial Sequence: Synthetic oligonucleotide
  Antisense strand to SEQ ID NO: 2049770
aagucgaccacugacaaau

SEQ ID NO: 2049772 - RNA, 19 nt, Artificial Sequence
  Description of Artificial Sequence: Synthetic oligonucleotide
  Sense strand starting at position 1215 of SEQ ID NO: 1881506
agcugcaggcuuuaugaga

SEQ ID NO: 2049773 - RNA, 19 nt, Artificial Sequence
  Description of Artificial Sequence: Synthetic oligonucleotide
  Antisense strand to SEQ ID NO: 2049772
ucucauaaagccugcagcu

SEQ ID NO: 2049774 - RNA, 19 nt, Artificial Sequence
  Description of Artificial Sequence: Synthetic oligonucleotide
  Sense strand starting at position 1228 of SEQ ID NO: 1881506
augagaucucccuaguauu

SEQ ID NO: 2049775 - RNA, 19 nt, Artificial Sequence
  Description of Artificial Sequence: Synthetic oligonucleotide
  Antisense strand to SEQ ID NO: 2049774
aauacuagggagaucucau

SEQ ID NO: 2049776 - RNA, 19 nt, Artificial Sequence
  Description of Artificial Sequence: Synthetic oligonucleotide
  Sense strand starting at position 1259 of SEQ ID NO: 1881506
ccuggacuaaguggucaaa

SEQ ID NO: 2049777 - RNA, 19 nt, Artificial Sequence
  Description of Artificial Sequence: Synthetic oligonucleotide
  Antisense strand to SEQ ID NO: 2049776
uuugaccacuuaguccagg

SEQ ID NO: 2049778 - RNA, 19 nt, Artificial Sequence
  Description of Artificial Sequence: Synthetic oligonucleotide
  Sense strand starting at position 1262 of SEQ ID NO: 1881506
ggacuaaguggucaaacgu

SEQ ID NO: 2049779 - RNA, 19 nt, Artificial Sequence
  Description of Artificial Sequence: Synthetic oligonucleotide
  Antisense strand to SEQ ID NO: 2049778
acguuugaccacuuagucc

SEQ ID NO: 2049780 - RNA, 19 nt, Artificial Sequence
  Description of Artificial Sequence: Synthetic oligonucleotide
  Sense strand starting at position 1305 of SEQ ID NO: 1881506
gauguugaauaaucgcuga

SEQ ID NO: 2049781 - RNA, 19 nt, Artificial Sequence
  Description of Artificial Sequence: Synthetic oligonucleotide
  Antisense strand to SEQ ID NO: 2049780
ucagcgauuauucaacauc

SEQ ID NO: 2049782 - RNA, 19 nt, Artificial Sequence
  Description of Artificial Sequence: Synthetic oligonucleotide
  Sense strand starting at position 1328 of SEQ ID NO: 1881506
gugguaaaccugugacacu

SEQ ID NO: 2049783 - RNA, 19 nt, Artificial Sequence
  Description of Artificial Sequence: Synthetic oligonucleotide
  Antisense strand to SEQ ID NO: 2049782
agugucacagguuuaccac

SEQ ID NO: 2049784 - RNA, 19 nt, Artificial Sequence
  Description of Artificial Sequence: Synthetic oligonucleotide
  Sense strand starting at position 1335 of SEQ ID NO: 1881506
accugugacacugauguga

SEQ ID NO: 2049785 - RNA, 19 nt, Artificial Sequence
  Description of Artificial Sequence: Synthetic oligonucleotide
  Antisense strand to SEQ ID NO: 2049784
ucacaucagugucacaggu

SEQ ID NO: 2049786 - RNA, 19 nt, Artificial Sequence
  Description of Artificial Sequence: Synthetic oligonucleotide
  Sense strand starting at position 1343 of SEQ ID NO: 1881506
cacugaugugauggaugua

SEQ ID NO: 2049787 - RNA, 19 nt, Artificial Sequence
  Description of Artificial Sequence: Synthetic oligonucleotide
  Antisense strand to SEQ ID NO: 2049786
uacauccaucacaucagug

SEQ ID NO: 2049788 - RNA, 19 nt, Artificial Sequence
  Description of Artificial Sequence: Synthetic oligonucleotide
  Sense strand starting at position 1346 of SEQ ID NO: 1881506
ugaugugauggauguagga

SEQ ID NO: 2049789 - RNA, 19 nt, Artificial Sequence
  Description of Artificial Sequence: Synthetic oligonucleotide
  Antisense strand to SEQ ID NO: 2049788
uccuacauccaucacauca

SEQ ID NO: 2049790 - RNA, 19 nt, Artificial Sequence
  Description of Artificial Sequence: Synthetic oligonucleotide
  Sense strand starting at position 1348 of SEQ ID NO: 1881506
augugauggauguaggagu

SEQ ID NO: 2049791 - RNA, 19 nt, Artificial Sequence
  Description of Artificial Sequence: Synthetic oligonucleotide
  Antisense strand to SEQ ID NO: 2049790
acuccuacauccaucacau

SEQ ID NO: 2049792 - RNA, 19 nt, Artificial Sequence
  Description of Artificial Sequence: Synthetic oligonucleotide
  Sense strand starting at position 1434 of SEQ ID NO: 1881506
cuguuauucccaggacauc

SEQ ID NO: 2049793 - RNA, 19 nt, Artificial Sequence
  Description of Artificial Sequence: Synthetic oligonucleotide
  Antisense strand to SEQ ID NO: 2049792
gauguccugggaauaacag

SEQ ID NO: 2049794 - RNA, 19 nt, Artificial Sequence
  Description of Artificial Sequence: Synthetic oligonucleotide
  Sense strand starting at position 1435 of SEQ ID NO: 1881506
uguuauucccaggacaucu

SEQ ID NO: 2049795 - RNA, 19 nt, Artificial Sequence
  Description of Artificial Sequence: Synthetic oligonucleotide
  Antisense strand to SEQ ID NO: 2049794
agauguccugggaauaaca

SEQ ID NO: 2049796 - RNA, 19 nt, Artificial Sequence
  Description of Artificial Sequence: Synthetic oligonucleotide
  Sense strand starting at position 1507 of SEQ ID NO: 1881506
uucuuuguagcagagucau

SEQ ID NO: 2049797 - RNA, 19 nt, Artificial Sequence
  Description of Artificial Sequence: Synthetic oligonucleotide
  Antisense strand to SEQ ID NO: 2049796
augacucugcuacaaagaa

SEQ ID NO: 2049798 - RNA, 19 nt, Artificial Sequence
  Description of Artificial Sequence: Synthetic oligonucleotide
  Sense strand starting at position 1521 of SEQ ID NO: 1881506
gucauuuccuguuuaauuc

SEQ ID NO: 2049799 - RNA, 19 nt, Artificial Sequence
  Description of Artificial Sequence: Synthetic oligonucleotide
  Antisense strand to SEQ ID NO: 2049798
gaauuaaacaggaaaugac

SEQ ID NO: 2049800 - RNA, 19 nt, Artificial Sequence
  Description of Artificial Sequence: Synthetic oligonucleotide
  Sense strand starting at position 1531 of SEQ ID NO: 1881506
guuuaauucucuccaaagu

SEQ ID NO: 2049801 - RNA, 19 nt, Artificial Sequence
  Description of Artificial Sequence: Synthetic oligonucleotide
  Antisense strand to SEQ ID NO: 2049800
acuuuggagagaauuaaac

SEQ ID NO: 2049802 - RNA, 19 nt, Artificial Sequence
  Description of Artificial Sequence: Synthetic oligonucleotide
  Sense strand starting at position 1680 of SEQ ID NO: 1881506
uaguccaugugaucuggaa

SEQ ID NO: 2049803 - RNA, 19 nt, Artificial Sequence
  Description of Artificial Sequence: Synthetic oligonucleotide
  Antisense strand to SEQ ID NO: 2049802
uuccagaucacauggacua

SEQ ID NO: 2049804 - RNA, 19 nt, Artificial Sequence
  Description of Artificial Sequence: Synthetic oligonucleotide
  Sense strand starting at position 1684 of SEQ ID NO: 1881506
ccaugugaucuggaaguga

SEQ ID NO: 2049805 - RNA, 19 nt, Artificial Sequence
  Description of Artificial Sequence: Synthetic oligonucleotide
  Antisense strand to SEQ ID NO: 2049804
ucacuuccagaucacaugg

SEQ ID NO: 2049806 - RNA, 19 nt, Artificial Sequence
  Description of Artificial Sequence: Synthetic oligonucleotide
  Sense strand starting at position 1688 of SEQ ID NO: 1881506
gugaucuggaagugaccaa

SEQ ID NO: 2049807 - RNA, 19 nt, Artificial Sequence
  Description of Artificial Sequence: Synthetic oligonucleotide
  Antisense strand to SEQ ID NO: 2049806
uuggucacuuccagaucac

SEQ ID NO: 2049808 - RNA, 19 nt, Artificial Sequence
  Description of Artificial Sequence: Synthetic oligonucleotide
  Sense strand starting at position 2048 of SEQ ID NO: 1881506
acucaaaccuguguuaaua

SEQ ID NO: 2049809 - RNA, 19 nt, Artificial Sequence
  Description of Artificial Sequence: Synthetic oligonucleotide
  Antisense strand to SEQ ID NO: 2049808
uauuaacacagguuugagu

SEQ ID NO: 2049810 - RNA, 19 nt, Artificial Sequence
  Description of Artificial Sequence: Synthetic oligonucleotide
  Sense strand starting at position 2060 of SEQ ID NO: 1881506
guuaauagcccagacucuu

SEQ ID NO: 2049811 - RNA, 19 nt, Artificial Sequence
  Description of Artificial Sequence: Synthetic oligonucleotide
  Antisense strand to SEQ ID NO: 2049810
aagagucugggcuauuaac

SEQ ID NO: 2049812 - RNA, 19 nt, Artificial Sequence
  Description of Artificial Sequence: Synthetic oligonucleotide
  Sense strand starting at position 2234 of SEQ ID NO: 1881506
guaucauacuuacuuaugu

SEQ ID NO: 2049813 - RNA, 19 nt, Artificial Sequence
  Description of Artificial Sequence: Synthetic oligonucleotide
  Antisense strand to SEQ ID NO: 2049812
acauaaguaaguaugauac

SEQ ID NO: 2049814 - RNA, 19 nt, Artificial Sequence
  Description of Artificial Sequence: Synthetic oligonucleotide
  Sense strand starting at position 2272 of SEQ ID NO: 1881506
guuguaaguguucaggaaa

SEQ ID NO: 2049815 - RNA, 19 nt, Artificial Sequence
  Description of Artificial Sequence: Synthetic oligonucleotide
  Antisense strand to SEQ ID NO: 2049814
uuuccugaacacuuacaac

SEQ ID NO: 2049816 - RNA, 19 nt, Artificial Sequence
  Description of Artificial Sequence: Synthetic oligonucleotide
  Sense strand starting at position 2361 of SEQ ID NO: 1881506
gcuugaauugcauggaauu

SEQ ID NO: 2049817 - RNA, 19 nt, Artificial Sequence
  Description of Artificial Sequence: Synthetic oligonucleotide
  Antisense strand to SEQ ID NO: 2049816
aauuccaugcaauucaagc

SEQ ID NO: 2049818 - RNA, 19 nt, Artificial Sequence
  Description of Artificial Sequence: Synthetic oligonucleotide
  Sense strand starting at position 2402 of SEQ ID NO: 1881506
ucugcuuuagaauagaucu

SEQ ID NO: 2049819 - RNA, 19 nt, Artificial Sequence
  Description of Artificial Sequence: Synthetic oligonucleotide
  Antisense strand to SEQ ID NO: 2049818
agaucuauucuaaagcaga

SEQ ID NO: 2049820 - RNA, 19 nt, Artificial Sequence
  Description of Artificial Sequence: Synthetic oligonucleotide
  Sense strand starting at position 2409 of SEQ ID NO: 1881506
uagaauagaucugagaaug

SEQ ID NO: 2049821 - RNA, 19 nt, Artificial Sequence
  Description of Artificial Sequence: Synthetic oligonucleotide
  Antisense strand to SEQ ID NO: 2049820
cauucucagaucuauucua

SEQ ID NO: 2049822 - RNA, 19 nt, Artificial Sequence
  Description of Artificial Sequence: Synthetic oligonucleotide
  Sense strand starting at position 2537 of SEQ ID NO: 1881506
ugcuauggccuacaggaau

SEQ ID NO: 2049823 - RNA, 19 nt, Artificial Sequence
  Description of Artificial Sequence: Synthetic oligonucleotide
  Antisense strand to SEQ ID NO: 2049822
auuccuguaggccauagca

SEQ ID NO: 2049824 - RNA, 19 nt, Artificial Sequence
  Description of Artificial Sequence: Synthetic oligonucleotide
  Sense strand starting at position 2939 of SEQ ID NO: 1881506
guuaaagugucccuaacaa

SEQ ID NO: 2049825 - RNA, 19 nt, Artificial Sequence
  Description of Artificial Sequence: Synthetic oligonucleotide
  Antisense strand to SEQ ID NO: 2049824
uuguuagggacacuuuaac

SEQ ID NO: 2049826 - RNA, 19 nt, Artificial Sequence
  Description of Artificial Sequence: Synthetic oligonucleotide
  Sense strand starting at position 2972 of SEQ ID NO: 1881506
acaauuagcugcuuauuga

SEQ ID NO: 2049827 - RNA, 19 nt, Artificial Sequence
  Description of Artificial Sequence: Synthetic oligonucleotide
  Antisense strand to SEQ ID NO: 2049826
ucaauaagcagcuaauugu

SEQ ID NO: 2049828 - RNA, 19 nt, Artificial Sequence
  Description of Artificial Sequence: Synthetic oligonucleotide
  Sense strand starting at position 3507 of SEQ ID NO: 1881506
uugauaaguugagauuucu

SEQ ID NO: 2049829 - RNA, 19 nt, Artificial Sequence
  Description of Artificial Sequence: Synthetic oligonucleotide
  Antisense strand to SEQ ID NO: 2049828
agaaaucucaacuuaucaa

SEQ ID NO: 2049830 - RNA, 19 nt, Artificial Sequence
  Description of Artificial Sequence: Synthetic oligonucleotide
  Sense strand starting at position 3516 of SEQ ID NO: 1881506
ugagauuucuuagaaaugc

SEQ ID NO: 2049831 - RNA, 19 nt, Artificial Sequence
  Description of Artificial Sequence: Synthetic oligonucleotide
  Antisense strand to SEQ ID NO: 2049830
gcauuucuaagaaaucuca

SEQ ID NO: 2049832 - RNA, 19 nt, Artificial Sequence
  Description of Artificial Sequence: Synthetic oligonucleotide
  Sense strand starting at position 3547 of SEQ ID NO: 1881506
acaguagaauaggcuauau

SEQ ID NO: 2049833 - RNA, 19 nt, Artificial Sequence
  Description of Artificial Sequence: Synthetic oligonucleotide
  Antisense strand to SEQ ID NO: 2049832
auauagccuauucuacugu

SEQ ID NO: 2049834 - RNA, 19 nt, Artificial Sequence
  Description of Artificial Sequence: Synthetic oligonucleotide
  Sense strand starting at position 3772 of SEQ ID NO: 1881506
uuuagucuugguuaacagu

SEQ ID NO: 2049835 - RNA, 19 nt, Artificial Sequence
  Description of Artificial Sequence: Synthetic oligonucleotide
  Antisense strand to SEQ ID NO: 2049834
acuguuaaccaagacuaaa

SEQ ID NO: 2049836 - RNA, 19 nt, Artificial Sequence
  Description of Artificial Sequence: Synthetic oligonucleotide
  Sense strand starting at position 3780 of SEQ ID NO: 1881506
ugguuaacaguauggcaau

SEQ ID NO: 2049837 - RNA, 19 nt, Artificial Sequence
  Description of Artificial Sequence: Synthetic oligonucleotide
  Antisense strand to SEQ ID NO: 2049836
auugccauacuguuaacca

SEQ ID NO: 2049838 - RNA, 19 nt, Artificial Sequence
  Description of Artificial Sequence: Synthetic oligonucleotide
  Sense strand starting at position 105 of SEQ ID NO: 1881507
gaggaacauugugcaauau

SEQ ID NO: 2049839 - RNA, 19 nt, Artificial Sequence
  Description of Artificial Sequence: Synthetic oligonucleotide
  Antisense strand to SEQ ID NO: 2049838
auauugcacaauguuccuc

SEQ ID NO: 2049840 - RNA, 19 nt, Artificial Sequence
  Description of Artificial Sequence: Synthetic oligonucleotide
  Sense strand starting at position 333 of SEQ ID NO: 1881507
agccuaacgaaaugugaca

SEQ ID NO: 2049841 - RNA, 19 nt, Artificial Sequence
  Description of Artificial Sequence: Synthetic oligonucleotide
  Antisense strand to SEQ ID NO: 2049840
ugucacauuucguuaggcu

SEQ ID NO: 2049842 - RNA, 19 nt, Artificial Sequence
  Description of Artificial Sequence: Synthetic oligonucleotide
  Sense strand starting at position 628 of SEQ ID NO: 1881507
ugcaaugguuaauucugaa

SEQ ID NO: 2049843 - RNA, 19 nt, Artificial Sequence
  Description of Artificial Sequence: Synthetic oligonucleotide
  Antisense strand to SEQ ID NO: 2049842
uucagaauuaaccauugca

SEQ ID NO: 2049844 - RNA, 19 nt, Artificial Sequence
  Description of Artificial Sequence: Synthetic oligonucleotide
  Sense strand starting at position 652 of SEQ ID NO: 1881507
cuuugaucuguugaauucu

SEQ ID NO: 2049845 - RNA, 19 nt, Artificial Sequence
  Description of Artificial Sequence: Synthetic oligonucleotide
  Antisense strand to SEQ ID NO: 2049844
agaauucaacagaucaaag

SEQ ID NO: 2049846 - RNA, 19 nt, Artificial Sequence
  Description of Artificial Sequence: Synthetic oligonucleotide
  Sense strand starting at position 671 of SEQ ID NO: 1881507
cagccuugccaguagaaca

SEQ ID NO: 2049847 - RNA, 19 nt, Artificial Sequence
  Description of Artificial Sequence: Synthetic oligonucleotide
  Antisense strand to SEQ ID NO: 2049846
uguucuacuggcaaggcug

SEQ ID NO: 2049848 - RNA, 19 nt, Artificial Sequence
  Description of Artificial Sequence: Synthetic oligonucleotide
  Sense strand starting at position 808 of SEQ ID NO: 1881507
acgugcucucugcucaauu

SEQ ID NO: 2049849 - RNA, 19 nt, Artificial Sequence
  Description of Artificial Sequence: Synthetic oligonucleotide
  Antisense strand to SEQ ID NO: 2049848
aauugagcagagagcacgu

SEQ ID NO: 2049850 - RNA, 19 nt, Artificial Sequence
  Description of Artificial Sequence: Synthetic oligonucleotide
  Sense strand starting at position 930 of SEQ ID NO: 1881507
gcuauauuccauuaagcag

SEQ ID NO: 2049851 - RNA, 19 nt, Artificial Sequence
  Description of Artificial Sequence: Synthetic oligonucleotide
  Antisense strand to SEQ ID NO: 2049850
cugcuuaauggaauauagc

SEQ ID NO: 2049852 - RNA, 19 nt, Artificial Sequence
  Description of Artificial Sequence: Synthetic oligonucleotide
  Sense strand starting at position 1050 of SEQ ID NO: 1881507
ggagaucagugccuugaac

SEQ ID NO: 2049853 - RNA, 19 nt, Artificial Sequence
  Description of Artificial Sequence: Synthetic oligonucleotide
  Antisense strand to SEQ ID NO: 2049852
guucaaggcacugaucucc

SEQ ID NO: 2049854 - RNA, 19 nt, Artificial Sequence
  Description of Artificial Sequence: Synthetic oligonucleotide
  Sense strand starting at position 1052 of SEQ ID NO: 1881507
agaucagugccuugaacau

SEQ ID NO: 2049855 - RNA, 19 nt, Artificial Sequence
  Description of Artificial Sequence: Synthetic oligonucleotide
  Antisense strand to SEQ ID NO: 2049854
auguucaaggcacugaucu

SEQ ID NO: 2049856 - RNA, 19 nt, Artificial Sequence
  Description of Artificial Sequence: Synthetic oligonucleotide
  Sense strand starting at position 1163 of SEQ ID NO: 1881507
ucucaaugccaugguaaga

SEQ ID NO: 2049857 - RNA, 19 nt, Artificial Sequence
  Description of Artificial Sequence: Synthetic oligonucleotide
  Antisense strand to SEQ ID NO: 2049856
ucuuaccauggcauugaga

SEQ ID NO: 2049858 - RNA, 19 nt, Artificial Sequence
  Description of Artificial Sequence: Synthetic oligonucleotide
  Sense strand starting at position 1261 of SEQ ID NO: 1881507
auuugauagucccaggaua

SEQ ID NO: 2049859 - RNA, 19 nt, Artificial Sequence
  Description of Artificial Sequence: Synthetic oligonucleotide
  Antisense strand to SEQ ID NO: 2049858
uauccugggacuaucaaau

SEQ ID NO: 2049860 - RNA, 19 nt, Artificial Sequence
  Description of Artificial Sequence: Synthetic oligonucleotide
  Sense strand starting at position 1263 of SEQ ID NO: 1881507
uugauagucccaggauauu

SEQ ID NO: 2049861 - RNA, 19 nt, Artificial Sequence
  Description of Artificial Sequence: Synthetic oligonucleotide
  Antisense strand to SEQ ID NO: 2049860
aauauccugggacuaucaa

SEQ ID NO: 2049862 - RNA, 19 nt, Artificial Sequence
  Description of Artificial Sequence: Synthetic oligonucleotide
  Sense strand starting at position 1305 of SEQ ID NO: 1881507
gccagauugguacauguug

SEQ ID NO: 2049863 - RNA, 19 nt, Artificial Sequence
  Description of Artificial Sequence: Synthetic oligonucleotide
  Antisense strand to SEQ ID NO: 2049862
caacauguaccaaucuggc

SEQ ID NO: 2049864 - RNA, 19 nt, Artificial Sequence
  Description of Artificial Sequence: Synthetic oligonucleotide
  Sense strand starting at position 1483 of SEQ ID NO: 1881507
guuaacagagcuuauugua

SEQ ID NO: 2049865 - RNA, 19 nt, Artificial Sequence
  Description of Artificial Sequence: Synthetic oligonucleotide
  Antisense strand to SEQ ID NO: 2049864
uacaauaagcucuguuaac

SEQ ID NO: 2049866 - RNA, 19 nt, Artificial Sequence
  Description of Artificial Sequence: Synthetic oligonucleotide
  Sense strand starting at position 1499 of SEQ ID NO: 1881507
guaagauuaccaggaaagu

SEQ ID NO: 2049867 - RNA, 19 nt, Artificial Sequence
  Description of Artificial Sequence: Synthetic oligonucleotide
  Antisense strand to SEQ ID NO: 2049866
acuuuccugguaaucuuac

SEQ ID NO: 2049868 - RNA, 19 nt, Artificial Sequence
  Description of Artificial Sequence: Synthetic oligonucleotide
  Sense strand starting at position 1576 of SEQ ID NO: 1881507
auggcuauuugggacacaa

SEQ ID NO: 2049869 - RNA, 19 nt, Artificial Sequence
  Description of Artificial Sequence: Synthetic oligonucleotide
  Antisense strand to SEQ ID NO: 2049868
uugugucccaaauagccau

SEQ ID NO: 2049870 - RNA, 19 nt, Artificial Sequence
  Description of Artificial Sequence: Synthetic oligonucleotide
  Sense strand starting at position 1631 of SEQ ID NO: 1881507
gcuggcugugcuccugauu

SEQ ID NO: 2049871 - RNA, 19 nt, Artificial Sequence
  Description of Artificial Sequence: Synthetic oligonucleotide
  Antisense strand to SEQ ID NO: 2049870
aaucaggagcacagccagc

SEQ ID NO: 2049872 - RNA, 19 nt, Artificial Sequence
  Description of Artificial Sequence: Synthetic oligonucleotide
  Sense strand starting at position 1737 of SEQ ID NO: 1881507
uuacuacuacgauggaaua

SEQ ID NO: 2049873 - RNA, 19 nt, Artificial Sequence
  Description of Artificial Sequence: Synthetic oligonucleotide
  Antisense strand to SEQ ID NO: 2049872
uauuccaucguaguaguaa

SEQ ID NO: 2049874 - RNA, 19 nt, Artificial Sequence
  Description of Artificial Sequence: Synthetic oligonucleotide
  Sense strand starting at position 1907 of SEQ ID NO: 1881507
aagaguuucugauuggacu

SEQ ID NO: 2049875 - RNA, 19 nt, Artificial Sequence
  Description of Artificial Sequence: Synthetic oligonucleotide
  Antisense strand to SEQ ID NO: 2049874
aguccaaucagaaacucuu

SEQ ID NO: 2049876 - RNA, 19 nt, Artificial Sequence
  Description of Artificial Sequence: Synthetic oligonucleotide
  Sense strand starting at position 1908 of SEQ ID NO: 1881507
agaguuucugauuggacuc

SEQ ID NO: 2049877 - RNA, 19 nt, Artificial Sequence
  Description of Artificial Sequence: Synthetic oligonucleotide
  Antisense strand to SEQ ID NO: 2049876
gaguccaaucagaaacucu

SEQ ID NO: 2049878 - RNA, 19 nt, Artificial Sequence
  Description of Artificial Sequence: Synthetic oligonucleotide
  Sense strand starting at position 2422 of SEQ ID NO: 1881507
gcaugcuuucuguuuccuu

SEQ ID NO: 2049879 - RNA, 19 nt, Artificial Sequence
  Description of Artificial Sequence: Synthetic oligonucleotide
  Antisense strand to SEQ ID NO: 2049878
aaggaaacagaaagcaugc

SEQ ID NO: 2049880 - RNA, 19 nt, Artificial Sequence
  Description of Artificial Sequence: Synthetic oligonucleotide
  Sense strand starting at position 2484 of SEQ ID NO: 1881507
cugguuuauggugggaaua

SEQ ID NO: 2049881 - RNA, 19 nt, Artificial Sequence
  Description of Artificial Sequence: Synthetic oligonucleotide
  Antisense strand to SEQ ID NO: 2049880
uauucccaccauaaaccag

SEQ ID NO: 2049882 - RNA, 19 nt, Artificial Sequence
  Description of Artificial Sequence: Synthetic oligonucleotide
  Sense strand starting at position 2485 of SEQ ID NO: 1881507
ugguuuauggugggaauau

SEQ ID NO: 2049883 - RNA, 19 nt, Artificial Sequence
  Description of Artificial Sequence: Synthetic oligonucleotide
  Antisense strand to SEQ ID NO: 2049882
auauucccaccauaaacca

SEQ ID NO: 2049884 - RNA, 19 nt, Artificial Sequence
  Description of Artificial Sequence: Synthetic oligonucleotide
  Sense strand starting at position 2497 of SEQ ID NO: 1881507
ggaauaugaguaggguugu

SEQ ID NO: 2049885 - RNA, 19 nt, Artificial Sequence
  Description of Artificial Sequence: Synthetic oligonucleotide
  Antisense strand to SEQ ID NO: 2049884
acaacccuacucauauucc

SEQ ID NO: 2049886 - RNA, 19 nt, Artificial Sequence
  Description of Artificial Sequence: Synthetic oligonucleotide
  Sense strand starting at position 2596 of SEQ ID NO: 1881507
auuagaguccaucagcaga

SEQ ID NO: 2049887 - RNA, 19 nt, Artificial Sequence
  Description of Artificial Sequence: Synthetic oligonucleotide
  Antisense strand to SEQ ID NO: 2049886
ucugcugauggacucuaau

SEQ ID NO: 2049888 - RNA, 19 nt, Artificial Sequence
  Description of Artificial Sequence: Synthetic oligonucleotide
  Sense strand starting at position 2644 of SEQ ID NO: 1881507
ucacguguaagaugaucaa

SEQ ID NO: 2049889 - RNA, 19 nt, Artificial Sequence
  Description of Artificial Sequence: Synthetic oligonucleotide
  Antisense strand to SEQ ID NO: 2049888
uugaucaucuuacacguga

SEQ ID NO: 2049890 - RNA, 19 nt, Artificial Sequence
  Description of Artificial Sequence: Synthetic oligonucleotide
  Sense strand starting at position 2648 of SEQ ID NO: 1881507
guguaagaugaucaacuuc

SEQ ID NO: 2049891 - RNA, 19 nt, Artificial Sequence
  Description of Artificial Sequence: Synthetic oligonucleotide
  Antisense strand to SEQ ID NO: 2049890
gaaguugaucaucuuacac

SEQ ID NO: 2049892 - RNA, 19 nt, Artificial Sequence
  Description of Artificial Sequence: Synthetic oligonucleotide
  Sense strand starting at position 2723 of SEQ ID NO: 1881507
guggaaaccugguuaucca

SEQ ID NO: 2049893 - RNA, 19 nt, Artificial Sequence
  Description of Artificial Sequence: Synthetic oligonucleotide
  Antisense strand to SEQ ID NO: 2049892
uggauaaccagguuuccac

SEQ ID NO: 2049894 - RNA, 19 nt, Artificial Sequence
  Description of Artificial Sequence: Synthetic oligonucleotide
  Sense strand starting at position 3063 of SEQ ID NO: 1881507
acggauacuccuuaacagu

SEQ ID NO: 2049895 - RNA, 19 nt, Artificial Sequence
  Description of Artificial Sequence: Synthetic oligonucleotide
  Antisense strand to SEQ ID NO: 2049894
acuguuaaggaguauccgu

SEQ ID NO: 2049896 - RNA, 19 nt, Artificial Sequence
  Description of Artificial Sequence: Synthetic oligonucleotide
  Sense strand starting at position 3160 of SEQ ID NO: 1881507
ggcucuuauuugguuugca

SEQ ID NO: 2049897 - RNA, 19 nt, Artificial Sequence
  Description of Artificial Sequence: Synthetic oligonucleotide
  Antisense strand to SEQ ID NO: 2049896
ugcaaaccaaauaagagcc

SEQ ID NO: 2049898 - RNA, 19 nt, Artificial Sequence
  Description of Artificial Sequence: Synthetic oligonucleotide
  Sense strand starting at position 3161 of SEQ ID NO: 1881507
gcucuuauuugguuugcaa

SEQ ID NO: 2049899 - RNA, 19 nt, Artificial Sequence
  Description of Artificial Sequence: Synthetic oligonucleotide
  Antisense strand to SEQ ID NO: 2049898
uugcaaaccaaauaagagc

SEQ ID NO: 2049900 - RNA, 19 nt, Artificial Sequence
  Description of Artificial Sequence: Synthetic oligonucleotide
  Sense strand starting at position 3163 of SEQ ID NO: 1881507
ucuuauuugguuugcaauu

SEQ ID NO: 2049901 - RNA, 19 nt, Artificial Sequence
  Description of Artificial Sequence: Synthetic oligonucleotide
  Antisense strand to SEQ ID NO: 2049900
aauugcaaaccaaauaaga

SEQ ID NO: 2049902 - RNA, 19 nt, Artificial Sequence
  Description of Artificial Sequence: Synthetic oligonucleotide
  Sense strand starting at position 3240 of SEQ ID NO: 1881507
acaaucauuggugacugua

SEQ ID NO: 2049903 - RNA, 19 nt, Artificial Sequence
  Description of Artificial Sequence: Synthetic oligonucleotide
  Antisense strand to SEQ ID NO: 2049902
uacagucaccaaugauugu

SEQ ID NO: 2049904 - RNA, 19 nt, Artificial Sequence
  Description of Artificial Sequence: Synthetic oligonucleotide
  Sense strand starting at position 3285 of SEQ ID NO: 1881507
agagguagacugggugaau

SEQ ID NO: 2049905 - RNA, 19 nt, Artificial Sequence
  Description of Artificial Sequence: Synthetic oligonucleotide
  Antisense strand to SEQ ID NO: 2049904
auucacccagucuaccucu

SEQ ID NO: 2049906 - RNA, 19 nt, Artificial Sequence
  Description of Artificial Sequence: Synthetic oligonucleotide
  Sense strand starting at position 3286 of SEQ ID NO: 1881507
gagguagacugggugaauu

SEQ ID NO: 2049907 - RNA, 19 nt, Artificial Sequence
  Description of Artificial Sequence: Synthetic oligonucleotide
  Antisense strand to SEQ ID NO: 2049906
aauucacccagucuaccuc

SEQ ID NO: 2049908 - RNA, 19 nt, Artificial Sequence
  Description of Artificial Sequence: Synthetic oligonucleotide
  Sense strand starting at position 3397 of SEQ ID NO: 1881507
ucaaguuaauagcuaagaa

SEQ ID NO: 2049909 - RNA, 19 nt, Artificial Sequence
  Description of Artificial Sequence: Synthetic oligonucleotide
  Antisense strand to SEQ ID NO: 2049908
uucuuagcuauuaacuuga

SEQ ID NO: 2049910 - RNA, 19 nt, Artificial Sequence
  Description of Artificial Sequence: Synthetic oligonucleotide
  Sense strand starting at position 3417 of SEQ ID NO: 1881507
auaucaaucuagguacugu

SEQ ID NO: 2049911 - RNA, 19 nt, Artificial Sequence
  Description of Artificial Sequence: Synthetic oligonucleotide
  Antisense strand to SEQ ID NO: 2049910
acaguaccuagauugauau

SEQ ID NO: 2049912 - RNA, 19 nt, Artificial Sequence
  Description of Artificial Sequence: Synthetic oligonucleotide
  Sense strand starting at position 3632 of SEQ ID NO: 1881507
cagcaaauuuggcuggcau

SEQ ID NO: 2049913 - RNA, 19 nt, Artificial Sequence
  Description of Artificial Sequence: Synthetic oligonucleotide
  Antisense strand to SEQ ID NO: 2049912
augccagccaaauuugcug

SEQ ID NO: 2049914 - RNA, 19 nt, Artificial Sequence
  Description of Artificial Sequence: Synthetic oligonucleotide
  Sense strand starting at position 3633 of SEQ ID NO: 1881507
agcaaauuuggcuggcauu

SEQ ID NO: 2049915 - RNA, 19 nt, Artificial Sequence
  Description of Artificial Sequence: Synthetic oligonucleotide
  Antisense strand to SEQ ID NO: 2049914
aaugccagccaaauuugcu

SEQ ID NO: 2049916 - RNA, 19 nt, Artificial Sequence
  Description of Artificial Sequence: Synthetic oligonucleotide
  Sense strand starting at position 3895 of SEQ ID NO: 1881507
guagcaguauuugcuacaa

SEQ ID NO: 2049917 - RNA, 19 nt, Artificial Sequence
  Description of Artificial Sequence: Synthetic oligonucleotide
  Antisense strand to SEQ ID NO: 2049916
uuguagcaaauacugcuac

SEQ ID NO: 2049918 - RNA, 19 nt, Artificial Sequence
  Description of Artificial Sequence: Synthetic oligonucleotide
  Sense strand starting at position 109 of SEQ ID NO: 1881508
acaaauauuguggguauau

SEQ ID NO: 2049919 - RNA, 19 nt, Artificial Sequence
  Description of Artificial Sequence: Synthetic oligonucleotide
  Antisense strand to SEQ ID NO: 2049918
auauacccacaauauuugu

SEQ ID NO: 2049920 - RNA, 19 nt, Artificial Sequence
  Description of Artificial Sequence: Synthetic oligonucleotide
  Sense strand starting at position 110 of SEQ ID NO: 1881508
caaauauuguggguauaua

SEQ ID NO: 2049921 - RNA, 19 nt, Artificial Sequence
  Description of Artificial Sequence: Synthetic oligonucleotide
  Antisense strand to SEQ ID NO: 2049920
uauauacccacaauauuug

SEQ ID NO: 2049922 - RNA, 19 nt, Artificial Sequence
  Description of Artificial Sequence: Synthetic oligonucleotide
  Sense strand starting at position 402 of SEQ ID NO: 1881508
ucagucucagaaugagguu

SEQ ID NO: 2049923 - RNA, 19 nt, Artificial Sequence
  Description of Artificial Sequence: Synthetic oligonucleotide
  Antisense strand to SEQ ID NO: 2049922
aaccucauucugagacuga

SEQ ID NO: 2049924 - RNA, 19 nt, Artificial Sequence
  Description of Artificial Sequence: Synthetic oligonucleotide
  Sense strand starting at position 565 of SEQ ID NO: 1881508
ccauuuaaauuugguguca

SEQ ID NO: 2049925 - RNA, 19 nt, Artificial Sequence
  Description of Artificial Sequence: Synthetic oligonucleotide
  Antisense strand to SEQ ID NO: 2049924
ugacaccaaauuuaaaugg

SEQ ID NO: 2049926 - RNA, 19 nt, Artificial Sequence
  Description of Artificial Sequence: Synthetic oligonucleotide
  Sense strand starting at position 567 of SEQ ID NO: 1881508
auuuaaauuuggugucagu

SEQ ID NO: 2049927 - RNA, 19 nt, Artificial Sequence
  Description of Artificial Sequence: Synthetic oligonucleotide
  Antisense strand to SEQ ID NO: 2049926
acugacaccaaauuuaaau

SEQ ID NO: 2049928 - RNA, 19 nt, Artificial Sequence
  Description of Artificial Sequence: Synthetic oligonucleotide
  Sense strand starting at position 615 of SEQ ID NO: 1881508
acagcagaaugcuuacagu

SEQ ID NO: 2049929 - RNA, 19 nt, Artificial Sequence
  Description of Artificial Sequence: Synthetic oligonucleotide
  Antisense strand to SEQ ID NO: 2049928
acuguaagcauucugcugu

SEQ ID NO: 2049930 - RNA, 19 nt, Artificial Sequence
  Description of Artificial Sequence: Synthetic oligonucleotide
  Sense strand starting at position 662 of SEQ ID NO: 1881508
cccgcuguauuauuuaaau

SEQ ID NO: 2049931 - RNA, 19 nt, Artificial Sequence
  Description of Artificial Sequence: Synthetic oligonucleotide
  Antisense strand to SEQ ID NO: 2049930
auuuaaauaauacagcggg

SEQ ID NO: 2049932 - RNA, 19 nt, Artificial Sequence
  Description of Artificial Sequence: Synthetic oligonucleotide
  Sense strand starting at position 706 of SEQ ID NO: 1881508
gauguugggaauuauguau

SEQ ID NO: 2049933 - RNA, 19 nt, Artificial Sequence
  Description of Artificial Sequence: Synthetic oligonucleotide
  Antisense strand to SEQ ID NO: 2049932
auacauaauucccaacauc

SEQ ID NO: 2049934 - RNA, 19 nt, Artificial Sequence
  Description of Artificial Sequence: Synthetic oligonucleotide
  Sense strand starting at position 710 of SEQ ID NO: 1881508
uugggaauuauguauagug

SEQ ID NO: 2049935 - RNA, 19 nt, Artificial Sequence
  Description of Artificial Sequence: Synthetic oligonucleotide
  Antisense strand to SEQ ID NO: 2049934
cacuauacauaauucccaa

SEQ ID NO: 2049936 - RNA, 19 nt, Artificial Sequence
  Description of Artificial Sequence: Synthetic oligonucleotide
  Sense strand starting at position 740 of SEQ ID NO: 1881508
acugguugccuggaaggua

SEQ ID NO: 2049937 - RNA, 19 nt, Artificial Sequence
  Description of Artificial Sequence: Synthetic oligonucleotide
  Antisense strand to SEQ ID NO: 2049936
uaccuuccaggcaaccagu

SEQ ID NO: 2049938 - RNA, 19 nt, Artificial Sequence
  Description of Artificial Sequence: Synthetic oligonucleotide
  Sense strand starting at position 798 of SEQ ID NO: 1881508
ucgcuuuguggguuuagua

SEQ ID NO: 2049939 - RNA, 19 nt, Artificial Sequence
  Description of Artificial Sequence: Synthetic oligonucleotide
  Antisense strand to SEQ ID NO: 2049938
uacuaaacccacaaagcga

SEQ ID NO: 2049940 - RNA, 19 nt, Artificial Sequence
  Description of Artificial Sequence: Synthetic oligonucleotide
  Sense strand starting at position 814 of SEQ ID NO: 1881508
guacuuggugcugacaaau

SEQ ID NO: 2049941 - RNA, 19 nt, Artificial Sequence
  Description of Artificial Sequence: Synthetic oligonucleotide
  Antisense strand to SEQ ID NO: 2049940
auuugucagcaccaaguac

SEQ ID NO: 2049942 - RNA, 19 nt, Artificial Sequence
  Description of Artificial Sequence: Synthetic oligonucleotide
  Sense strand starting at position 835 of SEQ ID NO: 1881508
uggagugagauccgaacau

SEQ ID NO: 2049943 - RNA, 19 nt, Artificial Sequence
  Description of Artificial Sequence: Synthetic oligonucleotide
  Antisense strand to SEQ ID NO: 2049942
auguucggaucucacucca

SEQ ID NO: 2049944 - RNA, 19 nt, Artificial Sequence
  Description of Artificial Sequence: Synthetic oligonucleotide
  Sense strand starting at position 888 of SEQ ID NO: 1881508
cgaauacuagaguagguuu

SEQ ID NO: 2049945 - RNA, 19 nt, Artificial Sequence
  Description of Artificial Sequence: Synthetic oligonucleotide
  Antisense strand to SEQ ID NO: 2049944
aaaccuacucuaguauucg

SEQ ID NO: 2049946 - RNA, 19 nt, Artificial Sequence
  Description of Artificial Sequence: Synthetic oligonucleotide
  Sense strand starting at position 914 of SEQ ID NO: 1881508
cguaaagacuugcuugaaa

SEQ ID NO: 2049947 - RNA, 19 nt, Artificial Sequence
  Description of Artificial Sequence: Synthetic oligonucleotide
  Antisense strand to SEQ ID NO: 2049946
uuucaagcaagucuuuacg

SEQ ID NO: 2049948 - RNA, 19 nt, Artificial Sequence
  Description of Artificial Sequence: Synthetic oligonucleotide
  Sense strand starting at position 1097 of SEQ ID NO: 1881508
gucccaggagugugagaaa

SEQ ID NO: 2049949 - RNA, 19 nt, Artificial Sequence
  Description of Artificial Sequence: Synthetic oligonucleotide
  Antisense strand to SEQ ID NO: 2049948
uuucucacacuccugggac

SEQ ID NO: 2049950 - RNA, 19 nt, Artificial Sequence
  Description of Artificial Sequence: Synthetic oligonucleotide
  Sense strand starting at position 1186 of SEQ ID NO: 1881508
gcgcuuagucgaucauuag

SEQ ID NO: 2049951 - RNA, 19 nt, Artificial Sequence
  Description of Artificial Sequence: Synthetic oligonucleotide
  Antisense strand to SEQ ID NO: 2049950
cuaaugaucgacuaagcgc

SEQ ID NO: 2049952 - RNA, 19 nt, Artificial Sequence
  Description of Artificial Sequence: Synthetic oligonucleotide
  Sense strand starting at position 1196 of SEQ ID NO: 1881508
gaucauuaggucugugggu

SEQ ID NO: 2049953 - RNA, 19 nt, Artificial Sequence
  Description of Artificial Sequence: Synthetic oligonucleotide
  Antisense strand to SEQ ID NO: 2049952
acccacagaccuaaugauc

SEQ ID NO: 2049954 - RNA, 19 nt, Artificial Sequence
  Description of Artificial Sequence: Synthetic oligonucleotide
  Sense strand starting at position 1198 of SEQ ID NO: 1881508
ucauuaggucuguggguga

SEQ ID NO: 2049955 - RNA, 19 nt, Artificial Sequence
  Description of Artificial Sequence: Synthetic oligonucleotide
  Antisense strand to SEQ ID NO: 2049954
ucacccacagaccuaauga

SEQ ID NO: 2049956 - RNA, 19 nt, Artificial Sequence
  Description of Artificial Sequence: Synthetic oligonucleotide
  Sense strand starting at position 1344 of SEQ ID NO: 1881508
guuguaugcccagagauau

SEQ ID NO: 2049957 - RNA, 19 nt, Artificial Sequence
  Description of Artificial Sequence: Synthetic oligonucleotide
  Antisense strand to SEQ ID NO: 2049956
auaucucugggcauacaac

SEQ ID NO: 2049958 - RNA, 19 nt, Artificial Sequence
  Description of Artificial Sequence: Synthetic oligonucleotide
  Sense strand starting at position 1354 of SEQ ID NO: 1881508
cagagauaucccggcguaa

SEQ ID NO: 2049959 - RNA, 19 nt, Artificial Sequence
  Description of Artificial Sequence: Synthetic oligonucleotide
  Antisense strand to SEQ ID NO: 2049958
uuacgccgggauaucucug

SEQ ID NO: 2049960 - RNA, 19 nt, Artificial Sequence
  Description of Artificial Sequence: Synthetic oligonucleotide
  Sense strand starting at position 1906 of SEQ ID NO: 1881508
gcgggauuugacugcgaaa

SEQ ID NO: 2049961 - RNA, 19 nt, Artificial Sequence
  Description of Artificial Sequence: Synthetic oligonucleotide
  Antisense strand to SEQ ID NO: 2049960
uuucgcagucaaaucccgc

SEQ ID NO: 2049962 - RNA, 19 nt, Artificial Sequence
  Description of Artificial Sequence: Synthetic oligonucleotide
  Sense strand starting at position 2171 of SEQ ID NO: 1881508
gccggugaccuugauugaa

SEQ ID NO: 2049963 - RNA, 19 nt, Artificial Sequence
  Description of Artificial Sequence: Synthetic oligonucleotide
  Antisense strand to SEQ ID NO: 2049962
uucaaucaaggucaccggc

SEQ ID NO: 2049964 - RNA, 19 nt, Artificial Sequence
  Description of Artificial Sequence: Synthetic oligonucleotide
  Sense strand starting at position 2173 of SEQ ID NO: 1881508
cggugaccuugauugaagu

SEQ ID NO: 2049965 - RNA, 19 nt, Artificial Sequence
  Description of Artificial Sequence: Synthetic oligonucleotide
  Antisense strand to SEQ ID NO: 2049964
acuucaaucaaggucaccg

SEQ ID NO: 2049966 - RNA, 19 nt, Artificial Sequence
  Description of Artificial Sequence: Synthetic oligonucleotide
  Sense strand starting at position 2175 of SEQ ID NO: 1881508
gugaccuugauugaaguca

SEQ ID NO: 2049967 - RNA, 19 nt, Artificial Sequence
  Description of Artificial Sequence: Synthetic oligonucleotide
  Antisense strand to SEQ ID NO: 2049966
ugacuucaaucaaggucac

SEQ ID NO: 2049968 - RNA, 19 nt, Artificial Sequence
  Description of Artificial Sequence: Synthetic oligonucleotide
  Sense strand starting at position 2462 of SEQ ID NO: 1881508
ugcguuccugaguaaucca

SEQ ID NO: 2049969 - RNA, 19 nt, Artificial Sequence
  Description of Artificial Sequence: Synthetic oligonucleotide
  Antisense strand to SEQ ID NO: 2049968
uggauuacucaggaacgca

SEQ ID NO: 2049970 - RNA, 19 nt, Artificial Sequence
  Description of Artificial Sequence: Synthetic oligonucleotide
  Sense strand starting at position 2835 of SEQ ID NO: 1881508
auuguuucccaucauagac

SEQ ID NO: 2049971 - RNA, 19 nt, Artificial Sequence
  Description of Artificial Sequence: Synthetic oligonucleotide
  Antisense strand to SEQ ID NO: 2049970
gucuaugaugggaaacaau

SEQ ID NO: 2049972 - RNA, 19 nt, Artificial Sequence
  Description of Artificial Sequence: Synthetic oligonucleotide
  Sense strand starting at position 2885 of SEQ ID NO: 1881508
aaaggagcuucguucggau

SEQ ID NO: 2049973 - RNA, 19 nt, Artificial Sequence
  Description of Artificial Sequence: Synthetic oligonucleotide
  Antisense strand to SEQ ID NO: 2049972
auccgaacgaagcuccuuu

SEQ ID NO: 2049974 - RNA, 19 nt, Artificial Sequence
  Description of Artificial Sequence: Synthetic oligonucleotide
  Sense strand starting at position 2887 of SEQ ID NO: 1881508
aggagcuucguucggauuu

SEQ ID NO: 2049975 - RNA, 19 nt, Artificial Sequence
  Description of Artificial Sequence: Synthetic oligonucleotide
  Antisense strand to SEQ ID NO: 2049974
aaauccgaacgaagcuccu

SEQ ID NO: 2049976 - RNA, 19 nt, Artificial Sequence
  Description of Artificial Sequence: Synthetic oligonucleotide
  Sense strand starting at position 3002 of SEQ ID NO: 1881508
aacguaaaccucguugugu

SEQ ID NO: 2049977 - RNA, 19 nt, Artificial Sequence
  Description of Artificial Sequence: Synthetic oligonucleotide
  Antisense strand to SEQ ID NO: 2049976
acacaacgagguuuacguu

SEQ ID NO: 2049978 - RNA, 19 nt, Artificial Sequence
  Description of Artificial Sequence: Synthetic oligonucleotide
  Sense strand starting at position 3007 of SEQ ID NO: 1881508
aaaccucguuguguagaaa

SEQ ID NO: 2049979 - RNA, 19 nt, Artificial Sequence
  Description of Artificial Sequence: Synthetic oligonucleotide
  Antisense strand to SEQ ID NO: 2049978
uuucuacacaacgagguuu

SEQ ID NO: 2049980 - RNA, 19 nt, Artificial Sequence
  Description of Artificial Sequence: Synthetic oligonucleotide
  Sense strand starting at position 3010 of SEQ ID NO: 1881508
ccucguuguguagaaagaa

SEQ ID NO: 2049981 - RNA, 19 nt, Artificial Sequence
  Description of Artificial Sequence: Synthetic oligonucleotide
  Antisense strand to SEQ ID NO: 2049980
uucuuucuacacaacgagg

SEQ ID NO: 2049982 - RNA, 19 nt, Artificial Sequence
  Description of Artificial Sequence: Synthetic oligonucleotide
  Sense strand starting at position 3091 of SEQ ID NO: 1881508
gauggaaacucauuagguu

SEQ ID NO: 2049983 - RNA, 19 nt, Artificial Sequence
  Description of Artificial Sequence: Synthetic oligonucleotide
  Antisense strand to SEQ ID NO: 2049982
aaccuaaugaguuuccauc

SEQ ID NO: 2049984 - RNA, 19 nt, Artificial Sequence
  Description of Artificial Sequence: Synthetic oligonucleotide
  Sense strand starting at position 3131 of SEQ ID NO: 1881508
gguucugagacguagccaa

SEQ ID NO: 2049985 - RNA, 19 nt, Artificial Sequence
  Description of Artificial Sequence: Synthetic oligonucleotide
  Antisense strand to SEQ ID NO: 2049984
uuggcuacgucucagaacc

SEQ ID NO: 2049986 - RNA, 19 nt, Artificial Sequence
  Description of Artificial Sequence: Synthetic oligonucleotide
  Sense strand starting at position 3366 of SEQ ID NO: 1881508
ucuaguuucguguacacag

SEQ ID NO: 2049987 - RNA, 19 nt, Artificial Sequence
  Description of Artificial Sequence: Synthetic oligonucleotide
  Antisense strand to SEQ ID NO: 2049986
cuguguacacgaaacuaga

SEQ ID NO: 2049988 - RNA, 19 nt, Artificial Sequence
  Description of Artificial Sequence: Synthetic oligonucleotide
  Sense strand starting at position 3398 of SEQ ID NO: 1881508
gagaucuaacagcggagau

SEQ ID NO: 2049989 - RNA, 19 nt, Artificial Sequence
  Description of Artificial Sequence: Synthetic oligonucleotide
  Antisense strand to SEQ ID NO: 2049988
aucuccgcuguuagaucuc

SEQ ID NO: 2049990 - RNA, 19 nt, Artificial Sequence
  Description of Artificial Sequence: Synthetic oligonucleotide
  Sense strand starting at position 3512 of SEQ ID NO: 1881508
ggcguguugggaucgguuu

SEQ ID NO: 2049991 - RNA, 19 nt, Artificial Sequence
  Description of Artificial Sequence: Synthetic oligonucleotide
  Antisense strand to SEQ ID NO: 2049990
aaaccgaucccaacacgcc

SEQ ID NO: 2049992 - RNA, 19 nt, Artificial Sequence
  Description of Artificial Sequence: Synthetic oligonucleotide
  Sense strand starting at position 3592 of SEQ ID NO: 1881508
gcuugcugugaguauauaa

SEQ ID NO: 2049993 - RNA, 19 nt, Artificial Sequence
  Description of Artificial Sequence: Synthetic oligonucleotide
  Antisense strand to SEQ ID NO: 2049992
uuauauacucacagcaagc

SEQ ID NO: 2049994 - RNA, 19 nt, Artificial Sequence
  Description of Artificial Sequence: Synthetic oligonucleotide
  Sense strand starting at position 3602 of SEQ ID NO: 1881508
aguauauaaccagagcucu

SEQ ID NO: 2049995 - RNA, 19 nt, Artificial Sequence
  Description of Artificial Sequence: Synthetic oligonucleotide
  Antisense strand to SEQ ID NO: 2049994
agagcucugguuauauacu

SEQ ID NO: 2049996 - RNA, 19 nt, Artificial Sequence
  Description of Artificial Sequence: Synthetic oligonucleotide
  Sense strand starting at position 3904 of SEQ ID NO: 1881508
cguguuggccagucuaguu

SEQ ID NO: 2049997 - RNA, 19 nt, Artificial Sequence
  Description of Artificial Sequence: Synthetic oligonucleotide
  Antisense strand to SEQ ID NO: 2049996
aacuagacuggccaacacg

SEQ ID NO: 2049998 - RNA, 19 nt, Artificial Sequence
  Description of Artificial Sequence: Synthetic oligonucleotide
  Sense strand starting at position 49 of SEQ ID NO: 1881509
uaauguucgugauuaggaa

SEQ ID NO: 2049999 - RNA, 19 nt, Artificial Sequence
  Description of Artificial Sequence: Synthetic oligonucleotide
  Antisense strand to SEQ ID NO: 2049998
uuccuaaucacgaacauua

SEQ ID NO: 2050000 - RNA, 19 nt, Artificial Sequence
  Description of Artificial Sequence: Synthetic oligonucleotide
  Sense strand starting at position 50 of SEQ ID NO: 1881509
aauguucgugauuaggaau

SEQ ID NO: 2050001 - RNA, 19 nt, Artificial Sequence
  Description of Artificial Sequence: Synthetic oligonucleotide
  Antisense strand to SEQ ID NO: 2050000
auuccuaaucacgaacauu

SEQ ID NO: 2050002 - RNA, 19 nt, Artificial Sequence
  Description of Artificial Sequence: Synthetic oligonucleotide
  Sense strand starting at position 64 of SEQ ID NO: 1881509
ggaaucauuacgcacguca

SEQ ID NO: 2050003 - RNA, 19 nt, Artificial Sequence
  Description of Artificial Sequence: Synthetic oligonucleotide
  Antisense strand to SEQ ID NO: 2050002
ugacgugcguaaugauucc

SEQ ID NO: 2050004 - RNA, 19 nt, Artificial Sequence
  Description of Artificial Sequence: Synthetic oligonucleotide
  Sense strand starting at position 83 of SEQ ID NO: 1881509
agccgaguccauuaaguug

SEQ ID NO: 2050005 - RNA, 19 nt, Artificial Sequence
  Description of Artificial Sequence: Synthetic oligonucleotide
  Antisense strand to SEQ ID NO: 2050004
caacuuaauggacucggcu

SEQ ID NO: 2050006 - RNA, 19 nt, Artificial Sequence
  Description of Artificial Sequence: Synthetic oligonucleotide
  Sense strand starting at position 92 of SEQ ID NO: 1881509
cauuaaguuguagggagaa

SEQ ID NO: 2050007 - RNA, 19 nt, Artificial Sequence
  Description of Artificial Sequence: Synthetic oligonucleotide
  Antisense strand to SEQ ID NO: 2050006
uucucccuacaacuuaaug

SEQ ID NO: 2050008 - RNA, 19 nt, Artificial Sequence
  Description of Artificial Sequence: Synthetic oligonucleotide
  Sense strand starting at position 104 of SEQ ID NO: 1881509
gggagaaauuagccuugac

SEQ ID NO: 2050009 - RNA, 19 nt, Artificial Sequence
  Description of Artificial Sequence: Synthetic oligonucleotide
  Antisense strand to SEQ ID NO: 2050008
gucaaggcuaauuucuccc

SEQ ID NO: 2050010 - RNA, 19 nt, Artificial Sequence
  Description of Artificial Sequence: Synthetic oligonucleotide
  Sense strand starting at position 439 of SEQ ID NO: 1881509
uugcuugcugcucuguaaa

SEQ ID NO: 2050011 - RNA, 19 nt, Artificial Sequence
  Description of Artificial Sequence: Synthetic oligonucleotide
  Antisense strand to SEQ ID NO: 2050010
uuuacagagcagcaagcaa

SEQ ID NO: 2050012 - RNA, 19 nt, Artificial Sequence
  Description of Artificial Sequence: Synthetic oligonucleotide
  Sense strand starting at position 506 of SEQ ID NO: 1881509
aagguauggucagugcaag

SEQ ID NO: 2050013 - RNA, 19 nt, Artificial Sequence
  Description of Artificial Sequence: Synthetic oligonucleotide
  Antisense strand to SEQ ID NO: 2050012
cuugcacugaccauaccuu

SEQ ID NO: 2050014 - RNA, 19 nt, Artificial Sequence
  Description of Artificial Sequence: Synthetic oligonucleotide
  Sense strand starting at position 691 of SEQ ID NO: 1881509
cugggaaacuugccaauca

SEQ ID NO: 2050015 - RNA, 19 nt, Artificial Sequence
  Description of Artificial Sequence: Synthetic oligonucleotide
  Antisense strand to SEQ ID NO: 2050014
ugauuggcaaguuucccag

SEQ ID NO: 2050016 - RNA, 19 nt, Artificial Sequence
  Description of Artificial Sequence: Synthetic oligonucleotide
  Sense strand starting at position 703 of SEQ ID NO: 1881509
ccaaucaggcauugagcaa

SEQ ID NO: 2050017 - RNA, 19 nt, Artificial Sequence
  Description of Artificial Sequence: Synthetic oligonucleotide
  Antisense strand to SEQ ID NO: 2050016
uugcucaaugccugauugg

SEQ ID NO: 2050018 - RNA, 19 nt, Artificial Sequence
  Description of Artificial Sequence: Synthetic oligonucleotide
  Sense strand starting at position 1032 of SEQ ID NO: 1881509
cccucuucugcagauagga

SEQ ID NO: 2050019 - RNA, 19 nt, Artificial Sequence
  Description of Artificial Sequence: Synthetic oligonucleotide
  Antisense strand to SEQ ID NO: 2050018
uccuaucugcagaagaggg

SEQ ID NO: 2050020 - RNA, 19 nt, Artificial Sequence
  Description of Artificial Sequence: Synthetic oligonucleotide
  Sense strand starting at position 1197 of SEQ ID NO: 1881509
accuaugagucuccuuauu

SEQ ID NO: 2050021 - RNA, 19 nt, Artificial Sequence
  Description of Artificial Sequence: Synthetic oligonucleotide
  Antisense strand to SEQ ID NO: 2050020
aauaaggagacucauaggu

SEQ ID NO: 2050022 - RNA, 19 nt, Artificial Sequence
  Description of Artificial Sequence: Synthetic oligonucleotide
  Sense strand starting at position 1225 of SEQ ID NO: 1881509
gaaugagggccugaguuua

SEQ ID NO: 2050023 - RNA, 19 nt, Artificial Sequence
  Description of Artificial Sequence: Synthetic oligonucleotide
  Antisense strand to SEQ ID NO: 2050022
uaaacucaggcccucauuc

SEQ ID NO: 2050024 - RNA, 19 nt, Artificial Sequence
  Description of Artificial Sequence: Synthetic oligonucleotide
  Sense strand starting at position 1431 of SEQ ID NO: 1881509
aaugaaaugcgcuaaaggu

SEQ ID NO: 2050025 - RNA, 19 nt, Artificial Sequence
  Description of Artificial Sequence: Synthetic oligonucleotide
  Antisense strand to SEQ ID NO: 2050024
accuuuagcgcauuucauu

SEQ ID NO: 2050026 - RNA, 19 nt, Artificial Sequence
  Description of Artificial Sequence: Synthetic oligonucleotide
  Sense strand starting at position 1767 of SEQ ID NO: 1881509
gcugguuaccaggaugcaa

SEQ ID NO: 2050027 - RNA, 19 nt, Artificial Sequence
  Description of Artificial Sequence: Synthetic oligonucleotide
  Antisense strand to SEQ ID NO: 2050026
uugcauccugguaaccagc

SEQ ID NO: 2050028 - RNA, 19 nt, Artificial Sequence
  Description of Artificial Sequence: Synthetic oligonucleotide
  Sense strand starting at position 1807 of SEQ ID NO: 1881509
gagguuugcugcccaggga

SEQ ID NO: 2050029 - RNA, 19 nt, Artificial Sequence
  Description of Artificial Sequence: Synthetic oligonucleotide
  Antisense strand to SEQ ID NO: 2050028
ucccugggcagcaaaccuc

SEQ ID NO: 2050030 - RNA, 19 nt, Artificial Sequence
  Description of Artificial Sequence: Synthetic oligonucleotide
  Sense strand starting at position 1810 of SEQ ID NO: 1881509
guuugcugcccagggagaa

SEQ ID NO: 2050031 - RNA, 19 nt, Artificial Sequence
  Description of Artificial Sequence: Synthetic oligonucleotide
  Antisense strand to SEQ ID NO: 2050030
uucucccugggcagcaaac

SEQ ID NO: 2050032 - RNA, 19 nt, Artificial Sequence
  Description of Artificial Sequence: Synthetic oligonucleotide
  Sense strand starting at position 1877 of SEQ ID NO: 1881509
aucucugaacguuagugau

SEQ ID NO: 2050033 - RNA, 19 nt, Artificial Sequence
  Description of Artificial Sequence: Synthetic oligonucleotide
  Antisense strand to SEQ ID NO: 2050032
aucacuaacguucagagau

SEQ ID NO: 2050034 - RNA, 19 nt, Artificial Sequence
  Description of Artificial Sequence: Synthetic oligonucleotide
  Sense strand starting at position 1887 of SEQ ID NO: 1881509
guuagugauccggaccuca

SEQ ID NO: 2050035 - RNA, 19 nt, Artificial Sequence
  Description of Artificial Sequence: Synthetic oligonucleotide
  Antisense strand to SEQ ID NO: 2050034
ugagguccggaucacuaac

SEQ ID NO: 2050036 - RNA, 19 nt, Artificial Sequence
  Description of Artificial Sequence: Synthetic oligonucleotide
  Sense strand starting at position 1988 of SEQ ID NO: 1881509
aggcccggucguuaagaaa

SEQ ID NO: 2050037 - RNA, 19 nt, Artificial Sequence
  Description of Artificial Sequence: Synthetic oligonucleotide
  Antisense strand to SEQ ID NO: 2050036
uuucuuaacgaccgggccu

SEQ ID NO: 2050038 - RNA, 19 nt, Artificial Sequence
  Description of Artificial Sequence: Synthetic oligonucleotide
  Sense strand starting at position 2146 of SEQ ID NO: 1881509
cgaucagucaggcagacau

SEQ ID NO: 2050039 - RNA, 19 nt, Artificial Sequence
  Description of Artificial Sequence: Synthetic oligonucleotide
  Antisense strand to SEQ ID NO: 2050038
augucugccugacugaucg

SEQ ID NO: 2050040 - RNA, 19 nt, Artificial Sequence
  Description of Artificial Sequence: Synthetic oligonucleotide
  Sense strand starting at position 2180 of SEQ ID NO: 1881509
gugacauggccuuaggauc

SEQ ID NO: 2050041 - RNA, 19 nt, Artificial Sequence
  Description of Artificial Sequence: Synthetic oligonucleotide
  Antisense strand to SEQ ID NO: 2050040
gauccuaaggccaugucac

SEQ ID NO: 2050042 - RNA, 19 nt, Artificial Sequence
  Description of Artificial Sequence: Synthetic oligonucleotide
  Sense strand starting at position 2229 of SEQ ID NO: 1881509
cugauauuccagugaccuu

SEQ ID NO: 2050043 - RNA, 19 nt, Artificial Sequence
  Description of Artificial Sequence: Synthetic oligonucleotide
  Antisense strand to SEQ ID NO: 2050042
aaggucacuggaauaucag

SEQ ID NO: 2050044 - RNA, 19 nt, Artificial Sequence
  Description of Artificial Sequence: Synthetic oligonucleotide
  Sense strand starting at position 2286 of SEQ ID NO: 1881509
cgcuaauccgcagcauauu

SEQ ID NO: 2050045 - RNA, 19 nt, Artificial Sequence
  Description of Artificial Sequence: Synthetic oligonucleotide
  Antisense strand to SEQ ID NO: 2050044
aauaugcugcggauuagcg

SEQ ID NO: 2050046 - RNA, 19 nt, Artificial Sequence
  Description of Artificial Sequence: Synthetic oligonucleotide
  Sense strand starting at position 2287 of SEQ ID NO: 1881509
gcuaauccgcagcauauuu

SEQ ID NO: 2050047 - RNA, 19 nt, Artificial Sequence
  Description of Artificial Sequence: Synthetic oligonucleotide
  Antisense strand to SEQ ID NO: 2050046
aaauaugcugcggauuagc

SEQ ID NO: 2050048 - RNA, 19 nt, Artificial Sequence
  Description of Artificial Sequence: Synthetic oligonucleotide
  Sense strand starting at position 2420 of SEQ ID NO: 1881509
cugaauaucugagcacuaa

SEQ ID NO: 2050049 - RNA, 19 nt, Artificial Sequence
  Description of Artificial Sequence: Synthetic oligonucleotide
  Antisense strand to SEQ ID NO: 2050048
uuagugcucagauauucag

SEQ ID NO: 2050050 - RNA, 19 nt, Artificial Sequence
  Description of Artificial Sequence: Synthetic oligonucleotide
  Sense strand starting at position 2510 of SEQ ID NO: 1881509
aaagaaaucucuguuuacg

SEQ ID NO: 2050051 - RNA, 19 nt, Artificial Sequence
  Description of Artificial Sequence: Synthetic oligonucleotide
  Antisense strand to SEQ ID NO: 2050050
cguaaacagagauuucuuu

SEQ ID NO: 2050052 - RNA, 19 nt, Artificial Sequence
  Description of Artificial Sequence: Synthetic oligonucleotide
  Sense strand starting at position 2512 of SEQ ID NO: 1881509
agaaaucucuguuuacgca

SEQ ID NO: 2050053 - RNA, 19 nt, Artificial Sequence
  Description of Artificial Sequence: Synthetic oligonucleotide
  Antisense strand to SEQ ID NO: 2050052
ugcguaaacagagauuucu

SEQ ID NO: 2050054 - RNA, 19 nt, Artificial Sequence
  Description of Artificial Sequence: Synthetic oligonucleotide
  Sense strand starting at position 2513 of SEQ ID NO: 1881509
gaaaucucuguuuacgcau

SEQ ID NO: 2050055 - RNA, 19 nt, Artificial Sequence
  Description of Artificial Sequence: Synthetic oligonucleotide
  Antisense strand to SEQ ID NO: 2050054
augcguaaacagagauuuc

SEQ ID NO: 2050056 - RNA, 19 nt, Artificial Sequence
  Description of Artificial Sequence: Synthetic oligonucleotide
  Sense strand starting at position 2537 of SEQ ID NO: 1881509
cggagcucauuguugagau

SEQ ID NO: 2050057 - RNA, 19 nt, Artificial Sequence
  Description of Artificial Sequence: Synthetic oligonucleotide
  Antisense strand to SEQ ID NO: 2050056
aucucaacaaugagcuccg

SEQ ID NO: 2050058 - RNA, 19 nt, Artificial Sequence
  Description of Artificial Sequence: Synthetic oligonucleotide
  Sense strand starting at position 2921 of SEQ ID NO: 1881509
ugcaguugcagaugggaua

SEQ ID NO: 2050059 - RNA, 19 nt, Artificial Sequence
  Description of Artificial Sequence: Synthetic oligonucleotide
  Antisense strand to SEQ ID NO: 2050058
uaucccaucugcaacugca

SEQ ID NO: 2050060 - RNA, 19 nt, Artificial Sequence
  Description of Artificial Sequence: Synthetic oligonucleotide
  Sense strand starting at position 3069 of SEQ ID NO: 1881509
acauguccuuguuuaacuu

SEQ ID NO: 2050061 - RNA, 19 nt, Artificial Sequence
  Description of Artificial Sequence: Synthetic oligonucleotide
  Antisense strand to SEQ ID NO: 2050060
aaguuaaacaaggacaugu

SEQ ID NO: 2050062 - RNA, 19 nt, Artificial Sequence
  Description of Artificial Sequence: Synthetic oligonucleotide
  Sense strand starting at position 3126 of SEQ ID NO: 1881509
ggugccaaauacucaagaa

SEQ ID NO: 2050063 - RNA, 19 nt, Artificial Sequence
  Description of Artificial Sequence: Synthetic oligonucleotide
  Antisense strand to SEQ ID NO: 2050062
uucuugaguauuuggcacc

SEQ ID NO: 2050064 - RNA, 19 nt, Artificial Sequence
  Description of Artificial Sequence: Synthetic oligonucleotide
  Sense strand starting at position 3136 of SEQ ID NO: 1881509
acucaagaagcauguaauu

SEQ ID NO: 2050065 - RNA, 19 nt, Artificial Sequence
  Description of Artificial Sequence: Synthetic oligonucleotide
  Antisense strand to SEQ ID NO: 2050064
aauuacaugcuucuugagu

SEQ ID NO: 2050066 - RNA, 19 nt, Artificial Sequence
  Description of Artificial Sequence: Synthetic oligonucleotide
  Sense strand starting at position 3204 of SEQ ID NO: 1881509
agcaaagaacugugaacua

SEQ ID NO: 2050067 - RNA, 19 nt, Artificial Sequence
  Description of Artificial Sequence: Synthetic oligonucleotide
  Antisense strand to SEQ ID NO: 2050066
uaguucacaguucuuugcu

SEQ ID NO: 2050068 - RNA, 19 nt, Artificial Sequence
  Description of Artificial Sequence: Synthetic oligonucleotide
  Sense strand starting at position 3294 of SEQ ID NO: 1881509
gccuucccucuugagagua

SEQ ID NO: 2050069 - RNA, 19 nt, Artificial Sequence
  Description of Artificial Sequence: Synthetic oligonucleotide
  Antisense strand to SEQ ID NO: 2050068
uacucucaagagggaaggc

SEQ ID NO: 2050070 - RNA, 19 nt, Artificial Sequence
  Description of Artificial Sequence: Synthetic oligonucleotide
  Sense strand starting at position 3319 of SEQ ID NO: 1881509
agaugucaggccugaguca

SEQ ID NO: 2050071 - RNA, 19 nt, Artificial Sequence
  Description of Artificial Sequence: Synthetic oligonucleotide
  Antisense strand to SEQ ID NO: 2050070
ugacucaggccugacaucu

SEQ ID NO: 2050072 - RNA, 19 nt, Artificial Sequence
  Description of Artificial Sequence: Synthetic oligonucleotide
  Sense strand starting at position 3353 of SEQ ID NO: 1881509
ccaaaugauugcuccugga

SEQ ID NO: 2050073 - RNA, 19 nt, Artificial Sequence
  Description of Artificial Sequence: Synthetic oligonucleotide
  Antisense strand to SEQ ID NO: 2050072
uccaggagcaaucauuugg

SEQ ID NO: 2050074 - RNA, 19 nt, Artificial Sequence
  Description of Artificial Sequence: Synthetic oligonucleotide
  Sense strand starting at position 3850 of SEQ ID NO: 1881509
ggcuuauuaugugucaaac

SEQ ID NO: 2050075 - RNA, 19 nt, Artificial Sequence
  Description of Artificial Sequence: Synthetic oligonucleotide
  Antisense strand to SEQ ID NO: 2050074
guuugacacauaauaagcc

SEQ ID NO: 2050076 - RNA, 19 nt, Artificial Sequence
  Description of Artificial Sequence: Synthetic oligonucleotide
  Sense strand starting at position 3943 of SEQ ID NO: 1881509
ucaugaucccaauggguac

SEQ ID NO: 2050077 - RNA, 19 nt, Artificial Sequence
  Description of Artificial Sequence: Synthetic oligonucleotide
  Antisense strand to SEQ ID NO: 2050076
guacccauugggaucauga

SEQ ID NO: 2050078 - RNA, 19 nt, Artificial Sequence
  Description of Artificial Sequence: Synthetic oligonucleotide
  Sense strand starting at position 72 of SEQ ID NO: 1881510
gggauuacauguuugaguc

SEQ ID NO: 2050079 - RNA, 19 nt, Artificial Sequence
  Description of Artificial Sequence: Synthetic oligonucleotide
  Antisense strand to SEQ ID NO: 2050078
gacucaaacauguaauccc

SEQ ID NO: 2050080 - RNA, 19 nt, Artificial Sequence
  Description of Artificial Sequence: Synthetic oligonucleotide
  Sense strand starting at position 76 of SEQ ID NO: 1881510
uuacauguuugagucuaag

SEQ ID NO: 2050081 - RNA, 19 nt, Artificial Sequence
  Description of Artificial Sequence: Synthetic oligonucleotide
  Antisense strand to SEQ ID NO: 2050080
cuuagacucaaacauguaa

SEQ ID NO: 2050082 - RNA, 19 nt, Artificial Sequence
  Description of Artificial Sequence: Synthetic oligonucleotide
  Sense strand starting at position 79 of SEQ ID NO: 1881510
cauguuugagucuaaguua

SEQ ID NO: 2050083 - RNA, 19 nt, Artificial Sequence
  Description of Artificial Sequence: Synthetic oligonucleotide
  Antisense strand to SEQ ID NO: 2050082
uaacuuagacucaaacaug

SEQ ID NO: 2050084 - RNA, 19 nt, Artificial Sequence
  Description of Artificial Sequence: Synthetic oligonucleotide
  Sense strand starting at position 84 of SEQ ID NO: 1881510
uugagucuaaguuaguauu

SEQ ID NO: 2050085 - RNA, 19 nt, Artificial Sequence
  Description of Artificial Sequence: Synthetic oligonucleotide
  Antisense strand to SEQ ID NO: 2050084
aauacuaacuuagacucaa

SEQ ID NO: 2050086 - RNA, 19 nt, Artificial Sequence
  Description of Artificial Sequence: Synthetic oligonucleotide
  Sense strand starting at position 168 of SEQ ID NO: 1881510
cuuauuaagugaccacgaa

SEQ ID NO: 2050087 - RNA, 19 nt, Artificial Sequence
  Description of Artificial Sequence: Synthetic oligonucleotide
  Antisense strand to SEQ ID NO: 2050086
uucguggucacuuaauaag

SEQ ID NO: 2050088 - RNA, 19 nt, Artificial Sequence
  Description of Artificial Sequence: Synthetic oligonucleotide
  Sense strand starting at position 172 of SEQ ID NO: 1881510
uuaagugaccacgaagguu

SEQ ID NO: 2050089 - RNA, 19 nt, Artificial Sequence
  Description of Artificial Sequence: Synthetic oligonucleotide
  Antisense strand to SEQ ID NO: 2050088
aaccuucguggucacuuaa

SEQ ID NO: 2050090 - RNA, 19 nt, Artificial Sequence
  Description of Artificial Sequence: Synthetic oligonucleotide
  Sense strand starting at position 353 of SEQ ID NO: 1881510
gagggaacuuguuuggauc

SEQ ID NO: 2050091 - RNA, 19 nt, Artificial Sequence
  Description of Artificial Sequence: Synthetic oligonucleotide
  Antisense strand to SEQ ID NO: 2050090
gauccaaacaaguucccuc

SEQ ID NO: 2050092 - RNA, 19 nt, Artificial Sequence
  Description of Artificial Sequence: Synthetic oligonucleotide
  Sense strand starting at position 400 of SEQ ID NO: 1881510
uugaaucuugcauagaauu

SEQ ID NO: 2050093 - RNA, 19 nt, Artificial Sequence
  Description of Artificial Sequence: Synthetic oligonucleotide
  Antisense strand to SEQ ID NO: 2050092
aauucuaugcaagauucaa

SEQ ID NO: 2050094 - RNA, 19 nt, Artificial Sequence
  Description of Artificial Sequence: Synthetic oligonucleotide
  Sense strand starting at position 426 of SEQ ID NO: 1881510
acaagaaauuuggaguuua

SEQ ID NO: 2050095 - RNA, 19 nt, Artificial Sequence
  Description of Artificial Sequence: Synthetic oligonucleotide
  Antisense strand to SEQ ID NO: 2050094
uaaacuccaaauuucuugu

SEQ ID NO: 2050096 - RNA, 19 nt, Artificial Sequence
  Description of Artificial Sequence: Synthetic oligonucleotide
  Sense strand starting at position 527 of SEQ ID NO: 1881510
ugccauuugcaguguauua

SEQ ID NO: 2050097 - RNA, 19 nt, Artificial Sequence
  Description of Artificial Sequence: Synthetic oligonucleotide
  Antisense strand to SEQ ID NO: 2050096
uaauacacugcaaauggca

SEQ ID NO: 2050098 - RNA, 19 nt, Artificial Sequence
  Description of Artificial Sequence: Synthetic oligonucleotide
  Sense strand starting at position 590 of SEQ ID NO: 1881510
gggagaagaauccguugau

SEQ ID NO: 2050099 - RNA, 19 nt, Artificial Sequence
  Description of Artificial Sequence: Synthetic oligonucleotide
  Antisense strand to SEQ ID NO: 2050098
aucaacggauucuucuccc

SEQ ID NO: 2050100 - RNA, 19 nt, Artificial Sequence
  Description of Artificial Sequence: Synthetic oligonucleotide
  Sense strand starting at position 591 of SEQ ID NO: 1881510
ggagaagaauccguugauc

SEQ ID NO: 2050101 - RNA, 19 nt, Artificial Sequence
  Description of Artificial Sequence: Synthetic oligonucleotide
  Antisense strand to SEQ ID NO: 2050100
gaucaacggauucuucucc

SEQ ID NO: 2050102 - RNA, 19 nt, Artificial Sequence
  Description of Artificial Sequence: Synthetic oligonucleotide
  Sense strand starting at position 593 of SEQ ID NO: 1881510
agaagaauccguugauccu

SEQ ID NO: 2050103 - RNA, 19 nt, Artificial Sequence
  Description of Artificial Sequence: Synthetic oligonucleotide
  Antisense strand to SEQ ID NO: 2050102
aggaucaacggauucuucu

SEQ ID NO: 2050104 - RNA, 19 nt, Artificial Sequence
  Description of Artificial Sequence: Synthetic oligonucleotide
  Sense strand starting at position 594 of SEQ ID NO: 1881510
gaagaauccguugauccua

SEQ ID NO: 2050105 - RNA, 19 nt, Artificial Sequence
  Description of Artificial Sequence: Synthetic oligonucleotide
  Antisense strand to SEQ ID NO: 2050104
uaggaucaacggauucuuc

SEQ ID NO: 2050106 - RNA, 19 nt, Artificial Sequence
  Description of Artificial Sequence: Synthetic oligonucleotide
  Sense strand starting at position 635 of SEQ ID NO: 1881510
ugguaaagcuacucaccaa

SEQ ID NO: 2050107 - RNA, 19 nt, Artificial Sequence
  Description of Artificial Sequence: Synthetic oligonucleotide
  Antisense strand to SEQ ID NO: 2050106
uuggugaguagcuuuacca

SEQ ID NO: 2050108 - RNA, 19 nt, Artificial Sequence
  Description of Artificial Sequence: Synthetic oligonucleotide
  Sense strand starting at position 858 of SEQ ID NO: 1881510
uagacuuggcaaugggauu

SEQ ID NO: 2050109 - RNA, 19 nt, Artificial Sequence
  Description of Artificial Sequence: Synthetic oligonucleotide
  Antisense strand to SEQ ID NO: 2050108
aaucccauugccaagucua

SEQ ID NO: 2050110 - RNA, 19 nt, Artificial Sequence
  Description of Artificial Sequence: Synthetic oligonucleotide
  Sense strand starting at position 859 of SEQ ID NO: 1881510
agacuuggcaaugggauua

SEQ ID NO: 2050111 - RNA, 19 nt, Artificial Sequence
  Description of Artificial Sequence: Synthetic oligonucleotide
  Antisense strand to SEQ ID NO: 2050110
uaaucccauugccaagucu

SEQ ID NO: 2050112 - RNA, 19 nt, Artificial Sequence
  Description of Artificial Sequence: Synthetic oligonucleotide
  Sense strand starting at position 864 of SEQ ID NO: 1881510
uggcaaugggauuagcaua

SEQ ID NO: 2050113 - RNA, 19 nt, Artificial Sequence
  Description of Artificial Sequence: Synthetic oligonucleotide
  Antisense strand to SEQ ID NO: 2050112
uaugcuaaucccauugcca

SEQ ID NO: 2050114 - RNA, 19 nt, Artificial Sequence
  Description of Artificial Sequence: Synthetic oligonucleotide
  Sense strand starting at position 872 of SEQ ID NO: 1881510
ggauuagcauauucucuua

SEQ ID NO: 2050115 - RNA, 19 nt, Artificial Sequence
  Description of Artificial Sequence: Synthetic oligonucleotide
  Antisense strand to SEQ ID NO: 2050114
uaagagaauaugcuaaucc

SEQ ID NO: 2050116 - RNA, 19 nt, Artificial Sequence
  Description of Artificial Sequence: Synthetic oligonucleotide
  Sense strand starting at position 1358 of SEQ ID NO: 1881510
ccacucguggccguaauau

SEQ ID NO: 2050117 - RNA, 19 nt, Artificial Sequence
  Description of Artificial Sequence: Synthetic oligonucleotide
  Antisense strand to SEQ ID NO: 2050116
auauuacggccacgagugg

SEQ ID NO: 2050118 - RNA, 19 nt, Artificial Sequence
  Description of Artificial Sequence: Synthetic oligonucleotide
  Sense strand starting at position 1505 of SEQ ID NO: 1881510
ugaucugaguuucugacau

SEQ ID NO: 2050119 - RNA, 19 nt, Artificial Sequence
  Description of Artificial Sequence: Synthetic oligonucleotide
  Antisense strand to SEQ ID NO: 2050118
augucagaaacucagauca

SEQ ID NO: 2050120 - RNA, 19 nt, Artificial Sequence
  Description of Artificial Sequence: Synthetic oligonucleotide
  Sense strand starting at position 1606 of SEQ ID NO: 1881510
ucccaaaucgccuagaaua

SEQ ID NO: 2050121 - RNA, 19 nt, Artificial Sequence
  Description of Artificial Sequence: Synthetic oligonucleotide
  Antisense strand to SEQ ID NO: 2050120
uauucuaggcgauuuggga

SEQ ID NO: 2050122 - RNA, 19 nt, Artificial Sequence
  Description of Artificial Sequence: Synthetic oligonucleotide
  Sense strand starting at position 1608 of SEQ ID NO: 1881510
ccaaaucgccuagaauaag

SEQ ID NO: 2050123 - RNA, 19 nt, Artificial Sequence
  Description of Artificial Sequence: Synthetic oligonucleotide
  Antisense strand to SEQ ID NO: 2050122
cuuauucuaggcgauuugg

SEQ ID NO: 2050124 - RNA, 19 nt, Artificial Sequence
  Description of Artificial Sequence: Synthetic oligonucleotide
  Sense strand starting at position 2655 of SEQ ID NO: 1881510
cuaaacagugauuauugua

SEQ ID NO: 2050125 - RNA, 19 nt, Artificial Sequence
  Description of Artificial Sequence: Synthetic oligonucleotide
  Antisense strand to SEQ ID NO: 2050124
uacaauaaucacuguuuag

SEQ ID NO: 2050126 - RNA, 19 nt, Artificial Sequence
  Description of Artificial Sequence: Synthetic oligonucleotide
  Sense strand starting at position 2671 of SEQ ID NO: 1881510
guaacuauuggcgauuaug

SEQ ID NO: 2050127 - RNA, 19 nt, Artificial Sequence
  Description of Artificial Sequence: Synthetic oligonucleotide
  Antisense strand to SEQ ID NO: 2050126
cauaaucgccaauaguuac

SEQ ID NO: 2050128 - RNA, 19 nt, Artificial Sequence
  Description of Artificial Sequence: Synthetic oligonucleotide
  Sense strand starting at position 2674 of SEQ ID NO: 1881510
acuauuggcgauuaugaau

SEQ ID NO: 2050129 - RNA, 19 nt, Artificial Sequence
  Description of Artificial Sequence: Synthetic oligonucleotide
  Antisense strand to SEQ ID NO: 2050128
auucauaaucgccaauagu

SEQ ID NO: 2050130 - RNA, 19 nt, Artificial Sequence
  Description of Artificial Sequence: Synthetic oligonucleotide
  Sense strand starting at position 2798 of SEQ ID NO: 1881510
auaagcucuggauacaagu

SEQ ID NO: 2050131 - RNA, 19 nt, Artificial Sequence
  Description of Artificial Sequence: Synthetic oligonucleotide
  Antisense strand to SEQ ID NO: 2050130
acuuguauccagagcuuau

SEQ ID NO: 2050132 - RNA, 19 nt, Artificial Sequence
  Description of Artificial Sequence: Synthetic oligonucleotide
  Sense strand starting at position 2894 of SEQ ID NO: 1881510
auaagucucgucuaaucag

SEQ ID NO: 2050133 - RNA, 19 nt, Artificial Sequence
  Description of Artificial Sequence: Synthetic oligonucleotide
  Antisense strand to SEQ ID NO: 2050132
cugauuagacgagacuuau

SEQ ID NO: 2050134 - RNA, 19 nt, Artificial Sequence
  Description of Artificial Sequence: Synthetic oligonucleotide
  Sense strand starting at position 2948 of SEQ ID NO: 1881510
cugagagcauucuccuaag

SEQ ID NO: 2050135 - RNA, 19 nt, Artificial Sequence
  Description of Artificial Sequence: Synthetic oligonucleotide
  Antisense strand to SEQ ID NO: 2050134
cuuaggagaaugcucucag

SEQ ID NO: 2050136 - RNA, 19 nt, Artificial Sequence
  Description of Artificial Sequence: Synthetic oligonucleotide
  Sense strand starting at position 3103 of SEQ ID NO: 1881510
uuaucacucccagauguuc

SEQ ID NO: 2050137 - RNA, 19 nt, Artificial Sequence
  Description of Artificial Sequence: Synthetic oligonucleotide
  Antisense strand to SEQ ID NO: 2050136
gaacaucugggagugauaa

SEQ ID NO: 2050138 - RNA, 19 nt, Artificial Sequence
  Description of Artificial Sequence: Synthetic oligonucleotide
  Sense strand starting at position 3114 of SEQ ID NO: 1881510
agauguuccaaacgaaguu

SEQ ID NO: 2050139 - RNA, 19 nt, Artificial Sequence
  Description of Artificial Sequence: Synthetic oligonucleotide
  Antisense strand to SEQ ID NO: 2050138
aacuucguuuggaacaucu

SEQ ID NO: 2050140 - RNA, 19 nt, Artificial Sequence
  Description of Artificial Sequence: Synthetic oligonucleotide
  Sense strand starting at position 3227 of SEQ ID NO: 1881510
agcuaauagagugauggua

SEQ ID NO: 2050141 - RNA, 19 nt, Artificial Sequence
  Description of Artificial Sequence: Synthetic oligonucleotide
  Antisense strand to SEQ ID NO: 2050140
uaccaucacucuauuagcu

SEQ ID NO: 2050142 - RNA, 19 nt, Artificial Sequence
  Description of Artificial Sequence: Synthetic oligonucleotide
  Sense strand starting at position 3463 of SEQ ID NO: 1881510
gacaccucgcaaugaagaa

SEQ ID NO: 2050143 - RNA, 19 nt, Artificial Sequence
  Description of Artificial Sequence: Synthetic oligonucleotide
  Antisense strand to SEQ ID NO: 2050142
uucuucauugcgagguguc

SEQ ID NO: 2050144 - RNA, 19 nt, Artificial Sequence
  Description of Artificial Sequence: Synthetic oligonucleotide
  Sense strand starting at position 3467 of SEQ ID NO: 1881510
ccucgcaaugaagaauuau

SEQ ID NO: 2050145 - RNA, 19 nt, Artificial Sequence
  Description of Artificial Sequence: Synthetic oligonucleotide
  Antisense strand to SEQ ID NO: 2050144
auaauucuucauugcgagg

SEQ ID NO: 2050146 - RNA, 19 nt, Artificial Sequence
  Description of Artificial Sequence: Synthetic oligonucleotide
  Sense strand starting at position 3744 of SEQ ID NO: 1881510
gaaucuauagauugcugua

SEQ ID NO: 2050147 - RNA, 19 nt, Artificial Sequence
  Description of Artificial Sequence: Synthetic oligonucleotide
  Antisense strand to SEQ ID NO: 2050146
uacagcaaucuauagauuc

SEQ ID NO: 2050148 - RNA, 19 nt, Artificial Sequence
  Description of Artificial Sequence: Synthetic oligonucleotide
  Sense strand starting at position 3763 of SEQ ID NO: 1881510
accucaagaugaugauuua

SEQ ID NO: 2050149 - RNA, 19 nt, Artificial Sequence
  Description of Artificial Sequence: Synthetic oligonucleotide
  Antisense strand to SEQ ID NO: 2050148
uaaaucaucaucuugaggu

SEQ ID NO: 2050150 - RNA, 19 nt, Artificial Sequence
  Description of Artificial Sequence: Synthetic oligonucleotide
  Sense strand starting at position 3812 of SEQ ID NO: 1881510
augucuuuccucgaaauga

SEQ ID NO: 2050151 - RNA, 19 nt, Artificial Sequence
  Description of Artificial Sequence: Synthetic oligonucleotide
  Antisense strand to SEQ ID NO: 2050150
ucauuucgaggaaagacau

SEQ ID NO: 2050152 - RNA, 19 nt, Artificial Sequence
  Description of Artificial Sequence: Synthetic oligonucleotide
  Sense strand starting at position 3820 of SEQ ID NO: 1881510
ccucgaaaugaguacccaa

SEQ ID NO: 2050153 - RNA, 19 nt, Artificial Sequence
  Description of Artificial Sequence: Synthetic oligonucleotide
  Antisense strand to SEQ ID NO: 2050152
uuggguacucauuucgagg

SEQ ID NO: 2050154 - RNA, 19 nt, Artificial Sequence
  Description of Artificial Sequence: Synthetic oligonucleotide
  Sense strand starting at position 3823 of SEQ ID NO: 1881510
cgaaaugaguacccaagau

SEQ ID NO: 2050155 - RNA, 19 nt, Artificial Sequence
  Description of Artificial Sequence: Synthetic oligonucleotide
  Antisense strand to SEQ ID NO: 2050154
aucuuggguacucauuucg

SEQ ID NO: 2050156 - RNA, 19 nt, Artificial Sequence
  Description of Artificial Sequence: Synthetic oligonucleotide
  Sense strand starting at position 3926 of SEQ ID NO: 1881510
agggcuaauucucccuuga

SEQ ID NO: 2050157 - RNA, 19 nt, Artificial Sequence
  Description of Artificial Sequence: Synthetic oligonucleotide
  Antisense strand to SEQ ID NO: 2050156
ucaagggagaauuagcccu

SEQ ID NO: 2050158 - RNA, 19 nt, Artificial Sequence
  Description of Artificial Sequence: Synthetic oligonucleotide
  Sense strand starting at position 255 of SEQ ID NO: 1881511
guauguguaagugcuguga

SEQ ID NO: 2050159 - RNA, 19 nt, Artificial Sequence
  Description of Artificial Sequence: Synthetic oligonucleotide
  Antisense strand to SEQ ID NO: 2050158
ucacagcacuuacacauac

SEQ ID NO: 2050160 - RNA, 19 nt, Artificial Sequence
  Description of Artificial Sequence: Synthetic oligonucleotide
  Sense strand starting at position 268 of SEQ ID NO: 1881511
cugugaacucagcauaauc

SEQ ID NO: 2050161 - RNA, 19 nt, Artificial Sequence
  Description of Artificial Sequence: Synthetic oligonucleotide
  Antisense strand to SEQ ID NO: 2050160
gauuaugcugaguucacag

SEQ ID NO: 2050162 - RNA, 19 nt, Artificial Sequence
  Description of Artificial Sequence: Synthetic oligonucleotide
  Sense strand starting at position 270 of SEQ ID NO: 1881511
gugaacucagcauaaucuu

SEQ ID NO: 2050163 - RNA, 19 nt, Artificial Sequence
  Description of Artificial Sequence: Synthetic oligonucleotide
  Antisense strand to SEQ ID NO: 2050162
aagauuaugcugaguucac

SEQ ID NO: 2050164 - RNA, 19 nt, Artificial Sequence
  Description of Artificial Sequence: Synthetic oligonucleotide
  Sense strand starting at position 289 of SEQ ID NO: 1881511
ggguuuaucucuuccuaaa

SEQ ID NO: 2050165 - RNA, 19 nt, Artificial Sequence
  Description of Artificial Sequence: Synthetic oligonucleotide
  Antisense strand to SEQ ID NO: 2050164
uuuaggaagagauaaaccc

SEQ ID NO: 2050166 - RNA, 19 nt, Artificial Sequence
  Description of Artificial Sequence: Synthetic oligonucleotide
  Sense strand starting at position 340 of SEQ ID NO: 1881511
gugccaccacauuauuauu

SEQ ID NO: 2050167 - RNA, 19 nt, Artificial Sequence
  Description of Artificial Sequence: Synthetic oligonucleotide
  Antisense strand to SEQ ID NO: 2050166
aauaauaaugugguggcac

SEQ ID NO: 2050168 - RNA, 19 nt, Artificial Sequence
  Description of Artificial Sequence: Synthetic oligonucleotide
  Sense strand starting at position 522 of SEQ ID NO: 1881511
gcaggauacauugaagugu

SEQ ID NO: 2050169 - RNA, 19 nt, Artificial Sequence
  Description of Artificial Sequence: Synthetic oligonucleotide
  Antisense strand to SEQ ID NO: 2050168
acacuucaauguauccugc

SEQ ID NO: 2050170 - RNA, 19 nt, Artificial Sequence
  Description of Artificial Sequence: Synthetic oligonucleotide
  Sense strand starting at position 609 of SEQ ID NO: 1881511
gucugugucagagagguag

SEQ ID NO: 2050171 - RNA, 19 nt, Artificial Sequence
  Description of Artificial Sequence: Synthetic oligonucleotide
  Antisense strand to SEQ ID NO: 2050170
cuaccucucugacacagac

SEQ ID NO: 2050172 - RNA, 19 nt, Artificial Sequence
  Description of Artificial Sequence: Synthetic oligonucleotide
  Sense strand starting at position 645 of SEQ ID NO: 1881511
aaauguugugguuaagaag

SEQ ID NO: 2050173 - RNA, 19 nt, Artificial Sequence
  Description of Artificial Sequence: Synthetic oligonucleotide
  Antisense strand to SEQ ID NO: 2050172
cuucuuaaccacaacauuu

SEQ ID NO: 2050174 - RNA, 19 nt, Artificial Sequence
  Description of Artificial Sequence: Synthetic oligonucleotide
  Sense strand starting at position 721 of SEQ ID NO: 1881511
agggacaguuuauccuuaa

SEQ ID NO: 2050175 - RNA, 19 nt, Artificial Sequence
  Description of Artificial Sequence: Synthetic oligonucleotide
  Antisense strand to SEQ ID NO: 2050174
uuaaggauaaacugucccu

SEQ ID NO: 2050176 - RNA, 19 nt, Artificial Sequence
  Description of Artificial Sequence: Synthetic oligonucleotide
  Sense strand starting at position 722 of SEQ ID NO: 1881511
gggacaguuuauccuuaaa

SEQ ID NO: 2050177 - RNA, 19 nt, Artificial Sequence
  Description of Artificial Sequence: Synthetic oligonucleotide
  Antisense strand to SEQ ID NO: 2050176
uuuaaggauaaacuguccc

SEQ ID NO: 2050178 - RNA, 19 nt, Artificial Sequence
  Description of Artificial Sequence: Synthetic oligonucleotide
  Sense strand starting at position 786 of SEQ ID NO: 1881511
guucucauuugucuccaca

SEQ ID NO: 2050179 - RNA, 19 nt, Artificial Sequence
  Description of Artificial Sequence: Synthetic oligonucleotide
  Antisense strand to SEQ ID NO: 2050178
uguggagacaaaugagaac

SEQ ID NO: 2050180 - RNA, 19 nt, Artificial Sequence
  Description of Artificial Sequence: Synthetic oligonucleotide
  Sense strand starting at position 799 of SEQ ID NO: 1881511
uccacaauguauucugaga

SEQ ID NO: 2050181 - RNA, 19 nt, Artificial Sequence
  Description of Artificial Sequence: Synthetic oligonucleotide
  Antisense strand to SEQ ID NO: 2050180
ucucagaauacauugugga

SEQ ID NO: 2050182 - RNA, 19 nt, Artificial Sequence
  Description of Artificial Sequence: Synthetic oligonucleotide
  Sense strand starting at position 813 of SEQ ID NO: 1881511
ugagaaaccuuacuguaca

SEQ ID NO: 2050183 - RNA, 19 nt, Artificial Sequence
  Description of Artificial Sequence: Synthetic oligonucleotide
  Antisense strand to SEQ ID NO: 2050182
uguacaguaagguuucuca

SEQ ID NO: 2050184 - RNA, 19 nt, Artificial Sequence
  Description of Artificial Sequence: Synthetic oligonucleotide
  Sense strand starting at position 866 of SEQ ID NO: 1881511
ggaacaauguuauaauuug

SEQ ID NO: 2050185 - RNA, 19 nt, Artificial Sequence
  Description of Artificial Sequence: Synthetic oligonucleotide
  Antisense strand to SEQ ID NO: 2050184
caaauuauaacauuguucc

SEQ ID NO: 2050186 - RNA, 19 nt, Artificial Sequence
  Description of Artificial Sequence: Synthetic oligonucleotide
  Sense strand starting at position 881 of SEQ ID NO: 1881511
uuugauguuauaugguaga

SEQ ID NO: 2050187 - RNA, 19 nt, Artificial Sequence
  Description of Artificial Sequence: Synthetic oligonucleotide
  Antisense strand to SEQ ID NO: 2050186
ucuaccauauaacaucaaa

SEQ ID NO: 2050188 - RNA, 19 nt, Artificial Sequence
  Description of Artificial Sequence: Synthetic oligonucleotide
  Sense strand starting at position 1023 of SEQ ID NO: 1881511
uguacuauauacucugaua

SEQ ID NO: 2050189 - RNA, 19 nt, Artificial Sequence
  Description of Artificial Sequence: Synthetic oligonucleotide
  Antisense strand to SEQ ID NO: 2050188
uaucagaguauauaguaca

SEQ ID NO: 2050190 - RNA, 19 nt, Artificial Sequence
  Description of Artificial Sequence: Synthetic oligonucleotide
  Sense strand starting at position 1256 of SEQ ID NO: 1881511
ucccacuuacaguaugauu

SEQ ID NO: 2050191 - RNA, 19 nt, Artificial Sequence
  Description of Artificial Sequence: Synthetic oligonucleotide
  Antisense strand to SEQ ID NO: 2050190
aaucauacuguaaguggga

SEQ ID NO: 2050192 - RNA, 19 nt, Artificial Sequence
  Description of Artificial Sequence: Synthetic oligonucleotide
  Sense strand starting at position 1261 of SEQ ID NO: 1881511
cuuacaguaugauuaaaug

SEQ ID NO: 2050193 - RNA, 19 nt, Artificial Sequence
  Description of Artificial Sequence: Synthetic oligonucleotide
  Antisense strand to SEQ ID NO: 2050192
cauuuaaucauacuguaag

SEQ ID NO: 2050194 - RNA, 19 nt, Artificial Sequence
  Description of Artificial Sequence: Synthetic oligonucleotide
  Sense strand starting at position 1483 of SEQ ID NO: 1881511
guggaagaaucuccauaac

SEQ ID NO: 2050195 - RNA, 19 nt, Artificial Sequence
  Description of Artificial Sequence: Synthetic oligonucleotide
  Antisense strand to SEQ ID NO: 2050194
guuauggagauucuuccac

SEQ ID NO: 2050196 - RNA, 19 nt, Artificial Sequence
  Description of Artificial Sequence: Synthetic oligonucleotide
  Sense strand starting at position 1553 of SEQ ID NO: 1881511
guauuuauuccaggccuua

SEQ ID NO: 2050197 - RNA, 19 nt, Artificial Sequence
  Description of Artificial Sequence: Synthetic oligonucleotide
  Antisense strand to SEQ ID NO: 2050196
uaaggccuggaauaaauac

SEQ ID NO: 2050198 - RNA, 19 nt, Artificial Sequence
  Description of Artificial Sequence: Synthetic oligonucleotide
  Sense strand starting at position 2018 of SEQ ID NO: 1881511
ugucaacacuuccuggaaa

SEQ ID NO: 2050199 - RNA, 19 nt, Artificial Sequence
  Description of Artificial Sequence: Synthetic oligonucleotide
  Antisense strand to SEQ ID NO: 2050198
uuuccaggaaguguugaca

SEQ ID NO: 2050200 - RNA, 19 nt, Artificial Sequence
  Description of Artificial Sequence: Synthetic oligonucleotide
  Sense strand starting at position 2211 of SEQ ID NO: 1881511
agagaaaguuucccaauug

SEQ ID NO: 2050201 - RNA, 19 nt, Artificial Sequence
  Description of Artificial Sequence: Synthetic oligonucleotide
  Antisense strand to SEQ ID NO: 2050200
caauugggaaacuuucucu

SEQ ID NO: 2050202 - RNA, 19 nt, Artificial Sequence
  Description of Artificial Sequence: Synthetic oligonucleotide
  Sense strand starting at position 2240 of SEQ ID NO: 1881511
ugcugacuucuccaggacu

SEQ ID NO: 2050203 - RNA, 19 nt, Artificial Sequence
  Description of Artificial Sequence: Synthetic oligonucleotide
  Antisense strand to SEQ ID NO: 2050202
aguccuggagaagucagca

SEQ ID NO: 2050204 - RNA, 19 nt, Artificial Sequence
  Description of Artificial Sequence: Synthetic oligonucleotide
  Sense strand starting at position 2242 of SEQ ID NO: 1881511
cugacuucuccaggacuca

SEQ ID NO: 2050205 - RNA, 19 nt, Artificial Sequence
  Description of Artificial Sequence: Synthetic oligonucleotide
  Antisense strand to SEQ ID NO: 2050204
ugaguccuggagaagucag

SEQ ID NO: 2050206 - RNA, 19 nt, Artificial Sequence
  Description of Artificial Sequence: Synthetic oligonucleotide
  Sense strand starting at position 2599 of SEQ ID NO: 1881511
ugguaauaugcauaucuau

SEQ ID NO: 2050207 - RNA, 19 nt, Artificial Sequence
  Description of Artificial Sequence: Synthetic oligonucleotide
  Antisense strand to SEQ ID NO: 2050206
auagauaugcauauuacca

SEQ ID NO: 2050208 - RNA, 19 nt, Artificial Sequence
  Description of Artificial Sequence: Synthetic oligonucleotide
  Sense strand starting at position 2879 of SEQ ID NO: 1881511
ucuguauauuuagugcuga

SEQ ID NO: 2050209 - RNA, 19 nt, Artificial Sequence
  Description of Artificial Sequence: Synthetic oligonucleotide
  Antisense strand to SEQ ID NO: 2050208
ucagcacuaaauauacaga

SEQ ID NO: 2050210 - RNA, 19 nt, Artificial Sequence
  Description of Artificial Sequence: Synthetic oligonucleotide
  Sense strand starting at position 2952 of SEQ ID NO: 1881511
accagcucuaggugagaua

SEQ ID NO: 2050211 - RNA, 19 nt, Artificial Sequence
  Description of Artificial Sequence: Synthetic oligonucleotide
  Antisense strand to SEQ ID NO: 2050210
uaucucaccuagagcuggu

SEQ ID NO: 2050212 - RNA, 19 nt, Artificial Sequence
  Description of Artificial Sequence: Synthetic oligonucleotide
  Sense strand starting at position 2961 of SEQ ID NO: 1881511
aggugagauacauguguca

SEQ ID NO: 2050213 - RNA, 19 nt, Artificial Sequence
  Description of Artificial Sequence: Synthetic oligonucleotide
  Antisense strand to SEQ ID NO: 2050212
ugacacauguaucucaccu

SEQ ID NO: 2050214 - RNA, 19 nt, Artificial Sequence
  Description of Artificial Sequence: Synthetic oligonucleotide
  Sense strand starting at position 3035 of SEQ ID NO: 1881511
agaauccagguaugcauaa

SEQ ID NO: 2050215 - RNA, 19 nt, Artificial Sequence
  Description of Artificial Sequence: Synthetic oligonucleotide
  Antisense strand to SEQ ID NO: 2050214
uuaugcauaccuggauucu

SEQ ID NO: 2050216 - RNA, 19 nt, Artificial Sequence
  Description of Artificial Sequence: Synthetic oligonucleotide
  Sense strand starting at position 3054 of SEQ ID NO: 1881511
ggcagucuccauuaagaau

SEQ ID NO: 2050217 - RNA, 19 nt, Artificial Sequence
  Description of Artificial Sequence: Synthetic oligonucleotide
  Antisense strand to SEQ ID NO: 2050216
auucuuaauggagacugcc

SEQ ID NO: 2050218 - RNA, 19 nt, Artificial Sequence
  Description of Artificial Sequence: Synthetic oligonucleotide
  Sense strand starting at position 3285 of SEQ ID NO: 1881511
ugugaauuauuaucaguag

SEQ ID NO: 2050219 - RNA, 19 nt, Artificial Sequence
  Description of Artificial Sequence: Synthetic oligonucleotide
  Antisense strand to SEQ ID NO: 2050218
cuacugauaauaauucaca

SEQ ID NO: 2050220 - RNA, 19 nt, Artificial Sequence
  Description of Artificial Sequence: Synthetic oligonucleotide
  Sense strand starting at position 3369 of SEQ ID NO: 1881511
cugucauacugauuucguu

SEQ ID NO: 2050221 - RNA, 19 nt, Artificial Sequence
  Description of Artificial Sequence: Synthetic oligonucleotide
  Antisense strand to SEQ ID NO: 2050220
aacgaaaucaguaugacag

SEQ ID NO: 2050222 - RNA, 19 nt, Artificial Sequence
  Description of Artificial Sequence: Synthetic oligonucleotide
  Sense strand starting at position 3479 of SEQ ID NO: 1881511
uguggcaugcuuguguaau

SEQ ID NO: 2050223 - RNA, 19 nt, Artificial Sequence
  Description of Artificial Sequence: Synthetic oligonucleotide
  Antisense strand to SEQ ID NO: 2050222
auuacacaagcaugccaca

SEQ ID NO: 2050224 - RNA, 19 nt, Artificial Sequence
  Description of Artificial Sequence: Synthetic oligonucleotide
  Sense strand starting at position 3625 of SEQ ID NO: 1881511
uuuguaagcauauggaaag

SEQ ID NO: 2050225 - RNA, 19 nt, Artificial Sequence
  Description of Artificial Sequence: Synthetic oligonucleotide
  Antisense strand to SEQ ID NO: 2050224
cuuuccauaugcuuacaaa

SEQ ID NO: 2050226 - RNA, 19 nt, Artificial Sequence
  Description of Artificial Sequence: Synthetic oligonucleotide
  Sense strand starting at position 3631 of SEQ ID NO: 1881511
agcauauggaaagguauua

SEQ ID NO: 2050227 - RNA, 19 nt, Artificial Sequence
  Description of Artificial Sequence: Synthetic oligonucleotide
  Antisense strand to SEQ ID NO: 2050226
uaauaccuuuccauaugcu

SEQ ID NO: 2050228 - RNA, 19 nt, Artificial Sequence
  Description of Artificial Sequence: Synthetic oligonucleotide
  Sense strand starting at position 3641 of SEQ ID NO: 1881511
aagguauuacaacgugaag

SEQ ID NO: 2050229 - RNA, 19 nt, Artificial Sequence
  Description of Artificial Sequence: Synthetic oligonucleotide
  Antisense strand to SEQ ID NO: 2050228
cuucacguuguaauaccuu

SEQ ID NO: 2050230 - RNA, 19 nt, Artificial Sequence
  Description of Artificial Sequence: Synthetic oligonucleotide
  Sense strand starting at position 3644 of SEQ ID NO: 1881511
guauuacaacgugaaguau

SEQ ID NO: 2050231 - RNA, 19 nt, Artificial Sequence
  Description of Artificial Sequence: Synthetic oligonucleotide
  Antisense strand to SEQ ID NO: 2050230
auacuucacguuguaauac

SEQ ID NO: 2050232 - RNA, 19 nt, Artificial Sequence
  Description of Artificial Sequence: Synthetic oligonucleotide
  Sense strand starting at position 3747 of SEQ ID NO: 1881511
uaagaaugguguccugaug

SEQ ID NO: 2050233 - RNA, 19 nt, Artificial Sequence
  Description of Artificial Sequence: Synthetic oligonucleotide
  Antisense strand to SEQ ID NO: 2050232
caucaggacaccauucuua

SEQ ID NO: 2050234 - RNA, 19 nt, Artificial Sequence
  Description of Artificial Sequence: Synthetic oligonucleotide
  Sense strand starting at position 3845 of SEQ ID NO: 1881511
cucuguuacgacuacucaa

SEQ ID NO: 2050235 - RNA, 19 nt, Artificial Sequence
  Description of Artificial Sequence: Synthetic oligonucleotide
  Antisense strand to SEQ ID NO: 2050234
uugaguagucguaacagag

SEQ ID NO: 2050236 - RNA, 19 nt, Artificial Sequence
  Description of Artificial Sequence: Synthetic oligonucleotide
  Sense strand starting at position 3906 of SEQ ID NO: 1881511
augaaugaucgugauugug

SEQ ID NO: 2050237 - RNA, 19 nt, Artificial Sequence
  Description of Artificial Sequence: Synthetic oligonucleotide
  Antisense strand to SEQ ID NO: 2050236
cacaaucacgaucauucau

SEQ ID NO: 2050238 - RNA, 19 nt, Artificial Sequence
  Description of Artificial Sequence: Synthetic oligonucleotide
  Sense strand starting at position 41 of SEQ ID NO: 1881512
ugggcuucuccugagcaaa

SEQ ID NO: 2050239 - RNA, 19 nt, Artificial Sequence
  Description of Artificial Sequence: Synthetic oligonucleotide
  Antisense strand to SEQ ID NO: 2050238
uuugcucaggagaagccca

SEQ ID NO: 2050240 - RNA, 19 nt, Artificial Sequence
  Description of Artificial Sequence: Synthetic oligonucleotide
  Sense strand starting at position 44 of SEQ ID NO: 1881512
gcuucuccugagcaaauga

SEQ ID NO: 2050241 - RNA, 19 nt, Artificial Sequence
  Description of Artificial Sequence: Synthetic oligonucleotide
  Antisense strand to SEQ ID NO: 2050240
ucauuugcucaggagaagc

SEQ ID NO: 2050242 - RNA, 19 nt, Artificial Sequence
  Description of Artificial Sequence: Synthetic oligonucleotide
  Sense strand starting at position 368 of SEQ ID NO: 1881512
gacaucacccuauggugaa

SEQ ID NO: 2050243 - RNA, 19 nt, Artificial Sequence
  Description of Artificial Sequence: Synthetic oligonucleotide
  Antisense strand to SEQ ID NO: 2050242
uucaccauagggugauguc

SEQ ID NO: 2050244 - RNA, 19 nt, Artificial Sequence
  Description of Artificial Sequence: Synthetic oligonucleotide
  Sense strand starting at position 434 of SEQ ID NO: 1881512
gugauaacuuauuccgaga

SEQ ID NO: 2050245 - RNA, 19 nt, Artificial Sequence
  Description of Artificial Sequence: Synthetic oligonucleotide
  Antisense strand to SEQ ID NO: 2050244
ucucggaauaaguuaucac

SEQ ID NO: 2050246 - RNA, 19 nt, Artificial Sequence
  Description of Artificial Sequence: Synthetic oligonucleotide
  Sense strand starting at position 447 of SEQ ID NO: 1881512
ccgagagacugaccuauga

SEQ ID NO: 2050247 - RNA, 19 nt, Artificial Sequence
  Description of Artificial Sequence: Synthetic oligonucleotide
  Antisense strand to SEQ ID NO: 2050246
ucauaggucagucucucgg

SEQ ID NO: 2050248 - RNA, 19 nt, Artificial Sequence
  Description of Artificial Sequence: Synthetic oligonucleotide
  Sense strand starting at position 457 of SEQ ID NO: 1881512
gaccuaugacauugcugau

SEQ ID NO: 2050249 - RNA, 19 nt, Artificial Sequence
  Description of Artificial Sequence: Synthetic oligonucleotide
  Antisense strand to SEQ ID NO: 2050248
aucagcaaugucauagguc

SEQ ID NO: 2050250 - RNA, 19 nt, Artificial Sequence
  Description of Artificial Sequence: Synthetic oligonucleotide
  Sense strand starting at position 461 of SEQ ID NO: 1881512
uaugacauugcugauguga

SEQ ID NO: 2050251 - RNA, 19 nt, Artificial Sequence
  Description of Artificial Sequence: Synthetic oligonucleotide
  Antisense strand to SEQ ID NO: 2050250
ucacaucagcaaugucaua

SEQ ID NO: 2050252 - RNA, 19 nt, Artificial Sequence
  Description of Artificial Sequence: Synthetic oligonucleotide
  Sense strand starting at position 542 of SEQ ID NO: 1881512
guuggaaauaccgacuuua

SEQ ID NO: 2050253 - RNA, 19 nt, Artificial Sequence
  Description of Artificial Sequence: Synthetic oligonucleotide
  Antisense strand to SEQ ID NO: 2050252
uaaagucgguauuuccaac

SEQ ID NO: 2050254 - RNA, 19 nt, Artificial Sequence
  Description of Artificial Sequence: Synthetic oligonucleotide
  Sense strand starting at position 567 of SEQ ID NO: 1881512
cuucuaaaguugucuggaa

SEQ ID NO: 2050255 - RNA, 19 nt, Artificial Sequence
  Description of Artificial Sequence: Synthetic oligonucleotide
  Antisense strand to SEQ ID NO: 2050254
uuccagacaacuuuagaag

SEQ ID NO: 2050256 - RNA, 19 nt, Artificial Sequence
  Description of Artificial Sequence: Synthetic oligonucleotide
  Sense strand starting at position 568 of SEQ ID NO: 1881512
uucuaaaguugucuggaaa

SEQ ID NO: 2050257 - RNA, 19 nt, Artificial Sequence
  Description of Artificial Sequence: Synthetic oligonucleotide
  Antisense strand to SEQ ID NO: 2050256
uuuccagacaacuuuagaa

SEQ ID NO: 2050258 - RNA, 19 nt, Artificial Sequence
  Description of Artificial Sequence: Synthetic oligonucleotide
  Sense strand starting at position 569 of SEQ ID NO: 1881512
ucuaaaguugucuggaaag

SEQ ID NO: 2050259 - RNA, 19 nt, Artificial Sequence
  Description of Artificial Sequence: Synthetic oligonucleotide
  Antisense strand to SEQ ID NO: 2050258
cuuuccagacaacuuuaga

SEQ ID NO: 2050260 - RNA, 19 nt, Artificial Sequence
  Description of Artificial Sequence: Synthetic oligonucleotide
  Sense strand starting at position 571 of SEQ ID NO: 1881512
uaaaguugucuggaaagca

SEQ ID NO: 2050261 - RNA, 19 nt, Artificial Sequence
  Description of Artificial Sequence: Synthetic oligonucleotide
  Antisense strand to SEQ ID NO: 2050260
ugcuuuccagacaacuuua

SEQ ID NO: 2050262 - RNA, 19 nt, Artificial Sequence
  Description of Artificial Sequence: Synthetic oligonucleotide
  Sense strand starting at position 745 of SEQ ID NO: 1881512
cuagacauguaguugaaua

SEQ ID NO: 2050263 - RNA, 19 nt, Artificial Sequence
  Description of Artificial Sequence: Synthetic oligonucleotide
  Antisense strand to SEQ ID NO: 2050262
uauucaacuacaugucuag

SEQ ID NO: 2050264 - RNA, 19 nt, Artificial Sequence
  Description of Artificial Sequence: Synthetic oligonucleotide
  Sense strand starting at position 1263 of SEQ ID NO: 1881512
aacguaguugaacaauaua

SEQ ID NO: 2050265 - RNA, 19 nt, Artificial Sequence
  Description of Artificial Sequence: Synthetic oligonucleotide
  Antisense strand to SEQ ID NO: 2050264
uauauuguucaacuacguu

SEQ ID NO: 2050266 - RNA, 19 nt, Artificial Sequence
  Description of Artificial Sequence: Synthetic oligonucleotide
  Sense strand starting at position 1277 of SEQ ID NO: 1881512
auauauuguguccaucaca

SEQ ID NO: 2050267 - RNA, 19 nt, Artificial Sequence
  Description of Artificial Sequence: Synthetic oligonucleotide
  Antisense strand to SEQ ID NO: 2050266
ugugauggacacaauauau

SEQ ID NO: 2050268 - RNA, 19 nt, Artificial Sequence
  Description of Artificial Sequence: Synthetic oligonucleotide
  Sense strand starting at position 1474 of SEQ ID NO: 1881512
gugcuaucagccuuugguu

SEQ ID NO: 2050269 - RNA, 19 nt, Artificial Sequence
  Description of Artificial Sequence: Synthetic oligonucleotide
  Antisense strand to SEQ ID NO: 2050268
aaccaaaggcugauagcac

SEQ ID NO: 2050270 - RNA, 19 nt, Artificial Sequence
  Description of Artificial Sequence: Synthetic oligonucleotide
  Sense strand starting at position 1605 of SEQ ID NO: 1881512
guguaaggauucccugaca

SEQ ID NO: 2050271 - RNA, 19 nt, Artificial Sequence
  Description of Artificial Sequence: Synthetic oligonucleotide
  Antisense strand to SEQ ID NO: 2050270
ugucagggaauccuuacac

SEQ ID NO: 2050272 - RNA, 19 nt, Artificial Sequence
  Description of Artificial Sequence: Synthetic oligonucleotide
  Sense strand starting at position 1621 of SEQ ID NO: 1881512
acaguuuaauuauccaagu

SEQ ID NO: 2050273 - RNA, 19 nt, Artificial Sequence
  Description of Artificial Sequence: Synthetic oligonucleotide
  Antisense strand to SEQ ID NO: 2050272
acuuggauaauuaaacugu

SEQ ID NO: 2050274 - RNA, 19 nt, Artificial Sequence
  Description of Artificial Sequence: Synthetic oligonucleotide
  Sense strand starting at position 1662 of SEQ ID NO: 1881512
aguuaauugccauagaccu

SEQ ID NO: 2050275 - RNA, 19 nt, Artificial Sequence
  Description of Artificial Sequence: Synthetic oligonucleotide
  Antisense strand to SEQ ID NO: 2050274
aggucuauggcaauuaacu

SEQ ID NO: 2050276 - RNA, 19 nt, Artificial Sequence
  Description of Artificial Sequence: Synthetic oligonucleotide
  Sense strand starting at position 1767 of SEQ ID NO: 1881512
gguccacuggaguacauau

SEQ ID NO: 2050277 - RNA, 19 nt, Artificial Sequence
  Description of Artificial Sequence: Synthetic oligonucleotide
  Antisense strand to SEQ ID NO: 2050276
auauguacuccaguggacc

SEQ ID NO: 2050278 - RNA, 19 nt, Artificial Sequence
  Description of Artificial Sequence: Synthetic oligonucleotide
  Sense strand starting at position 1784 of SEQ ID NO: 1881512
auugaagagacaugucgaa

SEQ ID NO: 2050279 - RNA, 19 nt, Artificial Sequence
  Description of Artificial Sequence: Synthetic oligonucleotide
  Antisense strand to SEQ ID NO: 2050278
uucgacaugucucuucaau

SEQ ID NO: 2050280 - RNA, 19 nt, Artificial Sequence
  Description of Artificial Sequence: Synthetic oligonucleotide
  Sense strand starting at position 2042 of SEQ ID NO: 1881512
gcaucacaugcagagcaau

SEQ ID NO: 2050281 - RNA, 19 nt, Artificial Sequence
  Description of Artificial Sequence: Synthetic oligonucleotide
  Antisense strand to SEQ ID NO: 2050280
auugcucugcaugugaugc

SEQ ID NO: 2050282 - RNA, 19 nt, Artificial Sequence
  Description of Artificial Sequence: Synthetic oligonucleotide
  Sense strand starting at position 2053 of SEQ ID NO: 1881512
agagcaauuucugauggga

SEQ ID NO: 2050283 - RNA, 19 nt, Artificial Sequence
  Description of Artificial Sequence: Synthetic oligonucleotide
  Antisense strand to SEQ ID NO: 2050282
ucccaucagaaauugcucu

SEQ ID NO: 2050284 - RNA, 19 nt, Artificial Sequence
  Description of Artificial Sequence: Synthetic oligonucleotide
  Sense strand starting at position 2141 of SEQ ID NO: 1881512
agcugacaucucugacaac

SEQ ID NO: 2050285 - RNA, 19 nt, Artificial Sequence
  Description of Artificial Sequence: Synthetic oligonucleotide
  Antisense strand to SEQ ID NO: 2050284
guugucagagaugucagcu

SEQ ID NO: 2050286 - RNA, 19 nt, Artificial Sequence
  Description of Artificial Sequence: Synthetic oligonucleotide
  Sense strand starting at position 2270 of SEQ ID NO: 1881512
cugagucaccagcauguau

SEQ ID NO: 2050287 - RNA, 19 nt, Artificial Sequence
  Description of Artificial Sequence: Synthetic oligonucleotide
  Antisense strand to SEQ ID NO: 2050286
auacaugcuggugacucag

SEQ ID NO: 2050288 - RNA, 19 nt, Artificial Sequence
  Description of Artificial Sequence: Synthetic oligonucleotide
  Sense strand starting at position 2272 of SEQ ID NO: 1881512
gagucaccagcauguauuu

SEQ ID NO: 2050289 - RNA, 19 nt, Artificial Sequence
  Description of Artificial Sequence: Synthetic oligonucleotide
  Antisense strand to SEQ ID NO: 2050288
aaauacaugcuggugacuc

SEQ ID NO: 2050290 - RNA, 19 nt, Artificial Sequence
  Description of Artificial Sequence: Synthetic oligonucleotide
  Sense strand starting at position 2342 of SEQ ID NO: 1881512
gaguaauugagacacguau

SEQ ID NO: 2050291 - RNA, 19 nt, Artificial Sequence
  Description of Artificial Sequence: Synthetic oligonucleotide
  Antisense strand to SEQ ID NO: 2050290
auacgugucucaauuacuc

SEQ ID NO: 2050292 - RNA, 19 nt, Artificial Sequence
  Description of Artificial Sequence: Synthetic oligonucleotide
  Sense strand starting at position 2349 of SEQ ID NO: 1881512
ugagacacguauccaaaua

SEQ ID NO: 2050293 - RNA, 19 nt, Artificial Sequence
  Description of Artificial Sequence: Synthetic oligonucleotide
  Antisense strand to SEQ ID NO: 2050292
uauuuggauacgugucuca

SEQ ID NO: 2050294 - RNA, 19 nt, Artificial Sequence
  Description of Artificial Sequence: Synthetic oligonucleotide
  Sense strand starting at position 2865 of SEQ ID NO: 1881512
uggugaaggcguaguucuu

SEQ ID NO: 2050295 - RNA, 19 nt, Artificial Sequence
  Description of Artificial Sequence: Synthetic oligonucleotide
  Antisense strand to SEQ ID NO: 2050294
aagaacuacgccuucacca

SEQ ID NO: 2050296 - RNA, 19 nt, Artificial Sequence
  Description of Artificial Sequence: Synthetic oligonucleotide
  Sense strand starting at position 2872 of SEQ ID NO: 1881512
ggcguaguucuucuaguau

SEQ ID NO: 2050297 - RNA, 19 nt, Artificial Sequence
  Description of Artificial Sequence: Synthetic oligonucleotide
  Antisense strand to SEQ ID NO: 2050296
auacuagaagaacuacgcc

SEQ ID NO: 2050298 - RNA, 19 nt, Artificial Sequence
  Description of Artificial Sequence: Synthetic oligonucleotide
  Sense strand starting at position 2948 of SEQ ID NO: 1881512
gugccuucccuugagagga

SEQ ID NO: 2050299 - RNA, 19 nt, Artificial Sequence
  Description of Artificial Sequence: Synthetic oligonucleotide
  Antisense strand to SEQ ID NO: 2050298
uccucucaagggaaggcac

SEQ ID NO: 2050300 - RNA, 19 nt, Artificial Sequence
  Description of Artificial Sequence: Synthetic oligonucleotide
  Sense strand starting at position 3261 of SEQ ID NO: 1881512
gauuaacaccagugaacug

SEQ ID NO: 2050301 - RNA, 19 nt, Artificial Sequence
  Description of Artificial Sequence: Synthetic oligonucleotide
  Antisense strand to SEQ ID NO: 2050300
caguucacugguguuaauc

SEQ ID NO: 2050302 - RNA, 19 nt, Artificial Sequence
  Description of Artificial Sequence: Synthetic oligonucleotide
  Sense strand starting at position 3290 of SEQ ID NO: 1881512
ugauguauauaguuaccau

SEQ ID NO: 2050303 - RNA, 19 nt, Artificial Sequence
  Description of Artificial Sequence: Synthetic oligonucleotide
  Antisense strand to SEQ ID NO: 2050302
augguaacuauauacauca

SEQ ID NO: 2050304 - RNA, 19 nt, Artificial Sequence
  Description of Artificial Sequence: Synthetic oligonucleotide
  Sense strand starting at position 3293 of SEQ ID NO: 1881512
uguauauaguuaccauaag

SEQ ID NO: 2050305 - RNA, 19 nt, Artificial Sequence
  Description of Artificial Sequence: Synthetic oligonucleotide
  Antisense strand to SEQ ID NO: 2050304
cuuaugguaacuauauaca

SEQ ID NO: 2050306 - RNA, 19 nt, Artificial Sequence
  Description of Artificial Sequence: Synthetic oligonucleotide
  Sense strand starting at position 3391 of SEQ ID NO: 1881512
caccauuacguagaaaggu

SEQ ID NO: 2050307 - RNA, 19 nt, Artificial Sequence
  Description of Artificial Sequence: Synthetic oligonucleotide
  Antisense strand to SEQ ID NO: 2050306
accuuucuacguaauggug

SEQ ID NO: 2050308 - RNA, 19 nt, Artificial Sequence
  Description of Artificial Sequence: Synthetic oligonucleotide
  Sense strand starting at position 3407 of SEQ ID NO: 1881512
gguugugaaacugaaugua

SEQ ID NO: 2050309 - RNA, 19 nt, Artificial Sequence
  Description of Artificial Sequence: Synthetic oligonucleotide
  Antisense strand to SEQ ID NO: 2050308
uacauucaguuucacaacc

SEQ ID NO: 2050310 - RNA, 19 nt, Artificial Sequence
  Description of Artificial Sequence: Synthetic oligonucleotide
  Sense strand starting at position 3582 of SEQ ID NO: 1881512
cacagugaccguuacauca

SEQ ID NO: 2050311 - RNA, 19 nt, Artificial Sequence
  Description of Artificial Sequence: Synthetic oligonucleotide
  Antisense strand to SEQ ID NO: 2050310
ugauguaacggucacugug

SEQ ID NO: 2050312 - RNA, 19 nt, Artificial Sequence
  Description of Artificial Sequence: Synthetic oligonucleotide
  Sense strand starting at position 3778 of SEQ ID NO: 1881512
auggaaauauagccgauua

SEQ ID NO: 2050313 - RNA, 19 nt, Artificial Sequence
  Description of Artificial Sequence: Synthetic oligonucleotide
  Antisense strand to SEQ ID NO: 2050312
uaaucggcuauauuuccau

SEQ ID NO: 2050314 - RNA, 19 nt, Artificial Sequence
  Description of Artificial Sequence: Synthetic oligonucleotide
  Sense strand starting at position 3779 of SEQ ID NO: 1881512
uggaaauauagccgauuac

SEQ ID NO: 2050315 - RNA, 19 nt, Artificial Sequence
  Description of Artificial Sequence: Synthetic oligonucleotide
  Antisense strand to SEQ ID NO: 2050314
guaaucggcuauauuucca

SEQ ID NO: 2050316 - RNA, 19 nt, Artificial Sequence
  Description of Artificial Sequence: Synthetic oligonucleotide
  Sense strand starting at position 3819 of SEQ ID NO: 1881512
cccugagcuccugaaauua

SEQ ID NO: 2050317 - RNA, 19 nt, Artificial Sequence
  Description of Artificial Sequence: Synthetic oligonucleotide
  Antisense strand to SEQ ID NO: 2050316
uaauuucaggagcucaggg

SEQ ID NO: 2050318 - RNA, 19 nt, Artificial Sequence
  Description of Artificial Sequence: Synthetic oligonucleotide
  Sense strand starting at position 203 of SEQ ID NO: 1881513
uuucuaugacucgauuaug

SEQ ID NO: 2050319 - RNA, 19 nt, Artificial Sequence
  Description of Artificial Sequence: Synthetic oligonucleotide
  Antisense strand to SEQ ID NO: 2050318
cauaaucgagucauagaaa

SEQ ID NO: 2050320 - RNA, 19 nt, Artificial Sequence
  Description of Artificial Sequence: Synthetic oligonucleotide
  Sense strand starting at position 206 of SEQ ID NO: 1881513
cuaugacucgauuauggca

SEQ ID NO: 2050321 - RNA, 19 nt, Artificial Sequence
  Description of Artificial Sequence: Synthetic oligonucleotide
  Antisense strand to SEQ ID NO: 2050320
ugccauaaucgagucauag

SEQ ID NO: 2050322 - RNA, 19 nt, Artificial Sequence
  Description of Artificial Sequence: Synthetic oligonucleotide
  Sense strand starting at position 215 of SEQ ID NO: 1881513
gauuauggcaagugaugua

SEQ ID NO: 2050323 - RNA, 19 nt, Artificial Sequence
  Description of Artificial Sequence: Synthetic oligonucleotide
  Antisense strand to SEQ ID NO: 2050322
uacaucacuugccauaauc

SEQ ID NO: 2050324 - RNA, 19 nt, Artificial Sequence
  Description of Artificial Sequence: Synthetic oligonucleotide
  Sense strand starting at position 220 of SEQ ID NO: 1881513
uggcaagugauguauaaag

SEQ ID NO: 2050325 - RNA, 19 nt, Artificial Sequence
  Description of Artificial Sequence: Synthetic oligonucleotide
  Antisense strand to SEQ ID NO: 2050324
cuuuauacaucacuugcca

SEQ ID NO: 2050326 - RNA, 19 nt, Artificial Sequence
  Description of Artificial Sequence: Synthetic oligonucleotide
  Sense strand starting at position 404 of SEQ ID NO: 1881513
ggugccuuucgugcauaga

SEQ ID NO: 2050327 - RNA, 19 nt, Artificial Sequence
  Description of Artificial Sequence: Synthetic oligonucleotide
  Antisense strand to SEQ ID NO: 2050326
ucuaugcacgaaaggcacc

SEQ ID NO: 2050328 - RNA, 19 nt, Artificial Sequence
  Description of Artificial Sequence: Synthetic oligonucleotide
  Sense strand starting at position 407 of SEQ ID NO: 1881513
gccuuucgugcauagauuu

SEQ ID NO: 2050329 - RNA, 19 nt, Artificial Sequence
  Description of Artificial Sequence: Synthetic oligonucleotide
  Antisense strand to SEQ ID NO: 2050328
aaaucuaugcacgaaaggc

SEQ ID NO: 2050330 - RNA, 19 nt, Artificial Sequence
  Description of Artificial Sequence: Synthetic oligonucleotide
  Sense strand starting at position 428 of SEQ ID NO: 1881513
auuagagaauucuugguca

SEQ ID NO: 2050331 - RNA, 19 nt, Artificial Sequence
  Description of Artificial Sequence: Synthetic oligonucleotide
  Antisense strand to SEQ ID NO: 2050330
ugaccaagaauucucuaau

SEQ ID NO: 2050332 - RNA, 19 nt, Artificial Sequence
  Description of Artificial Sequence: Synthetic oligonucleotide
  Sense strand starting at position 430 of SEQ ID NO: 1881513
uagagaauucuuggucagu

SEQ ID NO: 2050333 - RNA, 19 nt, Artificial Sequence
  Description of Artificial Sequence: Synthetic oligonucleotide
  Antisense strand to SEQ ID NO: 2050332
acugaccaagaauucucua

SEQ ID NO: 2050334 - RNA, 19 nt, Artificial Sequence
  Description of Artificial Sequence: Synthetic oligonucleotide
  Sense strand starting at position 431 of SEQ ID NO: 1881513
agagaauucuuggucaguu

SEQ ID NO: 2050335 - RNA, 19 nt, Artificial Sequence
  Description of Artificial Sequence: Synthetic oligonucleotide
  Antisense strand to SEQ ID NO: 2050334
aacugaccaagaauucucu

SEQ ID NO: 2050336 - RNA, 19 nt, Artificial Sequence
  Description of Artificial Sequence: Synthetic oligonucleotide
  Sense strand starting at position 432 of SEQ ID NO: 1881513
gagaauucuuggucaguuu

SEQ ID NO: 2050337 - RNA, 19 nt, Artificial Sequence
  Description of Artificial Sequence: Synthetic oligonucleotide
  Antisense strand to SEQ ID NO: 2050336
aaacugaccaagaauucuc

SEQ ID NO: 2050338 - RNA, 19 nt, Artificial Sequence
  Description of Artificial Sequence: Synthetic oligonucleotide
  Sense strand starting at position 525 of SEQ ID NO: 1881513
ggcgaauagcagcaaagau

SEQ ID NO: 2050339 - RNA, 19 nt, Artificial Sequence
  Description of Artificial Sequence: Synthetic oligonucleotide
  Antisense strand to SEQ ID NO: 2050338
aucuuugcugcuauucgcc

SEQ ID NO: 2050340 - RNA, 19 nt, Artificial Sequence
  Description of Artificial Sequence: Synthetic oligonucleotide
  Sense strand starting at position 735 of SEQ ID NO: 1881513
uguuauuuguuucuugaac

SEQ ID NO: 2050341 - RNA, 19 nt, Artificial Sequence
  Description of Artificial Sequence: Synthetic oligonucleotide
  Antisense strand to SEQ ID NO: 2050340
guucaagaaacaaauaaca

SEQ ID NO: 2050342 - RNA, 19 nt, Artificial Sequence
  Description of Artificial Sequence: Synthetic oligonucleotide
  Sense strand starting at position 755 of SEQ ID NO: 1881513
ggaaauauauuagcguaac

SEQ ID NO: 2050343 - RNA, 19 nt, Artificial Sequence
  Description of Artificial Sequence: Synthetic oligonucleotide
  Antisense strand to SEQ ID NO: 2050342
guuacgcuaauauauuucc

SEQ ID NO: 2050344 - RNA, 19 nt, Artificial Sequence
  Description of Artificial Sequence: Synthetic oligonucleotide
  Sense strand starting at position 872 of SEQ ID NO: 1881513
aaguaaaugugacuaaugu

SEQ ID NO: 2050345 - RNA, 19 nt, Artificial Sequence
  Description of Artificial Sequence: Synthetic oligonucleotide
  Antisense strand to SEQ ID NO: 2050344
acauuagucacauuuacuu

SEQ ID NO: 2050346 - RNA, 19 nt, Artificial Sequence
  Description of Artificial Sequence: Synthetic oligonucleotide
  Sense strand starting at position 873 of SEQ ID NO: 1881513
aguaaaugugacuaaugua

SEQ ID NO: 2050347 - RNA, 19 nt, Artificial Sequence
  Description of Artificial Sequence: Synthetic oligonucleotide
  Antisense strand to SEQ ID NO: 2050346
uacauuagucacauuuacu

SEQ ID NO: 2050348 - RNA, 19 nt, Artificial Sequence
  Description of Artificial Sequence: Synthetic oligonucleotide
  Sense strand starting at position 878 of SEQ ID NO: 1881513
augugacuaauguagucuu

SEQ ID NO: 2050349 - RNA, 19 nt, Artificial Sequence
  Description of Artificial Sequence: Synthetic oligonucleotide
  Antisense strand to SEQ ID NO: 2050348
aagacuacauuagucacau

SEQ ID NO: 2050350 - RNA, 19 nt, Artificial Sequence
  Description of Artificial Sequence: Synthetic oligonucleotide
  Sense strand starting at position 917 of SEQ ID NO: 1881513
auaauuagcuguuugacac

SEQ ID NO: 2050351 - RNA, 19 nt, Artificial Sequence
  Description of Artificial Sequence: Synthetic oligonucleotide
  Antisense strand to SEQ ID NO: 2050350
gugucaaacagcuaauuau

SEQ ID NO: 2050352 - RNA, 19 nt, Artificial Sequence
  Description of Artificial Sequence: Synthetic oligonucleotide
  Sense strand starting at position 931 of SEQ ID NO: 1881513
gacacucuuccggauauug

SEQ ID NO: 2050353 - RNA, 19 nt, Artificial Sequence
  Description of Artificial Sequence: Synthetic oligonucleotide
  Antisense strand to SEQ ID NO: 2050352
caauauccggaagaguguc

SEQ ID NO: 2050354 - RNA, 19 nt, Artificial Sequence
  Description of Artificial Sequence: Synthetic oligonucleotide
  Sense strand starting at position 933 of SEQ ID NO: 1881513
cacucuuccggauauuguu

SEQ ID NO: 2050355 - RNA, 19 nt, Artificial Sequence
  Description of Artificial Sequence: Synthetic oligonucleotide
  Antisense strand to SEQ ID NO: 2050354
aacaauauccggaagagug

SEQ ID NO: 2050356 - RNA, 19 nt, Artificial Sequence
  Description of Artificial Sequence: Synthetic oligonucleotide
  Sense strand starting at position 1053 of SEQ ID NO: 1881513
gcauguuauauguggaaag

SEQ ID NO: 2050357 - RNA, 19 nt, Artificial Sequence
  Description of Artificial Sequence: Synthetic oligonucleotide
  Antisense strand to SEQ ID NO: 2050356
cuuuccacauauaacaugc

SEQ ID NO: 2050358 - RNA, 19 nt, Artificial Sequence
  Description of Artificial Sequence: Synthetic oligonucleotide
  Sense strand starting at position 1232 of SEQ ID NO: 1881513
auuccuugugauuagaauc

SEQ ID NO: 2050359 - RNA, 19 nt, Artificial Sequence
  Description of Artificial Sequence: Synthetic oligonucleotide
  Antisense strand to SEQ ID NO: 2050358
gauucuaaucacaaggaau

SEQ ID NO: 2050360 - RNA, 19 nt, Artificial Sequence
  Description of Artificial Sequence: Synthetic oligonucleotide
  Sense strand starting at position 1303 of SEQ ID NO: 1881513
caggcuagugcucagaauu

SEQ ID NO: 2050361 - RNA, 19 nt, Artificial Sequence
  Description of Artificial Sequence: Synthetic oligonucleotide
  Antisense strand to SEQ ID NO: 2050360
aauucugagcacuagccug

SEQ ID NO: 2050362 - RNA, 19 nt, Artificial Sequence
  Description of Artificial Sequence: Synthetic oligonucleotide
  Sense strand starting at position 1328 of SEQ ID NO: 1881513
gcuuaaugccaccaagauu

SEQ ID NO: 2050363 - RNA, 19 nt, Artificial Sequence
  Description of Artificial Sequence: Synthetic oligonucleotide
  Antisense strand to SEQ ID NO: 2050362
aaucuugguggcauuaagc

SEQ ID NO: 2050364 - RNA, 19 nt, Artificial Sequence
  Description of Artificial Sequence: Synthetic oligonucleotide
  Sense strand starting at position 1576 of SEQ ID NO: 1881513
caagauugugaaggucaaa

SEQ ID NO: 2050365 - RNA, 19 nt, Artificial Sequence
  Description of Artificial Sequence: Synthetic oligonucleotide
  Antisense strand to SEQ ID NO: 2050364
uuugaccuucacaaucuug

SEQ ID NO: 2050366 - RNA, 19 nt, Artificial Sequence
  Description of Artificial Sequence: Synthetic oligonucleotide
  Sense strand starting at position 1993 of SEQ ID NO: 1881513
ucaagcaaugccugggaga

SEQ ID NO: 2050367 - RNA, 19 nt, Artificial Sequence
  Description of Artificial Sequence: Synthetic oligonucleotide
  Antisense strand to SEQ ID NO: 2050366
ucucccaggcauugcuuga

SEQ ID NO: 2050368 - RNA, 19 nt, Artificial Sequence
  Description of Artificial Sequence: Synthetic oligonucleotide
  Sense strand starting at position 1994 of SEQ ID NO: 1881513
caagcaaugccugggagau

SEQ ID NO: 2050369 - RNA, 19 nt, Artificial Sequence
  Description of Artificial Sequence: Synthetic oligonucleotide
  Antisense strand to SEQ ID NO: 2050368
aucucccaggcauugcuug

SEQ ID NO: 2050370 - RNA, 19 nt, Artificial Sequence
  Description of Artificial Sequence: Synthetic oligonucleotide
  Sense strand starting at position 1995 of SEQ ID NO: 1881513
aagcaaugccugggagaua

SEQ ID NO: 2050371 - RNA, 19 nt, Artificial Sequence
  Description of Artificial Sequence: Synthetic oligonucleotide
  Antisense strand to SEQ ID NO: 2050370
uaucucccaggcauugcuu

SEQ ID NO: 2050372 - RNA, 19 nt, Artificial Sequence
  Description of Artificial Sequence: Synthetic oligonucleotide
  Sense strand starting at position 2973 of SEQ ID NO: 1881513
agucccagagcauaaauua

SEQ ID NO: 2050373 - RNA, 19 nt, Artificial Sequence
  Description of Artificial Sequence: Synthetic oligonucleotide
  Antisense strand to SEQ ID NO: 2050372
uaauuuaugcucugggacu

SEQ ID NO: 2050374 - RNA, 19 nt, Artificial Sequence
  Description of Artificial Sequence: Synthetic oligonucleotide
  Sense strand starting at position 3124 of SEQ ID NO: 1881513
gucagacagagaugugauu

SEQ ID NO: 2050375 - RNA, 19 nt, Artificial Sequence
  Description of Artificial Sequence: Synthetic oligonucleotide
  Antisense strand to SEQ ID NO: 2050374
aaucacaucucugucugac

SEQ ID NO: 2050376 - RNA, 19 nt, Artificial Sequence
  Description of Artificial Sequence: Synthetic oligonucleotide
  Sense strand starting at position 3194 of SEQ ID NO: 1881513
agccaaauaugagucacua

SEQ ID NO: 2050377 - RNA, 19 nt, Artificial Sequence
  Description of Artificial Sequence: Synthetic oligonucleotide
  Antisense strand to SEQ ID NO: 2050376
uagugacucauauuuggcu

SEQ ID NO: 2050378 - RNA, 19 nt, Artificial Sequence
  Description of Artificial Sequence: Synthetic oligonucleotide
  Sense strand starting at position 3207 of SEQ ID NO: 1881513
ucacuaauggcccaugaca

SEQ ID NO: 2050379 - RNA, 19 nt, Artificial Sequence
  Description of Artificial Sequence: Synthetic oligonucleotide
  Antisense strand to SEQ ID NO: 2050378
ugucaugggccauuaguga

SEQ ID NO: 2050380 - RNA, 19 nt, Artificial Sequence
  Description of Artificial Sequence: Synthetic oligonucleotide
  Sense strand starting at position 3209 of SEQ ID NO: 1881513
acuaauggcccaugacaua

SEQ ID NO: 2050381 - RNA, 19 nt, Artificial Sequence
  Description of Artificial Sequence: Synthetic oligonucleotide
  Antisense strand to SEQ ID NO: 2050380
uaugucaugggccauuagu

SEQ ID NO: 2050382 - RNA, 19 nt, Artificial Sequence
  Description of Artificial Sequence: Synthetic oligonucleotide
  Sense strand starting at position 3398 of SEQ ID NO: 1881513
uuugucugauuugucaauu

SEQ ID NO: 2050383 - RNA, 19 nt, Artificial Sequence
  Description of Artificial Sequence: Synthetic oligonucleotide
  Antisense strand to SEQ ID NO: 2050382
aauugacaaaucagacaaa

SEQ ID NO: 2050384 - RNA, 19 nt, Artificial Sequence
  Description of Artificial Sequence: Synthetic oligonucleotide
  Sense strand starting at position 3407 of SEQ ID NO: 1881513
uuugucaauugguugaaag

SEQ ID NO: 2050385 - RNA, 19 nt, Artificial Sequence
  Description of Artificial Sequence: Synthetic oligonucleotide
  Antisense strand to SEQ ID NO: 2050384
cuuucaaccaauugacaaa

SEQ ID NO: 2050386 - RNA, 19 nt, Artificial Sequence
  Description of Artificial Sequence: Synthetic oligonucleotide
  Sense strand starting at position 3442 of SEQ ID NO: 1881513
aagaaaugucucgguuaca

SEQ ID NO: 2050387 - RNA, 19 nt, Artificial Sequence
  Description of Artificial Sequence: Synthetic oligonucleotide
  Antisense strand to SEQ ID NO: 2050386
uguaaccgagacauuucuu

SEQ ID NO: 2050388 - RNA, 19 nt, Artificial Sequence
  Description of Artificial Sequence: Synthetic oligonucleotide
  Sense strand starting at position 3443 of SEQ ID NO: 1881513
agaaaugucucgguuacaa

SEQ ID NO: 2050389 - RNA, 19 nt, Artificial Sequence
  Description of Artificial Sequence: Synthetic oligonucleotide
  Antisense strand to SEQ ID NO: 2050388
uuguaaccgagacauuucu

SEQ ID NO: 2050390 - RNA, 19 nt, Artificial Sequence
  Description of Artificial Sequence: Synthetic oligonucleotide
  Sense strand starting at position 3445 of SEQ ID NO: 1881513
aaaugucucgguuacaaua

SEQ ID NO: 2050391 - RNA, 19 nt, Artificial Sequence
  Description of Artificial Sequence: Synthetic oligonucleotide
  Antisense strand to SEQ ID NO: 2050390
uauuguaaccgagacauuu

SEQ ID NO: 2050392 - RNA, 19 nt, Artificial Sequence
  Description of Artificial Sequence: Synthetic oligonucleotide
  Sense strand starting at position 3613 of SEQ ID NO: 1881513
aggguauaacgagacaugu

SEQ ID NO: 2050393 - RNA, 19 nt, Artificial Sequence
  Description of Artificial Sequence: Synthetic oligonucleotide
  Antisense strand to SEQ ID NO: 2050392
acaugucucguuauacccu

SEQ ID NO: 2050394 - RNA, 19 nt, Artificial Sequence
  Description of Artificial Sequence: Synthetic oligonucleotide
  Sense strand starting at position 3615 of SEQ ID NO: 1881513
gguauaacgagacaugucu

SEQ ID NO: 2050395 - RNA, 19 nt, Artificial Sequence
  Description of Artificial Sequence: Synthetic oligonucleotide
  Antisense strand to SEQ ID NO: 2050394
agacaugucucguuauacc

SEQ ID NO: 2050396 - RNA, 19 nt, Artificial Sequence
  Description of Artificial Sequence: Synthetic oligonucleotide
  Sense strand starting at position 3809 of SEQ ID NO: 1881513
cuuucucaucugcaagaug

SEQ ID NO: 2050397 - RNA, 19 nt, Artificial Sequence
  Description of Artificial Sequence: Synthetic oligonucleotide
  Antisense strand to SEQ ID NO: 2050396
caucuugcagaugagaaag

SEQ ID NO: 2050398 - RNA, 19 nt, Artificial Sequence
  Description of Artificial Sequence: Synthetic oligonucleotide
  Sense strand starting at position 46 of SEQ ID NO: 1881514
auugacuucuaguuaguga

SEQ ID NO: 2050399 - RNA, 19 nt, Artificial Sequence
  Description of Artificial Sequence: Synthetic oligonucleotide
  Antisense strand to SEQ ID NO: 2050398
ucacuaacuagaagucaau

SEQ ID NO: 2050400 - RNA, 19 nt, Artificial Sequence
  Description of Artificial Sequence: Synthetic oligonucleotide
  Sense strand starting at position 49 of SEQ ID NO: 1881514
gacuucuaguuagugauau

SEQ ID NO: 2050401 - RNA, 19 nt, Artificial Sequence
  Description of Artificial Sequence: Synthetic oligonucleotide
  Antisense strand to SEQ ID NO: 2050400
auaucacuaacuagaaguc

SEQ ID NO: 2050402 - RNA, 19 nt, Artificial Sequence
  Description of Artificial Sequence: Synthetic oligonucleotide
  Sense strand starting at position 86 of SEQ ID NO: 1881514
ggguaaaguuuacugaggu

SEQ ID NO: 2050403 - RNA, 19 nt, Artificial Sequence
  Description of Artificial Sequence: Synthetic oligonucleotide
  Antisense strand to SEQ ID NO: 2050402
accucaguaaacuuuaccc

SEQ ID NO: 2050404 - RNA, 19 nt, Artificial Sequence
  Description of Artificial Sequence: Synthetic oligonucleotide
  Sense strand starting at position 138 of SEQ ID NO: 1881514
aggugaaucaguggacgua

SEQ ID NO: 2050405 - RNA, 19 nt, Artificial Sequence
  Description of Artificial Sequence: Synthetic oligonucleotide
  Antisense strand to SEQ ID NO: 2050404
uacguccacugauucaccu

SEQ ID NO: 2050406 - RNA, 19 nt, Artificial Sequence
  Description of Artificial Sequence: Synthetic oligonucleotide
  Sense strand starting at position 153 of SEQ ID NO: 1881514
cguacagagagaugauaau

SEQ ID NO: 2050407 - RNA, 19 nt, Artificial Sequence
  Description of Artificial Sequence: Synthetic oligonucleotide
  Antisense strand to SEQ ID NO: 2050406
auuaucaucucucuguacg

SEQ ID NO: 2050408 - RNA, 19 nt, Artificial Sequence
  Description of Artificial Sequence: Synthetic oligonucleotide
  Sense strand starting at position 159 of SEQ ID NO: 1881514
gagagaugauaauauguaa

SEQ ID NO: 2050409 - RNA, 19 nt, Artificial Sequence
  Description of Artificial Sequence: Synthetic oligonucleotide
  Antisense strand to SEQ ID NO: 2050408
uuacauauuaucaucucuc

SEQ ID NO: 2050410 - RNA, 19 nt, Artificial Sequence
  Description of Artificial Sequence: Synthetic oligonucleotide
  Sense strand starting at position 346 of SEQ ID NO: 1881514
ugaugauguaauugcuagu

SEQ ID NO: 2050411 - RNA, 19 nt, Artificial Sequence
  Description of Artificial Sequence: Synthetic oligonucleotide
  Antisense strand to SEQ ID NO: 2050410
acuagcaauuacaucauca

SEQ ID NO: 2050412 - RNA, 19 nt, Artificial Sequence
  Description of Artificial Sequence: Synthetic oligonucleotide
  Sense strand starting at position 376 of SEQ ID NO: 1881514
cagagacuggugugaaacu

SEQ ID NO: 2050413 - RNA, 19 nt, Artificial Sequence
  Description of Artificial Sequence: Synthetic oligonucleotide
  Antisense strand to SEQ ID NO: 2050412
aguuucacaccagucucug

SEQ ID NO: 2050414 - RNA, 19 nt, Artificial Sequence
  Description of Artificial Sequence: Synthetic oligonucleotide
  Sense strand starting at position 386 of SEQ ID NO: 1881514
ugugaaacuggguguguuu

SEQ ID NO: 2050415 - RNA, 19 nt, Artificial Sequence
  Description of Artificial Sequence: Synthetic oligonucleotide
  Antisense strand to SEQ ID NO: 2050414
aaacacacccaguuucaca

SEQ ID NO: 2050416 - RNA, 19 nt, Artificial Sequence
  Description of Artificial Sequence: Synthetic oligonucleotide
  Sense strand starting at position 639 of SEQ ID NO: 1881514
uuuccuuucuguuugagac

SEQ ID NO: 2050417 - RNA, 19 nt, Artificial Sequence
  Description of Artificial Sequence: Synthetic oligonucleotide
  Antisense strand to SEQ ID NO: 2050416
gucucaaacagaaaggaaa

SEQ ID NO: 2050418 - RNA, 19 nt, Artificial Sequence
  Description of Artificial Sequence: Synthetic oligonucleotide
  Sense strand starting at position 696 of SEQ ID NO: 1881514
guggucucaguucauggua

SEQ ID NO: 2050419 - RNA, 19 nt, Artificial Sequence
  Description of Artificial Sequence: Synthetic oligonucleotide
  Antisense strand to SEQ ID NO: 2050418
uaccaugaacugagaccac

SEQ ID NO: 2050420 - RNA, 19 nt, Artificial Sequence
  Description of Artificial Sequence: Synthetic oligonucleotide
  Sense strand starting at position 934 of SEQ ID NO: 1881514
uguggcuguggaugauaga

SEQ ID NO: 2050421 - RNA, 19 nt, Artificial Sequence
  Description of Artificial Sequence: Synthetic oligonucleotide
  Antisense strand to SEQ ID NO: 2050420
ucuaucauccacagccaca

SEQ ID NO: 2050422 - RNA, 19 nt, Artificial Sequence
  Description of Artificial Sequence: Synthetic oligonucleotide
  Sense strand starting at position 935 of SEQ ID NO: 1881514
guggcuguggaugauagaa

SEQ ID NO: 2050423 - RNA, 19 nt, Artificial Sequence
  Description of Artificial Sequence: Synthetic oligonucleotide
  Antisense strand to SEQ ID NO: 2050422
uucuaucauccacagccac

SEQ ID NO: 2050424 - RNA, 19 nt, Artificial Sequence
  Description of Artificial Sequence: Synthetic oligonucleotide
  Sense strand starting at position 1169 of SEQ ID NO: 1881514
acauaaaucugaugauaga

SEQ ID NO: 2050425 - RNA, 19 nt, Artificial Sequence
  Description of Artificial Sequence: Synthetic oligonucleotide
  Antisense strand to SEQ ID NO: 2050424
ucuaucaucagauuuaugu

SEQ ID NO: 2050426 - RNA, 19 nt, Artificial Sequence
  Description of Artificial Sequence: Synthetic oligonucleotide
  Sense strand starting at position 1357 of SEQ ID NO: 1881514
gugaaaucguaugauuuaa

SEQ ID NO: 2050427 - RNA, 19 nt, Artificial Sequence
  Description of Artificial Sequence: Synthetic oligonucleotide
  Antisense strand to SEQ ID NO: 2050426
uuaaaucauacgauuucac

SEQ ID NO: 2050428 - RNA, 19 nt, Artificial Sequence
  Description of Artificial Sequence: Synthetic oligonucleotide
  Sense strand starting at position 1384 of SEQ ID NO: 1881514
gguuaauucuaccuuggaa

SEQ ID NO: 2050429 - RNA, 19 nt, Artificial Sequence
  Description of Artificial Sequence: Synthetic oligonucleotide
  Antisense strand to SEQ ID NO: 2050428
uuccaagguagaauuaacc

SEQ ID NO: 2050430 - RNA, 19 nt, Artificial Sequence
  Description of Artificial Sequence: Synthetic oligonucleotide
  Sense strand starting at position 1615 of SEQ ID NO: 1881514
agcuguggcaguuaaauau

SEQ ID NO: 2050431 - RNA, 19 nt, Artificial Sequence
  Description of Artificial Sequence: Synthetic oligonucleotide
  Antisense strand to SEQ ID NO: 2050430
auauuuaacugccacagcu

SEQ ID NO: 2050432 - RNA, 19 nt, Artificial Sequence
  Description of Artificial Sequence: Synthetic oligonucleotide
  Sense strand starting at position 2007 of SEQ ID NO: 1881514
acuguaaugaaacguaguu

SEQ ID NO: 2050433 - RNA, 19 nt, Artificial Sequence
  Description of Artificial Sequence: Synthetic oligonucleotide
  Antisense strand to SEQ ID NO: 2050432
aacuacguuucauuacagu

SEQ ID NO: 2050434 - RNA, 19 nt, Artificial Sequence
  Description of Artificial Sequence: Synthetic oligonucleotide
  Sense strand starting at position 2009 of SEQ ID NO: 1881514
uguaaugaaacguaguuau

SEQ ID NO: 2050435 - RNA, 19 nt, Artificial Sequence
  Description of Artificial Sequence: Synthetic oligonucleotide
  Antisense strand to SEQ ID NO: 2050434
auaacuacguuucauuaca

SEQ ID NO: 2050436 - RNA, 19 nt, Artificial Sequence
  Description of Artificial Sequence: Synthetic oligonucleotide
  Sense strand starting at position 2088 of SEQ ID NO: 1881514
caaagauugugcuuuggcu

SEQ ID NO: 2050437 - RNA, 19 nt, Artificial Sequence
  Description of Artificial Sequence: Synthetic oligonucleotide
  Antisense strand to SEQ ID NO: 2050436
agccaaagcacaaucuuug

SEQ ID NO: 2050438 - RNA, 19 nt, Artificial Sequence
  Description of Artificial Sequence: Synthetic oligonucleotide
  Sense strand starting at position 2090 of SEQ ID NO: 1881514
aagauugugcuuuggcuga

SEQ ID NO: 2050439 - RNA, 19 nt, Artificial Sequence
  Description of Artificial Sequence: Synthetic oligonucleotide
  Antisense strand to SEQ ID NO: 2050438
ucagccaaagcacaaucuu

SEQ ID NO: 2050440 - RNA, 19 nt, Artificial Sequence
  Description of Artificial Sequence: Synthetic oligonucleotide
  Sense strand starting at position 2092 of SEQ ID NO: 1881514
gauugugcuuuggcugaca

SEQ ID NO: 2050441 - RNA, 19 nt, Artificial Sequence
  Description of Artificial Sequence: Synthetic oligonucleotide
  Antisense strand to SEQ ID NO: 2050440
ugucagccaaagcacaauc

SEQ ID NO: 2050442 - RNA, 19 nt, Artificial Sequence
  Description of Artificial Sequence: Synthetic oligonucleotide
  Sense strand starting at position 2130 of SEQ ID NO: 1881514
gguuuauaggagugacgug

SEQ ID NO: 2050443 - RNA, 19 nt, Artificial Sequence
  Description of Artificial Sequence: Synthetic oligonucleotide
  Antisense strand to SEQ ID NO: 2050442
cacgucacuccuauaaacc

SEQ ID NO: 2050444 - RNA, 19 nt, Artificial Sequence
  Description of Artificial Sequence: Synthetic oligonucleotide
  Sense strand starting at position 2135 of SEQ ID NO: 1881514
auaggagugacgugucuga

SEQ ID NO: 2050445 - RNA, 19 nt, Artificial Sequence
  Description of Artificial Sequence: Synthetic oligonucleotide
  Antisense strand to SEQ ID NO: 2050444
ucagacacgucacuccuau

SEQ ID NO: 2050446 - RNA, 19 nt, Artificial Sequence
  Description of Artificial Sequence: Synthetic oligonucleotide
  Sense strand starting at position 2139 of SEQ ID NO: 1881514
gagugacgugucugaacau

SEQ ID NO: 2050447 - RNA, 19 nt, Artificial Sequence
  Description of Artificial Sequence: Synthetic oligonucleotide
  Antisense strand to SEQ ID NO: 2050446
auguucagacacgucacuc

SEQ ID NO: 2050448 - RNA, 19 nt, Artificial Sequence
  Description of Artificial Sequence: Synthetic oligonucleotide
  Sense strand starting at position 2148 of SEQ ID NO: 1881514
gucugaacauaggucaauu

SEQ ID NO: 2050449 - RNA, 19 nt, Artificial Sequence
  Description of Artificial Sequence: Synthetic oligonucleotide
  Antisense strand to SEQ ID NO: 2050448
aauugaccuauguucagac

SEQ ID NO: 2050450 - RNA, 19 nt, Artificial Sequence
  Description of Artificial Sequence: Synthetic oligonucleotide
  Sense strand starting at position 2177 of SEQ ID NO: 1881514
ucuuuaaugucuuuaguga

SEQ ID NO: 2050451 - RNA, 19 nt, Artificial Sequence
  Description of Artificial Sequence: Synthetic oligonucleotide
  Antisense strand to SEQ ID NO: 2050450
ucacuaaagacauuaaaga

SEQ ID NO: 2050452 - RNA, 19 nt, Artificial Sequence
  Description of Artificial Sequence: Synthetic oligonucleotide
  Sense strand starting at position 2178 of SEQ ID NO: 1881514
cuuuaaugucuuuagugau

SEQ ID NO: 2050453 - RNA, 19 nt, Artificial Sequence
  Description of Artificial Sequence: Synthetic oligonucleotide
  Antisense strand to SEQ ID NO: 2050452
aucacuaaagacauuaaag

SEQ ID NO: 2050454 - RNA, 19 nt, Artificial Sequence
  Description of Artificial Sequence: Synthetic oligonucleotide
  Sense strand starting at position 2241 of SEQ ID NO: 1881514
auaguuuaucuugggacuu

SEQ ID NO: 2050455 - RNA, 19 nt, Artificial Sequence
  Description of Artificial Sequence: Synthetic oligonucleotide
  Antisense strand to SEQ ID NO: 2050454
aagucccaagauaaacuau

SEQ ID NO: 2050456 - RNA, 19 nt, Artificial Sequence
  Description of Artificial Sequence: Synthetic oligonucleotide
  Sense strand starting at position 2481 of SEQ ID NO: 1881514
ccaugauagccaggacagu

SEQ ID NO: 2050457 - RNA, 19 nt, Artificial Sequence
  Description of Artificial Sequence: Synthetic oligonucleotide
  Antisense strand to SEQ ID NO: 2050456
acuguccuggcuaucaugg

SEQ ID NO: 2050458 - RNA, 19 nt, Artificial Sequence
  Description of Artificial Sequence: Synthetic oligonucleotide
  Sense strand starting at position 2592 of SEQ ID NO: 1881514
uuuauuguugccuauuaag

SEQ ID NO: 2050459 - RNA, 19 nt, Artificial Sequence
  Description of Artificial Sequence: Synthetic oligonucleotide
  Antisense strand to SEQ ID NO: 2050458
cuuaauaggcaacaauaaa

SEQ ID NO: 2050460 - RNA, 19 nt, Artificial Sequence
  Description of Artificial Sequence: Synthetic oligonucleotide
  Sense strand starting at position 2725 of SEQ ID NO: 1881514
gugaacuaucaguaauggu

SEQ ID NO: 2050461 - RNA, 19 nt, Artificial Sequence
  Description of Artificial Sequence: Synthetic oligonucleotide
  Antisense strand to SEQ ID NO: 2050460
accauuacugauaguucac

SEQ ID NO: 2050462 - RNA, 19 nt, Artificial Sequence
  Description of Artificial Sequence: Synthetic oligonucleotide
  Sense strand starting at position 2796 of SEQ ID NO: 1881514
agcacugauguccaacuuu

SEQ ID NO: 2050463 - RNA, 19 nt, Artificial Sequence
  Description of Artificial Sequence: Synthetic oligonucleotide
  Antisense strand to SEQ ID NO: 2050462
aaaguuggacaucagugcu

SEQ ID NO: 2050464 - RNA, 19 nt, Artificial Sequence
  Description of Artificial Sequence: Synthetic oligonucleotide
  Sense strand starting at position 2934 of SEQ ID NO: 1881514
auaaguguuggccagcuaa

SEQ ID NO: 2050465 - RNA, 19 nt, Artificial Sequence
  Description of Artificial Sequence: Synthetic oligonucleotide
  Antisense strand to SEQ ID NO: 2050464
uuagcuggccaacacuuau

SEQ ID NO: 2050466 - RNA, 19 nt, Artificial Sequence
  Description of Artificial Sequence: Synthetic oligonucleotide
  Sense strand starting at position 3222 of SEQ ID NO: 1881514
auacacuauugucuugaua

SEQ ID NO: 2050467 - RNA, 19 nt, Artificial Sequence
  Description of Artificial Sequence: Synthetic oligonucleotide
  Antisense strand to SEQ ID NO: 2050466
uaucaagacaauaguguau

SEQ ID NO: 2050468 - RNA, 19 nt, Artificial Sequence
  Description of Artificial Sequence: Synthetic oligonucleotide
  Sense strand starting at position 3276 of SEQ ID NO: 1881514
agagaacuggucugaccau

SEQ ID NO: 2050469 - RNA, 19 nt, Artificial Sequence
  Description of Artificial Sequence: Synthetic oligonucleotide
  Antisense strand to SEQ ID NO: 2050468
auggucagaccaguucucu

SEQ ID NO: 2050470 - RNA, 19 nt, Artificial Sequence
  Description of Artificial Sequence: Synthetic oligonucleotide
  Sense strand starting at position 3323 of SEQ ID NO: 1881514
ccuuaauaagccugagggu

SEQ ID NO: 2050471 - RNA, 19 nt, Artificial Sequence
  Description of Artificial Sequence: Synthetic oligonucleotide
  Antisense strand to SEQ ID NO: 2050470
acccucaggcuuauuaagg

SEQ ID NO: 2050472 - RNA, 19 nt, Artificial Sequence
  Description of Artificial Sequence: Synthetic oligonucleotide
  Sense strand starting at position 3923 of SEQ ID NO: 1881514
gaugaagucuuguuuguuc

SEQ ID NO: 2050473 - RNA, 19 nt, Artificial Sequence
  Description of Artificial Sequence: Synthetic oligonucleotide
  Antisense strand to SEQ ID NO: 2050472
gaacaaacaagacuucauc

SEQ ID NO: 2050474 - RNA, 19 nt, Artificial Sequence
  Description of Artificial Sequence: Synthetic oligonucleotide
  Sense strand starting at position 3932 of SEQ ID NO: 1881514
uuguuuguucucucgguuu

SEQ ID NO: 2050475 - RNA, 19 nt, Artificial Sequence
  Description of Artificial Sequence: Synthetic oligonucleotide
  Antisense strand to SEQ ID NO: 2050474
aaaccgagagaacaaacaa

SEQ ID NO: 2050476 - RNA, 19 nt, Artificial Sequence
  Description of Artificial Sequence: Synthetic oligonucleotide
  Sense strand starting at position 3965 of SEQ ID NO: 1881514
uugacugguccgcacacua

SEQ ID NO: 2050477 - RNA, 19 nt, Artificial Sequence
  Description of Artificial Sequence: Synthetic oligonucleotide
  Antisense strand to SEQ ID NO: 2050476
uagugugcggaccagucaa

SEQ ID NO: 2050478 - RNA, 19 nt, Artificial Sequence
  Description of Artificial Sequence: Synthetic oligonucleotide
  Sense strand starting at position 393 of SEQ ID NO: 1881515
augugacuguaucuuaaac

SEQ ID NO: 2050479 - RNA, 19 nt, Artificial Sequence
  Description of Artificial Sequence: Synthetic oligonucleotide
  Antisense strand to SEQ ID NO: 2050478
guuuaagauacagucacau

SEQ ID NO: 2050480 - RNA, 19 nt, Artificial Sequence
  Description of Artificial Sequence: Synthetic oligonucleotide
  Sense strand starting at position 470 of SEQ ID NO: 1881515
ucauuaggauucgcugaac

SEQ ID NO: 2050481 - RNA, 19 nt, Artificial Sequence
  Description of Artificial Sequence: Synthetic oligonucleotide
  Antisense strand to SEQ ID NO: 2050480
guucagcgaauccuaauga

SEQ ID NO: 2050482 - RNA, 19 nt, Artificial Sequence
  Description of Artificial Sequence: Synthetic oligonucleotide
  Sense strand starting at position 473 of SEQ ID NO: 1881515
uuaggauucgcugaacuuu

SEQ ID NO: 2050483 - RNA, 19 nt, Artificial Sequence
  Description of Artificial Sequence: Synthetic oligonucleotide
  Antisense strand to SEQ ID NO: 2050482
aaaguucagcgaauccuaa

SEQ ID NO: 2050484 - RNA, 19 nt, Artificial Sequence
  Description of Artificial Sequence: Synthetic oligonucleotide
  Sense strand starting at position 488 of SEQ ID NO: 1881515
cuuugaaagugggucauca

SEQ ID NO: 2050485 - RNA, 19 nt, Artificial Sequence
  Description of Artificial Sequence: Synthetic oligonucleotide
  Antisense strand to SEQ ID NO: 2050484
ugaugacccacuuucaaag

SEQ ID NO: 2050486 - RNA, 19 nt, Artificial Sequence
  Description of Artificial Sequence: Synthetic oligonucleotide
  Sense strand starting at position 490 of SEQ ID NO: 1881515
uugaaagugggucaucacu

SEQ ID NO: 2050487 - RNA, 19 nt, Artificial Sequence
  Description of Artificial Sequence: Synthetic oligonucleotide
  Antisense strand to SEQ ID NO: 2050486
agugaugacccacuuucaa

SEQ ID NO: 2050488 - RNA, 19 nt, Artificial Sequence
  Description of Artificial Sequence: Synthetic oligonucleotide
  Sense strand starting at position 492 of SEQ ID NO: 1881515
gaaagugggucaucacuuc

SEQ ID NO: 2050489 - RNA, 19 nt, Artificial Sequence
  Description of Artificial Sequence: Synthetic oligonucleotide
  Antisense strand to SEQ ID NO: 2050488
gaagugaugacccacuuuc

SEQ ID NO: 2050490 - RNA, 19 nt, Artificial Sequence
  Description of Artificial Sequence: Synthetic oligonucleotide
  Sense strand starting at position 498 of SEQ ID NO: 1881515
gggucaucacuucaggguu

SEQ ID NO: 2050491 - RNA, 19 nt, Artificial Sequence
  Description of Artificial Sequence: Synthetic oligonucleotide
  Antisense strand to SEQ ID NO: 2050490
aacccugaagugaugaccc

SEQ ID NO: 2050492 - RNA, 19 nt, Artificial Sequence
  Description of Artificial Sequence: Synthetic oligonucleotide
  Sense strand starting at position 504 of SEQ ID NO: 1881515
ucacuucaggguugaggaa

SEQ ID NO: 2050493 - RNA, 19 nt, Artificial Sequence
  Description of Artificial Sequence: Synthetic oligonucleotide
  Antisense strand to SEQ ID NO: 2050492
uuccucaacccugaaguga

SEQ ID NO: 2050494 - RNA, 19 nt, Artificial Sequence
  Description of Artificial Sequence: Synthetic oligonucleotide
  Sense strand starting at position 555 of SEQ ID NO: 1881515
ucugaaaguuaccuagaau

SEQ ID NO: 2050495 - RNA, 19 nt, Artificial Sequence
  Description of Artificial Sequence: Synthetic oligonucleotide
  Antisense strand to SEQ ID NO: 2050494
auucuagguaacuuucaga

SEQ ID NO: 2050496 - RNA, 19 nt, Artificial Sequence
  Description of Artificial Sequence: Synthetic oligonucleotide
  Sense strand starting at position 758 of SEQ ID NO: 1881515
gggacuguuuaaguagaac

SEQ ID NO: 2050497 - RNA, 19 nt, Artificial Sequence
  Description of Artificial Sequence: Synthetic oligonucleotide
  Antisense strand to SEQ ID NO: 2050496
guucuacuuaaacaguccc

SEQ ID NO: 2050498 - RNA, 19 nt, Artificial Sequence
  Description of Artificial Sequence: Synthetic oligonucleotide
  Sense strand starting at position 792 of SEQ ID NO: 1881515
agaugagugucaagaggga

SEQ ID NO: 2050499 - RNA, 19 nt, Artificial Sequence
  Description of Artificial Sequence: Synthetic oligonucleotide
  Antisense strand to SEQ ID NO: 2050498
ucccucuugacacucaucu

SEQ ID NO: 2050500 - RNA, 19 nt, Artificial Sequence
  Description of Artificial Sequence: Synthetic oligonucleotide
  Sense strand starting at position 1013 of SEQ ID NO: 1881515
auaccauaggcuggacaau

SEQ ID NO: 2050501 - RNA, 19 nt, Artificial Sequence
  Description of Artificial Sequence: Synthetic oligonucleotide
  Antisense strand to SEQ ID NO: 2050500
auuguccagccuaugguau

SEQ ID NO: 2050502 - RNA, 19 nt, Artificial Sequence
  Description of Artificial Sequence: Synthetic oligonucleotide
  Sense strand starting at position 1275 of SEQ ID NO: 1881515
ccuuaaugacgccaucuaa

SEQ ID NO: 2050503 - RNA, 19 nt, Artificial Sequence
  Description of Artificial Sequence: Synthetic oligonucleotide
  Antisense strand to SEQ ID NO: 2050502
uuagauggcgucauuaagg

SEQ ID NO: 2050504 - RNA, 19 nt, Artificial Sequence
  Description of Artificial Sequence: Synthetic oligonucleotide
  Sense strand starting at position 1397 of SEQ ID NO: 1881515
caucgauaaugaucacgga

SEQ ID NO: 2050505 - RNA, 19 nt, Artificial Sequence
  Description of Artificial Sequence: Synthetic oligonucleotide
  Antisense strand to SEQ ID NO: 2050504
uccgugaucauuaucgaug

SEQ ID NO: 2050506 - RNA, 19 nt, Artificial Sequence
  Description of Artificial Sequence: Synthetic oligonucleotide
  Sense strand starting at position 1401 of SEQ ID NO: 1881515
gauaaugaucacggaggca

SEQ ID NO: 2050507 - RNA, 19 nt, Artificial Sequence
  Description of Artificial Sequence: Synthetic oligonucleotide
  Antisense strand to SEQ ID NO: 2050506
ugccuccgugaucauuauc

SEQ ID NO: 2050508 - RNA, 19 nt, Artificial Sequence
  Description of Artificial Sequence: Synthetic oligonucleotide
  Sense strand starting at position 1613 of SEQ ID NO: 1881515
ccaugccuggcauaaugua

SEQ ID NO: 2050509 - RNA, 19 nt, Artificial Sequence
  Description of Artificial Sequence: Synthetic oligonucleotide
  Antisense strand to SEQ ID NO: 2050508
uacauuaugccaggcaugg

SEQ ID NO: 2050510 - RNA, 19 nt, Artificial Sequence
  Description of Artificial Sequence: Synthetic oligonucleotide
  Sense strand starting at position 1621 of SEQ ID NO: 1881515
ggcauaauguaccuccaaa

SEQ ID NO: 2050511 - RNA, 19 nt, Artificial Sequence
  Description of Artificial Sequence: Synthetic oligonucleotide
  Antisense strand to SEQ ID NO: 2050510
uuuggagguacauuaugcc

SEQ ID NO: 2050512 - RNA, 19 nt, Artificial Sequence
  Description of Artificial Sequence: Synthetic oligonucleotide
  Sense strand starting at position 1632 of SEQ ID NO: 1881515
ccuccaaagguaugaagua

SEQ ID NO: 2050513 - RNA, 19 nt, Artificial Sequence
  Description of Artificial Sequence: Synthetic oligonucleotide
  Antisense strand to SEQ ID NO: 2050512
uacuucauaccuuuggagg

SEQ ID NO: 2050514 - RNA, 19 nt, Artificial Sequence
  Description of Artificial Sequence: Synthetic oligonucleotide
  Sense strand starting at position 1858 of SEQ ID NO: 1881515
aagagaaaguuggugaucu

SEQ ID NO: 2050515 - RNA, 19 nt, Artificial Sequence
  Description of Artificial Sequence: Synthetic oligonucleotide
  Antisense strand to SEQ ID NO: 2050514
agaucaccaacuuucucuu

SEQ ID NO: 2050516 - RNA, 19 nt, Artificial Sequence
  Description of Artificial Sequence: Synthetic oligonucleotide
  Sense strand starting at position 1862 of SEQ ID NO: 1881515
gaaaguuggugaucuuacu

SEQ ID NO: 2050517 - RNA, 19 nt, Artificial Sequence
  Description of Artificial Sequence: Synthetic oligonucleotide
  Antisense strand to SEQ ID NO: 2050516
aguaagaucaccaacuuuc

SEQ ID NO: 2050518 - RNA, 19 nt, Artificial Sequence
  Description of Artificial Sequence: Synthetic oligonucleotide
  Sense strand starting at position 2017 of SEQ ID NO: 1881515
ugauacauucgguauccuu

SEQ ID NO: 2050519 - RNA, 19 nt, Artificial Sequence
  Description of Artificial Sequence: Synthetic oligonucleotide
  Antisense strand to SEQ ID NO: 2050518
aaggauaccgaauguauca

SEQ ID NO: 2050520 - RNA, 19 nt, Artificial Sequence
  Description of Artificial Sequence: Synthetic oligonucleotide
  Sense strand starting at position 2092 of SEQ ID NO: 1881515
gaaauuaaauggcuaugua

SEQ ID NO: 2050521 - RNA, 19 nt, Artificial Sequence
  Description of Artificial Sequence: Synthetic oligonucleotide
  Antisense strand to SEQ ID NO: 2050520
uacauagccauuuaauuuc

SEQ ID NO: 2050522 - RNA, 19 nt, Artificial Sequence
  Description of Artificial Sequence: Synthetic oligonucleotide
  Sense strand starting at position 2112 of SEQ ID NO: 1881515
gcggaauaccuguagagug

SEQ ID NO: 2050523 - RNA, 19 nt, Artificial Sequence
  Description of Artificial Sequence: Synthetic oligonucleotide
  Antisense strand to SEQ ID NO: 2050522
cacucuacagguauuccgc

SEQ ID NO: 2050524 - RNA, 19 nt, Artificial Sequence
  Description of Artificial Sequence: Synthetic oligonucleotide
  Sense strand starting at position 2114 of SEQ ID NO: 1881515
ggaauaccuguagaguguu

SEQ ID NO: 2050525 - RNA, 19 nt, Artificial Sequence
  Description of Artificial Sequence: Synthetic oligonucleotide
  Antisense strand to SEQ ID NO: 2050524
aacacucuacagguauucc

SEQ ID NO: 2050526 - RNA, 19 nt, Artificial Sequence
  Description of Artificial Sequence: Synthetic oligonucleotide
  Sense strand starting at position 2311 of SEQ ID NO: 1881515
cgaaaugcuaguuauguua

SEQ ID NO: 2050527 - RNA, 19 nt, Artificial Sequence
  Description of Artificial Sequence: Synthetic oligonucleotide
  Antisense strand to SEQ ID NO: 2050526
uaacauaacuagcauuucg

SEQ ID NO: 2050528 - RNA, 19 nt, Artificial Sequence
  Description of Artificial Sequence: Synthetic oligonucleotide
  Sense strand starting at position 2333 of SEQ ID NO: 1881515
auuuaugacuauggagacu

SEQ ID NO: 2050529 - RNA, 19 nt, Artificial Sequence
  Description of Artificial Sequence: Synthetic oligonucleotide
  Antisense strand to SEQ ID NO: 2050528
agucuccauagucauaaau

SEQ ID NO: 2050530 - RNA, 19 nt, Artificial Sequence
  Description of Artificial Sequence: Synthetic oligonucleotide
  Sense strand starting at position 2344 of SEQ ID NO: 1881515
uggagacuuuccuccacaa

SEQ ID NO: 2050531 - RNA, 19 nt, Artificial Sequence
  Description of Artificial Sequence: Synthetic oligonucleotide
  Antisense strand to SEQ ID NO: 2050530
uuguggaggaaagucucca

SEQ ID NO: 2050532 - RNA, 19 nt, Artificial Sequence
  Description of Artificial Sequence: Synthetic oligonucleotide
  Sense strand starting at position 2703 of SEQ ID NO: 1881515
guccuaggauuugcaugua

SEQ ID NO: 2050533 - RNA, 19 nt, Artificial Sequence
  Description of Artificial Sequence: Synthetic oligonucleotide
  Antisense strand to SEQ ID NO: 2050532
uacaugcaaauccuaggac

SEQ ID NO: 2050534 - RNA, 19 nt, Artificial Sequence
  Description of Artificial Sequence: Synthetic oligonucleotide
  Sense strand starting at position 2723 of SEQ ID NO: 1881515
caaaucugaccuggugauu

SEQ ID NO: 2050535 - RNA, 19 nt, Artificial Sequence
  Description of Artificial Sequence: Synthetic oligonucleotide
  Antisense strand to SEQ ID NO: 2050534
aaucaccaggucagauuug

SEQ ID NO: 2050536 - RNA, 19 nt, Artificial Sequence
  Description of Artificial Sequence: Synthetic oligonucleotide
  Sense strand starting at position 2818 of SEQ ID NO: 1881515
cuuucuuugcuggauaaga

SEQ ID NO: 2050537 - RNA, 19 nt, Artificial Sequence
  Description of Artificial Sequence: Synthetic oligonucleotide
  Antisense strand to SEQ ID NO: 2050536
ucuuauccagcaaagaaag

SEQ ID NO: 2050538 - RNA, 19 nt, Artificial Sequence
  Description of Artificial Sequence: Synthetic oligonucleotide
  Sense strand starting at position 2931 of SEQ ID NO: 1881515
ggccuuggucaagguggaa

SEQ ID NO: 2050539 - RNA, 19 nt, Artificial Sequence
  Description of Artificial Sequence: Synthetic oligonucleotide
  Antisense strand to SEQ ID NO: 2050538
uuccaccuugaccaaggcc

SEQ ID NO: 2050540 - RNA, 19 nt, Artificial Sequence
  Description of Artificial Sequence: Synthetic oligonucleotide
  Sense strand starting at position 2959 of SEQ ID NO: 1881515
gguguuugggccugagaaa

SEQ ID NO: 2050541 - RNA, 19 nt, Artificial Sequence
  Description of Artificial Sequence: Synthetic oligonucleotide
  Antisense strand to SEQ ID NO: 2050540
uuucucaggcccaaacacc

SEQ ID NO: 2050542 - RNA, 19 nt, Artificial Sequence
  Description of Artificial Sequence: Synthetic oligonucleotide
  Sense strand starting at position 2960 of SEQ ID NO: 1881515
guguuugggccugagaaac

SEQ ID NO: 2050543 - RNA, 19 nt, Artificial Sequence
  Description of Artificial Sequence: Synthetic oligonucleotide
  Antisense strand to SEQ ID NO: 2050542
guuucucaggcccaaacac

SEQ ID NO: 2050544 - RNA, 19 nt, Artificial Sequence
  Description of Artificial Sequence: Synthetic oligonucleotide
  Sense strand starting at position 2971 of SEQ ID NO: 1881515
ugagaaacagccugccuaa

SEQ ID NO: 2050545 - RNA, 19 nt, Artificial Sequence
  Description of Artificial Sequence: Synthetic oligonucleotide
  Antisense strand to SEQ ID NO: 2050544
uuaggcaggcuguuucuca

SEQ ID NO: 2050546 - RNA, 19 nt, Artificial Sequence
  Description of Artificial Sequence: Synthetic oligonucleotide
  Sense strand starting at position 3406 of SEQ ID NO: 1881515
ucaaaucuugcugggcaaa

SEQ ID NO: 2050547 - RNA, 19 nt, Artificial Sequence
  Description of Artificial Sequence: Synthetic oligonucleotide
  Antisense strand to SEQ ID NO: 2050546
uuugcccagcaagauuuga

SEQ ID NO: 2050548 - RNA, 19 nt, Artificial Sequence
  Description of Artificial Sequence: Synthetic oligonucleotide
  Sense strand starting at position 3571 of SEQ ID NO: 1881515
gcagcuguggucucuggua

SEQ ID NO: 2050549 - RNA, 19 nt, Artificial Sequence
  Description of Artificial Sequence: Synthetic oligonucleotide
  Antisense strand to SEQ ID NO: 2050548
uaccagagaccacagcugc

SEQ ID NO: 2050550 - RNA, 19 nt, Artificial Sequence
  Description of Artificial Sequence: Synthetic oligonucleotide
  Sense strand starting at position 3624 of SEQ ID NO: 1881515
ggacauaaaugccugaauu

SEQ ID NO: 2050551 - RNA, 19 nt, Artificial Sequence
  Description of Artificial Sequence: Synthetic oligonucleotide
  Antisense strand to SEQ ID NO: 2050550
aauucaggcauuuaugucc

SEQ ID NO: 2050552 - RNA, 19 nt, Artificial Sequence
  Description of Artificial Sequence: Synthetic oligonucleotide
  Sense strand starting at position 3851 of SEQ ID NO: 1881515
guguauccacaacagaauu

SEQ ID NO: 2050553 - RNA, 19 nt, Artificial Sequence
  Description of Artificial Sequence: Synthetic oligonucleotide
  Antisense strand to SEQ ID NO: 2050552
aauucuguuguggauacac

SEQ ID NO: 2050554 - RNA, 19 nt, Artificial Sequence
  Description of Artificial Sequence: Synthetic oligonucleotide
  Sense strand starting at position 3979 of SEQ ID NO: 1881515
uuauuuacagcuugauugu

SEQ ID NO: 2050555 - RNA, 19 nt, Artificial Sequence
  Description of Artificial Sequence: Synthetic oligonucleotide
  Antisense strand to SEQ ID NO: 2050554
acaaucaagcuguaaauaa

SEQ ID NO: 2050556 - RNA, 19 nt, Artificial Sequence
  Description of Artificial Sequence: Synthetic oligonucleotide
  Sense strand starting at position 3982 of SEQ ID NO: 1881515
uuuacagcuugauuguaaa

SEQ ID NO: 2050557 - RNA, 19 nt, Artificial Sequence
  Description of Artificial Sequence: Synthetic oligonucleotide
  Antisense strand to SEQ ID NO: 2050556
uuuacaaucaagcuguaaa

SEQ ID NO: 2050558 - RNA, 19 nt, Artificial Sequence
  Description of Artificial Sequence: Synthetic oligonucleotide
  Sense strand starting at position 249 of SEQ ID NO: 1881516
gaaaccucaugcuuggaga

SEQ ID NO: 2050559 - RNA, 19 nt, Artificial Sequence
  Description of Artificial Sequence: Synthetic oligonucleotide
  Antisense strand to SEQ ID NO: 2050558
ucuccaagcaugagguuuc

SEQ ID NO: 2050560 - RNA, 19 nt, Artificial Sequence
  Description of Artificial Sequence: Synthetic oligonucleotide
  Sense strand starting at position 305 of SEQ ID NO: 1881516
ccaaauuagugguuccaga

SEQ ID NO: 2050561 - RNA, 19 nt, Artificial Sequence
  Description of Artificial Sequence: Synthetic oligonucleotide
  Antisense strand to SEQ ID NO: 2050560
ucuggaaccacuaauuugg

SEQ ID NO: 2050562 - RNA, 19 nt, Artificial Sequence
  Description of Artificial Sequence: Synthetic oligonucleotide
  Sense strand starting at position 462 of SEQ ID NO: 1881516
ccuugugacaaacgaagaa

SEQ ID NO: 2050563 - RNA, 19 nt, Artificial Sequence
  Description of Artificial Sequence: Synthetic oligonucleotide
  Antisense strand to SEQ ID NO: 2050562
uucuucguuugucacaagg

SEQ ID NO: 2050564 - RNA, 19 nt, Artificial Sequence
  Description of Artificial Sequence: Synthetic oligonucleotide
  Sense strand starting at position 745 of SEQ ID NO: 1881516
ccuugaagagcaugguaaa

SEQ ID NO: 2050565 - RNA, 19 nt, Artificial Sequence
  Description of Artificial Sequence: Synthetic oligonucleotide
  Antisense strand to SEQ ID NO: 2050564
uuuaccaugcucuucaagg

SEQ ID NO: 2050566 - RNA, 19 nt, Artificial Sequence
  Description of Artificial Sequence: Synthetic oligonucleotide
  Sense strand starting at position 851 of SEQ ID NO: 1881516
ggagggacugguugcgauu

SEQ ID NO: 2050567 - RNA, 19 nt, Artificial Sequence
  Description of Artificial Sequence: Synthetic oligonucleotide
  Antisense strand to SEQ ID NO: 2050566
aaucgcaaccagucccucc

SEQ ID NO: 2050568 - RNA, 19 nt, Artificial Sequence
  Description of Artificial Sequence: Synthetic oligonucleotide
  Sense strand starting at position 1184 of SEQ ID NO: 1881516
caagucauaugagugguau

SEQ ID NO: 2050569 - RNA, 19 nt, Artificial Sequence
  Description of Artificial Sequence: Synthetic oligonucleotide
  Antisense strand to SEQ ID NO: 2050568
auaccacucauaugacuug

SEQ ID NO: 2050570 - RNA, 19 nt, Artificial Sequence
  Description of Artificial Sequence: Synthetic oligonucleotide
  Sense strand starting at position 1185 of SEQ ID NO: 1881516
aagucauaugagugguauu

SEQ ID NO: 2050571 - RNA, 19 nt, Artificial Sequence
  Description of Artificial Sequence: Synthetic oligonucleotide
  Antisense strand to SEQ ID NO: 2050570
aauaccacucauaugacuu

SEQ ID NO: 2050572 - RNA, 19 nt, Artificial Sequence
  Description of Artificial Sequence: Synthetic oligonucleotide
  Sense strand starting at position 1204 of SEQ ID NO: 1881516
uuaagaauaugccugugaa

SEQ ID NO: 2050573 - RNA, 19 nt, Artificial Sequence
  Description of Artificial Sequence: Synthetic oligonucleotide
  Antisense strand to SEQ ID NO: 2050572
uucacaggcauauucuuaa

SEQ ID NO: 2050574 - RNA, 19 nt, Artificial Sequence
  Description of Artificial Sequence: Synthetic oligonucleotide
  Sense strand starting at position 1207 of SEQ ID NO: 1881516
agaauaugccugugaaugg

SEQ ID NO: 2050575 - RNA, 19 nt, Artificial Sequence
  Description of Artificial Sequence: Synthetic oligonucleotide
  Antisense strand to SEQ ID NO: 2050574
ccauucacaggcauauucu

SEQ ID NO: 2050576 - RNA, 19 nt, Artificial Sequence
  Description of Artificial Sequence: Synthetic oligonucleotide
  Sense strand starting at position 1350 of SEQ ID NO: 1881516
acagauauccacuguuauu

SEQ ID NO: 2050577 - RNA, 19 nt, Artificial Sequence
  Description of Artificial Sequence: Synthetic oligonucleotide
  Antisense strand to SEQ ID NO: 2050576
aauaacaguggauaucugu

SEQ ID NO: 2050578 - RNA, 19 nt, Artificial Sequence
  Description of Artificial Sequence: Synthetic oligonucleotide
  Sense strand starting at position 1436 of SEQ ID NO: 1881516
ucuguaaaugaaugauugu

SEQ ID NO: 2050579 - RNA, 19 nt, Artificial Sequence
  Description of Artificial Sequence: Synthetic oligonucleotide
  Antisense strand to SEQ ID NO: 2050578
acaaucauucauuuacaga

SEQ ID NO: 2050580 - RNA, 19 nt, Artificial Sequence
  Description of Artificial Sequence: Synthetic oligonucleotide
  Sense strand starting at position 1439 of SEQ ID NO: 1881516
guaaaugaaugauuguucu

SEQ ID NO: 2050581 - RNA, 19 nt, Artificial Sequence
  Description of Artificial Sequence: Synthetic oligonucleotide
  Antisense strand to SEQ ID NO: 2050580
agaacaaucauucauuuac

SEQ ID NO: 2050582 - RNA, 19 nt, Artificial Sequence
  Description of Artificial Sequence: Synthetic oligonucleotide
  Sense strand starting at position 1703 of SEQ ID NO: 1881516
cgcauacugucauuugaua

SEQ ID NO: 2050583 - RNA, 19 nt, Artificial Sequence
  Description of Artificial Sequence: Synthetic oligonucleotide
  Antisense strand to SEQ ID NO: 2050582
uaucaaaugacaguaugcg

SEQ ID NO: 2050584 - RNA, 19 nt, Artificial Sequence
  Description of Artificial Sequence: Synthetic oligonucleotide
  Sense strand starting at position 1708 of SEQ ID NO: 1881516
acugucauuugauaaagau

SEQ ID NO: 2050585 - RNA, 19 nt, Artificial Sequence
  Description of Artificial Sequence: Synthetic oligonucleotide
  Antisense strand to SEQ ID NO: 2050584
aucuuuaucaaaugacagu

SEQ ID NO: 2050586 - RNA, 19 nt, Artificial Sequence
  Description of Artificial Sequence: Synthetic oligonucleotide
  Sense strand starting at position 1727 of SEQ ID NO: 1881516
gaaggacaucugcaugugu

SEQ ID NO: 2050587 - RNA, 19 nt, Artificial Sequence
  Description of Artificial Sequence: Synthetic oligonucleotide
  Antisense strand to SEQ ID NO: 2050586
acacaugcagauguccuuc

SEQ ID NO: 2050588 - RNA, 19 nt, Artificial Sequence
  Description of Artificial Sequence: Synthetic oligonucleotide
  Sense strand starting at position 1745 of SEQ ID NO: 1881516
uuacucauuguguaucaua

SEQ ID NO: 2050589 - RNA, 19 nt, Artificial Sequence
  Description of Artificial Sequence: Synthetic oligonucleotide
  Antisense strand to SEQ ID NO: 2050588
uaugauacacaaugaguaa

SEQ ID NO: 2050590 - RNA, 19 nt, Artificial Sequence
  Description of Artificial Sequence: Synthetic oligonucleotide
  Sense strand starting at position 1820 of SEQ ID NO: 1881516
gaagucuagugauccagaa

SEQ ID NO: 2050591 - RNA, 19 nt, Artificial Sequence
  Description of Artificial Sequence: Synthetic oligonucleotide
  Antisense strand to SEQ ID NO: 2050590
uucuggaucacuagacuuc

SEQ ID NO: 2050592 - RNA, 19 nt, Artificial Sequence
  Description of Artificial Sequence: Synthetic oligonucleotide
  Sense strand starting at position 1822 of SEQ ID NO: 1881516
agucuagugauccagaagu

SEQ ID NO: 2050593 - RNA, 19 nt, Artificial Sequence
  Description of Artificial Sequence: Synthetic oligonucleotide
  Antisense strand to SEQ ID NO: 2050592
acuucuggaucacuagacu

SEQ ID NO: 2050594 - RNA, 19 nt, Artificial Sequence
  Description of Artificial Sequence: Synthetic oligonucleotide
  Sense strand starting at position 1860 of SEQ ID NO: 1881516
ggcuuagggucucucaaca

SEQ ID NO: 2050595 - RNA, 19 nt, Artificial Sequence
  Description of Artificial Sequence: Synthetic oligonucleotide
  Antisense strand to SEQ ID NO: 2050594
uguugagagacccuaagcc

SEQ ID NO: 2050596 - RNA, 19 nt, Artificial Sequence
  Description of Artificial Sequence: Synthetic oligonucleotide
  Sense strand starting at position 2053 of SEQ ID NO: 1881516
ccugaacguguuuaugaca

SEQ ID NO: 2050597 - RNA, 19 nt, Artificial Sequence
  Description of Artificial Sequence: Synthetic oligonucleotide
  Antisense strand to SEQ ID NO: 2050596
ugucauaaacacguucagg

SEQ ID NO: 2050598 - RNA, 19 nt, Artificial Sequence
  Description of Artificial Sequence: Synthetic oligonucleotide
  Sense strand starting at position 2137 of SEQ ID NO: 1881516
auggccuagccauagaaau

SEQ ID NO: 2050599 - RNA, 19 nt, Artificial Sequence
  Description of Artificial Sequence: Synthetic oligonucleotide
  Antisense strand to SEQ ID NO: 2050598
auuucuauggcuaggccau

SEQ ID NO: 2050600 - RNA, 19 nt, Artificial Sequence
  Description of Artificial Sequence: Synthetic oligonucleotide
  Sense strand starting at position 2139 of SEQ ID NO: 1881516
ggccuagccauagaaauga

SEQ ID NO: 2050601 - RNA, 19 nt, Artificial Sequence
  Description of Artificial Sequence: Synthetic oligonucleotide
  Antisense strand to SEQ ID NO: 2050600
ucauuucuauggcuaggcc

SEQ ID NO: 2050602 - RNA, 19 nt, Artificial Sequence
  Description of Artificial Sequence: Synthetic oligonucleotide
  Sense strand starting at position 2176 of SEQ ID NO: 1881516
auacucuauuggucacaca

SEQ ID NO: 2050603 - RNA, 19 nt, Artificial Sequence
  Description of Artificial Sequence: Synthetic oligonucleotide
  Antisense strand to SEQ ID NO: 2050602
ugugugaccaauagaguau

SEQ ID NO: 2050604 - RNA, 19 nt, Artificial Sequence
  Description of Artificial Sequence: Synthetic oligonucleotide
  Sense strand starting at position 2444 of SEQ ID NO: 1881516
uugugcacuguauaauaau

SEQ ID NO: 2050605 - RNA, 19 nt, Artificial Sequence
  Description of Artificial Sequence: Synthetic oligonucleotide
  Antisense strand to SEQ ID NO: 2050604
auuauuauacagugcacaa

SEQ ID NO: 2050606 - RNA, 19 nt, Artificial Sequence
  Description of Artificial Sequence: Synthetic oligonucleotide
  Sense strand starting at position 2543 of SEQ ID NO: 1881516
cuuuauauucuguauacug

SEQ ID NO: 2050607 - RNA, 19 nt, Artificial Sequence
  Description of Artificial Sequence: Synthetic oligonucleotide
  Antisense strand to SEQ ID NO: 2050606
caguauacagaauauaaag

SEQ ID NO: 2050608 - RNA, 19 nt, Artificial Sequence
  Description of Artificial Sequence: Synthetic oligonucleotide
  Sense strand starting at position 2576 of SEQ ID NO: 1881516
acaauauagugccuugaua

SEQ ID NO: 2050609 - RNA, 19 nt, Artificial Sequence
  Description of Artificial Sequence: Synthetic oligonucleotide
  Antisense strand to SEQ ID NO: 2050608
uaucaaggcacuauauugu

SEQ ID NO: 2050610 - RNA, 19 nt, Artificial Sequence
  Description of Artificial Sequence: Synthetic oligonucleotide
  Sense strand starting at position 2615 of SEQ ID NO: 1881516
guugauuauguuuaugcua

SEQ ID NO: 2050611 - RNA, 19 nt, Artificial Sequence
  Description of Artificial Sequence: Synthetic oligonucleotide
  Antisense strand to SEQ ID NO: 2050610
uagcauaaacauaaucaac

SEQ ID NO: 2050612 - RNA, 19 nt, Artificial Sequence
  Description of Artificial Sequence: Synthetic oligonucleotide
  Sense strand starting at position 3159 of SEQ ID NO: 1881516
gccagacucugacucuaua

SEQ ID NO: 2050613 - RNA, 19 nt, Artificial Sequence
  Description of Artificial Sequence: Synthetic oligonucleotide
  Antisense strand to SEQ ID NO: 2050612
uauagagucagagucuggc

SEQ ID NO: 2050614 - RNA, 19 nt, Artificial Sequence
  Description of Artificial Sequence: Synthetic oligonucleotide
  Sense strand starting at position 3426 of SEQ ID NO: 1881516
uuugaaguccuccaaauug

SEQ ID NO: 2050615 - RNA, 19 nt, Artificial Sequence
  Description of Artificial Sequence: Synthetic oligonucleotide
  Antisense strand to SEQ ID NO: 2050614
caauuuggaggacuucaaa

SEQ ID NO: 2050616 - RNA, 19 nt, Artificial Sequence
  Description of Artificial Sequence: Synthetic oligonucleotide
  Sense strand starting at position 3558 of SEQ ID NO: 1881516
agguuugucuuacugauac

SEQ ID NO: 2050617 - RNA, 19 nt, Artificial Sequence
  Description of Artificial Sequence: Synthetic oligonucleotide
  Antisense strand to SEQ ID NO: 2050616
guaucaguaagacaaaccu

SEQ ID NO: 2050618 - RNA, 19 nt, Artificial Sequence
  Description of Artificial Sequence: Synthetic oligonucleotide
  Sense strand starting at position 3580 of SEQ ID NO: 1881516
aaguauugcucauuuguga

SEQ ID NO: 2050619 - RNA, 19 nt, Artificial Sequence
  Description of Artificial Sequence: Synthetic oligonucleotide
  Antisense strand to SEQ ID NO: 2050618
ucacaaaugagcaauacuu

SEQ ID NO: 2050620 - RNA, 19 nt, Artificial Sequence
  Description of Artificial Sequence: Synthetic oligonucleotide
  Sense strand starting at position 3593 of SEQ ID NO: 1881516
uugugaaauuguguugaca

SEQ ID NO: 2050621 - RNA, 19 nt, Artificial Sequence
  Description of Artificial Sequence: Synthetic oligonucleotide
  Antisense strand to SEQ ID NO: 2050620
ugucaacacaauuucacaa

SEQ ID NO: 2050622 - RNA, 19 nt, Artificial Sequence
  Description of Artificial Sequence: Synthetic oligonucleotide
  Sense strand starting at position 3596 of SEQ ID NO: 1881516
ugaaauuguguugacaacu

SEQ ID NO: 2050623 - RNA, 19 nt, Artificial Sequence
  Description of Artificial Sequence: Synthetic oligonucleotide
  Antisense strand to SEQ ID NO: 2050622
aguugucaacacaauuuca

SEQ ID NO: 2050624 - RNA, 19 nt, Artificial Sequence
  Description of Artificial Sequence: Synthetic oligonucleotide
  Sense strand starting at position 3675 of SEQ ID NO: 1881516
ucauaaguugagggacuau

SEQ ID NO: 2050625 - RNA, 19 nt, Artificial Sequence
  Description of Artificial Sequence: Synthetic oligonucleotide
  Antisense strand to SEQ ID NO: 2050624
auagucccucaacuuauga

SEQ ID NO: 2050626 - RNA, 19 nt, Artificial Sequence
  Description of Artificial Sequence: Synthetic oligonucleotide
  Sense strand starting at position 3692 of SEQ ID NO: 1881516
aucugaagaguuugaaacu

SEQ ID NO: 2050627 - RNA, 19 nt, Artificial Sequence
  Description of Artificial Sequence: Synthetic oligonucleotide
  Antisense strand to SEQ ID NO: 2050626
aguuucaaacucuucagau

SEQ ID NO: 2050628 - RNA, 19 nt, Artificial Sequence
  Description of Artificial Sequence: Synthetic oligonucleotide
  Sense strand starting at position 3702 of SEQ ID NO: 1881516
uuugaaacucauggucuuu

SEQ ID NO: 2050629 - RNA, 19 nt, Artificial Sequence
  Description of Artificial Sequence: Synthetic oligonucleotide
  Antisense strand to SEQ ID NO: 2050628
aaagaccaugaguuucaaa

SEQ ID NO: 2050630 - RNA, 19 nt, Artificial Sequence
  Description of Artificial Sequence: Synthetic oligonucleotide
  Sense strand starting at position 3756 of SEQ ID NO: 1881516
caaagauucuuggugucuu

SEQ ID NO: 2050631 - RNA, 19 nt, Artificial Sequence
  Description of Artificial Sequence: Synthetic oligonucleotide
  Antisense strand to SEQ ID NO: 2050630
aagacaccaagaaucuuug

SEQ ID NO: 2050632 - RNA, 19 nt, Artificial Sequence
  Description of Artificial Sequence: Synthetic oligonucleotide
  Sense strand starting at position 3779 of SEQ ID NO: 1881516
uauguugaguuaucgacaa

SEQ ID NO: 2050633 - RNA, 19 nt, Artificial Sequence
  Description of Artificial Sequence: Synthetic oligonucleotide
  Antisense strand to SEQ ID NO: 2050632
uugucgauaacucaacaua

SEQ ID NO: 2050634 - RNA, 19 nt, Artificial Sequence
  Description of Artificial Sequence: Synthetic oligonucleotide
  Sense strand starting at position 3781 of SEQ ID NO: 1881516
uguugaguuaucgacaaag

SEQ ID NO: 2050635 - RNA, 19 nt, Artificial Sequence
  Description of Artificial Sequence: Synthetic oligonucleotide
  Antisense strand to SEQ ID NO: 2050634
cuuugucgauaacucaaca

SEQ ID NO: 2050636 - RNA, 19 nt, Artificial Sequence
  Description of Artificial Sequence: Synthetic oligonucleotide
  Sense strand starting at position 3860 of SEQ ID NO: 1881516
gccagauauuaguuacaug

SEQ ID NO: 2050637 - RNA, 19 nt, Artificial Sequence
  Description of Artificial Sequence: Synthetic oligonucleotide
  Antisense strand to SEQ ID NO: 2050636
cauguaacuaauaucuggc

SEQ ID NO: 2050638 - RNA, 19 nt, Artificial Sequence
  Description of Artificial Sequence: Synthetic oligonucleotide
  Sense strand starting at position 55 of SEQ ID NO: 1881517
ggguaaacugggugacaga

SEQ ID NO: 2050639 - RNA, 19 nt, Artificial Sequence
  Description of Artificial Sequence: Synthetic oligonucleotide
  Antisense strand to SEQ ID NO: 2050638
ucugucacccaguuuaccc

SEQ ID NO: 2050640 - RNA, 19 nt, Artificial Sequence
  Description of Artificial Sequence: Synthetic oligonucleotide
  Sense strand starting at position 273 of SEQ ID NO: 1881517
accucaguaugacuuuauu

SEQ ID NO: 2050641 - RNA, 19 nt, Artificial Sequence
  Description of Artificial Sequence: Synthetic oligonucleotide
  Antisense strand to SEQ ID NO: 2050640
aauaaagucauacugaggu

SEQ ID NO: 2050642 - RNA, 19 nt, Artificial Sequence
  Description of Artificial Sequence: Synthetic oligonucleotide
  Sense strand starting at position 282 of SEQ ID NO: 1881517
ugacuuuauuuggagguga

SEQ ID NO: 2050643 - RNA, 19 nt, Artificial Sequence
  Description of Artificial Sequence: Synthetic oligonucleotide
  Antisense strand to SEQ ID NO: 2050642
ucaccuccaaauaaaguca

SEQ ID NO: 2050644 - RNA, 19 nt, Artificial Sequence
  Description of Artificial Sequence: Synthetic oligonucleotide
  Sense strand starting at position 472 of SEQ ID NO: 1881517
gcagaaggacucugacaac

SEQ ID NO: 2050645 - RNA, 19 nt, Artificial Sequence
  Description of Artificial Sequence: Synthetic oligonucleotide
  Antisense strand to SEQ ID NO: 2050644
guugucagaguccuucugc

SEQ ID NO: 2050646 - RNA, 19 nt, Artificial Sequence
  Description of Artificial Sequence: Synthetic oligonucleotide
  Sense strand starting at position 697 of SEQ ID NO: 1881517
gcugauuucucaguguuau

SEQ ID NO: 2050647 - RNA, 19 nt, Artificial Sequence
  Description of Artificial Sequence: Synthetic oligonucleotide
  Antisense strand to SEQ ID NO: 2050646
auaacacugagaaaucagc

SEQ ID NO: 2050648 - RNA, 19 nt, Artificial Sequence
  Description of Artificial Sequence: Synthetic oligonucleotide
  Sense strand starting at position 731 of SEQ ID NO: 1881517
cuuggaguuucuuugaaau

SEQ ID NO: 2050649 - RNA, 19 nt, Artificial Sequence
  Description of Artificial Sequence: Synthetic oligonucleotide
  Antisense strand to SEQ ID NO: 2050648
auuucaaagaaacuccaag

SEQ ID NO: 2050650 - RNA, 19 nt, Artificial Sequence
  Description of Artificial Sequence: Synthetic oligonucleotide
  Sense strand starting at position 818 of SEQ ID NO: 1881517
gccucaaacccuggaagaa

SEQ ID NO: 2050651 - RNA, 19 nt, Artificial Sequence
  Description of Artificial Sequence: Synthetic oligonucleotide
  Antisense strand to SEQ ID NO: 2050650
uucuuccaggguuugaggc

SEQ ID NO: 2050652 - RNA, 19 nt, Artificial Sequence
  Description of Artificial Sequence: Synthetic oligonucleotide
  Sense strand starting at position 830 of SEQ ID NO: 1881517
ggaagaaugucugugacaa

SEQ ID NO: 2050653 - RNA, 19 nt, Artificial Sequence
  Description of Artificial Sequence: Synthetic oligonucleotide
  Antisense strand to SEQ ID NO: 2050652
uugucacagacauucuucc

SEQ ID NO: 2050654 - RNA, 19 nt, Artificial Sequence
  Description of Artificial Sequence: Synthetic oligonucleotide
  Sense strand starting at position 831 of SEQ ID NO: 1881517
gaagaaugucugugacaaa

SEQ ID NO: 2050655 - RNA, 19 nt, Artificial Sequence
  Description of Artificial Sequence: Synthetic oligonucleotide
  Antisense strand to SEQ ID NO: 2050654
uuugucacagacauucuuc

SEQ ID NO: 2050656 - RNA, 19 nt, Artificial Sequence
  Description of Artificial Sequence: Synthetic oligonucleotide
  Sense strand starting at position 890 of SEQ ID NO: 1881517
ccuggauuucgguguccca

SEQ ID NO: 2050657 - RNA, 19 nt, Artificial Sequence
  Description of Artificial Sequence: Synthetic oligonucleotide
  Antisense strand to SEQ ID NO: 2050656
ugggacaccgaaauccagg

SEQ ID NO: 2050658 - RNA, 19 nt, Artificial Sequence
  Description of Artificial Sequence: Synthetic oligonucleotide
  Sense strand starting at position 1297 of SEQ ID NO: 1881517
guguuauuauaaccuuaug

SEQ ID NO: 2050659 - RNA, 19 nt, Artificial Sequence
  Description of Artificial Sequence: Synthetic oligonucleotide
  Antisense strand to SEQ ID NO: 2050658
cauaagguuauaauaacac

SEQ ID NO: 2050660 - RNA, 19 nt, Artificial Sequence
  Description of Artificial Sequence: Synthetic oligonucleotide
  Sense strand starting at position 1315 of SEQ ID NO: 1881517
gaaagagaaugguuucccu

SEQ ID NO: 2050661 - RNA, 19 nt, Artificial Sequence
  Description of Artificial Sequence: Synthetic oligonucleotide
  Antisense strand to SEQ ID NO: 2050660
agggaaaccauucucuuuc

SEQ ID NO: 2050662 - RNA, 19 nt, Artificial Sequence
  Description of Artificial Sequence: Synthetic oligonucleotide
  Sense strand starting at position 1318 of SEQ ID NO: 1881517
agagaaugguuucccuaaa

SEQ ID NO: 2050663 - RNA, 19 nt, Artificial Sequence
  Description of Artificial Sequence: Synthetic oligonucleotide
  Antisense strand to SEQ ID NO: 2050662
uuuagggaaaccauucucu

SEQ ID NO: 2050664 - RNA, 19 nt, Artificial Sequence
  Description of Artificial Sequence: Synthetic oligonucleotide
  Sense strand starting at position 1376 of SEQ ID NO: 1881517
ggcucagacccacaguuaa

SEQ ID NO: 2050665 - RNA, 19 nt, Artificial Sequence
  Description of Artificial Sequence: Synthetic oligonucleotide
  Antisense strand to SEQ ID NO: 2050664
uuaacugugggucugagcc

SEQ ID NO: 2050666 - RNA, 19 nt, Artificial Sequence
  Description of Artificial Sequence: Synthetic oligonucleotide
  Sense strand starting at position 1532 of SEQ ID NO: 1881517
cacaucuggccagaaaugu

SEQ ID NO: 2050667 - RNA, 19 nt, Artificial Sequence
  Description of Artificial Sequence: Synthetic oligonucleotide
  Antisense strand to SEQ ID NO: 2050666
acauuucuggccagaugug

SEQ ID NO: 2050668 - RNA, 19 nt, Artificial Sequence
  Description of Artificial Sequence: Synthetic oligonucleotide
  Sense strand starting at position 1538 of SEQ ID NO: 1881517
uggccagaaaugugacauu

SEQ ID NO: 2050669 - RNA, 19 nt, Artificial Sequence
  Description of Artificial Sequence: Synthetic oligonucleotide
  Antisense strand to SEQ ID NO: 2050668
aaugucacauuucuggcca

SEQ ID NO: 2050670 - RNA, 19 nt, Artificial Sequence
  Description of Artificial Sequence: Synthetic oligonucleotide
  Sense strand starting at position 1984 of SEQ ID NO: 1881517
acaacuaggucaucacuga

SEQ ID NO: 2050671 - RNA, 19 nt, Artificial Sequence
  Description of Artificial Sequence: Synthetic oligonucleotide
  Antisense strand to SEQ ID NO: 2050670
ucagugaugaccuaguugu

SEQ ID NO: 2050672 - RNA, 19 nt, Artificial Sequence
  Description of Artificial Sequence: Synthetic oligonucleotide
  Sense strand starting at position 1991 of SEQ ID NO: 1881517
ggucaucacugauuccaga

SEQ ID NO: 2050673 - RNA, 19 nt, Artificial Sequence
  Description of Artificial Sequence: Synthetic oligonucleotide
  Antisense strand to SEQ ID NO: 2050672
ucuggaaucagugaugacc

SEQ ID NO: 2050674 - RNA, 19 nt, Artificial Sequence
  Description of Artificial Sequence: Synthetic oligonucleotide
  Sense strand starting at position 2204 of SEQ ID NO: 1881517
uuaugauaagucuguugaa

SEQ ID NO: 2050675 - RNA, 19 nt, Artificial Sequence
  Description of Artificial Sequence: Synthetic oligonucleotide
  Antisense strand to SEQ ID NO: 2050674
uucaacagacuuaucauaa

SEQ ID NO: 2050676 - RNA, 19 nt, Artificial Sequence
  Description of Artificial Sequence: Synthetic oligonucleotide
  Sense strand starting at position 2205 of SEQ ID NO: 1881517
uaugauaagucuguugaaa

SEQ ID NO: 2050677 - RNA, 19 nt, Artificial Sequence
  Description of Artificial Sequence: Synthetic oligonucleotide
  Antisense strand to SEQ ID NO: 2050676
uuucaacagacuuaucaua

SEQ ID NO: 2050678 - RNA, 19 nt, Artificial Sequence
  Description of Artificial Sequence: Synthetic oligonucleotide
  Sense strand starting at position 2341 of SEQ ID NO: 1881517
acgguuugauuccuaaaga

SEQ ID NO: 2050679 - RNA, 19 nt, Artificial Sequence
  Description of Artificial Sequence: Synthetic oligonucleotide
  Antisense strand to SEQ ID NO: 2050678
ucuuuaggaaucaaaccgu

SEQ ID NO: 2050680 - RNA, 19 nt, Artificial Sequence
  Description of Artificial Sequence: Synthetic oligonucleotide
  Sense strand starting at position 2428 of SEQ ID NO: 1881517
ccaggagaaacuugaguuu

SEQ ID NO: 2050681 - RNA, 19 nt, Artificial Sequence
  Description of Artificial Sequence: Synthetic oligonucleotide
  Antisense strand to SEQ ID NO: 2050680
aaacucaaguuucuccugg

SEQ ID NO: 2050682 - RNA, 19 nt, Artificial Sequence
  Description of Artificial Sequence: Synthetic oligonucleotide
  Sense strand starting at position 2434 of SEQ ID NO: 1881517
gaaacuugaguuugaguuu

SEQ ID NO: 2050683 - RNA, 19 nt, Artificial Sequence
  Description of Artificial Sequence: Synthetic oligonucleotide
  Antisense strand to SEQ ID NO: 2050682
aaacucaaacucaaguuuc

SEQ ID NO: 2050684 - RNA, 19 nt, Artificial Sequence
  Description of Artificial Sequence: Synthetic oligonucleotide
  Sense strand starting at position 2462 of SEQ ID NO: 1881517
acgaaauauuuccaaggaa

SEQ ID NO: 2050685 - RNA, 19 nt, Artificial Sequence
  Description of Artificial Sequence: Synthetic oligonucleotide
  Antisense strand to SEQ ID NO: 2050684
uuccuuggaaauauuucgu

SEQ ID NO: 2050686 - RNA, 19 nt, Artificial Sequence
  Description of Artificial Sequence: Synthetic oligonucleotide
  Sense strand starting at position 2588 of SEQ ID NO: 1881517
ucuguacuacuguaggaaa

SEQ ID NO: 2050687 - RNA, 19 nt, Artificial Sequence
  Description of Artificial Sequence: Synthetic oligonucleotide
  Antisense strand to SEQ ID NO: 2050686
uuuccuacaguaguacaga

SEQ ID NO: 2050688 - RNA, 19 nt, Artificial Sequence
  Description of Artificial Sequence: Synthetic oligonucleotide
  Sense strand starting at position 2621 of SEQ ID NO: 1881517
acgcuaaaucagcauccua

SEQ ID NO: 2050689 - RNA, 19 nt, Artificial Sequence
  Description of Artificial Sequence: Synthetic oligonucleotide
  Antisense strand to SEQ ID NO: 2050688
uaggaugcugauuuagcgu

SEQ ID NO: 2050690 - RNA, 19 nt, Artificial Sequence
  Description of Artificial Sequence: Synthetic oligonucleotide
  Sense strand starting at position 2706 of SEQ ID NO: 1881517
ccagaucucuguuugaaca

SEQ ID NO: 2050691 - RNA, 19 nt, Artificial Sequence
  Description of Artificial Sequence: Synthetic oligonucleotide
  Antisense strand to SEQ ID NO: 2050690
uguucaaacagagaucugg

SEQ ID NO: 2050692 - RNA, 19 nt, Artificial Sequence
  Description of Artificial Sequence: Synthetic oligonucleotide
  Sense strand starting at position 2718 of SEQ ID NO: 1881517
uugaacaagggcugucauu

SEQ ID NO: 2050693 - RNA, 19 nt, Artificial Sequence
  Description of Artificial Sequence: Synthetic oligonucleotide
  Antisense strand to SEQ ID NO: 2050692
aaugacagcccuuguucaa

SEQ ID NO: 2050694 - RNA, 19 nt, Artificial Sequence
  Description of Artificial Sequence: Synthetic oligonucleotide
  Sense strand starting at position 2820 of SEQ ID NO: 1881517
gggucaugagugcaccauu

SEQ ID NO: 2050695 - RNA, 19 nt, Artificial Sequence
  Description of Artificial Sequence: Synthetic oligonucleotide
  Antisense strand to SEQ ID NO: 2050694
aauggugcacucaugaccc

SEQ ID NO: 2050696 - RNA, 19 nt, Artificial Sequence
  Description of Artificial Sequence: Synthetic oligonucleotide
  Sense strand starting at position 2856 of SEQ ID NO: 1881517
gucagcauucuccagacca

SEQ ID NO: 2050697 - RNA, 19 nt, Artificial Sequence
  Description of Artificial Sequence: Synthetic oligonucleotide
  Antisense strand to SEQ ID NO: 2050696
uggucuggagaaugcugac

SEQ ID NO: 2050698 - RNA, 19 nt, Artificial Sequence
  Description of Artificial Sequence: Synthetic oligonucleotide
  Sense strand starting at position 3038 of SEQ ID NO: 1881517
ugguauucugaguaacuga

SEQ ID NO: 2050699 - RNA, 19 nt, Artificial Sequence
  Description of Artificial Sequence: Synthetic oligonucleotide
  Antisense strand to SEQ ID NO: 2050698
ucaguuacucagaauacca

SEQ ID NO: 2050700 - RNA, 19 nt, Artificial Sequence
  Description of Artificial Sequence: Synthetic oligonucleotide
  Sense strand starting at position 3185 of SEQ ID NO: 1881517
agaucaguggccugggaua

SEQ ID NO: 2050701 - RNA, 19 nt, Artificial Sequence
  Description of Artificial Sequence: Synthetic oligonucleotide
  Antisense strand to SEQ ID NO: 2050700
uaucccaggccacugaucu

SEQ ID NO: 2050702 - RNA, 19 nt, Artificial Sequence
  Description of Artificial Sequence: Synthetic oligonucleotide
  Sense strand starting at position 3339 of SEQ ID NO: 1881517
ggugauaccucaccuuacu

SEQ ID NO: 2050703 - RNA, 19 nt, Artificial Sequence
  Description of Artificial Sequence: Synthetic oligonucleotide
  Antisense strand to SEQ ID NO: 2050702
aguaaggugagguaucacc

SEQ ID NO: 2050704 - RNA, 19 nt, Artificial Sequence
  Description of Artificial Sequence: Synthetic oligonucleotide
  Sense strand starting at position 3529 of SEQ ID NO: 1881517
agaagaguuuaggcacaaa

SEQ ID NO: 2050705 - RNA, 19 nt, Artificial Sequence
  Description of Artificial Sequence: Synthetic oligonucleotide
  Antisense strand to SEQ ID NO: 2050704
uuugugccuaaacucuucu

SEQ ID NO: 2050706 - RNA, 19 nt, Artificial Sequence
  Description of Artificial Sequence: Synthetic oligonucleotide
  Sense strand starting at position 3638 of SEQ ID NO: 1881517
aagguuugugcucagauuc

SEQ ID NO: 2050707 - RNA, 19 nt, Artificial Sequence
  Description of Artificial Sequence: Synthetic oligonucleotide
  Antisense strand to SEQ ID NO: 2050706
gaaucugagcacaaaccuu

SEQ ID NO: 2050708 - RNA, 19 nt, Artificial Sequence
  Description of Artificial Sequence: Synthetic oligonucleotide
  Sense strand starting at position 3700 of SEQ ID NO: 1881517
uugugaccuuaccuguaaa

SEQ ID NO: 2050709 - RNA, 19 nt, Artificial Sequence
  Description of Artificial Sequence: Synthetic oligonucleotide
  Antisense strand to SEQ ID NO: 2050708
uuuacagguaaggucacaa

SEQ ID NO: 2050710 - RNA, 19 nt, Artificial Sequence
  Description of Artificial Sequence: Synthetic oligonucleotide
  Sense strand starting at position 3703 of SEQ ID NO: 1881517
ugaccuuaccuguaaagug

SEQ ID NO: 2050711 - RNA, 19 nt, Artificial Sequence
  Description of Artificial Sequence: Synthetic oligonucleotide
  Antisense strand to SEQ ID NO: 2050710
cacuuuacagguaagguca

SEQ ID NO: 2050712 - RNA, 19 nt, Artificial Sequence
  Description of Artificial Sequence: Synthetic oligonucleotide
  Sense strand starting at position 3790 of SEQ ID NO: 1881517
cagaguaggugaucaguga

SEQ ID NO: 2050713 - RNA, 19 nt, Artificial Sequence
  Description of Artificial Sequence: Synthetic oligonucleotide
  Antisense strand to SEQ ID NO: 2050712
ucacugaucaccuacucug

SEQ ID NO: 2050714 - RNA, 19 nt, Artificial Sequence
  Description of Artificial Sequence: Synthetic oligonucleotide
  Sense strand starting at position 3854 of SEQ ID NO: 1881517
cucaauaauccggagccau

SEQ ID NO: 2050715 - RNA, 19 nt, Artificial Sequence
  Description of Artificial Sequence: Synthetic oligonucleotide
  Antisense strand to SEQ ID NO: 2050714
auggcuccggauuauugag

SEQ ID NO: 2050716 - RNA, 19 nt, Artificial Sequence
  Description of Artificial Sequence: Synthetic oligonucleotide
  Sense strand starting at position 3921 of SEQ ID NO: 1881517
gccuaucuccucugaagga

SEQ ID NO: 2050717 - RNA, 19 nt, Artificial Sequence
  Description of Artificial Sequence: Synthetic oligonucleotide
  Antisense strand to SEQ ID NO: 2050716
uccuucagaggagauaggc

SEQ ID NO: 2050718 - RNA, 19 nt, Artificial Sequence
  Description of Artificial Sequence: Synthetic oligonucleotide
  Sense strand starting at position 737 of SEQ ID NO: 1881518
gguggaucggcucacaaga

SEQ ID NO: 2050719 - RNA, 19 nt, Artificial Sequence
  Description of Artificial Sequence: Synthetic oligonucleotide
  Antisense strand to SEQ ID NO: 2050718
ucuugugagccgauccacc

SEQ ID NO: 2050720 - RNA, 19 nt, Artificial Sequence
  Description of Artificial Sequence: Synthetic oligonucleotide
  Sense strand starting at position 771 of SEQ ID NO: 1881518
cccguugcucccuacaaga

SEQ ID NO: 2050721 - RNA, 19 nt, Artificial Sequence
  Description of Artificial Sequence: Synthetic oligonucleotide
  Antisense strand to SEQ ID NO: 2050720
ucuuguagggagcaacggg

SEQ ID NO: 2050722 - RNA, 19 nt, Artificial Sequence
  Description of Artificial Sequence: Synthetic oligonucleotide
  Sense strand starting at position 829 of SEQ ID NO: 1881518
uuucgaauacagugcaaau

SEQ ID NO: 2050723 - RNA, 19 nt, Artificial Sequence
  Description of Artificial Sequence: Synthetic oligonucleotide
  Antisense strand to SEQ ID NO: 2050722
auuugcacuguauucgaaa

SEQ ID NO: 2050724 - RNA, 19 nt, Artificial Sequence
  Description of Artificial Sequence: Synthetic oligonucleotide
  Sense strand starting at position 839 of SEQ ID NO: 1881518
agugcaaaucuguaucaua

SEQ ID NO: 2050725 - RNA, 19 nt, Artificial Sequence
  Description of Artificial Sequence: Synthetic oligonucleotide
  Antisense strand to SEQ ID NO: 2050724
uaugauacagauuugcacu

SEQ ID NO: 2050726 - RNA, 19 nt, Artificial Sequence
  Description of Artificial Sequence: Synthetic oligonucleotide
  Sense strand starting at position 956 of SEQ ID NO: 1881518
uuaauaucaugucugagau

SEQ ID NO: 2050727 - RNA, 19 nt, Artificial Sequence
  Description of Artificial Sequence: Synthetic oligonucleotide
  Antisense strand to SEQ ID NO: 2050726
aucucagacaugauauuaa

SEQ ID NO: 2050728 - RNA, 19 nt, Artificial Sequence
  Description of Artificial Sequence: Synthetic oligonucleotide
  Sense strand starting at position 1087 of SEQ ID NO: 1881518
uugcuuucccuagagggaa

SEQ ID NO: 2050729 - RNA, 19 nt, Artificial Sequence
  Description of Artificial Sequence: Synthetic oligonucleotide
  Antisense strand to SEQ ID NO: 2050728
uucccucuagggaaagcaa

SEQ ID NO: 2050730 - RNA, 19 nt, Artificial Sequence
  Description of Artificial Sequence: Synthetic oligonucleotide
  Sense strand starting at position 1089 of SEQ ID NO: 1881518
gcuuucccuagagggaaua

SEQ ID NO: 2050731 - RNA, 19 nt, Artificial Sequence
  Description of Artificial Sequence: Synthetic oligonucleotide
  Antisense strand to SEQ ID NO: 2050730
uauucccucuagggaaagc

SEQ ID NO: 2050732 - RNA, 19 nt, Artificial Sequence
  Description of Artificial Sequence: Synthetic oligonucleotide
  Sense strand starting at position 1192 of SEQ ID NO: 1881518
agcuuaugcauguuacguu

SEQ ID NO: 2050733 - RNA, 19 nt, Artificial Sequence
  Description of Artificial Sequence: Synthetic oligonucleotide
  Antisense strand to SEQ ID NO: 2050732
aacguaacaugcauaagcu

SEQ ID NO: 2050734 - RNA, 19 nt, Artificial Sequence
  Description of Artificial Sequence: Synthetic oligonucleotide
  Sense strand starting at position 1215 of SEQ ID NO: 1881518
ccuaaaugauguccagaag

SEQ ID NO: 2050735 - RNA, 19 nt, Artificial Sequence
  Description of Artificial Sequence: Synthetic oligonucleotide
  Antisense strand to SEQ ID NO: 2050734
cuucuggacaucauuuagg

SEQ ID NO: 2050736 - RNA, 19 nt, Artificial Sequence
  Description of Artificial Sequence: Synthetic oligonucleotide
  Sense strand starting at position 1233 of SEQ ID NO: 1881518
guauuuacuugugucauau

SEQ ID NO: 2050737 - RNA, 19 nt, Artificial Sequence
  Description of Artificial Sequence: Synthetic oligonucleotide
  Antisense strand to SEQ ID NO: 2050736
auaugacacaaguaaauac

SEQ ID NO: 2050738 - RNA, 19 nt, Artificial Sequence
  Description of Artificial Sequence: Synthetic oligonucleotide
  Sense strand starting at position 1298 of SEQ ID NO: 1881518
uuauuaauguucucaggaa

SEQ ID NO: 2050739 - RNA, 19 nt, Artificial Sequence
  Description of Artificial Sequence: Synthetic oligonucleotide
  Antisense strand to SEQ ID NO: 2050738
uuccugagaacauuaauaa

SEQ ID NO: 2050740 - RNA, 19 nt, Artificial Sequence
  Description of Artificial Sequence: Synthetic oligonucleotide
  Sense strand starting at position 1312 of SEQ ID NO: 1881518
aggaacaauugacaugaaa

SEQ ID NO: 2050741 - RNA, 19 nt, Artificial Sequence
  Description of Artificial Sequence: Synthetic oligonucleotide
  Antisense strand to SEQ ID NO: 2050740
uuucaugucaauuguuccu

SEQ ID NO: 2050742 - RNA, 19 nt, Artificial Sequence
  Description of Artificial Sequence: Synthetic oligonucleotide
  Sense strand starting at position 1771 of SEQ ID NO: 1881518
cuuuaagauugacauuugu

SEQ ID NO: 2050743 - RNA, 19 nt, Artificial Sequence
  Description of Artificial Sequence: Synthetic oligonucleotide
  Antisense strand to SEQ ID NO: 2050742
acaaaugucaaucuuaaag

SEQ ID NO: 2050744 - RNA, 19 nt, Artificial Sequence
  Description of Artificial Sequence: Synthetic oligonucleotide
  Sense strand starting at position 1821 of SEQ ID NO: 1881518
gauagauuaucacucgauc

SEQ ID NO: 2050745 - RNA, 19 nt, Artificial Sequence
  Description of Artificial Sequence: Synthetic oligonucleotide
  Antisense strand to SEQ ID NO: 2050744
gaucgagugauaaucuauc

SEQ ID NO: 2050746 - RNA, 19 nt, Artificial Sequence
  Description of Artificial Sequence: Synthetic oligonucleotide
  Sense strand starting at position 1853 of SEQ ID NO: 1881518
gcaaauugguuucuugaag

SEQ ID NO: 2050747 - RNA, 19 nt, Artificial Sequence
  Description of Artificial Sequence: Synthetic oligonucleotide
  Antisense strand to SEQ ID NO: 2050746
cuucaagaaaccaauuugc

SEQ ID NO: 2050748 - RNA, 19 nt, Artificial Sequence
  Description of Artificial Sequence: Synthetic oligonucleotide
  Sense strand starting at position 1854 of SEQ ID NO: 1881518
caaauugguuucuugaaga

SEQ ID NO: 2050749 - RNA, 19 nt, Artificial Sequence
  Description of Artificial Sequence: Synthetic oligonucleotide
  Antisense strand to SEQ ID NO: 2050748
ucuucaagaaaccaauuug

SEQ ID NO: 2050750 - RNA, 19 nt, Artificial Sequence
  Description of Artificial Sequence: Synthetic oligonucleotide
  Sense strand starting at position 1872 of SEQ ID NO: 1881518
acccacuuugcugaugaga

SEQ ID NO: 2050751 - RNA, 19 nt, Artificial Sequence
  Description of Artificial Sequence: Synthetic oligonucleotide
  Antisense strand to SEQ ID NO: 2050750
ucucaucagcaaagugggu

SEQ ID NO: 2050752 - RNA, 19 nt, Artificial Sequence
  Description of Artificial Sequence: Synthetic oligonucleotide
  Sense strand starting at position 2019 of SEQ ID NO: 1881518
uuccucugaguuuaugaaa

SEQ ID NO: 2050753 - RNA, 19 nt, Artificial Sequence
  Description of Artificial Sequence: Synthetic oligonucleotide
  Antisense strand to SEQ ID NO: 2050752
uuucauaaacucagaggaa

SEQ ID NO: 2050754 - RNA, 19 nt, Artificial Sequence
  Description of Artificial Sequence: Synthetic oligonucleotide
  Sense strand starting at position 2083 of SEQ ID NO: 1881518
gugcaaguugauuauccaa

SEQ ID NO: 2050755 - RNA, 19 nt, Artificial Sequence
  Description of Artificial Sequence: Synthetic oligonucleotide
  Antisense strand to SEQ ID NO: 2050754
uuggauaaucaacuugcac

SEQ ID NO: 2050756 - RNA, 19 nt, Artificial Sequence
  Description of Artificial Sequence: Synthetic oligonucleotide
  Sense strand starting at position 2085 of SEQ ID NO: 1881518
gcaaguugauuauccaaau

SEQ ID NO: 2050757 - RNA, 19 nt, Artificial Sequence
  Description of Artificial Sequence: Synthetic oligonucleotide
  Antisense strand to SEQ ID NO: 2050756
auuuggauaaucaacuugc

SEQ ID NO: 2050758 - RNA, 19 nt, Artificial Sequence
  Description of Artificial Sequence: Synthetic oligonucleotide
  Sense strand starting at position 2123 of SEQ ID NO: 1881518
ccaacuaaaucagagaaga

SEQ ID NO: 2050759 - RNA, 19 nt, Artificial Sequence
  Description of Artificial Sequence: Synthetic oligonucleotide
  Antisense strand to SEQ ID NO: 2050758
ucuucucugauuuaguugg

SEQ ID NO: 2050760 - RNA, 19 nt, Artificial Sequence
  Description of Artificial Sequence: Synthetic oligonucleotide
  Sense strand starting at position 2136 of SEQ ID NO: 1881518
agaagacgggucugaguaa

SEQ ID NO: 2050761 - RNA, 19 nt, Artificial Sequence
  Description of Artificial Sequence: Synthetic oligonucleotide
  Antisense strand to SEQ ID NO: 2050760
uuacucagacccgucuucu

SEQ ID NO: 2050762 - RNA, 19 nt, Artificial Sequence
  Description of Artificial Sequence: Synthetic oligonucleotide
  Sense strand starting at position 2166 of SEQ ID NO: 1881518
gguacaugacgucacucua

SEQ ID NO: 2050763 - RNA, 19 nt, Artificial Sequence
  Description of Artificial Sequence: Synthetic oligonucleotide
  Antisense strand to SEQ ID NO: 2050762
uagagugacgucauguacc

SEQ ID NO: 2050764 - RNA, 19 nt, Artificial Sequence
  Description of Artificial Sequence: Synthetic oligonucleotide
  Sense strand starting at position 2247 of SEQ ID NO: 1881518
aucuguagcaggugagaua

SEQ ID NO: 2050765 - RNA, 19 nt, Artificial Sequence
  Description of Artificial Sequence: Synthetic oligonucleotide
  Antisense strand to SEQ ID NO: 2050764
uaucucaccugcuacagau

SEQ ID NO: 2050766 - RNA, 19 nt, Artificial Sequence
  Description of Artificial Sequence: Synthetic oligonucleotide
  Sense strand starting at position 2270 of SEQ ID NO: 1881518
cugcaaaucacggacuagu

SEQ ID NO: 2050767 - RNA, 19 nt, Artificial Sequence
  Description of Artificial Sequence: Synthetic oligonucleotide
  Antisense strand to SEQ ID NO: 2050766
acuaguccgugauuugcag

SEQ ID NO: 2050768 - RNA, 19 nt, Artificial Sequence
  Description of Artificial Sequence: Synthetic oligonucleotide
  Sense strand starting at position 2959 of SEQ ID NO: 1881518
uuuggugugagggauuauu

SEQ ID NO: 2050769 - RNA, 19 nt, Artificial Sequence
  Description of Artificial Sequence: Synthetic oligonucleotide
  Antisense strand to SEQ ID NO: 2050768
aauaaucccucacaccaaa

SEQ ID NO: 2050770 - RNA, 19 nt, Artificial Sequence
  Description of Artificial Sequence: Synthetic oligonucleotide
  Sense strand starting at position 2968 of SEQ ID NO: 1881518
agggauuauuucuaguaaa

SEQ ID NO: 2050771 - RNA, 19 nt, Artificial Sequence
  Description of Artificial Sequence: Synthetic oligonucleotide
  Antisense strand to SEQ ID NO: 2050770
uuuacuagaaauaaucccu

SEQ ID NO: 2050772 - RNA, 19 nt, Artificial Sequence
  Description of Artificial Sequence: Synthetic oligonucleotide
  Sense strand starting at position 3020 of SEQ ID NO: 1881518
agugguucugagcaugauc

SEQ ID NO: 2050773 - RNA, 19 nt, Artificial Sequence
  Description of Artificial Sequence: Synthetic oligonucleotide
  Antisense strand to SEQ ID NO: 2050772
gaucaugcucagaaccacu

SEQ ID NO: 2050774 - RNA, 19 nt, Artificial Sequence
  Description of Artificial Sequence: Synthetic oligonucleotide
  Sense strand starting at position 3023 of SEQ ID NO: 1881518
gguucugagcaugaucacu

SEQ ID NO: 2050775 - RNA, 19 nt, Artificial Sequence
  Description of Artificial Sequence: Synthetic oligonucleotide
  Antisense strand to SEQ ID NO: 2050774
agugaucaugcucagaacc

SEQ ID NO: 2050776 - RNA, 19 nt, Artificial Sequence
  Description of Artificial Sequence: Synthetic oligonucleotide
  Sense strand starting at position 3025 of SEQ ID NO: 1881518
uucugagcaugaucacuaa

SEQ ID NO: 2050777 - RNA, 19 nt, Artificial Sequence
  Description of Artificial Sequence: Synthetic oligonucleotide
  Antisense strand to SEQ ID NO: 2050776
uuagugaucaugcucagaa

SEQ ID NO: 2050778 - RNA, 19 nt, Artificial Sequence
  Description of Artificial Sequence: Synthetic oligonucleotide
  Sense strand starting at position 3109 of SEQ ID NO: 1881518
gaaggaaguaugugguaau

SEQ ID NO: 2050779 - RNA, 19 nt, Artificial Sequence
  Description of Artificial Sequence: Synthetic oligonucleotide
  Antisense strand to SEQ ID NO: 2050778
auuaccacauacuuccuuc

SEQ ID NO: 2050780 - RNA, 19 nt, Artificial Sequence
  Description of Artificial Sequence: Synthetic oligonucleotide
  Sense strand starting at position 3324 of SEQ ID NO: 1881518
augacaucugcccagauau

SEQ ID NO: 2050781 - RNA, 19 nt, Artificial Sequence
  Description of Artificial Sequence: Synthetic oligonucleotide
  Antisense strand to SEQ ID NO: 2050780
auaucugggcagaugucau

SEQ ID NO: 2050782 - RNA, 19 nt, Artificial Sequence
  Description of Artificial Sequence: Synthetic oligonucleotide
  Sense strand starting at position 3504 of SEQ ID NO: 1881518
cuguauguucuacauucuu

SEQ ID NO: 2050783 - RNA, 19 nt, Artificial Sequence
  Description of Artificial Sequence: Synthetic oligonucleotide
  Antisense strand to SEQ ID NO: 2050782
aagaauguagaacauacag

SEQ ID NO: 2050784 - RNA, 19 nt, Artificial Sequence
  Description of Artificial Sequence: Synthetic oligonucleotide
  Sense strand starting at position 3509 of SEQ ID NO: 1881518
uguucuacauucuugagag

SEQ ID NO: 2050785 - RNA, 19 nt, Artificial Sequence
  Description of Artificial Sequence: Synthetic oligonucleotide
  Antisense strand to SEQ ID NO: 2050784
cucucaagaauguagaaca

SEQ ID NO: 2050786 - RNA, 19 nt, Artificial Sequence
  Description of Artificial Sequence: Synthetic oligonucleotide
  Sense strand starting at position 3553 of SEQ ID NO: 1881518
ucucgacaaauggaguuua

SEQ ID NO: 2050787 - RNA, 19 nt, Artificial Sequence
  Description of Artificial Sequence: Synthetic oligonucleotide
  Antisense strand to SEQ ID NO: 2050786
uaaacuccauuugucgaga

SEQ ID NO: 2050788 - RNA, 19 nt, Artificial Sequence
  Description of Artificial Sequence: Synthetic oligonucleotide
  Sense strand starting at position 3769 of SEQ ID NO: 1881518
gugauuucugcaugugaau

SEQ ID NO: 2050789 - RNA, 19 nt, Artificial Sequence
  Description of Artificial Sequence: Synthetic oligonucleotide
  Antisense strand to SEQ ID NO: 2050788
auucacaugcagaaaucac

SEQ ID NO: 2050790 - RNA, 19 nt, Artificial Sequence
  Description of Artificial Sequence: Synthetic oligonucleotide
  Sense strand starting at position 3780 of SEQ ID NO: 1881518
augugaauuguccagcuuu

SEQ ID NO: 2050791 - RNA, 19 nt, Artificial Sequence
  Description of Artificial Sequence: Synthetic oligonucleotide
  Antisense strand to SEQ ID NO: 2050790
aaagcuggacaauucacau

SEQ ID NO: 2050792 - RNA, 19 nt, Artificial Sequence
  Description of Artificial Sequence: Synthetic oligonucleotide
  Sense strand starting at position 3869 of SEQ ID NO: 1881518
uaguguggucucgauggaa

SEQ ID NO: 2050793 - RNA, 19 nt, Artificial Sequence
  Description of Artificial Sequence: Synthetic oligonucleotide
  Antisense strand to SEQ ID NO: 2050792
uuccaucgagaccacacua

SEQ ID NO: 2050794 - RNA, 19 nt, Artificial Sequence
  Description of Artificial Sequence: Synthetic oligonucleotide
  Sense strand starting at position 3873 of SEQ ID NO: 1881518
guggucucgauggaaggua

SEQ ID NO: 2050795 - RNA, 19 nt, Artificial Sequence
  Description of Artificial Sequence: Synthetic oligonucleotide
  Antisense strand to SEQ ID NO: 2050794
uaccuuccaucgagaccac

SEQ ID NO: 2050796 - RNA, 19 nt, Artificial Sequence
  Description of Artificial Sequence: Synthetic oligonucleotide
  Sense strand starting at position 3927 of SEQ ID NO: 1881518
aagcaaauccuguagcuga

SEQ ID NO: 2050797 - RNA, 19 nt, Artificial Sequence
  Description of Artificial Sequence: Synthetic oligonucleotide
  Antisense strand to SEQ ID NO: 2050796
ucagcuacaggauuugcuu

SEQ ID NO: 2050798 - RNA, 19 nt, Artificial Sequence
  Description of Artificial Sequence: Synthetic oligonucleotide
  Sense strand starting at position 74 of SEQ ID NO: 1881519
gcagaaauuuaagauaaug

SEQ ID NO: 2050799 - RNA, 19 nt, Artificial Sequence
  Description of Artificial Sequence: Synthetic oligonucleotide
  Antisense strand to SEQ ID NO: 2050798
cauuaucuuaaauuucugc

SEQ ID NO: 2050800 - RNA, 19 nt, Artificial Sequence
  Description of Artificial Sequence: Synthetic oligonucleotide
  Sense strand starting at position 210 of SEQ ID NO: 1881519
uagagaaauuugggaaggu

SEQ ID NO: 2050801 - RNA, 19 nt, Artificial Sequence
  Description of Artificial Sequence: Synthetic oligonucleotide
  Antisense strand to SEQ ID NO: 2050800
accuucccaaauuucucua

SEQ ID NO: 2050802 - RNA, 19 nt, Artificial Sequence
  Description of Artificial Sequence: Synthetic oligonucleotide
  Sense strand starting at position 211 of SEQ ID NO: 1881519
agagaaauuugggaagguu

SEQ ID NO: 2050803 - RNA, 19 nt, Artificial Sequence
  Description of Artificial Sequence: Synthetic oligonucleotide
  Antisense strand to SEQ ID NO: 2050802
aaccuucccaaauuucucu

SEQ ID NO: 2050804 - RNA, 19 nt, Artificial Sequence
  Description of Artificial Sequence: Synthetic oligonucleotide
  Sense strand starting at position 244 of SEQ ID NO: 1881519
guggcuucucacuauccaa

SEQ ID NO: 2050805 - RNA, 19 nt, Artificial Sequence
  Description of Artificial Sequence: Synthetic oligonucleotide
  Antisense strand to SEQ ID NO: 2050804
uuggauagugagaagccac

SEQ ID NO: 2050806 - RNA, 19 nt, Artificial Sequence
  Description of Artificial Sequence: Synthetic oligonucleotide
  Sense strand starting at position 291 of SEQ ID NO: 1881519
agggccauuucugaggaca

SEQ ID NO: 2050807 - RNA, 19 nt, Artificial Sequence
  Description of Artificial Sequence: Synthetic oligonucleotide
  Antisense strand to SEQ ID NO: 2050806
uguccucagaaauggcccu

SEQ ID NO: 2050808 - RNA, 19 nt, Artificial Sequence
  Description of Artificial Sequence: Synthetic oligonucleotide
  Sense strand starting at position 325 of SEQ ID NO: 1881519
gcaagaguucuugggagag

SEQ ID NO: 2050809 - RNA, 19 nt, Artificial Sequence
  Description of Artificial Sequence: Synthetic oligonucleotide
  Antisense strand to SEQ ID NO: 2050808
cucucccaagaacucuugc

SEQ ID NO: 2050810 - RNA, 19 nt, Artificial Sequence
  Description of Artificial Sequence: Synthetic oligonucleotide
  Sense strand starting at position 384 of SEQ ID NO: 1881519
agagaaugucaaugacagu

SEQ ID NO: 2050811 - RNA, 19 nt, Artificial Sequence
  Description of Artificial Sequence: Synthetic oligonucleotide
  Antisense strand to SEQ ID NO: 2050810
acugucauugacauucucu

SEQ ID NO: 2050812 - RNA, 19 nt, Artificial Sequence
  Description of Artificial Sequence: Synthetic oligonucleotide
  Sense strand starting at position 585 of SEQ ID NO: 1881519
uugagcugcccugaugaga

SEQ ID NO: 2050813 - RNA, 19 nt, Artificial Sequence
  Description of Artificial Sequence: Synthetic oligonucleotide
  Antisense strand to SEQ ID NO: 2050812
ucucaucagggcagcucaa

SEQ ID NO: 2050814 - RNA, 19 nt, Artificial Sequence
  Description of Artificial Sequence: Synthetic oligonucleotide
  Sense strand starting at position 617 of SEQ ID NO: 1881519
ugcugccuucuccagagaa

SEQ ID NO: 2050815 - RNA, 19 nt, Artificial Sequence
  Description of Artificial Sequence: Synthetic oligonucleotide
  Antisense strand to SEQ ID NO: 2050814
uucucuggagaaggcagca

SEQ ID NO: 2050816 - RNA, 19 nt, Artificial Sequence
  Description of Artificial Sequence: Synthetic oligonucleotide
  Sense strand starting at position 619 of SEQ ID NO: 1881519
cugccuucuccagagaaga

SEQ ID NO: 2050817 - RNA, 19 nt, Artificial Sequence
  Description of Artificial Sequence: Synthetic oligonucleotide
  Antisense strand to SEQ ID NO: 2050816
ucuucucuggagaaggcag

SEQ ID NO: 2050818 - RNA, 19 nt, Artificial Sequence
  Description of Artificial Sequence: Synthetic oligonucleotide
  Sense strand starting at position 703 of SEQ ID NO: 1881519
agagaucagucaguacauc

SEQ ID NO: 2050819 - RNA, 19 nt, Artificial Sequence
  Description of Artificial Sequence: Synthetic oligonucleotide
  Antisense strand to SEQ ID NO: 2050818
gauguacugacugaucucu

SEQ ID NO: 2050820 - RNA, 19 nt, Artificial Sequence
  Description of Artificial Sequence: Synthetic oligonucleotide
  Sense strand starting at position 1011 of SEQ ID NO: 1881519
auuggacuugucuggacuu

SEQ ID NO: 2050821 - RNA, 19 nt, Artificial Sequence
  Description of Artificial Sequence: Synthetic oligonucleotide
  Antisense strand to SEQ ID NO: 2050820
aaguccagacaaguccaau

SEQ ID NO: 2050822 - RNA, 19 nt, Artificial Sequence
  Description of Artificial Sequence: Synthetic oligonucleotide
  Sense strand starting at position 1070 of SEQ ID NO: 1881519
uuguucuuauaacuggaau

SEQ ID NO: 2050823 - RNA, 19 nt, Artificial Sequence
  Description of Artificial Sequence: Synthetic oligonucleotide
  Antisense strand to SEQ ID NO: 2050822
auuccaguuauaagaacaa

SEQ ID NO: 2050824 - RNA, 19 nt, Artificial Sequence
  Description of Artificial Sequence: Synthetic oligonucleotide
  Sense strand starting at position 1194 of SEQ ID NO: 1881519
agacucauuccauguauua

SEQ ID NO: 2050825 - RNA, 19 nt, Artificial Sequence
  Description of Artificial Sequence: Synthetic oligonucleotide
  Antisense strand to SEQ ID NO: 2050824
uaauacauggaaugagucu

SEQ ID NO: 2050826 - RNA, 19 nt, Artificial Sequence
  Description of Artificial Sequence: Synthetic oligonucleotide
  Sense strand starting at position 1379 of SEQ ID NO: 1881519
gugacucuacaguaaucca

SEQ ID NO: 2050827 - RNA, 19 nt, Artificial Sequence
  Description of Artificial Sequence: Synthetic oligonucleotide
  Antisense strand to SEQ ID NO: 2050826
uggauuacuguagagucac

SEQ ID NO: 2050828 - RNA, 19 nt, Artificial Sequence
  Description of Artificial Sequence: Synthetic oligonucleotide
  Sense strand starting at position 1495 of SEQ ID NO: 1881519
gcauuucuaugagcuaucu

SEQ ID NO: 2050829 - RNA, 19 nt, Artificial Sequence
  Description of Artificial Sequence: Synthetic oligonucleotide
  Antisense strand to SEQ ID NO: 2050828
agauagcucauagaaaugc

SEQ ID NO: 2050830 - RNA, 19 nt, Artificial Sequence
  Description of Artificial Sequence: Synthetic oligonucleotide
  Sense strand starting at position 1549 of SEQ ID NO: 1881519
ggaguaugcguacaaauaa

SEQ ID NO: 2050831 - RNA, 19 nt, Artificial Sequence
  Description of Artificial Sequence: Synthetic oligonucleotide
  Antisense strand to SEQ ID NO: 2050830
uuauuuguacgcauacucc

SEQ ID NO: 2050832 - RNA, 19 nt, Artificial Sequence
  Description of Artificial Sequence: Synthetic oligonucleotide
  Sense strand starting at position 1860 of SEQ ID NO: 1881519
agacuaaagucuccuauga

SEQ ID NO: 2050833 - RNA, 19 nt, Artificial Sequence
  Description of Artificial Sequence: Synthetic oligonucleotide
  Antisense strand to SEQ ID NO: 2050832
ucauaggagacuuuagucu

SEQ ID NO: 2050834 - RNA, 19 nt, Artificial Sequence
  Description of Artificial Sequence: Synthetic oligonucleotide
  Sense strand starting at position 1867 of SEQ ID NO: 1881519
agucuccuaugauuaugaa

SEQ ID NO: 2050835 - RNA, 19 nt, Artificial Sequence
  Description of Artificial Sequence: Synthetic oligonucleotide
  Antisense strand to SEQ ID NO: 2050834
uucauaaucauaggagacu

SEQ ID NO: 2050836 - RNA, 19 nt, Artificial Sequence
  Description of Artificial Sequence: Synthetic oligonucleotide
  Sense strand starting at position 1935 of SEQ ID NO: 1881519
accaaauauucccugugag

SEQ ID NO: 2050837 - RNA, 19 nt, Artificial Sequence
  Description of Artificial Sequence: Synthetic oligonucleotide
  Antisense strand to SEQ ID NO: 2050836
cucacagggaauauuuggu

SEQ ID NO: 2050838 - RNA, 19 nt, Artificial Sequence
  Description of Artificial Sequence: Synthetic oligonucleotide
  Sense strand starting at position 1936 of SEQ ID NO: 1881519
ccaaauauucccugugagg

SEQ ID NO: 2050839 - RNA, 19 nt, Artificial Sequence
  Description of Artificial Sequence: Synthetic oligonucleotide
  Antisense strand to SEQ ID NO: 2050838
ccucacagggaauauuugg

SEQ ID NO: 2050840 - RNA, 19 nt, Artificial Sequence
  Description of Artificial Sequence: Synthetic oligonucleotide
  Sense strand starting at position 1938 of SEQ ID NO: 1881519
aaauauucccugugaggac

SEQ ID NO: 2050841 - RNA, 19 nt, Artificial Sequence
  Description of Artificial Sequence: Synthetic oligonucleotide
  Antisense strand to SEQ ID NO: 2050840
guccucacagggaauauuu

SEQ ID NO: 2050842 - RNA, 19 nt, Artificial Sequence
  Description of Artificial Sequence: Synthetic oligonucleotide
  Sense strand starting at position 2167 of SEQ ID NO: 1881519
uaguuacauuagguaguaa

SEQ ID NO: 2050843 - RNA, 19 nt, Artificial Sequence
  Description of Artificial Sequence: Synthetic oligonucleotide
  Antisense strand to SEQ ID NO: 2050842
uuacuaccuaauguaacua

SEQ ID NO: 2050844 - RNA, 19 nt, Artificial Sequence
  Description of Artificial Sequence: Synthetic oligonucleotide
  Sense strand starting at position 2352 of SEQ ID NO: 1881519
ccauguauucuuuagaagu

SEQ ID NO: 2050845 - RNA, 19 nt, Artificial Sequence
  Description of Artificial Sequence: Synthetic oligonucleotide
  Antisense strand to SEQ ID NO: 2050844
acuucuaaagaauacaugg

SEQ ID NO: 2050846 - RNA, 19 nt, Artificial Sequence
  Description of Artificial Sequence: Synthetic oligonucleotide
  Sense strand starting at position 2437 of SEQ ID NO: 1881519
auuccaaggugcucugaga

SEQ ID NO: 2050847 - RNA, 19 nt, Artificial Sequence
  Description of Artificial Sequence: Synthetic oligonucleotide
  Antisense strand to SEQ ID NO: 2050846
ucucagagcaccuuggaau

SEQ ID NO: 2050848 - RNA, 19 nt, Artificial Sequence
  Description of Artificial Sequence: Synthetic oligonucleotide
  Sense strand starting at position 2609 of SEQ ID NO: 1881519
aaaucuaguugauugaugu

SEQ ID NO: 2050849 - RNA, 19 nt, Artificial Sequence
  Description of Artificial Sequence: Synthetic oligonucleotide
  Antisense strand to SEQ ID NO: 2050848
acaucaaucaacuagauuu

SEQ ID NO: 2050850 - RNA, 19 nt, Artificial Sequence
  Description of Artificial Sequence: Synthetic oligonucleotide
  Sense strand starting at position 2617 of SEQ ID NO: 1881519
uugauugauguccaguuga

SEQ ID NO: 2050851 - RNA, 19 nt, Artificial Sequence
  Description of Artificial Sequence: Synthetic oligonucleotide
  Antisense strand to SEQ ID NO: 2050850
ucaacuggacaucaaucaa

SEQ ID NO: 2050852 - RNA, 19 nt, Artificial Sequence
  Description of Artificial Sequence: Synthetic oligonucleotide
  Sense strand starting at position 2622 of SEQ ID NO: 1881519
ugauguccaguugaaguau

SEQ ID NO: 2050853 - RNA, 19 nt, Artificial Sequence
  Description of Artificial Sequence: Synthetic oligonucleotide
  Antisense strand to SEQ ID NO: 2050852
auacuucaacuggacauca

SEQ ID NO: 2050854 - RNA, 19 nt, Artificial Sequence
  Description of Artificial Sequence: Synthetic oligonucleotide
  Sense strand starting at position 2633 of SEQ ID NO: 1881519
ugaaguauauccuuaucga

SEQ ID NO: 2050855 - RNA, 19 nt, Artificial Sequence
  Description of Artificial Sequence: Synthetic oligonucleotide
  Antisense strand to SEQ ID NO: 2050854
ucgauaaggauauacuuca

SEQ ID NO: 2050856 - RNA, 19 nt, Artificial Sequence
  Description of Artificial Sequence: Synthetic oligonucleotide
  Sense strand starting at position 2634 of SEQ ID NO: 1881519
gaaguauauccuuaucgaa

SEQ ID NO: 2050857 - RNA, 19 nt, Artificial Sequence
  Description of Artificial Sequence: Synthetic oligonucleotide
  Antisense strand to SEQ ID NO: 2050856
uucgauaaggauauacuuc

SEQ ID NO: 2050858 - RNA, 19 nt, Artificial Sequence
  Description of Artificial Sequence: Synthetic oligonucleotide
  Sense strand starting at position 2790 of SEQ ID NO: 1881519
uuguuagaugcauauacau

SEQ ID NO: 2050859 - RNA, 19 nt, Artificial Sequence
  Description of Artificial Sequence: Synthetic oligonucleotide
  Antisense strand to SEQ ID NO: 2050858
auguauaugcaucuaacaa

SEQ ID NO: 2050860 - RNA, 19 nt, Artificial Sequence
  Description of Artificial Sequence: Synthetic oligonucleotide
  Sense strand starting at position 2863 of SEQ ID NO: 1881519
cuuccuuaucucuggaaag

SEQ ID NO: 2050861 - RNA, 19 nt, Artificial Sequence
  Description of Artificial Sequence: Synthetic oligonucleotide
  Antisense strand to SEQ ID NO: 2050860
cuuuccagagauaaggaag

SEQ ID NO: 2050862 - RNA, 19 nt, Artificial Sequence
  Description of Artificial Sequence: Synthetic oligonucleotide
  Sense strand starting at position 2865 of SEQ ID NO: 1881519
uccuuaucucuggaaaguu

SEQ ID NO: 2050863 - RNA, 19 nt, Artificial Sequence
  Description of Artificial Sequence: Synthetic oligonucleotide
  Antisense strand to SEQ ID NO: 2050862
aacuuuccagagauaagga

SEQ ID NO: 2050864 - RNA, 19 nt, Artificial Sequence
  Description of Artificial Sequence: Synthetic oligonucleotide
  Sense strand starting at position 2889 of SEQ ID NO: 1881519
gucaguuuaauuugugauu

SEQ ID NO: 2050865 - RNA, 19 nt, Artificial Sequence
  Description of Artificial Sequence: Synthetic oligonucleotide
  Antisense strand to SEQ ID NO: 2050864
aaucacaaauuaaacugac

SEQ ID NO: 2050866 - RNA, 19 nt, Artificial Sequence
  Description of Artificial Sequence: Synthetic oligonucleotide
  Sense strand starting at position 2965 of SEQ ID NO: 1881519
uacuguuuaucugugaaga

SEQ ID NO: 2050867 - RNA, 19 nt, Artificial Sequence
  Description of Artificial Sequence: Synthetic oligonucleotide
  Antisense strand to SEQ ID NO: 2050866
ucuucacagauaaacagua

SEQ ID NO: 2050868 - RNA, 19 nt, Artificial Sequence
  Description of Artificial Sequence: Synthetic oligonucleotide
  Sense strand starting at position 3293 of SEQ ID NO: 1881519
agcagauaucuaggacuuu

SEQ ID NO: 2050869 - RNA, 19 nt, Artificial Sequence
  Description of Artificial Sequence: Synthetic oligonucleotide
  Antisense strand to SEQ ID NO: 2050868
aaaguccuagauaucugcu

SEQ ID NO: 2050870 - RNA, 19 nt, Artificial Sequence
  Description of Artificial Sequence: Synthetic oligonucleotide
  Sense strand starting at position 3404 of SEQ ID NO: 1881519
cugugaguuuggcuauuua

SEQ ID NO: 2050871 - RNA, 19 nt, Artificial Sequence
  Description of Artificial Sequence: Synthetic oligonucleotide
  Antisense strand to SEQ ID NO: 2050870
uaaauagccaaacucacag

SEQ ID NO: 2050872 - RNA, 19 nt, Artificial Sequence
  Description of Artificial Sequence: Synthetic oligonucleotide
  Sense strand starting at position 3623 of SEQ ID NO: 1881519
auuggagucauguagcauu

SEQ ID NO: 2050873 - RNA, 19 nt, Artificial Sequence
  Description of Artificial Sequence: Synthetic oligonucleotide
  Antisense strand to SEQ ID NO: 2050872
aaugcuacaugacuccaau

SEQ ID NO: 2050874 - RNA, 19 nt, Artificial Sequence
  Description of Artificial Sequence: Synthetic oligonucleotide
  Sense strand starting at position 3639 of SEQ ID NO: 1881519
auuugccuuucugugacua

SEQ ID NO: 2050875 - RNA, 19 nt, Artificial Sequence
  Description of Artificial Sequence: Synthetic oligonucleotide
  Antisense strand to SEQ ID NO: 2050874
uagucacagaaaggcaaau

SEQ ID NO: 2050876 - RNA, 19 nt, Artificial Sequence
  Description of Artificial Sequence: Synthetic oligonucleotide
  Sense strand starting at position 3862 of SEQ ID NO: 1881519
cggcgagucaguucucacu

SEQ ID NO: 2050877 - RNA, 19 nt, Artificial Sequence
  Description of Artificial Sequence: Synthetic oligonucleotide
  Antisense strand to SEQ ID NO: 2050876
agugagaacugacucgccg

SEQ ID NO: 2050878 - RNA, 19 nt, Artificial Sequence
  Description of Artificial Sequence: Synthetic oligonucleotide
  Sense strand starting at position 11 of SEQ ID NO: 1881520
gggacuggcaguugaucau

SEQ ID NO: 2050879 - RNA, 19 nt, Artificial Sequence
  Description of Artificial Sequence: Synthetic oligonucleotide
  Antisense strand to SEQ ID NO: 2050878
augaucaacugccaguccc

SEQ ID NO: 2050880 - RNA, 19 nt, Artificial Sequence
  Description of Artificial Sequence: Synthetic oligonucleotide
  Sense strand starting at position 17 of SEQ ID NO: 1881520
ggcaguugaucauagcuuu

SEQ ID NO: 2050881 - RNA, 19 nt, Artificial Sequence
  Description of Artificial Sequence: Synthetic oligonucleotide
  Antisense strand to SEQ ID NO: 2050880
aaagcuaugaucaacugcc

SEQ ID NO: 2050882 - RNA, 19 nt, Artificial Sequence
  Description of Artificial Sequence: Synthetic oligonucleotide
  Sense strand starting at position 23 of SEQ ID NO: 1881520
ugaucauagcuuugguaua

SEQ ID NO: 2050883 - RNA, 19 nt, Artificial Sequence
  Description of Artificial Sequence: Synthetic oligonucleotide
  Antisense strand to SEQ ID NO: 2050882
uauaccaaagcuaugauca

SEQ ID NO: 2050884 - RNA, 19 nt, Artificial Sequence
  Description of Artificial Sequence: Synthetic oligonucleotide
  Sense strand starting at position 24 of SEQ ID NO: 1881520
gaucauagcuuugguauag

SEQ ID NO: 2050885 - RNA, 19 nt, Artificial Sequence
  Description of Artificial Sequence: Synthetic oligonucleotide
  Antisense strand to SEQ ID NO: 2050884
cuauaccaaagcuaugauc

SEQ ID NO: 2050886 - RNA, 19 nt, Artificial Sequence
  Description of Artificial Sequence: Synthetic oligonucleotide
  Sense strand starting at position 28 of SEQ ID NO: 1881520
auagcuuugguauagcaaa

SEQ ID NO: 2050887 - RNA, 19 nt, Artificial Sequence
  Description of Artificial Sequence: Synthetic oligonucleotide
  Antisense strand to SEQ ID NO: 2050886
uuugcuauaccaaagcuau

SEQ ID NO: 2050888 - RNA, 19 nt, Artificial Sequence
  Description of Artificial Sequence: Synthetic oligonucleotide
  Sense strand starting at position 57 of SEQ ID NO: 1881520
ccaguaagauggccaacua

SEQ ID NO: 2050889 - RNA, 19 nt, Artificial Sequence
  Description of Artificial Sequence: Synthetic oligonucleotide
  Antisense strand to SEQ ID NO: 2050888
uaguuggccaucuuacugg

SEQ ID NO: 2050890 - RNA, 19 nt, Artificial Sequence
  Description of Artificial Sequence: Synthetic oligonucleotide
  Sense strand starting at position 119 of SEQ ID NO: 1881520
cuggcaugcuccuaacaug

SEQ ID NO: 2050891 - RNA, 19 nt, Artificial Sequence
  Description of Artificial Sequence: Synthetic oligonucleotide
  Antisense strand to SEQ ID NO: 2050890
cauguuaggagcaugccag

SEQ ID NO: 2050892 - RNA, 19 nt, Artificial Sequence
  Description of Artificial Sequence: Synthetic oligonucleotide
  Sense strand starting at position 253 of SEQ ID NO: 1881520
accaauggcucuggaggaa

SEQ ID NO: 2050893 - RNA, 19 nt, Artificial Sequence
  Description of Artificial Sequence: Synthetic oligonucleotide
  Antisense strand to SEQ ID NO: 2050892
uuccuccagagccauuggu

SEQ ID NO: 2050894 - RNA, 19 nt, Artificial Sequence
  Description of Artificial Sequence: Synthetic oligonucleotide
  Sense strand starting at position 546 of SEQ ID NO: 1881520
gguggucuuguccaacaga

SEQ ID NO: 2050895 - RNA, 19 nt, Artificial Sequence
  Description of Artificial Sequence: Synthetic oligonucleotide
  Antisense strand to SEQ ID NO: 2050894
ucuguuggacaagaccacc

SEQ ID NO: 2050896 - RNA, 19 nt, Artificial Sequence
  Description of Artificial Sequence: Synthetic oligonucleotide
  Sense strand starting at position 549 of SEQ ID NO: 1881520
ggucuuguccaacagauag

SEQ ID NO: 2050897 - RNA, 19 nt, Artificial Sequence
  Description of Artificial Sequence: Synthetic oligonucleotide
  Antisense strand to SEQ ID NO: 2050896
cuaucuguuggacaagacc

SEQ ID NO: 2050898 - RNA, 19 nt, Artificial Sequence
  Description of Artificial Sequence: Synthetic oligonucleotide
  Sense strand starting at position 662 of SEQ ID NO: 1881520
gggccugugucauaguuuc

SEQ ID NO: 2050899 - RNA, 19 nt, Artificial Sequence
  Description of Artificial Sequence: Synthetic oligonucleotide
  Antisense strand to SEQ ID NO: 2050898
gaaacuaugacacaggccc

SEQ ID NO: 2050900 - RNA, 19 nt, Artificial Sequence
  Description of Artificial Sequence: Synthetic oligonucleotide
  Sense strand starting at position 668 of SEQ ID NO: 1881520
gugucauaguuucugcacu

SEQ ID NO: 2050901 - RNA, 19 nt, Artificial Sequence
  Description of Artificial Sequence: Synthetic oligonucleotide
  Antisense strand to SEQ ID NO: 2050900
agugcagaaacuaugacac

SEQ ID NO: 2050902 - RNA, 19 nt, Artificial Sequence
  Description of Artificial Sequence: Synthetic oligonucleotide
  Sense strand starting at position 674 of SEQ ID NO: 1881520
uaguuucugcacugguaga

SEQ ID NO: 2050903 - RNA, 19 nt, Artificial Sequence
  Description of Artificial Sequence: Synthetic oligonucleotide
  Antisense strand to SEQ ID NO: 2050902
ucuaccagugcagaaacua

SEQ ID NO: 2050904 - RNA, 19 nt, Artificial Sequence
  Description of Artificial Sequence: Synthetic oligonucleotide
  Sense strand starting at position 801 of SEQ ID NO: 1881520
cccagauugcucuguuggu

SEQ ID NO: 2050905 - RNA, 19 nt, Artificial Sequence
  Description of Artificial Sequence: Synthetic oligonucleotide
  Antisense strand to SEQ ID NO: 2050904
accaacagagcaaucuggg

SEQ ID NO: 2050906 - RNA, 19 nt, Artificial Sequence
  Description of Artificial Sequence: Synthetic oligonucleotide
  Sense strand starting at position 805 of SEQ ID NO: 1881520
gauugcucuguugguguau

SEQ ID NO: 2050907 - RNA, 19 nt, Artificial Sequence
  Description of Artificial Sequence: Synthetic oligonucleotide
  Antisense strand to SEQ ID NO: 2050906
auacaccaacagagcaauc

SEQ ID NO: 2050908 - RNA, 19 nt, Artificial Sequence
  Description of Artificial Sequence: Synthetic oligonucleotide
  Sense strand starting at position 1219 of SEQ ID NO: 1881520
acugcuauugcuggaaugu

SEQ ID NO: 2050909 - RNA, 19 nt, Artificial Sequence
  Description of Artificial Sequence: Synthetic oligonucleotide
  Antisense strand to SEQ ID NO: 2050908
acauuccagcaauagcagu

SEQ ID NO: 2050910 - RNA, 19 nt, Artificial Sequence
  Description of Artificial Sequence: Synthetic oligonucleotide
  Sense strand starting at position 1264 of SEQ ID NO: 1881520
ugugaaaggcuuuggcuga

SEQ ID NO: 2050911 - RNA, 19 nt, Artificial Sequence
  Description of Artificial Sequence: Synthetic oligonucleotide
  Antisense strand to SEQ ID NO: 2050910
ucagccaaagccuuucaca

SEQ ID NO: 2050912 - RNA, 19 nt, Artificial Sequence
  Description of Artificial Sequence: Synthetic oligonucleotide
  Sense strand starting at position 1286 of SEQ ID NO: 1881520
cauccauuggaguguagua

SEQ ID NO: 2050913 - RNA, 19 nt, Artificial Sequence
  Description of Artificial Sequence: Synthetic oligonucleotide
  Antisense strand to SEQ ID NO: 2050912
uacuacacuccaauggaug

SEQ ID NO: 2050914 - RNA, 19 nt, Artificial Sequence
  Description of Artificial Sequence: Synthetic oligonucleotide
  Sense strand starting at position 1377 of SEQ ID NO: 1881520
guuggagcccaauauaugu

SEQ ID NO: 2050915 - RNA, 19 nt, Artificial Sequence
  Description of Artificial Sequence: Synthetic oligonucleotide
  Antisense strand to SEQ ID NO: 2050914
acauauauugggcuccaac

SEQ ID NO: 2050916 - RNA, 19 nt, Artificial Sequence
  Description of Artificial Sequence: Synthetic oligonucleotide
  Sense strand starting at position 1696 of SEQ ID NO: 1881520
ggcugagcugcugaaauaa

SEQ ID NO: 2050917 - RNA, 19 nt, Artificial Sequence
  Description of Artificial Sequence: Synthetic oligonucleotide
  Antisense strand to SEQ ID NO: 2050916
uuauuucagcagcucagcc

SEQ ID NO: 2050918 - RNA, 19 nt, Artificial Sequence
  Description of Artificial Sequence: Synthetic oligonucleotide
  Sense strand starting at position 1907 of SEQ ID NO: 1881520
gguacucacaaguauuagu

SEQ ID NO: 2050919 - RNA, 19 nt, Artificial Sequence
  Description of Artificial Sequence: Synthetic oligonucleotide
  Antisense strand to SEQ ID NO: 2050918
acuaauacuugugaguacc

SEQ ID NO: 2050920 - RNA, 19 nt, Artificial Sequence
  Description of Artificial Sequence: Synthetic oligonucleotide
  Sense strand starting at position 2071 of SEQ ID NO: 1881520
auguaugacucauugcucu

SEQ ID NO: 2050921 - RNA, 19 nt, Artificial Sequence
  Description of Artificial Sequence: Synthetic oligonucleotide
  Antisense strand to SEQ ID NO: 2050920
agagcaaugagucauacau

SEQ ID NO: 2050922 - RNA, 19 nt, Artificial Sequence
  Description of Artificial Sequence: Synthetic oligonucleotide
  Sense strand starting at position 2271 of SEQ ID NO: 1881520
acauaauauuggcaggaga

SEQ ID NO: 2050923 - RNA, 19 nt, Artificial Sequence
  Description of Artificial Sequence: Synthetic oligonucleotide
  Antisense strand to SEQ ID NO: 2050922
ucuccugccaauauuaugu

SEQ ID NO: 2050924 - RNA, 19 nt, Artificial Sequence
  Description of Artificial Sequence: Synthetic oligonucleotide
  Sense strand starting at position 2273 of SEQ ID NO: 1881520
auaauauuggcaggagacu

SEQ ID NO: 2050925 - RNA, 19 nt, Artificial Sequence
  Description of Artificial Sequence: Synthetic oligonucleotide
  Antisense strand to SEQ ID NO: 2050924
agucuccugccaauauuau

SEQ ID NO: 2050926 - RNA, 19 nt, Artificial Sequence
  Description of Artificial Sequence: Synthetic oligonucleotide
  Sense strand starting at position 2374 of SEQ ID NO: 1881520
ucaaauagaucugauagac

SEQ ID NO: 2050927 - RNA, 19 nt, Artificial Sequence
  Description of Artificial Sequence: Synthetic oligonucleotide
  Antisense strand to SEQ ID NO: 2050926
gucuaucagaucuauuuga

SEQ ID NO: 2050928 - RNA, 19 nt, Artificial Sequence
  Description of Artificial Sequence: Synthetic oligonucleotide
  Sense strand starting at position 2627 of SEQ ID NO: 1881520
aaugacuuauggguaaauc

SEQ ID NO: 2050929 - RNA, 19 nt, Artificial Sequence
  Description of Artificial Sequence: Synthetic oligonucleotide
  Antisense strand to SEQ ID NO: 2050928
gauuuacccauaagucauu

SEQ ID NO: 2050930 - RNA, 19 nt, Artificial Sequence
  Description of Artificial Sequence: Synthetic oligonucleotide
  Sense strand starting at position 2635 of SEQ ID NO: 1881520
auggguaaaucaugaaauu

SEQ ID NO: 2050931 - RNA, 19 nt, Artificial Sequence
  Description of Artificial Sequence: Synthetic oligonucleotide
  Antisense strand to SEQ ID NO: 2050930
aauuucaugauuuacccau

SEQ ID NO: 2050932 - RNA, 19 nt, Artificial Sequence
  Description of Artificial Sequence: Synthetic oligonucleotide
  Sense strand starting at position 2644 of SEQ ID NO: 1881520
ucaugaaauuaagcgagaa

SEQ ID NO: 2050933 - RNA, 19 nt, Artificial Sequence
  Description of Artificial Sequence: Synthetic oligonucleotide
  Antisense strand to SEQ ID NO: 2050932
uucucgcuuaauuucauga

SEQ ID NO: 2050934 - RNA, 19 nt, Artificial Sequence
  Description of Artificial Sequence: Synthetic oligonucleotide
  Sense strand starting at position 2664 of SEQ ID NO: 1881520
ucaagaagcucuuugaaag

SEQ ID NO: 2050935 - RNA, 19 nt, Artificial Sequence
  Description of Artificial Sequence: Synthetic oligonucleotide
  Antisense strand to SEQ ID NO: 2050934
cuuucaaagagcuucuuga

SEQ ID NO: 2050936 - RNA, 19 nt, Artificial Sequence
  Description of Artificial Sequence: Synthetic oligonucleotide
  Sense strand starting at position 2671 of SEQ ID NO: 1881520
gcucuuugaaaguaaugag

SEQ ID NO: 2050937 - RNA, 19 nt, Artificial Sequence
  Description of Artificial Sequence: Synthetic oligonucleotide
  Antisense strand to SEQ ID NO: 2050936
cucauuacuuucaaagagc

SEQ ID NO: 2050938 - RNA, 19 nt, Artificial Sequence
  Description of Artificial Sequence: Synthetic oligonucleotide
  Sense strand starting at position 2892 of SEQ ID NO: 1881520
acugaaggauauugagaua

SEQ ID NO: 2050939 - RNA, 19 nt, Artificial Sequence
  Description of Artificial Sequence: Synthetic oligonucleotide
  Antisense strand to SEQ ID NO: 2050938
uaucucaauauccuucagu

SEQ ID NO: 2050940 - RNA, 19 nt, Artificial Sequence
  Description of Artificial Sequence: Synthetic oligonucleotide
  Sense strand starting at position 2895 of SEQ ID NO: 1881520
gaaggauauugagauacaa

SEQ ID NO: 2050941 - RNA, 19 nt, Artificial Sequence
  Description of Artificial Sequence: Synthetic oligonucleotide
  Antisense strand to SEQ ID NO: 2050940
uuguaucucaauauccuuc

SEQ ID NO: 2050942 - RNA, 19 nt, Artificial Sequence
  Description of Artificial Sequence: Synthetic oligonucleotide
  Sense strand starting at position 3163 of SEQ ID NO: 1881520
uggacauucucccaagacu

SEQ ID NO: 2050943 - RNA, 19 nt, Artificial Sequence
  Description of Artificial Sequence: Synthetic oligonucleotide
  Antisense strand to SEQ ID NO: 2050942
agucuugggagaaugucca

SEQ ID NO: 2050944 - RNA, 19 nt, Artificial Sequence
  Description of Artificial Sequence: Synthetic oligonucleotide
  Sense strand starting at position 3299 of SEQ ID NO: 1881520
guaccagauguacaaagua

SEQ ID NO: 2050945 - RNA, 19 nt, Artificial Sequence
  Description of Artificial Sequence: Synthetic oligonucleotide
  Antisense strand to SEQ ID NO: 2050944
uacuuuguacaucugguac

SEQ ID NO: 2050946 - RNA, 19 nt, Artificial Sequence
  Description of Artificial Sequence: Synthetic oligonucleotide
  Sense strand starting at position 3311 of SEQ ID NO: 1881520
caaaguagagcugguauca

SEQ ID NO: 2050947 - RNA, 19 nt, Artificial Sequence
  Description of Artificial Sequence: Synthetic oligonucleotide
  Antisense strand to SEQ ID NO: 2050946
ugauaccagcucuacuuug

SEQ ID NO: 2050948 - RNA, 19 nt, Artificial Sequence
  Description of Artificial Sequence: Synthetic oligonucleotide
  Sense strand starting at position 3548 of SEQ ID NO: 1881520
ggauguaagguuuguucaa

SEQ ID NO: 2050949 - RNA, 19 nt, Artificial Sequence
  Description of Artificial Sequence: Synthetic oligonucleotide
  Antisense strand to SEQ ID NO: 2050948
uugaacaaaccuuacaucc

SEQ ID NO: 2050950 - RNA, 19 nt, Artificial Sequence
  Description of Artificial Sequence: Synthetic oligonucleotide
  Sense strand starting at position 3695 of SEQ ID NO: 1881520
caguaauagggcuagacuu

SEQ ID NO: 2050951 - RNA, 19 nt, Artificial Sequence
  Description of Artificial Sequence: Synthetic oligonucleotide
  Antisense strand to SEQ ID NO: 2050950
aagucuagcccuauuacug

SEQ ID NO: 2050952 - RNA, 19 nt, Artificial Sequence
  Description of Artificial Sequence: Synthetic oligonucleotide
  Sense strand starting at position 3724 of SEQ ID NO: 1881520
cuagcagcauuagauagau

SEQ ID NO: 2050953 - RNA, 19 nt, Artificial Sequence
  Description of Artificial Sequence: Synthetic oligonucleotide
  Antisense strand to SEQ ID NO: 2050952
aucuaucuaaugcugcuag

SEQ ID NO: 2050954 - RNA, 19 nt, Artificial Sequence
  Description of Artificial Sequence: Synthetic oligonucleotide
  Sense strand starting at position 3750 of SEQ ID NO: 1881520
gcagaaacauuagcaaaga

SEQ ID NO: 2050955 - RNA, 19 nt, Artificial Sequence
  Description of Artificial Sequence: Synthetic oligonucleotide
  Antisense strand to SEQ ID NO: 2050954
ucuuugcuaauguuucugc

SEQ ID NO: 2050956 - RNA, 19 nt, Artificial Sequence
  Description of Artificial Sequence: Synthetic oligonucleotide
  Sense strand starting at position 3958 of SEQ ID NO: 1881520
gccggaccacagugaaaua

SEQ ID NO: 2050957 - RNA, 19 nt, Artificial Sequence
  Description of Artificial Sequence: Synthetic oligonucleotide
  Antisense strand to SEQ ID NO: 2050956
uauuucacugugguccggc

SEQ ID NO: 2050958 - RNA, 19 nt, Artificial Sequence
  Description of Artificial Sequence: Synthetic oligonucleotide
  Sense strand starting at position 15 of SEQ ID NO: 1881521
ggaggacuuuagccucuga

SEQ ID NO: 2050959 - RNA, 19 nt, Artificial Sequence
  Description of Artificial Sequence: Synthetic oligonucleotide
  Antisense strand to SEQ ID NO: 2050958
ucagaggcuaaaguccucc

SEQ ID NO: 2050960 - RNA, 19 nt, Artificial Sequence
  Description of Artificial Sequence: Synthetic oligonucleotide
  Sense strand starting at position 30 of SEQ ID NO: 1881521
cugaaagagucuccuccaa

SEQ ID NO: 2050961 - RNA, 19 nt, Artificial Sequence
  Description of Artificial Sequence: Synthetic oligonucleotide
  Antisense strand to SEQ ID NO: 2050960
uuggaggagacucuuucag

SEQ ID NO: 2050962 - RNA, 19 nt, Artificial Sequence
  Description of Artificial Sequence: Synthetic oligonucleotide
  Sense strand starting at position 32 of SEQ ID NO: 1881521
gaaagagucuccuccaaga

SEQ ID NO: 2050963 - RNA, 19 nt, Artificial Sequence
  Description of Artificial Sequence: Synthetic oligonucleotide
  Antisense strand to SEQ ID NO: 2050962
ucuuggaggagacucuuuc

SEQ ID NO: 2050964 - RNA, 19 nt, Artificial Sequence
  Description of Artificial Sequence: Synthetic oligonucleotide
  Sense strand starting at position 165 of SEQ ID NO: 1881521
ucuccacaugugcaaagau

SEQ ID NO: 2050965 - RNA, 19 nt, Artificial Sequence
  Description of Artificial Sequence: Synthetic oligonucleotide
  Antisense strand to SEQ ID NO: 2050964
aucuuugcacauguggaga

SEQ ID NO: 2050966 - RNA, 19 nt, Artificial Sequence
  Description of Artificial Sequence: Synthetic oligonucleotide
  Sense strand starting at position 193 of SEQ ID NO: 1881521
gggacagaauugcucugaa

SEQ ID NO: 2050967 - RNA, 19 nt, Artificial Sequence
  Description of Artificial Sequence: Synthetic oligonucleotide
  Antisense strand to SEQ ID NO: 2050966
uucagagcaauucuguccc

SEQ ID NO: 2050968 - RNA, 19 nt, Artificial Sequence
  Description of Artificial Sequence: Synthetic oligonucleotide
  Sense strand starting at position 196 of SEQ ID NO: 1881521
acagaauugcucugaaauc

SEQ ID NO: 2050969 - RNA, 19 nt, Artificial Sequence
  Description of Artificial Sequence: Synthetic oligonucleotide
  Antisense strand to SEQ ID NO: 2050968
gauuucagagcaauucugu

SEQ ID NO: 2050970 - RNA, 19 nt, Artificial Sequence
  Description of Artificial Sequence: Synthetic oligonucleotide
  Sense strand starting at position 790 of SEQ ID NO: 1881521
uaaaucagcgauugugaua

SEQ ID NO: 2050971 - RNA, 19 nt, Artificial Sequence
  Description of Artificial Sequence: Synthetic oligonucleotide
  Antisense strand to SEQ ID NO: 2050970
uaucacaaucgcugauuua

SEQ ID NO: 2050972 - RNA, 19 nt, Artificial Sequence
  Description of Artificial Sequence: Synthetic oligonucleotide
  Sense strand starting at position 1335 of SEQ ID NO: 1881521
gagacuuggaaucgaaguu

SEQ ID NO: 2050973 - RNA, 19 nt, Artificial Sequence
  Description of Artificial Sequence: Synthetic oligonucleotide
  Antisense strand to SEQ ID NO: 2050972
aacuucgauuccaagucuc

SEQ ID NO: 2050974 - RNA, 19 nt, Artificial Sequence
  Description of Artificial Sequence: Synthetic oligonucleotide
  Sense strand starting at position 1402 of SEQ ID NO: 1881521
ccacaaauuguauggcuga

SEQ ID NO: 2050975 - RNA, 19 nt, Artificial Sequence
  Description of Artificial Sequence: Synthetic oligonucleotide
  Antisense strand to SEQ ID NO: 2050974
ucagccauacaauuugugg

SEQ ID NO: 2050976 - RNA, 19 nt, Artificial Sequence
  Description of Artificial Sequence: Synthetic oligonucleotide
  Sense strand starting at position 1495 of SEQ ID NO: 1881521
cucugaaacccuggguaga

SEQ ID NO: 2050977 - RNA, 19 nt, Artificial Sequence
  Description of Artificial Sequence: Synthetic oligonucleotide
  Antisense strand to SEQ ID NO: 2050976
ucuacccaggguuucagag

SEQ ID NO: 2050978 - RNA, 19 nt, Artificial Sequence
  Description of Artificial Sequence: Synthetic oligonucleotide
  Sense strand starting at position 1685 of SEQ ID NO: 1881521
agcagucauauuggaugaa

SEQ ID NO: 2050979 - RNA, 19 nt, Artificial Sequence
  Description of Artificial Sequence: Synthetic oligonucleotide
  Antisense strand to SEQ ID NO: 2050978
uucauccaauaugacugcu

SEQ ID NO: 2050980 - RNA, 19 nt, Artificial Sequence
  Description of Artificial Sequence: Synthetic oligonucleotide
  Sense strand starting at position 1689 of SEQ ID NO: 1881521
gucauauuggaugaagcgu

SEQ ID NO: 2050981 - RNA, 19 nt, Artificial Sequence
  Description of Artificial Sequence: Synthetic oligonucleotide
  Antisense strand to SEQ ID NO: 2050980
acgcuucauccaauaugac

SEQ ID NO: 2050982 - RNA, 19 nt, Artificial Sequence
  Description of Artificial Sequence: Synthetic oligonucleotide
  Sense strand starting at position 1738 of SEQ ID NO: 1881521
uugauuacuucggcaaaga

SEQ ID NO: 2050983 - RNA, 19 nt, Artificial Sequence
  Description of Artificial Sequence: Synthetic oligonucleotide
  Antisense strand to SEQ ID NO: 2050982
ucuuugccgaaguaaucaa

SEQ ID NO: 2050984 - RNA, 19 nt, Artificial Sequence
  Description of Artificial Sequence: Synthetic oligonucleotide
  Sense strand starting at position 2082 of SEQ ID NO: 1881521
aguuuagaaauguggcaug

SEQ ID NO: 2050985 - RNA, 19 nt, Artificial Sequence
  Description of Artificial Sequence: Synthetic oligonucleotide
  Antisense strand to SEQ ID NO: 2050984
caugccacauuucuaaacu

SEQ ID NO: 2050986 - RNA, 19 nt, Artificial Sequence
  Description of Artificial Sequence: Synthetic oligonucleotide
  Sense strand starting at position 2087 of SEQ ID NO: 1881521
agaaauguggcaugguaaa

SEQ ID NO: 2050987 - RNA, 19 nt, Artificial Sequence
  Description of Artificial Sequence: Synthetic oligonucleotide
  Antisense strand to SEQ ID NO: 2050986
uuuaccaugccacauuucu

SEQ ID NO: 2050988 - RNA, 19 nt, Artificial Sequence
  Description of Artificial Sequence: Synthetic oligonucleotide
  Sense strand starting at position 2312 of SEQ ID NO: 1881521
ugcugucaggugcaagaau

SEQ ID NO: 2050989 - RNA, 19 nt, Artificial Sequence
  Description of Artificial Sequence: Synthetic oligonucleotide
  Antisense strand to SEQ ID NO: 2050988
auucuugcaccugacagca

SEQ ID NO: 2050990 - RNA, 19 nt, Artificial Sequence
  Description of Artificial Sequence: Synthetic oligonucleotide
  Sense strand starting at position 2444 of SEQ ID NO: 1881521
aucaccuguccuggauaaa

SEQ ID NO: 2050991 - RNA, 19 nt, Artificial Sequence
  Description of Artificial Sequence: Synthetic oligonucleotide
  Antisense strand to SEQ ID NO: 2050990
uuuauccaggacaggugau

SEQ ID NO: 2050992 - RNA, 19 nt, Artificial Sequence
  Description of Artificial Sequence: Synthetic oligonucleotide
  Sense strand starting at position 2527 of SEQ ID NO: 1881521
uuggccucaucucugagau

SEQ ID NO: 2050993 - RNA, 19 nt, Artificial Sequence
  Description of Artificial Sequence: Synthetic oligonucleotide
  Antisense strand to SEQ ID NO: 2050992
aucucagagaugaggccaa

SEQ ID NO: 2050994 - RNA, 19 nt, Artificial Sequence
  Description of Artificial Sequence: Synthetic oligonucleotide
  Sense strand starting at position 2528 of SEQ ID NO: 1881521
uggccucaucucugagaug

SEQ ID NO: 2050995 - RNA, 19 nt, Artificial Sequence
  Description of Artificial Sequence: Synthetic oligonucleotide
  Antisense strand to SEQ ID NO: 2050994
caucucagagaugaggcca

SEQ ID NO: 2050996 - RNA, 19 nt, Artificial Sequence
  Description of Artificial Sequence: Synthetic oligonucleotide
  Sense strand starting at position 2533 of SEQ ID NO: 1881521
ucaucucugagauguggga

SEQ ID NO: 2050997 - RNA, 19 nt, Artificial Sequence
  Description of Artificial Sequence: Synthetic oligonucleotide
  Antisense strand to SEQ ID NO: 2050996
ucccacaucucagagauga

SEQ ID NO: 2050998 - RNA, 19 nt, Artificial Sequence
  Description of Artificial Sequence: Synthetic oligonucleotide
  Sense strand starting at position 2537 of SEQ ID NO: 1881521
cucugagaugugggaguca

SEQ ID NO: 2050999 - RNA, 19 nt, Artificial Sequence
  Description of Artificial Sequence: Synthetic oligonucleotide
  Antisense strand to SEQ ID NO: 2050998
ugacucccacaucucagag

SEQ ID NO: 2051000 - RNA, 19 nt, Artificial Sequence
  Description of Artificial Sequence: Synthetic oligonucleotide
  Sense strand starting at position 2651 of SEQ ID NO: 1881521
gcauuagcucaagagcuga

SEQ ID NO: 2051001 - RNA, 19 nt, Artificial Sequence
  Description of Artificial Sequence: Synthetic oligonucleotide
  Antisense strand to SEQ ID NO: 2051000
ucagcucuugagcuaaugc

SEQ ID NO: 2051002 - RNA, 19 nt, Artificial Sequence
  Description of Artificial Sequence: Synthetic oligonucleotide
  Sense strand starting at position 2856 of SEQ ID NO: 1881521
cuaaauaguguugaccaca

SEQ ID NO: 2051003 - RNA, 19 nt, Artificial Sequence
  Description of Artificial Sequence: Synthetic oligonucleotide
  Antisense strand to SEQ ID NO: 2051002
uguggucaacacuauuuag

SEQ ID NO: 2051004 - RNA, 19 nt, Artificial Sequence
  Description of Artificial Sequence: Synthetic oligonucleotide
  Sense strand starting at position 2861 of SEQ ID NO: 1881521
uaguguugaccacagcaca

SEQ ID NO: 2051005 - RNA, 19 nt, Artificial Sequence
  Description of Artificial Sequence: Synthetic oligonucleotide
  Antisense strand to SEQ ID NO: 2051004
ugugcuguggucaacacua

SEQ ID NO: 2051006 - RNA, 19 nt, Artificial Sequence
  Description of Artificial Sequence: Synthetic oligonucleotide
  Sense strand starting at position 2959 of SEQ ID NO: 1881521
agcccaaaugcauguugaa

SEQ ID NO: 2051007 - RNA, 19 nt, Artificial Sequence
  Description of Artificial Sequence: Synthetic oligonucleotide
  Antisense strand to SEQ ID NO: 2051006
uucaacaugcauuugggcu

SEQ ID NO: 2051008 - RNA, 19 nt, Artificial Sequence
  Description of Artificial Sequence: Synthetic oligonucleotide
  Sense strand starting at position 2992 of SEQ ID NO: 1881521
gaaugaagguguuugcuca

SEQ ID NO: 2051009 - RNA, 19 nt, Artificial Sequence
  Description of Artificial Sequence: Synthetic oligonucleotide
  Antisense strand to SEQ ID NO: 2051008
ugagcaaacaccuucauuc

SEQ ID NO: 2051010 - RNA, 19 nt, Artificial Sequence
  Description of Artificial Sequence: Synthetic oligonucleotide
  Sense strand starting at position 3017 of SEQ ID NO: 1881521
cccucuauuccuuggagua

SEQ ID NO: 2051011 - RNA, 19 nt, Artificial Sequence
  Description of Artificial Sequence: Synthetic oligonucleotide
  Antisense strand to SEQ ID NO: 2051010
uacuccaaggaauagaggg

SEQ ID NO: 2051012 - RNA, 19 nt, Artificial Sequence
  Description of Artificial Sequence: Synthetic oligonucleotide
  Sense strand starting at position 3018 of SEQ ID NO: 1881521
ccucuauuccuuggaguaa

SEQ ID NO: 2051013 - RNA, 19 nt, Artificial Sequence
  Description of Artificial Sequence: Synthetic oligonucleotide
  Antisense strand to SEQ ID NO: 2051012
uuacuccaaggaauagagg

SEQ ID NO: 2051014 - RNA, 19 nt, Artificial Sequence
  Description of Artificial Sequence: Synthetic oligonucleotide
  Sense strand starting at position 3038 of SEQ ID NO: 1881521
uuucuucugucauugagga

SEQ ID NO: 2051015 - RNA, 19 nt, Artificial Sequence
  Description of Artificial Sequence: Synthetic oligonucleotide
  Antisense strand to SEQ ID NO: 2051014
uccucaaugacagaagaaa

SEQ ID NO: 2051016 - RNA, 19 nt, Artificial Sequence
  Description of Artificial Sequence: Synthetic oligonucleotide
  Sense strand starting at position 3039 of SEQ ID NO: 1881521
uucuucugucauugaggaa

SEQ ID NO: 2051017 - RNA, 19 nt, Artificial Sequence
  Description of Artificial Sequence: Synthetic oligonucleotide
  Antisense strand to SEQ ID NO: 2051016
uuccucaaugacagaagaa

SEQ ID NO: 2051018 - RNA, 19 nt, Artificial Sequence
  Description of Artificial Sequence: Synthetic oligonucleotide
  Sense strand starting at position 3248 of SEQ ID NO: 1881521
cugggaucuugguccaaac

SEQ ID NO: 2051019 - RNA, 19 nt, Artificial Sequence
  Description of Artificial Sequence: Synthetic oligonucleotide
  Antisense strand to SEQ ID NO: 2051018
guuuggaccaagaucccag

SEQ ID NO: 2051020 - RNA, 19 nt, Artificial Sequence
  Description of Artificial Sequence: Synthetic oligonucleotide
  Sense strand starting at position 3303 of SEQ ID NO: 1881521
gaacccaaauccgugugau

SEQ ID NO: 2051021 - RNA, 19 nt, Artificial Sequence
  Description of Artificial Sequence: Synthetic oligonucleotide
  Antisense strand to SEQ ID NO: 2051020
aucacacggauuuggguuc

SEQ ID NO: 2051022 - RNA, 19 nt, Artificial Sequence
  Description of Artificial Sequence: Synthetic oligonucleotide
  Sense strand starting at position 3304 of SEQ ID NO: 1881521
aacccaaauccgugugaug

SEQ ID NO: 2051023 - RNA, 19 nt, Artificial Sequence
  Description of Artificial Sequence: Synthetic oligonucleotide
  Antisense strand to SEQ ID NO: 2051022
caucacacggauuuggguu

SEQ ID NO: 2051024 - RNA, 19 nt, Artificial Sequence
  Description of Artificial Sequence: Synthetic oligonucleotide
  Sense strand starting at position 3371 of SEQ ID NO: 1881521
aggagaaauuauguuccau

SEQ ID NO: 2051025 - RNA, 19 nt, Artificial Sequence
  Description of Artificial Sequence: Synthetic oligonucleotide
  Antisense strand to SEQ ID NO: 2051024
auggaacauaauuucuccu

SEQ ID NO: 2051026 - RNA, 19 nt, Artificial Sequence
  Description of Artificial Sequence: Synthetic oligonucleotide
  Sense strand starting at position 3419 of SEQ ID NO: 1881521
gcgaccucucuuugaagga

SEQ ID NO: 2051027 - RNA, 19 nt, Artificial Sequence
  Description of Artificial Sequence: Synthetic oligonucleotide
  Antisense strand to SEQ ID NO: 2051026
uccuucaaagagaggucgc

SEQ ID NO: 2051028 - RNA, 19 nt, Artificial Sequence
  Description of Artificial Sequence: Synthetic oligonucleotide
  Sense strand starting at position 3451 of SEQ ID NO: 1881521
acaagaagugagcgaagaa

SEQ ID NO: 2051029 - RNA, 19 nt, Artificial Sequence
  Description of Artificial Sequence: Synthetic oligonucleotide
  Antisense strand to SEQ ID NO: 2051028
uucuucgcucacuucuugu

SEQ ID NO: 2051030 - RNA, 19 nt, Artificial Sequence
  Description of Artificial Sequence: Synthetic oligonucleotide
  Sense strand starting at position 3476 of SEQ ID NO: 1881521
gggaaacacccuugucuuc

SEQ ID NO: 2051031 - RNA, 19 nt, Artificial Sequence
  Description of Artificial Sequence: Synthetic oligonucleotide
  Antisense strand to SEQ ID NO: 2051030
gaagacaaggguguuuccc

SEQ ID NO: 2051032 - RNA, 19 nt, Artificial Sequence
  Description of Artificial Sequence: Synthetic oligonucleotide
  Sense strand starting at position 3794 of SEQ ID NO: 1881521
gaaacuagugggugcucaa

SEQ ID NO: 2051033 - RNA, 19 nt, Artificial Sequence
  Description of Artificial Sequence: Synthetic oligonucleotide
  Antisense strand to SEQ ID NO: 2051032
uugagcacccacuaguuuc

SEQ ID NO: 2051034 - RNA, 19 nt, Artificial Sequence
  Description of Artificial Sequence: Synthetic oligonucleotide
  Sense strand starting at position 3797 of SEQ ID NO: 1881521
acuagugggugcucaaaga

SEQ ID NO: 2051035 - RNA, 19 nt, Artificial Sequence
  Description of Artificial Sequence: Synthetic oligonucleotide
  Antisense strand to SEQ ID NO: 2051034
ucuuugagcacccacuagu

SEQ ID NO: 2051036 - RNA, 19 nt, Artificial Sequence
  Description of Artificial Sequence: Synthetic oligonucleotide
  Sense strand starting at position 3917 of SEQ ID NO: 1881521
gaggucugaucugcccuua

SEQ ID NO: 2051037 - RNA, 19 nt, Artificial Sequence
  Description of Artificial Sequence: Synthetic oligonucleotide
  Antisense strand to SEQ ID NO: 2051036
uaagggcagaucagaccuc

SEQ ID NO: 2051038 - RNA, 19 nt, Artificial Sequence
  Description of Artificial Sequence: Synthetic oligonucleotide
  Sense strand starting at position 158 of SEQ ID NO: 1881523
gcauccaaucaaugaaaug

SEQ ID NO: 2051039 - RNA, 19 nt, Artificial Sequence
  Description of Artificial Sequence: Synthetic oligonucleotide
  Antisense strand to SEQ ID NO: 2051038
cauuucauugauuggaugc

SEQ ID NO: 2051040 - RNA, 19 nt, Artificial Sequence
  Description of Artificial Sequence: Synthetic oligonucleotide
  Sense strand starting at position 264 of SEQ ID NO: 1881523
aggucauauucuccuagaa

SEQ ID NO: 2051041 - RNA, 19 nt, Artificial Sequence
  Description of Artificial Sequence: Synthetic oligonucleotide
  Antisense strand to SEQ ID NO: 2051040
uucuaggagaauaugaccu

SEQ ID NO: 2051042 - RNA, 19 nt, Artificial Sequence
  Description of Artificial Sequence: Synthetic oligonucleotide
  Sense strand starting at position 311 of SEQ ID NO: 1881523
agggauuuguugaggcagu

SEQ ID NO: 2051043 - RNA, 19 nt, Artificial Sequence
  Description of Artificial Sequence: Synthetic oligonucleotide
  Antisense strand to SEQ ID NO: 2051042
acugccucaacaaaucccu

SEQ ID NO: 2051044 - RNA, 19 nt, Artificial Sequence
  Description of Artificial Sequence: Synthetic oligonucleotide
  Sense strand starting at position 401 of SEQ ID NO: 1881523
guaucaucuugggugacac

SEQ ID NO: 2051045 - RNA, 19 nt, Artificial Sequence
  Description of Artificial Sequence: Synthetic oligonucleotide
  Antisense strand to SEQ ID NO: 2051044
gugucacccaagaugauac

SEQ ID NO: 2051046 - RNA, 19 nt, Artificial Sequence
  Description of Artificial Sequence: Synthetic oligonucleotide
  Sense strand starting at position 474 of SEQ ID NO: 1881523
guuuguccucuccaaggca

SEQ ID NO: 2051047 - RNA, 19 nt, Artificial Sequence
  Description of Artificial Sequence: Synthetic oligonucleotide
  Antisense strand to SEQ ID NO: 2051046
ugccuuggagaggacaaac

SEQ ID NO: 2051048 - RNA, 19 nt, Artificial Sequence
  Description of Artificial Sequence: Synthetic oligonucleotide
  Sense strand starting at position 506 of SEQ ID NO: 1881523
uuuguauucccacaauggu

SEQ ID NO: 2051049 - RNA, 19 nt, Artificial Sequence
  Description of Artificial Sequence: Synthetic oligonucleotide
  Antisense strand to SEQ ID NO: 2051048
accauugugggaauacaaa

SEQ ID NO: 2051050 - RNA, 19 nt, Artificial Sequence
  Description of Artificial Sequence: Synthetic oligonucleotide
  Sense strand starting at position 561 of SEQ ID NO: 1881523
cugagaaugaguugccaag

SEQ ID NO: 2051051 - RNA, 19 nt, Artificial Sequence
  Description of Artificial Sequence: Synthetic oligonucleotide
  Antisense strand to SEQ ID NO: 2051050
cuuggcaacucauucucag

SEQ ID NO: 2051052 - RNA, 19 nt, Artificial Sequence
  Description of Artificial Sequence: Synthetic oligonucleotide
  Sense strand starting at position 563 of SEQ ID NO: 1881523
gagaaugaguugccaaguu

SEQ ID NO: 2051053 - RNA, 19 nt, Artificial Sequence
  Description of Artificial Sequence: Synthetic oligonucleotide
  Antisense strand to SEQ ID NO: 2051052
aacuuggcaacucauucuc

SEQ ID NO: 2051054 - RNA, 19 nt, Artificial Sequence
  Description of Artificial Sequence: Synthetic oligonucleotide
  Sense strand starting at position 790 of SEQ ID NO: 1881523
ucauguagacuccaugauc

SEQ ID NO: 2051055 - RNA, 19 nt, Artificial Sequence
  Description of Artificial Sequence: Synthetic oligonucleotide
  Antisense strand to SEQ ID NO: 2051054
gaucauggagucuacauga

SEQ ID NO: 2051056 - RNA, 19 nt, Artificial Sequence
  Description of Artificial Sequence: Synthetic oligonucleotide
  Sense strand starting at position 1127 of SEQ ID NO: 1881523
aagagaucagucugaacuu

SEQ ID NO: 2051057 - RNA, 19 nt, Artificial Sequence
  Description of Artificial Sequence: Synthetic oligonucleotide
  Antisense strand to SEQ ID NO: 2051056
aaguucagacugaucucuu

SEQ ID NO: 2051058 - RNA, 19 nt, Artificial Sequence
  Description of Artificial Sequence: Synthetic oligonucleotide
  Sense strand starting at position 1184 of SEQ ID NO: 1881523
agauguccucccuacacua

SEQ ID NO: 2051059 - RNA, 19 nt, Artificial Sequence
  Description of Artificial Sequence: Synthetic oligonucleotide
  Antisense strand to SEQ ID NO: 2051058
uaguguagggaggacaucu

SEQ ID NO: 2051060 - RNA, 19 nt, Artificial Sequence
  Description of Artificial Sequence: Synthetic oligonucleotide
  Sense strand starting at position 1214 of SEQ ID NO: 1881523
agguucuuaucaucaagga

SEQ ID NO: 2051061 - RNA, 19 nt, Artificial Sequence
  Description of Artificial Sequence: Synthetic oligonucleotide
  Antisense strand to SEQ ID NO: 2051060
uccuugaugauaagaaccu

SEQ ID NO: 2051062 - RNA, 19 nt, Artificial Sequence
  Description of Artificial Sequence: Synthetic oligonucleotide
  Sense strand starting at position 1540 of SEQ ID NO: 1881523
guauucuucugucccaaca

SEQ ID NO: 2051063 - RNA, 19 nt, Artificial Sequence
  Description of Artificial Sequence: Synthetic oligonucleotide
  Antisense strand to SEQ ID NO: 2051062
uguugggacagaagaauac

SEQ ID NO: 2051064 - RNA, 19 nt, Artificial Sequence
  Description of Artificial Sequence: Synthetic oligonucleotide
  Sense strand starting at position 1553 of SEQ ID NO: 1881523
ccaacaguuucuguccuaa

SEQ ID NO: 2051065 - RNA, 19 nt, Artificial Sequence
  Description of Artificial Sequence: Synthetic oligonucleotide
  Antisense strand to SEQ ID NO: 2051064
uuaggacagaaacuguugg

SEQ ID NO: 2051066 - RNA, 19 nt, Artificial Sequence
  Description of Artificial Sequence: Synthetic oligonucleotide
  Sense strand starting at position 1639 of SEQ ID NO: 1881523
ggaagaaaguaggaauucu

SEQ ID NO: 2051067 - RNA, 19 nt, Artificial Sequence
  Description of Artificial Sequence: Synthetic oligonucleotide
  Antisense strand to SEQ ID NO: 2051066
agaauuccuacuuucuucc

SEQ ID NO: 2051068 - RNA, 19 nt, Artificial Sequence
  Description of Artificial Sequence: Synthetic oligonucleotide
  Sense strand starting at position 2029 of SEQ ID NO: 1881523
agcagauggccaugaaagu

SEQ ID NO: 2051069 - RNA, 19 nt, Artificial Sequence
  Description of Artificial Sequence: Synthetic oligonucleotide
  Antisense strand to SEQ ID NO: 2051068
acuuucauggccaucugcu

SEQ ID NO: 2051070 - RNA, 19 nt, Artificial Sequence
  Description of Artificial Sequence: Synthetic oligonucleotide
  Sense strand starting at position 2040 of SEQ ID NO: 1881523
augaaagugaccuguaguu

SEQ ID NO: 2051071 - RNA, 19 nt, Artificial Sequence
  Description of Artificial Sequence: Synthetic oligonucleotide
  Antisense strand to SEQ ID NO: 2051070
aacuacaggucacuuucau

SEQ ID NO: 2051072 - RNA, 19 nt, Artificial Sequence
  Description of Artificial Sequence: Synthetic oligonucleotide
  Sense strand starting at position 2122 of SEQ ID NO: 1881523
ggcaaugggccauagcaau

SEQ ID NO: 2051073 - RNA, 19 nt, Artificial Sequence
  Description of Artificial Sequence: Synthetic oligonucleotide
  Antisense strand to SEQ ID NO: 2051072
auugcuauggcccauugcc

SEQ ID NO: 2051074 - RNA, 19 nt, Artificial Sequence
  Description of Artificial Sequence: Synthetic oligonucleotide
  Sense strand starting at position 2133 of SEQ ID NO: 1881523
auagcaauggccuggaagu

SEQ ID NO: 2051075 - RNA, 19 nt, Artificial Sequence
  Description of Artificial Sequence: Synthetic oligonucleotide
  Antisense strand to SEQ ID NO: 2051074
acuuccaggccauugcuau

SEQ ID NO: 2051076 - RNA, 19 nt, Artificial Sequence
  Description of Artificial Sequence: Synthetic oligonucleotide
  Sense strand starting at position 2134 of SEQ ID NO: 1881523
uagcaauggccuggaaguu

SEQ ID NO: 2051077 - RNA, 19 nt, Artificial Sequence
  Description of Artificial Sequence: Synthetic oligonucleotide
  Antisense strand to SEQ ID NO: 2051076
aacuuccaggccauugcua

SEQ ID NO: 2051078 - RNA, 19 nt, Artificial Sequence
  Description of Artificial Sequence: Synthetic oligonucleotide
  Sense strand starting at position 2135 of SEQ ID NO: 1881523
agcaauggccuggaaguua

SEQ ID NO: 2051079 - RNA, 19 nt, Artificial Sequence
  Description of Artificial Sequence: Synthetic oligonucleotide
  Antisense strand to SEQ ID NO: 2051078
uaacuuccaggccauugcu

SEQ ID NO: 2051080 - RNA, 19 nt, Artificial Sequence
  Description of Artificial Sequence: Synthetic oligonucleotide
  Sense strand starting at position 2152 of SEQ ID NO: 1881523
uaccauauaugguucugga

SEQ ID NO: 2051081 - RNA, 19 nt, Artificial Sequence
  Description of Artificial Sequence: Synthetic oligonucleotide
  Antisense strand to SEQ ID NO: 2051080
uccagaaccauauauggua

SEQ ID NO: 2051082 - RNA, 19 nt, Artificial Sequence
  Description of Artificial Sequence: Synthetic oligonucleotide
  Sense strand starting at position 2185 of SEQ ID NO: 1881523
uuuccagaauguucugaau

SEQ ID NO: 2051083 - RNA, 19 nt, Artificial Sequence
  Description of Artificial Sequence: Synthetic oligonucleotide
  Antisense strand to SEQ ID NO: 2051082
auucagaacauucuggaaa

SEQ ID NO: 2051084 - RNA, 19 nt, Artificial Sequence
  Description of Artificial Sequence: Synthetic oligonucleotide
  Sense strand starting at position 2468 of SEQ ID NO: 1881523
auaagagcuuggcuuugua

SEQ ID NO: 2051085 - RNA, 19 nt, Artificial Sequence
  Description of Artificial Sequence: Synthetic oligonucleotide
  Antisense strand to SEQ ID NO: 2051084
uacaaagccaagcucuuau

SEQ ID NO: 2051086 - RNA, 19 nt, Artificial Sequence
  Description of Artificial Sequence: Synthetic oligonucleotide
  Sense strand starting at position 2477 of SEQ ID NO: 1881523
uggcuuuguaaucagugaa

SEQ ID NO: 2051087 - RNA, 19 nt, Artificial Sequence
  Description of Artificial Sequence: Synthetic oligonucleotide
  Antisense strand to SEQ ID NO: 2051086
uucacugauuacaaagcca

SEQ ID NO: 2051088 - RNA, 19 nt, Artificial Sequence
  Description of Artificial Sequence: Synthetic oligonucleotide
  Sense strand starting at position 2556 of SEQ ID NO: 1881523
uagccagcucuccaggauu

SEQ ID NO: 2051089 - RNA, 19 nt, Artificial Sequence
  Description of Artificial Sequence: Synthetic oligonucleotide
  Antisense strand to SEQ ID NO: 2051088
aauccuggagagcuggcua

SEQ ID NO: 2051090 - RNA, 19 nt, Artificial Sequence
  Description of Artificial Sequence: Synthetic oligonucleotide
  Sense strand starting at position 2581 of SEQ ID NO: 1881523
caagaagugucucuuugua

SEQ ID NO: 2051091 - RNA, 19 nt, Artificial Sequence
  Description of Artificial Sequence: Synthetic oligonucleotide
  Antisense strand to SEQ ID NO: 2051090
uacaaagagacacuucuug

SEQ ID NO: 2051092 - RNA, 19 nt, Artificial Sequence
  Description of Artificial Sequence: Synthetic oligonucleotide
  Sense strand starting at position 2583 of SEQ ID NO: 1881523
agaagugucucuuuguaug

SEQ ID NO: 2051093 - RNA, 19 nt, Artificial Sequence
  Description of Artificial Sequence: Synthetic oligonucleotide
  Antisense strand to SEQ ID NO: 2051092
cauacaaagagacacuucu

SEQ ID NO: 2051094 - RNA, 19 nt, Artificial Sequence
  Description of Artificial Sequence: Synthetic oligonucleotide
  Sense strand starting at position 2585 of SEQ ID NO: 1881523
aagugucucuuuguaugaa

SEQ ID NO: 2051095 - RNA, 19 nt, Artificial Sequence
  Description of Artificial Sequence: Synthetic oligonucleotide
  Antisense strand to SEQ ID NO: 2051094
uucauacaaagagacacuu

SEQ ID NO: 2051096 - RNA, 19 nt, Artificial Sequence
  Description of Artificial Sequence: Synthetic oligonucleotide
  Sense strand starting at position 2628 of SEQ ID NO: 1881523
gucguaauugucucagccu

SEQ ID NO: 2051097 - RNA, 19 nt, Artificial Sequence
  Description of Artificial Sequence: Synthetic oligonucleotide
  Antisense strand to SEQ ID NO: 2051096
aggcugagacaauuacgac

SEQ ID NO: 2051098 - RNA, 19 nt, Artificial Sequence
  Description of Artificial Sequence: Synthetic oligonucleotide
  Sense strand starting at position 2643 of SEQ ID NO: 1881523
gccuuuguugcccuguuaa

SEQ ID NO: 2051099 - RNA, 19 nt, Artificial Sequence
  Description of Artificial Sequence: Synthetic oligonucleotide
  Antisense strand to SEQ ID NO: 2051098
uuaacagggcaacaaaggc

SEQ ID NO: 2051100 - RNA, 19 nt, Artificial Sequence
  Description of Artificial Sequence: Synthetic oligonucleotide
  Sense strand starting at position 2682 of SEQ ID NO: 1881523
uuagguauccuuggaggaa

SEQ ID NO: 2051101 - RNA, 19 nt, Artificial Sequence
  Description of Artificial Sequence: Synthetic oligonucleotide
  Antisense strand to SEQ ID NO: 2051100
uuccuccaaggauaccuaa

SEQ ID NO: 2051102 - RNA, 19 nt, Artificial Sequence
  Description of Artificial Sequence: Synthetic oligonucleotide
  Sense strand starting at position 2685 of SEQ ID NO: 1881523
gguauccuuggaggaaacu

SEQ ID NO: 2051103 - RNA, 19 nt, Artificial Sequence
  Description of Artificial Sequence: Synthetic oligonucleotide
  Antisense strand to SEQ ID NO: 2051102
aguuuccuccaaggauacc

SEQ ID NO: 2051104 - RNA, 19 nt, Artificial Sequence
  Description of Artificial Sequence: Synthetic oligonucleotide
  Sense strand starting at position 2873 of SEQ ID NO: 1881523
cuaaguaacuguccuauug

SEQ ID NO: 2051105 - RNA, 19 nt, Artificial Sequence
  Description of Artificial Sequence: Synthetic oligonucleotide
  Antisense strand to SEQ ID NO: 2051104
caauaggacaguuacuuag

SEQ ID NO: 2051106 - RNA, 19 nt, Artificial Sequence
  Description of Artificial Sequence: Synthetic oligonucleotide
  Sense strand starting at position 2888 of SEQ ID NO: 1881523
auugguaccuaugugaaga

SEQ ID NO: 2051107 - RNA, 19 nt, Artificial Sequence
  Description of Artificial Sequence: Synthetic oligonucleotide
  Antisense strand to SEQ ID NO: 2051106
ucuucacauagguaccaau

SEQ ID NO: 2051108 - RNA, 19 nt, Artificial Sequence
  Description of Artificial Sequence: Synthetic oligonucleotide
  Sense strand starting at position 2889 of SEQ ID NO: 1881523
uugguaccuaugugaagau

SEQ ID NO: 2051109 - RNA, 19 nt, Artificial Sequence
  Description of Artificial Sequence: Synthetic oligonucleotide
  Antisense strand to SEQ ID NO: 2051108
aucuucacauagguaccaa

SEQ ID NO: 2051110 - RNA, 19 nt, Artificial Sequence
  Description of Artificial Sequence: Synthetic oligonucleotide
  Sense strand starting at position 3020 of SEQ ID NO: 1881523
cuacuuaaaguuugcugau

SEQ ID NO: 2051111 - RNA, 19 nt, Artificial Sequence
  Description of Artificial Sequence: Synthetic oligonucleotide
  Antisense strand to SEQ ID NO: 2051110
aucagcaaacuuuaaguag

SEQ ID NO: 2051112 - RNA, 19 nt, Artificial Sequence
  Description of Artificial Sequence: Synthetic oligonucleotide
  Sense strand starting at position 3166 of SEQ ID NO: 1881523
uaaugcacgucauuuagca

SEQ ID NO: 2051113 - RNA, 19 nt, Artificial Sequence
  Description of Artificial Sequence: Synthetic oligonucleotide
  Antisense strand to SEQ ID NO: 2051112
ugcuaaaugacgugcauua

SEQ ID NO: 2051114 - RNA, 19 nt, Artificial Sequence
  Description of Artificial Sequence: Synthetic oligonucleotide
  Sense strand starting at position 3170 of SEQ ID NO: 1881523
gcacgucauuuagcaugaa

SEQ ID NO: 2051115 - RNA, 19 nt, Artificial Sequence
  Description of Artificial Sequence: Synthetic oligonucleotide
  Antisense strand to SEQ ID NO: 2051114
uucaugcuaaaugacgugc

SEQ ID NO: 2051116 - RNA, 19 nt, Artificial Sequence
  Description of Artificial Sequence: Synthetic oligonucleotide
  Sense strand starting at position 3173 of SEQ ID NO: 1881523
cgucauuuagcaugaacuc

SEQ ID NO: 2051117 - RNA, 19 nt, Artificial Sequence
  Description of Artificial Sequence: Synthetic oligonucleotide
  Antisense strand to SEQ ID NO: 2051116
gaguucaugcuaaaugacg

SEQ ID NO: 2051118 - RNA, 19 nt, Artificial Sequence
  Description of Artificial Sequence: Synthetic oligonucleotide
  Sense strand starting at position 203 of SEQ ID NO: 1881522
ucauguagacuccaugauc

SEQ ID NO: 2051119 - RNA, 19 nt, Artificial Sequence
  Description of Artificial Sequence: Synthetic oligonucleotide
  Antisense strand to SEQ ID NO: 2051118
gaucauggagucuacauga

SEQ ID NO: 2051120 - RNA, 19 nt, Artificial Sequence
  Description of Artificial Sequence: Synthetic oligonucleotide
  Sense strand starting at position 540 of SEQ ID NO: 1881522
aagagaucagucugaacuu

SEQ ID NO: 2051121 - RNA, 19 nt, Artificial Sequence
  Description of Artificial Sequence: Synthetic oligonucleotide
  Antisense strand to SEQ ID NO: 2051120
aaguucagacugaucucuu

SEQ ID NO: 2051122 - RNA, 19 nt, Artificial Sequence
  Description of Artificial Sequence: Synthetic oligonucleotide
  Sense strand starting at position 597 of SEQ ID NO: 1881522
agauguccucccuacacua

SEQ ID NO: 2051123 - RNA, 19 nt, Artificial Sequence
  Description of Artificial Sequence: Synthetic oligonucleotide
  Antisense strand to SEQ ID NO: 2051122
uaguguagggaggacaucu

SEQ ID NO: 2051124 - RNA, 19 nt, Artificial Sequence
  Description of Artificial Sequence: Synthetic oligonucleotide
  Sense strand starting at position 627 of SEQ ID NO: 1881522
agguucuuaucaucaagga

SEQ ID NO: 2051125 - RNA, 19 nt, Artificial Sequence
  Description of Artificial Sequence: Synthetic oligonucleotide
  Antisense strand to SEQ ID NO: 2051124
uccuugaugauaagaaccu

SEQ ID NO: 2051126 - RNA, 19 nt, Artificial Sequence
  Description of Artificial Sequence: Synthetic oligonucleotide
  Sense strand starting at position 953 of SEQ ID NO: 1881522
guauucuucugucccaaca

SEQ ID NO: 2051127 - RNA, 19 nt, Artificial Sequence
  Description of Artificial Sequence: Synthetic oligonucleotide
  Antisense strand to SEQ ID NO: 2051126
uguugggacagaagaauac

SEQ ID NO: 2051128 - RNA, 19 nt, Artificial Sequence
  Description of Artificial Sequence: Synthetic oligonucleotide
  Sense strand starting at position 966 of SEQ ID NO: 1881522
ccaacaguuucuguccuaa

SEQ ID NO: 2051129 - RNA, 19 nt, Artificial Sequence
  Description of Artificial Sequence: Synthetic oligonucleotide
  Antisense strand to SEQ ID NO: 2051128
uuaggacagaaacuguugg

SEQ ID NO: 2051130 - RNA, 19 nt, Artificial Sequence
  Description of Artificial Sequence: Synthetic oligonucleotide
  Sense strand starting at position 1039 of SEQ ID NO: 1881522
ccuaauaaaugauggaaga

SEQ ID NO: 2051131 - RNA, 19 nt, Artificial Sequence
  Description of Artificial Sequence: Synthetic oligonucleotide
  Antisense strand to SEQ ID NO: 2051130
ucuuccaucauuuauuagg

SEQ ID NO: 2051132 - RNA, 19 nt, Artificial Sequence
  Description of Artificial Sequence: Synthetic oligonucleotide
  Sense strand starting at position 1052 of SEQ ID NO: 1881522
ggaagaaaguaggaauucu

SEQ ID NO: 2051133 - RNA, 19 nt, Artificial Sequence
  Description of Artificial Sequence: Synthetic oligonucleotide
  Antisense strand to SEQ ID NO: 2051132
agaauuccuacuuucuucc

SEQ ID NO: 2051134 - RNA, 19 nt, Artificial Sequence
  Description of Artificial Sequence: Synthetic oligonucleotide
  Sense strand starting at position 1442 of SEQ ID NO: 1881522
agcagauggccaugaaagu

SEQ ID NO: 2051135 - RNA, 19 nt, Artificial Sequence
  Description of Artificial Sequence: Synthetic oligonucleotide
  Antisense strand to SEQ ID NO: 2051134
acuuucauggccaucugcu

SEQ ID NO: 2051136 - RNA, 19 nt, Artificial Sequence
  Description of Artificial Sequence: Synthetic oligonucleotide
  Sense strand starting at position 1453 of SEQ ID NO: 1881522
augaaagugaccuguaguu

SEQ ID NO: 2051137 - RNA, 19 nt, Artificial Sequence
  Description of Artificial Sequence: Synthetic oligonucleotide
  Antisense strand to SEQ ID NO: 2051136
aacuacaggucacuuucau

SEQ ID NO: 2051138 - RNA, 19 nt, Artificial Sequence
  Description of Artificial Sequence: Synthetic oligonucleotide
  Sense strand starting at position 1535 of SEQ ID NO: 1881522
ggcaaugggccauagcaau

SEQ ID NO: 2051139 - RNA, 19 nt, Artificial Sequence
  Description of Artificial Sequence: Synthetic oligonucleotide
  Antisense strand to SEQ ID NO: 2051138
auugcuauggcccauugcc

SEQ ID NO: 2051140 - RNA, 19 nt, Artificial Sequence
  Description of Artificial Sequence: Synthetic oligonucleotide
  Sense strand starting at position 1546 of SEQ ID NO: 1881522
auagcaauggccuggaagu

SEQ ID NO: 2051141 - RNA, 19 nt, Artificial Sequence
  Description of Artificial Sequence: Synthetic oligonucleotide
  Antisense strand to SEQ ID NO: 2051140
acuuccaggccauugcuau

SEQ ID NO: 2051142 - RNA, 19 nt, Artificial Sequence
  Description of Artificial Sequence: Synthetic oligonucleotide
  Sense strand starting at position 1547 of SEQ ID NO: 1881522
uagcaauggccuggaaguu

SEQ ID NO: 2051143 - RNA, 19 nt, Artificial Sequence
  Description of Artificial Sequence: Synthetic oligonucleotide
  Antisense strand to SEQ ID NO: 2051142
aacuuccaggccauugcua

SEQ ID NO: 2051144 - RNA, 19 nt, Artificial Sequence
  Description of Artificial Sequence: Synthetic oligonucleotide
  Sense strand starting at position 1548 of SEQ ID NO: 1881522
agcaauggccuggaaguua

SEQ ID NO: 2051145 - RNA, 19 nt, Artificial Sequence
  Description of Artificial Sequence: Synthetic oligonucleotide
  Antisense strand to SEQ ID NO: 2051144
uaacuuccaggccauugcu

SEQ ID NO: 2051146 - RNA, 19 nt, Artificial Sequence
  Description of Artificial Sequence: Synthetic oligonucleotide
  Sense strand starting at position 1565 of SEQ ID NO: 1881522
uaccauauaugguucugga

SEQ ID NO: 2051147 - RNA, 19 nt, Artificial Sequence
  Description of Artificial Sequence: Synthetic oligonucleotide
  Antisense strand to SEQ ID NO: 2051146
uccagaaccauauauggua

SEQ ID NO: 2051148 - RNA, 19 nt, Artificial Sequence
  Description of Artificial Sequence: Synthetic oligonucleotide
  Sense strand starting at position 1598 of SEQ ID NO: 1881522
uuuccagaauguucugaau

SEQ ID NO: 2051149 - RNA, 19 nt, Artificial Sequence
  Description of Artificial Sequence: Synthetic oligonucleotide
  Antisense strand to SEQ ID NO: 2051148
auucagaacauucuggaaa

SEQ ID NO: 2051150 - RNA, 19 nt, Artificial Sequence
  Description of Artificial Sequence: Synthetic oligonucleotide
  Sense strand starting at position 1781 of SEQ ID NO: 1881522
gaguucguuccugggugaa

SEQ ID NO: 2051151 - RNA, 19 nt, Artificial Sequence
  Description of Artificial Sequence: Synthetic oligonucleotide
  Antisense strand to SEQ ID NO: 2051150
uucacccaggaacgaacuc

SEQ ID NO: 2051152 - RNA, 19 nt, Artificial Sequence
  Description of Artificial Sequence: Synthetic oligonucleotide
  Sense strand starting at position 1878 of SEQ ID NO: 1881522
gucauaagagcuuggcuuu

SEQ ID NO: 2051153 - RNA, 19 nt, Artificial Sequence
  Description of Artificial Sequence: Synthetic oligonucleotide
  Antisense strand to SEQ ID NO: 2051152
aaagccaagcucuuaugac

SEQ ID NO: 2051154 - RNA, 19 nt, Artificial Sequence
  Description of Artificial Sequence: Synthetic oligonucleotide
  Sense strand starting at position 1881 of SEQ ID NO: 1881522
auaagagcuuggcuuugua

SEQ ID NO: 2051155 - RNA, 19 nt, Artificial Sequence
  Description of Artificial Sequence: Synthetic oligonucleotide
  Antisense strand to SEQ ID NO: 2051154
uacaaagccaagcucuuau

SEQ ID NO: 2051156 - RNA, 19 nt, Artificial Sequence
  Description of Artificial Sequence: Synthetic oligonucleotide
  Sense strand starting at position 1885 of SEQ ID NO: 1881522
gagcuuggcuuuguaauca

SEQ ID NO: 2051157 - RNA, 19 nt, Artificial Sequence
  Description of Artificial Sequence: Synthetic oligonucleotide
  Antisense strand to SEQ ID NO: 2051156
ugauuacaaagccaagcuc

SEQ ID NO: 2051158 - RNA, 19 nt, Artificial Sequence
  Description of Artificial Sequence: Synthetic oligonucleotide
  Sense strand starting at position 1889 of SEQ ID NO: 1881522
uuggcuuuguaaucaguga

SEQ ID NO: 2051159 - RNA, 19 nt, Artificial Sequence
  Description of Artificial Sequence: Synthetic oligonucleotide
  Antisense strand to SEQ ID NO: 2051158
ucacugauuacaaagccaa

SEQ ID NO: 2051160 - RNA, 19 nt, Artificial Sequence
  Description of Artificial Sequence: Synthetic oligonucleotide
  Sense strand starting at position 1890 of SEQ ID NO: 1881522
uggcuuuguaaucagugaa

SEQ ID NO: 2051161 - RNA, 19 nt, Artificial Sequence
  Description of Artificial Sequence: Synthetic oligonucleotide
  Antisense strand to SEQ ID NO: 2051160
uucacugauuacaaagcca

SEQ ID NO: 2051162 - RNA, 19 nt, Artificial Sequence
  Description of Artificial Sequence: Synthetic oligonucleotide
  Sense strand starting at position 1969 of SEQ ID NO: 1881522
uagccagcucuccaggauu

SEQ ID NO: 2051163 - RNA, 19 nt, Artificial Sequence
  Description of Artificial Sequence: Synthetic oligonucleotide
  Antisense strand to SEQ ID NO: 2051162
aauccuggagagcuggcua

SEQ ID NO: 2051164 - RNA, 19 nt, Artificial Sequence
  Description of Artificial Sequence: Synthetic oligonucleotide
  Sense strand starting at position 1994 of SEQ ID NO: 1881522
caagaagugucucuuugua

SEQ ID NO: 2051165 - RNA, 19 nt, Artificial Sequence
  Description of Artificial Sequence: Synthetic oligonucleotide
  Antisense strand to SEQ ID NO: 2051164
uacaaagagacacuucuug

SEQ ID NO: 2051166 - RNA, 19 nt, Artificial Sequence
  Description of Artificial Sequence: Synthetic oligonucleotide
  Sense strand starting at position 1996 of SEQ ID NO: 1881522
agaagugucucuuuguaug

SEQ ID NO: 2051167 - RNA, 19 nt, Artificial Sequence
  Description of Artificial Sequence: Synthetic oligonucleotide
  Antisense strand to SEQ ID NO: 2051166
cauacaaagagacacuucu

SEQ ID NO: 2051168 - RNA, 19 nt, Artificial Sequence
  Description of Artificial Sequence: Synthetic oligonucleotide
  Sense strand starting at position 1998 of SEQ ID NO: 1881522
aagugucucuuuguaugaa

SEQ ID NO: 2051169 - RNA, 19 nt, Artificial Sequence
  Description of Artificial Sequence: Synthetic oligonucleotide
  Antisense strand to SEQ ID NO: 2051168
uucauacaaagagacacuu

SEQ ID NO: 2051170 - RNA, 19 nt, Artificial Sequence
  Description of Artificial Sequence: Synthetic oligonucleotide
  Sense strand starting at position 2029 of SEQ ID NO: 1881522
ucaggacaguuugucguaa

SEQ ID NO: 2051171 - RNA, 19 nt, Artificial Sequence
  Description of Artificial Sequence: Synthetic oligonucleotide
  Antisense strand to SEQ ID NO: 2051170
uuacgacaaacuguccuga

SEQ ID NO: 2051172 - RNA, 19 nt, Artificial Sequence
  Description of Artificial Sequence: Synthetic oligonucleotide
  Sense strand starting at position 2030 of SEQ ID NO: 1881522
caggacaguuugucguaau

SEQ ID NO: 2051173 - RNA, 19 nt, Artificial Sequence
  Description of Artificial Sequence: Synthetic oligonucleotide
  Antisense strand to SEQ ID NO: 2051172
auuacgacaaacuguccug

SEQ ID NO: 2051174 - RNA, 19 nt, Artificial Sequence
  Description of Artificial Sequence: Synthetic oligonucleotide
  Sense strand starting at position 2041 of SEQ ID NO: 1881522
gucguaauugucucagccu

SEQ ID NO: 2051175 - RNA, 19 nt, Artificial Sequence
  Description of Artificial Sequence: Synthetic oligonucleotide
  Antisense strand to SEQ ID NO: 2051174
aggcugagacaauuacgac

SEQ ID NO: 2051176 - RNA, 19 nt, Artificial Sequence
  Description of Artificial Sequence: Synthetic oligonucleotide
  Sense strand starting at position 2056 of SEQ ID NO: 1881522
gccuuuguugcccuguuaa

SEQ ID NO: 2051177 - RNA, 19 nt, Artificial Sequence
  Description of Artificial Sequence: Synthetic oligonucleotide
  Antisense strand to SEQ ID NO: 2051176
uuaacagggcaacaaaggc

SEQ ID NO: 2051178 - RNA, 19 nt, Artificial Sequence
  Description of Artificial Sequence: Synthetic oligonucleotide
  Sense strand starting at position 2095 of SEQ ID NO: 1881522
uuagguauccuuggaggaa

SEQ ID NO: 2051179 - RNA, 19 nt, Artificial Sequence
  Description of Artificial Sequence: Synthetic oligonucleotide
  Antisense strand to SEQ ID NO: 2051178
uuccuccaaggauaccuaa

SEQ ID NO: 2051180 - RNA, 19 nt, Artificial Sequence
  Description of Artificial Sequence: Synthetic oligonucleotide
  Sense strand starting at position 2098 of SEQ ID NO: 1881522
gguauccuuggaggaaacu

SEQ ID NO: 2051181 - RNA, 19 nt, Artificial Sequence
  Description of Artificial Sequence: Synthetic oligonucleotide
  Antisense strand to SEQ ID NO: 2051180
aguuuccuccaaggauacc

SEQ ID NO: 2051182 - RNA, 19 nt, Artificial Sequence
  Description of Artificial Sequence: Synthetic oligonucleotide
  Sense strand starting at position 2286 of SEQ ID NO: 1881522
cuaaguaacuguccuauug

SEQ ID NO: 2051183 - RNA, 19 nt, Artificial Sequence
  Description of Artificial Sequence: Synthetic oligonucleotide
  Antisense strand to SEQ ID NO: 2051182
caauaggacaguuacuuag

SEQ ID NO: 2051184 - RNA, 19 nt, Artificial Sequence
  Description of Artificial Sequence: Synthetic oligonucleotide
  Sense strand starting at position 2301 of SEQ ID NO: 1881522
auugguaccuaugugaaga

SEQ ID NO: 2051185 - RNA, 19 nt, Artificial Sequence
  Description of Artificial Sequence: Synthetic oligonucleotide
  Antisense strand to SEQ ID NO: 2051184
ucuucacauagguaccaau

SEQ ID NO: 2051186 - RNA, 19 nt, Artificial Sequence
  Description of Artificial Sequence: Synthetic oligonucleotide
  Sense strand starting at position 2302 of SEQ ID NO: 1881522
uugguaccuaugugaagau

SEQ ID NO: 2051187 - RNA, 19 nt, Artificial Sequence
  Description of Artificial Sequence: Synthetic oligonucleotide
  Antisense strand to SEQ ID NO: 2051186
aucuucacauagguaccaa

SEQ ID NO: 2051188 - RNA, 19 nt, Artificial Sequence
  Description of Artificial Sequence: Synthetic oligonucleotide
  Sense strand starting at position 2433 of SEQ ID NO: 1881522
cuacuuaaaguuugcugau

SEQ ID NO: 2051189 - RNA, 19 nt, Artificial Sequence
  Description of Artificial Sequence: Synthetic oligonucleotide
  Antisense strand to SEQ ID NO: 2051188
aucagcaaacuuuaaguag

SEQ ID NO: 2051190 - RNA, 19 nt, Artificial Sequence
  Description of Artificial Sequence: Synthetic oligonucleotide
  Sense strand starting at position 2574 of SEQ ID NO: 1881522
acccauaaugcacgucauu

SEQ ID NO: 2051191 - RNA, 19 nt, Artificial Sequence
  Description of Artificial Sequence: Synthetic oligonucleotide
  Antisense strand to SEQ ID NO: 2051190
aaugacgugcauuaugggu

SEQ ID NO: 2051192 - RNA, 19 nt, Artificial Sequence
  Description of Artificial Sequence: Synthetic oligonucleotide
  Sense strand starting at position 2579 of SEQ ID NO: 1881522
uaaugcacgucauuuagca

SEQ ID NO: 2051193 - RNA, 19 nt, Artificial Sequence
  Description of Artificial Sequence: Synthetic oligonucleotide
  Antisense strand to SEQ ID NO: 2051192
ugcuaaaugacgugcauua

SEQ ID NO: 2051194 - RNA, 19 nt, Artificial Sequence
  Description of Artificial Sequence: Synthetic oligonucleotide
  Sense strand starting at position 2583 of SEQ ID NO: 1881522
gcacgucauuuagcaugaa

SEQ ID NO: 2051195 - RNA, 19 nt, Artificial Sequence
  Description of Artificial Sequence: Synthetic oligonucleotide
  Antisense strand to SEQ ID NO: 2051194
uucaugcuaaaugacgugc

SEQ ID NO: 2051196 - RNA, 19 nt, Artificial Sequence
  Description of Artificial Sequence: Synthetic oligonucleotide
  Sense strand starting at position 2586 of SEQ ID NO: 1881522
cgucauuuagcaugaacuc

SEQ ID NO: 2051197 - RNA, 19 nt, Artificial Sequence
  Description of Artificial Sequence: Synthetic oligonucleotide
  Antisense strand to SEQ ID NO: 2051196
gaguucaugcuaaaugacg

SEQ ID NO: 2051198 - RNA, 19 nt, Artificial Sequence
  Description of Artificial Sequence: Synthetic oligonucleotide
  Sense strand starting at position 230 of SEQ ID NO: 1881524
gcuguaauuccagaaugga

SEQ ID NO: 2051199 - RNA, 19 nt, Artificial Sequence
  Description of Artificial Sequence: Synthetic oligonucleotide
  Antisense strand to SEQ ID NO: 2051198
uccauucuggaauuacagc

SEQ ID NO: 2051200 - RNA, 19 nt, Artificial Sequence
  Description of Artificial Sequence: Synthetic oligonucleotide
  Sense strand starting at position 243 of SEQ ID NO: 1881524
aauggagugagguguuaag

SEQ ID NO: 2051201 - RNA, 19 nt, Artificial Sequence
  Description of Artificial Sequence: Synthetic oligonucleotide
  Antisense strand to SEQ ID NO: 2051200
cuuaacaccucacuccauu

SEQ ID NO: 2051202 - RNA, 19 nt, Artificial Sequence
  Description of Artificial Sequence: Synthetic oligonucleotide
  Sense strand starting at position 253 of SEQ ID NO: 1881524
gguguuaagacucagcuag

SEQ ID NO: 2051203 - RNA, 19 nt, Artificial Sequence
  Description of Artificial Sequence: Synthetic oligonucleotide
  Antisense strand to SEQ ID NO: 2051202
cuagcugagucuuaacacc

SEQ ID NO: 2051204 - RNA, 19 nt, Artificial Sequence
  Description of Artificial Sequence: Synthetic oligonucleotide
  Sense strand starting at position 487 of SEQ ID NO: 1881524
cagagaugggucugggcau

SEQ ID NO: 2051205 - RNA, 19 nt, Artificial Sequence
  Description of Artificial Sequence: Synthetic oligonucleotide
  Antisense strand to SEQ ID NO: 2051204
augcccagacccaucucug

SEQ ID NO: 2051206 - RNA, 19 nt, Artificial Sequence
  Description of Artificial Sequence: Synthetic oligonucleotide
  Sense strand starting at position 909 of SEQ ID NO: 1881524
ccuuuaguccuugaguaag

SEQ ID NO: 2051207 - RNA, 19 nt, Artificial Sequence
  Description of Artificial Sequence: Synthetic oligonucleotide
  Antisense strand to SEQ ID NO: 2051206
cuuacucaaggacuaaagg

SEQ ID NO: 2051208 - RNA, 19 nt, Artificial Sequence
  Description of Artificial Sequence: Synthetic oligonucleotide
  Sense strand starting at position 911 of SEQ ID NO: 1881524
uuuaguccuugaguaagga

SEQ ID NO: 2051209 - RNA, 19 nt, Artificial Sequence
  Description of Artificial Sequence: Synthetic oligonucleotide
  Antisense strand to SEQ ID NO: 2051208
uccuuacucaaggacuaaa

SEQ ID NO: 2051210 - RNA, 19 nt, Artificial Sequence
  Description of Artificial Sequence: Synthetic oligonucleotide
  Sense strand starting at position 998 of SEQ ID NO: 1881524
ucuuuaaggucacuaggau

SEQ ID NO: 2051211 - RNA, 19 nt, Artificial Sequence
  Description of Artificial Sequence: Synthetic oligonucleotide
  Antisense strand to SEQ ID NO: 2051210
auccuagugaccuuaaaga

SEQ ID NO: 2051212 - RNA, 19 nt, Artificial Sequence
  Description of Artificial Sequence: Synthetic oligonucleotide
  Sense strand starting at position 1234 of SEQ ID NO: 1881524
cuuguuauaccagacaugu

SEQ ID NO: 2051213 - RNA, 19 nt, Artificial Sequence
  Description of Artificial Sequence: Synthetic oligonucleotide
  Antisense strand to SEQ ID NO: 2051212
acaugucugguauaacaag

SEQ ID NO: 2051214 - RNA, 19 nt, Artificial Sequence
  Description of Artificial Sequence: Synthetic oligonucleotide
  Sense strand starting at position 1266 of SEQ ID NO: 1881524
ugugguauagccuacuuaa

SEQ ID NO: 2051215 - RNA, 19 nt, Artificial Sequence
  Description of Artificial Sequence: Synthetic oligonucleotide
  Antisense strand to SEQ ID NO: 2051214
uuaaguaggcuauaccaca

SEQ ID NO: 2051216 - RNA, 19 nt, Artificial Sequence
  Description of Artificial Sequence: Synthetic oligonucleotide
  Sense strand starting at position 1315 of SEQ ID NO: 1881524
acucaaucacccgaguacu

SEQ ID NO: 2051217 - RNA, 19 nt, Artificial Sequence
  Description of Artificial Sequence: Synthetic oligonucleotide
  Antisense strand to SEQ ID NO: 2051216
aguacucgggugauugagu

SEQ ID NO: 2051218 - RNA, 19 nt, Artificial Sequence
  Description of Artificial Sequence: Synthetic oligonucleotide
  Sense strand starting at position 1318 of SEQ ID NO: 1881524
caaucacccgaguacuguu

SEQ ID NO: 2051219 - RNA, 19 nt, Artificial Sequence
  Description of Artificial Sequence: Synthetic oligonucleotide
  Antisense strand to SEQ ID NO: 2051218
aacaguacucgggugauug

SEQ ID NO: 2051220 - RNA, 19 nt, Artificial Sequence
  Description of Artificial Sequence: Synthetic oligonucleotide
  Sense strand starting at position 1494 of SEQ ID NO: 1881524
ucuuuauuguucuuagaga

SEQ ID NO: 2051221 - RNA, 19 nt, Artificial Sequence
  Description of Artificial Sequence: Synthetic oligonucleotide
  Antisense strand to SEQ ID NO: 2051220
ucucuaagaacaauaaaga

SEQ ID NO: 2051222 - RNA, 19 nt, Artificial Sequence
  Description of Artificial Sequence: Synthetic oligonucleotide
  Sense strand starting at position 1499 of SEQ ID NO: 1881524
auuguucuuagagaguuga

SEQ ID NO: 2051223 - RNA, 19 nt, Artificial Sequence
  Description of Artificial Sequence: Synthetic oligonucleotide
  Antisense strand to SEQ ID NO: 2051222
ucaacucucuaagaacaau

SEQ ID NO: 2051224 - RNA, 19 nt, Artificial Sequence
  Description of Artificial Sequence: Synthetic oligonucleotide
  Sense strand starting at position 1510 of SEQ ID NO: 1881524
agaguugaguacuuauuaa

SEQ ID NO: 2051225 - RNA, 19 nt, Artificial Sequence
  Description of Artificial Sequence: Synthetic oligonucleotide
  Antisense strand to SEQ ID NO: 2051224
uuaauaaguacucaacucu

SEQ ID NO: 2051226 - RNA, 19 nt, Artificial Sequence
  Description of Artificial Sequence: Synthetic oligonucleotide
  Sense strand starting at position 1840 of SEQ ID NO: 1881524
ggcucauagguccauagag

SEQ ID NO: 2051227 - RNA, 19 nt, Artificial Sequence
  Description of Artificial Sequence: Synthetic oligonucleotide
  Antisense strand to SEQ ID NO: 2051226
cucuauggaccuaugagcc

SEQ ID NO: 2051228 - RNA, 19 nt, Artificial Sequence
  Description of Artificial Sequence: Synthetic oligonucleotide
  Sense strand starting at position 1842 of SEQ ID NO: 1881524
cucauagguccauagagca

SEQ ID NO: 2051229 - RNA, 19 nt, Artificial Sequence
  Description of Artificial Sequence: Synthetic oligonucleotide
  Antisense strand to SEQ ID NO: 2051228
ugcucuauggaccuaugag

SEQ ID NO: 2051230 - RNA, 19 nt, Artificial Sequence
  Description of Artificial Sequence: Synthetic oligonucleotide
  Sense strand starting at position 1917 of SEQ ID NO: 1881524
gagaguaccggucacaaga

SEQ ID NO: 2051231 - RNA, 19 nt, Artificial Sequence
  Description of Artificial Sequence: Synthetic oligonucleotide
  Antisense strand to SEQ ID NO: 2051230
ucuugugaccgguacucuc

SEQ ID NO: 2051232 - RNA, 19 nt, Artificial Sequence
  Description of Artificial Sequence: Synthetic oligonucleotide
  Sense strand starting at position 1931 of SEQ ID NO: 1881524
caagaacucuggguucuga

SEQ ID NO: 2051233 - RNA, 19 nt, Artificial Sequence
  Description of Artificial Sequence: Synthetic oligonucleotide
  Antisense strand to SEQ ID NO: 2051232
ucagaacccagaguucuug

SEQ ID NO: 2051234 - RNA, 19 nt, Artificial Sequence
  Description of Artificial Sequence: Synthetic oligonucleotide
  Sense strand starting at position 2181 of SEQ ID NO: 1881524
cagccuagaugaucuuuga

SEQ ID NO: 2051235 - RNA, 19 nt, Artificial Sequence
  Description of Artificial Sequence: Synthetic oligonucleotide
  Antisense strand to SEQ ID NO: 2051234
ucaaagaucaucuaggcug

SEQ ID NO: 2051236 - RNA, 19 nt, Artificial Sequence
  Description of Artificial Sequence: Synthetic oligonucleotide
  Sense strand starting at position 2184 of SEQ ID NO: 1881524
ccuagaugaucuuugaauc

SEQ ID NO: 2051237 - RNA, 19 nt, Artificial Sequence
  Description of Artificial Sequence: Synthetic oligonucleotide
  Antisense strand to SEQ ID NO: 2051236
gauucaaagaucaucuagg

SEQ ID NO: 2051238 - RNA, 19 nt, Artificial Sequence
  Description of Artificial Sequence: Synthetic oligonucleotide
  Sense strand starting at position 2185 of SEQ ID NO: 1881524
cuagaugaucuuugaaucu

SEQ ID NO: 2051239 - RNA, 19 nt, Artificial Sequence
  Description of Artificial Sequence: Synthetic oligonucleotide
  Antisense strand to SEQ ID NO: 2051238
agauucaaagaucaucuag

SEQ ID NO: 2051240 - RNA, 19 nt, Artificial Sequence
  Description of Artificial Sequence: Synthetic oligonucleotide
  Sense strand starting at position 2312 of SEQ ID NO: 1881524
aacaacaaugucugguaga

SEQ ID NO: 2051241 - RNA, 19 nt, Artificial Sequence
  Description of Artificial Sequence: Synthetic oligonucleotide
  Antisense strand to SEQ ID NO: 2051240
ucuaccagacauuguuguu

SEQ ID NO: 2051242 - RNA, 19 nt, Artificial Sequence
  Description of Artificial Sequence: Synthetic oligonucleotide
  Sense strand starting at position 2325 of SEQ ID NO: 1881524
gguagaaagaacugauguu

SEQ ID NO: 2051243 - RNA, 19 nt, Artificial Sequence
  Description of Artificial Sequence: Synthetic oligonucleotide
  Antisense strand to SEQ ID NO: 2051242
aacaucaguucuuucuacc

SEQ ID NO: 2051244 - RNA, 19 nt, Artificial Sequence
  Description of Artificial Sequence: Synthetic oligonucleotide
  Sense strand starting at position 2357 of SEQ ID NO: 1881524
aaagcagagucuuuaagga

SEQ ID NO: 2051245 - RNA, 19 nt, Artificial Sequence
  Description of Artificial Sequence: Synthetic oligonucleotide
  Antisense strand to SEQ ID NO: 2051244
uccuuaaagacucugcuuu

SEQ ID NO: 2051246 - RNA, 19 nt, Artificial Sequence
  Description of Artificial Sequence: Synthetic oligonucleotide
  Sense strand starting at position 2551 of SEQ ID NO: 1881524
auggaacagcgagaguuua

SEQ ID NO: 2051247 - RNA, 19 nt, Artificial Sequence
  Description of Artificial Sequence: Synthetic oligonucleotide
  Antisense strand to SEQ ID NO: 2051246
uaaacucucgcuguuccau

SEQ ID NO: 2051248 - RNA, 19 nt, Artificial Sequence
  Description of Artificial Sequence: Synthetic oligonucleotide
  Sense strand starting at position 2611 of SEQ ID NO: 1881524
augaguauaagcugggaga

SEQ ID NO: 2051249 - RNA, 19 nt, Artificial Sequence
  Description of Artificial Sequence: Synthetic oligonucleotide
  Antisense strand to SEQ ID NO: 2051248
ucucccagcuuauacucau

SEQ ID NO: 2051250 - RNA, 19 nt, Artificial Sequence
  Description of Artificial Sequence: Synthetic oligonucleotide
  Sense strand starting at position 2923 of SEQ ID NO: 1881524
uaacaauaauggguugagu

SEQ ID NO: 2051251 - RNA, 19 nt, Artificial Sequence
  Description of Artificial Sequence: Synthetic oligonucleotide
  Antisense strand to SEQ ID NO: 2051250
acucaacccauuauuguua

SEQ ID NO: 2051252 - RNA, 19 nt, Artificial Sequence
  Description of Artificial Sequence: Synthetic oligonucleotide
  Sense strand starting at position 2934 of SEQ ID NO: 1881524
gguugagugccaugagaaa

SEQ ID NO: 2051253 - RNA, 19 nt, Artificial Sequence
  Description of Artificial Sequence: Synthetic oligonucleotide
  Antisense strand to SEQ ID NO: 2051252
uuucucauggcacucaacc

SEQ ID NO: 2051254 - RNA, 19 nt, Artificial Sequence
  Description of Artificial Sequence: Synthetic oligonucleotide
  Sense strand starting at position 2955 of SEQ ID NO: 1881524
gcuagaaagcuuuauagga

SEQ ID NO: 2051255 - RNA, 19 nt, Artificial Sequence
  Description of Artificial Sequence: Synthetic oligonucleotide
  Antisense strand to SEQ ID NO: 2051254
uccuauaaagcuuucuagc

SEQ ID NO: 2051256 - RNA, 19 nt, Artificial Sequence
  Description of Artificial Sequence: Synthetic oligonucleotide
  Sense strand starting at position 2978 of SEQ ID NO: 1881524
ggcuguuuagagcaaggga

SEQ ID NO: 2051257 - RNA, 19 nt, Artificial Sequence
  Description of Artificial Sequence: Synthetic oligonucleotide
  Antisense strand to SEQ ID NO: 2051256
ucccuugcucuaaacagcc

SEQ ID NO: 2051258 - RNA, 19 nt, Artificial Sequence
  Description of Artificial Sequence: Synthetic oligonucleotide
  Sense strand starting at position 3009 of SEQ ID NO: 1881524
gguagaguuuaauuggaag

SEQ ID NO: 2051259 - RNA, 19 nt, Artificial Sequence
  Description of Artificial Sequence: Synthetic oligonucleotide
  Antisense strand to SEQ ID NO: 2051258
cuuccaauuaaacucuacc

SEQ ID NO: 2051260 - RNA, 19 nt, Artificial Sequence
  Description of Artificial Sequence: Synthetic oligonucleotide
  Sense strand starting at position 3160 of SEQ ID NO: 1881524
gaaguuuggcaagaagagu

SEQ ID NO: 2051261 - RNA, 19 nt, Artificial Sequence
  Description of Artificial Sequence: Synthetic oligonucleotide
  Antisense strand to SEQ ID NO: 2051260
acucuucuugccaaacuuc

SEQ ID NO: 2051262 - RNA, 19 nt, Artificial Sequence
  Description of Artificial Sequence: Synthetic oligonucleotide
  Sense strand starting at position 3254 of SEQ ID NO: 1881524
ccugauuccagauggugaa

SEQ ID NO: 2051263 - RNA, 19 nt, Artificial Sequence
  Description of Artificial Sequence: Synthetic oligonucleotide
  Antisense strand to SEQ ID NO: 2051262
uucaccaucuggaaucagg

SEQ ID NO: 2051264 - RNA, 19 nt, Artificial Sequence
  Description of Artificial Sequence: Synthetic oligonucleotide
  Sense strand starting at position 3255 of SEQ ID NO: 1881524
cugauuccagauggugaaa

SEQ ID NO: 2051265 - RNA, 19 nt, Artificial Sequence
  Description of Artificial Sequence: Synthetic oligonucleotide
  Antisense strand to SEQ ID NO: 2051264
uuucaccaucuggaaucag

SEQ ID NO: 2051266 - RNA, 19 nt, Artificial Sequence
  Description of Artificial Sequence: Synthetic oligonucleotide
  Sense strand starting at position 3296 of SEQ ID NO: 1881524
aguagaucccagugaaagc

SEQ ID NO: 2051267 - RNA, 19 nt, Artificial Sequence
  Description of Artificial Sequence: Synthetic oligonucleotide
  Antisense strand to SEQ ID NO: 2051266
gcuuucacugggaucuacu

SEQ ID NO: 2051268 - RNA, 19 nt, Artificial Sequence
  Description of Artificial Sequence: Synthetic oligonucleotide
  Sense strand starting at position 3347 of SEQ ID NO: 1881524
cccacugguccauaucauu

SEQ ID NO: 2051269 - RNA, 19 nt, Artificial Sequence
  Description of Artificial Sequence: Synthetic oligonucleotide
  Antisense strand to SEQ ID NO: 2051268
aaugauauggaccaguggg

SEQ ID NO: 2051270 - RNA, 19 nt, Artificial Sequence
  Description of Artificial Sequence: Synthetic oligonucleotide
  Sense strand starting at position 3352 of SEQ ID NO: 1881524
ugguccauaucauuaucca

SEQ ID NO: 2051271 - RNA, 19 nt, Artificial Sequence
  Description of Artificial Sequence: Synthetic oligonucleotide
  Antisense strand to SEQ ID NO: 2051270
uggauaaugauauggacca

SEQ ID NO: 2051272 - RNA, 19 nt, Artificial Sequence
  Description of Artificial Sequence: Synthetic oligonucleotide
  Sense strand starting at position 3409 of SEQ ID NO: 1881524
ggcuacugccaggagacau

SEQ ID NO: 2051273 - RNA, 19 nt, Artificial Sequence
  Description of Artificial Sequence: Synthetic oligonucleotide
  Antisense strand to SEQ ID NO: 2051272
augucuccuggcaguagcc

SEQ ID NO: 2051274 - RNA, 19 nt, Artificial Sequence
  Description of Artificial Sequence: Synthetic oligonucleotide
  Sense strand starting at position 3546 of SEQ ID NO: 1881524
uguggauagugacuuucua

SEQ ID NO: 2051275 - RNA, 19 nt, Artificial Sequence
  Description of Artificial Sequence: Synthetic oligonucleotide
  Antisense strand to SEQ ID NO: 2051274
uagaaagucacuauccaca

SEQ ID NO: 2051276 - RNA, 19 nt, Artificial Sequence
  Description of Artificial Sequence: Synthetic oligonucleotide
  Sense strand starting at position 3570 of SEQ ID NO: 1881524
uuaugacucucugagauuu

SEQ ID NO: 2051277 - RNA, 19 nt, Artificial Sequence
  Description of Artificial Sequence: Synthetic oligonucleotide
  Antisense strand to SEQ ID NO: 2051276
aaaucucagagagucauaa

SEQ ID NO: 2051278 - RNA, 19 nt, Artificial Sequence
  Description of Artificial Sequence: Synthetic oligonucleotide
  Sense strand starting at position 211 of SEQ ID NO: 1881525
aagggagaguugucucuaa

SEQ ID NO: 2051279 - RNA, 19 nt, Artificial Sequence
  Description of Artificial Sequence: Synthetic oligonucleotide
  Antisense strand to SEQ ID NO: 2051278
uuagagacaacucucccuu

SEQ ID NO: 2051280 - RNA, 19 nt, Artificial Sequence
  Description of Artificial Sequence: Synthetic oligonucleotide
  Sense strand starting at position 348 of SEQ ID NO: 1881525
aguuccuucugaguugaaa

SEQ ID NO: 2051281 - RNA, 19 nt, Artificial Sequence
  Description of Artificial Sequence: Synthetic oligonucleotide
  Antisense strand to SEQ ID NO: 2051280
uuucaacucagaaggaacu

SEQ ID NO: 2051282 - RNA, 19 nt, Artificial Sequence
  Description of Artificial Sequence: Synthetic oligonucleotide
  Sense strand starting at position 381 of SEQ ID NO: 1881525
uagcaaugacagugagaau

SEQ ID NO: 2051283 - RNA, 19 nt, Artificial Sequence
  Description of Artificial Sequence: Synthetic oligonucleotide
  Antisense strand to SEQ ID NO: 2051282
auucucacugucauugcua

SEQ ID NO: 2051284 - RNA, 19 nt, Artificial Sequence
  Description of Artificial Sequence: Synthetic oligonucleotide
  Sense strand starting at position 420 of SEQ ID NO: 1881525
agcacuauauguccaggau

SEQ ID NO: 2051285 - RNA, 19 nt, Artificial Sequence
  Description of Artificial Sequence: Synthetic oligonucleotide
  Antisense strand to SEQ ID NO: 2051284
auccuggacauauagugcu

SEQ ID NO: 2051286 - RNA, 19 nt, Artificial Sequence
  Description of Artificial Sequence: Synthetic oligonucleotide
  Sense strand starting at position 421 of SEQ ID NO: 1881525
gcacuauauguccaggauu

SEQ ID NO: 2051287 - RNA, 19 nt, Artificial Sequence
  Description of Artificial Sequence: Synthetic oligonucleotide
  Antisense strand to SEQ ID NO: 2051286
aauccuggacauauagugc

SEQ ID NO: 2051288 - RNA, 19 nt, Artificial Sequence
  Description of Artificial Sequence: Synthetic oligonucleotide
  Sense strand starting at position 467 of SEQ ID NO: 1881525
cugguagugguuuauaaug

SEQ ID NO: 2051289 - RNA, 19 nt, Artificial Sequence
  Description of Artificial Sequence: Synthetic oligonucleotide
  Antisense strand to SEQ ID NO: 2051288
cauuauaaaccacuaccag

SEQ ID NO: 2051290 - RNA, 19 nt, Artificial Sequence
  Description of Artificial Sequence: Synthetic oligonucleotide
  Sense strand starting at position 574 of SEQ ID NO: 1881525
gugauaggccgcagaaguu

SEQ ID NO: 2051291 - RNA, 19 nt, Artificial Sequence
  Description of Artificial Sequence: Synthetic oligonucleotide
  Antisense strand to SEQ ID NO: 2051290
aacuucugcggccuaucac

SEQ ID NO: 2051292 - RNA, 19 nt, Artificial Sequence
  Description of Artificial Sequence: Synthetic oligonucleotide
  Sense strand starting at position 628 of SEQ ID NO: 1881525
guuacaacuggucauucuu

SEQ ID NO: 2051293 - RNA, 19 nt, Artificial Sequence
  Description of Artificial Sequence: Synthetic oligonucleotide
  Antisense strand to SEQ ID NO: 2051292
aagaaugaccaguuguaac

SEQ ID NO: 2051294 - RNA, 19 nt, Artificial Sequence
  Description of Artificial Sequence: Synthetic oligonucleotide
  Sense strand starting at position 727 of SEQ ID NO: 1881525
ggcgauggauuuccuggua

SEQ ID NO: 2051295 - RNA, 19 nt, Artificial Sequence
  Description of Artificial Sequence: Synthetic oligonucleotide
  Antisense strand to SEQ ID NO: 2051294
uaccaggaaauccaucgcc

SEQ ID NO: 2051296 - RNA, 19 nt, Artificial Sequence
  Description of Artificial Sequence: Synthetic oligonucleotide
  Sense strand starting at position 900 of SEQ ID NO: 1881525
gggcuacuucuacagguuu

SEQ ID NO: 2051297 - RNA, 19 nt, Artificial Sequence
  Description of Artificial Sequence: Synthetic oligonucleotide
  Antisense strand to SEQ ID NO: 2051296
aaaccuguagaaguagccc

SEQ ID NO: 2051298 - RNA, 19 nt, Artificial Sequence
  Description of Artificial Sequence: Synthetic oligonucleotide
  Sense strand starting at position 948 of SEQ ID NO: 1881525
agcugaauguguccaggaa

SEQ ID NO: 2051299 - RNA, 19 nt, Artificial Sequence
  Description of Artificial Sequence: Synthetic oligonucleotide
  Antisense strand to SEQ ID NO: 2051298
uuccuggacacauucagcu

SEQ ID NO: 2051300 - RNA, 19 nt, Artificial Sequence
  Description of Artificial Sequence: Synthetic oligonucleotide
  Sense strand starting at position 949 of SEQ ID NO: 1881525
gcugaauguguccaggaag

SEQ ID NO: 2051301 - RNA, 19 nt, Artificial Sequence
  Description of Artificial Sequence: Synthetic oligonucleotide
  Antisense strand to SEQ ID NO: 2051300
cuuccuggacacauucagc

SEQ ID NO: 2051302 - RNA, 19 nt, Artificial Sequence
  Description of Artificial Sequence: Synthetic oligonucleotide
  Sense strand starting at position 952 of SEQ ID NO: 1881525
gaauguguccaggaagugu

SEQ ID NO: 2051303 - RNA, 19 nt, Artificial Sequence
  Description of Artificial Sequence: Synthetic oligonucleotide
  Antisense strand to SEQ ID NO: 2051302
acacuuccuggacacauuc

SEQ ID NO: 2051304 - RNA, 19 nt, Artificial Sequence
  Description of Artificial Sequence: Synthetic oligonucleotide
  Sense strand starting at position 971 of SEQ ID NO: 1881525
cccagugagcaugaaauca

SEQ ID NO: 2051305 - RNA, 19 nt, Artificial Sequence
  Description of Artificial Sequence: Synthetic oligonucleotide
  Antisense strand to SEQ ID NO: 2051304
ugauuucaugcucacuggg

SEQ ID NO: 2051306 - RNA, 19 nt, Artificial Sequence
  Description of Artificial Sequence: Synthetic oligonucleotide
  Sense strand starting at position 1155 of SEQ ID NO: 1881525
guauaaagugcucagaaca

SEQ ID NO: 2051307 - RNA, 19 nt, Artificial Sequence
  Description of Artificial Sequence: Synthetic oligonucleotide
  Antisense strand to SEQ ID NO: 2051306
uguucugagcacuuuauac

SEQ ID NO: 2051308 - RNA, 19 nt, Artificial Sequence
  Description of Artificial Sequence: Synthetic oligonucleotide
  Sense strand starting at position 1350 of SEQ ID NO: 1881525
accugagaaggcuaauugu

SEQ ID NO: 2051309 - RNA, 19 nt, Artificial Sequence
  Description of Artificial Sequence: Synthetic oligonucleotide
  Antisense strand to SEQ ID NO: 2051308
acaauuagccuucucaggu

SEQ ID NO: 2051310 - RNA, 19 nt, Artificial Sequence
  Description of Artificial Sequence: Synthetic oligonucleotide
  Sense strand starting at position 1353 of SEQ ID NO: 1881525
ugagaaggcuaauugugua

SEQ ID NO: 2051311 - RNA, 19 nt, Artificial Sequence
  Description of Artificial Sequence: Synthetic oligonucleotide
  Antisense strand to SEQ ID NO: 2051310
uacacaauuagccuucuca

SEQ ID NO: 2051312 - RNA, 19 nt, Artificial Sequence
  Description of Artificial Sequence: Synthetic oligonucleotide
  Sense strand starting at position 1390 of SEQ ID NO: 1881525
uacacuauaccugggaguu

SEQ ID NO: 2051313 - RNA, 19 nt, Artificial Sequence
  Description of Artificial Sequence: Synthetic oligonucleotide
  Antisense strand to SEQ ID NO: 2051312
aacucccagguauagugua

SEQ ID NO: 2051314 - RNA, 19 nt, Artificial Sequence
  Description of Artificial Sequence: Synthetic oligonucleotide
  Sense strand starting at position 1391 of SEQ ID NO: 1881525
acacuauaccugggaguua

SEQ ID NO: 2051315 - RNA, 19 nt, Artificial Sequence
  Description of Artificial Sequence: Synthetic oligonucleotide
  Antisense strand to SEQ ID NO: 2051314
uaacucccagguauagugu

SEQ ID NO: 2051316 - RNA, 19 nt, Artificial Sequence
  Description of Artificial Sequence: Synthetic oligonucleotide
  Sense strand starting at position 1402 of SEQ ID NO: 1881525
gggaguuagcuccacuccu

SEQ ID NO: 2051317 - RNA, 19 nt, Artificial Sequence
  Description of Artificial Sequence: Synthetic oligonucleotide
  Antisense strand to SEQ ID NO: 2051316
aggaguggagcuaacuccc

SEQ ID NO: 2051318 - RNA, 19 nt, Artificial Sequence
  Description of Artificial Sequence: Synthetic oligonucleotide
  Sense strand starting at position 1409 of SEQ ID NO: 1881525
agcuccacuccuggauuaa

SEQ ID NO: 2051319 - RNA, 19 nt, Artificial Sequence
  Description of Artificial Sequence: Synthetic oligonucleotide
  Antisense strand to SEQ ID NO: 2051318
uuaauccaggaguggagcu

SEQ ID NO: 2051320 - RNA, 19 nt, Artificial Sequence
  Description of Artificial Sequence: Synthetic oligonucleotide
  Sense strand starting at position 1484 of SEQ ID NO: 1881525
gaugacuguguguauguga

SEQ ID NO: 2051321 - RNA, 19 nt, Artificial Sequence
  Description of Artificial Sequence: Synthetic oligonucleotide
  Antisense strand to SEQ ID NO: 2051320
ucacauacacacagucauc

SEQ ID NO: 2051322 - RNA, 19 nt, Artificial Sequence
  Description of Artificial Sequence: Synthetic oligonucleotide
  Sense strand starting at position 1532 of SEQ ID NO: 1881525
ggcuguucggugaagcuuu

SEQ ID NO: 2051323 - RNA, 19 nt, Artificial Sequence
  Description of Artificial Sequence: Synthetic oligonucleotide
  Antisense strand to SEQ ID NO: 2051322
aaagcuucaccgaacagcc

SEQ ID NO: 2051324 - RNA, 19 nt, Artificial Sequence
  Description of Artificial Sequence: Synthetic oligonucleotide
  Sense strand starting at position 1753 of SEQ ID NO: 1881525
ggccuuugugugagugaug

SEQ ID NO: 2051325 - RNA, 19 nt, Artificial Sequence
  Description of Artificial Sequence: Synthetic oligonucleotide
  Antisense strand to SEQ ID NO: 2051324
caucacucacacaaaggcc

SEQ ID NO: 2051326 - RNA, 19 nt, Artificial Sequence
  Description of Artificial Sequence: Synthetic oligonucleotide
  Sense strand starting at position 1764 of SEQ ID NO: 1881525
gagugauguuucucaauua

SEQ ID NO: 2051327 - RNA, 19 nt, Artificial Sequence
  Description of Artificial Sequence: Synthetic oligonucleotide
  Antisense strand to SEQ ID NO: 2051326
uaauugagaaacaucacuc

SEQ ID NO: 2051328 - RNA, 19 nt, Artificial Sequence
  Description of Artificial Sequence: Synthetic oligonucleotide
  Sense strand starting at position 1808 of SEQ ID NO: 1881525
ccugaaacaccugagugua

SEQ ID NO: 2051329 - RNA, 19 nt, Artificial Sequence
  Description of Artificial Sequence: Synthetic oligonucleotide
  Antisense strand to SEQ ID NO: 2051328
uacacucagguguuucagg

SEQ ID NO: 2051330 - RNA, 19 nt, Artificial Sequence
  Description of Artificial Sequence: Synthetic oligonucleotide
  Sense strand starting at position 1810 of SEQ ID NO: 1881525
ugaaacaccugaguguaaa

SEQ ID NO: 2051331 - RNA, 19 nt, Artificial Sequence
  Description of Artificial Sequence: Synthetic oligonucleotide
  Antisense strand to SEQ ID NO: 2051330
uuuacacucagguguuuca

SEQ ID NO: 2051332 - RNA, 19 nt, Artificial Sequence
  Description of Artificial Sequence: Synthetic oligonucleotide
  Sense strand starting at position 2106 of SEQ ID NO: 1881525
uugcuuugcgagcuauuga

SEQ ID NO: 2051333 - RNA, 19 nt, Artificial Sequence
  Description of Artificial Sequence: Synthetic oligonucleotide
  Antisense strand to SEQ ID NO: 2051332
ucaauagcucgcaaagcaa

SEQ ID NO: 2051334 - RNA, 19 nt, Artificial Sequence
  Description of Artificial Sequence: Synthetic oligonucleotide
  Sense strand starting at position 2230 of SEQ ID NO: 1881525
accucuagguaguccaaua

SEQ ID NO: 2051335 - RNA, 19 nt, Artificial Sequence
  Description of Artificial Sequence: Synthetic oligonucleotide
  Antisense strand to SEQ ID NO: 2051334
uauuggacuaccuagaggu

SEQ ID NO: 2051336 - RNA, 19 nt, Artificial Sequence
  Description of Artificial Sequence: Synthetic oligonucleotide
  Sense strand starting at position 2482 of SEQ ID NO: 1881525
gaugaugggagauguuuac

SEQ ID NO: 2051337 - RNA, 19 nt, Artificial Sequence
  Description of Artificial Sequence: Synthetic oligonucleotide
  Antisense strand to SEQ ID NO: 2051336
guaaacaucucccaucauc

SEQ ID NO: 2051338 - RNA, 19 nt, Artificial Sequence
  Description of Artificial Sequence: Synthetic oligonucleotide
  Sense strand starting at position 2638 of SEQ ID NO: 1881525
ccacgcuugggacagaaau

SEQ ID NO: 2051339 - RNA, 19 nt, Artificial Sequence
  Description of Artificial Sequence: Synthetic oligonucleotide
  Antisense strand to SEQ ID NO: 2051338
auuucugucccaagcgugg

SEQ ID NO: 2051340 - RNA, 19 nt, Artificial Sequence
  Description of Artificial Sequence: Synthetic oligonucleotide
  Sense strand starting at position 2650 of SEQ ID NO: 1881525
cagaaauaacucugacguc

SEQ ID NO: 2051341 - RNA, 19 nt, Artificial Sequence
  Description of Artificial Sequence: Synthetic oligonucleotide
  Antisense strand to SEQ ID NO: 2051340
gacgucagaguuauuucug

SEQ ID NO: 2051342 - RNA, 19 nt, Artificial Sequence
  Description of Artificial Sequence: Synthetic oligonucleotide
  Sense strand starting at position 2676 of SEQ ID NO: 1881525
uggcuauaucagcagacaa

SEQ ID NO: 2051343 - RNA, 19 nt, Artificial Sequence
  Description of Artificial Sequence: Synthetic oligonucleotide
  Antisense strand to SEQ ID NO: 2051342
uugucugcugauauagcca

SEQ ID NO: 2051344 - RNA, 19 nt, Artificial Sequence
  Description of Artificial Sequence: Synthetic oligonucleotide
  Sense strand starting at position 2678 of SEQ ID NO: 1881525
gcuauaucagcagacaaca

SEQ ID NO: 2051345 - RNA, 19 nt, Artificial Sequence
  Description of Artificial Sequence: Synthetic oligonucleotide
  Antisense strand to SEQ ID NO: 2051344
uguugucugcugauauagc

SEQ ID NO: 2051346 - RNA, 19 nt, Artificial Sequence
  Description of Artificial Sequence: Synthetic oligonucleotide
  Sense strand starting at position 2826 of SEQ ID NO: 1881525
uugcaaauuccugaauaug

SEQ ID NO: 2051347 - RNA, 19 nt, Artificial Sequence
  Description of Artificial Sequence: Synthetic oligonucleotide
  Antisense strand to SEQ ID NO: 2051346
cauauucaggaauuugcaa

SEQ ID NO: 2051348 - RNA, 19 nt, Artificial Sequence
  Description of Artificial Sequence: Synthetic oligonucleotide
  Sense strand starting at position 3030 of SEQ ID NO: 1881525
cucagauauuucuaagaag

SEQ ID NO: 2051349 - RNA, 19 nt, Artificial Sequence
  Description of Artificial Sequence: Synthetic oligonucleotide
  Antisense strand to SEQ ID NO: 2051348
cuucuuagaaauaucugag

SEQ ID NO: 2051350 - RNA, 19 nt, Artificial Sequence
  Description of Artificial Sequence: Synthetic oligonucleotide
  Sense strand starting at position 3033 of SEQ ID NO: 1881525
agauauuucuaagaaguuc

SEQ ID NO: 2051351 - RNA, 19 nt, Artificial Sequence
  Description of Artificial Sequence: Synthetic oligonucleotide
  Antisense strand to SEQ ID NO: 2051350
gaacuucuuagaaauaucu

SEQ ID NO: 2051352 - RNA, 19 nt, Artificial Sequence
  Description of Artificial Sequence: Synthetic oligonucleotide
  Sense strand starting at position 3122 of SEQ ID NO: 1881525
cuccuuugugggcagauau

SEQ ID NO: 2051353 - RNA, 19 nt, Artificial Sequence
  Description of Artificial Sequence: Synthetic oligonucleotide
  Antisense strand to SEQ ID NO: 2051352
auaucugcccacaaaggag

SEQ ID NO: 2051354 - RNA, 19 nt, Artificial Sequence
  Description of Artificial Sequence: Synthetic oligonucleotide
  Sense strand starting at position 3207 of SEQ ID NO: 1881525
cgugcugugcucaggaaag

SEQ ID NO: 2051355 - RNA, 19 nt, Artificial Sequence
  Description of Artificial Sequence: Synthetic oligonucleotide
  Antisense strand to SEQ ID NO: 2051354
cuuuccugagcacagcacg

SEQ ID NO: 2051356 - RNA, 19 nt, Artificial Sequence
  Description of Artificial Sequence: Synthetic oligonucleotide
  Sense strand starting at position 3242 of SEQ ID NO: 1881525
ggcaaauugcucuaacuga

SEQ ID NO: 2051357 - RNA, 19 nt, Artificial Sequence
  Description of Artificial Sequence: Synthetic oligonucleotide
  Antisense strand to SEQ ID NO: 2051356
ucaguuagagcaauuugcc

SEQ ID NO: 2051358 - RNA, 19 nt, Artificial Sequence
  Description of Artificial Sequence: Synthetic oligonucleotide
  Sense strand starting at position 38 of SEQ ID NO: 1881526
ggucaauugucuccucucu

SEQ ID NO: 2051359 - RNA, 19 nt, Artificial Sequence
  Description of Artificial Sequence: Synthetic oligonucleotide
  Antisense strand to SEQ ID NO: 2051358
agagaggagacaauugacc

SEQ ID NO: 2051360 - RNA, 19 nt, Artificial Sequence
  Description of Artificial Sequence: Synthetic oligonucleotide
  Sense strand starting at position 96 of SEQ ID NO: 1881526
ggauauuacuaggccuuga

SEQ ID NO: 2051361 - RNA, 19 nt, Artificial Sequence
  Description of Artificial Sequence: Synthetic oligonucleotide
  Antisense strand to SEQ ID NO: 2051360
ucaaggccuaguaauaucc

SEQ ID NO: 2051362 - RNA, 19 nt, Artificial Sequence
  Description of Artificial Sequence: Synthetic oligonucleotide
  Sense strand starting at position 207 of SEQ ID NO: 1881526
agcaaagacucaucgauau

SEQ ID NO: 2051363 - RNA, 19 nt, Artificial Sequence
  Description of Artificial Sequence: Synthetic oligonucleotide
  Antisense strand to SEQ ID NO: 2051362
auaucgaugagucuuugcu

SEQ ID NO: 2051364 - RNA, 19 nt, Artificial Sequence
  Description of Artificial Sequence: Synthetic oligonucleotide
  Sense strand starting at position 232 of SEQ ID NO: 1881526
agcccugugcauuauaauc

SEQ ID NO: 2051365 - RNA, 19 nt, Artificial Sequence
  Description of Artificial Sequence: Synthetic oligonucleotide
  Antisense strand to SEQ ID NO: 2051364
gauuauaaugcacagggcu

SEQ ID NO: 2051366 - RNA, 19 nt, Artificial Sequence
  Description of Artificial Sequence: Synthetic oligonucleotide
  Sense strand starting at position 237 of SEQ ID NO: 1881526
ugugcauuauaauccaaug

SEQ ID NO: 2051367 - RNA, 19 nt, Artificial Sequence
  Description of Artificial Sequence: Synthetic oligonucleotide
  Antisense strand to SEQ ID NO: 2051366
cauuggauuauaaugcaca

SEQ ID NO: 2051368 - RNA, 19 nt, Artificial Sequence
  Description of Artificial Sequence: Synthetic oligonucleotide
  Sense strand starting at position 545 of SEQ ID NO: 1881526
uggucagacugguuuccaa

SEQ ID NO: 2051369 - RNA, 19 nt, Artificial Sequence
  Description of Artificial Sequence: Synthetic oligonucleotide
  Antisense strand to SEQ ID NO: 2051368
uuggaaaccagucugacca

SEQ ID NO: 2051370 - RNA, 19 nt, Artificial Sequence
  Description of Artificial Sequence: Synthetic oligonucleotide
  Sense strand starting at position 690 of SEQ ID NO: 1881526
gccaguccuaggugaauuu

SEQ ID NO: 2051371 - RNA, 19 nt, Artificial Sequence
  Description of Artificial Sequence: Synthetic oligonucleotide
  Antisense strand to SEQ ID NO: 2051370
aaauucaccuaggacuggc

SEQ ID NO: 2051372 - RNA, 19 nt, Artificial Sequence
  Description of Artificial Sequence: Synthetic oligonucleotide
  Sense strand starting at position 730 of SEQ ID NO: 1881526
uuguuuaccucugcucaca

SEQ ID NO: 2051373 - RNA, 19 nt, Artificial Sequence
  Description of Artificial Sequence: Synthetic oligonucleotide
  Antisense strand to SEQ ID NO: 2051372
ugugagcagagguaaacaa

SEQ ID NO: 2051374 - RNA, 19 nt, Artificial Sequence
  Description of Artificial Sequence: Synthetic oligonucleotide
  Sense strand starting at position 821 of SEQ ID NO: 1881526
uguugaagacgccauguaa

SEQ ID NO: 2051375 - RNA, 19 nt, Artificial Sequence
  Description of Artificial Sequence: Synthetic oligonucleotide
  Antisense strand to SEQ ID NO: 2051374
uuacauggcgucuucaaca

SEQ ID NO: 2051376 - RNA, 19 nt, Artificial Sequence
  Description of Artificial Sequence: Synthetic oligonucleotide
  Sense strand starting at position 830 of SEQ ID NO: 1881526
cgccauguaagcuggaauu

SEQ ID NO: 2051377 - RNA, 19 nt, Artificial Sequence
  Description of Artificial Sequence: Synthetic oligonucleotide
  Antisense strand to SEQ ID NO: 2051376
aauuccagcuuacauggcg

SEQ ID NO: 2051378 - RNA, 19 nt, Artificial Sequence
  Description of Artificial Sequence: Synthetic oligonucleotide
  Sense strand starting at position 861 of SEQ ID NO: 1881526
uuugaacaacugugugaaa

SEQ ID NO: 2051379 - RNA, 19 nt, Artificial Sequence
  Description of Artificial Sequence: Synthetic oligonucleotide
  Antisense strand to SEQ ID NO: 2051378
uuucacacaguuguucaaa

SEQ ID NO: 2051380 - RNA, 19 nt, Artificial Sequence
  Description of Artificial Sequence: Synthetic oligonucleotide
  Sense strand starting at position 862 of SEQ ID NO: 1881526
uugaacaacugugugaaau

SEQ ID NO: 2051381 - RNA, 19 nt, Artificial Sequence
  Description of Artificial Sequence: Synthetic oligonucleotide
  Antisense strand to SEQ ID NO: 2051380
auuucacacaguuguucaa

SEQ ID NO: 2051382 - RNA, 19 nt, Artificial Sequence
  Description of Artificial Sequence: Synthetic oligonucleotide
  Sense strand starting at position 863 of SEQ ID NO: 1881526
ugaacaacugugugaaaua

SEQ ID NO: 2051383 - RNA, 19 nt, Artificial Sequence
  Description of Artificial Sequence: Synthetic oligonucleotide
  Antisense strand to SEQ ID NO: 2051382
uauuucacacaguuguuca

SEQ ID NO: 2051384 - RNA, 19 nt, Artificial Sequence
  Description of Artificial Sequence: Synthetic oligonucleotide
  Sense strand starting at position 864 of SEQ ID NO: 1881526
gaacaacugugugaaauaa

SEQ ID NO: 2051385 - RNA, 19 nt, Artificial Sequence
  Description of Artificial Sequence: Synthetic oligonucleotide
  Antisense strand to SEQ ID NO: 2051384
uuauuucacacaguuguuc

SEQ ID NO: 2051386 - RNA, 19 nt, Artificial Sequence
  Description of Artificial Sequence: Synthetic oligonucleotide
  Sense strand starting at position 872 of SEQ ID NO: 1881526
gugugaaauaaucgugcua

SEQ ID NO: 2051387 - RNA, 19 nt, Artificial Sequence
  Description of Artificial Sequence: Synthetic oligonucleotide
  Antisense strand to SEQ ID NO: 2051386
uagcacgauuauuucacac

SEQ ID NO: 2051388 - RNA, 19 nt, Artificial Sequence
  Description of Artificial Sequence: Synthetic oligonucleotide
  Sense strand starting at position 895 of SEQ ID NO: 1881526
guuauucuccuuuaaucgu

SEQ ID NO: 2051389 - RNA, 19 nt, Artificial Sequence
  Description of Artificial Sequence: Synthetic oligonucleotide
  Antisense strand to SEQ ID NO: 2051388
acgauuaaaggagaauaac

SEQ ID NO: 2051390 - RNA, 19 nt, Artificial Sequence
  Description of Artificial Sequence: Synthetic oligonucleotide
  Sense strand starting at position 980 of SEQ ID NO: 1881526
agcuuuguuccugaggcaa

SEQ ID NO: 2051391 - RNA, 19 nt, Artificial Sequence
  Description of Artificial Sequence: Synthetic oligonucleotide
  Antisense strand to SEQ ID NO: 2051390
uugccucaggaacaaagcu

SEQ ID NO: 2051392 - RNA, 19 nt, Artificial Sequence
  Description of Artificial Sequence: Synthetic oligonucleotide
  Sense strand starting at position 1015 of SEQ ID NO: 1881526
ugcuuuccucagugagcaa

SEQ ID NO: 2051393 - RNA, 19 nt, Artificial Sequence
  Description of Artificial Sequence: Synthetic oligonucleotide
  Antisense strand to SEQ ID NO: 2051392
uugcucacugaggaaagca

SEQ ID NO: 2051394 - RNA, 19 nt, Artificial Sequence
  Description of Artificial Sequence: Synthetic oligonucleotide
  Sense strand starting at position 1119 of SEQ ID NO: 1881526
aagucauucuggcucuaag

SEQ ID NO: 2051395 - RNA, 19 nt, Artificial Sequence
  Description of Artificial Sequence: Synthetic oligonucleotide
  Antisense strand to SEQ ID NO: 2051394
cuuagagccagaaugacuu

SEQ ID NO: 2051396 - RNA, 19 nt, Artificial Sequence
  Description of Artificial Sequence: Synthetic oligonucleotide
  Sense strand starting at position 1195 of SEQ ID NO: 1881526
ggcuuuauaggaugaguca

SEQ ID NO: 2051397 - RNA, 19 nt, Artificial Sequence
  Description of Artificial Sequence: Synthetic oligonucleotide
  Antisense strand to SEQ ID NO: 2051396
ugacucauccuauaaagcc

SEQ ID NO: 2051398 - RNA, 19 nt, Artificial Sequence
  Description of Artificial Sequence: Synthetic oligonucleotide
  Sense strand starting at position 1198 of SEQ ID NO: 1881526
uuuauaggaugagucacaa

SEQ ID NO: 2051399 - RNA, 19 nt, Artificial Sequence
  Description of Artificial Sequence: Synthetic oligonucleotide
  Antisense strand to SEQ ID NO: 2051398
uugugacucauccuauaaa

SEQ ID NO: 2051400 - RNA, 19 nt, Artificial Sequence
  Description of Artificial Sequence: Synthetic oligonucleotide
  Sense strand starting at position 1202 of SEQ ID NO: 1881526
uaggaugagucacaagaaa

SEQ ID NO: 2051401 - RNA, 19 nt, Artificial Sequence
  Description of Artificial Sequence: Synthetic oligonucleotide
  Antisense strand to SEQ ID NO: 2051400
uuucuugugacucauccua

SEQ ID NO: 2051402 - RNA, 19 nt, Artificial Sequence
  Description of Artificial Sequence: Synthetic oligonucleotide
  Sense strand starting at position 1911 of SEQ ID NO: 1881526
cgcacuuaguuaccugaga

SEQ ID NO: 2051403 - RNA, 19 nt, Artificial Sequence
  Description of Artificial Sequence: Synthetic oligonucleotide
  Antisense strand to SEQ ID NO: 2051402
ucucagguaacuaagugcg

SEQ ID NO: 2051404 - RNA, 19 nt, Artificial Sequence
  Description of Artificial Sequence: Synthetic oligonucleotide
  Sense strand starting at position 1912 of SEQ ID NO: 1881526
gcacuuaguuaccugagaa

SEQ ID NO: 2051405 - RNA, 19 nt, Artificial Sequence
  Description of Artificial Sequence: Synthetic oligonucleotide
  Antisense strand to SEQ ID NO: 2051404
uucucagguaacuaagugc

SEQ ID NO: 2051406 - RNA, 19 nt, Artificial Sequence
  Description of Artificial Sequence: Synthetic oligonucleotide
  Sense strand starting at position 2395 of SEQ ID NO: 1881526
cgcuguguucaagauacag

SEQ ID NO: 2051407 - RNA, 19 nt, Artificial Sequence
  Description of Artificial Sequence: Synthetic oligonucleotide
  Antisense strand to SEQ ID NO: 2051406
cuguaucuugaacacagcg

SEQ ID NO: 2051408 - RNA, 19 nt, Artificial Sequence
  Description of Artificial Sequence: Synthetic oligonucleotide
  Sense strand starting at position 3410 of SEQ ID NO: 1881526
gugcaaagacacugaguuu

SEQ ID NO: 2051409 - RNA, 19 nt, Artificial Sequence
  Description of Artificial Sequence: Synthetic oligonucleotide
  Antisense strand to SEQ ID NO: 2051408
aaacucagugucuuugcac

SEQ ID NO: 2051410 - RNA, 19 nt, Artificial Sequence
  Description of Artificial Sequence: Synthetic oligonucleotide
  Sense strand starting at position 3421 of SEQ ID NO: 1881526
cugaguuucuguuccagga

SEQ ID NO: 2051411 - RNA, 19 nt, Artificial Sequence
  Description of Artificial Sequence: Synthetic oligonucleotide
  Antisense strand to SEQ ID NO: 2051410
uccuggaacagaaacucag

SEQ ID NO: 2051412 - RNA, 19 nt, Artificial Sequence
  Description of Artificial Sequence: Synthetic oligonucleotide
  Sense strand starting at position 3425 of SEQ ID NO: 1881526
guuucuguuccaggaggaa

SEQ ID NO: 2051413 - RNA, 19 nt, Artificial Sequence
  Description of Artificial Sequence: Synthetic oligonucleotide
  Antisense strand to SEQ ID NO: 2051412
uuccuccuggaacagaaac

SEQ ID NO: 2051414 - RNA, 19 nt, Artificial Sequence
  Description of Artificial Sequence: Synthetic oligonucleotide
  Sense strand starting at position 3463 of SEQ ID NO: 1881526
gagagaucacccugggcaa

SEQ ID NO: 2051415 - RNA, 19 nt, Artificial Sequence
  Description of Artificial Sequence: Synthetic oligonucleotide
  Antisense strand to SEQ ID NO: 2051414
uugcccagggugaucucuc

SEQ ID NO: 2051416 - RNA, 19 nt, Artificial Sequence
  Description of Artificial Sequence: Synthetic oligonucleotide
  Sense strand starting at position 3465 of SEQ ID NO: 1881526
gagaucacccugggcaauu

SEQ ID NO: 2051417 - RNA, 19 nt, Artificial Sequence
  Description of Artificial Sequence: Synthetic oligonucleotide
  Antisense strand to SEQ ID NO: 2051416
aauugcccagggugaucuc

SEQ ID NO: 2051418 - RNA, 19 nt, Artificial Sequence
  Description of Artificial Sequence: Synthetic oligonucleotide
  Sense strand starting at position 3706 of SEQ ID NO: 1881526
acaugcugcucccuagaga

SEQ ID NO: 2051419 - RNA, 19 nt, Artificial Sequence
  Description of Artificial Sequence: Synthetic oligonucleotide
  Antisense strand to SEQ ID NO: 2051418
ucucuagggagcagcaugu

SEQ ID NO: 2051420 - RNA, 19 nt, Artificial Sequence
  Description of Artificial Sequence: Synthetic oligonucleotide
  Sense strand starting at position 3749 of SEQ ID NO: 1881526
guggucaaacuuuaguuaa

SEQ ID NO: 2051421 - RNA, 19 nt, Artificial Sequence
  Description of Artificial Sequence: Synthetic oligonucleotide
  Antisense strand to SEQ ID NO: 2051420
uuaacuaaaguuugaccac

SEQ ID NO: 2051422 - RNA, 19 nt, Artificial Sequence
  Description of Artificial Sequence: Synthetic oligonucleotide
  Sense strand starting at position 3751 of SEQ ID NO: 1881526
ggucaaacuuuaguuaacu

SEQ ID NO: 2051423 - RNA, 19 nt, Artificial Sequence
  Description of Artificial Sequence: Synthetic oligonucleotide
  Antisense strand to SEQ ID NO: 2051422
aguuaacuaaaguuugacc

SEQ ID NO: 2051424 - RNA, 19 nt, Artificial Sequence
  Description of Artificial Sequence: Synthetic oligonucleotide
  Sense strand starting at position 3752 of SEQ ID NO: 1881526
gucaaacuuuaguuaacuu

SEQ ID NO: 2051425 - RNA, 19 nt, Artificial Sequence
  Description of Artificial Sequence: Synthetic oligonucleotide
  Antisense strand to SEQ ID NO: 2051424
aaguuaacuaaaguuugac

SEQ ID NO: 2051426 - RNA, 19 nt, Artificial Sequence
  Description of Artificial Sequence: Synthetic oligonucleotide
  Sense strand starting at position 3768 of SEQ ID NO: 1881526
cuuccugaaucuucuggua

SEQ ID NO: 2051427 - RNA, 19 nt, Artificial Sequence
  Description of Artificial Sequence: Synthetic oligonucleotide
  Antisense strand to SEQ ID NO: 2051426
uaccagaagauucaggaag

SEQ ID NO: 2051428 - RNA, 19 nt, Artificial Sequence
  Description of Artificial Sequence: Synthetic oligonucleotide
  Sense strand starting at position 3794 of SEQ ID NO: 1881526
uggcccacuuccuuguaaa

SEQ ID NO: 2051429 - RNA, 19 nt, Artificial Sequence
  Description of Artificial Sequence: Synthetic oligonucleotide
  Antisense strand to SEQ ID NO: 2051428
uuuacaaggaagugggcca

SEQ ID NO: 2051430 - RNA, 19 nt, Artificial Sequence
  Description of Artificial Sequence: Synthetic oligonucleotide
  Sense strand starting at position 3900 of SEQ ID NO: 1881526
cccuaugggucugucugau

SEQ ID NO: 2051431 - RNA, 19 nt, Artificial Sequence
  Description of Artificial Sequence: Synthetic oligonucleotide
  Antisense strand to SEQ ID NO: 2051430
aucagacagacccauaggg

SEQ ID NO: 2051432 - RNA, 19 nt, Artificial Sequence
  Description of Artificial Sequence: Synthetic oligonucleotide
  Sense strand starting at position 3977 of SEQ ID NO: 1881526
cccugauguuccucaguca

SEQ ID NO: 2051433 - RNA, 19 nt, Artificial Sequence
  Description of Artificial Sequence: Synthetic oligonucleotide
  Antisense strand to SEQ ID NO: 2051432
ugacugaggaacaucaggg

SEQ ID NO: 2051434 - RNA, 19 nt, Artificial Sequence
  Description of Artificial Sequence: Synthetic oligonucleotide
  Sense strand starting at position 3978 of SEQ ID NO: 1881526
ccugauguuccucagucau

SEQ ID NO: 2051435 - RNA, 19 nt, Artificial Sequence
  Description of Artificial Sequence: Synthetic oligonucleotide
  Antisense strand to SEQ ID NO: 2051434
augacugaggaacaucagg

SEQ ID NO: 2051436 - RNA, 19 nt, Artificial Sequence
  Description of Artificial Sequence: Synthetic oligonucleotide
  Sense strand starting at position 3980 of SEQ ID NO: 1881526
ugauguuccucagucauuu

SEQ ID NO: 2051437 - RNA, 19 nt, Artificial Sequence
  Description of Artificial Sequence: Synthetic oligonucleotide
  Antisense strand to SEQ ID NO: 2051436
aaaugacugaggaacauca

SEQ ID NO: 2051438 - RNA, 19 nt, Artificial Sequence
  Description of Artificial Sequence: Synthetic oligonucleotide
  Sense strand starting at position 68 of SEQ ID NO: 1881527
guuugcuuucugucacugu

SEQ ID NO: 2051439 - RNA, 19 nt, Artificial Sequence
  Description of Artificial Sequence: Synthetic oligonucleotide
  Antisense strand to SEQ ID NO: 2051438
acagugacagaaagcaaac

SEQ ID NO: 2051440 - RNA, 19 nt, Artificial Sequence
  Description of Artificial Sequence: Synthetic oligonucleotide
  Sense strand starting at position 178 of SEQ ID NO: 1881527
ugcgaauggucaguaaaga

SEQ ID NO: 2051441 - RNA, 19 nt, Artificial Sequence
  Description of Artificial Sequence: Synthetic oligonucleotide
  Antisense strand to SEQ ID NO: 2051440
ucuuuacugaccauucgca

SEQ ID NO: 2051442 - RNA, 19 nt, Artificial Sequence
  Description of Artificial Sequence: Synthetic oligonucleotide
  Sense strand starting at position 179 of SEQ ID NO: 1881527
gcgaauggucaguaaagaa

SEQ ID NO: 2051443 - RNA, 19 nt, Artificial Sequence
  Description of Artificial Sequence: Synthetic oligonucleotide
  Antisense strand to SEQ ID NO: 2051442
uucuuuacugaccauucgc

SEQ ID NO: 2051444 - RNA, 19 nt, Artificial Sequence
  Description of Artificial Sequence: Synthetic oligonucleotide
  Sense strand starting at position 335 of SEQ ID NO: 1881527
uagguucuguccuugagag

SEQ ID NO: 2051445 - RNA, 19 nt, Artificial Sequence
  Description of Artificial Sequence: Synthetic oligonucleotide
  Antisense strand to SEQ ID NO: 2051444
cucucaaggacagaaccua

SEQ ID NO: 2051446 - RNA, 19 nt, Artificial Sequence
  Description of Artificial Sequence: Synthetic oligonucleotide
  Sense strand starting at position 336 of SEQ ID NO: 1881527
agguucuguccuugagaga

SEQ ID NO: 2051447 - RNA, 19 nt, Artificial Sequence
  Description of Artificial Sequence: Synthetic oligonucleotide
  Antisense strand to SEQ ID NO: 2051446
ucucucaaggacagaaccu

SEQ ID NO: 2051448 - RNA, 19 nt, Artificial Sequence
  Description of Artificial Sequence: Synthetic oligonucleotide
  Sense strand starting at position 337 of SEQ ID NO: 1881527
gguucuguccuugagagag

SEQ ID NO: 2051449 - RNA, 19 nt, Artificial Sequence
  Description of Artificial Sequence: Synthetic oligonucleotide
  Antisense strand to SEQ ID NO: 2051448
cucucucaaggacagaacc

SEQ ID NO: 2051450 - RNA, 19 nt, Artificial Sequence
  Description of Artificial Sequence: Synthetic oligonucleotide
  Sense strand starting at position 438 of SEQ ID NO: 1881527
agccguauucccgcucaua

SEQ ID NO: 2051451 - RNA, 19 nt, Artificial Sequence
  Description of Artificial Sequence: Synthetic oligonucleotide
  Antisense strand to SEQ ID NO: 2051450
uaugagcgggaauacggcu

SEQ ID NO: 2051452 - RNA, 19 nt, Artificial Sequence
  Description of Artificial Sequence: Synthetic oligonucleotide
  Sense strand starting at position 439 of SEQ ID NO: 1881527
gccguauucccgcucauaa

SEQ ID NO: 2051453 - RNA, 19 nt, Artificial Sequence
  Description of Artificial Sequence: Synthetic oligonucleotide
  Antisense strand to SEQ ID NO: 2051452
uuaugagcgggaauacggc

SEQ ID NO: 2051454 - RNA, 19 nt, Artificial Sequence
  Description of Artificial Sequence: Synthetic oligonucleotide
  Sense strand starting at position 519 of SEQ ID NO: 1881527
gcgcccuuagcuuuccaga

SEQ ID NO: 2051455 - RNA, 19 nt, Artificial Sequence
  Description of Artificial Sequence: Synthetic oligonucleotide
  Antisense strand to SEQ ID NO: 2051454
ucuggaaagcuaagggcgc

SEQ ID NO: 2051456 - RNA, 19 nt, Artificial Sequence
  Description of Artificial Sequence: Synthetic oligonucleotide
  Sense strand starting at position 524 of SEQ ID NO: 1881527
cuuagcuuuccagagucuu

SEQ ID NO: 2051457 - RNA, 19 nt, Artificial Sequence
  Description of Artificial Sequence: Synthetic oligonucleotide
  Antisense strand to SEQ ID NO: 2051456
aagacucuggaaagcuaag

SEQ ID NO: 2051458 - RNA, 19 nt, Artificial Sequence
  Description of Artificial Sequence: Synthetic oligonucleotide
  Sense strand starting at position 722 of SEQ ID NO: 1881527
agaagaugcuccuuuacaa

SEQ ID NO: 2051459 - RNA, 19 nt, Artificial Sequence
  Description of Artificial Sequence: Synthetic oligonucleotide
  Antisense strand to SEQ ID NO: 2051458
uuguaaaggagcaucuucu

SEQ ID NO: 2051460 - RNA, 19 nt, Artificial Sequence
  Description of Artificial Sequence: Synthetic oligonucleotide
  Sense strand starting at position 861 of SEQ ID NO: 1881527
ggcggagaacucugaagga

SEQ ID NO: 2051461 - RNA, 19 nt, Artificial Sequence
  Description of Artificial Sequence: Synthetic oligonucleotide
  Antisense strand to SEQ ID NO: 2051460
uccuucagaguucuccgcc

SEQ ID NO: 2051462 - RNA, 19 nt, Artificial Sequence
  Description of Artificial Sequence: Synthetic oligonucleotide
  Sense strand starting at position 1265 of SEQ ID NO: 1881527
uuuagaaguguugagcaau

SEQ ID NO: 2051463 - RNA, 19 nt, Artificial Sequence
  Description of Artificial Sequence: Synthetic oligonucleotide
  Antisense strand to SEQ ID NO: 2051462
auugcucaacacuucuaaa

SEQ ID NO: 2051464 - RNA, 19 nt, Artificial Sequence
  Description of Artificial Sequence: Synthetic oligonucleotide
  Sense strand starting at position 1271 of SEQ ID NO: 1881527
aguguugagcaaugagauc

SEQ ID NO: 2051465 - RNA, 19 nt, Artificial Sequence
  Description of Artificial Sequence: Synthetic oligonucleotide
  Antisense strand to SEQ ID NO: 2051464
gaucucauugcucaacacu

SEQ ID NO: 2051466 - RNA, 19 nt, Artificial Sequence
  Description of Artificial Sequence: Synthetic oligonucleotide
  Sense strand starting at position 1335 of SEQ ID NO: 1881527
gugcucucccuguaaauca

SEQ ID NO: 2051467 - RNA, 19 nt, Artificial Sequence
  Description of Artificial Sequence: Synthetic oligonucleotide
  Antisense strand to SEQ ID NO: 2051466
ugauuuacagggagagcac

SEQ ID NO: 2051468 - RNA, 19 nt, Artificial Sequence
  Description of Artificial Sequence: Synthetic oligonucleotide
  Sense strand starting at position 1419 of SEQ ID NO: 1881527
agcacuuaccucuacguua

SEQ ID NO: 2051469 - RNA, 19 nt, Artificial Sequence
  Description of Artificial Sequence: Synthetic oligonucleotide
  Antisense strand to SEQ ID NO: 2051468
uaacguagagguaagugcu

SEQ ID NO: 2051470 - RNA, 19 nt, Artificial Sequence
  Description of Artificial Sequence: Synthetic oligonucleotide
  Sense strand starting at position 1687 of SEQ ID NO: 1881527
auacuuuccgaacgaaugu

SEQ ID NO: 2051471 - RNA, 19 nt, Artificial Sequence
  Description of Artificial Sequence: Synthetic oligonucleotide
  Antisense strand to SEQ ID NO: 2051470
acauucguucggaaaguau

SEQ ID NO: 2051472 - RNA, 19 nt, Artificial Sequence
  Description of Artificial Sequence: Synthetic oligonucleotide
  Sense strand starting at position 1741 of SEQ ID NO: 1881527
gauucugacucagcuggua

SEQ ID NO: 2051473 - RNA, 19 nt, Artificial Sequence
  Description of Artificial Sequence: Synthetic oligonucleotide
  Antisense strand to SEQ ID NO: 2051472
uaccagcugagucagaauc

SEQ ID NO: 2051474 - RNA, 19 nt, Artificial Sequence
  Description of Artificial Sequence: Synthetic oligonucleotide
  Sense strand starting at position 1743 of SEQ ID NO: 1881527
uucugacucagcugguaga

SEQ ID NO: 2051475 - RNA, 19 nt, Artificial Sequence
  Description of Artificial Sequence: Synthetic oligonucleotide
  Antisense strand to SEQ ID NO: 2051474
ucuaccagcugagucagaa

SEQ ID NO: 2051476 - RNA, 19 nt, Artificial Sequence
  Description of Artificial Sequence: Synthetic oligonucleotide
  Sense strand starting at position 2032 of SEQ ID NO: 1881527
ggcuguucugcagcucuga

SEQ ID NO: 2051477 - RNA, 19 nt, Artificial Sequence
  Description of Artificial Sequence: Synthetic oligonucleotide
  Antisense strand to SEQ ID NO: 2051476
ucagagcugcagaacagcc

SEQ ID NO: 2051478 - RNA, 19 nt, Artificial Sequence
  Description of Artificial Sequence: Synthetic oligonucleotide
  Sense strand starting at position 2193 of SEQ ID NO: 1881527
guggguucuuauucuuaca

SEQ ID NO: 2051479 - RNA, 19 nt, Artificial Sequence
  Description of Artificial Sequence: Synthetic oligonucleotide
  Antisense strand to SEQ ID NO: 2051478
uguaagaauaagaacccac

SEQ ID NO: 2051480 - RNA, 19 nt, Artificial Sequence
  Description of Artificial Sequence: Synthetic oligonucleotide
  Sense strand starting at position 2195 of SEQ ID NO: 1881527
ggguucuuauucuuacagu

SEQ ID NO: 2051481 - RNA, 19 nt, Artificial Sequence
  Description of Artificial Sequence: Synthetic oligonucleotide
  Antisense strand to SEQ ID NO: 2051480
acuguaagaauaagaaccc

SEQ ID NO: 2051482 - RNA, 19 nt, Artificial Sequence
  Description of Artificial Sequence: Synthetic oligonucleotide
  Sense strand starting at position 2242 of SEQ ID NO: 1881527
cgccuugucagggauucca

SEQ ID NO: 2051483 - RNA, 19 nt, Artificial Sequence
  Description of Artificial Sequence: Synthetic oligonucleotide
  Antisense strand to SEQ ID NO: 2051482
uggaaucccugacaaggcg

SEQ ID NO: 2051484 - RNA, 19 nt, Artificial Sequence
  Description of Artificial Sequence: Synthetic oligonucleotide
  Sense strand starting at position 2271 of SEQ ID NO: 1881527
gugauagagccaggaauga

SEQ ID NO: 2051485 - RNA, 19 nt, Artificial Sequence
  Description of Artificial Sequence: Synthetic oligonucleotide
  Antisense strand to SEQ ID NO: 2051484
ucauuccuggcucuaucac

SEQ ID NO: 2051486 - RNA, 19 nt, Artificial Sequence
  Description of Artificial Sequence: Synthetic oligonucleotide
  Sense strand starting at position 2294 of SEQ ID NO: 1881527
aggccuaugugauuccaaa

SEQ ID NO: 2051487 - RNA, 19 nt, Artificial Sequence
  Description of Artificial Sequence: Synthetic oligonucleotide
  Antisense strand to SEQ ID NO: 2051486
uuuggaaucacauaggccu

SEQ ID NO: 2051488 - RNA, 19 nt, Artificial Sequence
  Description of Artificial Sequence: Synthetic oligonucleotide
  Sense strand starting at position 2323 of SEQ ID NO: 1881527
uaacccauucugggugaga

SEQ ID NO: 2051489 - RNA, 19 nt, Artificial Sequence
  Description of Artificial Sequence: Synthetic oligonucleotide
  Antisense strand to SEQ ID NO: 2051488
ucucacccagaauggguua

SEQ ID NO: 2051490 - RNA, 19 nt, Artificial Sequence
  Description of Artificial Sequence: Synthetic oligonucleotide
  Sense strand starting at position 2334 of SEQ ID NO: 1881527
gggugagagcauuaagcaa

SEQ ID NO: 2051491 - RNA, 19 nt, Artificial Sequence
  Description of Artificial Sequence: Synthetic oligonucleotide
  Antisense strand to SEQ ID NO: 2051490
uugcuuaaugcucucaccc

SEQ ID NO: 2051492 - RNA, 19 nt, Artificial Sequence
  Description of Artificial Sequence: Synthetic oligonucleotide
  Sense strand starting at position 2447 of SEQ ID NO: 1881527
ggacucaugggcugugacu

SEQ ID NO: 2051493 - RNA, 19 nt, Artificial Sequence
  Description of Artificial Sequence: Synthetic oligonucleotide
  Antisense strand to SEQ ID NO: 2051492
agucacagcccaugagucc

SEQ ID NO: 2051494 - RNA, 19 nt, Artificial Sequence
  Description of Artificial Sequence: Synthetic oligonucleotide
  Sense strand starting at position 2501 of SEQ ID NO: 1881527
cagugaugugacgaaagau

SEQ ID NO: 2051495 - RNA, 19 nt, Artificial Sequence
  Description of Artificial Sequence: Synthetic oligonucleotide
  Antisense strand to SEQ ID NO: 2051494
aucuuucgucacaucacug

SEQ ID NO: 2051496 - RNA, 19 nt, Artificial Sequence
  Description of Artificial Sequence: Synthetic oligonucleotide
  Sense strand starting at position 2606 of SEQ ID NO: 1881527
gguggauuguggccaaauc

SEQ ID NO: 2051497 - RNA, 19 nt, Artificial Sequence
  Description of Artificial Sequence: Synthetic oligonucleotide
  Antisense strand to SEQ ID NO: 2051496
gauuuggccacaauccacc

SEQ ID NO: 2051498 - RNA, 19 nt, Artificial Sequence
  Description of Artificial Sequence: Synthetic oligonucleotide
  Sense strand starting at position 2607 of SEQ ID NO: 1881527
guggauuguggccaaaucu

SEQ ID NO: 2051499 - RNA, 19 nt, Artificial Sequence
  Description of Artificial Sequence: Synthetic oligonucleotide
  Antisense strand to SEQ ID NO: 2051498
agauuuggccacaauccac

SEQ ID NO: 2051500 - RNA, 19 nt, Artificial Sequence
  Description of Artificial Sequence: Synthetic oligonucleotide
  Sense strand starting at position 2820 of SEQ ID NO: 1881527
guggccuagagucagauua

SEQ ID NO: 2051501 - RNA, 19 nt, Artificial Sequence
  Description of Artificial Sequence: Synthetic oligonucleotide
  Antisense strand to SEQ ID NO: 2051500
uaaucugacucuaggccac

SEQ ID NO: 2051502 - RNA, 19 nt, Artificial Sequence
  Description of Artificial Sequence: Synthetic oligonucleotide
  Sense strand starting at position 2995 of SEQ ID NO: 1881527
guugauugguugccaaaga

SEQ ID NO: 2051503 - RNA, 19 nt, Artificial Sequence
  Description of Artificial Sequence: Synthetic oligonucleotide
  Antisense strand to SEQ ID NO: 2051502
ucuuuggcaaccaaucaac

SEQ ID NO: 2051504 - RNA, 19 nt, Artificial Sequence
  Description of Artificial Sequence: Synthetic oligonucleotide
  Sense strand starting at position 3010 of SEQ ID NO: 1881527
aagaaauugggcugacacu

SEQ ID NO: 2051505 - RNA, 19 nt, Artificial Sequence
  Description of Artificial Sequence: Synthetic oligonucleotide
  Antisense strand to SEQ ID NO: 2051504
agugucagcccaauuucuu

SEQ ID NO: 2051506 - RNA, 19 nt, Artificial Sequence
  Description of Artificial Sequence: Synthetic oligonucleotide
  Sense strand starting at position 3123 of SEQ ID NO: 1881527
aucaaaugagcaugugaag

SEQ ID NO: 2051507 - RNA, 19 nt, Artificial Sequence
  Description of Artificial Sequence: Synthetic oligonucleotide
  Antisense strand to SEQ ID NO: 2051506
cuucacaugcucauuugau

SEQ ID NO: 2051508 - RNA, 19 nt, Artificial Sequence
  Description of Artificial Sequence: Synthetic oligonucleotide
  Sense strand starting at position 3134 of SEQ ID NO: 1881527
augugaaguucucugugaa

SEQ ID NO: 2051509 - RNA, 19 nt, Artificial Sequence
  Description of Artificial Sequence: Synthetic oligonucleotide
  Antisense strand to SEQ ID NO: 2051508
uucacagagaacuucacau

SEQ ID NO: 2051510 - RNA, 19 nt, Artificial Sequence
  Description of Artificial Sequence: Synthetic oligonucleotide
  Sense strand starting at position 3137 of SEQ ID NO: 1881527
ugaaguucucugugaacca

SEQ ID NO: 2051511 - RNA, 19 nt, Artificial Sequence
  Description of Artificial Sequence: Synthetic oligonucleotide
  Antisense strand to SEQ ID NO: 2051510
ugguucacagagaacuuca

SEQ ID NO: 2051512 - RNA, 19 nt, Artificial Sequence
  Description of Artificial Sequence: Synthetic oligonucleotide
  Sense strand starting at position 3210 of SEQ ID NO: 1881527
ggguguccugaguagagcu

SEQ ID NO: 2051513 - RNA, 19 nt, Artificial Sequence
  Description of Artificial Sequence: Synthetic oligonucleotide
  Antisense strand to SEQ ID NO: 2051512
agcucuacucaggacaccc

SEQ ID NO: 2051514 - RNA, 19 nt, Artificial Sequence
  Description of Artificial Sequence: Synthetic oligonucleotide
  Sense strand starting at position 3874 of SEQ ID NO: 1881527
cugagaucugcuggauugu

SEQ ID NO: 2051515 - RNA, 19 nt, Artificial Sequence
  Description of Artificial Sequence: Synthetic oligonucleotide
  Antisense strand to SEQ ID NO: 2051514
acaauccagcagaucucag

SEQ ID NO: 2051516 - RNA, 19 nt, Artificial Sequence
  Description of Artificial Sequence: Synthetic oligonucleotide
  Sense strand starting at position 3910 of SEQ ID NO: 1881527
ucuggaaauuuggauggau

SEQ ID NO: 2051517 - RNA, 19 nt, Artificial Sequence
  Description of Artificial Sequence: Synthetic oligonucleotide
  Antisense strand to SEQ ID NO: 2051516
auccauccaaauuuccaga

SEQ ID NO: 2051518 - RNA, 19 nt, Artificial Sequence
  Description of Artificial Sequence: Synthetic oligonucleotide
  Sense strand starting at position 33 of SEQ ID NO: 1881528
ggugucauuugggagugga

SEQ ID NO: 2051519 - RNA, 19 nt, Artificial Sequence
  Description of Artificial Sequence: Synthetic oligonucleotide
  Antisense strand to SEQ ID NO: 2051518
uccacucccaaaugacacc

SEQ ID NO: 2051520 - RNA, 19 nt, Artificial Sequence
  Description of Artificial Sequence: Synthetic oligonucleotide
  Sense strand starting at position 140 of SEQ ID NO: 1881528
gaggcacugucaggugaau

SEQ ID NO: 2051521 - RNA, 19 nt, Artificial Sequence
  Description of Artificial Sequence: Synthetic oligonucleotide
  Antisense strand to SEQ ID NO: 2051520
auucaccugacagugccuc

SEQ ID NO: 2051522 - RNA, 19 nt, Artificial Sequence
  Description of Artificial Sequence: Synthetic oligonucleotide
  Sense strand starting at position 142 of SEQ ID NO: 1881528
ggcacugucaggugaaugu

SEQ ID NO: 2051523 - RNA, 19 nt, Artificial Sequence
  Description of Artificial Sequence: Synthetic oligonucleotide
  Antisense strand to SEQ ID NO: 2051522
acauucaccugacagugcc

SEQ ID NO: 2051524 - RNA, 19 nt, Artificial Sequence
  Description of Artificial Sequence: Synthetic oligonucleotide
  Sense strand starting at position 494 of SEQ ID NO: 1881528
gggucaguagcugguuuaa

SEQ ID NO: 2051525 - RNA, 19 nt, Artificial Sequence
  Description of Artificial Sequence: Synthetic oligonucleotide
  Antisense strand to SEQ ID NO: 2051524
uuaaaccagcuacugaccc

SEQ ID NO: 2051526 - RNA, 19 nt, Artificial Sequence
  Description of Artificial Sequence: Synthetic oligonucleotide
  Sense strand starting at position 791 of SEQ ID NO: 1881528
cugccuaucagggauguuu

SEQ ID NO: 2051527 - RNA, 19 nt, Artificial Sequence
  Description of Artificial Sequence: Synthetic oligonucleotide
  Antisense strand to SEQ ID NO: 2051526
aaacaucccugauaggcag

SEQ ID NO: 2051528 - RNA, 19 nt, Artificial Sequence
  Description of Artificial Sequence: Synthetic oligonucleotide
  Sense strand starting at position 1477 of SEQ ID NO: 1881528
ggcggaagucuacaggaga

SEQ ID NO: 2051529 - RNA, 19 nt, Artificial Sequence
  Description of Artificial Sequence: Synthetic oligonucleotide
  Antisense strand to SEQ ID NO: 2051528
ucuccuguagacuuccgcc

SEQ ID NO: 2051530 - RNA, 19 nt, Artificial Sequence
  Description of Artificial Sequence: Synthetic oligonucleotide
  Sense strand starting at position 1611 of SEQ ID NO: 1881528
uacccaaggccuggagaau

SEQ ID NO: 2051531 - RNA, 19 nt, Artificial Sequence
  Description of Artificial Sequence: Synthetic oligonucleotide
  Antisense strand to SEQ ID NO: 2051530
auucuccaggccuugggua

SEQ ID NO: 2051532 - RNA, 19 nt, Artificial Sequence
  Description of Artificial Sequence: Synthetic oligonucleotide
  Sense strand starting at position 2009 of SEQ ID NO: 1881528
guggcuguuuccucuuuaa

SEQ ID NO: 2051533 - RNA, 19 nt, Artificial Sequence
  Description of Artificial Sequence: Synthetic oligonucleotide
  Antisense strand to SEQ ID NO: 2051532
uuaaagaggaaacagccac

SEQ ID NO: 2051534 - RNA, 19 nt, Artificial Sequence
  Description of Artificial Sequence: Synthetic oligonucleotide
  Sense strand starting at position 2020 of SEQ ID NO: 1881528
cucuuuaauucgccugagu

SEQ ID NO: 2051535 - RNA, 19 nt, Artificial Sequence
  Description of Artificial Sequence: Synthetic oligonucleotide
  Antisense strand to SEQ ID NO: 2051534
acucaggcgaauuaaagag

SEQ ID NO: 2051536 - RNA, 19 nt, Artificial Sequence
  Description of Artificial Sequence: Synthetic oligonucleotide
  Sense strand starting at position 2022 of SEQ ID NO: 1881528
cuuuaauucgccugaguuu

SEQ ID NO: 2051537 - RNA, 19 nt, Artificial Sequence
  Description of Artificial Sequence: Synthetic oligonucleotide
  Antisense strand to SEQ ID NO: 2051536
aaacucaggcgaauuaaag

SEQ ID NO: 2051538 - RNA, 19 nt, Artificial Sequence
  Description of Artificial Sequence: Synthetic oligonucleotide
  Sense strand starting at position 2058 of SEQ ID NO: 1881528
agaccuuuguugcugcaua

SEQ ID NO: 2051539 - RNA, 19 nt, Artificial Sequence
  Description of Artificial Sequence: Synthetic oligonucleotide
  Antisense strand to SEQ ID NO: 2051538
uaugcagcaacaaaggucu

SEQ ID NO: 2051540 - RNA, 19 nt, Artificial Sequence
  Description of Artificial Sequence: Synthetic oligonucleotide
  Sense strand starting at position 2059 of SEQ ID NO: 1881528
gaccuuuguugcugcauau

SEQ ID NO: 2051541 - RNA, 19 nt, Artificial Sequence
  Description of Artificial Sequence: Synthetic oligonucleotide
  Antisense strand to SEQ ID NO: 2051540
auaugcagcaacaaagguc

SEQ ID NO: 2051542 - RNA, 19 nt, Artificial Sequence
  Description of Artificial Sequence: Synthetic oligonucleotide
  Sense strand starting at position 2085 of SEQ ID NO: 1881528
aggauaaacuuguugaauu

SEQ ID NO: 2051543 - RNA, 19 nt, Artificial Sequence
  Description of Artificial Sequence: Synthetic oligonucleotide
  Antisense strand to SEQ ID NO: 2051542
aauucaacaaguuuauccu

SEQ ID NO: 2051544 - RNA, 19 nt, Artificial Sequence
  Description of Artificial Sequence: Synthetic oligonucleotide
  Sense strand starting at position 2086 of SEQ ID NO: 1881528
ggauaaacuuguugaauuu

SEQ ID NO: 2051545 - RNA, 19 nt, Artificial Sequence
  Description of Artificial Sequence: Synthetic oligonucleotide
  Antisense strand to SEQ ID NO: 2051544
aaauucaacaaguuuaucc

SEQ ID NO: 2051546 - RNA, 19 nt, Artificial Sequence
  Description of Artificial Sequence: Synthetic oligonucleotide
  Sense strand starting at position 2149 of SEQ ID NO: 1881528
ggcucuagcacucgguaaa

SEQ ID NO: 2051547 - RNA, 19 nt, Artificial Sequence
  Description of Artificial Sequence: Synthetic oligonucleotide
  Antisense strand to SEQ ID NO: 2051546
uuuaccgagugcuagagcc

SEQ ID NO: 2051548 - RNA, 19 nt, Artificial Sequence
  Description of Artificial Sequence: Synthetic oligonucleotide
  Sense strand starting at position 2172 of SEQ ID NO: 1881528
auuuaaagcgcauguaguu

SEQ ID NO: 2051549 - RNA, 19 nt, Artificial Sequence
  Description of Artificial Sequence: Synthetic oligonucleotide
  Antisense strand to SEQ ID NO: 2051548
aacuacaugcgcuuuaaau

SEQ ID NO: 2051550 - RNA, 19 nt, Artificial Sequence
  Description of Artificial Sequence: Synthetic oligonucleotide
  Sense strand starting at position 2179 of SEQ ID NO: 1881528
gcgcauguaguuuacaaca

SEQ ID NO: 2051551 - RNA, 19 nt, Artificial Sequence
  Description of Artificial Sequence: Synthetic oligonucleotide
  Antisense strand to SEQ ID NO: 2051550
uguuguaaacuacaugcgc

SEQ ID NO: 2051552 - RNA, 19 nt, Artificial Sequence
  Description of Artificial Sequence: Synthetic oligonucleotide
  Sense strand starting at position 2181 of SEQ ID NO: 1881528
gcauguaguuuacaacacu

SEQ ID NO: 2051553 - RNA, 19 nt, Artificial Sequence
  Description of Artificial Sequence: Synthetic oligonucleotide
  Antisense strand to SEQ ID NO: 2051552
aguguuguaaacuacaugc

SEQ ID NO: 2051554 - RNA, 19 nt, Artificial Sequence
  Description of Artificial Sequence: Synthetic oligonucleotide
  Sense strand starting at position 2346 of SEQ ID NO: 1881528
uguggaaucgcgugagcag

SEQ ID NO: 2051555 - RNA, 19 nt, Artificial Sequence
  Description of Artificial Sequence: Synthetic oligonucleotide
  Antisense strand to SEQ ID NO: 2051554
cugcucacgcgauuccaca

SEQ ID NO: 2051556 - RNA, 19 nt, Artificial Sequence
  Description of Artificial Sequence: Synthetic oligonucleotide
  Sense strand starting at position 2428 of SEQ ID NO: 1881528
gacuuuguuuccguuuguu

SEQ ID NO: 2051557 - RNA, 19 nt, Artificial Sequence
  Description of Artificial Sequence: Synthetic oligonucleotide
  Antisense strand to SEQ ID NO: 2051556
aacaaacggaaacaaaguc

SEQ ID NO: 2051558 - RNA, 19 nt, Artificial Sequence
  Description of Artificial Sequence: Synthetic oligonucleotide
  Sense strand starting at position 2547 of SEQ ID NO: 1881528
uugggucuuguacacagau

SEQ ID NO: 2051559 - RNA, 19 nt, Artificial Sequence
  Description of Artificial Sequence: Synthetic oligonucleotide
  Antisense strand to SEQ ID NO: 2051558
aucuguguacaagacccaa

SEQ ID NO: 2051560 - RNA, 19 nt, Artificial Sequence
  Description of Artificial Sequence: Synthetic oligonucleotide
  Sense strand starting at position 2559 of SEQ ID NO: 1881528
cacagaugcuugucagcaa

SEQ ID NO: 2051561 - RNA, 19 nt, Artificial Sequence
  Description of Artificial Sequence: Synthetic oligonucleotide
  Antisense strand to SEQ ID NO: 2051560
uugcugacaagcaucugug

SEQ ID NO: 2051562 - RNA, 19 nt, Artificial Sequence
  Description of Artificial Sequence: Synthetic oligonucleotide
  Sense strand starting at position 2560 of SEQ ID NO: 1881528
acagaugcuugucagcaaa

SEQ ID NO: 2051563 - RNA, 19 nt, Artificial Sequence
  Description of Artificial Sequence: Synthetic oligonucleotide
  Antisense strand to SEQ ID NO: 2051562
uuugcugacaagcaucugu

SEQ ID NO: 2051564 - RNA, 19 nt, Artificial Sequence
  Description of Artificial Sequence: Synthetic oligonucleotide
  Sense strand starting at position 2562 of SEQ ID NO: 1881528
agaugcuugucagcaaaua

SEQ ID NO: 2051565 - RNA, 19 nt, Artificial Sequence
  Description of Artificial Sequence: Synthetic oligonucleotide
  Antisense strand to SEQ ID NO: 2051564
uauuugcugacaagcaucu

SEQ ID NO: 2051566 - RNA, 19 nt, Artificial Sequence
  Description of Artificial Sequence: Synthetic oligonucleotide
  Sense strand starting at position 2563 of SEQ ID NO: 1881528
gaugcuugucagcaaauac

SEQ ID NO: 2051567 - RNA, 19 nt, Artificial Sequence
  Description of Artificial Sequence: Synthetic oligonucleotide
  Antisense strand to SEQ ID NO: 2051566
guauuugcugacaagcauc

SEQ ID NO: 2051568 - RNA, 19 nt, Artificial Sequence
  Description of Artificial Sequence: Synthetic oligonucleotide
  Sense strand starting at position 2845 of SEQ ID NO: 1881528
agcuuucugucccuuacau

SEQ ID NO: 2051569 - RNA, 19 nt, Artificial Sequence
  Description of Artificial Sequence: Synthetic oligonucleotide
  Antisense strand to SEQ ID NO: 2051568
auguaagggacagaaagcu

SEQ ID NO: 2051570 - RNA, 19 nt, Artificial Sequence
  Description of Artificial Sequence: Synthetic oligonucleotide
  Sense strand starting at position 3636 of SEQ ID NO: 1881528
cgcuucuuucugcuuuaua

SEQ ID NO: 2051571 - RNA, 19 nt, Artificial Sequence
  Description of Artificial Sequence: Synthetic oligonucleotide
  Antisense strand to SEQ ID NO: 2051570
uauaaagcagaaagaagcg

SEQ ID NO: 2051572 - RNA, 19 nt, Artificial Sequence
  Description of Artificial Sequence: Synthetic oligonucleotide
  Sense strand starting at position 3872 of SEQ ID NO: 1881528
ucucauaaaugaguuggga

SEQ ID NO: 2051573 - RNA, 19 nt, Artificial Sequence
  Description of Artificial Sequence: Synthetic oligonucleotide
  Antisense strand to SEQ ID NO: 2051572
ucccaacucauuuaugaga

SEQ ID NO: 2051574 - RNA, 19 nt, Artificial Sequence
  Description of Artificial Sequence: Synthetic oligonucleotide
  Sense strand starting at position 3874 of SEQ ID NO: 1881528
ucauaaaugaguugggacu

SEQ ID NO: 2051575 - RNA, 19 nt, Artificial Sequence
  Description of Artificial Sequence: Synthetic oligonucleotide
  Antisense strand to SEQ ID NO: 2051574
agucccaacucauuuauga

SEQ ID NO: 2051576 - RNA, 19 nt, Artificial Sequence
  Description of Artificial Sequence: Synthetic oligonucleotide
  Sense strand starting at position 3888 of SEQ ID NO: 1881528
ggacucugcugauuugcau

SEQ ID NO: 2051577 - RNA, 19 nt, Artificial Sequence
  Description of Artificial Sequence: Synthetic oligonucleotide
  Antisense strand to SEQ ID NO: 2051576
augcaaaucagcagagucc

SEQ ID NO: 2051578 - RNA, 19 nt, Artificial Sequence
  Description of Artificial Sequence: Synthetic oligonucleotide
  Sense strand starting at position 96 of SEQ ID NO: 1881529
agcugcuuguucugggaua

SEQ ID NO: 2051579 - RNA, 19 nt, Artificial Sequence
  Description of Artificial Sequence: Synthetic oligonucleotide
  Antisense strand to SEQ ID NO: 2051578
uaucccagaacaagcagcu

SEQ ID NO: 2051580 - RNA, 19 nt, Artificial Sequence
  Description of Artificial Sequence: Synthetic oligonucleotide
  Sense strand starting at position 97 of SEQ ID NO: 1881529
gcugcuuguucugggauau

SEQ ID NO: 2051581 - RNA, 19 nt, Artificial Sequence
  Description of Artificial Sequence: Synthetic oligonucleotide
  Antisense strand to SEQ ID NO: 2051580
auaucccagaacaagcagc

SEQ ID NO: 2051582 - RNA, 19 nt, Artificial Sequence
  Description of Artificial Sequence: Synthetic oligonucleotide
  Sense strand starting at position 98 of SEQ ID NO: 1881529
cugcuuguucugggauaug

SEQ ID NO: 2051583 - RNA, 19 nt, Artificial Sequence
  Description of Artificial Sequence: Synthetic oligonucleotide
  Antisense strand to SEQ ID NO: 2051582
cauaucccagaacaagcag

SEQ ID NO: 2051584 - RNA, 19 nt, Artificial Sequence
  Description of Artificial Sequence: Synthetic oligonucleotide
  Sense strand starting at position 277 of SEQ ID NO: 1881529
uucugcagacccugagauu

SEQ ID NO: 2051585 - RNA, 19 nt, Artificial Sequence
  Description of Artificial Sequence: Synthetic oligonucleotide
  Antisense strand to SEQ ID NO: 2051584
aaucucagggucugcagaa

SEQ ID NO: 2051586 - RNA, 19 nt, Artificial Sequence
  Description of Artificial Sequence: Synthetic oligonucleotide
  Sense strand starting at position 286 of SEQ ID NO: 1881529
cccugagauucugagaugu

SEQ ID NO: 2051587 - RNA, 19 nt, Artificial Sequence
  Description of Artificial Sequence: Synthetic oligonucleotide
  Antisense strand to SEQ ID NO: 2051586
acaucucagaaucucaggg

SEQ ID NO: 2051588 - RNA, 19 nt, Artificial Sequence
  Description of Artificial Sequence: Synthetic oligonucleotide
  Sense strand starting at position 288 of SEQ ID NO: 1881529
cugagauucugagauguac

SEQ ID NO: 2051589 - RNA, 19 nt, Artificial Sequence
  Description of Artificial Sequence: Synthetic oligonucleotide
  Antisense strand to SEQ ID NO: 2051588
guacaucucagaaucucag

SEQ ID NO: 2051590 - RNA, 19 nt, Artificial Sequence
  Description of Artificial Sequence: Synthetic oligonucleotide
  Sense strand starting at position 294 of SEQ ID NO: 1881529
uucugagauguacgcuuua

SEQ ID NO: 2051591 - RNA, 19 nt, Artificial Sequence
  Description of Artificial Sequence: Synthetic oligonucleotide
  Antisense strand to SEQ ID NO: 2051590
uaaagcguacaucucagaa

SEQ ID NO: 2051592 - RNA, 19 nt, Artificial Sequence
  Description of Artificial Sequence: Synthetic oligonucleotide
  Sense strand starting at position 299 of SEQ ID NO: 1881529
agauguacgcuuuagaaca

SEQ ID NO: 2051593 - RNA, 19 nt, Artificial Sequence
  Description of Artificial Sequence: Synthetic oligonucleotide
  Antisense strand to SEQ ID NO: 2051592
uguucuaaagcguacaucu

SEQ ID NO: 2051594 - RNA, 19 nt, Artificial Sequence
  Description of Artificial Sequence: Synthetic oligonucleotide
  Sense strand starting at position 319 of SEQ ID NO: 1881529
gacaauggcuuagugacuu

SEQ ID NO: 2051595 - RNA, 19 nt, Artificial Sequence
  Description of Artificial Sequence: Synthetic oligonucleotide
  Antisense strand to SEQ ID NO: 2051594
aagucacuaagccauuguc

SEQ ID NO: 2051596 - RNA, 19 nt, Artificial Sequence
  Description of Artificial Sequence: Synthetic oligonucleotide
  Sense strand starting at position 449 of SEQ ID NO: 1881529
cccuuagguucuggcgaga

SEQ ID NO: 2051597 - RNA, 19 nt, Artificial Sequence
  Description of Artificial Sequence: Synthetic oligonucleotide
  Antisense strand to SEQ ID NO: 2051596
ucucgccagaaccuaaggg

SEQ ID NO: 2051598 - RNA, 19 nt, Artificial Sequence
  Description of Artificial Sequence: Synthetic oligonucleotide
  Sense strand starting at position 462 of SEQ ID NO: 1881529
gcgagagagucccaggcuu

SEQ ID NO: 2051599 - RNA, 19 nt, Artificial Sequence
  Description of Artificial Sequence: Synthetic oligonucleotide
  Antisense strand to SEQ ID NO: 2051598
aagccugggacucucucgc

SEQ ID NO: 2051600 - RNA, 19 nt, Artificial Sequence
  Description of Artificial Sequence: Synthetic oligonucleotide
  Sense strand starting at position 470 of SEQ ID NO: 1881529
gucccaggcuuucuuuaca

SEQ ID NO: 2051601 - RNA, 19 nt, Artificial Sequence
  Description of Artificial Sequence: Synthetic oligonucleotide
  Antisense strand to SEQ ID NO: 2051600
uguaaagaaagccugggac

SEQ ID NO: 2051602 - RNA, 19 nt, Artificial Sequence
  Description of Artificial Sequence: Synthetic oligonucleotide
  Sense strand starting at position 720 of SEQ ID NO: 1881529
guggaaucugcaugucgca

SEQ ID NO: 2051603 - RNA, 19 nt, Artificial Sequence
  Description of Artificial Sequence: Synthetic oligonucleotide
  Antisense strand to SEQ ID NO: 2051602
ugcgacaugcagauuccac

SEQ ID NO: 2051604 - RNA, 19 nt, Artificial Sequence
  Description of Artificial Sequence: Synthetic oligonucleotide
  Sense strand starting at position 747 of SEQ ID NO: 1881529
ccuuguguuuccggaagga

SEQ ID NO: 2051605 - RNA, 19 nt, Artificial Sequence
  Description of Artificial Sequence: Synthetic oligonucleotide
  Antisense strand to SEQ ID NO: 2051604
uccuuccggaaacacaagg

SEQ ID NO: 2051606 - RNA, 19 nt, Artificial Sequence
  Description of Artificial Sequence: Synthetic oligonucleotide
  Sense strand starting at position 751 of SEQ ID NO: 1881529
guguuuccggaaggauucu

SEQ ID NO: 2051607 - RNA, 19 nt, Artificial Sequence
  Description of Artificial Sequence: Synthetic oligonucleotide
  Antisense strand to SEQ ID NO: 2051606
agaauccuuccggaaacac

SEQ ID NO: 2051608 - RNA, 19 nt, Artificial Sequence
  Description of Artificial Sequence: Synthetic oligonucleotide
  Sense strand starting at position 760 of SEQ ID NO: 1881529
gaaggauucucaggcuuga

SEQ ID NO: 2051609 - RNA, 19 nt, Artificial Sequence
  Description of Artificial Sequence: Synthetic oligonucleotide
  Antisense strand to SEQ ID NO: 2051608
ucaagccugagaauccuuc

SEQ ID NO: 2051610 - RNA, 19 nt, Artificial Sequence
  Description of Artificial Sequence: Synthetic oligonucleotide
  Sense strand starting at position 964 of SEQ ID NO: 1881529
cgcugcuauggcgacauaa

SEQ ID NO: 2051611 - RNA, 19 nt, Artificial Sequence
  Description of Artificial Sequence: Synthetic oligonucleotide
  Antisense strand to SEQ ID NO: 2051610
uuaugucgccauagcagcg

SEQ ID NO: 2051612 - RNA, 19 nt, Artificial Sequence
  Description of Artificial Sequence: Synthetic oligonucleotide
  Sense strand starting at position 966 of SEQ ID NO: 1881529
cugcuauggcgacauaaac

SEQ ID NO: 2051613 - RNA, 19 nt, Artificial Sequence
  Description of Artificial Sequence: Synthetic oligonucleotide
  Antisense strand to SEQ ID NO: 2051612
guuuaugucgccauagcag

SEQ ID NO: 2051614 - RNA, 19 nt, Artificial Sequence
  Description of Artificial Sequence: Synthetic oligonucleotide
  Sense strand starting at position 1053 of SEQ ID NO: 1881529
cgcuguuuaucagcauuua

SEQ ID NO: 2051615 - RNA, 19 nt, Artificial Sequence
  Description of Artificial Sequence: Synthetic oligonucleotide
  Antisense strand to SEQ ID NO: 2051614
uaaaugcugauaaacagcg

SEQ ID NO: 2051616 - RNA, 19 nt, Artificial Sequence
  Description of Artificial Sequence: Synthetic oligonucleotide
  Sense strand starting at position 1054 of SEQ ID NO: 1881529
gcuguuuaucagcauuuau

SEQ ID NO: 2051617 - RNA, 19 nt, Artificial Sequence
  Description of Artificial Sequence: Synthetic oligonucleotide
  Antisense strand to SEQ ID NO: 2051616
auaaaugcugauaaacagc

SEQ ID NO: 2051618 - RNA, 19 nt, Artificial Sequence
  Description of Artificial Sequence: Synthetic oligonucleotide
  Sense strand starting at position 1115 of SEQ ID NO: 1881529
uccucauugugggucuaga

SEQ ID NO: 2051619 - RNA, 19 nt, Artificial Sequence
  Description of Artificial Sequence: Synthetic oligonucleotide
  Antisense strand to SEQ ID NO: 2051618
ucuagacccacaaugagga

SEQ ID NO: 2051620 - RNA, 19 nt, Artificial Sequence
  Description of Artificial Sequence: Synthetic oligonucleotide
  Sense strand starting at position 1674 of SEQ ID NO: 1881529
agcugacuuggaggugaaa

SEQ ID NO: 2051621 - RNA, 19 nt, Artificial Sequence
  Description of Artificial Sequence: Synthetic oligonucleotide
  Antisense strand to SEQ ID NO: 2051620
uuucaccuccaagucagcu

SEQ ID NO: 2051622 - RNA, 19 nt, Artificial Sequence
  Description of Artificial Sequence: Synthetic oligonucleotide
  Sense strand starting at position 1676 of SEQ ID NO: 1881529
cugacuuggaggugaaaug

SEQ ID NO: 2051623 - RNA, 19 nt, Artificial Sequence
  Description of Artificial Sequence: Synthetic oligonucleotide
  Antisense strand to SEQ ID NO: 2051622
cauuucaccuccaagucag

SEQ ID NO: 2051624 - RNA, 19 nt, Artificial Sequence
  Description of Artificial Sequence: Synthetic oligonucleotide
  Sense strand starting at position 1869 of SEQ ID NO: 1881529
acaguucuuccagauccua

SEQ ID NO: 2051625 - RNA, 19 nt, Artificial Sequence
  Description of Artificial Sequence: Synthetic oligonucleotide
  Antisense strand to SEQ ID NO: 2051624
uaggaucuggaagaacugu

SEQ ID NO: 2051626 - RNA, 19 nt, Artificial Sequence
  Description of Artificial Sequence: Synthetic oligonucleotide
  Sense strand starting at position 2070 of SEQ ID NO: 1881529
ccagcccuugccugaguua

SEQ ID NO: 2051627 - RNA, 19 nt, Artificial Sequence
  Description of Artificial Sequence: Synthetic oligonucleotide
  Antisense strand to SEQ ID NO: 2051626
uaacucaggcaagggcugg

SEQ ID NO: 2051628 - RNA, 19 nt, Artificial Sequence
  Description of Artificial Sequence: Synthetic oligonucleotide
  Sense strand starting at position 2073 of SEQ ID NO: 1881529
gcccuugccugaguuacau

SEQ ID NO: 2051629 - RNA, 19 nt, Artificial Sequence
  Description of Artificial Sequence: Synthetic oligonucleotide
  Antisense strand to SEQ ID NO: 2051628
auguaacucaggcaagggc

SEQ ID NO: 2051630 - RNA, 19 nt, Artificial Sequence
  Description of Artificial Sequence: Synthetic oligonucleotide
  Sense strand starting at position 2082 of SEQ ID NO: 1881529
ugaguuacaucacaauaug

SEQ ID NO: 2051631 - RNA, 19 nt, Artificial Sequence
  Description of Artificial Sequence: Synthetic oligonucleotide
  Antisense strand to SEQ ID NO: 2051630
cauauugugauguaacuca

SEQ ID NO: 2051632 - RNA, 19 nt, Artificial Sequence
  Description of Artificial Sequence: Synthetic oligonucleotide
  Sense strand starting at position 2116 of SEQ ID NO: 1881529
gccugugguucacuguuga

SEQ ID NO: 2051633 - RNA, 19 nt, Artificial Sequence
  Description of Artificial Sequence: Synthetic oligonucleotide
  Antisense strand to SEQ ID NO: 2051632
ucaacagugaaccacaggc

SEQ ID NO: 2051634 - RNA, 19 nt, Artificial Sequence
  Description of Artificial Sequence: Synthetic oligonucleotide
  Sense strand starting at position 2760 of SEQ ID NO: 1881529
guaagaaacugaggaguga

SEQ ID NO: 2051635 - RNA, 19 nt, Artificial Sequence
  Description of Artificial Sequence: Synthetic oligonucleotide
  Antisense strand to SEQ ID NO: 2051634
ucacuccucaguuucuuac

SEQ ID NO: 2051636 - RNA, 19 nt, Artificial Sequence
  Description of Artificial Sequence: Synthetic oligonucleotide
  Sense strand starting at position 3073 of SEQ ID NO: 1881529
ccauuucuguggucuccaa

SEQ ID NO: 2051637 - RNA, 19 nt, Artificial Sequence
  Description of Artificial Sequence: Synthetic oligonucleotide
  Antisense strand to SEQ ID NO: 2051636
uuggagaccacagaaaugg

SEQ ID NO: 2051638 - RNA, 19 nt, Artificial Sequence
  Description of Artificial Sequence: Synthetic oligonucleotide
  Sense strand starting at position 3206 of SEQ ID NO: 1881529
ugagcuuuguggccucuga

SEQ ID NO: 2051639 - RNA, 19 nt, Artificial Sequence
  Description of Artificial Sequence: Synthetic oligonucleotide
  Antisense strand to SEQ ID NO: 2051638
ucagaggccacaaagcuca

SEQ ID NO: 2051640 - RNA, 19 nt, Artificial Sequence
  Description of Artificial Sequence: Synthetic oligonucleotide
  Sense strand starting at position 3391 of SEQ ID NO: 1881529
ccggaaggguccggaguua

SEQ ID NO: 2051641 - RNA, 19 nt, Artificial Sequence
  Description of Artificial Sequence: Synthetic oligonucleotide
  Antisense strand to SEQ ID NO: 2051640
uaacuccggacccuuccgg

SEQ ID NO: 2051642 - RNA, 19 nt, Artificial Sequence
  Description of Artificial Sequence: Synthetic oligonucleotide
  Sense strand starting at position 3392 of SEQ ID NO: 1881529
cggaaggguccggaguuau

SEQ ID NO: 2051643 - RNA, 19 nt, Artificial Sequence
  Description of Artificial Sequence: Synthetic oligonucleotide
  Antisense strand to SEQ ID NO: 2051642
auaacuccggacccuuccg

SEQ ID NO: 2051644 - RNA, 19 nt, Artificial Sequence
  Description of Artificial Sequence: Synthetic oligonucleotide
  Sense strand starting at position 3550 of SEQ ID NO: 1881529
ucgcccauuucccguguua

SEQ ID NO: 2051645 - RNA, 19 nt, Artificial Sequence
  Description of Artificial Sequence: Synthetic oligonucleotide
  Antisense strand to SEQ ID NO: 2051644
uaacacgggaaaugggcga

SEQ ID NO: 2051646 - RNA, 19 nt, Artificial Sequence
  Description of Artificial Sequence: Synthetic oligonucleotide
  Sense strand starting at position 3555 of SEQ ID NO: 1881529
cauuucccguguuaggaau

SEQ ID NO: 2051647 - RNA, 19 nt, Artificial Sequence
  Description of Artificial Sequence: Synthetic oligonucleotide
  Antisense strand to SEQ ID NO: 2051646
auuccuaacacgggaaaug

SEQ ID NO: 2051648 - RNA, 19 nt, Artificial Sequence
  Description of Artificial Sequence: Synthetic oligonucleotide
  Sense strand starting at position 3593 of SEQ ID NO: 1881529
accagcaucugcuguuuaa

SEQ ID NO: 2051649 - RNA, 19 nt, Artificial Sequence
  Description of Artificial Sequence: Synthetic oligonucleotide
  Antisense strand to SEQ ID NO: 2051648
uuaaacagcagaugcuggu

SEQ ID NO: 2051650 - RNA, 19 nt, Artificial Sequence
  Description of Artificial Sequence: Synthetic oligonucleotide
  Sense strand starting at position 3596 of SEQ ID NO: 1881529
agcaucugcuguuuaagaa

SEQ ID NO: 2051651 - RNA, 19 nt, Artificial Sequence
  Description of Artificial Sequence: Synthetic oligonucleotide
  Antisense strand to SEQ ID NO: 2051650
uucuuaaacagcagaugcu

SEQ ID NO: 2051652 - RNA, 19 nt, Artificial Sequence
  Description of Artificial Sequence: Synthetic oligonucleotide
  Sense strand starting at position 3597 of SEQ ID NO: 1881529
gcaucugcuguuuaagaag

SEQ ID NO: 2051653 - RNA, 19 nt, Artificial Sequence
  Description of Artificial Sequence: Synthetic oligonucleotide
  Antisense strand to SEQ ID NO: 2051652
cuucuuaaacagcagaugc

SEQ ID NO: 2051654 - RNA, 19 nt, Artificial Sequence
  Description of Artificial Sequence: Synthetic oligonucleotide
  Sense strand starting at position 3862 of SEQ ID NO: 1881529
aagccuggcugacugaaau

SEQ ID NO: 2051655 - RNA, 19 nt, Artificial Sequence
  Description of Artificial Sequence: Synthetic oligonucleotide
  Antisense strand to SEQ ID NO: 2051654
auuucagucagccaggcuu

SEQ ID NO: 2051656 - RNA, 19 nt, Artificial Sequence
  Description of Artificial Sequence: Synthetic oligonucleotide
  Sense strand starting at position 52 of SEQ ID NO: 1881530
acccgaauucuccaguucu

SEQ ID NO: 2051657 - RNA, 19 nt, Artificial Sequence
  Description of Artificial Sequence: Synthetic oligonucleotide
  Antisense strand to SEQ ID NO: 2051656
agaacuggagaauucgggu

SEQ ID NO: 2051658 - RNA, 19 nt, Artificial Sequence
  Description of Artificial Sequence: Synthetic oligonucleotide
  Sense strand starting at position 97 of SEQ ID NO: 1881530
uuuccucagugguugacaa

SEQ ID NO: 2051659 - RNA, 19 nt, Artificial Sequence
  Description of Artificial Sequence: Synthetic oligonucleotide
  Antisense strand to SEQ ID NO: 2051658
uugucaaccacugaggaaa

SEQ ID NO: 2051660 - RNA, 19 nt, Artificial Sequence
  Description of Artificial Sequence: Synthetic oligonucleotide
  Sense strand starting at position 287 of SEQ ID NO: 1881530
gcauucgaauuugcaguua

SEQ ID NO: 2051661 - RNA, 19 nt, Artificial Sequence
  Description of Artificial Sequence: Synthetic oligonucleotide
  Antisense strand to SEQ ID NO: 2051660
uaacugcaaauucgaaugc

SEQ ID NO: 2051662 - RNA, 19 nt, Artificial Sequence
  Description of Artificial Sequence: Synthetic oligonucleotide
  Sense strand starting at position 329 of SEQ ID NO: 1881530
ucugcuugcugauuaaaua

SEQ ID NO: 2051663 - RNA, 19 nt, Artificial Sequence
  Description of Artificial Sequence: Synthetic oligonucleotide
  Antisense strand to SEQ ID NO: 2051662
uauuuaaucagcaagcaga

SEQ ID NO: 2051664 - RNA, 19 nt, Artificial Sequence
  Description of Artificial Sequence: Synthetic oligonucleotide
  Sense strand starting at position 520 of SEQ ID NO: 1881530
uugguauacaggugacaaa

SEQ ID NO: 2051665 - RNA, 19 nt, Artificial Sequence
  Description of Artificial Sequence: Synthetic oligonucleotide
  Antisense strand to SEQ ID NO: 2051664
uuugucaccuguauaccaa

SEQ ID NO: 2051666 - RNA, 19 nt, Artificial Sequence
  Description of Artificial Sequence: Synthetic oligonucleotide
  Sense strand starting at position 553 of SEQ ID NO: 1881530
uccugaauagcuuggagga

SEQ ID NO: 2051667 - RNA, 19 nt, Artificial Sequence
  Description of Artificial Sequence: Synthetic oligonucleotide
  Antisense strand to SEQ ID NO: 2051666
uccuccaagcuauucagga

SEQ ID NO: 2051668 - RNA, 19 nt, Artificial Sequence
  Description of Artificial Sequence: Synthetic oligonucleotide
  Sense strand starting at position 554 of SEQ ID NO: 1881530
ccugaauagcuuggaggau

SEQ ID NO: 2051669 - RNA, 19 nt, Artificial Sequence
  Description of Artificial Sequence: Synthetic oligonucleotide
  Antisense strand to SEQ ID NO: 2051668
auccuccaagcuauucagg

SEQ ID NO: 2051670 - RNA, 19 nt, Artificial Sequence
  Description of Artificial Sequence: Synthetic oligonucleotide
  Sense strand starting at position 722 of SEQ ID NO: 1881530
aacgguugauucuugaaag

SEQ ID NO: 2051671 - RNA, 19 nt, Artificial Sequence
  Description of Artificial Sequence: Synthetic oligonucleotide
  Antisense strand to SEQ ID NO: 2051670
cuuucaagaaucaaccguu

SEQ ID NO: 2051672 - RNA, 19 nt, Artificial Sequence
  Description of Artificial Sequence: Synthetic oligonucleotide
  Sense strand starting at position 861 of SEQ ID NO: 1881530
cuguaugggccguagauuu

SEQ ID NO: 2051673 - RNA, 19 nt, Artificial Sequence
  Description of Artificial Sequence: Synthetic oligonucleotide
  Antisense strand to SEQ ID NO: 2051672
aaaucuacggcccauacag

SEQ ID NO: 2051674 - RNA, 19 nt, Artificial Sequence
  Description of Artificial Sequence: Synthetic oligonucleotide
  Sense strand starting at position 938 of SEQ ID NO: 1881530
agugaaagucguagcguuu

SEQ ID NO: 2051675 - RNA, 19 nt, Artificial Sequence
  Description of Artificial Sequence: Synthetic oligonucleotide
  Antisense strand to SEQ ID NO: 2051674
aaacgcuacgacuuucacu

SEQ ID NO: 2051676 - RNA, 19 nt, Artificial Sequence
  Description of Artificial Sequence: Synthetic oligonucleotide
  Sense strand starting at position 999 of SEQ ID NO: 1881530
ggacuaugaugucuccaga

SEQ ID NO: 2051677 - RNA, 19 nt, Artificial Sequence
  Description of Artificial Sequence: Synthetic oligonucleotide
  Antisense strand to SEQ ID NO: 2051676
ucuggagacaucauagucc

SEQ ID NO: 2051678 - RNA, 19 nt, Artificial Sequence
  Description of Artificial Sequence: Synthetic oligonucleotide
  Sense strand starting at position 1002 of SEQ ID NO: 1881530
cuaugaugucuccagaauc

SEQ ID NO: 2051679 - RNA, 19 nt, Artificial Sequence
  Description of Artificial Sequence: Synthetic oligonucleotide
  Antisense strand to SEQ ID NO: 2051678
gauucuggagacaucauag

SEQ ID NO: 2051680 - RNA, 19 nt, Artificial Sequence
  Description of Artificial Sequence: Synthetic oligonucleotide
  Sense strand starting at position 1303 of SEQ ID NO: 1881530
cuuugagccuaaucaguca

SEQ ID NO: 2051681 - RNA, 19 nt, Artificial Sequence
  Description of Artificial Sequence: Synthetic oligonucleotide
  Antisense strand to SEQ ID NO: 2051680
ugacugauuaggcucaaag

SEQ ID NO: 2051682 - RNA, 19 nt, Artificial Sequence
  Description of Artificial Sequence: Synthetic oligonucleotide
  Sense strand starting at position 1306 of SEQ ID NO: 1881530
ugagccuaaucagucaaga

SEQ ID NO: 2051683 - RNA, 19 nt, Artificial Sequence
  Description of Artificial Sequence: Synthetic oligonucleotide
  Antisense strand to SEQ ID NO: 2051682
ucuugacugauuaggcuca

SEQ ID NO: 2051684 - RNA, 19 nt, Artificial Sequence
  Description of Artificial Sequence: Synthetic oligonucleotide
  Sense strand starting at position 1451 of SEQ ID NO: 1881530
accaucuaugccgggaaau

SEQ ID NO: 2051685 - RNA, 19 nt, Artificial Sequence
  Description of Artificial Sequence: Synthetic oligonucleotide
  Antisense strand to SEQ ID NO: 2051684
auuucccggcauagauggu

SEQ ID NO: 2051686 - RNA, 19 nt, Artificial Sequence
  Description of Artificial Sequence: Synthetic oligonucleotide
  Sense strand starting at position 1452 of SEQ ID NO: 1881530
ccaucuaugccgggaaauu

SEQ ID NO: 2051687 - RNA, 19 nt, Artificial Sequence
  Description of Artificial Sequence: Synthetic oligonucleotide
  Antisense strand to SEQ ID NO: 2051686
aauuucccggcauagaugg

SEQ ID NO: 2051688 - RNA, 19 nt, Artificial Sequence
  Description of Artificial Sequence: Synthetic oligonucleotide
  Sense strand starting at position 1453 of SEQ ID NO: 1881530
caucuaugccgggaaauuc

SEQ ID NO: 2051689 - RNA, 19 nt, Artificial Sequence
  Description of Artificial Sequence: Synthetic oligonucleotide
  Antisense strand to SEQ ID NO: 2051688
gaauuucccggcauagaug

SEQ ID NO: 2051690 - RNA, 19 nt, Artificial Sequence
  Description of Artificial Sequence: Synthetic oligonucleotide
  Sense strand starting at position 1461 of SEQ ID NO: 1881530
ccgggaaauucccucagca

SEQ ID NO: 2051691 - RNA, 19 nt, Artificial Sequence
  Description of Artificial Sequence: Synthetic oligonucleotide
  Antisense strand to SEQ ID NO: 2051690
ugcugagggaauuucccgg

SEQ ID NO: 2051692 - RNA, 19 nt, Artificial Sequence
  Description of Artificial Sequence: Synthetic oligonucleotide
  Sense strand starting at position 1690 of SEQ ID NO: 1881530
augaaauccuguucgugac

SEQ ID NO: 2051693 - RNA, 19 nt, Artificial Sequence
  Description of Artificial Sequence: Synthetic oligonucleotide
  Antisense strand to SEQ ID NO: 2051692
gucacgaacaggauuucau

SEQ ID NO: 2051694 - RNA, 19 nt, Artificial Sequence
  Description of Artificial Sequence: Synthetic oligonucleotide
  Sense strand starting at position 1760 of SEQ ID NO: 1881530
acacgauaccuuuaagggu

SEQ ID NO: 2051695 - RNA, 19 nt, Artificial Sequence
  Description of Artificial Sequence: Synthetic oligonucleotide
  Antisense strand to SEQ ID NO: 2051694
acccuuaaagguaucgugu

SEQ ID NO: 2051696 - RNA, 19 nt, Artificial Sequence
  Description of Artificial Sequence: Synthetic oligonucleotide
  Sense strand starting at position 1961 of SEQ ID NO: 1881530
uccugaguuggccacucau

SEQ ID NO: 2051697 - RNA, 19 nt, Artificial Sequence
  Description of Artificial Sequence: Synthetic oligonucleotide
  Antisense strand to SEQ ID NO: 2051696
augaguggccaacucagga

SEQ ID NO: 2051698 - RNA, 19 nt, Artificial Sequence
  Description of Artificial Sequence: Synthetic oligonucleotide
  Sense strand starting at position 2149 of SEQ ID NO: 1881530
acuaaaguaugagaauaga

SEQ ID NO: 2051699 - RNA, 19 nt, Artificial Sequence
  Description of Artificial Sequence: Synthetic oligonucleotide
  Antisense strand to SEQ ID NO: 2051698
ucuauucucauacuuuagu

SEQ ID NO: 2051700 - RNA, 19 nt, Artificial Sequence
  Description of Artificial Sequence: Synthetic oligonucleotide
  Sense strand starting at position 2492 of SEQ ID NO: 1881530
acaguugauuuacacauau

SEQ ID NO: 2051701 - RNA, 19 nt, Artificial Sequence
  Description of Artificial Sequence: Synthetic oligonucleotide
  Antisense strand to SEQ ID NO: 2051700
auauguguaaaucaacugu

SEQ ID NO: 2051702 - RNA, 19 nt, Artificial Sequence
  Description of Artificial Sequence: Synthetic oligonucleotide
  Sense strand starting at position 2827 of SEQ ID NO: 1881530
cauagaggaucuguauaca

SEQ ID NO: 2051703 - RNA, 19 nt, Artificial Sequence
  Description of Artificial Sequence: Synthetic oligonucleotide
  Antisense strand to SEQ ID NO: 2051702
uguauacagauccucuaug

SEQ ID NO: 2051704 - RNA, 19 nt, Artificial Sequence
  Description of Artificial Sequence: Synthetic oligonucleotide
  Sense strand starting at position 2837 of SEQ ID NO: 1881530
cuguauacaugauccauca

SEQ ID NO: 2051705 - RNA, 19 nt, Artificial Sequence
  Description of Artificial Sequence: Synthetic oligonucleotide
  Antisense strand to SEQ ID NO: 2051704
ugauggaucauguauacag

SEQ ID NO: 2051706 - RNA, 19 nt, Artificial Sequence
  Description of Artificial Sequence: Synthetic oligonucleotide
  Sense strand starting at position 2849 of SEQ ID NO: 1881530
uccaucauggaucauguau

SEQ ID NO: 2051707 - RNA, 19 nt, Artificial Sequence
  Description of Artificial Sequence: Synthetic oligonucleotide
  Antisense strand to SEQ ID NO: 2051706
auacaugauccaugaugga

SEQ ID NO: 2051708 - RNA, 19 nt, Artificial Sequence
  Description of Artificial Sequence: Synthetic oligonucleotide
  Sense strand starting at position 3066 of SEQ ID NO: 1881530
cacggagagucuuuggcau

SEQ ID NO: 2051709 - RNA, 19 nt, Artificial Sequence
  Description of Artificial Sequence: Synthetic oligonucleotide
  Antisense strand to SEQ ID NO: 2051708
augccaaagacucuccgug

SEQ ID NO: 2051710 - RNA, 19 nt, Artificial Sequence
  Description of Artificial Sequence: Synthetic oligonucleotide
  Sense strand starting at position 3079 of SEQ ID NO: 1881530
uggcaugaauuguuuagac

SEQ ID NO: 2051711 - RNA, 19 nt, Artificial Sequence
  Description of Artificial Sequence: Synthetic oligonucleotide
  Antisense strand to SEQ ID NO: 2051710
gucuaaacaauucaugcca

SEQ ID NO: 2051712 - RNA, 19 nt, Artificial Sequence
  Description of Artificial Sequence: Synthetic oligonucleotide
  Sense strand starting at position 3081 of SEQ ID NO: 1881530
gcaugaauuguuuagacag

SEQ ID NO: 2051713 - RNA, 19 nt, Artificial Sequence
  Description of Artificial Sequence: Synthetic oligonucleotide
  Antisense strand to SEQ ID NO: 2051712
cugucuaaacaauucaugc

SEQ ID NO: 2051714 - RNA, 19 nt, Artificial Sequence
  Description of Artificial Sequence: Synthetic oligonucleotide
  Sense strand starting at position 3266 of SEQ ID NO: 1881530
acauuuaacuccgagauuc

SEQ ID NO: 2051715 - RNA, 19 nt, Artificial Sequence
  Description of Artificial Sequence: Synthetic oligonucleotide
  Antisense strand to SEQ ID NO: 2051714
gaaucucggaguuaaaugu

SEQ ID NO: 2051716 - RNA, 19 nt, Artificial Sequence
  Description of Artificial Sequence: Synthetic oligonucleotide
  Sense strand starting at position 3276 of SEQ ID NO: 1881530
ccgagauucugucucucag

SEQ ID NO: 2051717 - RNA, 19 nt, Artificial Sequence
  Description of Artificial Sequence: Synthetic oligonucleotide
  Antisense strand to SEQ ID NO: 2051716
cugagagacagaaucucgg

SEQ ID NO: 2051718 - RNA, 19 nt, Artificial Sequence
  Description of Artificial Sequence: Synthetic oligonucleotide
  Sense strand starting at position 3326 of SEQ ID NO: 1881530
uuaauauugcccugaguga

SEQ ID NO: 2051719 - RNA, 19 nt, Artificial Sequence
  Description of Artificial Sequence: Synthetic oligonucleotide
  Antisense strand to SEQ ID NO: 2051718
ucacucagggcaauauuaa

SEQ ID NO: 2051720 - RNA, 19 nt, Artificial Sequence
  Description of Artificial Sequence: Synthetic oligonucleotide
  Sense strand starting at position 3396 of SEQ ID NO: 1881530
gcucuuauccugugaaugg

SEQ ID NO: 2051721 - RNA, 19 nt, Artificial Sequence
  Description of Artificial Sequence: Synthetic oligonucleotide
  Antisense strand to SEQ ID NO: 2051720
ccauucacaggauaagagc

SEQ ID NO: 2051722 - RNA, 19 nt, Artificial Sequence
  Description of Artificial Sequence: Synthetic oligonucleotide
  Sense strand starting at position 3411 of SEQ ID NO: 1881530
auggcugaccugcaauaaa

SEQ ID NO: 2051723 - RNA, 19 nt, Artificial Sequence
  Description of Artificial Sequence: Synthetic oligonucleotide
  Antisense strand to SEQ ID NO: 2051722
uuuauugcaggucagccau

SEQ ID NO: 2051724 - RNA, 19 nt, Artificial Sequence
  Description of Artificial Sequence: Synthetic oligonucleotide
  Sense strand starting at position 3466 of SEQ ID NO: 1881530
aggugacggcauugauuga

SEQ ID NO: 2051725 - RNA, 19 nt, Artificial Sequence
  Description of Artificial Sequence: Synthetic oligonucleotide
  Antisense strand to SEQ ID NO: 2051724
ucaaucaaugccgucaccu

SEQ ID NO: 2051726 - RNA, 19 nt, Artificial Sequence
  Description of Artificial Sequence: Synthetic oligonucleotide
  Sense strand starting at position 3637 of SEQ ID NO: 1881530
uuuccaccuuuguuugaga

SEQ ID NO: 2051727 - RNA, 19 nt, Artificial Sequence
  Description of Artificial Sequence: Synthetic oligonucleotide
  Antisense strand to SEQ ID NO: 2051726
ucucaaacaaagguggaaa

SEQ ID NO: 2051728 - RNA, 19 nt, Artificial Sequence
  Description of Artificial Sequence: Synthetic oligonucleotide
  Sense strand starting at position 3638 of SEQ ID NO: 1881530
uuccaccuuuguuugagau

SEQ ID NO: 2051729 - RNA, 19 nt, Artificial Sequence
  Description of Artificial Sequence: Synthetic oligonucleotide
  Antisense strand to SEQ ID NO: 2051728
aucucaaacaaagguggaa

SEQ ID NO: 2051730 - RNA, 19 nt, Artificial Sequence
  Description of Artificial Sequence: Synthetic oligonucleotide
  Sense strand starting at position 3639 of SEQ ID NO: 1881530
uccaccuuuguuugagaua

SEQ ID NO: 2051731 - RNA, 19 nt, Artificial Sequence
  Description of Artificial Sequence: Synthetic oligonucleotide
  Antisense strand to SEQ ID NO: 2051730
uaucucaaacaaaggugga

SEQ ID NO: 2051732 - RNA, 19 nt, Artificial Sequence
  Description of Artificial Sequence: Synthetic oligonucleotide
  Sense strand starting at position 3720 of SEQ ID NO: 1881530
uguugauucuccucaagac

SEQ ID NO: 2051733 - RNA, 19 nt, Artificial Sequence
  Description of Artificial Sequence: Synthetic oligonucleotide
  Antisense strand to SEQ ID NO: 2051732
gucuugaggagaaucaaca

SEQ ID NO: 2051734 - RNA, 19 nt, Artificial Sequence
  Description of Artificial Sequence: Synthetic oligonucleotide
  Sense strand starting at position 3905 of SEQ ID NO: 1881530
ugguauuaaggguguggga

SEQ ID NO: 2051735 - RNA, 19 nt, Artificial Sequence
  Description of Artificial Sequence: Synthetic oligonucleotide
  Antisense strand to SEQ ID NO: 2051734
ucccacacccuuaauacca

SEQ ID NO: 2051736 - RNA, 19 nt, Artificial Sequence
  Description of Artificial Sequence: Synthetic oligonucleotide
  Sense strand starting at position 328 of SEQ ID NO: 1881531
gccacuaaccuaggucaga

SEQ ID NO: 2051737 - RNA, 19 nt, Artificial Sequence
  Description of Artificial Sequence: Synthetic oligonucleotide
  Antisense strand to SEQ ID NO: 2051736
ucugaccuagguuaguggc

SEQ ID NO: 2051738 - RNA, 19 nt, Artificial Sequence
  Description of Artificial Sequence: Synthetic oligonucleotide
  Sense strand starting at position 612 of SEQ ID NO: 1881531
uugagucucuuucuuggaa

SEQ ID NO: 2051739 - RNA, 19 nt, Artificial Sequence
  Description of Artificial Sequence: Synthetic oligonucleotide
  Antisense strand to SEQ ID NO: 2051738
uuccaagaaagagacucaa

SEQ ID NO: 2051740 - RNA, 19 nt, Artificial Sequence
  Description of Artificial Sequence: Synthetic oligonucleotide
  Sense strand starting at position 613 of SEQ ID NO: 1881531
ugagucucuuucuuggaaa

SEQ ID NO: 2051741 - RNA, 19 nt, Artificial Sequence
  Description of Artificial Sequence: Synthetic oligonucleotide
  Antisense strand to SEQ ID NO: 2051740
uuuccaagaaagagacuca

SEQ ID NO: 2051742 - RNA, 19 nt, Artificial Sequence
  Description of Artificial Sequence: Synthetic oligonucleotide
  Sense strand starting at position 704 of SEQ ID NO: 1881531
ucacaagguucuccugauu

SEQ ID NO: 2051743 - RNA, 19 nt, Artificial Sequence
  Description of Artificial Sequence: Synthetic oligonucleotide
  Antisense strand to SEQ ID NO: 2051742
aaucaggagaaccuuguga

SEQ ID NO: 2051744 - RNA, 19 nt, Artificial Sequence
  Description of Artificial Sequence: Synthetic oligonucleotide
  Sense strand starting at position 868 of SEQ ID NO: 1881531
aggugaaguucuucaggac

SEQ ID NO: 2051745 - RNA, 19 nt, Artificial Sequence
  Description of Artificial Sequence: Synthetic oligonucleotide
  Antisense strand to SEQ ID NO: 2051744
guccugaagaacuucaccu

SEQ ID NO: 2051746 - RNA, 19 nt, Artificial Sequence
  Description of Artificial Sequence: Synthetic oligonucleotide
  Sense strand starting at position 869 of SEQ ID NO: 1881531
ggugaaguucuucaggaca

SEQ ID NO: 2051747 - RNA, 19 nt, Artificial Sequence
  Description of Artificial Sequence: Synthetic oligonucleotide
  Antisense strand to SEQ ID NO: 2051746
uguccugaagaacuucacc

SEQ ID NO: 2051748 - RNA, 19 nt, Artificial Sequence
  Description of Artificial Sequence: Synthetic oligonucleotide
  Sense strand starting at position 1093 of SEQ ID NO: 1881531
uucuuuaaggagugaugaa

SEQ ID NO: 2051749 - RNA, 19 nt, Artificial Sequence
  Description of Artificial Sequence: Synthetic oligonucleotide
  Antisense strand to SEQ ID NO: 2051748
uucaucacuccuuaaagaa

SEQ ID NO: 2051750 - RNA, 19 nt, Artificial Sequence
  Description of Artificial Sequence: Synthetic oligonucleotide
  Sense strand starting at position 1281 of SEQ ID NO: 1881531
gauugcuuugcuucguuga

SEQ ID NO: 2051751 - RNA, 19 nt, Artificial Sequence
  Description of Artificial Sequence: Synthetic oligonucleotide
  Antisense strand to SEQ ID NO: 2051750
ucaacgaagcaaagcaauc

SEQ ID NO: 2051752 - RNA, 19 nt, Artificial Sequence
  Description of Artificial Sequence: Synthetic oligonucleotide
  Sense strand starting at position 1437 of SEQ ID NO: 1881531
ccugaugagacacgcaauu

SEQ ID NO: 2051753 - RNA, 19 nt, Artificial Sequence
  Description of Artificial Sequence: Synthetic oligonucleotide
  Antisense strand to SEQ ID NO: 2051752
aauugcgugucucaucagg

SEQ ID NO: 2051754 - RNA, 19 nt, Artificial Sequence
  Description of Artificial Sequence: Synthetic oligonucleotide
  Sense strand starting at position 1563 of SEQ ID NO: 1881531
ugagaaauauuuggaauca

SEQ ID NO: 2051755 - RNA, 19 nt, Artificial Sequence
  Description of Artificial Sequence: Synthetic oligonucleotide
  Antisense strand to SEQ ID NO: 2051754
ugauuccaaauauuucuca

SEQ ID NO: 2051756 - RNA, 19 nt, Artificial Sequence
  Description of Artificial Sequence: Synthetic oligonucleotide
  Sense strand starting at position 1574 of SEQ ID NO: 1881531
uggaaucacuguccacauu

SEQ ID NO: 2051757 - RNA, 19 nt, Artificial Sequence
  Description of Artificial Sequence: Synthetic oligonucleotide
  Antisense strand to SEQ ID NO: 2051756
aauguggacagugauucca

SEQ ID NO: 2051758 - RNA, 19 nt, Artificial Sequence
  Description of Artificial Sequence: Synthetic oligonucleotide
  Sense strand starting at position 1659 of SEQ ID NO: 1881531
gacccaggguuauuagauc

SEQ ID NO: 2051759 - RNA, 19 nt, Artificial Sequence
  Description of Artificial Sequence: Synthetic oligonucleotide
  Antisense strand to SEQ ID NO: 2051758
gaucuaauaacccuggguc

SEQ ID NO: 2051760 - RNA, 19 nt, Artificial Sequence
  Description of Artificial Sequence: Synthetic oligonucleotide
  Sense strand starting at position 1690 of SEQ ID NO: 1881531
caggguaaauauguccuau

SEQ ID NO: 2051761 - RNA, 19 nt, Artificial Sequence
  Description of Artificial Sequence: Synthetic oligonucleotide
  Antisense strand to SEQ ID NO: 2051760
auaggacauauuuacccug

SEQ ID NO: 2051762 - RNA, 19 nt, Artificial Sequence
  Description of Artificial Sequence: Synthetic oligonucleotide
  Sense strand starting at position 1692 of SEQ ID NO: 1881531
ggguaaauauguccuauuc

SEQ ID NO: 2051763 - RNA, 19 nt, Artificial Sequence
  Description of Artificial Sequence: Synthetic oligonucleotide
  Antisense strand to SEQ ID NO: 2051762
gaauaggacauauuuaccc

SEQ ID NO: 2051764 - RNA, 19 nt, Artificial Sequence
  Description of Artificial Sequence: Synthetic oligonucleotide
  Sense strand starting at position 1714 of SEQ ID NO: 1881531
ucuacagacugauugcuua

SEQ ID NO: 2051765 - RNA, 19 nt, Artificial Sequence
  Description of Artificial Sequence: Synthetic oligonucleotide
  Antisense strand to SEQ ID NO: 2051764
uaagcaaucagucuguaga

SEQ ID NO: 2051766 - RNA, 19 nt, Artificial Sequence
  Description of Artificial Sequence: Synthetic oligonucleotide
  Sense strand starting at position 1726 of SEQ ID NO: 1881531
uugcuuaccggguaagaag

SEQ ID NO: 2051767 - RNA, 19 nt, Artificial Sequence
  Description of Artificial Sequence: Synthetic oligonucleotide
  Antisense strand to SEQ ID NO: 2051766
cuucuuacccgguaagcaa

SEQ ID NO: 2051768 - RNA, 19 nt, Artificial Sequence
  Description of Artificial Sequence: Synthetic oligonucleotide
  Sense strand starting at position 1842 of SEQ ID NO: 1881531
aguauuuaguaagaacaag

SEQ ID NO: 2051769 - RNA, 19 nt, Artificial Sequence
  Description of Artificial Sequence: Synthetic oligonucleotide
  Antisense strand to SEQ ID NO: 2051768
cuuguucuuacuaaauacu

SEQ ID NO: 2051770 - RNA, 19 nt, Artificial Sequence
  Description of Artificial Sequence: Synthetic oligonucleotide
  Sense strand starting at position 2084 of SEQ ID NO: 1881531
cugcaaaugcugggaaaga

SEQ ID NO: 2051771 - RNA, 19 nt, Artificial Sequence
  Description of Artificial Sequence: Synthetic oligonucleotide
  Antisense strand to SEQ ID NO: 2051770
ucuuucccagcauuugcag

SEQ ID NO: 2051772 - RNA, 19 nt, Artificial Sequence
  Description of Artificial Sequence: Synthetic oligonucleotide
  Sense strand starting at position 2389 of SEQ ID NO: 1881531
aaagaacugucuuugguug

SEQ ID NO: 2051773 - RNA, 19 nt, Artificial Sequence
  Description of Artificial Sequence: Synthetic oligonucleotide
  Antisense strand to SEQ ID NO: 2051772
caaccaaagacaguucuuu

SEQ ID NO: 2051774 - RNA, 19 nt, Artificial Sequence
  Description of Artificial Sequence: Synthetic oligonucleotide
  Sense strand starting at position 2390 of SEQ ID NO: 1881531
aagaacugucuuugguuga

SEQ ID NO: 2051775 - RNA, 19 nt, Artificial Sequence
  Description of Artificial Sequence: Synthetic oligonucleotide
  Antisense strand to SEQ ID NO: 2051774
ucaaccaaagacaguucuu

SEQ ID NO: 2051776 - RNA, 19 nt, Artificial Sequence
  Description of Artificial Sequence: Synthetic oligonucleotide
  Sense strand starting at position 2527 of SEQ ID NO: 1881531
gacuguuuccgagaauaau

SEQ ID NO: 2051777 - RNA, 19 nt, Artificial Sequence
  Description of Artificial Sequence: Synthetic oligonucleotide
  Antisense strand to SEQ ID NO: 2051776
auuauucucggaaacaguc

SEQ ID NO: 2051778 - RNA, 19 nt, Artificial Sequence
  Description of Artificial Sequence: Synthetic oligonucleotide
  Sense strand starting at position 2530 of SEQ ID NO: 1881531
uguuuccgagaauaaucau

SEQ ID NO: 2051779 - RNA, 19 nt, Artificial Sequence
  Description of Artificial Sequence: Synthetic oligonucleotide
  Antisense strand to SEQ ID NO: 2051778
augauuauucucggaaaca

SEQ ID NO: 2051780 - RNA, 19 nt, Artificial Sequence
  Description of Artificial Sequence: Synthetic oligonucleotide
  Sense strand starting at position 2533 of SEQ ID NO: 1881531
uuccgagaauaaucauaau

SEQ ID NO: 2051781 - RNA, 19 nt, Artificial Sequence
  Description of Artificial Sequence: Synthetic oligonucleotide
  Antisense strand to SEQ ID NO: 2051780
auuaugauuauucucggaa

SEQ ID NO: 2051782 - RNA, 19 nt, Artificial Sequence
  Description of Artificial Sequence: Synthetic oligonucleotide
  Sense strand starting at position 2690 of SEQ ID NO: 1881531
guguguaagcagucuguca

SEQ ID NO: 2051783 - RNA, 19 nt, Artificial Sequence
  Description of Artificial Sequence: Synthetic oligonucleotide
  Antisense strand to SEQ ID NO: 2051782
ugacagacugcuuacacac

SEQ ID NO: 2051784 - RNA, 19 nt, Artificial Sequence
  Description of Artificial Sequence: Synthetic oligonucleotide
  Sense strand starting at position 2742 of SEQ ID NO: 1881531
ggccucugagaugaguuua

SEQ ID NO: 2051785 - RNA, 19 nt, Artificial Sequence
  Description of Artificial Sequence: Synthetic oligonucleotide
  Antisense strand to SEQ ID NO: 2051784
uaaacucaucucagaggcc

SEQ ID NO: 2051786 - RNA, 19 nt, Artificial Sequence
  Description of Artificial Sequence: Synthetic oligonucleotide
  Sense strand starting at position 2747 of SEQ ID NO: 1881531
cugagaugaguuuacuugu

SEQ ID NO: 2051787 - RNA, 19 nt, Artificial Sequence
  Description of Artificial Sequence: Synthetic oligonucleotide
  Antisense strand to SEQ ID NO: 2051786
acaaguaaacucaucucag

SEQ ID NO: 2051788 - RNA, 19 nt, Artificial Sequence
  Description of Artificial Sequence: Synthetic oligonucleotide
  Sense strand starting at position 2757 of SEQ ID NO: 1881531
uuuacuuguccugaagaac

SEQ ID NO: 2051789 - RNA, 19 nt, Artificial Sequence
  Description of Artificial Sequence: Synthetic oligonucleotide
  Antisense strand to SEQ ID NO: 2051788
guucuucaggacaaguaaa

SEQ ID NO: 2051790 - RNA, 19 nt, Artificial Sequence
  Description of Artificial Sequence: Synthetic oligonucleotide
  Sense strand starting at position 2862 of SEQ ID NO: 1881531
agcuaugagguccagcaau

SEQ ID NO: 2051791 - RNA, 19 nt, Artificial Sequence
  Description of Artificial Sequence: Synthetic oligonucleotide
  Antisense strand to SEQ ID NO: 2051790
auugcuggaccucauagcu

SEQ ID NO: 2051792 - RNA, 19 nt, Artificial Sequence
  Description of Artificial Sequence: Synthetic oligonucleotide
  Sense strand starting at position 2872 of SEQ ID NO: 1881531
uccagcaauccggacaaua

SEQ ID NO: 2051793 - RNA, 19 nt, Artificial Sequence
  Description of Artificial Sequence: Synthetic oligonucleotide
  Antisense strand to SEQ ID NO: 2051792
uauuguccggauugcugga

SEQ ID NO: 2051794 - RNA, 19 nt, Artificial Sequence
  Description of Artificial Sequence: Synthetic oligonucleotide
  Sense strand starting at position 2910 of SEQ ID NO: 1881531
gagauaaauuaggccugau

SEQ ID NO: 2051795 - RNA, 19 nt, Artificial Sequence
  Description of Artificial Sequence: Synthetic oligonucleotide
  Antisense strand to SEQ ID NO: 2051794
aucaggccuaauuuaucuc

SEQ ID NO: 2051796 - RNA, 19 nt, Artificial Sequence
  Description of Artificial Sequence: Synthetic oligonucleotide
  Sense strand starting at position 2913 of SEQ ID NO: 1881531
auaaauuaggccugaucac

SEQ ID NO: 2051797 - RNA, 19 nt, Artificial Sequence
  Description of Artificial Sequence: Synthetic oligonucleotide
  Antisense strand to SEQ ID NO: 2051796
gugaucaggccuaauuuau

SEQ ID NO: 2051798 - RNA, 19 nt, Artificial Sequence
  Description of Artificial Sequence: Synthetic oligonucleotide
  Sense strand starting at position 2923 of SEQ ID NO: 1881531
ccugaucaccuugaaguuu

SEQ ID NO: 2051799 - RNA, 19 nt, Artificial Sequence
  Description of Artificial Sequence: Synthetic oligonucleotide
  Antisense strand to SEQ ID NO: 2051798
aaacuucaaggugaucagg

SEQ ID NO: 2051800 - RNA, 19 nt, Artificial Sequence
  Description of Artificial Sequence: Synthetic oligonucleotide
  Sense strand starting at position 2961 of SEQ ID NO: 1881531
aggagauacacuggcuuau

SEQ ID NO: 2051801 - RNA, 19 nt, Artificial Sequence
  Description of Artificial Sequence: Synthetic oligonucleotide
  Antisense strand to SEQ ID NO: 2051800
auaagccaguguaucuccu

SEQ ID NO: 2051802 - RNA, 19 nt, Artificial Sequence
  Description of Artificial Sequence: Synthetic oligonucleotide
  Sense strand starting at position 3068 of SEQ ID NO: 1881531
ugcauauggugaccaagaa

SEQ ID NO: 2051803 - RNA, 19 nt, Artificial Sequence
  Description of Artificial Sequence: Synthetic oligonucleotide
  Antisense strand to SEQ ID NO: 2051802
uucuuggucaccauaugca

SEQ ID NO: 2051804 - RNA, 19 nt, Artificial Sequence
  Description of Artificial Sequence: Synthetic oligonucleotide
  Sense strand starting at position 3101 of SEQ ID NO: 1881531
cagagauaacuguggcaga

SEQ ID NO: 2051805 - RNA, 19 nt, Artificial Sequence
  Description of Artificial Sequence: Synthetic oligonucleotide
  Antisense strand to SEQ ID NO: 2051804
ucugccacaguuaucucug

SEQ ID NO: 2051806 - RNA, 19 nt, Artificial Sequence
  Description of Artificial Sequence: Synthetic oligonucleotide
  Sense strand starting at position 3200 of SEQ ID NO: 1881531
ugaguaucuggcuaacuuu

SEQ ID NO: 2051807 - RNA, 19 nt, Artificial Sequence
  Description of Artificial Sequence: Synthetic oligonucleotide
  Antisense strand to SEQ ID NO: 2051806
aaaguuagccagauacuca

SEQ ID NO: 2051808 - RNA, 19 nt, Artificial Sequence
  Description of Artificial Sequence: Synthetic oligonucleotide
  Sense strand starting at position 3206 of SEQ ID NO: 1881531
ucuggcuaacuuuaagaca

SEQ ID NO: 2051809 - RNA, 19 nt, Artificial Sequence
  Description of Artificial Sequence: Synthetic oligonucleotide
  Antisense strand to SEQ ID NO: 2051808
ugucuuaaaguuagccaga

SEQ ID NO: 2051810 - RNA, 19 nt, Artificial Sequence
  Description of Artificial Sequence: Synthetic oligonucleotide
  Sense strand starting at position 3331 of SEQ ID NO: 1881531
ccaggaauauaguucucca

SEQ ID NO: 2051811 - RNA, 19 nt, Artificial Sequence
  Description of Artificial Sequence: Synthetic oligonucleotide
  Antisense strand to SEQ ID NO: 2051810
uggagaacuauauuccugg

SEQ ID NO: 2051812 - RNA, 19 nt, Artificial Sequence
  Description of Artificial Sequence: Synthetic oligonucleotide
  Sense strand starting at position 3334 of SEQ ID NO: 1881531
ggaauauaguucuccaguu

SEQ ID NO: 2051813 - RNA, 19 nt, Artificial Sequence
  Description of Artificial Sequence: Synthetic oligonucleotide
  Antisense strand to SEQ ID NO: 2051812
aacuggagaacuauauucc

SEQ ID NO: 2051814 - RNA, 19 nt, Artificial Sequence
  Description of Artificial Sequence: Synthetic oligonucleotide
  Sense strand starting at position 3580 of SEQ ID NO: 1881531
uccaguguucuauaccauu

SEQ ID NO: 2051815 - RNA, 19 nt, Artificial Sequence
  Description of Artificial Sequence: Synthetic oligonucleotide
  Antisense strand to SEQ ID NO: 2051814
aaugguauagaacacugga

SEQ ID NO: 2051816 - RNA, 19 nt, Artificial Sequence
  Description of Artificial Sequence: Synthetic oligonucleotide
  Sense strand starting at position 234 of SEQ ID NO: 1881532
ugguaauugguugauguuu

SEQ ID NO: 2051817 - RNA, 19 nt, Artificial Sequence
  Description of Artificial Sequence: Synthetic oligonucleotide
  Antisense strand to SEQ ID NO: 2051816
aaacaucaaccaauuacca

SEQ ID NO: 2051818 - RNA, 19 nt, Artificial Sequence
  Description of Artificial Sequence: Synthetic oligonucleotide
  Sense strand starting at position 294 of SEQ ID NO: 1881532
uuguauaaauaggcucaau

SEQ ID NO: 2051819 - RNA, 19 nt, Artificial Sequence
  Description of Artificial Sequence: Synthetic oligonucleotide
  Antisense strand to SEQ ID NO: 2051818
auugagccuauuuauacaa

SEQ ID NO: 2051820 - RNA, 19 nt, Artificial Sequence
  Description of Artificial Sequence: Synthetic oligonucleotide
  Sense strand starting at position 320 of SEQ ID NO: 1881532
uuuacaauggguuggauaa

SEQ ID NO: 2051821 - RNA, 19 nt, Artificial Sequence
  Description of Artificial Sequence: Synthetic oligonucleotide
  Antisense strand to SEQ ID NO: 2051820
uuauccaacccauuguaaa

SEQ ID NO: 2051822 - RNA, 19 nt, Artificial Sequence
  Description of Artificial Sequence: Synthetic oligonucleotide
  Sense strand starting at position 321 of SEQ ID NO: 1881532
uuacaauggguuggauaau

SEQ ID NO: 2051823 - RNA, 19 nt, Artificial Sequence
  Description of Artificial Sequence: Synthetic oligonucleotide
  Antisense strand to SEQ ID NO: 2051822
auuauccaacccauuguaa

SEQ ID NO: 2051824 - RNA, 19 nt, Artificial Sequence
  Description of Artificial Sequence: Synthetic oligonucleotide
  Sense strand starting at position 453 of SEQ ID NO: 1881532
gcaugaugaaguggaaaua

SEQ ID NO: 2051825 - RNA, 19 nt, Artificial Sequence
  Description of Artificial Sequence: Synthetic oligonucleotide
  Antisense strand to SEQ ID NO: 2051824
uauuuccacuucaucaugc

SEQ ID NO: 2051826 - RNA, 19 nt, Artificial Sequence
  Description of Artificial Sequence: Synthetic oligonucleotide
  Sense strand starting at position 500 of SEQ ID NO: 1881532
guuguagaccaagauauuc

SEQ ID NO: 2051827 - RNA, 19 nt, Artificial Sequence
  Description of Artificial Sequence: Synthetic oligonucleotide
  Antisense strand to SEQ ID NO: 2051826
gaauaucuuggucuacaac

SEQ ID NO: 2051828 - RNA, 19 nt, Artificial Sequence
  Description of Artificial Sequence: Synthetic oligonucleotide
  Sense strand starting at position 520 of SEQ ID NO: 1881532
aguaucuugcacuaaaguu

SEQ ID NO: 2051829 - RNA, 19 nt, Artificial Sequence
  Description of Artificial Sequence: Synthetic oligonucleotide
  Antisense strand to SEQ ID NO: 2051828
aacuuuagugcaagauacu

SEQ ID NO: 2051830 - RNA, 19 nt, Artificial Sequence
  Description of Artificial Sequence: Synthetic oligonucleotide
  Sense strand starting at position 602 of SEQ ID NO: 1881532
ggagaagaucuauguaagu

SEQ ID NO: 2051831 - RNA, 19 nt, Artificial Sequence
  Description of Artificial Sequence: Synthetic oligonucleotide
  Antisense strand to SEQ ID NO: 2051830
acuuacauagaucuucucc

SEQ ID NO: 2051832 - RNA, 19 nt, Artificial Sequence
  Description of Artificial Sequence: Synthetic oligonucleotide
  Sense strand starting at position 676 of SEQ ID NO: 1881532
cugaaagaacauugcuacu

SEQ ID NO: 2051833 - RNA, 19 nt, Artificial Sequence
  Description of Artificial Sequence: Synthetic oligonucleotide
  Antisense strand to SEQ ID NO: 2051832
aguagcaauguucuuucag

SEQ ID NO: 2051834 - RNA, 19 nt, Artificial Sequence
  Description of Artificial Sequence: Synthetic oligonucleotide
  Sense strand starting at position 689 of SEQ ID NO: 1881532
gcuacuauuagagggaaca

SEQ ID NO: 2051835 - RNA, 19 nt, Artificial Sequence
  Description of Artificial Sequence: Synthetic oligonucleotide
  Antisense strand to SEQ ID NO: 2051834
uguucccucuaauaguagc

SEQ ID NO: 2051836 - RNA, 19 nt, Artificial Sequence
  Description of Artificial Sequence: Synthetic oligonucleotide
  Sense strand starting at position 755 of SEQ ID NO: 1881532
gguacaguauuucuagcau

SEQ ID NO: 2051837 - RNA, 19 nt, Artificial Sequence
  Description of Artificial Sequence: Synthetic oligonucleotide
  Antisense strand to SEQ ID NO: 2051836
augcuagaaauacuguacc

SEQ ID NO: 2051838 - RNA, 19 nt, Artificial Sequence
  Description of Artificial Sequence: Synthetic oligonucleotide
  Sense strand starting at position 1174 of SEQ ID NO: 1881532
aucaauagagccuggguua

SEQ ID NO: 2051839 - RNA, 19 nt, Artificial Sequence
  Description of Artificial Sequence: Synthetic oligonucleotide
  Antisense strand to SEQ ID NO: 2051838
uaacccaggcucuauugau

SEQ ID NO: 2051840 - RNA, 19 nt, Artificial Sequence
  Description of Artificial Sequence: Synthetic oligonucleotide
  Sense strand starting at position 1175 of SEQ ID NO: 1881532
ucaauagagccuggguuaa

SEQ ID NO: 2051841 - RNA, 19 nt, Artificial Sequence
  Description of Artificial Sequence: Synthetic oligonucleotide
  Antisense strand to SEQ ID NO: 2051840
uuaacccaggcucuauuga

SEQ ID NO: 2051842 - RNA, 19 nt, Artificial Sequence
  Description of Artificial Sequence: Synthetic oligonucleotide
  Sense strand starting at position 1241 of SEQ ID NO: 1881532
cacauaucgggugaugcaa

SEQ ID NO: 2051843 - RNA, 19 nt, Artificial Sequence
  Description of Artificial Sequence: Synthetic oligonucleotide
  Antisense strand to SEQ ID NO: 2051842
uugcaucacccgauaugug

SEQ ID NO: 2051844 - RNA, 19 nt, Artificial Sequence
  Description of Artificial Sequence: Synthetic oligonucleotide
  Sense strand starting at position 1276 of SEQ ID NO: 1881532
ccgauugauguuuaacuuu

SEQ ID NO: 2051845 - RNA, 19 nt, Artificial Sequence
  Description of Artificial Sequence: Synthetic oligonucleotide
  Antisense strand to SEQ ID NO: 2051844
aaaguuaaacaucaaucgg

SEQ ID NO: 2051846 - RNA, 19 nt, Artificial Sequence
  Description of Artificial Sequence: Synthetic oligonucleotide
  Sense strand starting at position 1309 of SEQ ID NO: 1881532
uugacaaauacguagguua

SEQ ID NO: 2051847 - RNA, 19 nt, Artificial Sequence
  Description of Artificial Sequence: Synthetic oligonucleotide
  Antisense strand to SEQ ID NO: 2051846
uaaccuacguauuugucaa

SEQ ID NO: 2051848 - RNA, 19 nt, Artificial Sequence
  Description of Artificial Sequence: Synthetic oligonucleotide
  Sense strand starting at position 1311 of SEQ ID NO: 1881532
gacaaauacguagguuaaa

SEQ ID NO: 2051849 - RNA, 19 nt, Artificial Sequence
  Description of Artificial Sequence: Synthetic oligonucleotide
  Antisense strand to SEQ ID NO: 2051848
uuuaaccuacguauuuguc

SEQ ID NO: 2051850 - RNA, 19 nt, Artificial Sequence
  Description of Artificial Sequence: Synthetic oligonucleotide
  Sense strand starting at position 1407 of SEQ ID NO: 1881532
ggacuuuaucagggugaau

SEQ ID NO: 2051851 - RNA, 19 nt, Artificial Sequence
  Description of Artificial Sequence: Synthetic oligonucleotide
  Antisense strand to SEQ ID NO: 2051850
auucacccugauaaagucc

SEQ ID NO: 2051852 - RNA, 19 nt, Artificial Sequence
  Description of Artificial Sequence: Synthetic oligonucleotide
  Sense strand starting at position 1409 of SEQ ID NO: 1881532
acuuuaucagggugaauau

SEQ ID NO: 2051853 - RNA, 19 nt, Artificial Sequence
  Description of Artificial Sequence: Synthetic oligonucleotide
  Antisense strand to SEQ ID NO: 2051852
auauucacccugauaaagu

SEQ ID NO: 2051854 - RNA, 19 nt, Artificial Sequence
  Description of Artificial Sequence: Synthetic oligonucleotide
  Sense strand starting at position 1517 of SEQ ID NO: 1881532
agcacagauaugugaggua

SEQ ID NO: 2051855 - RNA, 19 nt, Artificial Sequence
  Description of Artificial Sequence: Synthetic oligonucleotide
  Antisense strand to SEQ ID NO: 2051854
uaccucacauaucugugcu

SEQ ID NO: 2051856 - RNA, 19 nt, Artificial Sequence
  Description of Artificial Sequence: Synthetic oligonucleotide
  Sense strand starting at position 1538 of SEQ ID NO: 1881532
aggugcuaacuugaaauau

SEQ ID NO: 2051857 - RNA, 19 nt, Artificial Sequence
  Description of Artificial Sequence: Synthetic oligonucleotide
  Antisense strand to SEQ ID NO: 2051856
auauuucaaguuagcaccu

SEQ ID NO: 2051858 - RNA, 19 nt, Artificial Sequence
  Description of Artificial Sequence: Synthetic oligonucleotide
  Sense strand starting at position 1697 of SEQ ID NO: 1881532
ucaacaugacucgaguaac

SEQ ID NO: 2051859 - RNA, 19 nt, Artificial Sequence
  Description of Artificial Sequence: Synthetic oligonucleotide
  Antisense strand to SEQ ID NO: 2051858
guuacucgagucauguuga

SEQ ID NO: 2051860 - RNA, 19 nt, Artificial Sequence
  Description of Artificial Sequence: Synthetic oligonucleotide
  Sense strand starting at position 1700 of SEQ ID NO: 1881532
acaugacucgaguaacuac

SEQ ID NO: 2051861 - RNA, 19 nt, Artificial Sequence
  Description of Artificial Sequence: Synthetic oligonucleotide
  Antisense strand to SEQ ID NO: 2051860
guaguuacucgagucaugu

SEQ ID NO: 2051862 - RNA, 19 nt, Artificial Sequence
  Description of Artificial Sequence: Synthetic oligonucleotide
  Sense strand starting at position 2046 of SEQ ID NO: 1881532
acauuaugauguucuugaa

SEQ ID NO: 2051863 - RNA, 19 nt, Artificial Sequence
  Description of Artificial Sequence: Synthetic oligonucleotide
  Antisense strand to SEQ ID NO: 2051862
uucaagaacaucauaaugu

SEQ ID NO: 2051864 - RNA, 19 nt, Artificial Sequence
  Description of Artificial Sequence: Synthetic oligonucleotide
  Sense strand starting at position 2086 of SEQ ID NO: 1881532
auucuaaggguugagaugu

SEQ ID NO: 2051865 - RNA, 19 nt, Artificial Sequence
  Description of Artificial Sequence: Synthetic oligonucleotide
  Antisense strand to SEQ ID NO: 2051864
acaucucaacccuuagaau

SEQ ID NO: 2051866 - RNA, 19 nt, Artificial Sequence
  Description of Artificial Sequence: Synthetic oligonucleotide
  Sense strand starting at position 2092 of SEQ ID NO: 1881532
aggguugagauguaccuau

SEQ ID NO: 2051867 - RNA, 19 nt, Artificial Sequence
  Description of Artificial Sequence: Synthetic oligonucleotide
  Antisense strand to SEQ ID NO: 2051866
auagguacaucucaacccu

SEQ ID NO: 2051868 - RNA, 19 nt, Artificial Sequence
  Description of Artificial Sequence: Synthetic oligonucleotide
  Sense strand starting at position 2231 of SEQ ID NO: 1881532
gcuagcuaucuggaaagaa

SEQ ID NO: 2051869 - RNA, 19 nt, Artificial Sequence
  Description of Artificial Sequence: Synthetic oligonucleotide
  Antisense strand to SEQ ID NO: 2051868
uucuuuccagauagcuagc

SEQ ID NO: 2051870 - RNA, 19 nt, Artificial Sequence
  Description of Artificial Sequence: Synthetic oligonucleotide
  Sense strand starting at position 2353 of SEQ ID NO: 1881532
aagagaggucaauguuugu

SEQ ID NO: 2051871 - RNA, 19 nt, Artificial Sequence
  Description of Artificial Sequence: Synthetic oligonucleotide
  Antisense strand to SEQ ID NO: 2051870
acaaacauugaccucucuu

SEQ ID NO: 2051872 - RNA, 19 nt, Artificial Sequence
  Description of Artificial Sequence: Synthetic oligonucleotide
  Sense strand starting at position 2511 of SEQ ID NO: 1881532
augugucauuaugcaauuu

SEQ ID NO: 2051873 - RNA, 19 nt, Artificial Sequence
  Description of Artificial Sequence: Synthetic oligonucleotide
  Antisense strand to SEQ ID NO: 2051872
aaauugcauaaugacacau

SEQ ID NO: 2051874 - RNA, 19 nt, Artificial Sequence
  Description of Artificial Sequence: Synthetic oligonucleotide
  Sense strand starting at position 2628 of SEQ ID NO: 1881532
ggcagaacaugaguugaaa

SEQ ID NO: 2051875 - RNA, 19 nt, Artificial Sequence
  Description of Artificial Sequence: Synthetic oligonucleotide
  Antisense strand to SEQ ID NO: 2051874
uuucaacucauguucugcc

SEQ ID NO: 2051876 - RNA, 19 nt, Artificial Sequence
  Description of Artificial Sequence: Synthetic oligonucleotide
  Sense strand starting at position 2716 of SEQ ID NO: 1881532
ucagaugcacuugagaguu

SEQ ID NO: 2051877 - RNA, 19 nt, Artificial Sequence
  Description of Artificial Sequence: Synthetic oligonucleotide
  Antisense strand to SEQ ID NO: 2051876
aacucucaagugcaucuga

SEQ ID NO: 2051878 - RNA, 19 nt, Artificial Sequence
  Description of Artificial Sequence: Synthetic oligonucleotide
  Sense strand starting at position 2743 of SEQ ID NO: 1881532
ggcaaauucuaauugaauu

SEQ ID NO: 2051879 - RNA, 19 nt, Artificial Sequence
  Description of Artificial Sequence: Synthetic oligonucleotide
  Antisense strand to SEQ ID NO: 2051878
aauucaauuagaauuugcc

SEQ ID NO: 2051880 - RNA, 19 nt, Artificial Sequence
  Description of Artificial Sequence: Synthetic oligonucleotide
  Sense strand starting at position 2802 of SEQ ID NO: 1881532
ggcaguguggauuaaggaa

SEQ ID NO: 2051881 - RNA, 19 nt, Artificial Sequence
  Description of Artificial Sequence: Synthetic oligonucleotide
  Antisense strand to SEQ ID NO: 2051880
uuccuuaauccacacugcc

SEQ ID NO: 2051882 - RNA, 19 nt, Artificial Sequence
  Description of Artificial Sequence: Synthetic oligonucleotide
  Sense strand starting at position 3073 of SEQ ID NO: 1881532
aaugauaaauuugggaaga

SEQ ID NO: 2051883 - RNA, 19 nt, Artificial Sequence
  Description of Artificial Sequence: Synthetic oligonucleotide
  Antisense strand to SEQ ID NO: 2051882
ucuucccaaauuuaucauu

SEQ ID NO: 2051884 - RNA, 19 nt, Artificial Sequence
  Description of Artificial Sequence: Synthetic oligonucleotide
  Sense strand starting at position 3074 of SEQ ID NO: 1881532
augauaaauuugggaagaa

SEQ ID NO: 2051885 - RNA, 19 nt, Artificial Sequence
  Description of Artificial Sequence: Synthetic oligonucleotide
  Antisense strand to SEQ ID NO: 2051884
uucuucccaaauuuaucau

SEQ ID NO: 2051886 - RNA, 19 nt, Artificial Sequence
  Description of Artificial Sequence: Synthetic oligonucleotide
  Sense strand starting at position 3141 of SEQ ID NO: 1881532
gauagagaucucugcucuu

SEQ ID NO: 2051887 - RNA, 19 nt, Artificial Sequence
  Description of Artificial Sequence: Synthetic oligonucleotide
  Antisense strand to SEQ ID NO: 2051886
aagagcagagaucucuauc

SEQ ID NO: 2051888 - RNA, 19 nt, Artificial Sequence
  Description of Artificial Sequence: Synthetic oligonucleotide
  Sense strand starting at position 3169 of SEQ ID NO: 1881532
agacuuccacauggucaaa

SEQ ID NO: 2051889 - RNA, 19 nt, Artificial Sequence
  Description of Artificial Sequence: Synthetic oligonucleotide
  Antisense strand to SEQ ID NO: 2051888
uuugaccauguggaagucu

SEQ ID NO: 2051890 - RNA, 19 nt, Artificial Sequence
  Description of Artificial Sequence: Synthetic oligonucleotide
  Sense strand starting at position 3306 of SEQ ID NO: 1881532
uguguuucucaagaaagua

SEQ ID NO: 2051891 - RNA, 19 nt, Artificial Sequence
  Description of Artificial Sequence: Synthetic oligonucleotide
  Antisense strand to SEQ ID NO: 2051890
uacuuucuugagaaacaca

SEQ ID NO: 2051892 - RNA, 19 nt, Artificial Sequence
  Description of Artificial Sequence: Synthetic oligonucleotide
  Sense strand starting at position 3483 of SEQ ID NO: 1881532
ccaguuugauucuuaagac

SEQ ID NO: 2051893 - RNA, 19 nt, Artificial Sequence
  Description of Artificial Sequence: Synthetic oligonucleotide
  Antisense strand to SEQ ID NO: 2051892
gucuuaagaaucaaacugg

SEQ ID NO: 2051894 - RNA, 19 nt, Artificial Sequence
  Description of Artificial Sequence: Synthetic oligonucleotide
  Sense strand starting at position 3808 of SEQ ID NO: 1881532
ucaccaaugucaguaauga

SEQ ID NO: 2051895 - RNA, 19 nt, Artificial Sequence
  Description of Artificial Sequence: Synthetic oligonucleotide
  Antisense strand to SEQ ID NO: 2051894
ucauuacugacauugguga

SEQ ID NO: 2051896 - RNA, 19 nt, Artificial Sequence
  Description of Artificial Sequence: Synthetic oligonucleotide
  Sense strand starting at position 167 of SEQ ID NO: 1881533
uugugaaagcgcuuuaguu

SEQ ID NO: 2051897 - RNA, 19 nt, Artificial Sequence
  Description of Artificial Sequence: Synthetic oligonucleotide
  Antisense strand to SEQ ID NO: 2051896
aacuaaagcgcuuucacaa

SEQ ID NO: 2051898 - RNA, 19 nt, Artificial Sequence
  Description of Artificial Sequence: Synthetic oligonucleotide
  Sense strand starting at position 168 of SEQ ID NO: 1881533
ugugaaagcgcuuuaguuu

SEQ ID NO: 2051899 - RNA, 19 nt, Artificial Sequence
  Description of Artificial Sequence: Synthetic oligonucleotide
  Antisense strand to SEQ ID NO: 2051898
aaacuaaagcgcuuucaca

SEQ ID NO: 2051900 - RNA, 19 nt, Artificial Sequence
  Description of Artificial Sequence: Synthetic oligonucleotide
  Sense strand starting at position 547 of SEQ ID NO: 1881533
ccgguucccucccugauua

SEQ ID NO: 2051901 - RNA, 19 nt, Artificial Sequence
  Description of Artificial Sequence: Synthetic oligonucleotide
  Antisense strand to SEQ ID NO: 2051900
uaaucagggagggaaccgg

SEQ ID NO: 2051902 - RNA, 19 nt, Artificial Sequence
  Description of Artificial Sequence: Synthetic oligonucleotide
  Sense strand starting at position 625 of SEQ ID NO: 1881533
ggauccagugcuggugaau

SEQ ID NO: 2051903 - RNA, 19 nt, Artificial Sequence
  Description of Artificial Sequence: Synthetic oligonucleotide
  Antisense strand to SEQ ID NO: 2051902
auucaccagcacuggaucc

SEQ ID NO: 2051904 - RNA, 19 nt, Artificial Sequence
  Description of Artificial Sequence: Synthetic oligonucleotide
  Sense strand starting at position 634 of SEQ ID NO: 1881533
gcuggugaaucagugugau

SEQ ID NO: 2051905 - RNA, 19 nt, Artificial Sequence
  Description of Artificial Sequence: Synthetic oligonucleotide
  Antisense strand to SEQ ID NO: 2051904
aucacacugauucaccagc

SEQ ID NO: 2051906 - RNA, 19 nt, Artificial Sequence
  Description of Artificial Sequence: Synthetic oligonucleotide
  Sense strand starting at position 721 of SEQ ID NO: 1881533
ugaguaggcucucugagag

SEQ ID NO: 2051907 - RNA, 19 nt, Artificial Sequence
  Description of Artificial Sequence: Synthetic oligonucleotide
  Antisense strand to SEQ ID NO: 2051906
cucucagagagccuacuca

SEQ ID NO: 2051908 - RNA, 19 nt, Artificial Sequence
  Description of Artificial Sequence: Synthetic oligonucleotide
  Sense strand starting at position 937 of SEQ ID NO: 1881533
ugugaugugaccuaugggu

SEQ ID NO: 2051909 - RNA, 19 nt, Artificial Sequence
  Description of Artificial Sequence: Synthetic oligonucleotide
  Antisense strand to SEQ ID NO: 2051908
acccauaggucacaucaca

SEQ ID NO: 2051910 - RNA, 19 nt, Artificial Sequence
  Description of Artificial Sequence: Synthetic oligonucleotide
  Sense strand starting at position 939 of SEQ ID NO: 1881533
ugaugugaccuaugggucu

SEQ ID NO: 2051911 - RNA, 19 nt, Artificial Sequence
  Description of Artificial Sequence: Synthetic oligonucleotide
  Antisense strand to SEQ ID NO: 2051910
agacccauaggucacauca

SEQ ID NO: 2051912 - RNA, 19 nt, Artificial Sequence
  Description of Artificial Sequence: Synthetic oligonucleotide
  Sense strand starting at position 1088 of SEQ ID NO: 1881533
gggcgcuuuccagagagca

SEQ ID NO: 2051913 - RNA, 19 nt, Artificial Sequence
  Description of Artificial Sequence: Synthetic oligonucleotide
  Antisense strand to SEQ ID NO: 2051912
ugcucucuggaaagcgccc

SEQ ID NO: 2051914 - RNA, 19 nt, Artificial Sequence
  Description of Artificial Sequence: Synthetic oligonucleotide
  Sense strand starting at position 1596 of SEQ ID NO: 1881533
uaguucuggccaggaggau

SEQ ID NO: 2051915 - RNA, 19 nt, Artificial Sequence
  Description of Artificial Sequence: Synthetic oligonucleotide
  Antisense strand to SEQ ID NO: 2051914
auccuccuggccagaacua

SEQ ID NO: 2051916 - RNA, 19 nt, Artificial Sequence
  Description of Artificial Sequence: Synthetic oligonucleotide
  Sense strand starting at position 1608 of SEQ ID NO: 1881533
ggaggauucucacccaguu

SEQ ID NO: 2051917 - RNA, 19 nt, Artificial Sequence
  Description of Artificial Sequence: Synthetic oligonucleotide
  Antisense strand to SEQ ID NO: 2051916
aacugggugagaauccucc

SEQ ID NO: 2051918 - RNA, 19 nt, Artificial Sequence
  Description of Artificial Sequence: Synthetic oligonucleotide
  Sense strand starting at position 1819 of SEQ ID NO: 1881533
guuggaaauucucccgcaa

SEQ ID NO: 2051919 - RNA, 19 nt, Artificial Sequence
  Description of Artificial Sequence: Synthetic oligonucleotide
  Antisense strand to SEQ ID NO: 2051918
uugcgggagaauuuccaac

SEQ ID NO: 2051920 - RNA, 19 nt, Artificial Sequence
  Description of Artificial Sequence: Synthetic oligonucleotide
  Sense strand starting at position 1823 of SEQ ID NO: 1881533
gaaauucucccgcaagcag

SEQ ID NO: 2051921 - RNA, 19 nt, Artificial Sequence
  Description of Artificial Sequence: Synthetic oligonucleotide
  Antisense strand to SEQ ID NO: 2051920
cugcuugcgggagaauuuc

SEQ ID NO: 2051922 - RNA, 19 nt, Artificial Sequence
  Description of Artificial Sequence: Synthetic oligonucleotide
  Sense strand starting at position 2173 of SEQ ID NO: 1881533
gccauaaucggugugugcu

SEQ ID NO: 2051923 - RNA, 19 nt, Artificial Sequence
  Description of Artificial Sequence: Synthetic oligonucleotide
  Antisense strand to SEQ ID NO: 2051922
agcacacaccgauuauggc

SEQ ID NO: 2051924 - RNA, 19 nt, Artificial Sequence
  Description of Artificial Sequence: Synthetic oligonucleotide
  Sense strand starting at position 2226 of SEQ ID NO: 1881533
auggguugcauugauaauu

SEQ ID NO: 2051925 - RNA, 19 nt, Artificial Sequence
  Description of Artificial Sequence: Synthetic oligonucleotide
  Antisense strand to SEQ ID NO: 2051924
aauuaucaaugcaacccau

SEQ ID NO: 2051926 - RNA, 19 nt, Artificial Sequence
  Description of Artificial Sequence: Synthetic oligonucleotide
  Sense strand starting at position 2283 of SEQ ID NO: 1881533
uucuuaguguuucuuacau

SEQ ID NO: 2051927 - RNA, 19 nt, Artificial Sequence
  Description of Artificial Sequence: Synthetic oligonucleotide
  Antisense strand to SEQ ID NO: 2051926
auguaagaaacacuaagaa

SEQ ID NO: 2051928 - RNA, 19 nt, Artificial Sequence
  Description of Artificial Sequence: Synthetic oligonucleotide
  Sense strand starting at position 2369 of SEQ ID NO: 1881533
uucuuucuuugaucguaua

SEQ ID NO: 2051929 - RNA, 19 nt, Artificial Sequence
  Description of Artificial Sequence: Synthetic oligonucleotide
  Antisense strand to SEQ ID NO: 2051928
uauacgaucaaagaaagaa

SEQ ID NO: 2051930 - RNA, 19 nt, Artificial Sequence
  Description of Artificial Sequence: Synthetic oligonucleotide
  Sense strand starting at position 2370 of SEQ ID NO: 1881533
ucuuucuuugaucguauau

SEQ ID NO: 2051931 - RNA, 19 nt, Artificial Sequence
  Description of Artificial Sequence: Synthetic oligonucleotide
  Antisense strand to SEQ ID NO: 2051930
auauacgaucaaagaaaga

SEQ ID NO: 2051932 - RNA, 19 nt, Artificial Sequence
  Description of Artificial Sequence: Synthetic oligonucleotide
  Sense strand starting at position 2502 of SEQ ID NO: 1881533
cuguuaaauguugggagaa

SEQ ID NO: 2051933 - RNA, 19 nt, Artificial Sequence
  Description of Artificial Sequence: Synthetic oligonucleotide
  Antisense strand to SEQ ID NO: 2051932
uucucccaacauuuaacag

SEQ ID NO: 2051934 - RNA, 19 nt, Artificial Sequence
  Description of Artificial Sequence: Synthetic oligonucleotide
  Sense strand starting at position 2731 of SEQ ID NO: 1881533
guuagcaaucuguauugaa

SEQ ID NO: 2051935 - RNA, 19 nt, Artificial Sequence
  Description of Artificial Sequence: Synthetic oligonucleotide
  Antisense strand to SEQ ID NO: 2051934
uucaauacagauugcuaac

SEQ ID NO: 2051936 - RNA, 19 nt, Artificial Sequence
  Description of Artificial Sequence: Synthetic oligonucleotide
  Sense strand starting at position 2764 of SEQ ID NO: 1881533
aauguaaaggugggcgaua

SEQ ID NO: 2051937 - RNA, 19 nt, Artificial Sequence
  Description of Artificial Sequence: Synthetic oligonucleotide
  Antisense strand to SEQ ID NO: 2051936
uaucgcccaccuuuacauu

SEQ ID NO: 2051938 - RNA, 19 nt, Artificial Sequence
  Description of Artificial Sequence: Synthetic oligonucleotide
  Sense strand starting at position 2817 of SEQ ID NO: 1881533
caaaguugccaucaguuga

SEQ ID NO: 2051939 - RNA, 19 nt, Artificial Sequence
  Description of Artificial Sequence: Synthetic oligonucleotide
  Antisense strand to SEQ ID NO: 2051938
ucaacugauggcaacuuug

SEQ ID NO: 2051940 - RNA, 19 nt, Artificial Sequence
  Description of Artificial Sequence: Synthetic oligonucleotide
  Sense strand starting at position 2821 of SEQ ID NO: 1881533
guugccaucaguugagaua

SEQ ID NO: 2051941 - RNA, 19 nt, Artificial Sequence
  Description of Artificial Sequence: Synthetic oligonucleotide
  Antisense strand to SEQ ID NO: 2051940
uaucucaacugauggcaac

SEQ ID NO: 2051942 - RNA, 19 nt, Artificial Sequence
  Description of Artificial Sequence: Synthetic oligonucleotide
  Sense strand starting at position 2865 of SEQ ID NO: 1881533
ccuccuggcuuuguauaua

SEQ ID NO: 2051943 - RNA, 19 nt, Artificial Sequence
  Description of Artificial Sequence: Synthetic oligonucleotide
  Antisense strand to SEQ ID NO: 2051942
uauauacaaagccaggagg

SEQ ID NO: 2051944 - RNA, 19 nt, Artificial Sequence
  Description of Artificial Sequence: Synthetic oligonucleotide
  Sense strand starting at position 2868 of SEQ ID NO: 1881533
ccuggcuuuguauauaauu

SEQ ID NO: 2051945 - RNA, 19 nt, Artificial Sequence
  Description of Artificial Sequence: Synthetic oligonucleotide
  Antisense strand to SEQ ID NO: 2051944
aauuauauacaaagccagg

SEQ ID NO: 2051946 - RNA, 19 nt, Artificial Sequence
  Description of Artificial Sequence: Synthetic oligonucleotide
  Sense strand starting at position 2999 of SEQ ID NO: 1881533
guagaaugagcagguaaau

SEQ ID NO: 2051947 - RNA, 19 nt, Artificial Sequence
  Description of Artificial Sequence: Synthetic oligonucleotide
  Antisense strand to SEQ ID NO: 2051946
auuuaccugcucauucuac

SEQ ID NO: 2051948 - RNA, 19 nt, Artificial Sequence
  Description of Artificial Sequence: Synthetic oligonucleotide
  Sense strand starting at position 3009 of SEQ ID NO: 1881533
cagguaaauccuggaaccu

SEQ ID NO: 2051949 - RNA, 19 nt, Artificial Sequence
  Description of Artificial Sequence: Synthetic oligonucleotide
  Antisense strand to SEQ ID NO: 2051948
agguuccaggauuuaccug

SEQ ID NO: 2051950 - RNA, 19 nt, Artificial Sequence
  Description of Artificial Sequence: Synthetic oligonucleotide
  Sense strand starting at position 3212 of SEQ ID NO: 1881533
agaucaaucccaggcaaac

SEQ ID NO: 2051951 - RNA, 19 nt, Artificial Sequence
  Description of Artificial Sequence: Synthetic oligonucleotide
  Antisense strand to SEQ ID NO: 2051950
guuugccugggauugaucu

SEQ ID NO: 2051952 - RNA, 19 nt, Artificial Sequence
  Description of Artificial Sequence: Synthetic oligonucleotide
  Sense strand starting at position 3329 of SEQ ID NO: 1881533
ccauguacuuugcuaagau

SEQ ID NO: 2051953 - RNA, 19 nt, Artificial Sequence
  Description of Artificial Sequence: Synthetic oligonucleotide
  Antisense strand to SEQ ID NO: 2051952
aucuuagcaaaguacaugg

SEQ ID NO: 2051954 - RNA, 19 nt, Artificial Sequence
  Description of Artificial Sequence: Synthetic oligonucleotide
  Sense strand starting at position 3375 of SEQ ID NO: 1881533
cugcuucuagcacaagaau

SEQ ID NO: 2051955 - RNA, 19 nt, Artificial Sequence
  Description of Artificial Sequence: Synthetic oligonucleotide
  Antisense strand to SEQ ID NO: 2051954
auucuugugcuagaagcag

SEQ ID NO: 2051956 - RNA, 19 nt, Artificial Sequence
  Description of Artificial Sequence: Synthetic oligonucleotide
  Sense strand starting at position 3384 of SEQ ID NO: 1881533
gcacaagaauauguauaaa

SEQ ID NO: 2051957 - RNA, 19 nt, Artificial Sequence
  Description of Artificial Sequence: Synthetic oligonucleotide
  Antisense strand to SEQ ID NO: 2051956
uuuauacauauucuugugc

SEQ ID NO: 2051958 - RNA, 19 nt, Artificial Sequence
  Description of Artificial Sequence: Synthetic oligonucleotide
  Sense strand starting at position 3466 of SEQ ID NO: 1881533
cggacuugcaggugaguua

SEQ ID NO: 2051959 - RNA, 19 nt, Artificial Sequence
  Description of Artificial Sequence: Synthetic oligonucleotide
  Antisense strand to SEQ ID NO: 2051958
uaacucaccugcaaguccg

SEQ ID NO: 2051960 - RNA, 19 nt, Artificial Sequence
  Description of Artificial Sequence: Synthetic oligonucleotide
  Sense strand starting at position 3490 of SEQ ID NO: 1881533
ucagaacuccuuuguguca

SEQ ID NO: 2051961 - RNA, 19 nt, Artificial Sequence
  Description of Artificial Sequence: Synthetic oligonucleotide
  Antisense strand to SEQ ID NO: 2051960
ugacacaaaggaguucuga

SEQ ID NO: 2051962 - RNA, 19 nt, Artificial Sequence
  Description of Artificial Sequence: Synthetic oligonucleotide
  Sense strand starting at position 3497 of SEQ ID NO: 1881533
uccuuugugucauuuaugu

SEQ ID NO: 2051963 - RNA, 19 nt, Artificial Sequence
  Description of Artificial Sequence: Synthetic oligonucleotide
  Antisense strand to SEQ ID NO: 2051962
acauaaaugacacaaagga

SEQ ID NO: 2051964 - RNA, 19 nt, Artificial Sequence
  Description of Artificial Sequence: Synthetic oligonucleotide
  Sense strand starting at position 3502 of SEQ ID NO: 1881533
ugugucauuuaugugacuu

SEQ ID NO: 2051965 - RNA, 19 nt, Artificial Sequence
  Description of Artificial Sequence: Synthetic oligonucleotide
  Antisense strand to SEQ ID NO: 2051964
aagucacauaaaugacaca

SEQ ID NO: 2051966 - RNA, 19 nt, Artificial Sequence
  Description of Artificial Sequence: Synthetic oligonucleotide
  Sense strand starting at position 3503 of SEQ ID NO: 1881533
gugucauuuaugugacuug

SEQ ID NO: 2051967 - RNA, 19 nt, Artificial Sequence
  Description of Artificial Sequence: Synthetic oligonucleotide
  Antisense strand to SEQ ID NO: 2051966
caagucacauaaaugacac

SEQ ID NO: 2051968 - RNA, 19 nt, Artificial Sequence
  Description of Artificial Sequence: Synthetic oligonucleotide
  Sense strand starting at position 3512 of SEQ ID NO: 1881533
augugacuuggguaacuua

SEQ ID NO: 2051969 - RNA, 19 nt, Artificial Sequence
  Description of Artificial Sequence: Synthetic oligonucleotide
  Antisense strand to SEQ ID NO: 2051968
uaaguuacccaagucacau

SEQ ID NO: 2051970 - RNA, 19 nt, Artificial Sequence
  Description of Artificial Sequence: Synthetic oligonucleotide
  Sense strand starting at position 3589 of SEQ ID NO: 1881533
ggaaguuauaguggaaaug

SEQ ID NO: 2051971 - RNA, 19 nt, Artificial Sequence
  Description of Artificial Sequence: Synthetic oligonucleotide
  Antisense strand to SEQ ID NO: 2051970
cauuuccacuauaacuucc

SEQ ID NO: 2051972 - RNA, 19 nt, Artificial Sequence
  Description of Artificial Sequence: Synthetic oligonucleotide
  Sense strand starting at position 3614 of SEQ ID NO: 1881533
aaggaaagagugugguaaa

SEQ ID NO: 2051973 - RNA, 19 nt, Artificial Sequence
  Description of Artificial Sequence: Synthetic oligonucleotide
  Antisense strand to SEQ ID NO: 2051972
uuuaccacacucuuuccuu

SEQ ID NO: 2051974 - RNA, 19 nt, Artificial Sequence
  Description of Artificial Sequence: Synthetic oligonucleotide
  Sense strand starting at position 3640 of SEQ ID NO: 1881533
gcauguauuugggacacga

SEQ ID NO: 2051975 - RNA, 19 nt, Artificial Sequence
  Description of Artificial Sequence: Synthetic oligonucleotide
  Antisense strand to SEQ ID NO: 2051974
ucgugucccaaauacaugc

SEQ ID NO: 2051976 - RNA, 19 nt, Artificial Sequence
  Description of Artificial Sequence: Synthetic oligonucleotide
  Sense strand starting at position 81 of SEQ ID NO: 1881534
cugugaaguaccuggcaua

SEQ ID NO: 2051977 - RNA, 19 nt, Artificial Sequence
  Description of Artificial Sequence: Synthetic oligonucleotide
  Antisense strand to SEQ ID NO: 2051976
uaugccagguacuucacag

SEQ ID NO: 2051978 - RNA, 19 nt, Artificial Sequence
  Description of Artificial Sequence: Synthetic oligonucleotide
  Sense strand starting at position 82 of SEQ ID NO: 1881534
ugugaaguaccuggcauau

SEQ ID NO: 2051979 - RNA, 19 nt, Artificial Sequence
  Description of Artificial Sequence: Synthetic oligonucleotide
  Antisense strand to SEQ ID NO: 2051978
auaugccagguacuucaca

SEQ ID NO: 2051980 - RNA, 19 nt, Artificial Sequence
  Description of Artificial Sequence: Synthetic oligonucleotide
  Sense strand starting at position 198 of SEQ ID NO: 1881534
ugcccucuuggauaucaua

SEQ ID NO: 2051981 - RNA, 19 nt, Artificial Sequence
  Description of Artificial Sequence: Synthetic oligonucleotide
  Antisense strand to SEQ ID NO: 2051980
uaugauauccaagagggca

SEQ ID NO: 2051982 - RNA, 19 nt, Artificial Sequence
  Description of Artificial Sequence: Synthetic oligonucleotide
  Sense strand starting at position 233 of SEQ ID NO: 1881534
cugccauuccaauagguau

SEQ ID NO: 2051983 - RNA, 19 nt, Artificial Sequence
  Description of Artificial Sequence: Synthetic oligonucleotide
  Antisense strand to SEQ ID NO: 2051982
auaccuauuggaauggcag

SEQ ID NO: 2051984 - RNA, 19 nt, Artificial Sequence
  Description of Artificial Sequence: Synthetic oligonucleotide
  Sense strand starting at position 375 of SEQ ID NO: 1881534
aagauaaguguuggcuaag

SEQ ID NO: 2051985 - RNA, 19 nt, Artificial Sequence
  Description of Artificial Sequence: Synthetic oligonucleotide
  Antisense strand to SEQ ID NO: 2051984
cuuagccaacacuuaucuu

SEQ ID NO: 2051986 - RNA, 19 nt, Artificial Sequence
  Description of Artificial Sequence: Synthetic oligonucleotide
  Sense strand starting at position 387 of SEQ ID NO: 1881534
ggcuaagcuguugagaaac

SEQ ID NO: 2051987 - RNA, 19 nt, Artificial Sequence
  Description of Artificial Sequence: Synthetic oligonucleotide
  Antisense strand to SEQ ID NO: 2051986
guuucucaacagcuuagcc

SEQ ID NO: 2051988 - RNA, 19 nt, Artificial Sequence
  Description of Artificial Sequence: Synthetic oligonucleotide
  Sense strand starting at position 669 of SEQ ID NO: 1881534
cugcacaugcaguagaaua

SEQ ID NO: 2051989 - RNA, 19 nt, Artificial Sequence
  Description of Artificial Sequence: Synthetic oligonucleotide
  Antisense strand to SEQ ID NO: 2051988
uauucuacugcaugugcag

SEQ ID NO: 2051990 - RNA, 19 nt, Artificial Sequence
  Description of Artificial Sequence: Synthetic oligonucleotide
  Sense strand starting at position 671 of SEQ ID NO: 1881534
gcacaugcaguagaauauu

SEQ ID NO: 2051991 - RNA, 19 nt, Artificial Sequence
  Description of Artificial Sequence: Synthetic oligonucleotide
  Antisense strand to SEQ ID NO: 2051990
aauauucuacugcaugugc

SEQ ID NO: 2051992 - RNA, 19 nt, Artificial Sequence
  Description of Artificial Sequence: Synthetic oligonucleotide
  Sense strand starting at position 960 of SEQ ID NO: 1881534
uugugacucugguuaacaa

SEQ ID NO: 2051993 - RNA, 19 nt, Artificial Sequence
  Description of Artificial Sequence: Synthetic oligonucleotide
  Antisense strand to SEQ ID NO: 2051992
uuguuaaccagagucacaa

SEQ ID NO: 2051994 - RNA, 19 nt, Artificial Sequence
  Description of Artificial Sequence: Synthetic oligonucleotide
  Sense strand starting at position 1008 of SEQ ID NO: 1881534
agagauagaucuccuguua

SEQ ID NO: 2051995 - RNA, 19 nt, Artificial Sequence
  Description of Artificial Sequence: Synthetic oligonucleotide
  Antisense strand to SEQ ID NO: 2051994
uaacaggagaucuaucucu

SEQ ID NO: 2051996 - RNA, 19 nt, Artificial Sequence
  Description of Artificial Sequence: Synthetic oligonucleotide
  Sense strand starting at position 1070 of SEQ ID NO: 1881534
agaucaugguaaucuagau

SEQ ID NO: 2051997 - RNA, 19 nt, Artificial Sequence
  Description of Artificial Sequence: Synthetic oligonucleotide
  Antisense strand to SEQ ID NO: 2051996
aucuagauuaccaugaucu

SEQ ID NO: 2051998 - RNA, 19 nt, Artificial Sequence
  Description of Artificial Sequence: Synthetic oligonucleotide
  Sense strand starting at position 1082 of SEQ ID NO: 1881534
ucuagaucauguuugugua

SEQ ID NO: 2051999 - RNA, 19 nt, Artificial Sequence
  Description of Artificial Sequence: Synthetic oligonucleotide
  Antisense strand to SEQ ID NO: 2051998
uacacaaacaugaucuaga

SEQ ID NO: 2052000 - RNA, 19 nt, Artificial Sequence
  Description of Artificial Sequence: Synthetic oligonucleotide
  Sense strand starting at position 1083 of SEQ ID NO: 1881534
cuagaucauguuuguguaa

SEQ ID NO: 2052001 - RNA, 19 nt, Artificial Sequence
  Description of Artificial Sequence: Synthetic oligonucleotide
  Antisense strand to SEQ ID NO: 2052000
uuacacaaacaugaucuag

SEQ ID NO: 2052002 - RNA, 19 nt, Artificial Sequence
  Description of Artificial Sequence: Synthetic oligonucleotide
  Sense strand starting at position 1086 of SEQ ID NO: 1881534
gaucauguuuguguaacuc

SEQ ID NO: 2052003 - RNA, 19 nt, Artificial Sequence
  Description of Artificial Sequence: Synthetic oligonucleotide
  Antisense strand to SEQ ID NO: 2052002
gaguuacacaaacaugauc

SEQ ID NO: 2052004 - RNA, 19 nt, Artificial Sequence
  Description of Artificial Sequence: Synthetic oligonucleotide
  Sense strand starting at position 1094 of SEQ ID NO: 1881534
uuguguaacucuguaaccu

SEQ ID NO: 2052005 - RNA, 19 nt, Artificial Sequence
  Description of Artificial Sequence: Synthetic oligonucleotide
  Antisense strand to SEQ ID NO: 2052004
agguuacagaguuacacaa

SEQ ID NO: 2052006 - RNA, 19 nt, Artificial Sequence
  Description of Artificial Sequence: Synthetic oligonucleotide
  Sense strand starting at position 1095 of SEQ ID NO: 1881534
uguguaacucuguaaccuu

SEQ ID NO: 2052007 - RNA, 19 nt, Artificial Sequence
  Description of Artificial Sequence: Synthetic oligonucleotide
  Antisense strand to SEQ ID NO: 2052006
aagguuacagaguuacaca

SEQ ID NO: 2052008 - RNA, 19 nt, Artificial Sequence
  Description of Artificial Sequence: Synthetic oligonucleotide
  Sense strand starting at position 1452 of SEQ ID NO: 1881534
gacaauaaacugugcuguu

SEQ ID NO: 2052009 - RNA, 19 nt, Artificial Sequence
  Description of Artificial Sequence: Synthetic oligonucleotide
  Antisense strand to SEQ ID NO: 2052008
aacagcacaguuuauuguc

SEQ ID NO: 2052010 - RNA, 19 nt, Artificial Sequence
  Description of Artificial Sequence: Synthetic oligonucleotide
  Sense strand starting at position 1553 of SEQ ID NO: 1881534
ucuaaaugucuagaauagu

SEQ ID NO: 2052011 - RNA, 19 nt, Artificial Sequence
  Description of Artificial Sequence: Synthetic oligonucleotide
  Antisense strand to SEQ ID NO: 2052010
acuauucuagacauuuaga

SEQ ID NO: 2052012 - RNA, 19 nt, Artificial Sequence
  Description of Artificial Sequence: Synthetic oligonucleotide
  Sense strand starting at position 1571 of SEQ ID NO: 1881534
ugccuagaaugucuagaau

SEQ ID NO: 2052013 - RNA, 19 nt, Artificial Sequence
  Description of Artificial Sequence: Synthetic oligonucleotide
  Antisense strand to SEQ ID NO: 2052012
auucuagacauucuaggca

SEQ ID NO: 2052014 - RNA, 19 nt, Artificial Sequence
  Description of Artificial Sequence: Synthetic oligonucleotide
  Sense strand starting at position 1583 of SEQ ID NO: 1881534
cuagaauagugccuagaau

SEQ ID NO: 2052015 - RNA, 19 nt, Artificial Sequence
  Description of Artificial Sequence: Synthetic oligonucleotide
  Antisense strand to SEQ ID NO: 2052014
auucuaggcacuauucuag

SEQ ID NO: 2052016 - RNA, 19 nt, Artificial Sequence
  Description of Artificial Sequence: Synthetic oligonucleotide
  Sense strand starting at position 1653 of SEQ ID NO: 1881534
gggugucaugccuagcauc

SEQ ID NO: 2052017 - RNA, 19 nt, Artificial Sequence
  Description of Artificial Sequence: Synthetic oligonucleotide
  Antisense strand to SEQ ID NO: 2052016
gaugcuaggcaugacaccc

SEQ ID NO: 2052018 - RNA, 19 nt, Artificial Sequence
  Description of Artificial Sequence: Synthetic oligonucleotide
  Sense strand starting at position 1790 of SEQ ID NO: 1881534
ugaagaaugucagcaggga

SEQ ID NO: 2052019 - RNA, 19 nt, Artificial Sequence
  Description of Artificial Sequence: Synthetic oligonucleotide
  Antisense strand to SEQ ID NO: 2052018
ucccugcugacauucuuca

SEQ ID NO: 2052020 - RNA, 19 nt, Artificial Sequence
  Description of Artificial Sequence: Synthetic oligonucleotide
  Sense strand starting at position 1970 of SEQ ID NO: 1881534
cccugucuugccuggaaag

SEQ ID NO: 2052021 - RNA, 19 nt, Artificial Sequence
  Description of Artificial Sequence: Synthetic oligonucleotide
  Antisense strand to SEQ ID NO: 2052020
cuuuccaggcaagacaggg

SEQ ID NO: 2052022 - RNA, 19 nt, Artificial Sequence
  Description of Artificial Sequence: Synthetic oligonucleotide
  Sense strand starting at position 1972 of SEQ ID NO: 1881534
cugucuugccuggaaagug

SEQ ID NO: 2052023 - RNA, 19 nt, Artificial Sequence
  Description of Artificial Sequence: Synthetic oligonucleotide
  Antisense strand to SEQ ID NO: 2052022
cacuuuccaggcaagacag

SEQ ID NO: 2052024 - RNA, 19 nt, Artificial Sequence
  Description of Artificial Sequence: Synthetic oligonucleotide
  Sense strand starting at position 2037 of SEQ ID NO: 1881534
ccuaaugguccaggaauca

SEQ ID NO: 2052025 - RNA, 19 nt, Artificial Sequence
  Description of Artificial Sequence: Synthetic oligonucleotide
  Antisense strand to SEQ ID NO: 2052024
ugauuccuggaccauuagg

SEQ ID NO: 2052026 - RNA, 19 nt, Artificial Sequence
  Description of Artificial Sequence: Synthetic oligonucleotide
  Sense strand starting at position 2238 of SEQ ID NO: 1881534
aggcuacguggaugagaau

SEQ ID NO: 2052027 - RNA, 19 nt, Artificial Sequence
  Description of Artificial Sequence: Synthetic oligonucleotide
  Antisense strand to SEQ ID NO: 2052026
auucucauccacguagccu

SEQ ID NO: 2052028 - RNA, 19 nt, Artificial Sequence
  Description of Artificial Sequence: Synthetic oligonucleotide
  Sense strand starting at position 2239 of SEQ ID NO: 1881534
ggcuacguggaugagaaua

SEQ ID NO: 2052029 - RNA, 19 nt, Artificial Sequence
  Description of Artificial Sequence: Synthetic oligonucleotide
  Antisense strand to SEQ ID NO: 2052028
uauucucauccacguagcc

SEQ ID NO: 2052030 - RNA, 19 nt, Artificial Sequence
  Description of Artificial Sequence: Synthetic oligonucleotide
  Sense strand starting at position 2244 of SEQ ID NO: 1881534
cguggaugagaauaugcaa

SEQ ID NO: 2052031 - RNA, 19 nt, Artificial Sequence
  Description of Artificial Sequence: Synthetic oligonucleotide
  Antisense strand to SEQ ID NO: 2052030
uugcauauucucauccacg

SEQ ID NO: 2052032 - RNA, 19 nt, Artificial Sequence
  Description of Artificial Sequence: Synthetic oligonucleotide
  Sense strand starting at position 2257 of SEQ ID NO: 1881534
augcaaauuccuuguuaga

SEQ ID NO: 2052033 - RNA, 19 nt, Artificial Sequence
  Description of Artificial Sequence: Synthetic oligonucleotide
  Antisense strand to SEQ ID NO: 2052032
ucuaacaaggaauuugcau

SEQ ID NO: 2052034 - RNA, 19 nt, Artificial Sequence
  Description of Artificial Sequence: Synthetic oligonucleotide
  Sense strand starting at position 2259 of SEQ ID NO: 1881534
gcaaauuccuuguuagaca

SEQ ID NO: 2052035 - RNA, 19 nt, Artificial Sequence
  Description of Artificial Sequence: Synthetic oligonucleotide
  Antisense strand to SEQ ID NO: 2052034
ugucuaacaaggaauuugc

SEQ ID NO: 2052036 - RNA, 19 nt, Artificial Sequence
  Description of Artificial Sequence: Synthetic oligonucleotide
  Sense strand starting at position 2366 of SEQ ID NO: 1881534
uuauuauuguccucuggaa

SEQ ID NO: 2052037 - RNA, 19 nt, Artificial Sequence
  Description of Artificial Sequence: Synthetic oligonucleotide
  Antisense strand to SEQ ID NO: 2052036
uuccagaggacaauaauaa

SEQ ID NO: 2052038 - RNA, 19 nt, Artificial Sequence
  Description of Artificial Sequence: Synthetic oligonucleotide
  Sense strand starting at position 2466 of SEQ ID NO: 1881534
gcaacuuugaguugcugga

SEQ ID NO: 2052039 - RNA, 19 nt, Artificial Sequence
  Description of Artificial Sequence: Synthetic oligonucleotide
  Antisense strand to SEQ ID NO: 2052038
uccagcaacucaaaguugc

SEQ ID NO: 2052040 - RNA, 19 nt, Artificial Sequence
  Description of Artificial Sequence: Synthetic oligonucleotide
  Sense strand starting at position 2470 of SEQ ID NO: 1881534
cuuugaguugcuggacuuu

SEQ ID NO: 2052041 - RNA, 19 nt, Artificial Sequence
  Description of Artificial Sequence: Synthetic oligonucleotide
  Antisense strand to SEQ ID NO: 2052040
aaaguccagcaacucaaag

SEQ ID NO: 2052042 - RNA, 19 nt, Artificial Sequence
  Description of Artificial Sequence: Synthetic oligonucleotide
  Sense strand starting at position 2762 of SEQ ID NO: 1881534
auaucacauuaugaaggaa

SEQ ID NO: 2052043 - RNA, 19 nt, Artificial Sequence
  Description of Artificial Sequence: Synthetic oligonucleotide
  Antisense strand to SEQ ID NO: 2052042
uuccuucauaaugugauau

SEQ ID NO: 2052044 - RNA, 19 nt, Artificial Sequence
  Description of Artificial Sequence: Synthetic oligonucleotide
  Sense strand starting at position 2798 of SEQ ID NO: 1881534
ucuuguagccuugagguua

SEQ ID NO: 2052045 - RNA, 19 nt, Artificial Sequence
  Description of Artificial Sequence: Synthetic oligonucleotide
  Antisense strand to SEQ ID NO: 2052044
uaaccucaaggcuacaaga

SEQ ID NO: 2052046 - RNA, 19 nt, Artificial Sequence
  Description of Artificial Sequence: Synthetic oligonucleotide
  Sense strand starting at position 2907 of SEQ ID NO: 1881534
ggaagaggcaauuguuaag

SEQ ID NO: 2052047 - RNA, 19 nt, Artificial Sequence
  Description of Artificial Sequence: Synthetic oligonucleotide
  Antisense strand to SEQ ID NO: 2052046
cuuaacaauugccucuucc

SEQ ID NO: 2052048 - RNA, 19 nt, Artificial Sequence
  Description of Artificial Sequence: Synthetic oligonucleotide
  Sense strand starting at position 2948 of SEQ ID NO: 1881534
ucuugagugucacucuaug

SEQ ID NO: 2052049 - RNA, 19 nt, Artificial Sequence
  Description of Artificial Sequence: Synthetic oligonucleotide
  Antisense strand to SEQ ID NO: 2052048
cauagagugacacucaaga

SEQ ID NO: 2052050 - RNA, 19 nt, Artificial Sequence
  Description of Artificial Sequence: Synthetic oligonucleotide
  Sense strand starting at position 3700 of SEQ ID NO: 1881534
uuguguuggcccucaugca

SEQ ID NO: 2052051 - RNA, 19 nt, Artificial Sequence
  Description of Artificial Sequence: Synthetic oligonucleotide
  Antisense strand to SEQ ID NO: 2052050
ugcaugagggccaacacaa

SEQ ID NO: 2052052 - RNA, 19 nt, Artificial Sequence
  Description of Artificial Sequence: Synthetic oligonucleotide
  Sense strand starting at position 3819 of SEQ ID NO: 1881534
ccugcaaugguuuggauau

SEQ ID NO: 2052053 - RNA, 19 nt, Artificial Sequence
  Description of Artificial Sequence: Synthetic oligonucleotide
  Antisense strand to SEQ ID NO: 2052052
auauccaaaccauugcagg

SEQ ID NO: 2052054 - RNA, 19 nt, Artificial Sequence
  Description of Artificial Sequence: Synthetic oligonucleotide
  Sense strand starting at position 3858 of SEQ ID NO: 1881534
agcucauguugagauuuga

SEQ ID NO: 2052055 - RNA, 19 nt, Artificial Sequence
  Description of Artificial Sequence: Synthetic oligonucleotide
  Antisense strand to SEQ ID NO: 2052054
ucaaaucucaacaugagcu

SEQ ID NO: 2052056 - RNA, 19 nt, Artificial Sequence
  Description of Artificial Sequence: Synthetic oligonucleotide
  Sense strand starting at position 2 of SEQ ID NO: 1881535
guaugagauuagguuguca

SEQ ID NO: 2052057 - RNA, 19 nt, Artificial Sequence
  Description of Artificial Sequence: Synthetic oligonucleotide
  Antisense strand to SEQ ID NO: 2052056
ugacaaccuaaucucauac

SEQ ID NO: 2052058 - RNA, 19 nt, Artificial Sequence
  Description of Artificial Sequence: Synthetic oligonucleotide
  Sense strand starting at position 4 of SEQ ID NO: 1881535
augagauuagguugucaaa

SEQ ID NO: 2052059 - RNA, 19 nt, Artificial Sequence
  Description of Artificial Sequence: Synthetic oligonucleotide
  Antisense strand to SEQ ID NO: 2052058
uuugacaaccuaaucucau

SEQ ID NO: 2052060 - RNA, 19 nt, Artificial Sequence
  Description of Artificial Sequence: Synthetic oligonucleotide
  Sense strand starting at position 96 of SEQ ID NO: 1881535
aggaaaguguagcuaacaa

SEQ ID NO: 2052061 - RNA, 19 nt, Artificial Sequence
  Description of Artificial Sequence: Synthetic oligonucleotide
  Antisense strand to SEQ ID NO: 2052060
uuguuagcuacacuuuccu

SEQ ID NO: 2052062 - RNA, 19 nt, Artificial Sequence
  Description of Artificial Sequence: Synthetic oligonucleotide
  Sense strand starting at position 202 of SEQ ID NO: 1881535
guagauauaguguaaucac

SEQ ID NO: 2052063 - RNA, 19 nt, Artificial Sequence
  Description of Artificial Sequence: Synthetic oligonucleotide
  Antisense strand to SEQ ID NO: 2052062
gugauuacacuauaucuac

SEQ ID NO: 2052064 - RNA, 19 nt, Artificial Sequence
  Description of Artificial Sequence: Synthetic oligonucleotide
  Sense strand starting at position 402 of SEQ ID NO: 1881535
aaguguguacuggaauuau

SEQ ID NO: 2052065 - RNA, 19 nt, Artificial Sequence
  Description of Artificial Sequence: Synthetic oligonucleotide
  Antisense strand to SEQ ID NO: 2052064
auaauuccaguacacacuu

SEQ ID NO: 2052066 - RNA, 19 nt, Artificial Sequence
  Description of Artificial Sequence: Synthetic oligonucleotide
  Sense strand starting at position 472 of SEQ ID NO: 1881535
ugucuuugucaucaauaug

SEQ ID NO: 2052067 - RNA, 19 nt, Artificial Sequence
  Description of Artificial Sequence: Synthetic oligonucleotide
  Antisense strand to SEQ ID NO: 2052066
cauauugaugacaaagaca

SEQ ID NO: 2052068 - RNA, 19 nt, Artificial Sequence
  Description of Artificial Sequence: Synthetic oligonucleotide
  Sense strand starting at position 502 of SEQ ID NO: 1881535
agcacauugccuuaagaau

SEQ ID NO: 2052069 - RNA, 19 nt, Artificial Sequence
  Description of Artificial Sequence: Synthetic oligonucleotide
  Antisense strand to SEQ ID NO: 2052068
auucuuaaggcaaugugcu

SEQ ID NO: 2052070 - RNA, 19 nt, Artificial Sequence
  Description of Artificial Sequence: Synthetic oligonucleotide
  Sense strand starting at position 508 of SEQ ID NO: 1881535
uugccuuaagaauauugau

SEQ ID NO: 2052071 - RNA, 19 nt, Artificial Sequence
  Description of Artificial Sequence: Synthetic oligonucleotide
  Antisense strand to SEQ ID NO: 2052070
aucaauauucuuaaggcaa

SEQ ID NO: 2052072 - RNA, 19 nt, Artificial Sequence
  Description of Artificial Sequence: Synthetic oligonucleotide
  Sense strand starting at position 733 of SEQ ID NO: 1881535
uuuagauagaagugguaaa

SEQ ID NO: 2052073 - RNA, 19 nt, Artificial Sequence
  Description of Artificial Sequence: Synthetic oligonucleotide
  Antisense strand to SEQ ID NO: 2052072
uuuaccacuucuaucuaaa

SEQ ID NO: 2052074 - RNA, 19 nt, Artificial Sequence
  Description of Artificial Sequence: Synthetic oligonucleotide
  Sense strand starting at position 853 of SEQ ID NO: 1881535
agagaucagucucuguuag

SEQ ID NO: 2052075 - RNA, 19 nt, Artificial Sequence
  Description of Artificial Sequence: Synthetic oligonucleotide
  Antisense strand to SEQ ID NO: 2052074
cuaacagagacugaucucu

SEQ ID NO: 2052076 - RNA, 19 nt, Artificial Sequence
  Description of Artificial Sequence: Synthetic oligonucleotide
  Sense strand starting at position 854 of SEQ ID NO: 1881535
gagaucagucucuguuaga

SEQ ID NO: 2052077 - RNA, 19 nt, Artificial Sequence
  Description of Artificial Sequence: Synthetic oligonucleotide
  Antisense strand to SEQ ID NO: 2052076
ucuaacagagacugaucuc

SEQ ID NO: 2052078 - RNA, 19 nt, Artificial Sequence
  Description of Artificial Sequence: Synthetic oligonucleotide
  Sense strand starting at position 855 of SEQ ID NO: 1881535
agaucagucucuguuagaa

SEQ ID NO: 2052079 - RNA, 19 nt, Artificial Sequence
  Description of Artificial Sequence: Synthetic oligonucleotide
  Antisense strand to SEQ ID NO: 2052078
uucuaacagagacugaucu

SEQ ID NO: 2052080 - RNA, 19 nt, Artificial Sequence
  Description of Artificial Sequence: Synthetic oligonucleotide
  Sense strand starting at position 887 of SEQ ID NO: 1881535
guacaaacacuuuguaaga

SEQ ID NO: 2052081 - RNA, 19 nt, Artificial Sequence
  Description of Artificial Sequence: Synthetic oligonucleotide
  Antisense strand to SEQ ID NO: 2052080
ucuuacaaaguguuuguac

SEQ ID NO: 2052082 - RNA, 19 nt, Artificial Sequence
  Description of Artificial Sequence: Synthetic oligonucleotide
  Sense strand starting at position 1075 of SEQ ID NO: 1881535
augggaaauuaagucaagu

SEQ ID NO: 2052083 - RNA, 19 nt, Artificial Sequence
  Description of Artificial Sequence: Synthetic oligonucleotide
  Antisense strand to SEQ ID NO: 2052082
acuugacuuaauuucccau

SEQ ID NO: 2052084 - RNA, 19 nt, Artificial Sequence
  Description of Artificial Sequence: Synthetic oligonucleotide
  Sense strand starting at position 1434 of SEQ ID NO: 1881535
guauguuuacagcaggaau

SEQ ID NO: 2052085 - RNA, 19 nt, Artificial Sequence
  Description of Artificial Sequence: Synthetic oligonucleotide
  Antisense strand to SEQ ID NO: 2052084
auuccugcuguaaacauac

SEQ ID NO: 2052086 - RNA, 19 nt, Artificial Sequence
  Description of Artificial Sequence: Synthetic oligonucleotide
  Sense strand starting at position 1459 of SEQ ID NO: 1881535
gcgacuuaacuagacauaa

SEQ ID NO: 2052087 - RNA, 19 nt, Artificial Sequence
  Description of Artificial Sequence: Synthetic oligonucleotide
  Antisense strand to SEQ ID NO: 2052086
uuaugucuaguuaagucgc

SEQ ID NO: 2052088 - RNA, 19 nt, Artificial Sequence
  Description of Artificial Sequence: Synthetic oligonucleotide
  Sense strand starting at position 1610 of SEQ ID NO: 1881535
gccugugacauugagcaca

SEQ ID NO: 2052089 - RNA, 19 nt, Artificial Sequence
  Description of Artificial Sequence: Synthetic oligonucleotide
  Antisense strand to SEQ ID NO: 2052088
ugugcucaaugucacaggc

SEQ ID NO: 2052090 - RNA, 19 nt, Artificial Sequence
  Description of Artificial Sequence: Synthetic oligonucleotide
  Sense strand starting at position 1612 of SEQ ID NO: 1881535
cugugacauugagcacaau

SEQ ID NO: 2052091 - RNA, 19 nt, Artificial Sequence
  Description of Artificial Sequence: Synthetic oligonucleotide
  Antisense strand to SEQ ID NO: 2052090
auugugcucaaugucacag

SEQ ID NO: 2052092 - RNA, 19 nt, Artificial Sequence
  Description of Artificial Sequence: Synthetic oligonucleotide
  Sense strand starting at position 1613 of SEQ ID NO: 1881535
ugugacauugagcacaaua

SEQ ID NO: 2052093 - RNA, 19 nt, Artificial Sequence
  Description of Artificial Sequence: Synthetic oligonucleotide
  Antisense strand to SEQ ID NO: 2052092
uauugugcucaaugucaca

SEQ ID NO: 2052094 - RNA, 19 nt, Artificial Sequence
  Description of Artificial Sequence: Synthetic oligonucleotide
  Sense strand starting at position 1641 of SEQ ID NO: 1881535
cggcgcuuccguuucauua

SEQ ID NO: 2052095 - RNA, 19 nt, Artificial Sequence
  Description of Artificial Sequence: Synthetic oligonucleotide
  Antisense strand to SEQ ID NO: 2052094
uaaugaaacggaagcgccg

SEQ ID NO: 2052096 - RNA, 19 nt, Artificial Sequence
  Description of Artificial Sequence: Synthetic oligonucleotide
  Sense strand starting at position 1642 of SEQ ID NO: 1881535
ggcgcuuccguuucauuau

SEQ ID NO: 2052097 - RNA, 19 nt, Artificial Sequence
  Description of Artificial Sequence: Synthetic oligonucleotide
  Antisense strand to SEQ ID NO: 2052096
auaaugaaacggaagcgcc

SEQ ID NO: 2052098 - RNA, 19 nt, Artificial Sequence
  Description of Artificial Sequence: Synthetic oligonucleotide
  Sense strand starting at position 1756 of SEQ ID NO: 1881535
cccagauguuaguuauuau

SEQ ID NO: 2052099 - RNA, 19 nt, Artificial Sequence
  Description of Artificial Sequence: Synthetic oligonucleotide
  Antisense strand to SEQ ID NO: 2052098
auaauaacuaacaucuggg

SEQ ID NO: 2052100 - RNA, 19 nt, Artificial Sequence
  Description of Artificial Sequence: Synthetic oligonucleotide
  Sense strand starting at position 1861 of SEQ ID NO: 1881535
gagcuuaaucucgccguaa

SEQ ID NO: 2052101 - RNA, 19 nt, Artificial Sequence
  Description of Artificial Sequence: Synthetic oligonucleotide
  Antisense strand to SEQ ID NO: 2052100
uuacggcgagauuaagcuc

SEQ ID NO: 2052102 - RNA, 19 nt, Artificial Sequence
  Description of Artificial Sequence: Synthetic oligonucleotide
  Sense strand starting at position 2743 of SEQ ID NO: 1881535
gcuacuugaguugcguaau

SEQ ID NO: 2052103 - RNA, 19 nt, Artificial Sequence
  Description of Artificial Sequence: Synthetic oligonucleotide
  Antisense strand to SEQ ID NO: 2052102
auuacgcaacucaaguagc

SEQ ID NO: 2052104 - RNA, 19 nt, Artificial Sequence
  Description of Artificial Sequence: Synthetic oligonucleotide
  Sense strand starting at position 2746 of SEQ ID NO: 1881535
acuugaguugcguaaugag

SEQ ID NO: 2052105 - RNA, 19 nt, Artificial Sequence
  Description of Artificial Sequence: Synthetic oligonucleotide
  Antisense strand to SEQ ID NO: 2052104
cucauuacgcaacucaagu

SEQ ID NO: 2052106 - RNA, 19 nt, Artificial Sequence
  Description of Artificial Sequence: Synthetic oligonucleotide
  Sense strand starting at position 2758 of SEQ ID NO: 1881535
uaaugagucccagaaguuu

SEQ ID NO: 2052107 - RNA, 19 nt, Artificial Sequence
  Description of Artificial Sequence: Synthetic oligonucleotide
  Antisense strand to SEQ ID NO: 2052106
aaacuucugggacucauua

SEQ ID NO: 2052108 - RNA, 19 nt, Artificial Sequence
  Description of Artificial Sequence: Synthetic oligonucleotide
  Sense strand starting at position 2984 of SEQ ID NO: 1881535
uuaguaugggacugguuaa

SEQ ID NO: 2052109 - RNA, 19 nt, Artificial Sequence
  Description of Artificial Sequence: Synthetic oligonucleotide
  Antisense strand to SEQ ID NO: 2052108
uuaaccagucccauacuaa

SEQ ID NO: 2052110 - RNA, 19 nt, Artificial Sequence
  Description of Artificial Sequence: Synthetic oligonucleotide
  Sense strand starting at position 2985 of SEQ ID NO: 1881535
uaguaugggacugguuaau

SEQ ID NO: 2052111 - RNA, 19 nt, Artificial Sequence
  Description of Artificial Sequence: Synthetic oligonucleotide
  Antisense strand to SEQ ID NO: 2052110
auuaaccagucccauacua

SEQ ID NO: 2052112 - RNA, 19 nt, Artificial Sequence
  Description of Artificial Sequence: Synthetic oligonucleotide
  Sense strand starting at position 3123 of SEQ ID NO: 1881535
ugaaucacacguuaccuua

SEQ ID NO: 2052113 - RNA, 19 nt, Artificial Sequence
  Description of Artificial Sequence: Synthetic oligonucleotide
  Antisense strand to SEQ ID NO: 2052112
uaagguaacgugugauuca

SEQ ID NO: 2052114 - RNA, 19 nt, Artificial Sequence
  Description of Artificial Sequence: Synthetic oligonucleotide
  Sense strand starting at position 3188 of SEQ ID NO: 1881535
guucgauaccguccggcua

SEQ ID NO: 2052115 - RNA, 19 nt, Artificial Sequence
  Description of Artificial Sequence: Synthetic oligonucleotide
  Antisense strand to SEQ ID NO: 2052114
uagccggacgguaucgaac

SEQ ID NO: 2052116 - RNA, 19 nt, Artificial Sequence
  Description of Artificial Sequence: Synthetic oligonucleotide
  Sense strand starting at position 3302 of SEQ ID NO: 1881535
ccgaaucucccuugaacca

SEQ ID NO: 2052117 - RNA, 19 nt, Artificial Sequence
  Description of Artificial Sequence: Synthetic oligonucleotide
  Antisense strand to SEQ ID NO: 2052116
ugguucaagggagauucgg

SEQ ID NO: 2052118 - RNA, 19 nt, Artificial Sequence
  Description of Artificial Sequence: Synthetic oligonucleotide
  Sense strand starting at position 3345 of SEQ ID NO: 1881535
gcagccaagugauuuguuu

SEQ ID NO: 2052119 - RNA, 19 nt, Artificial Sequence
  Description of Artificial Sequence: Synthetic oligonucleotide
  Antisense strand to SEQ ID NO: 2052118
aaacaaaucacuuggcugc

SEQ ID NO: 2052120 - RNA, 19 nt, Artificial Sequence
  Description of Artificial Sequence: Synthetic oligonucleotide
  Sense strand starting at position 3368 of SEQ ID NO: 1881535
gguggagccggagauaauu

SEQ ID NO: 2052121 - RNA, 19 nt, Artificial Sequence
  Description of Artificial Sequence: Synthetic oligonucleotide
  Antisense strand to SEQ ID NO: 2052120
aauuaucuccggcuccacc

SEQ ID NO: 2052122 - RNA, 19 nt, Artificial Sequence
  Description of Artificial Sequence: Synthetic oligonucleotide
  Sense strand starting at position 3563 of SEQ ID NO: 1881535
cugagaggcguggagaauu

SEQ ID NO: 2052123 - RNA, 19 nt, Artificial Sequence
  Description of Artificial Sequence: Synthetic oligonucleotide
  Antisense strand to SEQ ID NO: 2052122
aauucuccacgccucucag

SEQ ID NO: 2052124 - RNA, 19 nt, Artificial Sequence
  Description of Artificial Sequence: Synthetic oligonucleotide
  Sense strand starting at position 3781 of SEQ ID NO: 1881535
acuuccucugucuaaugua

SEQ ID NO: 2052125 - RNA, 19 nt, Artificial Sequence
  Description of Artificial Sequence: Synthetic oligonucleotide
  Antisense strand to SEQ ID NO: 2052124
uacauuagacagaggaagu

SEQ ID NO: 2052126 - RNA, 19 nt, Artificial Sequence
  Description of Artificial Sequence: Synthetic oligonucleotide
  Sense strand starting at position 3817 of SEQ ID NO: 1881535
ucaucuuuagugggaagga

SEQ ID NO: 2052127 - RNA, 19 nt, Artificial Sequence
  Description of Artificial Sequence: Synthetic oligonucleotide
  Antisense strand to SEQ ID NO: 2052126
uccuucccacuaaagauga

SEQ ID NO: 2052128 - RNA, 19 nt, Artificial Sequence
  Description of Artificial Sequence: Synthetic oligonucleotide
  Sense strand starting at position 3833 of SEQ ID NO: 1881535
ggauuacuugaguggauau

SEQ ID NO: 2052129 - RNA, 19 nt, Artificial Sequence
  Description of Artificial Sequence: Synthetic oligonucleotide
  Antisense strand to SEQ ID NO: 2052128
auauccacucaaguaaucc

SEQ ID NO: 2052130 - RNA, 19 nt, Artificial Sequence
  Description of Artificial Sequence: Synthetic oligonucleotide
  Sense strand starting at position 3844 of SEQ ID NO: 1881535
guggauauuccggaaguag

SEQ ID NO: 2052131 - RNA, 19 nt, Artificial Sequence
  Description of Artificial Sequence: Synthetic oligonucleotide
  Antisense strand to SEQ ID NO: 2052130
cuacuuccggaauauccac

SEQ ID NO: 2052132 - RNA, 19 nt, Artificial Sequence
  Description of Artificial Sequence: Synthetic oligonucleotide
  Sense strand starting at position 3929 of SEQ ID NO: 1881535
gauguugggaaguauugua

SEQ ID NO: 2052133 - RNA, 19 nt, Artificial Sequence
  Description of Artificial Sequence: Synthetic oligonucleotide
  Antisense strand to SEQ ID NO: 2052132
uacaauacuucccaacauc

SEQ ID NO: 2052134 - RNA, 19 nt, Artificial Sequence
  Description of Artificial Sequence: Synthetic oligonucleotide
  Sense strand starting at position 3937 of SEQ ID NO: 1881535
gaaguauuguacuugaaua

SEQ ID NO: 2052135 - RNA, 19 nt, Artificial Sequence
  Description of Artificial Sequence: Synthetic oligonucleotide
  Antisense strand to SEQ ID NO: 2052134
uauucaaguacaauacuuc

SEQ ID NO: 2052136 - RNA, 19 nt, Artificial Sequence
  Description of Artificial Sequence: Synthetic oligonucleotide
  Sense strand starting at position 153 of SEQ ID NO: 1881536
gcauuccaagcagaaguau

SEQ ID NO: 2052137 - RNA, 19 nt, Artificial Sequence
  Description of Artificial Sequence: Synthetic oligonucleotide
  Antisense strand to SEQ ID NO: 2052136
auacuucugcuuggaaugc

SEQ ID NO: 2052138 - RNA, 19 nt, Artificial Sequence
  Description of Artificial Sequence: Synthetic oligonucleotide
  Sense strand starting at position 223 of SEQ ID NO: 1881536
cuacgaauguuccuuaaau

SEQ ID NO: 2052139 - RNA, 19 nt, Artificial Sequence
  Description of Artificial Sequence: Synthetic oligonucleotide
  Antisense strand to SEQ ID NO: 2052138
auuuaaggaacauucguag

SEQ ID NO: 2052140 - RNA, 19 nt, Artificial Sequence
  Description of Artificial Sequence: Synthetic oligonucleotide
  Sense strand starting at position 224 of SEQ ID NO: 1881536
uacgaauguuccuuaaaug

SEQ ID NO: 2052141 - RNA, 19 nt, Artificial Sequence
  Description of Artificial Sequence: Synthetic oligonucleotide
  Antisense strand to SEQ ID NO: 2052140
cauuuaaggaacauucgua

SEQ ID NO: 2052142 - RNA, 19 nt, Artificial Sequence
  Description of Artificial Sequence: Synthetic oligonucleotide
  Sense strand starting at position 225 of SEQ ID NO: 1881536
acgaauguuccuuaaaugu

SEQ ID NO: 2052143 - RNA, 19 nt, Artificial Sequence
  Description of Artificial Sequence: Synthetic oligonucleotide
  Antisense strand to SEQ ID NO: 2052142
acauuuaaggaacauucgu

SEQ ID NO: 2052144 - RNA, 19 nt, Artificial Sequence
  Description of Artificial Sequence: Synthetic oligonucleotide
  Sense strand starting at position 233 of SEQ ID NO: 1881536
uccuuaaauguugguguga

SEQ ID NO: 2052145 - RNA, 19 nt, Artificial Sequence
  Description of Artificial Sequence: Synthetic oligonucleotide
  Antisense strand to SEQ ID NO: 2052144
ucacaccaacauuuaagga

SEQ ID NO: 2052146 - RNA, 19 nt, Artificial Sequence
  Description of Artificial Sequence: Synthetic oligonucleotide
  Sense strand starting at position 234 of SEQ ID NO: 1881536
ccuuaaauguuggugugaa

SEQ ID NO: 2052147 - RNA, 19 nt, Artificial Sequence
  Description of Artificial Sequence: Synthetic oligonucleotide
  Antisense strand to SEQ ID NO: 2052146
uucacaccaacauuuaagg

SEQ ID NO: 2052148 - RNA, 19 nt, Artificial Sequence
  Description of Artificial Sequence: Synthetic oligonucleotide
  Sense strand starting at position 247 of SEQ ID NO: 1881536
ugugaaauuuggcaggaga

SEQ ID NO: 2052149 - RNA, 19 nt, Artificial Sequence
  Description of Artificial Sequence: Synthetic oligonucleotide
  Antisense strand to SEQ ID NO: 2052148
ucuccugccaaauuucaca

SEQ ID NO: 2052150 - RNA, 19 nt, Artificial Sequence
  Description of Artificial Sequence: Synthetic oligonucleotide
  Sense strand starting at position 311 of SEQ ID NO: 1881536
gccugaguggccuaaagag

SEQ ID NO: 2052151 - RNA, 19 nt, Artificial Sequence
  Description of Artificial Sequence: Synthetic oligonucleotide
  Antisense strand to SEQ ID NO: 2052150
cucuuuaggccacucaggc

SEQ ID NO: 2052152 - RNA, 19 nt, Artificial Sequence
  Description of Artificial Sequence: Synthetic oligonucleotide
  Sense strand starting at position 452 of SEQ ID NO: 1881536
auggcauugauugauguua

SEQ ID NO: 2052153 - RNA, 19 nt, Artificial Sequence
  Description of Artificial Sequence: Synthetic oligonucleotide
  Antisense strand to SEQ ID NO: 2052152
uaacaucaaucaaugccau

SEQ ID NO: 2052154 - RNA, 19 nt, Artificial Sequence
  Description of Artificial Sequence: Synthetic oligonucleotide
  Sense strand starting at position 545 of SEQ ID NO: 1881536
augggaggcucuuucagua

SEQ ID NO: 2052155 - RNA, 19 nt, Artificial Sequence
  Description of Artificial Sequence: Synthetic oligonucleotide
  Antisense strand to SEQ ID NO: 2052154
uacugaaagagccucccau

SEQ ID NO: 2052156 - RNA, 19 nt, Artificial Sequence
  Description of Artificial Sequence: Synthetic oligonucleotide
  Sense strand starting at position 631 of SEQ ID NO: 1881536
gagagauauuuagggcuug

SEQ ID NO: 2052157 - RNA, 19 nt, Artificial Sequence
  Description of Artificial Sequence: Synthetic oligonucleotide
  Antisense strand to SEQ ID NO: 2052156
caagcccuaaauaucucuc

SEQ ID NO: 2052158 - RNA, 19 nt, Artificial Sequence
  Description of Artificial Sequence: Synthetic oligonucleotide
  Sense strand starting at position 797 of SEQ ID NO: 1881536
ucgauugugagauauccua

SEQ ID NO: 2052159 - RNA, 19 nt, Artificial Sequence
  Description of Artificial Sequence: Synthetic oligonucleotide
  Antisense strand to SEQ ID NO: 2052158
uaggauaucucacaaucga

SEQ ID NO: 2052160 - RNA, 19 nt, Artificial Sequence
  Description of Artificial Sequence: Synthetic oligonucleotide
  Sense strand starting at position 846 of SEQ ID NO: 1881536
uguccaagucuggaguuua

SEQ ID NO: 2052161 - RNA, 19 nt, Artificial Sequence
  Description of Artificial Sequence: Synthetic oligonucleotide
  Antisense strand to SEQ ID NO: 2052160
uaaacuccagacuuggaca

SEQ ID NO: 2052162 - RNA, 19 nt, Artificial Sequence
  Description of Artificial Sequence: Synthetic oligonucleotide
  Sense strand starting at position 868 of SEQ ID NO: 1881536
gagccauccugauuggaga

SEQ ID NO: 2052163 - RNA, 19 nt, Artificial Sequence
  Description of Artificial Sequence: Synthetic oligonucleotide
  Antisense strand to SEQ ID NO: 2052162
ucuccaaucaggauggcuc

SEQ ID NO: 2052164 - RNA, 19 nt, Artificial Sequence
  Description of Artificial Sequence: Synthetic oligonucleotide
  Sense strand starting at position 869 of SEQ ID NO: 1881536
agccauccugauuggagau

SEQ ID NO: 2052165 - RNA, 19 nt, Artificial Sequence
  Description of Artificial Sequence: Synthetic oligonucleotide
  Antisense strand to SEQ ID NO: 2052164
aucuccaaucaggauggcu

SEQ ID NO: 2052166 - RNA, 19 nt, Artificial Sequence
  Description of Artificial Sequence: Synthetic oligonucleotide
  Sense strand starting at position 870 of SEQ ID NO: 1881536
gccauccugauuggagaua

SEQ ID NO: 2052167 - RNA, 19 nt, Artificial Sequence
  Description of Artificial Sequence: Synthetic oligonucleotide
  Antisense strand to SEQ ID NO: 2052166
uaucuccaaucaggauggc

SEQ ID NO: 2052168 - RNA, 19 nt, Artificial Sequence
  Description of Artificial Sequence: Synthetic oligonucleotide
  Sense strand starting at position 889 of SEQ ID NO: 1881536
auaaucugguagucaucuu

SEQ ID NO: 2052169 - RNA, 19 nt, Artificial Sequence
  Description of Artificial Sequence: Synthetic oligonucleotide
  Antisense strand to SEQ ID NO: 2052168
aagaugacuaccagauuau

SEQ ID NO: 2052170 - RNA, 19 nt, Artificial Sequence
  Description of Artificial Sequence: Synthetic oligonucleotide
  Sense strand starting at position 897 of SEQ ID NO: 1881536
guagucaucuuuccauaaa

SEQ ID NO: 2052171 - RNA, 19 nt, Artificial Sequence
  Description of Artificial Sequence: Synthetic oligonucleotide
  Antisense strand to SEQ ID NO: 2052170
uuuauggaaagaugacuac

SEQ ID NO: 2052172 - RNA, 19 nt, Artificial Sequence
  Description of Artificial Sequence: Synthetic oligonucleotide
  Sense strand starting at position 983 of SEQ ID NO: 1881536
uaccauauguacccggaaa

SEQ ID NO: 2052173 - RNA, 19 nt, Artificial Sequence
  Description of Artificial Sequence: Synthetic oligonucleotide
  Antisense strand to SEQ ID NO: 2052172
uuuccggguacauauggua

SEQ ID NO: 2052174 - RNA, 19 nt, Artificial Sequence
  Description of Artificial Sequence: Synthetic oligonucleotide
  Sense strand starting at position 1038 of SEQ ID NO: 1881536
gugugucugacagagcuau

SEQ ID NO: 2052175 - RNA, 19 nt, Artificial Sequence
  Description of Artificial Sequence: Synthetic oligonucleotide
  Antisense strand to SEQ ID NO: 2052174
auagcucugucagacacac

SEQ ID NO: 2052176 - RNA, 19 nt, Artificial Sequence
  Description of Artificial Sequence: Synthetic oligonucleotide
  Sense strand starting at position 1069 of SEQ ID NO: 1881536
cagcguuuacaacagaguu

SEQ ID NO: 2052177 - RNA, 19 nt, Artificial Sequence
  Description of Artificial Sequence: Synthetic oligonucleotide
  Antisense strand to SEQ ID NO: 2052176
aacucuguuguaaacgcug

SEQ ID NO: 2052178 - RNA, 19 nt, Artificial Sequence
  Description of Artificial Sequence: Synthetic oligonucleotide
  Sense strand starting at position 1071 of SEQ ID NO: 1881536
gcguuuacaacagaguuua

SEQ ID NO: 2052179 - RNA, 19 nt, Artificial Sequence
  Description of Artificial Sequence: Synthetic oligonucleotide
  Antisense strand to SEQ ID NO: 2052178
uaaacucuguuguaaacgc

SEQ ID NO: 2052180 - RNA, 19 nt, Artificial Sequence
  Description of Artificial Sequence: Synthetic oligonucleotide
  Sense strand starting at position 2140 of SEQ ID NO: 1881536
cgaccagaauccgugaaca

SEQ ID NO: 2052181 - RNA, 19 nt, Artificial Sequence
  Description of Artificial Sequence: Synthetic oligonucleotide
  Antisense strand to SEQ ID NO: 2052180
uguucacggauucuggucg

SEQ ID NO: 2052182 - RNA, 19 nt, Artificial Sequence
  Description of Artificial Sequence: Synthetic oligonucleotide
  Sense strand starting at position 2452 of SEQ ID NO: 1881536
ucgguaucccaguggaaau

SEQ ID NO: 2052183 - RNA, 19 nt, Artificial Sequence
  Description of Artificial Sequence: Synthetic oligonucleotide
  Antisense strand to SEQ ID NO: 2052182
auuuccacugggauaccga

SEQ ID NO: 2052184 - RNA, 19 nt, Artificial Sequence
  Description of Artificial Sequence: Synthetic oligonucleotide
  Sense strand starting at position 2453 of SEQ ID NO: 1881536
cgguaucccaguggaaaug

SEQ ID NO: 2052185 - RNA, 19 nt, Artificial Sequence
  Description of Artificial Sequence: Synthetic oligonucleotide
  Antisense strand to SEQ ID NO: 2052184
cauuuccacugggauaccg

SEQ ID NO: 2052186 - RNA, 19 nt, Artificial Sequence
  Description of Artificial Sequence: Synthetic oligonucleotide
  Sense strand starting at position 2492 of SEQ ID NO: 1881536
ugcuucuuacacgaaauua

SEQ ID NO: 2052187 - RNA, 19 nt, Artificial Sequence
  Description of Artificial Sequence: Synthetic oligonucleotide
  Antisense strand to SEQ ID NO: 2052186
uaauuucguguaagaagca

SEQ ID NO: 2052188 - RNA, 19 nt, Artificial Sequence
  Description of Artificial Sequence: Synthetic oligonucleotide
  Sense strand starting at position 2562 of SEQ ID NO: 1881536
gccagaucccgugcuucua

SEQ ID NO: 2052189 - RNA, 19 nt, Artificial Sequence
  Description of Artificial Sequence: Synthetic oligonucleotide
  Antisense strand to SEQ ID NO: 2052188
uagaagcacgggaucuggc

SEQ ID NO: 2052190 - RNA, 19 nt, Artificial Sequence
  Description of Artificial Sequence: Synthetic oligonucleotide
  Sense strand starting at position 2589 of SEQ ID NO: 1881536
guugcuuguguugcauaau

SEQ ID NO: 2052191 - RNA, 19 nt, Artificial Sequence
  Description of Artificial Sequence: Synthetic oligonucleotide
  Antisense strand to SEQ ID NO: 2052190
auuaugcaacacaagcaac

SEQ ID NO: 2052192 - RNA, 19 nt, Artificial Sequence
  Description of Artificial Sequence: Synthetic oligonucleotide
  Sense strand starting at position 2631 of SEQ ID NO: 1881536
gccuccaaggaguguauuu

SEQ ID NO: 2052193 - RNA, 19 nt, Artificial Sequence
  Description of Artificial Sequence: Synthetic oligonucleotide
  Antisense strand to SEQ ID NO: 2052192
aaauacacuccuuggaggc

SEQ ID NO: 2052194 - RNA, 19 nt, Artificial Sequence
  Description of Artificial Sequence: Synthetic oligonucleotide
  Sense strand starting at position 2715 of SEQ ID NO: 1881536
cccucuaguccucacguaa

SEQ ID NO: 2052195 - RNA, 19 nt, Artificial Sequence
  Description of Artificial Sequence: Synthetic oligonucleotide
  Antisense strand to SEQ ID NO: 2052194
uuacgugaggacuagaggg

SEQ ID NO: 2052196 - RNA, 19 nt, Artificial Sequence
  Description of Artificial Sequence: Synthetic oligonucleotide
  Sense strand starting at position 2899 of SEQ ID NO: 1881536
cgaauaacauacucagucu

SEQ ID NO: 2052197 - RNA, 19 nt, Artificial Sequence
  Description of Artificial Sequence: Synthetic oligonucleotide
  Antisense strand to SEQ ID NO: 2052196
agacugaguauguuauucg

SEQ ID NO: 2052198 - RNA, 19 nt, Artificial Sequence
  Description of Artificial Sequence: Synthetic oligonucleotide
  Sense strand starting at position 2905 of SEQ ID NO: 1881536
acauacucagucuaaaguu

SEQ ID NO: 2052199 - RNA, 19 nt, Artificial Sequence
  Description of Artificial Sequence: Synthetic oligonucleotide
  Antisense strand to SEQ ID NO: 2052198
aacuuuagacugaguaugu

SEQ ID NO: 2052200 - RNA, 19 nt, Artificial Sequence
  Description of Artificial Sequence: Synthetic oligonucleotide
  Sense strand starting at position 2915 of SEQ ID NO: 1881536
ucuaaaguugcugauuauu

SEQ ID NO: 2052201 - RNA, 19 nt, Artificial Sequence
  Description of Artificial Sequence: Synthetic oligonucleotide
  Antisense strand to SEQ ID NO: 2052200
aauaaucagcaacuuuaga

SEQ ID NO: 2052202 - RNA, 19 nt, Artificial Sequence
  Description of Artificial Sequence: Synthetic oligonucleotide
  Sense strand starting at position 3049 of SEQ ID NO: 1881536
ccuuauuacugagugucuu

SEQ ID NO: 2052203 - RNA, 19 nt, Artificial Sequence
  Description of Artificial Sequence: Synthetic oligonucleotide
  Antisense strand to SEQ ID NO: 2052202
aagacacucaguaauaagg

SEQ ID NO: 2052204 - RNA, 19 nt, Artificial Sequence
  Description of Artificial Sequence: Synthetic oligonucleotide
  Sense strand starting at position 3053 of SEQ ID NO: 1881536
auuacugagugucuuuauu

SEQ ID NO: 2052205 - RNA, 19 nt, Artificial Sequence
  Description of Artificial Sequence: Synthetic oligonucleotide
  Antisense strand to SEQ ID NO: 2052204
aauaaagacacucaguaau

SEQ ID NO: 2052206 - RNA, 19 nt, Artificial Sequence
  Description of Artificial Sequence: Synthetic oligonucleotide
  Sense strand starting at position 3159 of SEQ ID NO: 1881536
ugcuuagaauugucaguaa

SEQ ID NO: 2052207 - RNA, 19 nt, Artificial Sequence
  Description of Artificial Sequence: Synthetic oligonucleotide
  Antisense strand to SEQ ID NO: 2052206
uuacugacaauucuaagca

SEQ ID NO: 2052208 - RNA, 19 nt, Artificial Sequence
  Description of Artificial Sequence: Synthetic oligonucleotide
  Sense strand starting at position 3239 of SEQ ID NO: 1881536
auucuuguuucuuuggauu

SEQ ID NO: 2052209 - RNA, 19 nt, Artificial Sequence
  Description of Artificial Sequence: Synthetic oligonucleotide
  Antisense strand to SEQ ID NO: 2052208
aauccaaagaaacaagaau

SEQ ID NO: 2052210 - RNA, 19 nt, Artificial Sequence
  Description of Artificial Sequence: Synthetic oligonucleotide
  Sense strand starting at position 3292 of SEQ ID NO: 1881536
aucugacuuguggaguuga

SEQ ID NO: 2052211 - RNA, 19 nt, Artificial Sequence
  Description of Artificial Sequence: Synthetic oligonucleotide
  Antisense strand to SEQ ID NO: 2052210
ucaacuccacaagucagau

SEQ ID NO: 2052212 - RNA, 19 nt, Artificial Sequence
  Description of Artificial Sequence: Synthetic oligonucleotide
  Sense strand starting at position 3357 of SEQ ID NO: 1881536
uucuuuguacuaugagauu

SEQ ID NO: 2052213 - RNA, 19 nt, Artificial Sequence
  Description of Artificial Sequence: Synthetic oligonucleotide
  Antisense strand to SEQ ID NO: 2052212
aaucucauaguacaaagaa

SEQ ID NO: 2052214 - RNA, 19 nt, Artificial Sequence
  Description of Artificial Sequence: Synthetic oligonucleotide
  Sense strand starting at position 3608 of SEQ ID NO: 1881536
gucaccaugcucgguauuu

SEQ ID NO: 2052215 - RNA, 19 nt, Artificial Sequence
  Description of Artificial Sequence: Synthetic oligonucleotide
  Antisense strand to SEQ ID NO: 2052214
aaauaccgagcauggugac

SEQ ID NO: 2052216 - RNA, 19 nt, Artificial Sequence
  Description of Artificial Sequence: Synthetic oligonucleotide
  Sense strand starting at position 61 of SEQ ID NO: 1881537
ugcuguagucucuaauaag

SEQ ID NO: 2052217 - RNA, 19 nt, Artificial Sequence
  Description of Artificial Sequence: Synthetic oligonucleotide
  Antisense strand to SEQ ID NO: 2052216
cuuauuagagacuacagca

SEQ ID NO: 2052218 - RNA, 19 nt, Artificial Sequence
  Description of Artificial Sequence: Synthetic oligonucleotide
  Sense strand starting at position 149 of SEQ ID NO: 1881537
ccugguuauuugucagugu

SEQ ID NO: 2052219 - RNA, 19 nt, Artificial Sequence
  Description of Artificial Sequence: Synthetic oligonucleotide
  Antisense strand to SEQ ID NO: 2052218
acacugacaaauaaccagg

SEQ ID NO: 2052220 - RNA, 19 nt, Artificial Sequence
  Description of Artificial Sequence: Synthetic oligonucleotide
  Sense strand starting at position 247 of SEQ ID NO: 1881537
ucuuguugacugcagagau

SEQ ID NO: 2052221 - RNA, 19 nt, Artificial Sequence
  Description of Artificial Sequence: Synthetic oligonucleotide
  Antisense strand to SEQ ID NO: 2052220
aucucugcagucaacaaga

SEQ ID NO: 2052222 - RNA, 19 nt, Artificial Sequence
  Description of Artificial Sequence: Synthetic oligonucleotide
  Sense strand starting at position 279 of SEQ ID NO: 1881537
gucaguugucuauugugcu

SEQ ID NO: 2052223 - RNA, 19 nt, Artificial Sequence
  Description of Artificial Sequence: Synthetic oligonucleotide
  Antisense strand to SEQ ID NO: 2052222
agcacaauagacaacugac

SEQ ID NO: 2052224 - RNA, 19 nt, Artificial Sequence
  Description of Artificial Sequence: Synthetic oligonucleotide
  Sense strand starting at position 504 of SEQ ID NO: 1881537
acagguaaaucuguaggau

SEQ ID NO: 2052225 - RNA, 19 nt, Artificial Sequence
  Description of Artificial Sequence: Synthetic oligonucleotide
  Antisense strand to SEQ ID NO: 2052224
auccuacagauuuaccugu

SEQ ID NO: 2052226 - RNA, 19 nt, Artificial Sequence
  Description of Artificial Sequence: Synthetic oligonucleotide
  Sense strand starting at position 582 of SEQ ID NO: 1881537
aaagacaggcuuugaaagu

SEQ ID NO: 2052227 - RNA, 19 nt, Artificial Sequence
  Description of Artificial Sequence: Synthetic oligonucleotide
  Antisense strand to SEQ ID NO: 2052226
acuuucaaagccugucuuu

SEQ ID NO: 2052228 - RNA, 19 nt, Artificial Sequence
  Description of Artificial Sequence: Synthetic oligonucleotide
  Sense strand starting at position 1235 of SEQ ID NO: 1881537
gaggaaugaugcgucugga

SEQ ID NO: 2052229 - RNA, 19 nt, Artificial Sequence
  Description of Artificial Sequence: Synthetic oligonucleotide
  Antisense strand to SEQ ID NO: 2052228
uccagacgcaucauuccuc

SEQ ID NO: 2052230 - RNA, 19 nt, Artificial Sequence
  Description of Artificial Sequence: Synthetic oligonucleotide
  Sense strand starting at position 1341 of SEQ ID NO: 1881537
aacuaaauaccucgugaga

SEQ ID NO: 2052231 - RNA, 19 nt, Artificial Sequence
  Description of Artificial Sequence: Synthetic oligonucleotide
  Antisense strand to SEQ ID NO: 2052230
ucucacgagguauuuaguu

SEQ ID NO: 2052232 - RNA, 19 nt, Artificial Sequence
  Description of Artificial Sequence: Synthetic oligonucleotide
  Sense strand starting at position 1417 of SEQ ID NO: 1881537
gggugcucucaacaccuua

SEQ ID NO: 2052233 - RNA, 19 nt, Artificial Sequence
  Description of Artificial Sequence: Synthetic oligonucleotide
  Antisense strand to SEQ ID NO: 2052232
uaagguguugagagcaccc

SEQ ID NO: 2052234 - RNA, 19 nt, Artificial Sequence
  Description of Artificial Sequence: Synthetic oligonucleotide
  Sense strand starting at position 1442 of SEQ ID NO: 1881537
gcuaucacccagcagauaa

SEQ ID NO: 2052235 - RNA, 19 nt, Artificial Sequence
  Description of Artificial Sequence: Synthetic oligonucleotide
  Antisense strand to SEQ ID NO: 2052234
uuaucugcugggugauagc

SEQ ID NO: 2052236 - RNA, 19 nt, Artificial Sequence
  Description of Artificial Sequence: Synthetic oligonucleotide
  Sense strand starting at position 1565 of SEQ ID NO: 1881537
cucccaggguucuuaacau

SEQ ID NO: 2052237 - RNA, 19 nt, Artificial Sequence
  Description of Artificial Sequence: Synthetic oligonucleotide
  Antisense strand to SEQ ID NO: 2052236
auguuaagaacccugggag

SEQ ID NO: 2052238 - RNA, 19 nt, Artificial Sequence
  Description of Artificial Sequence: Synthetic oligonucleotide
  Sense strand starting at position 1588 of SEQ ID NO: 1881537
caaguuagucuggaugcaa

SEQ ID NO: 2052239 - RNA, 19 nt, Artificial Sequence
  Description of Artificial Sequence: Synthetic oligonucleotide
  Antisense strand to SEQ ID NO: 2052238
uugcauccagacuaacuug

SEQ ID NO: 2052240 - RNA, 19 nt, Artificial Sequence
  Description of Artificial Sequence: Synthetic oligonucleotide
  Sense strand starting at position 1730 of SEQ ID NO: 1881537
ucacgaugcagagguugaa

SEQ ID NO: 2052241 - RNA, 19 nt, Artificial Sequence
  Description of Artificial Sequence: Synthetic oligonucleotide
  Antisense strand to SEQ ID NO: 2052240
uucaaccucugcaucguga

SEQ ID NO: 2052242 - RNA, 19 nt, Artificial Sequence
  Description of Artificial Sequence: Synthetic oligonucleotide
  Sense strand starting at position 1826 of SEQ ID NO: 1881537
guaugugaacaggagguau

SEQ ID NO: 2052243 - RNA, 19 nt, Artificial Sequence
  Description of Artificial Sequence: Synthetic oligonucleotide
  Antisense strand to SEQ ID NO: 2052242
auaccuccuguucacauac

SEQ ID NO: 2052244 - RNA, 19 nt, Artificial Sequence
  Description of Artificial Sequence: Synthetic oligonucleotide
  Sense strand starting at position 2038 of SEQ ID NO: 1881537
gccgccaggcucuuaguua

SEQ ID NO: 2052245 - RNA, 19 nt, Artificial Sequence
  Description of Artificial Sequence: Synthetic oligonucleotide
  Antisense strand to SEQ ID NO: 2052244
uaacuaagagccuggcggc

SEQ ID NO: 2052246 - RNA, 19 nt, Artificial Sequence
  Description of Artificial Sequence: Synthetic oligonucleotide
  Sense strand starting at position 2076 of SEQ ID NO: 1881537
ucauuuaagcaguggcaca

SEQ ID NO: 2052247 - RNA, 19 nt, Artificial Sequence
  Description of Artificial Sequence: Synthetic oligonucleotide
  Antisense strand to SEQ ID NO: 2052246
ugugccacugcuuaaauga

SEQ ID NO: 2052248 - RNA, 19 nt, Artificial Sequence
  Description of Artificial Sequence: Synthetic oligonucleotide
  Sense strand starting at position 2104 of SEQ ID NO: 1881537
gagaaaucccagugcucua

SEQ ID NO: 2052249 - RNA, 19 nt, Artificial Sequence
  Description of Artificial Sequence: Synthetic oligonucleotide
  Antisense strand to SEQ ID NO: 2052248
uagagcacugggauuucuc

SEQ ID NO: 2052250 - RNA, 19 nt, Artificial Sequence
  Description of Artificial Sequence: Synthetic oligonucleotide
  Sense strand starting at position 2141 of SEQ ID NO: 1881537
gggccaggucugugagaaa

SEQ ID NO: 2052251 - RNA, 19 nt, Artificial Sequence
  Description of Artificial Sequence: Synthetic oligonucleotide
  Antisense strand to SEQ ID NO: 2052250
uuucucacagaccuggccc

SEQ ID NO: 2052252 - RNA, 19 nt, Artificial Sequence
  Description of Artificial Sequence: Synthetic oligonucleotide
  Sense strand starting at position 2183 of SEQ ID NO: 1881537
cccauauuccaguaagucu

SEQ ID NO: 2052253 - RNA, 19 nt, Artificial Sequence
  Description of Artificial Sequence: Synthetic oligonucleotide
  Antisense strand to SEQ ID NO: 2052252
agacuuacuggaauauggg

SEQ ID NO: 2052254 - RNA, 19 nt, Artificial Sequence
  Description of Artificial Sequence: Synthetic oligonucleotide
  Sense strand starting at position 2194 of SEQ ID NO: 1881537
guaagucuagauugaguaa

SEQ ID NO: 2052255 - RNA, 19 nt, Artificial Sequence
  Description of Artificial Sequence: Synthetic oligonucleotide
  Antisense strand to SEQ ID NO: 2052254
uuacucaaucuagacuuac

SEQ ID NO: 2052256 - RNA, 19 nt, Artificial Sequence
  Description of Artificial Sequence: Synthetic oligonucleotide
  Sense strand starting at position 2262 of SEQ ID NO: 1881537
gauugccugcuuuauagau

SEQ ID NO: 2052257 - RNA, 19 nt, Artificial Sequence
  Description of Artificial Sequence: Synthetic oligonucleotide
  Antisense strand to SEQ ID NO: 2052256
aucuauaaagcaggcaauc

SEQ ID NO: 2052258 - RNA, 19 nt, Artificial Sequence
  Description of Artificial Sequence: Synthetic oligonucleotide
  Sense strand starting at position 2405 of SEQ ID NO: 1881537
accuaaucaggaggcaaau

SEQ ID NO: 2052259 - RNA, 19 nt, Artificial Sequence
  Description of Artificial Sequence: Synthetic oligonucleotide
  Antisense strand to SEQ ID NO: 2052258
auuugccuccugauuaggu

SEQ ID NO: 2052260 - RNA, 19 nt, Artificial Sequence
  Description of Artificial Sequence: Synthetic oligonucleotide
  Sense strand starting at position 2414 of SEQ ID NO: 1881537
ggaggcaaauguucucuga

SEQ ID NO: 2052261 - RNA, 19 nt, Artificial Sequence
  Description of Artificial Sequence: Synthetic oligonucleotide
  Antisense strand to SEQ ID NO: 2052260
ucagagaacauuugccucc

SEQ ID NO: 2052262 - RNA, 19 nt, Artificial Sequence
  Description of Artificial Sequence: Synthetic oligonucleotide
  Sense strand starting at position 2418 of SEQ ID NO: 1881537
gcaaauguucucugacuaa

SEQ ID NO: 2052263 - RNA, 19 nt, Artificial Sequence
  Description of Artificial Sequence: Synthetic oligonucleotide
  Antisense strand to SEQ ID NO: 2052262
uuagucagagaacauuugc

SEQ ID NO: 2052264 - RNA, 19 nt, Artificial Sequence
  Description of Artificial Sequence: Synthetic oligonucleotide
  Sense strand starting at position 2430 of SEQ ID NO: 1881537
ugacuaauuuagcucuguu

SEQ ID NO: 2052265 - RNA, 19 nt, Artificial Sequence
  Description of Artificial Sequence: Synthetic oligonucleotide
  Antisense strand to SEQ ID NO: 2052264
aacagagcuaaauuaguca

SEQ ID NO: 2052266 - RNA, 19 nt, Artificial Sequence
  Description of Artificial Sequence: Synthetic oligonucleotide
  Sense strand starting at position 2471 of SEQ ID NO: 1881537
cuuagagugagaggcaaua

SEQ ID NO: 2052267 - RNA, 19 nt, Artificial Sequence
  Description of Artificial Sequence: Synthetic oligonucleotide
  Antisense strand to SEQ ID NO: 2052266
uauugccucucacucuaag

SEQ ID NO: 2052268 - RNA, 19 nt, Artificial Sequence
  Description of Artificial Sequence: Synthetic oligonucleotide
  Sense strand starting at position 2484 of SEQ ID NO: 1881537
gcaauauagaguuguggga

SEQ ID NO: 2052269 - RNA, 19 nt, Artificial Sequence
  Description of Artificial Sequence: Synthetic oligonucleotide
  Antisense strand to SEQ ID NO: 2052268
ucccacaacucuauauugc

SEQ ID NO: 2052270 - RNA, 19 nt, Artificial Sequence
  Description of Artificial Sequence: Synthetic oligonucleotide
  Sense strand starting at position 2562 of SEQ ID NO: 1881537
gugacuuugagauaguuuc

SEQ ID NO: 2052271 - RNA, 19 nt, Artificial Sequence
  Description of Artificial Sequence: Synthetic oligonucleotide
  Antisense strand to SEQ ID NO: 2052270
gaaacuaucucaaagucac

SEQ ID NO: 2052272 - RNA, 19 nt, Artificial Sequence
  Description of Artificial Sequence: Synthetic oligonucleotide
  Sense strand starting at position 2568 of SEQ ID NO: 1881537
uugagauaguuuccucacu

SEQ ID NO: 2052273 - RNA, 19 nt, Artificial Sequence
  Description of Artificial Sequence: Synthetic oligonucleotide
  Antisense strand to SEQ ID NO: 2052272
agugaggaaacuaucucaa

SEQ ID NO: 2052274 - RNA, 19 nt, Artificial Sequence
  Description of Artificial Sequence: Synthetic oligonucleotide
  Sense strand starting at position 2595 of SEQ ID NO: 1881537
uuagguuucucauuggaaa

SEQ ID NO: 2052275 - RNA, 19 nt, Artificial Sequence
  Description of Artificial Sequence: Synthetic oligonucleotide
  Antisense strand to SEQ ID NO: 2052274
uuuccaaugagaaaccuaa

SEQ ID NO: 2052276 - RNA, 19 nt, Artificial Sequence
  Description of Artificial Sequence: Synthetic oligonucleotide
  Sense strand starting at position 2596 of SEQ ID NO: 1881537
uagguuucucauuggaaau

SEQ ID NO: 2052277 - RNA, 19 nt, Artificial Sequence
  Description of Artificial Sequence: Synthetic oligonucleotide
  Antisense strand to SEQ ID NO: 2052276
auuuccaaugagaaaccua

SEQ ID NO: 2052278 - RNA, 19 nt, Artificial Sequence
  Description of Artificial Sequence: Synthetic oligonucleotide
  Sense strand starting at position 2597 of SEQ ID NO: 1881537
agguuucucauuggaaaug

SEQ ID NO: 2052279 - RNA, 19 nt, Artificial Sequence
  Description of Artificial Sequence: Synthetic oligonucleotide
  Antisense strand to SEQ ID NO: 2052278
cauuuccaaugagaaaccu

SEQ ID NO: 2052280 - RNA, 19 nt, Artificial Sequence
  Description of Artificial Sequence: Synthetic oligonucleotide
  Sense strand starting at position 2902 of SEQ ID NO: 1881537
ggagcugcccuuuauuaaa

SEQ ID NO: 2052281 - RNA, 19 nt, Artificial Sequence
  Description of Artificial Sequence: Synthetic oligonucleotide
  Antisense strand to SEQ ID NO: 2052280
uuuaauaaagggcagcucc

SEQ ID NO: 2052282 - RNA, 19 nt, Artificial Sequence
  Description of Artificial Sequence: Synthetic oligonucleotide
  Sense strand starting at position 3204 of SEQ ID NO: 1881537
auaacaagugucugauagu

SEQ ID NO: 2052283 - RNA, 19 nt, Artificial Sequence
  Description of Artificial Sequence: Synthetic oligonucleotide
  Antisense strand to SEQ ID NO: 2052282
acuaucagacacuuguuau

SEQ ID NO: 2052284 - RNA, 19 nt, Artificial Sequence
  Description of Artificial Sequence: Synthetic oligonucleotide
  Sense strand starting at position 3270 of SEQ ID NO: 1881537
gcugacuuuguuuaucuga

SEQ ID NO: 2052285 - RNA, 19 nt, Artificial Sequence
  Description of Artificial Sequence: Synthetic oligonucleotide
  Antisense strand to SEQ ID NO: 2052284
ucagauaaacaaagucagc

SEQ ID NO: 2052286 - RNA, 19 nt, Artificial Sequence
  Description of Artificial Sequence: Synthetic oligonucleotide
  Sense strand starting at position 3306 of SEQ ID NO: 1881537
gaggcaaguccucagaucu

SEQ ID NO: 2052287 - RNA, 19 nt, Artificial Sequence
  Description of Artificial Sequence: Synthetic oligonucleotide
  Antisense strand to SEQ ID NO: 2052286
agaucugaggacuugccuc

SEQ ID NO: 2052288 - RNA, 19 nt, Artificial Sequence
  Description of Artificial Sequence: Synthetic oligonucleotide
  Sense strand starting at position 3463 of SEQ ID NO: 1881537
agacucuucuuucuagaag

SEQ ID NO: 2052289 - RNA, 19 nt, Artificial Sequence
  Description of Artificial Sequence: Synthetic oligonucleotide
  Antisense strand to SEQ ID NO: 2052288
cuucuagaaagaagagucu

SEQ ID NO: 2052290 - RNA, 19 nt, Artificial Sequence
  Description of Artificial Sequence: Synthetic oligonucleotide
  Sense strand starting at position 3499 of SEQ ID NO: 1881537
ugagaaguucaagguauug

SEQ ID NO: 2052291 - RNA, 19 nt, Artificial Sequence
  Description of Artificial Sequence: Synthetic oligonucleotide
  Antisense strand to SEQ ID NO: 2052290
caauaccuugaacuucuca

SEQ ID NO: 2052292 - RNA, 19 nt, Artificial Sequence
  Description of Artificial Sequence: Synthetic oligonucleotide
  Sense strand starting at position 3854 of SEQ ID NO: 1881537
cugggauugccugagcauc

SEQ ID NO: 2052293 - RNA, 19 nt, Artificial Sequence
  Description of Artificial Sequence: Synthetic oligonucleotide
  Antisense strand to SEQ ID NO: 2052292
gaugcucaggcaaucccag

SEQ ID NO: 2052294 - RNA, 19 nt, Artificial Sequence
  Description of Artificial Sequence: Synthetic oligonucleotide
  Sense strand starting at position 3876 of SEQ ID NO: 1881537
aagauuguggucuacuguu

SEQ ID NO: 2052295 - RNA, 19 nt, Artificial Sequence
  Description of Artificial Sequence: Synthetic oligonucleotide
  Antisense strand to SEQ ID NO: 2052294
aacaguagaccacaaucuu

SEQ ID NO: 2052296 - RNA, 19 nt, Artificial Sequence
  Description of Artificial Sequence: Synthetic oligonucleotide
  Sense strand starting at position 12 of SEQ ID NO: 1881538
agccauacuguccaaagaa

SEQ ID NO: 2052297 - RNA, 19 nt, Artificial Sequence
  Description of Artificial Sequence: Synthetic oligonucleotide
  Antisense strand to SEQ ID NO: 2052296
uucuuuggacaguauggcu

SEQ ID NO: 2052298 - RNA, 19 nt, Artificial Sequence
  Description of Artificial Sequence: Synthetic oligonucleotide
  Sense strand starting at position 156 of SEQ ID NO: 1881538
aaguauaaagcuggaggua

SEQ ID NO: 2052299 - RNA, 19 nt, Artificial Sequence
  Description of Artificial Sequence: Synthetic oligonucleotide
  Antisense strand to SEQ ID NO: 2052298
uaccuccagcuuuauacuu

SEQ ID NO: 2052300 - RNA, 19 nt, Artificial Sequence
  Description of Artificial Sequence: Synthetic oligonucleotide
  Sense strand starting at position 157 of SEQ ID NO: 1881538
aguauaaagcuggagguau

SEQ ID NO: 2052301 - RNA, 19 nt, Artificial Sequence
  Description of Artificial Sequence: Synthetic oligonucleotide
  Antisense strand to SEQ ID NO: 2052300
auaccuccagcuuuauacu

SEQ ID NO: 2052302 - RNA, 19 nt, Artificial Sequence
  Description of Artificial Sequence: Synthetic oligonucleotide
  Sense strand starting at position 269 of SEQ ID NO: 1881538
guuagagaacuccgaaaua

SEQ ID NO: 2052303 - RNA, 19 nt, Artificial Sequence
  Description of Artificial Sequence: Synthetic oligonucleotide
  Antisense strand to SEQ ID NO: 2052302
uauuucggaguucucuaac

SEQ ID NO: 2052304 - RNA, 19 nt, Artificial Sequence
  Description of Artificial Sequence: Synthetic oligonucleotide
  Sense strand starting at position 501 of SEQ ID NO: 1881538
gcaaguacccucuggacau

SEQ ID NO: 2052305 - RNA, 19 nt, Artificial Sequence
  Description of Artificial Sequence: Synthetic oligonucleotide
  Antisense strand to SEQ ID NO: 2052304
auguccagaggguacuugc

SEQ ID NO: 2052306 - RNA, 19 nt, Artificial Sequence
  Description of Artificial Sequence: Synthetic oligonucleotide
  Sense strand starting at position 767 of SEQ ID NO: 1881538
gggcaaaugacgugaacag

SEQ ID NO: 2052307 - RNA, 19 nt, Artificial Sequence
  Description of Artificial Sequence: Synthetic oligonucleotide
  Antisense strand to SEQ ID NO: 2052306
cuguucacgucauuugccc

SEQ ID NO: 2052308 - RNA, 19 nt, Artificial Sequence
  Description of Artificial Sequence: Synthetic oligonucleotide
  Sense strand starting at position 1197 of SEQ ID NO: 1881538
ggauaaugagcauguggua

SEQ ID NO: 2052309 - RNA, 19 nt, Artificial Sequence
  Description of Artificial Sequence: Synthetic oligonucleotide
  Antisense strand to SEQ ID NO: 2052308
uaccacaugcucauuaucc

SEQ ID NO: 2052310 - RNA, 19 nt, Artificial Sequence
  Description of Artificial Sequence: Synthetic oligonucleotide
  Sense strand starting at position 1204 of SEQ ID NO: 1881538
gagcaugugguacauauua

SEQ ID NO: 2052311 - RNA, 19 nt, Artificial Sequence
  Description of Artificial Sequence: Synthetic oligonucleotide
  Antisense strand to SEQ ID NO: 2052310
uaauauguaccacaugcuc

SEQ ID NO: 2052312 - RNA, 19 nt, Artificial Sequence
  Description of Artificial Sequence: Synthetic oligonucleotide
  Sense strand starting at position 1529 of SEQ ID NO: 1881538
auaguuuacccauguaaca

SEQ ID NO: 2052313 - RNA, 19 nt, Artificial Sequence
  Description of Artificial Sequence: Synthetic oligonucleotide
  Antisense strand to SEQ ID NO: 2052312
uguuacauggguaaacuau

SEQ ID NO: 2052314 - RNA, 19 nt, Artificial Sequence
  Description of Artificial Sequence: Synthetic oligonucleotide
  Sense strand starting at position 1613 of SEQ ID NO: 1881538
ugcuaauggauacgggaau

SEQ ID NO: 2052315 - RNA, 19 nt, Artificial Sequence
  Description of Artificial Sequence: Synthetic oligonucleotide
  Antisense strand to SEQ ID NO: 2052314
auucccguauccauuagca

SEQ ID NO: 2052316 - RNA, 19 nt, Artificial Sequence
  Description of Artificial Sequence: Synthetic oligonucleotide
  Sense strand starting at position 1692 of SEQ ID NO: 1881538
uucccaauccaggguugaa

SEQ ID NO: 2052317 - RNA, 19 nt, Artificial Sequence
  Description of Artificial Sequence: Synthetic oligonucleotide
  Antisense strand to SEQ ID NO: 2052316
uucaacccuggauugggaa

SEQ ID NO: 2052318 - RNA, 19 nt, Artificial Sequence
  Description of Artificial Sequence: Synthetic oligonucleotide
  Sense strand starting at position 1772 of SEQ ID NO: 1881538
gugucauacugaccaaacu

SEQ ID NO: 2052319 - RNA, 19 nt, Artificial Sequence
  Description of Artificial Sequence: Synthetic oligonucleotide
  Antisense strand to SEQ ID NO: 2052318
aguuuggucaguaugacac

SEQ ID NO: 2052320 - RNA, 19 nt, Artificial Sequence
  Description of Artificial Sequence: Synthetic oligonucleotide
  Sense strand starting at position 1808 of SEQ ID NO: 1881538
cuggaacuugcuggaaauu

SEQ ID NO: 2052321 - RNA, 19 nt, Artificial Sequence
  Description of Artificial Sequence: Synthetic oligonucleotide
  Antisense strand to SEQ ID NO: 2052320
aauuuccagcaaguuccag

SEQ ID NO: 2052322 - RNA, 19 nt, Artificial Sequence
  Description of Artificial Sequence: Synthetic oligonucleotide
  Sense strand starting at position 1867 of SEQ ID NO: 1881538
agaugucacauuggagcau

SEQ ID NO: 2052323 - RNA, 19 nt, Artificial Sequence
  Description of Artificial Sequence: Synthetic oligonucleotide
  Antisense strand to SEQ ID NO: 2052322
augcuccaaugugacaucu

SEQ ID NO: 2052324 - RNA, 19 nt, Artificial Sequence
  Description of Artificial Sequence: Synthetic oligonucleotide
  Sense strand starting at position 1983 of SEQ ID NO: 1881538
auuccaggagcuugcauau

SEQ ID NO: 2052325 - RNA, 19 nt, Artificial Sequence
  Description of Artificial Sequence: Synthetic oligonucleotide
  Antisense strand to SEQ ID NO: 2052324
auaugcaagcuccuggaau

SEQ ID NO: 2052326 - RNA, 19 nt, Artificial Sequence
  Description of Artificial Sequence: Synthetic oligonucleotide
  Sense strand starting at position 2131 of SEQ ID NO: 1881538
agagcaugcaaugaagagu

SEQ ID NO: 2052327 - RNA, 19 nt, Artificial Sequence
  Description of Artificial Sequence: Synthetic oligonucleotide
  Antisense strand to SEQ ID NO: 2052326
acucuucauugcaugcucu

SEQ ID NO: 2052328 - RNA, 19 nt, Artificial Sequence
  Description of Artificial Sequence: Synthetic oligonucleotide
  Sense strand starting at position 2156 of SEQ ID NO: 1881538
guagcugugaggcaauaaa

SEQ ID NO: 2052329 - RNA, 19 nt, Artificial Sequence
  Description of Artificial Sequence: Synthetic oligonucleotide
  Antisense strand to SEQ ID NO: 2052328
uuuauugccucacagcuac

SEQ ID NO: 2052330 - RNA, 19 nt, Artificial Sequence
  Description of Artificial Sequence: Synthetic oligonucleotide
  Sense strand starting at position 2199 of SEQ ID NO: 1881538
acgagaacaucaccuauuc

SEQ ID NO: 2052331 - RNA, 19 nt, Artificial Sequence
  Description of Artificial Sequence: Synthetic oligonucleotide
  Antisense strand to SEQ ID NO: 2052330
gaauaggugauguucucgu

SEQ ID NO: 2052332 - RNA, 19 nt, Artificial Sequence
  Description of Artificial Sequence: Synthetic oligonucleotide
  Sense strand starting at position 2357 of SEQ ID NO: 1881538
cccgcuaugaaggauauca

SEQ ID NO: 2052333 - RNA, 19 nt, Artificial Sequence
  Description of Artificial Sequence: Synthetic oligonucleotide
  Antisense strand to SEQ ID NO: 2052332
ugauauccuucauagcggg

SEQ ID NO: 2052334 - RNA, 19 nt, Artificial Sequence
  Description of Artificial Sequence: Synthetic oligonucleotide
  Sense strand starting at position 2517 of SEQ ID NO: 1881538
cuaagcuuacucuaugugu

SEQ ID NO: 2052335 - RNA, 19 nt, Artificial Sequence
  Description of Artificial Sequence: Synthetic oligonucleotide
  Antisense strand to SEQ ID NO: 2052334
acacauagaguaagcuuag

SEQ ID NO: 2052336 - RNA, 19 nt, Artificial Sequence
  Description of Artificial Sequence: Synthetic oligonucleotide
  Sense strand starting at position 2590 of SEQ ID NO: 1881538
uggaauguugugcaaccau

SEQ ID NO: 2052337 - RNA, 19 nt, Artificial Sequence
  Description of Artificial Sequence: Synthetic oligonucleotide
  Antisense strand to SEQ ID NO: 2052336
augguugcacaacauucca

SEQ ID NO: 2052338 - RNA, 19 nt, Artificial Sequence
  Description of Artificial Sequence: Synthetic oligonucleotide
  Sense strand starting at position 2760 of SEQ ID NO: 1881538
cacuaucuuuagguggaau

SEQ ID NO: 2052339 - RNA, 19 nt, Artificial Sequence
  Description of Artificial Sequence: Synthetic oligonucleotide
  Antisense strand to SEQ ID NO: 2052338
auuccaccuaaagauagug

SEQ ID NO: 2052340 - RNA, 19 nt, Artificial Sequence
  Description of Artificial Sequence: Synthetic oligonucleotide
  Sense strand starting at position 2762 of SEQ ID NO: 1881538
cuaucuuuagguggaauca

SEQ ID NO: 2052341 - RNA, 19 nt, Artificial Sequence
  Description of Artificial Sequence: Synthetic oligonucleotide
  Antisense strand to SEQ ID NO: 2052340
ugauuccaccuaaagauag

SEQ ID NO: 2052342 - RNA, 19 nt, Artificial Sequence
  Description of Artificial Sequence: Synthetic oligonucleotide
  Sense strand starting at position 2827 of SEQ ID NO: 1881538
uuacuauagugaccacgua

SEQ ID NO: 2052343 - RNA, 19 nt, Artificial Sequence
  Description of Artificial Sequence: Synthetic oligonucleotide
  Antisense strand to SEQ ID NO: 2052342
uacguggucacuauaguaa

SEQ ID NO: 2052344 - RNA, 19 nt, Artificial Sequence
  Description of Artificial Sequence: Synthetic oligonucleotide
  Sense strand starting at position 2847 of SEQ ID NO: 1881538
ugguuauaccuuugggaca

SEQ ID NO: 2052345 - RNA, 19 nt, Artificial Sequence
  Description of Artificial Sequence: Synthetic oligonucleotide
  Antisense strand to SEQ ID NO: 2052344
ugucccaaagguauaacca

SEQ ID NO: 2052346 - RNA, 19 nt, Artificial Sequence
  Description of Artificial Sequence: Synthetic oligonucleotide
  Sense strand starting at position 2932 of SEQ ID NO: 1881538
uacauuuauguguguaucu

SEQ ID NO: 2052347 - RNA, 19 nt, Artificial Sequence
  Description of Artificial Sequence: Synthetic oligonucleotide
  Antisense strand to SEQ ID NO: 2052346
agauacacacauaaaugua

SEQ ID NO: 2052348 - RNA, 19 nt, Artificial Sequence
  Description of Artificial Sequence: Synthetic oligonucleotide
  Sense strand starting at position 2933 of SEQ ID NO: 1881538
acauuuauguguguaucuu

SEQ ID NO: 2052349 - RNA, 19 nt, Artificial Sequence
  Description of Artificial Sequence: Synthetic oligonucleotide
  Antisense strand to SEQ ID NO: 2052348
aagauacacacauaaaugu

SEQ ID NO: 2052350 - RNA, 19 nt, Artificial Sequence
  Description of Artificial Sequence: Synthetic oligonucleotide
  Sense strand starting at position 2981 of SEQ ID NO: 1881538
accagaauuugacagaguu

SEQ ID NO: 2052351 - RNA, 19 nt, Artificial Sequence
  Description of Artificial Sequence: Synthetic oligonucleotide
  Antisense strand to SEQ ID NO: 2052350
aacucugucaaauucuggu

SEQ ID NO: 2052352 - RNA, 19 nt, Artificial Sequence
  Description of Artificial Sequence: Synthetic oligonucleotide
  Sense strand starting at position 3014 of SEQ ID NO: 1881538
ugaaccaguucuuuauagu

SEQ ID NO: 2052353 - RNA, 19 nt, Artificial Sequence
  Description of Artificial Sequence: Synthetic oligonucleotide
  Antisense strand to SEQ ID NO: 2052352
acuauaaagaacugguuca

SEQ ID NO: 2052354 - RNA, 19 nt, Artificial Sequence
  Description of Artificial Sequence: Synthetic oligonucleotide
  Sense strand starting at position 3415 of SEQ ID NO: 1881538
uggcuauugcuagaaccau

SEQ ID NO: 2052355 - RNA, 19 nt, Artificial Sequence
  Description of Artificial Sequence: Synthetic oligonucleotide
  Antisense strand to SEQ ID NO: 2052354
augguucuagcaauagcca

SEQ ID NO: 2052356 - RNA, 19 nt, Artificial Sequence
  Description of Artificial Sequence: Synthetic oligonucleotide
  Sense strand starting at position 3421 of SEQ ID NO: 1881538
uugcuagaaccaugaacuu

SEQ ID NO: 2052357 - RNA, 19 nt, Artificial Sequence
  Description of Artificial Sequence: Synthetic oligonucleotide
  Antisense strand to SEQ ID NO: 2052356
aaguucaugguucuagcaa

SEQ ID NO: 2052358 - RNA, 19 nt, Artificial Sequence
  Description of Artificial Sequence: Synthetic oligonucleotide
  Sense strand starting at position 3720 of SEQ ID NO: 1881538
guucuaggacuccauuauu

SEQ ID NO: 2052359 - RNA, 19 nt, Artificial Sequence
  Description of Artificial Sequence: Synthetic oligonucleotide
  Antisense strand to SEQ ID NO: 2052358
aauaauggaguccuagaac

SEQ ID NO: 2052360 - RNA, 19 nt, Artificial Sequence
  Description of Artificial Sequence: Synthetic oligonucleotide
  Sense strand starting at position 3730 of SEQ ID NO: 1881538
uccauuauuuagcagagau

SEQ ID NO: 2052361 - RNA, 19 nt, Artificial Sequence
  Description of Artificial Sequence: Synthetic oligonucleotide
  Antisense strand to SEQ ID NO: 2052360
aucucugcuaaauaaugga

SEQ ID NO: 2052362 - RNA, 19 nt, Artificial Sequence
  Description of Artificial Sequence: Synthetic oligonucleotide
  Sense strand starting at position 3738 of SEQ ID NO: 1881538
uuagcagagaucugaugca

SEQ ID NO: 2052363 - RNA, 19 nt, Artificial Sequence
  Description of Artificial Sequence: Synthetic oligonucleotide
  Antisense strand to SEQ ID NO: 2052362
ugcaucagaucucugcuaa

SEQ ID NO: 2052364 - RNA, 19 nt, Artificial Sequence
  Description of Artificial Sequence: Synthetic oligonucleotide
  Sense strand starting at position 3759 of SEQ ID NO: 1881538
gggaacauguuagaaagaa

SEQ ID NO: 2052365 - RNA, 19 nt, Artificial Sequence
  Description of Artificial Sequence: Synthetic oligonucleotide
  Antisense strand to SEQ ID NO: 2052364
uucuuucuaacauguuccc

SEQ ID NO: 2052366 - RNA, 19 nt, Artificial Sequence
  Description of Artificial Sequence: Synthetic oligonucleotide
  Sense strand starting at position 3812 of SEQ ID NO: 1881538
aaacuugagucugugagga

SEQ ID NO: 2052367 - RNA, 19 nt, Artificial Sequence
  Description of Artificial Sequence: Synthetic oligonucleotide
  Antisense strand to SEQ ID NO: 2052366
uccucacagacucaaguuu

SEQ ID NO: 2052368 - RNA, 19 nt, Artificial Sequence
  Description of Artificial Sequence: Synthetic oligonucleotide
  Sense strand starting at position 3832 of SEQ ID NO: 1881538
gaggaaugcuaaguugauc

SEQ ID NO: 2052369 - RNA, 19 nt, Artificial Sequence
  Description of Artificial Sequence: Synthetic oligonucleotide
  Antisense strand to SEQ ID NO: 2052368
gaucaacuuagcauuccuc

SEQ ID NO: 2052370 - RNA, 19 nt, Artificial Sequence
  Description of Artificial Sequence: Synthetic oligonucleotide
  Sense strand starting at position 3883 of SEQ ID NO: 1881538
cuggaaguucuccaucuca

SEQ ID NO: 2052371 - RNA, 19 nt, Artificial Sequence
  Description of Artificial Sequence: Synthetic oligonucleotide
  Antisense strand to SEQ ID NO: 2052370
ugagauggagaacuuccag

SEQ ID NO: 2052372 - RNA, 19 nt, Artificial Sequence
  Description of Artificial Sequence: Synthetic oligonucleotide
  Sense strand starting at position 3927 of SEQ ID NO: 1881538
cagaauggcuagucaucuu

SEQ ID NO: 2052373 - RNA, 19 nt, Artificial Sequence
  Description of Artificial Sequence: Synthetic oligonucleotide
  Antisense strand to SEQ ID NO: 2052372
aagaugacuagccauucug

SEQ ID NO: 2052374 - RNA, 19 nt, Artificial Sequence
  Description of Artificial Sequence: Synthetic oligonucleotide
  Sense strand starting at position 3964 of SEQ ID NO: 1881538
agauuagcuucuuuggguu

SEQ ID NO: 2052375 - RNA, 19 nt, Artificial Sequence
  Description of Artificial Sequence: Synthetic oligonucleotide
  Antisense strand to SEQ ID NO: 2052374
aacccaaagaagcuaaucu

SEQ ID NO: 2052376 - RNA, 19 nt, Artificial Sequence
  Description of Artificial Sequence: Synthetic oligonucleotide
  Sense strand starting at position 295 of SEQ ID NO: 1881539
acuugauaggguuguaauu

SEQ ID NO: 2052377 - RNA, 19 nt, Artificial Sequence
  Description of Artificial Sequence: Synthetic oligonucleotide
  Antisense strand to SEQ ID NO: 2052376
aauuacaacccuaucaagu

SEQ ID NO: 2052378 - RNA, 19 nt, Artificial Sequence
  Description of Artificial Sequence: Synthetic oligonucleotide
  Sense strand starting at position 321 of SEQ ID NO: 1881539
caggaacuucuauguaaag

SEQ ID NO: 2052379 - RNA, 19 nt, Artificial Sequence
  Description of Artificial Sequence: Synthetic oligonucleotide
  Antisense strand to SEQ ID NO: 2052378
cuuuacauagaaguuccug

SEQ ID NO: 2052380 - RNA, 19 nt, Artificial Sequence
  Description of Artificial Sequence: Synthetic oligonucleotide
  Sense strand starting at position 356 of SEQ ID NO: 1881539
gucuuagaaauguaguaua

SEQ ID NO: 2052381 - RNA, 19 nt, Artificial Sequence
  Description of Artificial Sequence: Synthetic oligonucleotide
  Antisense strand to SEQ ID NO: 2052380
uauacuacauuucuaagac

SEQ ID NO: 2052382 - RNA, 19 nt, Artificial Sequence
  Description of Artificial Sequence: Synthetic oligonucleotide
  Sense strand starting at position 390 of SEQ ID NO: 1881539
ccaggaaugugcccagaau

SEQ ID NO: 2052383 - RNA, 19 nt, Artificial Sequence
  Description of Artificial Sequence: Synthetic oligonucleotide
  Antisense strand to SEQ ID NO: 2052382
auucugggcacauuccugg

SEQ ID NO: 2052384 - RNA, 19 nt, Artificial Sequence
  Description of Artificial Sequence: Synthetic oligonucleotide
  Sense strand starting at position 529 of SEQ ID NO: 1881539
gagaaugucucagcuuagg

SEQ ID NO: 2052385 - RNA, 19 nt, Artificial Sequence
  Description of Artificial Sequence: Synthetic oligonucleotide
  Antisense strand to SEQ ID NO: 2052384
ccuaagcugagacauucuc

SEQ ID NO: 2052386 - RNA, 19 nt, Artificial Sequence
  Description of Artificial Sequence: Synthetic oligonucleotide
  Sense strand starting at position 532 of SEQ ID NO: 1881539
aaugucucagcuuaggaau

SEQ ID NO: 2052387 - RNA, 19 nt, Artificial Sequence
  Description of Artificial Sequence: Synthetic oligonucleotide
  Antisense strand to SEQ ID NO: 2052386
auuccuaagcugagacauu

SEQ ID NO: 2052388 - RNA, 19 nt, Artificial Sequence
  Description of Artificial Sequence: Synthetic oligonucleotide
  Sense strand starting at position 764 of SEQ ID NO: 1881539
gagcgagaaugagaaauuu

SEQ ID NO: 2052389 - RNA, 19 nt, Artificial Sequence
  Description of Artificial Sequence: Synthetic oligonucleotide
  Antisense strand to SEQ ID NO: 2052388
aaauuucucauucucgcuc

SEQ ID NO: 2052390 - RNA, 19 nt, Artificial Sequence
  Description of Artificial Sequence: Synthetic oligonucleotide
  Sense strand starting at position 1151 of SEQ ID NO: 1881539
ggaggacaguugucaugag

SEQ ID NO: 2052391 - RNA, 19 nt, Artificial Sequence
  Description of Artificial Sequence: Synthetic oligonucleotide
  Antisense strand to SEQ ID NO: 2052390
cucaugacaacuguccucc

SEQ ID NO: 2052392 - RNA, 19 nt, Artificial Sequence
  Description of Artificial Sequence: Synthetic oligonucleotide
  Sense strand starting at position 1155 of SEQ ID NO: 1881539
gacaguugucaugaguaau

SEQ ID NO: 2052393 - RNA, 19 nt, Artificial Sequence
  Description of Artificial Sequence: Synthetic oligonucleotide
  Antisense strand to SEQ ID NO: 2052392
auuacucaugacaacuguc

SEQ ID NO: 2052394 - RNA, 19 nt, Artificial Sequence
  Description of Artificial Sequence: Synthetic oligonucleotide
  Sense strand starting at position 1226 of SEQ ID NO: 1881539
gucaacacuuagcugagaa

SEQ ID NO: 2052395 - RNA, 19 nt, Artificial Sequence
  Description of Artificial Sequence: Synthetic oligonucleotide
  Antisense strand to SEQ ID NO: 2052394
uucucagcuaaguguugac

SEQ ID NO: 2052396 - RNA, 19 nt, Artificial Sequence
  Description of Artificial Sequence: Synthetic oligonucleotide
  Sense strand starting at position 1280 of SEQ ID NO: 1881539
ggaaaucggaugugagcau

SEQ ID NO: 2052397 - RNA, 19 nt, Artificial Sequence
  Description of Artificial Sequence: Synthetic oligonucleotide
  Antisense strand to SEQ ID NO: 2052396
augcucacauccgauuucc

SEQ ID NO: 2052398 - RNA, 19 nt, Artificial Sequence
  Description of Artificial Sequence: Synthetic oligonucleotide
  Sense strand starting at position 1315 of SEQ ID NO: 1881539
agaguaugguguuuaggaa

SEQ ID NO: 2052399 - RNA, 19 nt, Artificial Sequence
  Description of Artificial Sequence: Synthetic oligonucleotide
  Antisense strand to SEQ ID NO: 2052398
uuccuaaacaccauacucu

SEQ ID NO: 2052400 - RNA, 19 nt, Artificial Sequence
  Description of Artificial Sequence: Synthetic oligonucleotide
  Sense strand starting at position 1316 of SEQ ID NO: 1881539
gaguaugguguuuaggaac

SEQ ID NO: 2052401 - RNA, 19 nt, Artificial Sequence
  Description of Artificial Sequence: Synthetic oligonucleotide
  Antisense strand to SEQ ID NO: 2052400
guuccuaaacaccauacuc

SEQ ID NO: 2052402 - RNA, 19 nt, Artificial Sequence
  Description of Artificial Sequence: Synthetic oligonucleotide
  Sense strand starting at position 1392 of SEQ ID NO: 1881539
aggugugaucaccagccau

SEQ ID NO: 2052403 - RNA, 19 nt, Artificial Sequence
  Description of Artificial Sequence: Synthetic oligonucleotide
  Antisense strand to SEQ ID NO: 2052402
auggcuggugaucacaccu

SEQ ID NO: 2052404 - RNA, 19 nt, Artificial Sequence
  Description of Artificial Sequence: Synthetic oligonucleotide
  Sense strand starting at position 1430 of SEQ ID NO: 1881539
ccacuaauacugggacuuu

SEQ ID NO: 2052405 - RNA, 19 nt, Artificial Sequence
  Description of Artificial Sequence: Synthetic oligonucleotide
  Antisense strand to SEQ ID NO: 2052404
aaagucccaguauuagugg

SEQ ID NO: 2052406 - RNA, 19 nt, Artificial Sequence
  Description of Artificial Sequence: Synthetic oligonucleotide
  Sense strand starting at position 1520 of SEQ ID NO: 1881539
acaggugguaagugauauu

SEQ ID NO: 2052407 - RNA, 19 nt, Artificial Sequence
  Description of Artificial Sequence: Synthetic oligonucleotide
  Antisense strand to SEQ ID NO: 2052406
aauaucacuuaccaccugu

SEQ ID NO: 2052408 - RNA, 19 nt, Artificial Sequence
  Description of Artificial Sequence: Synthetic oligonucleotide
  Sense strand starting at position 1540 of SEQ ID NO: 1881539
accuguuaaucaccgaaau

SEQ ID NO: 2052409 - RNA, 19 nt, Artificial Sequence
  Description of Artificial Sequence: Synthetic oligonucleotide
  Antisense strand to SEQ ID NO: 2052408
auuucggugauuaacaggu

SEQ ID NO: 2052410 - RNA, 19 nt, Artificial Sequence
  Description of Artificial Sequence: Synthetic oligonucleotide
  Sense strand starting at position 1571 of SEQ ID NO: 1881539
cuucuccuggcaugaaaga

SEQ ID NO: 2052411 - RNA, 19 nt, Artificial Sequence
  Description of Artificial Sequence: Synthetic oligonucleotide
  Antisense strand to SEQ ID NO: 2052410
ucuuucaugccaggagaag

SEQ ID NO: 2052412 - RNA, 19 nt, Artificial Sequence
  Description of Artificial Sequence: Synthetic oligonucleotide
  Sense strand starting at position 1582 of SEQ ID NO: 1881539
augaaagaguugguauugu

SEQ ID NO: 2052413 - RNA, 19 nt, Artificial Sequence
  Description of Artificial Sequence: Synthetic oligonucleotide
  Antisense strand to SEQ ID NO: 2052412
acaauaccaacucuuucau

SEQ ID NO: 2052414 - RNA, 19 nt, Artificial Sequence
  Description of Artificial Sequence: Synthetic oligonucleotide
  Sense strand starting at position 3206 of SEQ ID NO: 1881539
agcacaguugaauacuaua

SEQ ID NO: 2052415 - RNA, 19 nt, Artificial Sequence
  Description of Artificial Sequence: Synthetic oligonucleotide
  Antisense strand to SEQ ID NO: 2052414
uauaguauucaacugugcu

SEQ ID NO: 2052416 - RNA, 19 nt, Artificial Sequence
  Description of Artificial Sequence: Synthetic oligonucleotide
  Sense strand starting at position 3279 of SEQ ID NO: 1881539
aaggcuuugggcuauaaca

SEQ ID NO: 2052417 - RNA, 19 nt, Artificial Sequence
  Description of Artificial Sequence: Synthetic oligonucleotide
  Antisense strand to SEQ ID NO: 2052416
uguuauagcccaaagccuu

SEQ ID NO: 2052418 - RNA, 19 nt, Artificial Sequence
  Description of Artificial Sequence: Synthetic oligonucleotide
  Sense strand starting at position 3281 of SEQ ID NO: 1881539
ggcuuugggcuauaacaaa

SEQ ID NO: 2052419 - RNA, 19 nt, Artificial Sequence
  Description of Artificial Sequence: Synthetic oligonucleotide
  Antisense strand to SEQ ID NO: 2052418
uuuguuauagcccaaagcc

SEQ ID NO: 2052420 - RNA, 19 nt, Artificial Sequence
  Description of Artificial Sequence: Synthetic oligonucleotide
  Sense strand starting at position 3306 of SEQ ID NO: 1881539
gaauacaagcucgaguaca

SEQ ID NO: 2052421 - RNA, 19 nt, Artificial Sequence
  Description of Artificial Sequence: Synthetic oligonucleotide
  Antisense strand to SEQ ID NO: 2052420
uguacucgagcuuguauuc

SEQ ID NO: 2052422 - RNA, 19 nt, Artificial Sequence
  Description of Artificial Sequence: Synthetic oligonucleotide
  Sense strand starting at position 3314 of SEQ ID NO: 1881539
gcucgaguacauuacccaa

SEQ ID NO: 2052423 - RNA, 19 nt, Artificial Sequence
  Description of Artificial Sequence: Synthetic oligonucleotide
  Antisense strand to SEQ ID NO: 2052422
uuggguaauguacucgagc

SEQ ID NO: 2052424 - RNA, 19 nt, Artificial Sequence
  Description of Artificial Sequence: Synthetic oligonucleotide
  Sense strand starting at position 3316 of SEQ ID NO: 1881539
ucgaguacauuacccaaua

SEQ ID NO: 2052425 - RNA, 19 nt, Artificial Sequence
  Description of Artificial Sequence: Synthetic oligonucleotide
  Antisense strand to SEQ ID NO: 2052424
uauuggguaauguacucga

SEQ ID NO: 2052426 - RNA, 19 nt, Artificial Sequence
  Description of Artificial Sequence: Synthetic oligonucleotide
  Sense strand starting at position 3317 of SEQ ID NO: 1881539
cgaguacauuacccaauau

SEQ ID NO: 2052427 - RNA, 19 nt, Artificial Sequence
  Description of Artificial Sequence: Synthetic oligonucleotide
  Antisense strand to SEQ ID NO: 2052426
auauuggguaauguacucg

SEQ ID NO: 2052428 - RNA, 19 nt, Artificial Sequence
  Description of Artificial Sequence: Synthetic oligonucleotide
  Sense strand starting at position 3328 of SEQ ID NO: 1881539
cccaauauuugagagaugu

SEQ ID NO: 2052429 - RNA, 19 nt, Artificial Sequence
  Description of Artificial Sequence: Synthetic oligonucleotide
  Antisense strand to SEQ ID NO: 2052428
acaucucucaaauauuggg

SEQ ID NO: 2052430 - RNA, 19 nt, Artificial Sequence
  Description of Artificial Sequence: Synthetic oligonucleotide
  Sense strand starting at position 3372 of SEQ ID NO: 1881539
uugugaaauugacuggaca

SEQ ID NO: 2052431 - RNA, 19 nt, Artificial Sequence
  Description of Artificial Sequence: Synthetic oligonucleotide
  Antisense strand to SEQ ID NO: 2052430
uguccagucaauuucacaa

SEQ ID NO: 2052432 - RNA, 19 nt, Artificial Sequence
  Description of Artificial Sequence: Synthetic oligonucleotide
  Sense strand starting at position 3373 of SEQ ID NO: 1881539
ugugaaauugacuggacau

SEQ ID NO: 2052433 - RNA, 19 nt, Artificial Sequence
  Description of Artificial Sequence: Synthetic oligonucleotide
  Antisense strand to SEQ ID NO: 2052432
auguccagucaauuucaca

SEQ ID NO: 2052434 - RNA, 19 nt, Artificial Sequence
  Description of Artificial Sequence: Synthetic oligonucleotide
  Sense strand starting at position 3374 of SEQ ID NO: 1881539
gugaaauugacuggacauu

SEQ ID NO: 2052435 - RNA, 19 nt, Artificial Sequence
  Description of Artificial Sequence: Synthetic oligonucleotide
  Antisense strand to SEQ ID NO: 2052434
aauguccagucaauuucac

SEQ ID NO: 2052436 - RNA, 19 nt, Artificial Sequence
  Description of Artificial Sequence: Synthetic oligonucleotide
  Sense strand starting at position 3468 of SEQ ID NO: 1881539
ggacuugguccaggauauu

SEQ ID NO: 2052437 - RNA, 19 nt, Artificial Sequence
  Description of Artificial Sequence: Synthetic oligonucleotide
  Antisense strand to SEQ ID NO: 2052436
aauauccuggaccaagucc

SEQ ID NO: 2052438 - RNA, 19 nt, Artificial Sequence
  Description of Artificial Sequence: Synthetic oligonucleotide
  Sense strand starting at position 3479 of SEQ ID NO: 1881539
aggauauuccuaggcaaug

SEQ ID NO: 2052439 - RNA, 19 nt, Artificial Sequence
  Description of Artificial Sequence: Synthetic oligonucleotide
  Antisense strand to SEQ ID NO: 2052438
cauugccuaggaauauccu

SEQ ID NO: 2052440 - RNA, 19 nt, Artificial Sequence
  Description of Artificial Sequence: Synthetic oligonucleotide
  Sense strand starting at position 3597 of SEQ ID NO: 1881539
cugggugagacucaguauu

SEQ ID NO: 2052441 - RNA, 19 nt, Artificial Sequence
  Description of Artificial Sequence: Synthetic oligonucleotide
  Antisense strand to SEQ ID NO: 2052440
aauacugagucucacccag

SEQ ID NO: 2052442 - RNA, 19 nt, Artificial Sequence
  Description of Artificial Sequence: Synthetic oligonucleotide
  Sense strand starting at position 3615 of SEQ ID NO: 1881539
uuaagugagaccugaaguc

SEQ ID NO: 2052443 - RNA, 19 nt, Artificial Sequence
  Description of Artificial Sequence: Synthetic oligonucleotide
  Antisense strand to SEQ ID NO: 2052442
gacuucaggucucacuuaa

SEQ ID NO: 2052444 - RNA, 19 nt, Artificial Sequence
  Description of Artificial Sequence: Synthetic oligonucleotide
  Sense strand starting at position 3621 of SEQ ID NO: 1881539
gagaccugaagucaugguu

SEQ ID NO: 2052445 - RNA, 19 nt, Artificial Sequence
  Description of Artificial Sequence: Synthetic oligonucleotide
  Antisense strand to SEQ ID NO: 2052444
aaccaugacuucaggucuc

SEQ ID NO: 2052446 - RNA, 19 nt, Artificial Sequence
  Description of Artificial Sequence: Synthetic oligonucleotide
  Sense strand starting at position 3624 of SEQ ID NO: 1881539
accugaagucaugguuaua

SEQ ID NO: 2052447 - RNA, 19 nt, Artificial Sequence
  Description of Artificial Sequence: Synthetic oligonucleotide
  Antisense strand to SEQ ID NO: 2052446
uauaaccaugacuucaggu

SEQ ID NO: 2052448 - RNA, 19 nt, Artificial Sequence
  Description of Artificial Sequence: Synthetic oligonucleotide
  Sense strand starting at position 3657 of SEQ ID NO: 1881539
uguacagaucaguaacagu

SEQ ID NO: 2052449 - RNA, 19 nt, Artificial Sequence
  Description of Artificial Sequence: Synthetic oligonucleotide
  Antisense strand to SEQ ID NO: 2052448
acuguuacugaucuguaca

SEQ ID NO: 2052450 - RNA, 19 nt, Artificial Sequence
  Description of Artificial Sequence: Synthetic oligonucleotide
  Sense strand starting at position 3872 of SEQ ID NO: 1881539
uagccugauuucucuaggu

SEQ ID NO: 2052451 - RNA, 19 nt, Artificial Sequence
  Description of Artificial Sequence: Synthetic oligonucleotide
  Antisense strand to SEQ ID NO: 2052450
accuagagaaaucaggcua

SEQ ID NO: 2052452 - RNA, 19 nt, Artificial Sequence
  Description of Artificial Sequence: Synthetic oligonucleotide
  Sense strand starting at position 3886 of SEQ ID NO: 1881539
uagguagauauugguagua

SEQ ID NO: 2052453 - RNA, 19 nt, Artificial Sequence
  Description of Artificial Sequence: Synthetic oligonucleotide
  Antisense strand to SEQ ID NO: 2052452
uacuaccaauaucuaccua

SEQ ID NO: 2052454 - RNA, 19 nt, Artificial Sequence
  Description of Artificial Sequence: Synthetic oligonucleotide
  Sense strand starting at position 3921 of SEQ ID NO: 1881539
ugacuacuucaguggagga

SEQ ID NO: 2052455 - RNA, 19 nt, Artificial Sequence
  Description of Artificial Sequence: Synthetic oligonucleotide
  Antisense strand to SEQ ID NO: 2052454
uccuccacugaaguaguca

SEQ ID NO: 2052456 - RNA, 19 nt, Artificial Sequence
  Description of Artificial Sequence: Synthetic oligonucleotide
  Sense strand starting at position 7 of SEQ ID NO: 1881541
ucaagcucugacugagaca

SEQ ID NO: 2052457 - RNA, 19 nt, Artificial Sequence
  Description of Artificial Sequence: Synthetic oligonucleotide
  Antisense strand to SEQ ID NO: 2052456
ugucucagucagagcuuga

SEQ ID NO: 2052458 - RNA, 19 nt, Artificial Sequence
  Description of Artificial Sequence: Synthetic oligonucleotide
  Sense strand starting at position 363 of SEQ ID NO: 1881541
guauguugauaacuuaaca

SEQ ID NO: 2052459 - RNA, 19 nt, Artificial Sequence
  Description of Artificial Sequence: Synthetic oligonucleotide
  Antisense strand to SEQ ID NO: 2052458
uguuaaguuaucaacauac

SEQ ID NO: 2052460 - RNA, 19 nt, Artificial Sequence
  Description of Artificial Sequence: Synthetic oligonucleotide
  Sense strand starting at position 374 of SEQ ID NO: 1881541
acuuaacauguuugagcua

SEQ ID NO: 2052461 - RNA, 19 nt, Artificial Sequence
  Description of Artificial Sequence: Synthetic oligonucleotide
  Antisense strand to SEQ ID NO: 2052460
uagcucaaacauguuaagu

SEQ ID NO: 2052462 - RNA, 19 nt, Artificial Sequence
  Description of Artificial Sequence: Synthetic oligonucleotide
  Sense strand starting at position 488 of SEQ ID NO: 1881541
gcaugacuggcuuacauaa

SEQ ID NO: 2052463 - RNA, 19 nt, Artificial Sequence
  Description of Artificial Sequence: Synthetic oligonucleotide
  Antisense strand to SEQ ID NO: 2052462
uuauguaagccagucaugc

SEQ ID NO: 2052464 - RNA, 19 nt, Artificial Sequence
  Description of Artificial Sequence: Synthetic oligonucleotide
  Sense strand starting at position 496 of SEQ ID NO: 1881541
ggcuuacauaauugugaga

SEQ ID NO: 2052465 - RNA, 19 nt, Artificial Sequence
  Description of Artificial Sequence: Synthetic oligonucleotide
  Antisense strand to SEQ ID NO: 2052464
ucucacaauuauguaagcc

SEQ ID NO: 2052466 - RNA, 19 nt, Artificial Sequence
  Description of Artificial Sequence: Synthetic oligonucleotide
  Sense strand starting at position 546 of SEQ ID NO: 1881541
cuuuaucagucucuuagga

SEQ ID NO: 2052467 - RNA, 19 nt, Artificial Sequence
  Description of Artificial Sequence: Synthetic oligonucleotide
  Antisense strand to SEQ ID NO: 2052466
uccuaagagacugauaaag

SEQ ID NO: 2052468 - RNA, 19 nt, Artificial Sequence
  Description of Artificial Sequence: Synthetic oligonucleotide
  Sense strand starting at position 568 of SEQ ID NO: 1881541
ugguuacauugaucaaugu

SEQ ID NO: 2052469 - RNA, 19 nt, Artificial Sequence
  Description of Artificial Sequence: Synthetic oligonucleotide
  Antisense strand to SEQ ID NO: 2052468
acauugaucaauguaacca

SEQ ID NO: 2052470 - RNA, 19 nt, Artificial Sequence
  Description of Artificial Sequence: Synthetic oligonucleotide
  Sense strand starting at position 781 of SEQ ID NO: 1881541
caggaucucuggcugaauu

SEQ ID NO: 2052471 - RNA, 19 nt, Artificial Sequence
  Description of Artificial Sequence: Synthetic oligonucleotide
  Antisense strand to SEQ ID NO: 2052470
aauucagccagagauccug

SEQ ID NO: 2052472 - RNA, 19 nt, Artificial Sequence
  Description of Artificial Sequence: Synthetic oligonucleotide
  Sense strand starting at position 1114 of SEQ ID NO: 1881541
auucucaggucaucucuua

SEQ ID NO: 2052473 - RNA, 19 nt, Artificial Sequence
  Description of Artificial Sequence: Synthetic oligonucleotide
  Antisense strand to SEQ ID NO: 2052472
uaagagaugaccugagaau

SEQ ID NO: 2052474 - RNA, 19 nt, Artificial Sequence
  Description of Artificial Sequence: Synthetic oligonucleotide
  Sense strand starting at position 1230 of SEQ ID NO: 1881541
cccucuuaccuggaugacu

SEQ ID NO: 2052475 - RNA, 19 nt, Artificial Sequence
  Description of Artificial Sequence: Synthetic oligonucleotide
  Antisense strand to SEQ ID NO: 2052474
agucauccagguaagaggg

SEQ ID NO: 2052476 - RNA, 19 nt, Artificial Sequence
  Description of Artificial Sequence: Synthetic oligonucleotide
  Sense strand starting at position 1363 of SEQ ID NO: 1881541
cuuacauaauugucagaug

SEQ ID NO: 2052477 - RNA, 19 nt, Artificial Sequence
  Description of Artificial Sequence: Synthetic oligonucleotide
  Antisense strand to SEQ ID NO: 2052476
caucugacaauuauguaag

SEQ ID NO: 2052478 - RNA, 19 nt, Artificial Sequence
  Description of Artificial Sequence: Synthetic oligonucleotide
  Sense strand starting at position 1368 of SEQ ID NO: 1881541
auaauugucagauggagca

SEQ ID NO: 2052479 - RNA, 19 nt, Artificial Sequence
  Description of Artificial Sequence: Synthetic oligonucleotide
  Antisense strand to SEQ ID NO: 2052478
ugcuccaucugacaauuau

SEQ ID NO: 2052480 - RNA, 19 nt, Artificial Sequence
  Description of Artificial Sequence: Synthetic oligonucleotide
  Sense strand starting at position 2075 of SEQ ID NO: 1881541
ugugucauuuccucuguca

SEQ ID NO: 2052481 - RNA, 19 nt, Artificial Sequence
  Description of Artificial Sequence: Synthetic oligonucleotide
  Antisense strand to SEQ ID NO: 2052480
ugacagaggaaaugacaca

SEQ ID NO: 2052482 - RNA, 19 nt, Artificial Sequence
  Description of Artificial Sequence: Synthetic oligonucleotide
  Sense strand starting at position 2077 of SEQ ID NO: 1881541
ugucauuuccucugucaga

SEQ ID NO: 2052483 - RNA, 19 nt, Artificial Sequence
  Description of Artificial Sequence: Synthetic oligonucleotide
  Antisense strand to SEQ ID NO: 2052482
ucugacagaggaaaugaca

SEQ ID NO: 2052484 - RNA, 19 nt, Artificial Sequence
  Description of Artificial Sequence: Synthetic oligonucleotide
  Sense strand starting at position 2156 of SEQ ID NO: 1881541
gucacaugggagugcaaau

SEQ ID NO: 2052485 - RNA, 19 nt, Artificial Sequence
  Description of Artificial Sequence: Synthetic oligonucleotide
  Antisense strand to SEQ ID NO: 2052484
auuugcacucccaugugac

SEQ ID NO: 2052486 - RNA, 19 nt, Artificial Sequence
  Description of Artificial Sequence: Synthetic oligonucleotide
  Sense strand starting at position 2332 of SEQ ID NO: 1881541
gcaaaucucuuugucagag

SEQ ID NO: 2052487 - RNA, 19 nt, Artificial Sequence
  Description of Artificial Sequence: Synthetic oligonucleotide
  Antisense strand to SEQ ID NO: 2052486
cucugacaaagagauuugc

SEQ ID NO: 2052488 - RNA, 19 nt, Artificial Sequence
  Description of Artificial Sequence: Synthetic oligonucleotide
  Sense strand starting at position 2504 of SEQ ID NO: 1881541
cuagacagugccuggaaua

SEQ ID NO: 2052489 - RNA, 19 nt, Artificial Sequence
  Description of Artificial Sequence: Synthetic oligonucleotide
  Antisense strand to SEQ ID NO: 2052488
uauuccaggcacugucuag

SEQ ID NO: 2052490 - RNA, 19 nt, Artificial Sequence
  Description of Artificial Sequence: Synthetic oligonucleotide
  Sense strand starting at position 2514 of SEQ ID NO: 1881541
ccuggaauacguggaaguu

SEQ ID NO: 2052491 - RNA, 19 nt, Artificial Sequence
  Description of Artificial Sequence: Synthetic oligonucleotide
  Antisense strand to SEQ ID NO: 2052490
aacuuccacguauuccagg

SEQ ID NO: 2052492 - RNA, 19 nt, Artificial Sequence
  Description of Artificial Sequence: Synthetic oligonucleotide
  Sense strand starting at position 2589 of SEQ ID NO: 1881541
gggaaacugucuuccugaa

SEQ ID NO: 2052493 - RNA, 19 nt, Artificial Sequence
  Description of Artificial Sequence: Synthetic oligonucleotide
  Antisense strand to SEQ ID NO: 2052492
uucaggaagacaguuuccc

SEQ ID NO: 2052494 - RNA, 19 nt, Artificial Sequence
  Description of Artificial Sequence: Synthetic oligonucleotide
  Sense strand starting at position 2806 of SEQ ID NO: 1881541
gcuuguucgacugcgacaa

SEQ ID NO: 2052495 - RNA, 19 nt, Artificial Sequence
  Description of Artificial Sequence: Synthetic oligonucleotide
  Antisense strand to SEQ ID NO: 2052494
uugucgcagucgaacaagc

SEQ ID NO: 2052496 - RNA, 19 nt, Artificial Sequence
  Description of Artificial Sequence: Synthetic oligonucleotide
  Sense strand starting at position 2893 of SEQ ID NO: 1881541
cucugaagccagugauaaa

SEQ ID NO: 2052497 - RNA, 19 nt, Artificial Sequence
  Description of Artificial Sequence: Synthetic oligonucleotide
  Antisense strand to SEQ ID NO: 2052496
uuuaucacuggcuucagag

SEQ ID NO: 2052498 - RNA, 19 nt, Artificial Sequence
  Description of Artificial Sequence: Synthetic oligonucleotide
  Sense strand starting at position 2996 of SEQ ID NO: 1881541
ucgaaucaagagugguuca

SEQ ID NO: 2052499 - RNA, 19 nt, Artificial Sequence
  Description of Artificial Sequence: Synthetic oligonucleotide
  Antisense strand to SEQ ID NO: 2052498
ugaaccacucuugauucga

SEQ ID NO: 2052500 - RNA, 19 nt, Artificial Sequence
  Description of Artificial Sequence: Synthetic oligonucleotide
  Sense strand starting at position 3103 of SEQ ID NO: 1881541
guagaauguccaggaagcu

SEQ ID NO: 2052501 - RNA, 19 nt, Artificial Sequence
  Description of Artificial Sequence: Synthetic oligonucleotide
  Antisense strand to SEQ ID NO: 2052500
agcuuccuggacauucuac

SEQ ID NO: 2052502 - RNA, 19 nt, Artificial Sequence
  Description of Artificial Sequence: Synthetic oligonucleotide
  Sense strand starting at position 3146 of SEQ ID NO: 1881541
ucgccuaugccuuuagagu

SEQ ID NO: 2052503 - RNA, 19 nt, Artificial Sequence
  Description of Artificial Sequence: Synthetic oligonucleotide
  Antisense strand to SEQ ID NO: 2052502
acucuaaaggcauaggcga

SEQ ID NO: 2052504 - RNA, 19 nt, Artificial Sequence
  Description of Artificial Sequence: Synthetic oligonucleotide
  Sense strand starting at position 3152 of SEQ ID NO: 1881541
augccuuuagaguaagucu

SEQ ID NO: 2052505 - RNA, 19 nt, Artificial Sequence
  Description of Artificial Sequence: Synthetic oligonucleotide
  Antisense strand to SEQ ID NO: 2052504
agacuuacucuaaaggcau

SEQ ID NO: 2052506 - RNA, 19 nt, Artificial Sequence
  Description of Artificial Sequence: Synthetic oligonucleotide
  Sense strand starting at position 3189 of SEQ ID NO: 1881541
uuggaauucccuggaaugu

SEQ ID NO: 2052507 - RNA, 19 nt, Artificial Sequence
  Description of Artificial Sequence: Synthetic oligonucleotide
  Antisense strand to SEQ ID NO: 2052506
acauuccagggaauuccaa

SEQ ID NO: 2052508 - RNA, 19 nt, Artificial Sequence
  Description of Artificial Sequence: Synthetic oligonucleotide
  Sense strand starting at position 3228 of SEQ ID NO: 1881541
ggacauaaagaauguuucu

SEQ ID NO: 2052509 - RNA, 19 nt, Artificial Sequence
  Description of Artificial Sequence: Synthetic oligonucleotide
  Antisense strand to SEQ ID NO: 2052508
agaaacauucuuuaugucc

SEQ ID NO: 2052510 - RNA, 19 nt, Artificial Sequence
  Description of Artificial Sequence: Synthetic oligonucleotide
  Sense strand starting at position 3237 of SEQ ID NO: 1881541
gaauguuucugggucaaga

SEQ ID NO: 2052511 - RNA, 19 nt, Artificial Sequence
  Description of Artificial Sequence: Synthetic oligonucleotide
  Antisense strand to SEQ ID NO: 2052510
ucuugacccagaaacauuc

SEQ ID NO: 2052512 - RNA, 19 nt, Artificial Sequence
  Description of Artificial Sequence: Synthetic oligonucleotide
  Sense strand starting at position 3239 of SEQ ID NO: 1881541
auguuucugggucaagaag

SEQ ID NO: 2052513 - RNA, 19 nt, Artificial Sequence
  Description of Artificial Sequence: Synthetic oligonucleotide
  Antisense strand to SEQ ID NO: 2052512
cuucuugacccagaaacau

SEQ ID NO: 2052514 - RNA, 19 nt, Artificial Sequence
  Description of Artificial Sequence: Synthetic oligonucleotide
  Sense strand starting at position 3254 of SEQ ID NO: 1881541
gaaggugccagagaugguu

SEQ ID NO: 2052515 - RNA, 19 nt, Artificial Sequence
  Description of Artificial Sequence: Synthetic oligonucleotide
  Antisense strand to SEQ ID NO: 2052514
aaccaucucuggcaccuuc

SEQ ID NO: 2052516 - RNA, 19 nt, Artificial Sequence
  Description of Artificial Sequence: Synthetic oligonucleotide
  Sense strand starting at position 3437 of SEQ ID NO: 1881541
guuggaguuagauaaugca

SEQ ID NO: 2052517 - RNA, 19 nt, Artificial Sequence
  Description of Artificial Sequence: Synthetic oligonucleotide
  Antisense strand to SEQ ID NO: 2052516
ugcauuaucuaacuccaac

SEQ ID NO: 2052518 - RNA, 19 nt, Artificial Sequence
  Description of Artificial Sequence: Synthetic oligonucleotide
  Sense strand starting at position 3481 of SEQ ID NO: 1881541
agggaaauguggcugggaa

SEQ ID NO: 2052519 - RNA, 19 nt, Artificial Sequence
  Description of Artificial Sequence: Synthetic oligonucleotide
  Antisense strand to SEQ ID NO: 2052518
uucccagccacauuucccu

SEQ ID NO: 2052520 - RNA, 19 nt, Artificial Sequence
  Description of Artificial Sequence: Synthetic oligonucleotide
  Sense strand starting at position 3482 of SEQ ID NO: 1881541
gggaaauguggcugggaau

SEQ ID NO: 2052521 - RNA, 19 nt, Artificial Sequence
  Description of Artificial Sequence: Synthetic oligonucleotide
  Antisense strand to SEQ ID NO: 2052520
auucccagccacauuuccc

SEQ ID NO: 2052522 - RNA, 19 nt, Artificial Sequence
  Description of Artificial Sequence: Synthetic oligonucleotide
  Sense strand starting at position 3483 of SEQ ID NO: 1881541
ggaaauguggcugggaaug

SEQ ID NO: 2052523 - RNA, 19 nt, Artificial Sequence
  Description of Artificial Sequence: Synthetic oligonucleotide
  Antisense strand to SEQ ID NO: 2052522
cauucccagccacauuucc

SEQ ID NO: 2052524 - RNA, 19 nt, Artificial Sequence
  Description of Artificial Sequence: Synthetic oligonucleotide
  Sense strand starting at position 3575 of SEQ ID NO: 1881541
gaggcaguccauuagauac

SEQ ID NO: 2052525 - RNA, 19 nt, Artificial Sequence
  Description of Artificial Sequence: Synthetic oligonucleotide
  Antisense strand to SEQ ID NO: 2052524
guaucuaauggacugccuc

SEQ ID NO: 2052526 - RNA, 19 nt, Artificial Sequence
  Description of Artificial Sequence: Synthetic oligonucleotide
  Sense strand starting at position 3703 of SEQ ID NO: 1881541
ggaggagguuccaggauga

SEQ ID NO: 2052527 - RNA, 19 nt, Artificial Sequence
  Description of Artificial Sequence: Synthetic oligonucleotide
  Antisense strand to SEQ ID NO: 2052526
ucauccuggaaccuccucc

SEQ ID NO: 2052528 - RNA, 19 nt, Artificial Sequence
  Description of Artificial Sequence: Synthetic oligonucleotide
  Sense strand starting at position 3716 of SEQ ID NO: 1881541
ggaugauccagccauuguu

SEQ ID NO: 2052529 - RNA, 19 nt, Artificial Sequence
  Description of Artificial Sequence: Synthetic oligonucleotide
  Antisense strand to SEQ ID NO: 2052528
aacaauggcuggaucaucc

SEQ ID NO: 2052530 - RNA, 19 nt, Artificial Sequence
  Description of Artificial Sequence: Synthetic oligonucleotide
  Sense strand starting at position 3785 of SEQ ID NO: 1881541
uccaacagccuuugagaca

SEQ ID NO: 2052531 - RNA, 19 nt, Artificial Sequence
  Description of Artificial Sequence: Synthetic oligonucleotide
  Antisense strand to SEQ ID NO: 2052530
ugucucaaaggcuguugga

SEQ ID NO: 2052532 - RNA, 19 nt, Artificial Sequence
  Description of Artificial Sequence: Synthetic oligonucleotide
  Sense strand starting at position 3828 of SEQ ID NO: 1881541
uuggauggcucauuacaca

SEQ ID NO: 2052533 - RNA, 19 nt, Artificial Sequence
  Description of Artificial Sequence: Synthetic oligonucleotide
  Antisense strand to SEQ ID NO: 2052532
uguguaaugagccauccaa

SEQ ID NO: 2052534 - RNA, 19 nt, Artificial Sequence
  Description of Artificial Sequence: Synthetic oligonucleotide
  Sense strand starting at position 3869 of SEQ ID NO: 1881541
ggucccuaagcagauugau

SEQ ID NO: 2052535 - RNA, 19 nt, Artificial Sequence
  Description of Artificial Sequence: Synthetic oligonucleotide
  Antisense strand to SEQ ID NO: 2052534
aucaaucugcuuagggacc

SEQ ID NO: 2052536 - RNA, 19 nt, Artificial Sequence
  Description of Artificial Sequence: Synthetic oligonucleotide
  Sense strand starting at position 298 of SEQ ID NO: 1881540
guauguugauaacuuaaca

SEQ ID NO: 2052537 - RNA, 19 nt, Artificial Sequence
  Description of Artificial Sequence: Synthetic oligonucleotide
  Antisense strand to SEQ ID NO: 2052536
uguuaaguuaucaacauac

SEQ ID NO: 2052538 - RNA, 19 nt, Artificial Sequence
  Description of Artificial Sequence: Synthetic oligonucleotide
  Sense strand starting at position 309 of SEQ ID NO: 1881540
acuuaacauguuugagcua

SEQ ID NO: 2052539 - RNA, 19 nt, Artificial Sequence
  Description of Artificial Sequence: Synthetic oligonucleotide
  Antisense strand to SEQ ID NO: 2052538
uagcucaaacauguuaagu

SEQ ID NO: 2052540 - RNA, 19 nt, Artificial Sequence
  Description of Artificial Sequence: Synthetic oligonucleotide
  Sense strand starting at position 423 of SEQ ID NO: 1881540
gcaugacuggcuuacauaa

SEQ ID NO: 2052541 - RNA, 19 nt, Artificial Sequence
  Description of Artificial Sequence: Synthetic oligonucleotide
  Antisense strand to SEQ ID NO: 2052540
uuauguaagccagucaugc

SEQ ID NO: 2052542 - RNA, 19 nt, Artificial Sequence
  Description of Artificial Sequence: Synthetic oligonucleotide
  Sense strand starting at position 431 of SEQ ID NO: 1881540
ggcuuacauaauugugaga

SEQ ID NO: 2052543 - RNA, 19 nt, Artificial Sequence
  Description of Artificial Sequence: Synthetic oligonucleotide
  Antisense strand to SEQ ID NO: 2052542
ucucacaauuauguaagcc

SEQ ID NO: 2052544 - RNA, 19 nt, Artificial Sequence
  Description of Artificial Sequence: Synthetic oligonucleotide
  Sense strand starting at position 481 of SEQ ID NO: 1881540
cuuuaucagucucuuagga

SEQ ID NO: 2052545 - RNA, 19 nt, Artificial Sequence
  Description of Artificial Sequence: Synthetic oligonucleotide
  Antisense strand to SEQ ID NO: 2052544
uccuaagagacugauaaag

SEQ ID NO: 2052546 - RNA, 19 nt, Artificial Sequence
  Description of Artificial Sequence: Synthetic oligonucleotide
  Sense strand starting at position 503 of SEQ ID NO: 1881540
ugguuacauugaucaaugu

SEQ ID NO: 2052547 - RNA, 19 nt, Artificial Sequence
  Description of Artificial Sequence: Synthetic oligonucleotide
  Antisense strand to SEQ ID NO: 2052546
acauugaucaauguaacca

SEQ ID NO: 2052548 - RNA, 19 nt, Artificial Sequence
  Description of Artificial Sequence: Synthetic oligonucleotide
  Sense strand starting at position 716 of SEQ ID NO: 1881540
caggaucucuggcugaauu

SEQ ID NO: 2052549 - RNA, 19 nt, Artificial Sequence
  Description of Artificial Sequence: Synthetic oligonucleotide
  Antisense strand to SEQ ID NO: 2052548
aauucagccagagauccug

SEQ ID NO: 2052550 - RNA, 19 nt, Artificial Sequence
  Description of Artificial Sequence: Synthetic oligonucleotide
  Sense strand starting at position 1049 of SEQ ID NO: 1881540
auucucaggucaucucuua

SEQ ID NO: 2052551 - RNA, 19 nt, Artificial Sequence
  Description of Artificial Sequence: Synthetic oligonucleotide
  Antisense strand to SEQ ID NO: 2052550
uaagagaugaccugagaau

SEQ ID NO: 2052552 - RNA, 19 nt, Artificial Sequence
  Description of Artificial Sequence: Synthetic oligonucleotide
  Sense strand starting at position 1165 of SEQ ID NO: 1881540
cccucuuaccuggaugacu

SEQ ID NO: 2052553 - RNA, 19 nt, Artificial Sequence
  Description of Artificial Sequence: Synthetic oligonucleotide
  Antisense strand to SEQ ID NO: 2052552
agucauccagguaagaggg

SEQ ID NO: 2052554 - RNA, 19 nt, Artificial Sequence
  Description of Artificial Sequence: Synthetic oligonucleotide
  Sense strand starting at position 1298 of SEQ ID NO: 1881540
cuuacauaauugucagaug

SEQ ID NO: 2052555 - RNA, 19 nt, Artificial Sequence
  Description of Artificial Sequence: Synthetic oligonucleotide
  Antisense strand to SEQ ID NO: 2052554
caucugacaauuauguaag

SEQ ID NO: 2052556 - RNA, 19 nt, Artificial Sequence
  Description of Artificial Sequence: Synthetic oligonucleotide
  Sense strand starting at position 1303 of SEQ ID NO: 1881540
auaauugucagauggagca

SEQ ID NO: 2052557 - RNA, 19 nt, Artificial Sequence
  Description of Artificial Sequence: Synthetic oligonucleotide
  Antisense strand to SEQ ID NO: 2052556
ugcuccaucugacaauuau

SEQ ID NO: 2052558 - RNA, 19 nt, Artificial Sequence
  Description of Artificial Sequence: Synthetic oligonucleotide
  Sense strand starting at position 2010 of SEQ ID NO: 1881540
ugugucauuuccucuguca

SEQ ID NO: 2052559 - RNA, 19 nt, Artificial Sequence
  Description of Artificial Sequence: Synthetic oligonucleotide
  Antisense strand to SEQ ID NO: 2052558
ugacagaggaaaugacaca

SEQ ID NO: 2052560 - RNA, 19 nt, Artificial Sequence
  Description of Artificial Sequence: Synthetic oligonucleotide
  Sense strand starting at position 2012 of SEQ ID NO: 1881540
ugucauuuccucugucaga

SEQ ID NO: 2052561 - RNA, 19 nt, Artificial Sequence
  Description of Artificial Sequence: Synthetic oligonucleotide
  Antisense strand to SEQ ID NO: 2052560
ucugacagaggaaaugaca

SEQ ID NO: 2052562 - RNA, 19 nt, Artificial Sequence
  Description of Artificial Sequence: Synthetic oligonucleotide
  Sense strand starting at position 2091 of SEQ ID NO: 1881540
gucacaugggagugcaaau

SEQ ID NO: 2052563 - RNA, 19 nt, Artificial Sequence
  Description of Artificial Sequence: Synthetic oligonucleotide
  Antisense strand to SEQ ID NO: 2052562
auuugcacucccaugugac

SEQ ID NO: 2052564 - RNA, 19 nt, Artificial Sequence
  Description of Artificial Sequence: Synthetic oligonucleotide
  Sense strand starting at position 2267 of SEQ ID NO: 1881540
gcaaaucucuuugucagag

SEQ ID NO: 2052565 - RNA, 19 nt, Artificial Sequence
  Description of Artificial Sequence: Synthetic oligonucleotide
  Antisense strand to SEQ ID NO: 2052564
cucugacaaagagauuugc

SEQ ID NO: 2052566 - RNA, 19 nt, Artificial Sequence
  Description of Artificial Sequence: Synthetic oligonucleotide
  Sense strand starting at position 2439 of SEQ ID NO: 1881540
cuagacagugccuggaaua

SEQ ID NO: 2052567 - RNA, 19 nt, Artificial Sequence
  Description of Artificial Sequence: Synthetic oligonucleotide
  Antisense strand to SEQ ID NO: 2052566
uauuccaggcacugucuag

SEQ ID NO: 2052568 - RNA, 19 nt, Artificial Sequence
  Description of Artificial Sequence: Synthetic oligonucleotide
  Sense strand starting at position 2449 of SEQ ID NO: 1881540
ccuggaauacguggaaguu

SEQ ID NO: 2052569 - RNA, 19 nt, Artificial Sequence
  Description of Artificial Sequence: Synthetic oligonucleotide
  Antisense strand to SEQ ID NO: 2052568
aacuuccacguauuccagg

SEQ ID NO: 2052570 - RNA, 19 nt, Artificial Sequence
  Description of Artificial Sequence: Synthetic oligonucleotide
  Sense strand starting at position 2524 of SEQ ID NO: 1881540
gggaaacugucuuccugaa

SEQ ID NO: 2052571 - RNA, 19 nt, Artificial Sequence
  Description of Artificial Sequence: Synthetic oligonucleotide
  Antisense strand to SEQ ID NO: 2052570
uucaggaagacaguuuccc

SEQ ID NO: 2052572 - RNA, 19 nt, Artificial Sequence
  Description of Artificial Sequence: Synthetic oligonucleotide
  Sense strand starting at position 2741 of SEQ ID NO: 1881540
gcuuguucgacugcgacaa

SEQ ID NO: 2052573 - RNA, 19 nt, Artificial Sequence
  Description of Artificial Sequence: Synthetic oligonucleotide
  Antisense strand to SEQ ID NO: 2052572
uugucgcagucgaacaagc

SEQ ID NO: 2052574 - RNA, 19 nt, Artificial Sequence
  Description of Artificial Sequence: Synthetic oligonucleotide
  Sense strand starting at position 2828 of SEQ ID NO: 1881540
cucugaagccagugauaaa

SEQ ID NO: 2052575 - RNA, 19 nt, Artificial Sequence
  Description of Artificial Sequence: Synthetic oligonucleotide
  Antisense strand to SEQ ID NO: 2052574
uuuaucacuggcuucagag

SEQ ID NO: 2052576 - RNA, 19 nt, Artificial Sequence
  Description of Artificial Sequence: Synthetic oligonucleotide
  Sense strand starting at position 2931 of SEQ ID NO: 1881540
ucgaaucaagagugguuca

SEQ ID NO: 2052577 - RNA, 19 nt, Artificial Sequence
  Description of Artificial Sequence: Synthetic oligonucleotide
  Antisense strand to SEQ ID NO: 2052576
ugaaccacucuugauucga

SEQ ID NO: 2052578 - RNA, 19 nt, Artificial Sequence
  Description of Artificial Sequence: Synthetic oligonucleotide
  Sense strand starting at position 3038 of SEQ ID NO: 1881540
guagaauguccaggaagcu

SEQ ID NO: 2052579 - RNA, 19 nt, Artificial Sequence
  Description of Artificial Sequence: Synthetic oligonucleotide
  Antisense strand to SEQ ID NO: 2052578
agcuuccuggacauucuac

SEQ ID NO: 2052580 - RNA, 19 nt, Artificial Sequence
  Description of Artificial Sequence: Synthetic oligonucleotide
  Sense strand starting at position 3081 of SEQ ID NO: 1881540
ucgccuaugccuuuagagu

SEQ ID NO: 2052581 - RNA, 19 nt, Artificial Sequence
  Description of Artificial Sequence: Synthetic oligonucleotide
  Antisense strand to SEQ ID NO: 2052580
acucuaaaggcauaggcga

SEQ ID NO: 2052582 - RNA, 19 nt, Artificial Sequence
  Description of Artificial Sequence: Synthetic oligonucleotide
  Sense strand starting at position 3087 of SEQ ID NO: 1881540
augccuuuagaguaagucu

SEQ ID NO: 2052583 - RNA, 19 nt, Artificial Sequence
  Description of Artificial Sequence: Synthetic oligonucleotide
  Antisense strand to SEQ ID NO: 2052582
agacuuacucuaaaggcau

SEQ ID NO: 2052584 - RNA, 19 nt, Artificial Sequence
  Description of Artificial Sequence: Synthetic oligonucleotide
  Sense strand starting at position 3124 of SEQ ID NO: 1881540
uuggaauucccuggaaugu

SEQ ID NO: 2052585 - RNA, 19 nt, Artificial Sequence
  Description of Artificial Sequence: Synthetic oligonucleotide
  Antisense strand to SEQ ID NO: 2052584
acauuccagggaauuccaa

SEQ ID NO: 2052586 - RNA, 19 nt, Artificial Sequence
  Description of Artificial Sequence: Synthetic oligonucleotide
  Sense strand starting at position 3163 of SEQ ID NO: 1881540
ggacauaaagaauguuucu

SEQ ID NO: 2052587 - RNA, 19 nt, Artificial Sequence
  Description of Artificial Sequence: Synthetic oligonucleotide
  Antisense strand to SEQ ID NO: 2052586
agaaacauucuuuaugucc

SEQ ID NO: 2052588 - RNA, 19 nt, Artificial Sequence
  Description of Artificial Sequence: Synthetic oligonucleotide
  Sense strand starting at position 3172 of SEQ ID NO: 1881540
gaauguuucugggucaaga

SEQ ID NO: 2052589 - RNA, 19 nt, Artificial Sequence
  Description of Artificial Sequence: Synthetic oligonucleotide
  Antisense strand to SEQ ID NO: 2052588
ucuugacccagaaacauuc

SEQ ID NO: 2052590 - RNA, 19 nt, Artificial Sequence
  Description of Artificial Sequence: Synthetic oligonucleotide
  Sense strand starting at position 3174 of SEQ ID NO: 1881540
auguuucugggucaagaag

SEQ ID NO: 2052591 - RNA, 19 nt, Artificial Sequence
  Description of Artificial Sequence: Synthetic oligonucleotide
  Antisense strand to SEQ ID NO: 2052590
cuucuugacccagaaacau

SEQ ID NO: 2052592 - RNA, 19 nt, Artificial Sequence
  Description of Artificial Sequence: Synthetic oligonucleotide
  Sense strand starting at position 3189 of SEQ ID NO: 1881540
gaaggugccagagaugguu

SEQ ID NO: 2052593 - RNA, 19 nt, Artificial Sequence
  Description of Artificial Sequence: Synthetic oligonucleotide
  Antisense strand to SEQ ID NO: 2052592
aaccaucucuggcaccuuc

SEQ ID NO: 2052594 - RNA, 19 nt, Artificial Sequence
  Description of Artificial Sequence: Synthetic oligonucleotide
  Sense strand starting at position 3372 of SEQ ID NO: 1881540
guuggaguuagauaaugca

SEQ ID NO: 2052595 - RNA, 19 nt, Artificial Sequence
  Description of Artificial Sequence: Synthetic oligonucleotide
  Antisense strand to SEQ ID NO: 2052594
ugcauuaucuaacuccaac

SEQ ID NO: 2052596 - RNA, 19 nt, Artificial Sequence
  Description of Artificial Sequence: Synthetic oligonucleotide
  Sense strand starting at position 3416 of SEQ ID NO: 1881540
agggaaauguggcugggaa

SEQ ID NO: 2052597 - RNA, 19 nt, Artificial Sequence
  Description of Artificial Sequence: Synthetic oligonucleotide
  Antisense strand to SEQ ID NO: 2052596
uucccagccacauuucccu

SEQ ID NO: 2052598 - RNA, 19 nt, Artificial Sequence
  Description of Artificial Sequence: Synthetic oligonucleotide
  Sense strand starting at position 3417 of SEQ ID NO: 1881540
gggaaauguggcugggaau

SEQ ID NO: 2052599 - RNA, 19 nt, Artificial Sequence
  Description of Artificial Sequence: Synthetic oligonucleotide
  Antisense strand to SEQ ID NO: 2052598
auucccagccacauuuccc

SEQ ID NO: 2052600 - RNA, 19 nt, Artificial Sequence
  Description of Artificial Sequence: Synthetic oligonucleotide
  Sense strand starting at position 3418 of SEQ ID NO: 1881540
ggaaauguggcugggaaug

SEQ ID NO: 2052601 - RNA, 19 nt, Artificial Sequence
  Description of Artificial Sequence: Synthetic oligonucleotide
  Antisense strand to SEQ ID NO: 2052600
cauucccagccacauuucc

SEQ ID NO: 2052602 - RNA, 19 nt, Artificial Sequence
  Description of Artificial Sequence: Synthetic oligonucleotide
  Sense strand starting at position 3510 of SEQ ID NO: 1881540
gaggcaguccauuagauac

SEQ ID NO: 2052603 - RNA, 19 nt, Artificial Sequence
  Description of Artificial Sequence: Synthetic oligonucleotide
  Antisense strand to SEQ ID NO: 2052602
guaucuaauggacugccuc

SEQ ID NO: 2052604 - RNA, 19 nt, Artificial Sequence
  Description of Artificial Sequence: Synthetic oligonucleotide
  Sense strand starting at position 3638 of SEQ ID NO: 1881540
ggaggagguuccaggauga

SEQ ID NO: 2052605 - RNA, 19 nt, Artificial Sequence
  Description of Artificial Sequence: Synthetic oligonucleotide
  Antisense strand to SEQ ID NO: 2052604
ucauccuggaaccuccucc

SEQ ID NO: 2052606 - RNA, 19 nt, Artificial Sequence
  Description of Artificial Sequence: Synthetic oligonucleotide
  Sense strand starting at position 3651 of SEQ ID NO: 1881540
ggaugauccagccauuguu

SEQ ID NO: 2052607 - RNA, 19 nt, Artificial Sequence
  Description of Artificial Sequence: Synthetic oligonucleotide
  Antisense strand to SEQ ID NO: 2052606
aacaauggcuggaucaucc

SEQ ID NO: 2052608 - RNA, 19 nt, Artificial Sequence
  Description of Artificial Sequence: Synthetic oligonucleotide
  Sense strand starting at position 3720 of SEQ ID NO: 1881540
uccaacagccuuugagaca

SEQ ID NO: 2052609 - RNA, 19 nt, Artificial Sequence
  Description of Artificial Sequence: Synthetic oligonucleotide
  Antisense strand to SEQ ID NO: 2052608
ugucucaaaggcuguugga

SEQ ID NO: 2052610 - RNA, 19 nt, Artificial Sequence
  Description of Artificial Sequence: Synthetic oligonucleotide
  Sense strand starting at position 3763 of SEQ ID NO: 1881540
uuggauggcucauuacaca

SEQ ID NO: 2052611 - RNA, 19 nt, Artificial Sequence
  Description of Artificial Sequence: Synthetic oligonucleotide
  Antisense strand to SEQ ID NO: 2052610
uguguaaugagccauccaa

SEQ ID NO: 2052612 - RNA, 19 nt, Artificial Sequence
  Description of Artificial Sequence: Synthetic oligonucleotide
  Sense strand starting at position 3804 of SEQ ID NO: 1881540
ggucccuaagcagauugau

SEQ ID NO: 2052613 - RNA, 19 nt, Artificial Sequence
  Description of Artificial Sequence: Synthetic oligonucleotide
  Antisense strand to SEQ ID NO: 2052612
aucaaucugcuuagggacc

SEQ ID NO: 2052614 - RNA, 19 nt, Artificial Sequence
  Description of Artificial Sequence: Synthetic oligonucleotide
  Sense strand starting at position 3973 of SEQ ID NO: 1881540
aggagaugccucugaggac

SEQ ID NO: 2052615 - RNA, 19 nt, Artificial Sequence
  Description of Artificial Sequence: Synthetic oligonucleotide
  Antisense strand to SEQ ID NO: 2052614
guccucagaggcaucuccu

SEQ ID NO: 2052616 - RNA, 19 nt, Artificial Sequence
  Description of Artificial Sequence: Synthetic oligonucleotide
  Sense strand starting at position 56 of SEQ ID NO: 1881542
aguguuuauacuggagaaa

SEQ ID NO: 2052617 - RNA, 19 nt, Artificial Sequence
  Description of Artificial Sequence: Synthetic oligonucleotide
  Antisense strand to SEQ ID NO: 2052616
uuucuccaguauaaacacu

SEQ ID NO: 2052618 - RNA, 19 nt, Artificial Sequence
  Description of Artificial Sequence: Synthetic oligonucleotide
  Sense strand starting at position 79 of SEQ ID NO: 1881542
cccagugaacccuggaaau

SEQ ID NO: 2052619 - RNA, 19 nt, Artificial Sequence
  Description of Artificial Sequence: Synthetic oligonucleotide
  Antisense strand to SEQ ID NO: 2052618
auuuccaggguucacuggg

SEQ ID NO: 2052620 - RNA, 19 nt, Artificial Sequence
  Description of Artificial Sequence: Synthetic oligonucleotide
  Sense strand starting at position 89 of SEQ ID NO: 1881542
ccuggaaauuuacaggauu

SEQ ID NO: 2052621 - RNA, 19 nt, Artificial Sequence
  Description of Artificial Sequence: Synthetic oligonucleotide
  Antisense strand to SEQ ID NO: 2052620
aauccuguaaauuuccagg

SEQ ID NO: 2052622 - RNA, 19 nt, Artificial Sequence
  Description of Artificial Sequence: Synthetic oligonucleotide
  Sense strand starting at position 157 of SEQ ID NO: 1881542
gggaguaagggucauguau

SEQ ID NO: 2052623 - RNA, 19 nt, Artificial Sequence
  Description of Artificial Sequence: Synthetic oligonucleotide
  Antisense strand to SEQ ID NO: 2052622
auacaugacccuuacuccc

SEQ ID NO: 2052624 - RNA, 19 nt, Artificial Sequence
  Description of Artificial Sequence: Synthetic oligonucleotide
  Sense strand starting at position 220 of SEQ ID NO: 1881542
acaaguuaauagucaucuu

SEQ ID NO: 2052625 - RNA, 19 nt, Artificial Sequence
  Description of Artificial Sequence: Synthetic oligonucleotide
  Antisense strand to SEQ ID NO: 2052624
aagaugacuauuaacuugu

SEQ ID NO: 2052626 - RNA, 19 nt, Artificial Sequence
  Description of Artificial Sequence: Synthetic oligonucleotide
  Sense strand starting at position 489 of SEQ ID NO: 1881542
ggccucaacugacuuuaau

SEQ ID NO: 2052627 - RNA, 19 nt, Artificial Sequence
  Description of Artificial Sequence: Synthetic oligonucleotide
  Antisense strand to SEQ ID NO: 2052626
auuaaagucaguugaggcc

SEQ ID NO: 2052628 - RNA, 19 nt, Artificial Sequence
  Description of Artificial Sequence: Synthetic oligonucleotide
  Sense strand starting at position 570 of SEQ ID NO: 1881542
auuaacauccagcgaaacu

SEQ ID NO: 2052629 - RNA, 19 nt, Artificial Sequence
  Description of Artificial Sequence: Synthetic oligonucleotide
  Antisense strand to SEQ ID NO: 2052628
aguuucgcuggauguuaau

SEQ ID NO: 2052630 - RNA, 19 nt, Artificial Sequence
  Description of Artificial Sequence: Synthetic oligonucleotide
  Sense strand starting at position 597 of SEQ ID NO: 1881542
cauaaugccuuugugaaga

SEQ ID NO: 2052631 - RNA, 19 nt, Artificial Sequence
  Description of Artificial Sequence: Synthetic oligonucleotide
  Antisense strand to SEQ ID NO: 2052630
ucuucacaaaggcauuaug

SEQ ID NO: 2052632 - RNA, 19 nt, Artificial Sequence
  Description of Artificial Sequence: Synthetic oligonucleotide
  Sense strand starting at position 602 of SEQ ID NO: 1881542
ugccuuugugaagaaacaa

SEQ ID NO: 2052633 - RNA, 19 nt, Artificial Sequence
  Description of Artificial Sequence: Synthetic oligonucleotide
  Antisense strand to SEQ ID NO: 2052632
uuguuucuucacaaaggca

SEQ ID NO: 2052634 - RNA, 19 nt, Artificial Sequence
  Description of Artificial Sequence: Synthetic oligonucleotide
  Sense strand starting at position 685 of SEQ ID NO: 1881542
guggcaauuggucaacuau

SEQ ID NO: 2052635 - RNA, 19 nt, Artificial Sequence
  Description of Artificial Sequence: Synthetic oligonucleotide
  Antisense strand to SEQ ID NO: 2052634
auaguugaccaauugccac

SEQ ID NO: 2052636 - RNA, 19 nt, Artificial Sequence
  Description of Artificial Sequence: Synthetic oligonucleotide
  Sense strand starting at position 711 of SEQ ID NO: 1881542
acuugaguugauuacugua

SEQ ID NO: 2052637 - RNA, 19 nt, Artificial Sequence
  Description of Artificial Sequence: Synthetic oligonucleotide
  Antisense strand to SEQ ID NO: 2052636
uacaguaaucaacucaagu

SEQ ID NO: 2052638 - RNA, 19 nt, Artificial Sequence
  Description of Artificial Sequence: Synthetic oligonucleotide
  Sense strand starting at position 903 of SEQ ID NO: 1881542
uuuagagugagaugugaca

SEQ ID NO: 2052639 - RNA, 19 nt, Artificial Sequence
  Description of Artificial Sequence: Synthetic oligonucleotide
  Antisense strand to SEQ ID NO: 2052638
ugucacaucucacucuaaa

SEQ ID NO: 2052640 - RNA, 19 nt, Artificial Sequence
  Description of Artificial Sequence: Synthetic oligonucleotide
  Sense strand starting at position 1007 of SEQ ID NO: 1881542
acauaaauguccucagaug

SEQ ID NO: 2052641 - RNA, 19 nt, Artificial Sequence
  Description of Artificial Sequence: Synthetic oligonucleotide
  Antisense strand to SEQ ID NO: 2052640
caucugaggacauuuaugu

SEQ ID NO: 2052642 - RNA, 19 nt, Artificial Sequence
  Description of Artificial Sequence: Synthetic oligonucleotide
  Sense strand starting at position 1021 of SEQ ID NO: 1881542
agauguuuacugugggaag

SEQ ID NO: 2052643 - RNA, 19 nt, Artificial Sequence
  Description of Artificial Sequence: Synthetic oligonucleotide
  Antisense strand to SEQ ID NO: 2052642
cuucccacaguaaacaucu

SEQ ID NO: 2052644 - RNA, 19 nt, Artificial Sequence
  Description of Artificial Sequence: Synthetic oligonucleotide
  Sense strand starting at position 1235 of SEQ ID NO: 1881542
ggaacugagucucuuaaac

SEQ ID NO: 2052645 - RNA, 19 nt, Artificial Sequence
  Description of Artificial Sequence: Synthetic oligonucleotide
  Antisense strand to SEQ ID NO: 2052644
guuuaagagacucaguucc

SEQ ID NO: 2052646 - RNA, 19 nt, Artificial Sequence
  Description of Artificial Sequence: Synthetic oligonucleotide
  Sense strand starting at position 1371 of SEQ ID NO: 1881542
gugauaaugagccaagcaa

SEQ ID NO: 2052647 - RNA, 19 nt, Artificial Sequence
  Description of Artificial Sequence: Synthetic oligonucleotide
  Antisense strand to SEQ ID NO: 2052646
uugcuuggcucauuaucac

SEQ ID NO: 2052648 - RNA, 19 nt, Artificial Sequence
  Description of Artificial Sequence: Synthetic oligonucleotide
  Sense strand starting at position 1438 of SEQ ID NO: 1881542
aagggaacauugucuuuau

SEQ ID NO: 2052649 - RNA, 19 nt, Artificial Sequence
  Description of Artificial Sequence: Synthetic oligonucleotide
  Antisense strand to SEQ ID NO: 2052648
auaaagacaauguucccuu

SEQ ID NO: 2052650 - RNA, 19 nt, Artificial Sequence
  Description of Artificial Sequence: Synthetic oligonucleotide
  Sense strand starting at position 1439 of SEQ ID NO: 1881542
agggaacauugucuuuaua

SEQ ID NO: 2052651 - RNA, 19 nt, Artificial Sequence
  Description of Artificial Sequence: Synthetic oligonucleotide
  Antisense strand to SEQ ID NO: 2052650
uauaaagacaauguucccu

SEQ ID NO: 2052652 - RNA, 19 nt, Artificial Sequence
  Description of Artificial Sequence: Synthetic oligonucleotide
  Sense strand starting at position 1441 of SEQ ID NO: 1881542
ggaacauugucuuuauagg

SEQ ID NO: 2052653 - RNA, 19 nt, Artificial Sequence
  Description of Artificial Sequence: Synthetic oligonucleotide
  Antisense strand to SEQ ID NO: 2052652
ccuauaaagacaauguucc

SEQ ID NO: 2052654 - RNA, 19 nt, Artificial Sequence
  Description of Artificial Sequence: Synthetic oligonucleotide
  Sense strand starting at position 1497 of SEQ ID NO: 1881542
ccauuaaaggguuauuggu

SEQ ID NO: 2052655 - RNA, 19 nt, Artificial Sequence
  Description of Artificial Sequence: Synthetic oligonucleotide
  Antisense strand to SEQ ID NO: 2052654
accaauaacccuuuaaugg

SEQ ID NO: 2052656 - RNA, 19 nt, Artificial Sequence
  Description of Artificial Sequence: Synthetic oligonucleotide
  Sense strand starting at position 1507 of SEQ ID NO: 1881542
guuauugguguccaggaca

SEQ ID NO: 2052657 - RNA, 19 nt, Artificial Sequence
  Description of Artificial Sequence: Synthetic oligonucleotide
  Antisense strand to SEQ ID NO: 2052656
uguccuggacaccaauaac

SEQ ID NO: 2052658 - RNA, 19 nt, Artificial Sequence
  Description of Artificial Sequence: Synthetic oligonucleotide
  Sense strand starting at position 1553 of SEQ ID NO: 1881542
gggcuacucuuucuaaaua

SEQ ID NO: 2052659 - RNA, 19 nt, Artificial Sequence
  Description of Artificial Sequence: Synthetic oligonucleotide
  Antisense strand to SEQ ID NO: 2052658
uauuuagaaagaguagccc

SEQ ID NO: 2052660 - RNA, 19 nt, Artificial Sequence
  Description of Artificial Sequence: Synthetic oligonucleotide
  Sense strand starting at position 2014 of SEQ ID NO: 1881542
agagacuuaucuuugucag

SEQ ID NO: 2052661 - RNA, 19 nt, Artificial Sequence
  Description of Artificial Sequence: Synthetic oligonucleotide
  Antisense strand to SEQ ID NO: 2052660
cugacaaagauaagucucu

SEQ ID NO: 2052662 - RNA, 19 nt, Artificial Sequence
  Description of Artificial Sequence: Synthetic oligonucleotide
  Sense strand starting at position 2088 of SEQ ID NO: 1881542
uucuguucucuuuaugaca

SEQ ID NO: 2052663 - RNA, 19 nt, Artificial Sequence
  Description of Artificial Sequence: Synthetic oligonucleotide
  Antisense strand to SEQ ID NO: 2052662
ugucauaaagagaacagaa

SEQ ID NO: 2052664 - RNA, 19 nt, Artificial Sequence
  Description of Artificial Sequence: Synthetic oligonucleotide
  Sense strand starting at position 2121 of SEQ ID NO: 1881542
guuauauuuguaggcaauu

SEQ ID NO: 2052665 - RNA, 19 nt, Artificial Sequence
  Description of Artificial Sequence: Synthetic oligonucleotide
  Antisense strand to SEQ ID NO: 2052664
aauugccuacaaauauaac

SEQ ID NO: 2052666 - RNA, 19 nt, Artificial Sequence
  Description of Artificial Sequence: Synthetic oligonucleotide
  Sense strand starting at position 2316 of SEQ ID NO: 1881542
aaaccaaaugguuguggaa

SEQ ID NO: 2052667 - RNA, 19 nt, Artificial Sequence
  Description of Artificial Sequence: Synthetic oligonucleotide
  Antisense strand to SEQ ID NO: 2052666
uuccacaaccauuugguuu

SEQ ID NO: 2052668 - RNA, 19 nt, Artificial Sequence
  Description of Artificial Sequence: Synthetic oligonucleotide
  Sense strand starting at position 2476 of SEQ ID NO: 1881542
ccauuagaccucuguacac

SEQ ID NO: 2052669 - RNA, 19 nt, Artificial Sequence
  Description of Artificial Sequence: Synthetic oligonucleotide
  Antisense strand to SEQ ID NO: 2052668
guguacagaggucuaaugg

SEQ ID NO: 2052670 - RNA, 19 nt, Artificial Sequence
  Description of Artificial Sequence: Synthetic oligonucleotide
  Sense strand starting at position 2547 of SEQ ID NO: 1881542
agcuguaaggguuagacaa

SEQ ID NO: 2052671 - RNA, 19 nt, Artificial Sequence
  Description of Artificial Sequence: Synthetic oligonucleotide
  Antisense strand to SEQ ID NO: 2052670
uugucuaacccuuacagcu

SEQ ID NO: 2052672 - RNA, 19 nt, Artificial Sequence
  Description of Artificial Sequence: Synthetic oligonucleotide
  Sense strand starting at position 2604 of SEQ ID NO: 1881542
auaaucugccugugggaaa

SEQ ID NO: 2052673 - RNA, 19 nt, Artificial Sequence
  Description of Artificial Sequence: Synthetic oligonucleotide
  Antisense strand to SEQ ID NO: 2052672
uuucccacaggcagauuau

SEQ ID NO: 2052674 - RNA, 19 nt, Artificial Sequence
  Description of Artificial Sequence: Synthetic oligonucleotide
  Sense strand starting at position 2689 of SEQ ID NO: 1881542
augucuuaucuaugacaug

SEQ ID NO: 2052675 - RNA, 19 nt, Artificial Sequence
  Description of Artificial Sequence: Synthetic oligonucleotide
  Antisense strand to SEQ ID NO: 2052674
caugucauagauaagacau

SEQ ID NO: 2052676 - RNA, 19 nt, Artificial Sequence
  Description of Artificial Sequence: Synthetic oligonucleotide
  Sense strand starting at position 3355 of SEQ ID NO: 1881542
cuucucagccuagaaguuu

SEQ ID NO: 2052677 - RNA, 19 nt, Artificial Sequence
  Description of Artificial Sequence: Synthetic oligonucleotide
  Antisense strand to SEQ ID NO: 2052676
aaacuucuaggcugagaag

SEQ ID NO: 2052678 - RNA, 19 nt, Artificial Sequence
  Description of Artificial Sequence: Synthetic oligonucleotide
  Sense strand starting at position 3412 of SEQ ID NO: 1881542
agagcucagguuuaaaugu

SEQ ID NO: 2052679 - RNA, 19 nt, Artificial Sequence
  Description of Artificial Sequence: Synthetic oligonucleotide
  Antisense strand to SEQ ID NO: 2052678
acauuuaaaccugagcucu

SEQ ID NO: 2052680 - RNA, 19 nt, Artificial Sequence
  Description of Artificial Sequence: Synthetic oligonucleotide
  Sense strand starting at position 3449 of SEQ ID NO: 1881542
cagagaggcucucuuggau

SEQ ID NO: 2052681 - RNA, 19 nt, Artificial Sequence
  Description of Artificial Sequence: Synthetic oligonucleotide
  Antisense strand to SEQ ID NO: 2052680
auccaagagagccucucug

SEQ ID NO: 2052682 - RNA, 19 nt, Artificial Sequence
  Description of Artificial Sequence: Synthetic oligonucleotide
  Sense strand starting at position 3622 of SEQ ID NO: 1881542
uuauguucucuacaagggu

SEQ ID NO: 2052683 - RNA, 19 nt, Artificial Sequence
  Description of Artificial Sequence: Synthetic oligonucleotide
  Antisense strand to SEQ ID NO: 2052682
acccuuguagagaacauaa

SEQ ID NO: 2052684 - RNA, 19 nt, Artificial Sequence
  Description of Artificial Sequence: Synthetic oligonucleotide
  Sense strand starting at position 3666 of SEQ ID NO: 1881542
auaccugcugaguaaauga

SEQ ID NO: 2052685 - RNA, 19 nt, Artificial Sequence
  Description of Artificial Sequence: Synthetic oligonucleotide
  Antisense strand to SEQ ID NO: 2052684
ucauuuacucagcagguau

SEQ ID NO: 2052686 - RNA, 19 nt, Artificial Sequence
  Description of Artificial Sequence: Synthetic oligonucleotide
  Sense strand starting at position 3736 of SEQ ID NO: 1881542
uaguaaggauuagugaaau

SEQ ID NO: 2052687 - RNA, 19 nt, Artificial Sequence
  Description of Artificial Sequence: Synthetic oligonucleotide
  Antisense strand to SEQ ID NO: 2052686
auuucacuaauccuuacua

SEQ ID NO: 2052688 - RNA, 19 nt, Artificial Sequence
  Description of Artificial Sequence: Synthetic oligonucleotide
  Sense strand starting at position 3742 of SEQ ID NO: 1881542
ggauuagugaaauguaauu

SEQ ID NO: 2052689 - RNA, 19 nt, Artificial Sequence
  Description of Artificial Sequence: Synthetic oligonucleotide
  Antisense strand to SEQ ID NO: 2052688
aauuacauuucacuaaucc

SEQ ID NO: 2052690 - RNA, 19 nt, Artificial Sequence
  Description of Artificial Sequence: Synthetic oligonucleotide
  Sense strand starting at position 3805 of SEQ ID NO: 1881542
guauacauacuugguauua

SEQ ID NO: 2052691 - RNA, 19 nt, Artificial Sequence
  Description of Artificial Sequence: Synthetic oligonucleotide
  Antisense strand to SEQ ID NO: 2052690
uaauaccaaguauguauac

SEQ ID NO: 2052692 - RNA, 19 nt, Artificial Sequence
  Description of Artificial Sequence: Synthetic oligonucleotide
  Sense strand starting at position 3901 of SEQ ID NO: 1881542
auggauuagcaggguucau

SEQ ID NO: 2052693 - RNA, 19 nt, Artificial Sequence
  Description of Artificial Sequence: Synthetic oligonucleotide
  Antisense strand to SEQ ID NO: 2052692
augaacccugcuaauccau

SEQ ID NO: 2052694 - RNA, 19 nt, Artificial Sequence
  Description of Artificial Sequence: Synthetic oligonucleotide
  Sense strand starting at position 3949 of SEQ ID NO: 1881542
auuguaggugucuaucaca

SEQ ID NO: 2052695 - RNA, 19 nt, Artificial Sequence
  Description of Artificial Sequence: Synthetic oligonucleotide
  Antisense strand to SEQ ID NO: 2052694
ugugauagacaccuacaau

SEQ ID NO: 2052696 - RNA, 19 nt, Artificial Sequence
  Description of Artificial Sequence: Synthetic oligonucleotide
  Sense strand starting at position 1 of SEQ ID NO: 1881544
gcgugacucgcugccaaau

SEQ ID NO: 2052697 - RNA, 19 nt, Artificial Sequence
  Description of Artificial Sequence: Synthetic oligonucleotide
  Antisense strand to SEQ ID NO: 2052696
auuuggcagcgagucacgc

SEQ ID NO: 2052698 - RNA, 19 nt, Artificial Sequence
  Description of Artificial Sequence: Synthetic oligonucleotide
  Sense strand starting at position 12 of SEQ ID NO: 1881544
ugccaaaugagaggucuga

SEQ ID NO: 2052699 - RNA, 19 nt, Artificial Sequence
  Description of Artificial Sequence: Synthetic oligonucleotide
  Antisense strand to SEQ ID NO: 2052698
ucagaccucucauuuggca

SEQ ID NO: 2052700 - RNA, 19 nt, Artificial Sequence
  Description of Artificial Sequence: Synthetic oligonucleotide
  Sense strand starting at position 162 of SEQ ID NO: 1881544
gggugcaucuugguagaaa

SEQ ID NO: 2052701 - RNA, 19 nt, Artificial Sequence
  Description of Artificial Sequence: Synthetic oligonucleotide
  Antisense strand to SEQ ID NO: 2052700
uuucuaccaagaugcaccc

SEQ ID NO: 2052702 - RNA, 19 nt, Artificial Sequence
  Description of Artificial Sequence: Synthetic oligonucleotide
  Sense strand starting at position 206 of SEQ ID NO: 1881544
aguuucuguucugucauuu

SEQ ID NO: 2052703 - RNA, 19 nt, Artificial Sequence
  Description of Artificial Sequence: Synthetic oligonucleotide
  Antisense strand to SEQ ID NO: 2052702
aaaugacagaacagaaacu

SEQ ID NO: 2052704 - RNA, 19 nt, Artificial Sequence
  Description of Artificial Sequence: Synthetic oligonucleotide
  Sense strand starting at position 210 of SEQ ID NO: 1881544
ucuguucugucauuuauua

SEQ ID NO: 2052705 - RNA, 19 nt, Artificial Sequence
  Description of Artificial Sequence: Synthetic oligonucleotide
  Antisense strand to SEQ ID NO: 2052704
uaauaaaugacagaacaga

SEQ ID NO: 2052706 - RNA, 19 nt, Artificial Sequence
  Description of Artificial Sequence: Synthetic oligonucleotide
  Sense strand starting at position 221 of SEQ ID NO: 1881544
auuuauuagugagagaucu

SEQ ID NO: 2052707 - RNA, 19 nt, Artificial Sequence
  Description of Artificial Sequence: Synthetic oligonucleotide
  Antisense strand to SEQ ID NO: 2052706
agaucucucacuaauaaau

SEQ ID NO: 2052708 - RNA, 19 nt, Artificial Sequence
  Description of Artificial Sequence: Synthetic oligonucleotide
  Sense strand starting at position 271 of SEQ ID NO: 1881544
caguuuccucaugggugaa

SEQ ID NO: 2052709 - RNA, 19 nt, Artificial Sequence
  Description of Artificial Sequence: Synthetic oligonucleotide
  Antisense strand to SEQ ID NO: 2052708
uucacccaugaggaaacug

SEQ ID NO: 2052710 - RNA, 19 nt, Artificial Sequence
  Description of Artificial Sequence: Synthetic oligonucleotide
  Sense strand starting at position 338 of SEQ ID NO: 1881544
caagcaucuguggagucua

SEQ ID NO: 2052711 - RNA, 19 nt, Artificial Sequence
  Description of Artificial Sequence: Synthetic oligonucleotide
  Antisense strand to SEQ ID NO: 2052710
uagacuccacagaugcuug

SEQ ID NO: 2052712 - RNA, 19 nt, Artificial Sequence
  Description of Artificial Sequence: Synthetic oligonucleotide
  Sense strand starting at position 343 of SEQ ID NO: 1881544
aucuguggagucuacuuau

SEQ ID NO: 2052713 - RNA, 19 nt, Artificial Sequence
  Description of Artificial Sequence: Synthetic oligonucleotide
  Antisense strand to SEQ ID NO: 2052712
auaaguagacuccacagau

SEQ ID NO: 2052714 - RNA, 19 nt, Artificial Sequence
  Description of Artificial Sequence: Synthetic oligonucleotide
  Sense strand starting at position 346 of SEQ ID NO: 1881544
uguggagucuacuuauacu

SEQ ID NO: 2052715 - RNA, 19 nt, Artificial Sequence
  Description of Artificial Sequence: Synthetic oligonucleotide
  Antisense strand to SEQ ID NO: 2052714
aguauaaguagacuccaca

SEQ ID NO: 2052716 - RNA, 19 nt, Artificial Sequence
  Description of Artificial Sequence: Synthetic oligonucleotide
  Sense strand starting at position 372 of SEQ ID NO: 1881544
uuugauaagcccuggagua

SEQ ID NO: 2052717 - RNA, 19 nt, Artificial Sequence
  Description of Artificial Sequence: Synthetic oligonucleotide
  Antisense strand to SEQ ID NO: 2052716
uacuccagggcuuaucaaa

SEQ ID NO: 2052718 - RNA, 19 nt, Artificial Sequence
  Description of Artificial Sequence: Synthetic oligonucleotide
  Sense strand starting at position 374 of SEQ ID NO: 1881544
ugauaagcccuggaguaca

SEQ ID NO: 2052719 - RNA, 19 nt, Artificial Sequence
  Description of Artificial Sequence: Synthetic oligonucleotide
  Antisense strand to SEQ ID NO: 2052718
uguacuccagggcuuauca

SEQ ID NO: 2052720 - RNA, 19 nt, Artificial Sequence
  Description of Artificial Sequence: Synthetic oligonucleotide
  Sense strand starting at position 919 of SEQ ID NO: 1881544
gcaggacauugguucagaa

SEQ ID NO: 2052721 - RNA, 19 nt, Artificial Sequence
  Description of Artificial Sequence: Synthetic oligonucleotide
  Antisense strand to SEQ ID NO: 2052720
uucugaaccaauguccugc

SEQ ID NO: 2052722 - RNA, 19 nt, Artificial Sequence
  Description of Artificial Sequence: Synthetic oligonucleotide
  Sense strand starting at position 929 of SEQ ID NO: 1881544
gguucagaaguuugaagac

SEQ ID NO: 2052723 - RNA, 19 nt, Artificial Sequence
  Description of Artificial Sequence: Synthetic oligonucleotide
  Antisense strand to SEQ ID NO: 2052722
gucuucaaacuucugaacc

SEQ ID NO: 2052724 - RNA, 19 nt, Artificial Sequence
  Description of Artificial Sequence: Synthetic oligonucleotide
  Sense strand starting at position 1410 of SEQ ID NO: 1881544
gcguuucuuagcccugauu

SEQ ID NO: 2052725 - RNA, 19 nt, Artificial Sequence
  Description of Artificial Sequence: Synthetic oligonucleotide
  Antisense strand to SEQ ID NO: 2052724
aaucagggcuaagaaacgc

SEQ ID NO: 2052726 - RNA, 19 nt, Artificial Sequence
  Description of Artificial Sequence: Synthetic oligonucleotide
  Sense strand starting at position 1469 of SEQ ID NO: 1881544
acagcaggauugucuauaa

SEQ ID NO: 2052727 - RNA, 19 nt, Artificial Sequence
  Description of Artificial Sequence: Synthetic oligonucleotide
  Antisense strand to SEQ ID NO: 2052726
uuauagacaauccugcugu

SEQ ID NO: 2052728 - RNA, 19 nt, Artificial Sequence
  Description of Artificial Sequence: Synthetic oligonucleotide
  Sense strand starting at position 2016 of SEQ ID NO: 1881544
caagcagguugccuagaaa

SEQ ID NO: 2052729 - RNA, 19 nt, Artificial Sequence
  Description of Artificial Sequence: Synthetic oligonucleotide
  Antisense strand to SEQ ID NO: 2052728
uuucuaggcaaccugcuug

SEQ ID NO: 2052730 - RNA, 19 nt, Artificial Sequence
  Description of Artificial Sequence: Synthetic oligonucleotide
  Sense strand starting at position 2019 of SEQ ID NO: 1881544
gcagguugccuagaaacca

SEQ ID NO: 2052731 - RNA, 19 nt, Artificial Sequence
  Description of Artificial Sequence: Synthetic oligonucleotide
  Antisense strand to SEQ ID NO: 2052730
ugguuucuaggcaaccugc

SEQ ID NO: 2052732 - RNA, 19 nt, Artificial Sequence
  Description of Artificial Sequence: Synthetic oligonucleotide
  Sense strand starting at position 2083 of SEQ ID NO: 1881544
gacucaugccaggaaugca

SEQ ID NO: 2052733 - RNA, 19 nt, Artificial Sequence
  Description of Artificial Sequence: Synthetic oligonucleotide
  Antisense strand to SEQ ID NO: 2052732
ugcauuccuggcaugaguc

SEQ ID NO: 2052734 - RNA, 19 nt, Artificial Sequence
  Description of Artificial Sequence: Synthetic oligonucleotide
  Sense strand starting at position 2093 of SEQ ID NO: 1881544
aggaaugcacgucauaauu

SEQ ID NO: 2052735 - RNA, 19 nt, Artificial Sequence
  Description of Artificial Sequence: Synthetic oligonucleotide
  Antisense strand to SEQ ID NO: 2052734
aauuaugacgugcauuccu

SEQ ID NO: 2052736 - RNA, 19 nt, Artificial Sequence
  Description of Artificial Sequence: Synthetic oligonucleotide
  Sense strand starting at position 2360 of SEQ ID NO: 1881544
agcauauugucaguauuuc

SEQ ID NO: 2052737 - RNA, 19 nt, Artificial Sequence
  Description of Artificial Sequence: Synthetic oligonucleotide
  Antisense strand to SEQ ID NO: 2052736
gaaauacugacaauaugcu

SEQ ID NO: 2052738 - RNA, 19 nt, Artificial Sequence
  Description of Artificial Sequence: Synthetic oligonucleotide
  Sense strand starting at position 2459 of SEQ ID NO: 1881544
cucuaaaugcuagauguuu

SEQ ID NO: 2052739 - RNA, 19 nt, Artificial Sequence
  Description of Artificial Sequence: Synthetic oligonucleotide
  Antisense strand to SEQ ID NO: 2052738
aaacaucuagcauuuagag

SEQ ID NO: 2052740 - RNA, 19 nt, Artificial Sequence
  Description of Artificial Sequence: Synthetic oligonucleotide
  Sense strand starting at position 2465 of SEQ ID NO: 1881544
augcuagauguuuagguua

SEQ ID NO: 2052741 - RNA, 19 nt, Artificial Sequence
  Description of Artificial Sequence: Synthetic oligonucleotide
  Antisense strand to SEQ ID NO: 2052740
uaaccuaaacaucuagcau

SEQ ID NO: 2052742 - RNA, 19 nt, Artificial Sequence
  Description of Artificial Sequence: Synthetic oligonucleotide
  Sense strand starting at position 2715 of SEQ ID NO: 1881544
acagcacauguguaugauu

SEQ ID NO: 2052743 - RNA, 19 nt, Artificial Sequence
  Description of Artificial Sequence: Synthetic oligonucleotide
  Antisense strand to SEQ ID NO: 2052742
aaucauacacaugugcugu

SEQ ID NO: 2052744 - RNA, 19 nt, Artificial Sequence
  Description of Artificial Sequence: Synthetic oligonucleotide
  Sense strand starting at position 2722 of SEQ ID NO: 1881544
auguguaugauuugucuau

SEQ ID NO: 2052745 - RNA, 19 nt, Artificial Sequence
  Description of Artificial Sequence: Synthetic oligonucleotide
  Antisense strand to SEQ ID NO: 2052744
auagacaaaucauacacau

SEQ ID NO: 2052746 - RNA, 19 nt, Artificial Sequence
  Description of Artificial Sequence: Synthetic oligonucleotide
  Sense strand starting at position 2723 of SEQ ID NO: 1881544
uguguaugauuugucuauu

SEQ ID NO: 2052747 - RNA, 19 nt, Artificial Sequence
  Description of Artificial Sequence: Synthetic oligonucleotide
  Antisense strand to SEQ ID NO: 2052746
aauagacaaaucauacaca

SEQ ID NO: 2052748 - RNA, 19 nt, Artificial Sequence
  Description of Artificial Sequence: Synthetic oligonucleotide
  Sense strand starting at position 2932 of SEQ ID NO: 1881544
uagcaaugggucugaaucu

SEQ ID NO: 2052749 - RNA, 19 nt, Artificial Sequence
  Description of Artificial Sequence: Synthetic oligonucleotide
  Antisense strand to SEQ ID NO: 2052748
agauucagacccauugcua

SEQ ID NO: 2052750 - RNA, 19 nt, Artificial Sequence
  Description of Artificial Sequence: Synthetic oligonucleotide
  Sense strand starting at position 3012 of SEQ ID NO: 1881544
ccuuaucuggcuggaauua

SEQ ID NO: 2052751 - RNA, 19 nt, Artificial Sequence
  Description of Artificial Sequence: Synthetic oligonucleotide
  Antisense strand to SEQ ID NO: 2052750
uaauuccagccagauaagg

SEQ ID NO: 2052752 - RNA, 19 nt, Artificial Sequence
  Description of Artificial Sequence: Synthetic oligonucleotide
  Sense strand starting at position 3033 of SEQ ID NO: 1881544
guuauauucuaacccagag

SEQ ID NO: 2052753 - RNA, 19 nt, Artificial Sequence
  Description of Artificial Sequence: Synthetic oligonucleotide
  Antisense strand to SEQ ID NO: 2052752
cucuggguuagaauauaac

SEQ ID NO: 2052754 - RNA, 19 nt, Artificial Sequence
  Description of Artificial Sequence: Synthetic oligonucleotide
  Sense strand starting at position 3045 of SEQ ID NO: 1881544
cccagaggucuccaaacuu

SEQ ID NO: 2052755 - RNA, 19 nt, Artificial Sequence
  Description of Artificial Sequence: Synthetic oligonucleotide
  Antisense strand to SEQ ID NO: 2052754
aaguuuggagaccucuggg

SEQ ID NO: 2052756 - RNA, 19 nt, Artificial Sequence
  Description of Artificial Sequence: Synthetic oligonucleotide
  Sense strand starting at position 3222 of SEQ ID NO: 1881544
cccauauacuguguaacca

SEQ ID NO: 2052757 - RNA, 19 nt, Artificial Sequence
  Description of Artificial Sequence: Synthetic oligonucleotide
  Antisense strand to SEQ ID NO: 2052756
ugguuacacaguauauggg

SEQ ID NO: 2052758 - RNA, 19 nt, Artificial Sequence
  Description of Artificial Sequence: Synthetic oligonucleotide
  Sense strand starting at position 3223 of SEQ ID NO: 1881544
ccauauacuguguaaccau

SEQ ID NO: 2052759 - RNA, 19 nt, Artificial Sequence
  Description of Artificial Sequence: Synthetic oligonucleotide
  Antisense strand to SEQ ID NO: 2052758
augguuacacaguauaugg

SEQ ID NO: 2052760 - RNA, 19 nt, Artificial Sequence
  Description of Artificial Sequence: Synthetic oligonucleotide
  Sense strand starting at position 3338 of SEQ ID NO: 1881544
acuuuaugauguccacaug

SEQ ID NO: 2052761 - RNA, 19 nt, Artificial Sequence
  Description of Artificial Sequence: Synthetic oligonucleotide
  Antisense strand to SEQ ID NO: 2052760
cauguggacaucauaaagu

SEQ ID NO: 2052762 - RNA, 19 nt, Artificial Sequence
  Description of Artificial Sequence: Synthetic oligonucleotide
  Sense strand starting at position 3339 of SEQ ID NO: 1881544
cuuuaugauguccacauga

SEQ ID NO: 2052763 - RNA, 19 nt, Artificial Sequence
  Description of Artificial Sequence: Synthetic oligonucleotide
  Antisense strand to SEQ ID NO: 2052762
ucauguggacaucauaaag

SEQ ID NO: 2052764 - RNA, 19 nt, Artificial Sequence
  Description of Artificial Sequence: Synthetic oligonucleotide
  Sense strand starting at position 3402 of SEQ ID NO: 1881544
cguuaagugacaugacuaa

SEQ ID NO: 2052765 - RNA, 19 nt, Artificial Sequence
  Description of Artificial Sequence: Synthetic oligonucleotide
  Antisense strand to SEQ ID NO: 2052764
uuagucaugucacuuaacg

SEQ ID NO: 2052766 - RNA, 19 nt, Artificial Sequence
  Description of Artificial Sequence: Synthetic oligonucleotide
  Sense strand starting at position 3571 of SEQ ID NO: 1881544
gcacaaugugacugaauau

SEQ ID NO: 2052767 - RNA, 19 nt, Artificial Sequence
  Description of Artificial Sequence: Synthetic oligonucleotide
  Antisense strand to SEQ ID NO: 2052766
auauucagucacauugugc

SEQ ID NO: 2052768 - RNA, 19 nt, Artificial Sequence
  Description of Artificial Sequence: Synthetic oligonucleotide
  Sense strand starting at position 3685 of SEQ ID NO: 1881544
gguugucgucgcaggaaga

SEQ ID NO: 2052769 - RNA, 19 nt, Artificial Sequence
  Description of Artificial Sequence: Synthetic oligonucleotide
  Antisense strand to SEQ ID NO: 2052768
ucuuccugcgacgacaacc

SEQ ID NO: 2052770 - RNA, 19 nt, Artificial Sequence
  Description of Artificial Sequence: Synthetic oligonucleotide
  Sense strand starting at position 3826 of SEQ ID NO: 1881544
uuugauuugugguuacuuu

SEQ ID NO: 2052771 - RNA, 19 nt, Artificial Sequence
  Description of Artificial Sequence: Synthetic oligonucleotide
  Antisense strand to SEQ ID NO: 2052770
aaaguaaccacaaaucaaa

SEQ ID NO: 2052772 - RNA, 19 nt, Artificial Sequence
  Description of Artificial Sequence: Synthetic oligonucleotide
  Sense strand starting at position 3833 of SEQ ID NO: 1881544
ugugguuacuuuguagaaa

SEQ ID NO: 2052773 - RNA, 19 nt, Artificial Sequence
  Description of Artificial Sequence: Synthetic oligonucleotide
  Antisense strand to SEQ ID NO: 2052772
uuucuacaaaguaaccaca

SEQ ID NO: 2052774 - RNA, 19 nt, Artificial Sequence
  Description of Artificial Sequence: Synthetic oligonucleotide
  Sense strand starting at position 3836 of SEQ ID NO: 1881544
gguuacuuuguagaaaucu

SEQ ID NO: 2052775 - RNA, 19 nt, Artificial Sequence
  Description of Artificial Sequence: Synthetic oligonucleotide
  Antisense strand to SEQ ID NO: 2052774
agauuucuacaaaguaacc

SEQ ID NO: 2052776 - RNA, 19 nt, Artificial Sequence
  Description of Artificial Sequence: Synthetic oligonucleotide
  Sense strand starting at position 42 of SEQ ID NO: 1881543
ucuuuaauguggguuauau

SEQ ID NO: 2052777 - RNA, 19 nt, Artificial Sequence
  Description of Artificial Sequence: Synthetic oligonucleotide
  Antisense strand to SEQ ID NO: 2052776
auauaacccacauuaaaga

SEQ ID NO: 2052778 - RNA, 19 nt, Artificial Sequence
  Description of Artificial Sequence: Synthetic oligonucleotide
  Sense strand starting at position 88 of SEQ ID NO: 1881543
caaucagaccugugaaaug

SEQ ID NO: 2052779 - RNA, 19 nt, Artificial Sequence
  Description of Artificial Sequence: Synthetic oligonucleotide
  Antisense strand to SEQ ID NO: 2052778
cauuucacaggucugauug

SEQ ID NO: 2052780 - RNA, 19 nt, Artificial Sequence
  Description of Artificial Sequence: Synthetic oligonucleotide
  Sense strand starting at position 181 of SEQ ID NO: 1881543
ucaccuauaggauguauau

SEQ ID NO: 2052781 - RNA, 19 nt, Artificial Sequence
  Description of Artificial Sequence: Synthetic oligonucleotide
  Antisense strand to SEQ ID NO: 2052780
auauacauccuauagguga

SEQ ID NO: 2052782 - RNA, 19 nt, Artificial Sequence
  Description of Artificial Sequence: Synthetic oligonucleotide
  Sense strand starting at position 358 of SEQ ID NO: 1881543
aggucugcuugacuuagaa

SEQ ID NO: 2052783 - RNA, 19 nt, Artificial Sequence
  Description of Artificial Sequence: Synthetic oligonucleotide
  Antisense strand to SEQ ID NO: 2052782
uucuaagucaagcagaccu

SEQ ID NO: 2052784 - RNA, 19 nt, Artificial Sequence
  Description of Artificial Sequence: Synthetic oligonucleotide
  Sense strand starting at position 388 of SEQ ID NO: 1881543
uugcuuucucccgaggaga

SEQ ID NO: 2052785 - RNA, 19 nt, Artificial Sequence
  Description of Artificial Sequence: Synthetic oligonucleotide
  Antisense strand to SEQ ID NO: 2052784
ucuccucgggagaaagcaa

SEQ ID NO: 2052786 - RNA, 19 nt, Artificial Sequence
  Description of Artificial Sequence: Synthetic oligonucleotide
  Sense strand starting at position 390 of SEQ ID NO: 1881543
gcuuucucccgaggagaag

SEQ ID NO: 2052787 - RNA, 19 nt, Artificial Sequence
  Description of Artificial Sequence: Synthetic oligonucleotide
  Antisense strand to SEQ ID NO: 2052786
cuucuccucgggagaaagc

SEQ ID NO: 2052788 - RNA, 19 nt, Artificial Sequence
  Description of Artificial Sequence: Synthetic oligonucleotide
  Sense strand starting at position 539 of SEQ ID NO: 1881543
augcauucugcaugaauaa

SEQ ID NO: 2052789 - RNA, 19 nt, Artificial Sequence
  Description of Artificial Sequence: Synthetic oligonucleotide
  Antisense strand to SEQ ID NO: 2052788
uuauucaugcagaaugcau

SEQ ID NO: 2052790 - RNA, 19 nt, Artificial Sequence
  Description of Artificial Sequence: Synthetic oligonucleotide
  Sense strand starting at position 540 of SEQ ID NO: 1881543
ugcauucugcaugaauaaa

SEQ ID NO: 2052791 - RNA, 19 nt, Artificial Sequence
  Description of Artificial Sequence: Synthetic oligonucleotide
  Antisense strand to SEQ ID NO: 2052790
uuuauucaugcagaaugca

SEQ ID NO: 2052792 - RNA, 19 nt, Artificial Sequence
  Description of Artificial Sequence: Synthetic oligonucleotide
  Sense strand starting at position 594 of SEQ ID NO: 1881543
ugggaauguuuaucacuuc

SEQ ID NO: 2052793 - RNA, 19 nt, Artificial Sequence
  Description of Artificial Sequence: Synthetic oligonucleotide
  Antisense strand to SEQ ID NO: 2052792
gaagugauaaacauuccca

SEQ ID NO: 2052794 - RNA, 19 nt, Artificial Sequence
  Description of Artificial Sequence: Synthetic oligonucleotide
  Sense strand starting at position 680 of SEQ ID NO: 1881543
guaucuacagaguaucaca

SEQ ID NO: 2052795 - RNA, 19 nt, Artificial Sequence
  Description of Artificial Sequence: Synthetic oligonucleotide
  Antisense strand to SEQ ID NO: 2052794
ugugauacucuguagauac

SEQ ID NO: 2052796 - RNA, 19 nt, Artificial Sequence
  Description of Artificial Sequence: Synthetic oligonucleotide
  Sense strand starting at position 779 of SEQ ID NO: 1881543
aucugaagugacugcucau

SEQ ID NO: 2052797 - RNA, 19 nt, Artificial Sequence
  Description of Artificial Sequence: Synthetic oligonucleotide
  Antisense strand to SEQ ID NO: 2052796
augagcagucacuucagau

SEQ ID NO: 2052798 - RNA, 19 nt, Artificial Sequence
  Description of Artificial Sequence: Synthetic oligonucleotide
  Sense strand starting at position 1055 of SEQ ID NO: 1881543
ucagcuuagagugaauugu

SEQ ID NO: 2052799 - RNA, 19 nt, Artificial Sequence
  Description of Artificial Sequence: Synthetic oligonucleotide
  Antisense strand to SEQ ID NO: 2052798
acaauucacucuaagcuga

SEQ ID NO: 2052800 - RNA, 19 nt, Artificial Sequence
  Description of Artificial Sequence: Synthetic oligonucleotide
  Sense strand starting at position 1299 of SEQ ID NO: 1881543
caggaagagucuuugccca

SEQ ID NO: 2052801 - RNA, 19 nt, Artificial Sequence
  Description of Artificial Sequence: Synthetic oligonucleotide
  Antisense strand to SEQ ID NO: 2052800
ugggcaaagacucuuccug

SEQ ID NO: 2052802 - RNA, 19 nt, Artificial Sequence
  Description of Artificial Sequence: Synthetic oligonucleotide
  Sense strand starting at position 1301 of SEQ ID NO: 1881543
ggaagagucuuugcccaau

SEQ ID NO: 2052803 - RNA, 19 nt, Artificial Sequence
  Description of Artificial Sequence: Synthetic oligonucleotide
  Antisense strand to SEQ ID NO: 2052802
auugggcaaagacucuucc

SEQ ID NO: 2052804 - RNA, 19 nt, Artificial Sequence
  Description of Artificial Sequence: Synthetic oligonucleotide
  Sense strand starting at position 1304 of SEQ ID NO: 1881543
agagucuuugcccaauuag

SEQ ID NO: 2052805 - RNA, 19 nt, Artificial Sequence
  Description of Artificial Sequence: Synthetic oligonucleotide
  Antisense strand to SEQ ID NO: 2052804
cuaauugggcaaagacucu

SEQ ID NO: 2052806 - RNA, 19 nt, Artificial Sequence
  Description of Artificial Sequence: Synthetic oligonucleotide
  Sense strand starting at position 1348 of SEQ ID NO: 1881543
ggucacagcccuggagaau

SEQ ID NO: 2052807 - RNA, 19 nt, Artificial Sequence
  Description of Artificial Sequence: Synthetic oligonucleotide
  Antisense strand to SEQ ID NO: 2052806
auucuccagggcugugacc

SEQ ID NO: 2052808 - RNA, 19 nt, Artificial Sequence
  Description of Artificial Sequence: Synthetic oligonucleotide
  Sense strand starting at position 1349 of SEQ ID NO: 1881543
gucacagcccuggagaauu

SEQ ID NO: 2052809 - RNA, 19 nt, Artificial Sequence
  Description of Artificial Sequence: Synthetic oligonucleotide
  Antisense strand to SEQ ID NO: 2052808
aauucuccagggcugugac

SEQ ID NO: 2052810 - RNA, 19 nt, Artificial Sequence
  Description of Artificial Sequence: Synthetic oligonucleotide
  Sense strand starting at position 1432 of SEQ ID NO: 1881543
gucagagagcuugaugaug

SEQ ID NO: 2052811 - RNA, 19 nt, Artificial Sequence
  Description of Artificial Sequence: Synthetic oligonucleotide
  Antisense strand to SEQ ID NO: 2052810
caucaucaagcucucugac

SEQ ID NO: 2052812 - RNA, 19 nt, Artificial Sequence
  Description of Artificial Sequence: Synthetic oligonucleotide
  Sense strand starting at position 1599 of SEQ ID NO: 1881543
gggagaaguucuguaucga

SEQ ID NO: 2052813 - RNA, 19 nt, Artificial Sequence
  Description of Artificial Sequence: Synthetic oligonucleotide
  Antisense strand to SEQ ID NO: 2052812
ucgauacagaacuucuccc

SEQ ID NO: 2052814 - RNA, 19 nt, Artificial Sequence
  Description of Artificial Sequence: Synthetic oligonucleotide
  Sense strand starting at position 1600 of SEQ ID NO: 1881543
ggagaaguucuguaucgag

SEQ ID NO: 2052815 - RNA, 19 nt, Artificial Sequence
  Description of Artificial Sequence: Synthetic oligonucleotide
  Antisense strand to SEQ ID NO: 2052814
cucgauacagaacuucucc

SEQ ID NO: 2052816 - RNA, 19 nt, Artificial Sequence
  Description of Artificial Sequence: Synthetic oligonucleotide
  Sense strand starting at position 2101 of SEQ ID NO: 1881543
ggaguuuggaggugucaga

SEQ ID NO: 2052817 - RNA, 19 nt, Artificial Sequence
  Description of Artificial Sequence: Synthetic oligonucleotide
  Antisense strand to SEQ ID NO: 2052816
ucugacaccuccaaacucc

SEQ ID NO: 2052818 - RNA, 19 nt, Artificial Sequence
  Description of Artificial Sequence: Synthetic oligonucleotide
  Sense strand starting at position 2108 of SEQ ID NO: 1881543
ggaggugucagacacccau

SEQ ID NO: 2052819 - RNA, 19 nt, Artificial Sequence
  Description of Artificial Sequence: Synthetic oligonucleotide
  Antisense strand to SEQ ID NO: 2052818
augggugucugacaccucc

SEQ ID NO: 2052820 - RNA, 19 nt, Artificial Sequence
  Description of Artificial Sequence: Synthetic oligonucleotide
  Sense strand starting at position 2122 of SEQ ID NO: 1881543
cccaucaauggcugagaga

SEQ ID NO: 2052821 - RNA, 19 nt, Artificial Sequence
  Description of Artificial Sequence: Synthetic oligonucleotide
  Antisense strand to SEQ ID NO: 2052820
ucucucagccauugauggg

SEQ ID NO: 2052822 - RNA, 19 nt, Artificial Sequence
  Description of Artificial Sequence: Synthetic oligonucleotide
  Sense strand starting at position 2295 of SEQ ID NO: 1881543
ugccuuucugaagaugcaa

SEQ ID NO: 2052823 - RNA, 19 nt, Artificial Sequence
  Description of Artificial Sequence: Synthetic oligonucleotide
  Antisense strand to SEQ ID NO: 2052822
uugcaucuucagaaaggca

SEQ ID NO: 2052824 - RNA, 19 nt, Artificial Sequence
  Description of Artificial Sequence: Synthetic oligonucleotide
  Sense strand starting at position 2375 of SEQ ID NO: 1881543
cucagugucccagaacauu

SEQ ID NO: 2052825 - RNA, 19 nt, Artificial Sequence
  Description of Artificial Sequence: Synthetic oligonucleotide
  Antisense strand to SEQ ID NO: 2052824
aauguucugggacacugag

SEQ ID NO: 2052826 - RNA, 19 nt, Artificial Sequence
  Description of Artificial Sequence: Synthetic oligonucleotide
  Sense strand starting at position 2384 of SEQ ID NO: 1881543
ccagaacauugcuuuggga

SEQ ID NO: 2052827 - RNA, 19 nt, Artificial Sequence
  Description of Artificial Sequence: Synthetic oligonucleotide
  Antisense strand to SEQ ID NO: 2052826
ucccaaagcaauguucugg

SEQ ID NO: 2052828 - RNA, 19 nt, Artificial Sequence
  Description of Artificial Sequence: Synthetic oligonucleotide
  Sense strand starting at position 2415 of SEQ ID NO: 1881543
uuugaucuugcagaacagu

SEQ ID NO: 2052829 - RNA, 19 nt, Artificial Sequence
  Description of Artificial Sequence: Synthetic oligonucleotide
  Antisense strand to SEQ ID NO: 2052828
acuguucugcaagaucaaa

SEQ ID NO: 2052830 - RNA, 19 nt, Artificial Sequence
  Description of Artificial Sequence: Synthetic oligonucleotide
  Sense strand starting at position 2606 of SEQ ID NO: 1881543
accaguuacucugcaagau

SEQ ID NO: 2052831 - RNA, 19 nt, Artificial Sequence
  Description of Artificial Sequence: Synthetic oligonucleotide
  Antisense strand to SEQ ID NO: 2052830
aucuugcagaguaacuggu

SEQ ID NO: 2052832 - RNA, 19 nt, Artificial Sequence
  Description of Artificial Sequence: Synthetic oligonucleotide
  Sense strand starting at position 2607 of SEQ ID NO: 1881543
ccaguuacucugcaagauu

SEQ ID NO: 2052833 - RNA, 19 nt, Artificial Sequence
  Description of Artificial Sequence: Synthetic oligonucleotide
  Antisense strand to SEQ ID NO: 2052832
aaucuugcagaguaacugg

SEQ ID NO: 2052834 - RNA, 19 nt, Artificial Sequence
  Description of Artificial Sequence: Synthetic oligonucleotide
  Sense strand starting at position 2610 of SEQ ID NO: 1881543
guuacucugcaagauucuu

SEQ ID NO: 2052835 - RNA, 19 nt, Artificial Sequence
  Description of Artificial Sequence: Synthetic oligonucleotide
  Antisense strand to SEQ ID NO: 2052834
aagaaucuugcagaguaac

SEQ ID NO: 2052836 - RNA, 19 nt, Artificial Sequence
  Description of Artificial Sequence: Synthetic oligonucleotide
  Sense strand starting at position 3072 of SEQ ID NO: 1881543
uccugauuaggccagcauu

SEQ ID NO: 2052837 - RNA, 19 nt, Artificial Sequence
  Description of Artificial Sequence: Synthetic oligonucleotide
  Antisense strand to SEQ ID NO: 2052836
aaugcuggccuaaucagga

SEQ ID NO: 2052838 - RNA, 19 nt, Artificial Sequence
  Description of Artificial Sequence: Synthetic oligonucleotide
  Sense strand starting at position 3075 of SEQ ID NO: 1881543
ugauuaggccagcauuaga

SEQ ID NO: 2052839 - RNA, 19 nt, Artificial Sequence
  Description of Artificial Sequence: Synthetic oligonucleotide
  Antisense strand to SEQ ID NO: 2052838
ucuaaugcuggccuaauca

SEQ ID NO: 2052840 - RNA, 19 nt, Artificial Sequence
  Description of Artificial Sequence: Synthetic oligonucleotide
  Sense strand starting at position 3083 of SEQ ID NO: 1881543
ccagcauuagagcauccaa

SEQ ID NO: 2052841 - RNA, 19 nt, Artificial Sequence
  Description of Artificial Sequence: Synthetic oligonucleotide
  Antisense strand to SEQ ID NO: 2052840
uuggaugcucuaaugcugg

SEQ ID NO: 2052842 - RNA, 19 nt, Artificial Sequence
  Description of Artificial Sequence: Synthetic oligonucleotide
  Sense strand starting at position 3184 of SEQ ID NO: 1881543
uguugaguuccuuaacuuu

SEQ ID NO: 2052843 - RNA, 19 nt, Artificial Sequence
  Description of Artificial Sequence: Synthetic oligonucleotide
  Antisense strand to SEQ ID NO: 2052842
aaaguuaaggaacucaaca

SEQ ID NO: 2052844 - RNA, 19 nt, Artificial Sequence
  Description of Artificial Sequence: Synthetic oligonucleotide
  Sense strand starting at position 3299 of SEQ ID NO: 1881543
accuuaagugcucaguaaa

SEQ ID NO: 2052845 - RNA, 19 nt, Artificial Sequence
  Description of Artificial Sequence: Synthetic oligonucleotide
  Antisense strand to SEQ ID NO: 2052844
uuuacugagcacuuaaggu

SEQ ID NO: 2052846 - RNA, 19 nt, Artificial Sequence
  Description of Artificial Sequence: Synthetic oligonucleotide
  Sense strand starting at position 3302 of SEQ ID NO: 1881543
uuaagugcucaguaaauag

SEQ ID NO: 2052847 - RNA, 19 nt, Artificial Sequence
  Description of Artificial Sequence: Synthetic oligonucleotide
  Antisense strand to SEQ ID NO: 2052846
cuauuuacugagcacuuaa

SEQ ID NO: 2052848 - RNA, 19 nt, Artificial Sequence
  Description of Artificial Sequence: Synthetic oligonucleotide
  Sense strand starting at position 3364 of SEQ ID NO: 1881543
ugggaagacucauugucac

SEQ ID NO: 2052849 - RNA, 19 nt, Artificial Sequence
  Description of Artificial Sequence: Synthetic oligonucleotide
  Antisense strand to SEQ ID NO: 2052848
gugacaaugagucuuccca

SEQ ID NO: 2052850 - RNA, 19 nt, Artificial Sequence
  Description of Artificial Sequence: Synthetic oligonucleotide
  Sense strand starting at position 3580 of SEQ ID NO: 1881543
ugucaagauccucaauggu

SEQ ID NO: 2052851 - RNA, 19 nt, Artificial Sequence
  Description of Artificial Sequence: Synthetic oligonucleotide
  Antisense strand to SEQ ID NO: 2052850
accauugaggaucuugaca

SEQ ID NO: 2052852 - RNA, 19 nt, Artificial Sequence
  Description of Artificial Sequence: Synthetic oligonucleotide
  Sense strand starting at position 3720 of SEQ ID NO: 1881543
aaguguggccuuuaaagac

SEQ ID NO: 2052853 - RNA, 19 nt, Artificial Sequence
  Description of Artificial Sequence: Synthetic oligonucleotide
  Antisense strand to SEQ ID NO: 2052852
gucuuuaaaggccacacuu

SEQ ID NO: 2052854 - RNA, 19 nt, Artificial Sequence
  Description of Artificial Sequence: Synthetic oligonucleotide
  Sense strand starting at position 3778 of SEQ ID NO: 1881543
gucugugaaccugagauau

SEQ ID NO: 2052855 - RNA, 19 nt, Artificial Sequence
  Description of Artificial Sequence: Synthetic oligonucleotide
  Antisense strand to SEQ ID NO: 2052854
auaucucagguucacagac

SEQ ID NO: 2052856 - RNA, 19 nt, Artificial Sequence
  Description of Artificial Sequence: Synthetic oligonucleotide
  Sense strand starting at position 155 of SEQ ID NO: 1881545
ucuaguauagauggguaca

SEQ ID NO: 2052857 - RNA, 19 nt, Artificial Sequence
  Description of Artificial Sequence: Synthetic oligonucleotide
  Antisense strand to SEQ ID NO: 2052856
uguacccaucuauacuaga

SEQ ID NO: 2052858 - RNA, 19 nt, Artificial Sequence
  Description of Artificial Sequence: Synthetic oligonucleotide
  Sense strand starting at position 158 of SEQ ID NO: 1881545
aguauagauggguacaguu

SEQ ID NO: 2052859 - RNA, 19 nt, Artificial Sequence
  Description of Artificial Sequence: Synthetic oligonucleotide
  Antisense strand to SEQ ID NO: 2052858
aacuguacccaucuauacu

SEQ ID NO: 2052860 - RNA, 19 nt, Artificial Sequence
  Description of Artificial Sequence: Synthetic oligonucleotide
  Sense strand starting at position 172 of SEQ ID NO: 1881545
caguuugggagcugaaaug

SEQ ID NO: 2052861 - RNA, 19 nt, Artificial Sequence
  Description of Artificial Sequence: Synthetic oligonucleotide
  Antisense strand to SEQ ID NO: 2052860
cauuucagcucccaaacug

SEQ ID NO: 2052862 - RNA, 19 nt, Artificial Sequence
  Description of Artificial Sequence: Synthetic oligonucleotide
  Sense strand starting at position 182 of SEQ ID NO: 1881545
gcugaaaugcaauaacuua

SEQ ID NO: 2052863 - RNA, 19 nt, Artificial Sequence
  Description of Artificial Sequence: Synthetic oligonucleotide
  Antisense strand to SEQ ID NO: 2052862
uaaguuauugcauuucagc

SEQ ID NO: 2052864 - RNA, 19 nt, Artificial Sequence
  Description of Artificial Sequence: Synthetic oligonucleotide
  Sense strand starting at position 508 of SEQ ID NO: 1881545
gagagcuaaagcgaguaau

SEQ ID NO: 2052865 - RNA, 19 nt, Artificial Sequence
  Description of Artificial Sequence: Synthetic oligonucleotide
  Antisense strand to SEQ ID NO: 2052864
auuacucgcuuuagcucuc

SEQ ID NO: 2052866 - RNA, 19 nt, Artificial Sequence
  Description of Artificial Sequence: Synthetic oligonucleotide
  Sense strand starting at position 601 of SEQ ID NO: 1881545
gaccucaauccacgguuua

SEQ ID NO: 2052867 - RNA, 19 nt, Artificial Sequence
  Description of Artificial Sequence: Synthetic oligonucleotide
  Antisense strand to SEQ ID NO: 2052866
uaaaccguggauugagguc

SEQ ID NO: 2052868 - RNA, 19 nt, Artificial Sequence
  Description of Artificial Sequence: Synthetic oligonucleotide
  Sense strand starting at position 602 of SEQ ID NO: 1881545
accucaauccacgguuuaa

SEQ ID NO: 2052869 - RNA, 19 nt, Artificial Sequence
  Description of Artificial Sequence: Synthetic oligonucleotide
  Antisense strand to SEQ ID NO: 2052868
uuaaaccguggauugaggu

SEQ ID NO: 2052870 - RNA, 19 nt, Artificial Sequence
  Description of Artificial Sequence: Synthetic oligonucleotide
  Sense strand starting at position 637 of SEQ ID NO: 1881545
aggauacacugagaguaaa

SEQ ID NO: 2052871 - RNA, 19 nt, Artificial Sequence
  Description of Artificial Sequence: Synthetic oligonucleotide
  Antisense strand to SEQ ID NO: 2052870
uuuacucucaguguauccu

SEQ ID NO: 2052872 - RNA, 19 nt, Artificial Sequence
  Description of Artificial Sequence: Synthetic oligonucleotide
  Sense strand starting at position 693 of SEQ ID NO: 1881545
cuuacaagucuccaggcau

SEQ ID NO: 2052873 - RNA, 19 nt, Artificial Sequence
  Description of Artificial Sequence: Synthetic oligonucleotide
  Antisense strand to SEQ ID NO: 2052872
augccuggagacuuguaag

SEQ ID NO: 2052874 - RNA, 19 nt, Artificial Sequence
  Description of Artificial Sequence: Synthetic oligonucleotide
  Sense strand starting at position 802 of SEQ ID NO: 1881545
ucuguuagcuaauuaugga

SEQ ID NO: 2052875 - RNA, 19 nt, Artificial Sequence
  Description of Artificial Sequence: Synthetic oligonucleotide
  Antisense strand to SEQ ID NO: 2052874
uccauaauuagcuaacaga

SEQ ID NO: 2052876 - RNA, 19 nt, Artificial Sequence
  Description of Artificial Sequence: Synthetic oligonucleotide
  Sense strand starting at position 934 of SEQ ID NO: 1881545
aauagaggguuguugaaca

SEQ ID NO: 2052877 - RNA, 19 nt, Artificial Sequence
  Description of Artificial Sequence: Synthetic oligonucleotide
  Antisense strand to SEQ ID NO: 2052876
uguucaacaacccucuauu

SEQ ID NO: 2052878 - RNA, 19 nt, Artificial Sequence
  Description of Artificial Sequence: Synthetic oligonucleotide
  Sense strand starting at position 941 of SEQ ID NO: 1881545
gguuguugaacaugaaacu

SEQ ID NO: 2052879 - RNA, 19 nt, Artificial Sequence
  Description of Artificial Sequence: Synthetic oligonucleotide
  Antisense strand to SEQ ID NO: 2052878
aguuucauguucaacaacc

SEQ ID NO: 2052880 - RNA, 19 nt, Artificial Sequence
  Description of Artificial Sequence: Synthetic oligonucleotide
  Sense strand starting at position 1076 of SEQ ID NO: 1881545
uaguguauauauccuuagu

SEQ ID NO: 2052881 - RNA, 19 nt, Artificial Sequence
  Description of Artificial Sequence: Synthetic oligonucleotide
  Antisense strand to SEQ ID NO: 2052880
acuaaggauauauacacua

SEQ ID NO: 2052882 - RNA, 19 nt, Artificial Sequence
  Description of Artificial Sequence: Synthetic oligonucleotide
  Sense strand starting at position 1079 of SEQ ID NO: 1881545
uguauauauccuuaguguc

SEQ ID NO: 2052883 - RNA, 19 nt, Artificial Sequence
  Description of Artificial Sequence: Synthetic oligonucleotide
  Antisense strand to SEQ ID NO: 2052882
gacacuaaggauauauaca

SEQ ID NO: 2052884 - RNA, 19 nt, Artificial Sequence
  Description of Artificial Sequence: Synthetic oligonucleotide
  Sense strand starting at position 1269 of SEQ ID NO: 1881545
cccauauuuguaugcgaaa

SEQ ID NO: 2052885 - RNA, 19 nt, Artificial Sequence
  Description of Artificial Sequence: Synthetic oligonucleotide
  Antisense strand to SEQ ID NO: 2052884
uuucgcauacaaauauggg

SEQ ID NO: 2052886 - RNA, 19 nt, Artificial Sequence
  Description of Artificial Sequence: Synthetic oligonucleotide
  Sense strand starting at position 1280 of SEQ ID NO: 1881545
augcgaaacuaucuauaaa

SEQ ID NO: 2052887 - RNA, 19 nt, Artificial Sequence
  Description of Artificial Sequence: Synthetic oligonucleotide
  Antisense strand to SEQ ID NO: 2052886
uuuauagauaguuucgcau

SEQ ID NO: 2052888 - RNA, 19 nt, Artificial Sequence
  Description of Artificial Sequence: Synthetic oligonucleotide
  Sense strand starting at position 1644 of SEQ ID NO: 1881545
uaagaaugugccuaggacu

SEQ ID NO: 2052889 - RNA, 19 nt, Artificial Sequence
  Description of Artificial Sequence: Synthetic oligonucleotide
  Antisense strand to SEQ ID NO: 2052888
aguccuaggcacauucuua

SEQ ID NO: 2052890 - RNA, 19 nt, Artificial Sequence
  Description of Artificial Sequence: Synthetic oligonucleotide
  Sense strand starting at position 1696 of SEQ ID NO: 1881545
gggccuugcaaugaguuga

SEQ ID NO: 2052891 - RNA, 19 nt, Artificial Sequence
  Description of Artificial Sequence: Synthetic oligonucleotide
  Antisense strand to SEQ ID NO: 2052890
ucaacucauugcaaggccc

SEQ ID NO: 2052892 - RNA, 19 nt, Artificial Sequence
  Description of Artificial Sequence: Synthetic oligonucleotide
  Sense strand starting at position 1906 of SEQ ID NO: 1881545
gaucaacuagauugcagua

SEQ ID NO: 2052893 - RNA, 19 nt, Artificial Sequence
  Description of Artificial Sequence: Synthetic oligonucleotide
  Antisense strand to SEQ ID NO: 2052892
uacugcaaucuaguugauc

SEQ ID NO: 2052894 - RNA, 19 nt, Artificial Sequence
  Description of Artificial Sequence: Synthetic oligonucleotide
  Sense strand starting at position 2479 of SEQ ID NO: 1881545
ggugcacauaucuggguaa

SEQ ID NO: 2052895 - RNA, 19 nt, Artificial Sequence
  Description of Artificial Sequence: Synthetic oligonucleotide
  Antisense strand to SEQ ID NO: 2052894
uuacccagauaugugcacc

SEQ ID NO: 2052896 - RNA, 19 nt, Artificial Sequence
  Description of Artificial Sequence: Synthetic oligonucleotide
  Sense strand starting at position 2481 of SEQ ID NO: 1881545
ugcacauaucuggguaaag

SEQ ID NO: 2052897 - RNA, 19 nt, Artificial Sequence
  Description of Artificial Sequence: Synthetic oligonucleotide
  Antisense strand to SEQ ID NO: 2052896
cuuuacccagauaugugca

SEQ ID NO: 2052898 - RNA, 19 nt, Artificial Sequence
  Description of Artificial Sequence: Synthetic oligonucleotide
  Sense strand starting at position 2482 of SEQ ID NO: 1881545
gcacauaucuggguaaagg

SEQ ID NO: 2052899 - RNA, 19 nt, Artificial Sequence
  Description of Artificial Sequence: Synthetic oligonucleotide
  Antisense strand to SEQ ID NO: 2052898
ccuuuacccagauaugugc

SEQ ID NO: 2052900 - RNA, 19 nt, Artificial Sequence
  Description of Artificial Sequence: Synthetic oligonucleotide
  Sense strand starting at position 2531 of SEQ ID NO: 1881545
gaguuagaaucucuccuag

SEQ ID NO: 2052901 - RNA, 19 nt, Artificial Sequence
  Description of Artificial Sequence: Synthetic oligonucleotide
  Antisense strand to SEQ ID NO: 2052900
cuaggagagauucuaacuc

SEQ ID NO: 2052902 - RNA, 19 nt, Artificial Sequence
  Description of Artificial Sequence: Synthetic oligonucleotide
  Sense strand starting at position 2533 of SEQ ID NO: 1881545
guuagaaucucuccuagca

SEQ ID NO: 2052903 - RNA, 19 nt, Artificial Sequence
  Description of Artificial Sequence: Synthetic oligonucleotide
  Antisense strand to SEQ ID NO: 2052902
ugcuaggagagauucuaac

SEQ ID NO: 2052904 - RNA, 19 nt, Artificial Sequence
  Description of Artificial Sequence: Synthetic oligonucleotide
  Sense strand starting at position 2628 of SEQ ID NO: 1881545
ggacuagagucccuucuaa

SEQ ID NO: 2052905 - RNA, 19 nt, Artificial Sequence
  Description of Artificial Sequence: Synthetic oligonucleotide
  Antisense strand to SEQ ID NO: 2052904
uuagaagggacucuagucc

SEQ ID NO: 2052906 - RNA, 19 nt, Artificial Sequence
  Description of Artificial Sequence: Synthetic oligonucleotide
  Sense strand starting at position 2662 of SEQ ID NO: 1881545
agacccuucucaguaaagu

SEQ ID NO: 2052907 - RNA, 19 nt, Artificial Sequence
  Description of Artificial Sequence: Synthetic oligonucleotide
  Antisense strand to SEQ ID NO: 2052906
acuuuacugagaagggucu

SEQ ID NO: 2052908 - RNA, 19 nt, Artificial Sequence
  Description of Artificial Sequence: Synthetic oligonucleotide
  Sense strand starting at position 2663 of SEQ ID NO: 1881545
gacccuucucaguaaagug

SEQ ID NO: 2052909 - RNA, 19 nt, Artificial Sequence
  Description of Artificial Sequence: Synthetic oligonucleotide
  Antisense strand to SEQ ID NO: 2052908
cacuuuacugagaaggguc

SEQ ID NO: 2052910 - RNA, 19 nt, Artificial Sequence
  Description of Artificial Sequence: Synthetic oligonucleotide
  Sense strand starting at position 2679 of SEQ ID NO: 1881545
gugccucuuggcuaagaau

SEQ ID NO: 2052911 - RNA, 19 nt, Artificial Sequence
  Description of Artificial Sequence: Synthetic oligonucleotide
  Antisense strand to SEQ ID NO: 2052910
auucuuagccaagaggcac

SEQ ID NO: 2052912 - RNA, 19 nt, Artificial Sequence
  Description of Artificial Sequence: Synthetic oligonucleotide
  Sense strand starting at position 2710 of SEQ ID NO: 1881545
acaguauguuaacugcuau

SEQ ID NO: 2052913 - RNA, 19 nt, Artificial Sequence
  Description of Artificial Sequence: Synthetic oligonucleotide
  Antisense strand to SEQ ID NO: 2052912
auagcaguuaacauacugu

SEQ ID NO: 2052914 - RNA, 19 nt, Artificial Sequence
  Description of Artificial Sequence: Synthetic oligonucleotide
  Sense strand starting at position 2882 of SEQ ID NO: 1881545
acagcagccgccugaauuu

SEQ ID NO: 2052915 - RNA, 19 nt, Artificial Sequence
  Description of Artificial Sequence: Synthetic oligonucleotide
  Antisense strand to SEQ ID NO: 2052914
aaauucaggcggcugcugu

SEQ ID NO: 2052916 - RNA, 19 nt, Artificial Sequence
  Description of Artificial Sequence: Synthetic oligonucleotide
  Sense strand starting at position 3056 of SEQ ID NO: 1881545
gaaacuccugguuggaagu

SEQ ID NO: 2052917 - RNA, 19 nt, Artificial Sequence
  Description of Artificial Sequence: Synthetic oligonucleotide
  Antisense strand to SEQ ID NO: 2052916
acuuccaaccaggaguuuc

SEQ ID NO: 2052918 - RNA, 19 nt, Artificial Sequence
  Description of Artificial Sequence: Synthetic oligonucleotide
  Sense strand starting at position 3137 of SEQ ID NO: 1881545
gugguuaaugucuaugucu

SEQ ID NO: 2052919 - RNA, 19 nt, Artificial Sequence
  Description of Artificial Sequence: Synthetic oligonucleotide
  Antisense strand to SEQ ID NO: 2052918
agacauagacauuaaccac

SEQ ID NO: 2052920 - RNA, 19 nt, Artificial Sequence
  Description of Artificial Sequence: Synthetic oligonucleotide
  Sense strand starting at position 3423 of SEQ ID NO: 1881545
gagguuucccucuggucaa

SEQ ID NO: 2052921 - RNA, 19 nt, Artificial Sequence
  Description of Artificial Sequence: Synthetic oligonucleotide
  Antisense strand to SEQ ID NO: 2052920
uugaccagagggaaaccuc

SEQ ID NO: 2052922 - RNA, 19 nt, Artificial Sequence
  Description of Artificial Sequence: Synthetic oligonucleotide
  Sense strand starting at position 3516 of SEQ ID NO: 1881545
gguccaauuccuggcauag

SEQ ID NO: 2052923 - RNA, 19 nt, Artificial Sequence
  Description of Artificial Sequence: Synthetic oligonucleotide
  Antisense strand to SEQ ID NO: 2052922
cuaugccaggaauuggacc

SEQ ID NO: 2052924 - RNA, 19 nt, Artificial Sequence
  Description of Artificial Sequence: Synthetic oligonucleotide
  Sense strand starting at position 3534 of SEQ ID NO: 1881545
gggaaugaaugaguccuuu

SEQ ID NO: 2052925 - RNA, 19 nt, Artificial Sequence
  Description of Artificial Sequence: Synthetic oligonucleotide
  Antisense strand to SEQ ID NO: 2052924
aaaggacucauucauuccc

SEQ ID NO: 2052926 - RNA, 19 nt, Artificial Sequence
  Description of Artificial Sequence: Synthetic oligonucleotide
  Sense strand starting at position 3538 of SEQ ID NO: 1881545
augaaugaguccuuuaucu

SEQ ID NO: 2052927 - RNA, 19 nt, Artificial Sequence
  Description of Artificial Sequence: Synthetic oligonucleotide
  Antisense strand to SEQ ID NO: 2052926
agauaaaggacucauucau

SEQ ID NO: 2052928 - RNA, 19 nt, Artificial Sequence
  Description of Artificial Sequence: Synthetic oligonucleotide
  Sense strand starting at position 3686 of SEQ ID NO: 1881545
augugaguuaaguagccuu

SEQ ID NO: 2052929 - RNA, 19 nt, Artificial Sequence
  Description of Artificial Sequence: Synthetic oligonucleotide
  Antisense strand to SEQ ID NO: 2052928
aaggcuacuuaacucacau

SEQ ID NO: 2052930 - RNA, 19 nt, Artificial Sequence
  Description of Artificial Sequence: Synthetic oligonucleotide
  Sense strand starting at position 3693 of SEQ ID NO: 1881545
uuaaguagccuuugggaaa

SEQ ID NO: 2052931 - RNA, 19 nt, Artificial Sequence
  Description of Artificial Sequence: Synthetic oligonucleotide
  Antisense strand to SEQ ID NO: 2052930
uuucccaaaggcuacuuaa

SEQ ID NO: 2052932 - RNA, 19 nt, Artificial Sequence
  Description of Artificial Sequence: Synthetic oligonucleotide
  Sense strand starting at position 3834 of SEQ ID NO: 1881545
ucaauucuaccuuggagac

SEQ ID NO: 2052933 - RNA, 19 nt, Artificial Sequence
  Description of Artificial Sequence: Synthetic oligonucleotide
  Antisense strand to SEQ ID NO: 2052932
gucuccaagguagaauuga

SEQ ID NO: 2052934 - RNA, 19 nt, Artificial Sequence
  Description of Artificial Sequence: Synthetic oligonucleotide
  Sense strand starting at position 3912 of SEQ ID NO: 1881545
uggagucagccauaucugu

SEQ ID NO: 2052935 - RNA, 19 nt, Artificial Sequence
  Description of Artificial Sequence: Synthetic oligonucleotide
  Antisense strand to SEQ ID NO: 2052934
acagauauggcugacucca

SEQ ID NO: 2052936 - RNA, 19 nt, Artificial Sequence
  Description of Artificial Sequence: Synthetic oligonucleotide
  Sense strand starting at position 67 of SEQ ID NO: 1881546
acuacuuaggauugaaucu

SEQ ID NO: 2052937 - RNA, 19 nt, Artificial Sequence
  Description of Artificial Sequence: Synthetic oligonucleotide
  Antisense strand to SEQ ID NO: 2052936
agauucaauccuaaguagu

SEQ ID NO: 2052938 - RNA, 19 nt, Artificial Sequence
  Description of Artificial Sequence: Synthetic oligonucleotide
  Sense strand starting at position 105 of SEQ ID NO: 1881546
cuguaugaucaagggcaaa

SEQ ID NO: 2052939 - RNA, 19 nt, Artificial Sequence
  Description of Artificial Sequence: Synthetic oligonucleotide
  Antisense strand to SEQ ID NO: 2052938
uuugcccuugaucauacag

SEQ ID NO: 2052940 - RNA, 19 nt, Artificial Sequence
  Description of Artificial Sequence: Synthetic oligonucleotide
  Sense strand starting at position 181 of SEQ ID NO: 1881546
gguuacugugaguaccaaa

SEQ ID NO: 2052941 - RNA, 19 nt, Artificial Sequence
  Description of Artificial Sequence: Synthetic oligonucleotide
  Antisense strand to SEQ ID NO: 2052940
uuugguacucacaguaacc

SEQ ID NO: 2052942 - RNA, 19 nt, Artificial Sequence
  Description of Artificial Sequence: Synthetic oligonucleotide
  Sense strand starting at position 192 of SEQ ID NO: 1881546
guaccaaauuaguuaauac

SEQ ID NO: 2052943 - RNA, 19 nt, Artificial Sequence
  Description of Artificial Sequence: Synthetic oligonucleotide
  Antisense strand to SEQ ID NO: 2052942
guauuaacuaauuugguac

SEQ ID NO: 2052944 - RNA, 19 nt, Artificial Sequence
  Description of Artificial Sequence: Synthetic oligonucleotide
  Sense strand starting at position 378 of SEQ ID NO: 1881546
ucuaccugucaguauauau

SEQ ID NO: 2052945 - RNA, 19 nt, Artificial Sequence
  Description of Artificial Sequence: Synthetic oligonucleotide
  Antisense strand to SEQ ID NO: 2052944
auauauacugacagguaga

SEQ ID NO: 2052946 - RNA, 19 nt, Artificial Sequence
  Description of Artificial Sequence: Synthetic oligonucleotide
  Sense strand starting at position 399 of SEQ ID NO: 1881546
acauguaucuuauuggaaa

SEQ ID NO: 2052947 - RNA, 19 nt, Artificial Sequence
  Description of Artificial Sequence: Synthetic oligonucleotide
  Antisense strand to SEQ ID NO: 2052946
uuuccaauaagauacaugu

SEQ ID NO: 2052948 - RNA, 19 nt, Artificial Sequence
  Description of Artificial Sequence: Synthetic oligonucleotide
  Sense strand starting at position 507 of SEQ ID NO: 1881546
uagcaugucccagggaaag

SEQ ID NO: 2052949 - RNA, 19 nt, Artificial Sequence
  Description of Artificial Sequence: Synthetic oligonucleotide
  Antisense strand to SEQ ID NO: 2052948
cuuucccugggacaugcua

SEQ ID NO: 2052950 - RNA, 19 nt, Artificial Sequence
  Description of Artificial Sequence: Synthetic oligonucleotide
  Sense strand starting at position 518 of SEQ ID NO: 1881546
agggaaagcucauugcaca

SEQ ID NO: 2052951 - RNA, 19 nt, Artificial Sequence
  Description of Artificial Sequence: Synthetic oligonucleotide
  Antisense strand to SEQ ID NO: 2052950
ugugcaaugagcuuucccu

SEQ ID NO: 2052952 - RNA, 19 nt, Artificial Sequence
  Description of Artificial Sequence: Synthetic oligonucleotide
  Sense strand starting at position 519 of SEQ ID NO: 1881546
gggaaagcucauugcacac

SEQ ID NO: 2052953 - RNA, 19 nt, Artificial Sequence
  Description of Artificial Sequence: Synthetic oligonucleotide
  Antisense strand to SEQ ID NO: 2052952
gugugcaaugagcuuuccc

SEQ ID NO: 2052954 - RNA, 19 nt, Artificial Sequence
  Description of Artificial Sequence: Synthetic oligonucleotide
  Sense strand starting at position 707 of SEQ ID NO: 1881546
uagugagacuucccuauga

SEQ ID NO: 2052955 - RNA, 19 nt, Artificial Sequence
  Description of Artificial Sequence: Synthetic oligonucleotide
  Antisense strand to SEQ ID NO: 2052954
ucauagggaagucucacua

SEQ ID NO: 2052956 - RNA, 19 nt, Artificial Sequence
  Description of Artificial Sequence: Synthetic oligonucleotide
  Sense strand starting at position 760 of SEQ ID NO: 1881546
cucacuaagccuggagaga

SEQ ID NO: 2052957 - RNA, 19 nt, Artificial Sequence
  Description of Artificial Sequence: Synthetic oligonucleotide
  Antisense strand to SEQ ID NO: 2052956
ucucuccaggcuuagugag

SEQ ID NO: 2052958 - RNA, 19 nt, Artificial Sequence
  Description of Artificial Sequence: Synthetic oligonucleotide
  Sense strand starting at position 959 of SEQ ID NO: 1881546
guuugcuuagaccagauga

SEQ ID NO: 2052959 - RNA, 19 nt, Artificial Sequence
  Description of Artificial Sequence: Synthetic oligonucleotide
  Antisense strand to SEQ ID NO: 2052958
ucaucuggucuaagcaaac

SEQ ID NO: 2052960 - RNA, 19 nt, Artificial Sequence
  Description of Artificial Sequence: Synthetic oligonucleotide
  Sense strand starting at position 1059 of SEQ ID NO: 1881546
ucuaaccuuguaugagaaa

SEQ ID NO: 2052961 - RNA, 19 nt, Artificial Sequence
  Description of Artificial Sequence: Synthetic oligonucleotide
  Antisense strand to SEQ ID NO: 2052960
uuucucauacaagguuaga

SEQ ID NO: 2052962 - RNA, 19 nt, Artificial Sequence
  Description of Artificial Sequence: Synthetic oligonucleotide
  Sense strand starting at position 1131 of SEQ ID NO: 1881546
uuaaaucucuacuucggaa

SEQ ID NO: 2052963 - RNA, 19 nt, Artificial Sequence
  Description of Artificial Sequence: Synthetic oligonucleotide
  Antisense strand to SEQ ID NO: 2052962
uuccgaaguagagauuuaa

SEQ ID NO: 2052964 - RNA, 19 nt, Artificial Sequence
  Description of Artificial Sequence: Synthetic oligonucleotide
  Sense strand starting at position 1180 of SEQ ID NO: 1881546
uagguaggcuauccucaaa

SEQ ID NO: 2052965 - RNA, 19 nt, Artificial Sequence
  Description of Artificial Sequence: Synthetic oligonucleotide
  Antisense strand to SEQ ID NO: 2052964
uuugaggauagccuaccua

SEQ ID NO: 2052966 - RNA, 19 nt, Artificial Sequence
  Description of Artificial Sequence: Synthetic oligonucleotide
  Sense strand starting at position 1183 of SEQ ID NO: 1881546
guaggcuauccucaaacuu

SEQ ID NO: 2052967 - RNA, 19 nt, Artificial Sequence
  Description of Artificial Sequence: Synthetic oligonucleotide
  Antisense strand to SEQ ID NO: 2052966
aaguuugaggauagccuac

SEQ ID NO: 2052968 - RNA, 19 nt, Artificial Sequence
  Description of Artificial Sequence: Synthetic oligonucleotide
  Sense strand starting at position 1774 of SEQ ID NO: 1881546
ucuugcuccgcgguuuauu

SEQ ID NO: 2052969 - RNA, 19 nt, Artificial Sequence
  Description of Artificial Sequence: Synthetic oligonucleotide
  Antisense strand to SEQ ID NO: 2052968
aauaaaccgcggagcaaga

SEQ ID NO: 2052970 - RNA, 19 nt, Artificial Sequence
  Description of Artificial Sequence: Synthetic oligonucleotide
  Sense strand starting at position 1784 of SEQ ID NO: 1881546
cgguuuauuucuguaccua

SEQ ID NO: 2052971 - RNA, 19 nt, Artificial Sequence
  Description of Artificial Sequence: Synthetic oligonucleotide
  Antisense strand to SEQ ID NO: 2052970
uagguacagaaauaaaccg

SEQ ID NO: 2052972 - RNA, 19 nt, Artificial Sequence
  Description of Artificial Sequence: Synthetic oligonucleotide
  Sense strand starting at position 2012 of SEQ ID NO: 1881546
cuccuuugcagggauggaa

SEQ ID NO: 2052973 - RNA, 19 nt, Artificial Sequence
  Description of Artificial Sequence: Synthetic oligonucleotide
  Antisense strand to SEQ ID NO: 2052972
uuccaucccugcaaaggag

SEQ ID NO: 2052974 - RNA, 19 nt, Artificial Sequence
  Description of Artificial Sequence: Synthetic oligonucleotide
  Sense strand starting at position 2362 of SEQ ID NO: 1881546
cucguucgggaguuuguua

SEQ ID NO: 2052975 - RNA, 19 nt, Artificial Sequence
  Description of Artificial Sequence: Synthetic oligonucleotide
  Antisense strand to SEQ ID NO: 2052974
uaacaaacucccgaacgag

SEQ ID NO: 2052976 - RNA, 19 nt, Artificial Sequence
  Description of Artificial Sequence: Synthetic oligonucleotide
  Sense strand starting at position 2432 of SEQ ID NO: 1881546
guagauuuccaucgcaccu

SEQ ID NO: 2052977 - RNA, 19 nt, Artificial Sequence
  Description of Artificial Sequence: Synthetic oligonucleotide
  Antisense strand to SEQ ID NO: 2052976
aggugcgauggaaaucuac

SEQ ID NO: 2052978 - RNA, 19 nt, Artificial Sequence
  Description of Artificial Sequence: Synthetic oligonucleotide
  Sense strand starting at position 2515 of SEQ ID NO: 1881546
uccagaccaucaguuguaa

SEQ ID NO: 2052979 - RNA, 19 nt, Artificial Sequence
  Description of Artificial Sequence: Synthetic oligonucleotide
  Antisense strand to SEQ ID NO: 2052978
uuacaacugauggucugga

SEQ ID NO: 2052980 - RNA, 19 nt, Artificial Sequence
  Description of Artificial Sequence: Synthetic oligonucleotide
  Sense strand starting at position 2544 of SEQ ID NO: 1881546
gguguucugauuuggucua

SEQ ID NO: 2052981 - RNA, 19 nt, Artificial Sequence
  Description of Artificial Sequence: Synthetic oligonucleotide
  Antisense strand to SEQ ID NO: 2052980
uagaccaaaucagaacacc

SEQ ID NO: 2052982 - RNA, 19 nt, Artificial Sequence
  Description of Artificial Sequence: Synthetic oligonucleotide
  Sense strand starting at position 2589 of SEQ ID NO: 1881546
uuaaauguggauugauugu

SEQ ID NO: 2052983 - RNA, 19 nt, Artificial Sequence
  Description of Artificial Sequence: Synthetic oligonucleotide
  Antisense strand to SEQ ID NO: 2052982
acaaucaauccacauuuaa

SEQ ID NO: 2052984 - RNA, 19 nt, Artificial Sequence
  Description of Artificial Sequence: Synthetic oligonucleotide
  Sense strand starting at position 2711 of SEQ ID NO: 1881546
uuagauuggacuugggcau

SEQ ID NO: 2052985 - RNA, 19 nt, Artificial Sequence
  Description of Artificial Sequence: Synthetic oligonucleotide
  Antisense strand to SEQ ID NO: 2052984
augcccaaguccaaucuaa

SEQ ID NO: 2052986 - RNA, 19 nt, Artificial Sequence
  Description of Artificial Sequence: Synthetic oligonucleotide
  Sense strand starting at position 2760 of SEQ ID NO: 1881546
ccaggugucauuugucauc

SEQ ID NO: 2052987 - RNA, 19 nt, Artificial Sequence
  Description of Artificial Sequence: Synthetic oligonucleotide
  Antisense strand to SEQ ID NO: 2052986
gaugacaaaugacaccugg

SEQ ID NO: 2052988 - RNA, 19 nt, Artificial Sequence
  Description of Artificial Sequence: Synthetic oligonucleotide
  Sense strand starting at position 2762 of SEQ ID NO: 1881546
aggugucauuugucaucuu

SEQ ID NO: 2052989 - RNA, 19 nt, Artificial Sequence
  Description of Artificial Sequence: Synthetic oligonucleotide
  Antisense strand to SEQ ID NO: 2052988
aagaugacaaaugacaccu

SEQ ID NO: 2052990 - RNA, 19 nt, Artificial Sequence
  Description of Artificial Sequence: Synthetic oligonucleotide
  Sense strand starting at position 2765 of SEQ ID NO: 1881546
ugucauuugucaucuuuac

SEQ ID NO: 2052991 - RNA, 19 nt, Artificial Sequence
  Description of Artificial Sequence: Synthetic oligonucleotide
  Antisense strand to SEQ ID NO: 2052990
guaaagaugacaaaugaca

SEQ ID NO: 2052992 - RNA, 19 nt, Artificial Sequence
  Description of Artificial Sequence: Synthetic oligonucleotide
  Sense strand starting at position 2875 of SEQ ID NO: 1881546
uguccuucuguggacauau

SEQ ID NO: 2052993 - RNA, 19 nt, Artificial Sequence
  Description of Artificial Sequence: Synthetic oligonucleotide
  Antisense strand to SEQ ID NO: 2052992
auauguccacagaaggaca

SEQ ID NO: 2052994 - RNA, 19 nt, Artificial Sequence
  Description of Artificial Sequence: Synthetic oligonucleotide
  Sense strand starting at position 3015 of SEQ ID NO: 1881546
uuguguuuggaaugcauuu

SEQ ID NO: 2052995 - RNA, 19 nt, Artificial Sequence
  Description of Artificial Sequence: Synthetic oligonucleotide
  Antisense strand to SEQ ID NO: 2052994
aaaugcauuccaaacacaa

SEQ ID NO: 2052996 - RNA, 19 nt, Artificial Sequence
  Description of Artificial Sequence: Synthetic oligonucleotide
  Sense strand starting at position 3061 of SEQ ID NO: 1881546
agcagaauugaguaucuug

SEQ ID NO: 2052997 - RNA, 19 nt, Artificial Sequence
  Description of Artificial Sequence: Synthetic oligonucleotide
  Antisense strand to SEQ ID NO: 2052996
caagauacucaauucugcu

SEQ ID NO: 2052998 - RNA, 19 nt, Artificial Sequence
  Description of Artificial Sequence: Synthetic oligonucleotide
  Sense strand starting at position 3064 of SEQ ID NO: 1881546
agaauugaguaucuugaau

SEQ ID NO: 2052999 - RNA, 19 nt, Artificial Sequence
  Description of Artificial Sequence: Synthetic oligonucleotide
  Antisense strand to SEQ ID NO: 2052998
auucaagauacucaauucu

SEQ ID NO: 2053000 - RNA, 19 nt, Artificial Sequence
  Description of Artificial Sequence: Synthetic oligonucleotide
  Sense strand starting at position 3103 of SEQ ID NO: 1881546
uugaaagguaggugguauu

SEQ ID NO: 2053001 - RNA, 19 nt, Artificial Sequence
  Description of Artificial Sequence: Synthetic oligonucleotide
  Antisense strand to SEQ ID NO: 2053000
aauaccaccuaccuuucaa

SEQ ID NO: 2053002 - RNA, 19 nt, Artificial Sequence
  Description of Artificial Sequence: Synthetic oligonucleotide
  Sense strand starting at position 3174 of SEQ ID NO: 1881546
ugugaacagguuugguaaa

SEQ ID NO: 2053003 - RNA, 19 nt, Artificial Sequence
  Description of Artificial Sequence: Synthetic oligonucleotide
  Antisense strand to SEQ ID NO: 2053002
uuuaccaaaccuguucaca

SEQ ID NO: 2053004 - RNA, 19 nt, Artificial Sequence
  Description of Artificial Sequence: Synthetic oligonucleotide
  Sense strand starting at position 3176 of SEQ ID NO: 1881546
ugaacagguuugguaaacu

SEQ ID NO: 2053005 - RNA, 19 nt, Artificial Sequence
  Description of Artificial Sequence: Synthetic oligonucleotide
  Antisense strand to SEQ ID NO: 2053004
aguuuaccaaaccuguuca

SEQ ID NO: 2053006 - RNA, 19 nt, Artificial Sequence
  Description of Artificial Sequence: Synthetic oligonucleotide
  Sense strand starting at position 3789 of SEQ ID NO: 1881546
agcauucucuaccuggaca

SEQ ID NO: 2053007 - RNA, 19 nt, Artificial Sequence
  Description of Artificial Sequence: Synthetic oligonucleotide
  Antisense strand to SEQ ID NO: 2053006
uguccagguagagaaugcu

SEQ ID NO: 2053008 - RNA, 19 nt, Artificial Sequence
  Description of Artificial Sequence: Synthetic oligonucleotide
  Sense strand starting at position 3858 of SEQ ID NO: 1881546
uucucuuuacuuugagaug

SEQ ID NO: 2053009 - RNA, 19 nt, Artificial Sequence
  Description of Artificial Sequence: Synthetic oligonucleotide
  Antisense strand to SEQ ID NO: 2053008
caucucaaaguaaagagaa

SEQ ID NO: 2053010 - RNA, 19 nt, Artificial Sequence
  Description of Artificial Sequence: Synthetic oligonucleotide
  Sense strand starting at position 3872 of SEQ ID NO: 1881546
agaugauguuaggugaaua

SEQ ID NO: 2053011 - RNA, 19 nt, Artificial Sequence
  Description of Artificial Sequence: Synthetic oligonucleotide
  Antisense strand to SEQ ID NO: 2053010
uauucaccuaacaucaucu

SEQ ID NO: 2053012 - RNA, 19 nt, Artificial Sequence
  Description of Artificial Sequence: Synthetic oligonucleotide
  Sense strand starting at position 3873 of SEQ ID NO: 1881546
gaugauguuaggugaauac

SEQ ID NO: 2053013 - RNA, 19 nt, Artificial Sequence
  Description of Artificial Sequence: Synthetic oligonucleotide
  Antisense strand to SEQ ID NO: 2053012
guauucaccuaacaucauc

SEQ ID NO: 2053014 - RNA, 19 nt, Artificial Sequence
  Description of Artificial Sequence: Synthetic oligonucleotide
  Sense strand starting at position 3959 of SEQ ID NO: 1881546
agugcuaauuucccguaua

SEQ ID NO: 2053015 - RNA, 19 nt, Artificial Sequence
  Description of Artificial Sequence: Synthetic oligonucleotide
  Antisense strand to SEQ ID NO: 2053014
uauacgggaaauuagcacu

SEQ ID NO: 2053016 - RNA, 19 nt, Artificial Sequence
  Description of Artificial Sequence: Synthetic oligonucleotide
  Sense strand starting at position 240 of SEQ ID NO: 1881547
uuuggugauuuguuuccua

SEQ ID NO: 2053017 - RNA, 19 nt, Artificial Sequence
  Description of Artificial Sequence: Synthetic oligonucleotide
  Antisense strand to SEQ ID NO: 2053016
uaggaaacaaaucaccaaa

SEQ ID NO: 2053018 - RNA, 19 nt, Artificial Sequence
  Description of Artificial Sequence: Synthetic oligonucleotide
  Sense strand starting at position 244 of SEQ ID NO: 1881547
gugauuuguuuccuaaucu

SEQ ID NO: 2053019 - RNA, 19 nt, Artificial Sequence
  Description of Artificial Sequence: Synthetic oligonucleotide
  Antisense strand to SEQ ID NO: 2053018
agauuaggaaacaaaucac

SEQ ID NO: 2053020 - RNA, 19 nt, Artificial Sequence
  Description of Artificial Sequence: Synthetic oligonucleotide
  Sense strand starting at position 295 of SEQ ID NO: 1881547
cuuggugagaaaugucuca

SEQ ID NO: 2053021 - RNA, 19 nt, Artificial Sequence
  Description of Artificial Sequence: Synthetic oligonucleotide
  Antisense strand to SEQ ID NO: 2053020
ugagacauuucucaccaag

SEQ ID NO: 2053022 - RNA, 19 nt, Artificial Sequence
  Description of Artificial Sequence: Synthetic oligonucleotide
  Sense strand starting at position 342 of SEQ ID NO: 1881547
acucuagagccaugugaug

SEQ ID NO: 2053023 - RNA, 19 nt, Artificial Sequence
  Description of Artificial Sequence: Synthetic oligonucleotide
  Antisense strand to SEQ ID NO: 2053022
caucacauggcucuagagu

SEQ ID NO: 2053024 - RNA, 19 nt, Artificial Sequence
  Description of Artificial Sequence: Synthetic oligonucleotide
  Sense strand starting at position 983 of SEQ ID NO: 1881547
agugguuuccuauagcaga

SEQ ID NO: 2053025 - RNA, 19 nt, Artificial Sequence
  Description of Artificial Sequence: Synthetic oligonucleotide
  Antisense strand to SEQ ID NO: 2053024
ucugcuauaggaaaccacu

SEQ ID NO: 2053026 - RNA, 19 nt, Artificial Sequence
  Description of Artificial Sequence: Synthetic oligonucleotide
  Sense strand starting at position 1032 of SEQ ID NO: 1881547
ggccuaggcauuuguugaa

SEQ ID NO: 2053027 - RNA, 19 nt, Artificial Sequence
  Description of Artificial Sequence: Synthetic oligonucleotide
  Antisense strand to SEQ ID NO: 2053026
uucaacaaaugccuaggcc

SEQ ID NO: 2053028 - RNA, 19 nt, Artificial Sequence
  Description of Artificial Sequence: Synthetic oligonucleotide
  Sense strand starting at position 1049 of SEQ ID NO: 1881547
aauaguaaauggccagauu

SEQ ID NO: 2053029 - RNA, 19 nt, Artificial Sequence
  Description of Artificial Sequence: Synthetic oligonucleotide
  Antisense strand to SEQ ID NO: 2053028
aaucuggccauuuacuauu

SEQ ID NO: 2053030 - RNA, 19 nt, Artificial Sequence
  Description of Artificial Sequence: Synthetic oligonucleotide
  Sense strand starting at position 1081 of SEQ ID NO: 1881547
cugacaagugaguauuagu

SEQ ID NO: 2053031 - RNA, 19 nt, Artificial Sequence
  Description of Artificial Sequence: Synthetic oligonucleotide
  Antisense strand to SEQ ID NO: 2053030
acuaauacucacuugucag

SEQ ID NO: 2053032 - RNA, 19 nt, Artificial Sequence
  Description of Artificial Sequence: Synthetic oligonucleotide
  Sense strand starting at position 1086 of SEQ ID NO: 1881547
aagugaguauuagucacau

SEQ ID NO: 2053033 - RNA, 19 nt, Artificial Sequence
  Description of Artificial Sequence: Synthetic oligonucleotide
  Antisense strand to SEQ ID NO: 2053032
augugacuaauacucacuu

SEQ ID NO: 2053034 - RNA, 19 nt, Artificial Sequence
  Description of Artificial Sequence: Synthetic oligonucleotide
  Sense strand starting at position 1088 of SEQ ID NO: 1881547
gugaguauuagucacauaa

SEQ ID NO: 2053035 - RNA, 19 nt, Artificial Sequence
  Description of Artificial Sequence: Synthetic oligonucleotide
  Antisense strand to SEQ ID NO: 2053034
uuaugugacuaauacucac

SEQ ID NO: 2053036 - RNA, 19 nt, Artificial Sequence
  Description of Artificial Sequence: Synthetic oligonucleotide
  Sense strand starting at position 1098 of SEQ ID NO: 1881547
gucacauaauccucugagu

SEQ ID NO: 2053037 - RNA, 19 nt, Artificial Sequence
  Description of Artificial Sequence: Synthetic oligonucleotide
  Antisense strand to SEQ ID NO: 2053036
acucagaggauuaugugac

SEQ ID NO: 2053038 - RNA, 19 nt, Artificial Sequence
  Description of Artificial Sequence: Synthetic oligonucleotide
  Sense strand starting at position 1578 of SEQ ID NO: 1881547
gagguucucggugaacaua

SEQ ID NO: 2053039 - RNA, 19 nt, Artificial Sequence
  Description of Artificial Sequence: Synthetic oligonucleotide
  Antisense strand to SEQ ID NO: 2053038
uauguucaccgagaaccuc

SEQ ID NO: 2053040 - RNA, 19 nt, Artificial Sequence
  Description of Artificial Sequence: Synthetic oligonucleotide
  Sense strand starting at position 1581 of SEQ ID NO: 1881547
guucucggugaacauauau

SEQ ID NO: 2053041 - RNA, 19 nt, Artificial Sequence
  Description of Artificial Sequence: Synthetic oligonucleotide
  Antisense strand to SEQ ID NO: 2053040
auauauguucaccgagaac

SEQ ID NO: 2053042 - RNA, 19 nt, Artificial Sequence
  Description of Artificial Sequence: Synthetic oligonucleotide
  Sense strand starting at position 1627 of SEQ ID NO: 1881547
gaugcauagauaggucagu

SEQ ID NO: 2053043 - RNA, 19 nt, Artificial Sequence
  Description of Artificial Sequence: Synthetic oligonucleotide
  Antisense strand to SEQ ID NO: 2053042
acugaccuaucuaugcauc

SEQ ID NO: 2053044 - RNA, 19 nt, Artificial Sequence
  Description of Artificial Sequence: Synthetic oligonucleotide
  Sense strand starting at position 1735 of SEQ ID NO: 1881547
uguuuauuauucucaugga

SEQ ID NO: 2053045 - RNA, 19 nt, Artificial Sequence
  Description of Artificial Sequence: Synthetic oligonucleotide
  Antisense strand to SEQ ID NO: 2053044
uccaugagaauaauaaaca

SEQ ID NO: 2053046 - RNA, 19 nt, Artificial Sequence
  Description of Artificial Sequence: Synthetic oligonucleotide
  Sense strand starting at position 1775 of SEQ ID NO: 1881547
gggagauuauguucugcua

SEQ ID NO: 2053047 - RNA, 19 nt, Artificial Sequence
  Description of Artificial Sequence: Synthetic oligonucleotide
  Antisense strand to SEQ ID NO: 2053046
uagcagaacauaaucuccc

SEQ ID NO: 2053048 - RNA, 19 nt, Artificial Sequence
  Description of Artificial Sequence: Synthetic oligonucleotide
  Sense strand starting at position 1933 of SEQ ID NO: 1881547
acagucauccuggagcagu

SEQ ID NO: 2053049 - RNA, 19 nt, Artificial Sequence
  Description of Artificial Sequence: Synthetic oligonucleotide
  Antisense strand to SEQ ID NO: 2053048
acugcuccaggaugacugu

SEQ ID NO: 2053050 - RNA, 19 nt, Artificial Sequence
  Description of Artificial Sequence: Synthetic oligonucleotide
  Sense strand starting at position 2018 of SEQ ID NO: 1881547
aagggugcccauuaauuau

SEQ ID NO: 2053051 - RNA, 19 nt, Artificial Sequence
  Description of Artificial Sequence: Synthetic oligonucleotide
  Antisense strand to SEQ ID NO: 2053050
auaauuaaugggcacccuu

SEQ ID NO: 2053052 - RNA, 19 nt, Artificial Sequence
  Description of Artificial Sequence: Synthetic oligonucleotide
  Sense strand starting at position 2136 of SEQ ID NO: 1881547
agagcugguggugacaaau

SEQ ID NO: 2053053 - RNA, 19 nt, Artificial Sequence
  Description of Artificial Sequence: Synthetic oligonucleotide
  Antisense strand to SEQ ID NO: 2053052
auuugucaccaccagcucu

SEQ ID NO: 2053054 - RNA, 19 nt, Artificial Sequence
  Description of Artificial Sequence: Synthetic oligonucleotide
  Sense strand starting at position 2191 of SEQ ID NO: 1881547
aagguuguccuguagguga

SEQ ID NO: 2053055 - RNA, 19 nt, Artificial Sequence
  Description of Artificial Sequence: Synthetic oligonucleotide
  Antisense strand to SEQ ID NO: 2053054
ucaccuacaggacaaccuu

SEQ ID NO: 2053056 - RNA, 19 nt, Artificial Sequence
  Description of Artificial Sequence: Synthetic oligonucleotide
  Sense strand starting at position 2211 of SEQ ID NO: 1881547
ccaucuugucauuaauguc

SEQ ID NO: 2053057 - RNA, 19 nt, Artificial Sequence
  Description of Artificial Sequence: Synthetic oligonucleotide
  Antisense strand to SEQ ID NO: 2053056
gacauuaaugacaagaugg

SEQ ID NO: 2053058 - RNA, 19 nt, Artificial Sequence
  Description of Artificial Sequence: Synthetic oligonucleotide
  Sense strand starting at position 2232 of SEQ ID NO: 1881547
ugcugaaacucuguaagag

SEQ ID NO: 2053059 - RNA, 19 nt, Artificial Sequence
  Description of Artificial Sequence: Synthetic oligonucleotide
  Antisense strand to SEQ ID NO: 2053058
cucuuacagaguuucagca

SEQ ID NO: 2053060 - RNA, 19 nt, Artificial Sequence
  Description of Artificial Sequence: Synthetic oligonucleotide
  Sense strand starting at position 2575 of SEQ ID NO: 1881547
gaaccuccugaauggugaa

SEQ ID NO: 2053061 - RNA, 19 nt, Artificial Sequence
  Description of Artificial Sequence: Synthetic oligonucleotide
  Antisense strand to SEQ ID NO: 2053060
uucaccauucaggagguuc

SEQ ID NO: 2053062 - RNA, 19 nt, Artificial Sequence
  Description of Artificial Sequence: Synthetic oligonucleotide
  Sense strand starting at position 2682 of SEQ ID NO: 1881547
agcuuuaauguaugagaau

SEQ ID NO: 2053063 - RNA, 19 nt, Artificial Sequence
  Description of Artificial Sequence: Synthetic oligonucleotide
  Antisense strand to SEQ ID NO: 2053062
auucucauacauuaaagcu

SEQ ID NO: 2053064 - RNA, 19 nt, Artificial Sequence
  Description of Artificial Sequence: Synthetic oligonucleotide
  Sense strand starting at position 2758 of SEQ ID NO: 1881547
augugacagguauauuauu

SEQ ID NO: 2053065 - RNA, 19 nt, Artificial Sequence
  Description of Artificial Sequence: Synthetic oligonucleotide
  Antisense strand to SEQ ID NO: 2053064
aauaauauaccugucacau

SEQ ID NO: 2053066 - RNA, 19 nt, Artificial Sequence
  Description of Artificial Sequence: Synthetic oligonucleotide
  Sense strand starting at position 2767 of SEQ ID NO: 1881547
guauauuauuaggcacuua

SEQ ID NO: 2053067 - RNA, 19 nt, Artificial Sequence
  Description of Artificial Sequence: Synthetic oligonucleotide
  Antisense strand to SEQ ID NO: 2053066
uaagugccuaauaauauac

SEQ ID NO: 2053068 - RNA, 19 nt, Artificial Sequence
  Description of Artificial Sequence: Synthetic oligonucleotide
  Sense strand starting at position 2911 of SEQ ID NO: 1881547
uucaguguccuggaguaag

SEQ ID NO: 2053069 - RNA, 19 nt, Artificial Sequence
  Description of Artificial Sequence: Synthetic oligonucleotide
  Antisense strand to SEQ ID NO: 2053068
cuuacuccaggacacugaa

SEQ ID NO: 2053070 - RNA, 19 nt, Artificial Sequence
  Description of Artificial Sequence: Synthetic oligonucleotide
  Sense strand starting at position 3153 of SEQ ID NO: 1881547
auuggucuccaaugugaca

SEQ ID NO: 2053071 - RNA, 19 nt, Artificial Sequence
  Description of Artificial Sequence: Synthetic oligonucleotide
  Antisense strand to SEQ ID NO: 2053070
ugucacauuggagaccaau

SEQ ID NO: 2053072 - RNA, 19 nt, Artificial Sequence
  Description of Artificial Sequence: Synthetic oligonucleotide
  Sense strand starting at position 3188 of SEQ ID NO: 1881547
cagggauuaguuugacagu

SEQ ID NO: 2053073 - RNA, 19 nt, Artificial Sequence
  Description of Artificial Sequence: Synthetic oligonucleotide
  Antisense strand to SEQ ID NO: 2053072
acugucaaacuaaucccug

SEQ ID NO: 2053074 - RNA, 19 nt, Artificial Sequence
  Description of Artificial Sequence: Synthetic oligonucleotide
  Sense strand starting at position 3194 of SEQ ID NO: 1881547
uuaguuugacaguacauga

SEQ ID NO: 2053075 - RNA, 19 nt, Artificial Sequence
  Description of Artificial Sequence: Synthetic oligonucleotide
  Antisense strand to SEQ ID NO: 2053074
ucauguacugucaaacuaa

SEQ ID NO: 2053076 - RNA, 19 nt, Artificial Sequence
  Description of Artificial Sequence: Synthetic oligonucleotide
  Sense strand starting at position 3348 of SEQ ID NO: 1881547
agucaagcaucaucagaaa

SEQ ID NO: 2053077 - RNA, 19 nt, Artificial Sequence
  Description of Artificial Sequence: Synthetic oligonucleotide
  Antisense strand to SEQ ID NO: 2053076
uuucugaugaugcuugacu

SEQ ID NO: 2053078 - RNA, 19 nt, Artificial Sequence
  Description of Artificial Sequence: Synthetic oligonucleotide
  Sense strand starting at position 3375 of SEQ ID NO: 1881547
caauaagaaguugguauua

SEQ ID NO: 2053079 - RNA, 19 nt, Artificial Sequence
  Description of Artificial Sequence: Synthetic oligonucleotide
  Antisense strand to SEQ ID NO: 2053078
uaauaccaacuucuuauug

SEQ ID NO: 2053080 - RNA, 19 nt, Artificial Sequence
  Description of Artificial Sequence: Synthetic oligonucleotide
  Sense strand starting at position 3427 of SEQ ID NO: 1881547
uuuagauccugguuuacuu

SEQ ID NO: 2053081 - RNA, 19 nt, Artificial Sequence
  Description of Artificial Sequence: Synthetic oligonucleotide
  Antisense strand to SEQ ID NO: 2053080
aaguaaaccaggaucuaaa

SEQ ID NO: 2053082 - RNA, 19 nt, Artificial Sequence
  Description of Artificial Sequence: Synthetic oligonucleotide
  Sense strand starting at position 3451 of SEQ ID NO: 1881547
aaaugagguaguuggacua

SEQ ID NO: 2053083 - RNA, 19 nt, Artificial Sequence
  Description of Artificial Sequence: Synthetic oligonucleotide
  Antisense strand to SEQ ID NO: 2053082
uaguccaacuaccucauuu

SEQ ID NO: 2053084 - RNA, 19 nt, Artificial Sequence
  Description of Artificial Sequence: Synthetic oligonucleotide
  Sense strand starting at position 3573 of SEQ ID NO: 1881547
ccuuucugauagcugacaa

SEQ ID NO: 2053085 - RNA, 19 nt, Artificial Sequence
  Description of Artificial Sequence: Synthetic oligonucleotide
  Antisense strand to SEQ ID NO: 2053084
uugucagcuaucagaaagg

SEQ ID NO: 2053086 - RNA, 19 nt, Artificial Sequence
  Description of Artificial Sequence: Synthetic oligonucleotide
  Sense strand starting at position 3625 of SEQ ID NO: 1881547
augguaucuuuccugacac

SEQ ID NO: 2053087 - RNA, 19 nt, Artificial Sequence
  Description of Artificial Sequence: Synthetic oligonucleotide
  Antisense strand to SEQ ID NO: 2053086
gugucaggaaagauaccau

SEQ ID NO: 2053088 - RNA, 19 nt, Artificial Sequence
  Description of Artificial Sequence: Synthetic oligonucleotide
  Sense strand starting at position 3627 of SEQ ID NO: 1881547
gguaucuuuccugacacca

SEQ ID NO: 2053089 - RNA, 19 nt, Artificial Sequence
  Description of Artificial Sequence: Synthetic oligonucleotide
  Antisense strand to SEQ ID NO: 2053088
uggugucaggaaagauacc

SEQ ID NO: 2053090 - RNA, 19 nt, Artificial Sequence
  Description of Artificial Sequence: Synthetic oligonucleotide
  Sense strand starting at position 3713 of SEQ ID NO: 1881547
gaguuagugccagauccca

SEQ ID NO: 2053091 - RNA, 19 nt, Artificial Sequence
  Description of Artificial Sequence: Synthetic oligonucleotide
  Antisense strand to SEQ ID NO: 2053090
ugggaucuggcacuaacuc

SEQ ID NO: 2053092 - RNA, 19 nt, Artificial Sequence
  Description of Artificial Sequence: Synthetic oligonucleotide
  Sense strand starting at position 3785 of SEQ ID NO: 1881547
cugacugauuggccaugaa

SEQ ID NO: 2053093 - RNA, 19 nt, Artificial Sequence
  Description of Artificial Sequence: Synthetic oligonucleotide
  Antisense strand to SEQ ID NO: 2053092
uucauggccaaucagucag

SEQ ID NO: 2053094 - RNA, 19 nt, Artificial Sequence
  Description of Artificial Sequence: Synthetic oligonucleotide
  Sense strand starting at position 3788 of SEQ ID NO: 1881547
acugauuggccaugaauca

SEQ ID NO: 2053095 - RNA, 19 nt, Artificial Sequence
  Description of Artificial Sequence: Synthetic oligonucleotide
  Antisense strand to SEQ ID NO: 2053094
ugauucauggccaaucagu

SEQ ID NO: 2053096 - RNA, 19 nt, Artificial Sequence
  Description of Artificial Sequence: Synthetic oligonucleotide
  Sense strand starting at position 268 of SEQ ID NO: 1881548
auauuuaggugagaaguua

SEQ ID NO: 2053097 - RNA, 19 nt, Artificial Sequence
  Description of Artificial Sequence: Synthetic oligonucleotide
  Antisense strand to SEQ ID NO: 2053096
uaacuucucaccuaaauau

SEQ ID NO: 2053098 - RNA, 19 nt, Artificial Sequence
  Description of Artificial Sequence: Synthetic oligonucleotide
  Sense strand starting at position 279 of SEQ ID NO: 1881548
agaaguuaauuagcugagu

SEQ ID NO: 2053099 - RNA, 19 nt, Artificial Sequence
  Description of Artificial Sequence: Synthetic oligonucleotide
  Antisense strand to SEQ ID NO: 2053098
acucagcuaauuaacuucu

SEQ ID NO: 2053100 - RNA, 19 nt, Artificial Sequence
  Description of Artificial Sequence: Synthetic oligonucleotide
  Sense strand starting at position 317 of SEQ ID NO: 1881548
guguuuaugagauauguga

SEQ ID NO: 2053101 - RNA, 19 nt, Artificial Sequence
  Description of Artificial Sequence: Synthetic oligonucleotide
  Antisense strand to SEQ ID NO: 2053100
ucacauaucucauaaacac

SEQ ID NO: 2053102 - RNA, 19 nt, Artificial Sequence
  Description of Artificial Sequence: Synthetic oligonucleotide
  Sense strand starting at position 324 of SEQ ID NO: 1881548
ugagauaugugagucgaga

SEQ ID NO: 2053103 - RNA, 19 nt, Artificial Sequence
  Description of Artificial Sequence: Synthetic oligonucleotide
  Antisense strand to SEQ ID NO: 2053102
ucucgacucacauaucuca

SEQ ID NO: 2053104 - RNA, 19 nt, Artificial Sequence
  Description of Artificial Sequence: Synthetic oligonucleotide
  Sense strand starting at position 326 of SEQ ID NO: 1881548
agauaugugagucgagaua

SEQ ID NO: 2053105 - RNA, 19 nt, Artificial Sequence
  Description of Artificial Sequence: Synthetic oligonucleotide
  Antisense strand to SEQ ID NO: 2053104
uaucucgacucacauaucu

SEQ ID NO: 2053106 - RNA, 19 nt, Artificial Sequence
  Description of Artificial Sequence: Synthetic oligonucleotide
  Sense strand starting at position 335 of SEQ ID NO: 1881548
agucgagauauauggugaa

SEQ ID NO: 2053107 - RNA, 19 nt, Artificial Sequence
  Description of Artificial Sequence: Synthetic oligonucleotide
  Antisense strand to SEQ ID NO: 2053106
uucaccauauaucucgacu

SEQ ID NO: 2053108 - RNA, 19 nt, Artificial Sequence
  Description of Artificial Sequence: Synthetic oligonucleotide
  Sense strand starting at position 372 of SEQ ID NO: 1881548
cuguacauugcugagaaua

SEQ ID NO: 2053109 - RNA, 19 nt, Artificial Sequence
  Description of Artificial Sequence: Synthetic oligonucleotide
  Antisense strand to SEQ ID NO: 2053108
uauucucagcaauguacag

SEQ ID NO: 2053110 - RNA, 19 nt, Artificial Sequence
  Description of Artificial Sequence: Synthetic oligonucleotide
  Sense strand starting at position 470 of SEQ ID NO: 1881548
ggguguaagagcuaguaug

SEQ ID NO: 2053111 - RNA, 19 nt, Artificial Sequence
  Description of Artificial Sequence: Synthetic oligonucleotide
  Antisense strand to SEQ ID NO: 2053110
cauacuagcucuuacaccc

SEQ ID NO: 2053112 - RNA, 19 nt, Artificial Sequence
  Description of Artificial Sequence: Synthetic oligonucleotide
  Sense strand starting at position 488 of SEQ ID NO: 1881548
ggcugaugacuuggugaug

SEQ ID NO: 2053113 - RNA, 19 nt, Artificial Sequence
  Description of Artificial Sequence: Synthetic oligonucleotide
  Antisense strand to SEQ ID NO: 2053112
caucaccaagucaucagcc

SEQ ID NO: 2053114 - RNA, 19 nt, Artificial Sequence
  Description of Artificial Sequence: Synthetic oligonucleotide
  Sense strand starting at position 489 of SEQ ID NO: 1881548
gcugaugacuuggugauga

SEQ ID NO: 2053115 - RNA, 19 nt, Artificial Sequence
  Description of Artificial Sequence: Synthetic oligonucleotide
  Antisense strand to SEQ ID NO: 2053114
ucaucaccaagucaucagc

SEQ ID NO: 2053116 - RNA, 19 nt, Artificial Sequence
  Description of Artificial Sequence: Synthetic oligonucleotide
  Sense strand starting at position 508 of SEQ ID NO: 1881548
uggagcaugcugggauaau

SEQ ID NO: 2053117 - RNA, 19 nt, Artificial Sequence
  Description of Artificial Sequence: Synthetic oligonucleotide
  Antisense strand to SEQ ID NO: 2053116
auuaucccagcaugcucca

SEQ ID NO: 2053118 - RNA, 19 nt, Artificial Sequence
  Description of Artificial Sequence: Synthetic oligonucleotide
  Sense strand starting at position 899 of SEQ ID NO: 1881548
gccuuauugauagggauga

SEQ ID NO: 2053119 - RNA, 19 nt, Artificial Sequence
  Description of Artificial Sequence: Synthetic oligonucleotide
  Antisense strand to SEQ ID NO: 2053118
ucaucccuaucaauaaggc

SEQ ID NO: 2053120 - RNA, 19 nt, Artificial Sequence
  Description of Artificial Sequence: Synthetic oligonucleotide
  Sense strand starting at position 903 of SEQ ID NO: 1881548
uauugauagggaugaugca

SEQ ID NO: 2053121 - RNA, 19 nt, Artificial Sequence
  Description of Artificial Sequence: Synthetic oligonucleotide
  Antisense strand to SEQ ID NO: 2053120
ugcaucaucccuaucaaua

SEQ ID NO: 2053122 - RNA, 19 nt, Artificial Sequence
  Description of Artificial Sequence: Synthetic oligonucleotide
  Sense strand starting at position 932 of SEQ ID NO: 1881548
ucaaaugaugcucaugcaa

SEQ ID NO: 2053123 - RNA, 19 nt, Artificial Sequence
  Description of Artificial Sequence: Synthetic oligonucleotide
  Antisense strand to SEQ ID NO: 2053122
uugcaugagcaucauuuga

SEQ ID NO: 2053124 - RNA, 19 nt, Artificial Sequence
  Description of Artificial Sequence: Synthetic oligonucleotide
  Sense strand starting at position 1558 of SEQ ID NO: 1881548
uagggauauuuaggugaga

SEQ ID NO: 2053125 - RNA, 19 nt, Artificial Sequence
  Description of Artificial Sequence: Synthetic oligonucleotide
  Antisense strand to SEQ ID NO: 2053124
ucucaccuaaauaucccua

SEQ ID NO: 2053126 - RNA, 19 nt, Artificial Sequence
  Description of Artificial Sequence: Synthetic oligonucleotide
  Sense strand starting at position 1603 of SEQ ID NO: 1881548
gggucuuggaaauguaauu

SEQ ID NO: 2053127 - RNA, 19 nt, Artificial Sequence
  Description of Artificial Sequence: Synthetic oligonucleotide
  Antisense strand to SEQ ID NO: 2053126
aauuacauuuccaagaccc

SEQ ID NO: 2053128 - RNA, 19 nt, Artificial Sequence
  Description of Artificial Sequence: Synthetic oligonucleotide
  Sense strand starting at position 1659 of SEQ ID NO: 1881548
cagaguagaguuuagguga

SEQ ID NO: 2053129 - RNA, 19 nt, Artificial Sequence
  Description of Artificial Sequence: Synthetic oligonucleotide
  Antisense strand to SEQ ID NO: 2053128
ucaccuaaacucuacucug

SEQ ID NO: 2053130 - RNA, 19 nt, Artificial Sequence
  Description of Artificial Sequence: Synthetic oligonucleotide
  Sense strand starting at position 1664 of SEQ ID NO: 1881548
uagaguuuaggugagucaa

SEQ ID NO: 2053131 - RNA, 19 nt, Artificial Sequence
  Description of Artificial Sequence: Synthetic oligonucleotide
  Antisense strand to SEQ ID NO: 2053130
uugacucaccuaaacucua

SEQ ID NO: 2053132 - RNA, 19 nt, Artificial Sequence
  Description of Artificial Sequence: Synthetic oligonucleotide
  Sense strand starting at position 1666 of SEQ ID NO: 1881548
gaguuuaggugagucaauu

SEQ ID NO: 2053133 - RNA, 19 nt, Artificial Sequence
  Description of Artificial Sequence: Synthetic oligonucleotide
  Antisense strand to SEQ ID NO: 2053132
aauugacucaccuaaacuc

SEQ ID NO: 2053134 - RNA, 19 nt, Artificial Sequence
  Description of Artificial Sequence: Synthetic oligonucleotide
  Sense strand starting at position 1838 of SEQ ID NO: 1881548
agaaguuacuaagccuuua

SEQ ID NO: 2053135 - RNA, 19 nt, Artificial Sequence
  Description of Artificial Sequence: Synthetic oligonucleotide
  Antisense strand to SEQ ID NO: 2053134
uaaaggcuuaguaacuucu

SEQ ID NO: 2053136 - RNA, 19 nt, Artificial Sequence
  Description of Artificial Sequence: Synthetic oligonucleotide
  Sense strand starting at position 2032 of SEQ ID NO: 1881548
aaagccuggucuuuaggaa

SEQ ID NO: 2053137 - RNA, 19 nt, Artificial Sequence
  Description of Artificial Sequence: Synthetic oligonucleotide
  Antisense strand to SEQ ID NO: 2053136
uuccuaaagaccaggcuuu

SEQ ID NO: 2053138 - RNA, 19 nt, Artificial Sequence
  Description of Artificial Sequence: Synthetic oligonucleotide
  Sense strand starting at position 2119 of SEQ ID NO: 1881548
gguggccagagcuguauuu

SEQ ID NO: 2053139 - RNA, 19 nt, Artificial Sequence
  Description of Artificial Sequence: Synthetic oligonucleotide
  Antisense strand to SEQ ID NO: 2053138
aaauacagcucuggccacc

SEQ ID NO: 2053140 - RNA, 19 nt, Artificial Sequence
  Description of Artificial Sequence: Synthetic oligonucleotide
  Sense strand starting at position 2432 of SEQ ID NO: 1881548
acaggauaacuguguugua

SEQ ID NO: 2053141 - RNA, 19 nt, Artificial Sequence
  Description of Artificial Sequence: Synthetic oligonucleotide
  Antisense strand to SEQ ID NO: 2053140
uacaacacaguuauccugu

SEQ ID NO: 2053142 - RNA, 19 nt, Artificial Sequence
  Description of Artificial Sequence: Synthetic oligonucleotide
  Sense strand starting at position 2853 of SEQ ID NO: 1881548
auaauaugagugggcuuau

SEQ ID NO: 2053143 - RNA, 19 nt, Artificial Sequence
  Description of Artificial Sequence: Synthetic oligonucleotide
  Antisense strand to SEQ ID NO: 2053142
auaagcccacucauauuau

SEQ ID NO: 2053144 - RNA, 19 nt, Artificial Sequence
  Description of Artificial Sequence: Synthetic oligonucleotide
  Sense strand starting at position 2854 of SEQ ID NO: 1881548
uaauaugagugggcuuauc

SEQ ID NO: 2053145 - RNA, 19 nt, Artificial Sequence
  Description of Artificial Sequence: Synthetic oligonucleotide
  Antisense strand to SEQ ID NO: 2053144
gauaagcccacucauauua

SEQ ID NO: 2053146 - RNA, 19 nt, Artificial Sequence
  Description of Artificial Sequence: Synthetic oligonucleotide
  Sense strand starting at position 2865 of SEQ ID NO: 1881548
ggcuuaucccaucaguuga

SEQ ID NO: 2053147 - RNA, 19 nt, Artificial Sequence
  Description of Artificial Sequence: Synthetic oligonucleotide
  Antisense strand to SEQ ID NO: 2053146
ucaacugaugggauaagcc

SEQ ID NO: 2053148 - RNA, 19 nt, Artificial Sequence
  Description of Artificial Sequence: Synthetic oligonucleotide
  Sense strand starting at position 3036 of SEQ ID NO: 1881548
gugugucaauuuguuaaac

SEQ ID NO: 2053149 - RNA, 19 nt, Artificial Sequence
  Description of Artificial Sequence: Synthetic oligonucleotide
  Antisense strand to SEQ ID NO: 2053148
guuuaacaaauugacacac

SEQ ID NO: 2053150 - RNA, 19 nt, Artificial Sequence
  Description of Artificial Sequence: Synthetic oligonucleotide
  Sense strand starting at position 3037 of SEQ ID NO: 1881548
ugugucaauuuguuaaacu

SEQ ID NO: 2053151 - RNA, 19 nt, Artificial Sequence
  Description of Artificial Sequence: Synthetic oligonucleotide
  Antisense strand to SEQ ID NO: 2053150
aguuuaacaaauugacaca

SEQ ID NO: 2053152 - RNA, 19 nt, Artificial Sequence
  Description of Artificial Sequence: Synthetic oligonucleotide
  Sense strand starting at position 3114 of SEQ ID NO: 1881548
ugacuaacauaguuguaua

SEQ ID NO: 2053153 - RNA, 19 nt, Artificial Sequence
  Description of Artificial Sequence: Synthetic oligonucleotide
  Antisense strand to SEQ ID NO: 2053152
uauacaacuauguuaguca

SEQ ID NO: 2053154 - RNA, 19 nt, Artificial Sequence
  Description of Artificial Sequence: Synthetic oligonucleotide
  Sense strand starting at position 3399 of SEQ ID NO: 1881548
ugguauguucuauaucuga

SEQ ID NO: 2053155 - RNA, 19 nt, Artificial Sequence
  Description of Artificial Sequence: Synthetic oligonucleotide
  Antisense strand to SEQ ID NO: 2053154
ucagauauagaacauacca

SEQ ID NO: 2053156 - RNA, 19 nt, Artificial Sequence
  Description of Artificial Sequence: Synthetic oligonucleotide
  Sense strand starting at position 3588 of SEQ ID NO: 1881548
gcagcauggcuagaagaau

SEQ ID NO: 2053157 - RNA, 19 nt, Artificial Sequence
  Description of Artificial Sequence: Synthetic oligonucleotide
  Antisense strand to SEQ ID NO: 2053156
auucuucuagccaugcugc

SEQ ID NO: 2053158 - RNA, 19 nt, Artificial Sequence
  Description of Artificial Sequence: Synthetic oligonucleotide
  Sense strand starting at position 3594 of SEQ ID NO: 1881548
uggcuagaagaauguguaa

SEQ ID NO: 2053159 - RNA, 19 nt, Artificial Sequence
  Description of Artificial Sequence: Synthetic oligonucleotide
  Antisense strand to SEQ ID NO: 2053158
uuacacauucuucuagcca

SEQ ID NO: 2053160 - RNA, 19 nt, Artificial Sequence
  Description of Artificial Sequence: Synthetic oligonucleotide
  Sense strand starting at position 3596 of SEQ ID NO: 1881548
gcuagaagaauguguaacu

SEQ ID NO: 2053161 - RNA, 19 nt, Artificial Sequence
  Description of Artificial Sequence: Synthetic oligonucleotide
  Antisense strand to SEQ ID NO: 2053160
aguuacacauucuucuagc

SEQ ID NO: 2053162 - RNA, 19 nt, Artificial Sequence
  Description of Artificial Sequence: Synthetic oligonucleotide
  Sense strand starting at position 3597 of SEQ ID NO: 1881548
cuagaagaauguguaacua

SEQ ID NO: 2053163 - RNA, 19 nt, Artificial Sequence
  Description of Artificial Sequence: Synthetic oligonucleotide
  Antisense strand to SEQ ID NO: 2053162
uaguuacacauucuucuag

SEQ ID NO: 2053164 - RNA, 19 nt, Artificial Sequence
  Description of Artificial Sequence: Synthetic oligonucleotide
  Sense strand starting at position 3695 of SEQ ID NO: 1881548
uauucucugccagggaaga

SEQ ID NO: 2053165 - RNA, 19 nt, Artificial Sequence
  Description of Artificial Sequence: Synthetic oligonucleotide
  Antisense strand to SEQ ID NO: 2053164
ucuucccuggcagagaaua

SEQ ID NO: 2053166 - RNA, 19 nt, Artificial Sequence
  Description of Artificial Sequence: Synthetic oligonucleotide
  Sense strand starting at position 3696 of SEQ ID NO: 1881548
auucucugccagggaagaa

SEQ ID NO: 2053167 - RNA, 19 nt, Artificial Sequence
  Description of Artificial Sequence: Synthetic oligonucleotide
  Antisense strand to SEQ ID NO: 2053166
uucuucccuggcagagaau

SEQ ID NO: 2053168 - RNA, 19 nt, Artificial Sequence
  Description of Artificial Sequence: Synthetic oligonucleotide
  Sense strand starting at position 3706 of SEQ ID NO: 1881548
agggaagaaucucaauuuc

SEQ ID NO: 2053169 - RNA, 19 nt, Artificial Sequence
  Description of Artificial Sequence: Synthetic oligonucleotide
  Antisense strand to SEQ ID NO: 2053168
gaaauugagauucuucccu

SEQ ID NO: 2053170 - RNA, 19 nt, Artificial Sequence
  Description of Artificial Sequence: Synthetic oligonucleotide
  Sense strand starting at position 3876 of SEQ ID NO: 1881548
accuucuuguuauuggaga

SEQ ID NO: 2053171 - RNA, 19 nt, Artificial Sequence
  Description of Artificial Sequence: Synthetic oligonucleotide
  Antisense strand to SEQ ID NO: 2053170
ucuccaauaacaagaaggu

SEQ ID NO: 2053172 - RNA, 19 nt, Artificial Sequence
  Description of Artificial Sequence: Synthetic oligonucleotide
  Sense strand starting at position 3924 of SEQ ID NO: 1881548
gcaucagagugauuggacu

SEQ ID NO: 2053173 - RNA, 19 nt, Artificial Sequence
  Description of Artificial Sequence: Synthetic oligonucleotide
  Antisense strand to SEQ ID NO: 2053172
aguccaaucacucugaugc

SEQ ID NO: 2053174 - RNA, 19 nt, Artificial Sequence
  Description of Artificial Sequence: Synthetic oligonucleotide
  Sense strand starting at position 3930 of SEQ ID NO: 1881548
gagugauuggacuguacca

SEQ ID NO: 2053175 - RNA, 19 nt, Artificial Sequence
  Description of Artificial Sequence: Synthetic oligonucleotide
  Antisense strand to SEQ ID NO: 2053174
ugguacaguccaaucacuc

SEQ ID NO: 2053176 - RNA, 19 nt, Artificial Sequence
  Description of Artificial Sequence: Synthetic oligonucleotide
  Sense strand starting at position 97 of SEQ ID NO: 1881549
agugccucaagguaaagau

SEQ ID NO: 2053177 - RNA, 19 nt, Artificial Sequence
  Description of Artificial Sequence: Synthetic oligonucleotide
  Antisense strand to SEQ ID NO: 2053176
aucuuuaccuugaggcacu

SEQ ID NO: 2053178 - RNA, 19 nt, Artificial Sequence
  Description of Artificial Sequence: Synthetic oligonucleotide
  Sense strand starting at position 107 of SEQ ID NO: 1881549
gguaaagaugauuguuaca

SEQ ID NO: 2053179 - RNA, 19 nt, Artificial Sequence
  Description of Artificial Sequence: Synthetic oligonucleotide
  Antisense strand to SEQ ID NO: 2053178
uguaacaaucaucuuuacc

SEQ ID NO: 2053180 - RNA, 19 nt, Artificial Sequence
  Description of Artificial Sequence: Synthetic oligonucleotide
  Sense strand starting at position 439 of SEQ ID NO: 1881549
acaugacuaaaggguguua

SEQ ID NO: 2053181 - RNA, 19 nt, Artificial Sequence
  Description of Artificial Sequence: Synthetic oligonucleotide
  Antisense strand to SEQ ID NO: 2053180
uaacacccuuuagucaugu

SEQ ID NO: 2053182 - RNA, 19 nt, Artificial Sequence
  Description of Artificial Sequence: Synthetic oligonucleotide
  Sense strand starting at position 441 of SEQ ID NO: 1881549
augacuaaaggguguuaaa

SEQ ID NO: 2053183 - RNA, 19 nt, Artificial Sequence
  Description of Artificial Sequence: Synthetic oligonucleotide
  Antisense strand to SEQ ID NO: 2053182
uuuaacacccuuuagucau

SEQ ID NO: 2053184 - RNA, 19 nt, Artificial Sequence
  Description of Artificial Sequence: Synthetic oligonucleotide
  Sense strand starting at position 625 of SEQ ID NO: 1881549
aaagcauguucuguacaga

SEQ ID NO: 2053185 - RNA, 19 nt, Artificial Sequence
  Description of Artificial Sequence: Synthetic oligonucleotide
  Antisense strand to SEQ ID NO: 2053184
ucuguacagaacaugcuuu

SEQ ID NO: 2053186 - RNA, 19 nt, Artificial Sequence
  Description of Artificial Sequence: Synthetic oligonucleotide
  Sense strand starting at position 656 of SEQ ID NO: 1881549
uuuagaguacuguacaucu

SEQ ID NO: 2053187 - RNA, 19 nt, Artificial Sequence
  Description of Artificial Sequence: Synthetic oligonucleotide
  Antisense strand to SEQ ID NO: 2053186
agauguacaguacucuaaa

SEQ ID NO: 2053188 - RNA, 19 nt, Artificial Sequence
  Description of Artificial Sequence: Synthetic oligonucleotide
  Sense strand starting at position 815 of SEQ ID NO: 1881549
agaugaaauauaggcgauu

SEQ ID NO: 2053189 - RNA, 19 nt, Artificial Sequence
  Description of Artificial Sequence: Synthetic oligonucleotide
  Antisense strand to SEQ ID NO: 2053188
aaucgccuauauuucaucu

SEQ ID NO: 2053190 - RNA, 19 nt, Artificial Sequence
  Description of Artificial Sequence: Synthetic oligonucleotide
  Sense strand starting at position 816 of SEQ ID NO: 1881549
gaugaaauauaggcgauua

SEQ ID NO: 2053191 - RNA, 19 nt, Artificial Sequence
  Description of Artificial Sequence: Synthetic oligonucleotide
  Antisense strand to SEQ ID NO: 2053190
uaaucgccuauauuucauc

SEQ ID NO: 2053192 - RNA, 19 nt, Artificial Sequence
  Description of Artificial Sequence: Synthetic oligonucleotide
  Sense strand starting at position 828 of SEQ ID NO: 1881549
gcgauuaaaucacugaagu

SEQ ID NO: 2053193 - RNA, 19 nt, Artificial Sequence
  Description of Artificial Sequence: Synthetic oligonucleotide
  Antisense strand to SEQ ID NO: 2053192
acuucagugauuuaaucgc

SEQ ID NO: 2053194 - RNA, 19 nt, Artificial Sequence
  Description of Artificial Sequence: Synthetic oligonucleotide
  Sense strand starting at position 829 of SEQ ID NO: 1881549
cgauuaaaucacugaagua

SEQ ID NO: 2053195 - RNA, 19 nt, Artificial Sequence
  Description of Artificial Sequence: Synthetic oligonucleotide
  Antisense strand to SEQ ID NO: 2053194
uacuucagugauuuaaucg

SEQ ID NO: 2053196 - RNA, 19 nt, Artificial Sequence
  Description of Artificial Sequence: Synthetic oligonucleotide
  Sense strand starting at position 1119 of SEQ ID NO: 1881549
gagucaauguuucucagac

SEQ ID NO: 2053197 - RNA, 19 nt, Artificial Sequence
  Description of Artificial Sequence: Synthetic oligonucleotide
  Antisense strand to SEQ ID NO: 2053196
gucugagaaacauugacuc

SEQ ID NO: 2053198 - RNA, 19 nt, Artificial Sequence
  Description of Artificial Sequence: Synthetic oligonucleotide
  Sense strand starting at position 1120 of SEQ ID NO: 1881549
agucaauguuucucagaca

SEQ ID NO: 2053199 - RNA, 19 nt, Artificial Sequence
  Description of Artificial Sequence: Synthetic oligonucleotide
  Antisense strand to SEQ ID NO: 2053198
ugucugagaaacauugacu

SEQ ID NO: 2053200 - RNA, 19 nt, Artificial Sequence
  Description of Artificial Sequence: Synthetic oligonucleotide
  Sense strand starting at position 1410 of SEQ ID NO: 1881549
agucuaaguauaggaugaa

SEQ ID NO: 2053201 - RNA, 19 nt, Artificial Sequence
  Description of Artificial Sequence: Synthetic oligonucleotide
  Antisense strand to SEQ ID NO: 2053200
uucauccuauacuuagacu

SEQ ID NO: 2053202 - RNA, 19 nt, Artificial Sequence
  Description of Artificial Sequence: Synthetic oligonucleotide
  Sense strand starting at position 1457 of SEQ ID NO: 1881549
ucaucuugagauuguugaa

SEQ ID NO: 2053203 - RNA, 19 nt, Artificial Sequence
  Description of Artificial Sequence: Synthetic oligonucleotide
  Antisense strand to SEQ ID NO: 2053202
uucaacaaucucaagauga

SEQ ID NO: 2053204 - RNA, 19 nt, Artificial Sequence
  Description of Artificial Sequence: Synthetic oligonucleotide
  Sense strand starting at position 1692 of SEQ ID NO: 1881549
caggaucuuuaagcaguaa

SEQ ID NO: 2053205 - RNA, 19 nt, Artificial Sequence
  Description of Artificial Sequence: Synthetic oligonucleotide
  Antisense strand to SEQ ID NO: 2053204
uuacugcuuaaagauccug

SEQ ID NO: 2053206 - RNA, 19 nt, Artificial Sequence
  Description of Artificial Sequence: Synthetic oligonucleotide
  Sense strand starting at position 1734 of SEQ ID NO: 1881549
ugugaauugauugggcuua

SEQ ID NO: 2053207 - RNA, 19 nt, Artificial Sequence
  Description of Artificial Sequence: Synthetic oligonucleotide
  Antisense strand to SEQ ID NO: 2053206
uaagcccaaucaauucaca

SEQ ID NO: 2053208 - RNA, 19 nt, Artificial Sequence
  Description of Artificial Sequence: Synthetic oligonucleotide
  Sense strand starting at position 1756 of SEQ ID NO: 1881549
gggcaauucucacuugaga

SEQ ID NO: 2053209 - RNA, 19 nt, Artificial Sequence
  Description of Artificial Sequence: Synthetic oligonucleotide
  Antisense strand to SEQ ID NO: 2053208
ucucaagugagaauugccc

SEQ ID NO: 2053210 - RNA, 19 nt, Artificial Sequence
  Description of Artificial Sequence: Synthetic oligonucleotide
  Sense strand starting at position 1806 of SEQ ID NO: 1881549
ggagcuacacacugucaaa

SEQ ID NO: 2053211 - RNA, 19 nt, Artificial Sequence
  Description of Artificial Sequence: Synthetic oligonucleotide
  Antisense strand to SEQ ID NO: 2053210
uuugacaguguguagcucc

SEQ ID NO: 2053212 - RNA, 19 nt, Artificial Sequence
  Description of Artificial Sequence: Synthetic oligonucleotide
  Sense strand starting at position 1848 of SEQ ID NO: 1881549
uuccaagguugcucauuua

SEQ ID NO: 2053213 - RNA, 19 nt, Artificial Sequence
  Description of Artificial Sequence: Synthetic oligonucleotide
  Antisense strand to SEQ ID NO: 2053212
uaaaugagcaaccuuggaa

SEQ ID NO: 2053214 - RNA, 19 nt, Artificial Sequence
  Description of Artificial Sequence: Synthetic oligonucleotide
  Sense strand starting at position 1976 of SEQ ID NO: 1881549
guuuccugagagggagaau

SEQ ID NO: 2053215 - RNA, 19 nt, Artificial Sequence
  Description of Artificial Sequence: Synthetic oligonucleotide
  Antisense strand to SEQ ID NO: 2053214
auucucccucucaggaaac

SEQ ID NO: 2053216 - RNA, 19 nt, Artificial Sequence
  Description of Artificial Sequence: Synthetic oligonucleotide
  Sense strand starting at position 2014 of SEQ ID NO: 1881549
agaggcucaaucugaaguu

SEQ ID NO: 2053217 - RNA, 19 nt, Artificial Sequence
  Description of Artificial Sequence: Synthetic oligonucleotide
  Antisense strand to SEQ ID NO: 2053216
aacuucagauugagccucu

SEQ ID NO: 2053218 - RNA, 19 nt, Artificial Sequence
  Description of Artificial Sequence: Synthetic oligonucleotide
  Sense strand starting at position 2049 of SEQ ID NO: 1881549
uggucauuaugaccauagu

SEQ ID NO: 2053219 - RNA, 19 nt, Artificial Sequence
  Description of Artificial Sequence: Synthetic oligonucleotide
  Antisense strand to SEQ ID NO: 2053218
acuauggucauaaugacca

SEQ ID NO: 2053220 - RNA, 19 nt, Artificial Sequence
  Description of Artificial Sequence: Synthetic oligonucleotide
  Sense strand starting at position 2098 of SEQ ID NO: 1881549
gugagucacaauuaguuua

SEQ ID NO: 2053221 - RNA, 19 nt, Artificial Sequence
  Description of Artificial Sequence: Synthetic oligonucleotide
  Antisense strand to SEQ ID NO: 2053220
uaaacuaauugugacucac

SEQ ID NO: 2053222 - RNA, 19 nt, Artificial Sequence
  Description of Artificial Sequence: Synthetic oligonucleotide
  Sense strand starting at position 2179 of SEQ ID NO: 1881549
aucuuuggagucuagcuaa

SEQ ID NO: 2053223 - RNA, 19 nt, Artificial Sequence
  Description of Artificial Sequence: Synthetic oligonucleotide
  Antisense strand to SEQ ID NO: 2053222
uuagcuagacuccaaagau

SEQ ID NO: 2053224 - RNA, 19 nt, Artificial Sequence
  Description of Artificial Sequence: Synthetic oligonucleotide
  Sense strand starting at position 2206 of SEQ ID NO: 1881549
cuugguauguaaucuaauu

SEQ ID NO: 2053225 - RNA, 19 nt, Artificial Sequence
  Description of Artificial Sequence: Synthetic oligonucleotide
  Antisense strand to SEQ ID NO: 2053224
aauuagauuacauaccaag

SEQ ID NO: 2053226 - RNA, 19 nt, Artificial Sequence
  Description of Artificial Sequence: Synthetic oligonucleotide
  Sense strand starting at position 2309 of SEQ ID NO: 1881549
caagaauagugagcucuuu

SEQ ID NO: 2053227 - RNA, 19 nt, Artificial Sequence
  Description of Artificial Sequence: Synthetic oligonucleotide
  Antisense strand to SEQ ID NO: 2053226
aaagagcucacuauucuug

SEQ ID NO: 2053228 - RNA, 19 nt, Artificial Sequence
  Description of Artificial Sequence: Synthetic oligonucleotide
  Sense strand starting at position 2461 of SEQ ID NO: 1881549
ggauucuccuugucuacca

SEQ ID NO: 2053229 - RNA, 19 nt, Artificial Sequence
  Description of Artificial Sequence: Synthetic oligonucleotide
  Antisense strand to SEQ ID NO: 2053228
ugguagacaaggagaaucc

SEQ ID NO: 2053230 - RNA, 19 nt, Artificial Sequence
  Description of Artificial Sequence: Synthetic oligonucleotide
  Sense strand starting at position 2704 of SEQ ID NO: 1881549
cagccugauugaucaguga

SEQ ID NO: 2053231 - RNA, 19 nt, Artificial Sequence
  Description of Artificial Sequence: Synthetic oligonucleotide
  Antisense strand to SEQ ID NO: 2053230
ucacugaucaaucaggcug

SEQ ID NO: 2053232 - RNA, 19 nt, Artificial Sequence
  Description of Artificial Sequence: Synthetic oligonucleotide
  Sense strand starting at position 2707 of SEQ ID NO: 1881549
ccugauugaucagugaaac

SEQ ID NO: 2053233 - RNA, 19 nt, Artificial Sequence
  Description of Artificial Sequence: Synthetic oligonucleotide
  Antisense strand to SEQ ID NO: 2053232
guuucacugaucaaucagg

SEQ ID NO: 2053234 - RNA, 19 nt, Artificial Sequence
  Description of Artificial Sequence: Synthetic oligonucleotide
  Sense strand starting at position 2708 of SEQ ID NO: 1881549
cugauugaucagugaaaca

SEQ ID NO: 2053235 - RNA, 19 nt, Artificial Sequence
  Description of Artificial Sequence: Synthetic oligonucleotide
  Antisense strand to SEQ ID NO: 2053234
uguuucacugaucaaucag

SEQ ID NO: 2053236 - RNA, 19 nt, Artificial Sequence
  Description of Artificial Sequence: Synthetic oligonucleotide
  Sense strand starting at position 2939 of SEQ ID NO: 1881549
ugagcuacuguguaccaau

SEQ ID NO: 2053237 - RNA, 19 nt, Artificial Sequence
  Description of Artificial Sequence: Synthetic oligonucleotide
  Antisense strand to SEQ ID NO: 2053236
auugguacacaguagcuca

SEQ ID NO: 2053238 - RNA, 19 nt, Artificial Sequence
  Description of Artificial Sequence: Synthetic oligonucleotide
  Sense strand starting at position 2975 of SEQ ID NO: 1881549
auguguccugucuaaucaa

SEQ ID NO: 2053239 - RNA, 19 nt, Artificial Sequence
  Description of Artificial Sequence: Synthetic oligonucleotide
  Antisense strand to SEQ ID NO: 2053238
uugauuagacaggacacau

SEQ ID NO: 2053240 - RNA, 19 nt, Artificial Sequence
  Description of Artificial Sequence: Synthetic oligonucleotide
  Sense strand starting at position 3000 of SEQ ID NO: 1881549
acaacaaaucagugaagca

SEQ ID NO: 2053241 - RNA, 19 nt, Artificial Sequence
  Description of Artificial Sequence: Synthetic oligonucleotide
  Antisense strand to SEQ ID NO: 2053240
ugcuucacugauuuguugu

SEQ ID NO: 2053242 - RNA, 19 nt, Artificial Sequence
  Description of Artificial Sequence: Synthetic oligonucleotide
  Sense strand starting at position 3414 of SEQ ID NO: 1881549
ucacauugggcuuaucaua

SEQ ID NO: 2053243 - RNA, 19 nt, Artificial Sequence
  Description of Artificial Sequence: Synthetic oligonucleotide
  Antisense strand to SEQ ID NO: 2053242
uaugauaagcccaauguga

SEQ ID NO: 2053244 - RNA, 19 nt, Artificial Sequence
  Description of Artificial Sequence: Synthetic oligonucleotide
  Sense strand starting at position 3443 of SEQ ID NO: 1881549
uccaguggugucuacauga

SEQ ID NO: 2053245 - RNA, 19 nt, Artificial Sequence
  Description of Artificial Sequence: Synthetic oligonucleotide
  Antisense strand to SEQ ID NO: 2053244
ucauguagacaccacugga

SEQ ID NO: 2053246 - RNA, 19 nt, Artificial Sequence
  Description of Artificial Sequence: Synthetic oligonucleotide
  Sense strand starting at position 3448 of SEQ ID NO: 1881549
uggugucuacaugaauaca

SEQ ID NO: 2053247 - RNA, 19 nt, Artificial Sequence
  Description of Artificial Sequence: Synthetic oligonucleotide
  Antisense strand to SEQ ID NO: 2053246
uguauucauguagacacca

SEQ ID NO: 2053248 - RNA, 19 nt, Artificial Sequence
  Description of Artificial Sequence: Synthetic oligonucleotide
  Sense strand starting at position 3495 of SEQ ID NO: 1881549
ugagcuuugacucaguuga

SEQ ID NO: 2053249 - RNA, 19 nt, Artificial Sequence
  Description of Artificial Sequence: Synthetic oligonucleotide
  Antisense strand to SEQ ID NO: 2053248
ucaacugagucaaagcuca

SEQ ID NO: 2053250 - RNA, 19 nt, Artificial Sequence
  Description of Artificial Sequence: Synthetic oligonucleotide
  Sense strand starting at position 3869 of SEQ ID NO: 1881549
cugauuucuccuugucuac

SEQ ID NO: 2053251 - RNA, 19 nt, Artificial Sequence
  Description of Artificial Sequence: Synthetic oligonucleotide
  Antisense strand to SEQ ID NO: 2053250
guagacaaggagaaaucag

SEQ ID NO: 2053252 - RNA, 19 nt, Artificial Sequence
  Description of Artificial Sequence: Synthetic oligonucleotide
  Sense strand starting at position 3910 of SEQ ID NO: 1881549
gggugacugguguggauua

SEQ ID NO: 2053253 - RNA, 19 nt, Artificial Sequence
  Description of Artificial Sequence: Synthetic oligonucleotide
  Antisense strand to SEQ ID NO: 2053252
uaauccacaccagucaccc

SEQ ID NO: 2053254 - RNA, 19 nt, Artificial Sequence
  Description of Artificial Sequence: Synthetic oligonucleotide
  Sense strand starting at position 3912 of SEQ ID NO: 1881549
gugacugguguggauuaca

SEQ ID NO: 2053255 - RNA, 19 nt, Artificial Sequence
  Description of Artificial Sequence: Synthetic oligonucleotide
  Antisense strand to SEQ ID NO: 2053254
uguaauccacaccagucac

SEQ ID NO: 2053256 - RNA, 19 nt, Artificial Sequence
  Description of Artificial Sequence: Synthetic oligonucleotide
  Sense strand starting at position 15 of SEQ ID NO: 1881550
acggcugacaauugaaaug

SEQ ID NO: 2053257 - RNA, 19 nt, Artificial Sequence
  Description of Artificial Sequence: Synthetic oligonucleotide
  Antisense strand to SEQ ID NO: 2053256
cauuucaauugucagccgu

SEQ ID NO: 2053258 - RNA, 19 nt, Artificial Sequence
  Description of Artificial Sequence: Synthetic oligonucleotide
  Sense strand starting at position 72 of SEQ ID NO: 1881550
cuugccuagucccauuauu

SEQ ID NO: 2053259 - RNA, 19 nt, Artificial Sequence
  Description of Artificial Sequence: Synthetic oligonucleotide
  Antisense strand to SEQ ID NO: 2053258
aauaaugggacuaggcaag

SEQ ID NO: 2053260 - RNA, 19 nt, Artificial Sequence
  Description of Artificial Sequence: Synthetic oligonucleotide
  Sense strand starting at position 242 of SEQ ID NO: 1881550
aauauauguugcccguaca

SEQ ID NO: 2053261 - RNA, 19 nt, Artificial Sequence
  Description of Artificial Sequence: Synthetic oligonucleotide
  Antisense strand to SEQ ID NO: 2053260
uguacgggcaacauauauu

SEQ ID NO: 2053262 - RNA, 19 nt, Artificial Sequence
  Description of Artificial Sequence: Synthetic oligonucleotide
  Sense strand starting at position 255 of SEQ ID NO: 1881550
cguacagucuaguuagauu

SEQ ID NO: 2053263 - RNA, 19 nt, Artificial Sequence
  Description of Artificial Sequence: Synthetic oligonucleotide
  Antisense strand to SEQ ID NO: 2053262
aaucuaacuagacuguacg

SEQ ID NO: 2053264 - RNA, 19 nt, Artificial Sequence
  Description of Artificial Sequence: Synthetic oligonucleotide
  Sense strand starting at position 332 of SEQ ID NO: 1881550
aucucuagaugugucacua

SEQ ID NO: 2053265 - RNA, 19 nt, Artificial Sequence
  Description of Artificial Sequence: Synthetic oligonucleotide
  Antisense strand to SEQ ID NO: 2053264
uagugacacaucuagagau

SEQ ID NO: 2053266 - RNA, 19 nt, Artificial Sequence
  Description of Artificial Sequence: Synthetic oligonucleotide
  Sense strand starting at position 336 of SEQ ID NO: 1881550
cuagaugugucacuagaga

SEQ ID NO: 2053267 - RNA, 19 nt, Artificial Sequence
  Description of Artificial Sequence: Synthetic oligonucleotide
  Antisense strand to SEQ ID NO: 2053266
ucucuagugacacaucuag

SEQ ID NO: 2053268 - RNA, 19 nt, Artificial Sequence
  Description of Artificial Sequence: Synthetic oligonucleotide
  Sense strand starting at position 539 of SEQ ID NO: 1881550
aagagaaauugguagaaca

SEQ ID NO: 2053269 - RNA, 19 nt, Artificial Sequence
  Description of Artificial Sequence: Synthetic oligonucleotide
  Antisense strand to SEQ ID NO: 2053268
uguucuaccaauuucucuu

SEQ ID NO: 2053270 - RNA, 19 nt, Artificial Sequence
  Description of Artificial Sequence: Synthetic oligonucleotide
  Sense strand starting at position 649 of SEQ ID NO: 1881550
uuccuacugucauuggaau

SEQ ID NO: 2053271 - RNA, 19 nt, Artificial Sequence
  Description of Artificial Sequence: Synthetic oligonucleotide
  Antisense strand to SEQ ID NO: 2053270
auuccaaugacaguaggaa

SEQ ID NO: 2053272 - RNA, 19 nt, Artificial Sequence
  Description of Artificial Sequence: Synthetic oligonucleotide
  Sense strand starting at position 793 of SEQ ID NO: 1881550
gucugcuaaucuucgagua

SEQ ID NO: 2053273 - RNA, 19 nt, Artificial Sequence
  Description of Artificial Sequence: Synthetic oligonucleotide
  Antisense strand to SEQ ID NO: 2053272
uacucgaagauuagcagac

SEQ ID NO: 2053274 - RNA, 19 nt, Artificial Sequence
  Description of Artificial Sequence: Synthetic oligonucleotide
  Sense strand starting at position 794 of SEQ ID NO: 1881550
ucugcuaaucuucgaguaa

SEQ ID NO: 2053275 - RNA, 19 nt, Artificial Sequence
  Description of Artificial Sequence: Synthetic oligonucleotide
  Antisense strand to SEQ ID NO: 2053274
uuacucgaagauuagcaga

SEQ ID NO: 2053276 - RNA, 19 nt, Artificial Sequence
  Description of Artificial Sequence: Synthetic oligonucleotide
  Sense strand starting at position 795 of SEQ ID NO: 1881550
cugcuaaucuucgaguaag

SEQ ID NO: 2053277 - RNA, 19 nt, Artificial Sequence
  Description of Artificial Sequence: Synthetic oligonucleotide
  Antisense strand to SEQ ID NO: 2053276
cuuacucgaagauuagcag

SEQ ID NO: 2053278 - RNA, 19 nt, Artificial Sequence
  Description of Artificial Sequence: Synthetic oligonucleotide
  Sense strand starting at position 798 of SEQ ID NO: 1881550
cuaaucuucgaguaagccu

SEQ ID NO: 2053279 - RNA, 19 nt, Artificial Sequence
  Description of Artificial Sequence: Synthetic oligonucleotide
  Antisense strand to SEQ ID NO: 2053278
aggcuuacucgaagauuag

SEQ ID NO: 2053280 - RNA, 19 nt, Artificial Sequence
  Description of Artificial Sequence: Synthetic oligonucleotide
  Sense strand starting at position 931 of SEQ ID NO: 1881550
uuauguuucuucuacugga

SEQ ID NO: 2053281 - RNA, 19 nt, Artificial Sequence
  Description of Artificial Sequence: Synthetic oligonucleotide
  Antisense strand to SEQ ID NO: 2053280
uccaguagaagaaacauaa

SEQ ID NO: 2053282 - RNA, 19 nt, Artificial Sequence
  Description of Artificial Sequence: Synthetic oligonucleotide
  Sense strand starting at position 1000 of SEQ ID NO: 1881550
cucugugucugaguuaauu

SEQ ID NO: 2053283 - RNA, 19 nt, Artificial Sequence
  Description of Artificial Sequence: Synthetic oligonucleotide
  Antisense strand to SEQ ID NO: 2053282
aauuaacucagacacagag

SEQ ID NO: 2053284 - RNA, 19 nt, Artificial Sequence
  Description of Artificial Sequence: Synthetic oligonucleotide
  Sense strand starting at position 1008 of SEQ ID NO: 1881550
cugaguuaauugcuuccuu

SEQ ID NO: 2053285 - RNA, 19 nt, Artificial Sequence
  Description of Artificial Sequence: Synthetic oligonucleotide
  Antisense strand to SEQ ID NO: 2053284
aaggaagcaauuaacucag

SEQ ID NO: 2053286 - RNA, 19 nt, Artificial Sequence
  Description of Artificial Sequence: Synthetic oligonucleotide
  Sense strand starting at position 1009 of SEQ ID NO: 1881550
ugaguuaauugcuuccuua

SEQ ID NO: 2053287 - RNA, 19 nt, Artificial Sequence
  Description of Artificial Sequence: Synthetic oligonucleotide
  Antisense strand to SEQ ID NO: 2053286
uaaggaagcaauuaacuca

SEQ ID NO: 2053288 - RNA, 19 nt, Artificial Sequence
  Description of Artificial Sequence: Synthetic oligonucleotide
  Sense strand starting at position 1012 of SEQ ID NO: 1881550
guuaauugcuuccuuaggu

SEQ ID NO: 2053289 - RNA, 19 nt, Artificial Sequence
  Description of Artificial Sequence: Synthetic oligonucleotide
  Antisense strand to SEQ ID NO: 2053288
accuaaggaagcaauuaac

SEQ ID NO: 2053290 - RNA, 19 nt, Artificial Sequence
  Description of Artificial Sequence: Synthetic oligonucleotide
  Sense strand starting at position 1013 of SEQ ID NO: 1881550
uuaauugcuuccuuagguu

SEQ ID NO: 2053291 - RNA, 19 nt, Artificial Sequence
  Description of Artificial Sequence: Synthetic oligonucleotide
  Antisense strand to SEQ ID NO: 2053290
aaccuaaggaagcaauuaa

SEQ ID NO: 2053292 - RNA, 19 nt, Artificial Sequence
  Description of Artificial Sequence: Synthetic oligonucleotide
  Sense strand starting at position 1037 of SEQ ID NO: 1881550
guaggauugucucuccauc

SEQ ID NO: 2053293 - RNA, 19 nt, Artificial Sequence
  Description of Artificial Sequence: Synthetic oligonucleotide
  Antisense strand to SEQ ID NO: 2053292
gauggagagacaauccuac

SEQ ID NO: 2053294 - RNA, 19 nt, Artificial Sequence
  Description of Artificial Sequence: Synthetic oligonucleotide
  Sense strand starting at position 1039 of SEQ ID NO: 1881550
aggauugucucuccaucag

SEQ ID NO: 2053295 - RNA, 19 nt, Artificial Sequence
  Description of Artificial Sequence: Synthetic oligonucleotide
  Antisense strand to SEQ ID NO: 2053294
cugauggagagacaauccu

SEQ ID NO: 2053296 - RNA, 19 nt, Artificial Sequence
  Description of Artificial Sequence: Synthetic oligonucleotide
  Sense strand starting at position 1045 of SEQ ID NO: 1881550
gucucuccaucaguaacuu

SEQ ID NO: 2053297 - RNA, 19 nt, Artificial Sequence
  Description of Artificial Sequence: Synthetic oligonucleotide
  Antisense strand to SEQ ID NO: 2053296
aaguuacugauggagagac

SEQ ID NO: 2053298 - RNA, 19 nt, Artificial Sequence
  Description of Artificial Sequence: Synthetic oligonucleotide
  Sense strand starting at position 1064 of SEQ ID NO: 1881550
uccuauaucgcccauguua

SEQ ID NO: 2053299 - RNA, 19 nt, Artificial Sequence
  Description of Artificial Sequence: Synthetic oligonucleotide
  Antisense strand to SEQ ID NO: 2053298
uaacaugggcgauauagga

SEQ ID NO: 2053300 - RNA, 19 nt, Artificial Sequence
  Description of Artificial Sequence: Synthetic oligonucleotide
  Sense strand starting at position 1066 of SEQ ID NO: 1881550
cuauaucgcccauguuaac

SEQ ID NO: 2053301 - RNA, 19 nt, Artificial Sequence
  Description of Artificial Sequence: Synthetic oligonucleotide
  Antisense strand to SEQ ID NO: 2053300
guuaacaugggcgauauag

SEQ ID NO: 2053302 - RNA, 19 nt, Artificial Sequence
  Description of Artificial Sequence: Synthetic oligonucleotide
  Sense strand starting at position 1085 of SEQ ID NO: 1881550
guaccuauaucguuuacug

SEQ ID NO: 2053303 - RNA, 19 nt, Artificial Sequence
  Description of Artificial Sequence: Synthetic oligonucleotide
  Antisense strand to SEQ ID NO: 2053302
caguaaacgauauagguac

SEQ ID NO: 2053304 - RNA, 19 nt, Artificial Sequence
  Description of Artificial Sequence: Synthetic oligonucleotide
  Sense strand starting at position 1087 of SEQ ID NO: 1881550
accuauaucguuuacugaa

SEQ ID NO: 2053305 - RNA, 19 nt, Artificial Sequence
  Description of Artificial Sequence: Synthetic oligonucleotide
  Antisense strand to SEQ ID NO: 2053304
uucaguaaacgauauaggu

SEQ ID NO: 2053306 - RNA, 19 nt, Artificial Sequence
  Description of Artificial Sequence: Synthetic oligonucleotide
  Sense strand starting at position 1180 of SEQ ID NO: 1881550
gaagguaaguaugauauuc

SEQ ID NO: 2053307 - RNA, 19 nt, Artificial Sequence
  Description of Artificial Sequence: Synthetic oligonucleotide
  Antisense strand to SEQ ID NO: 2053306
gaauaucauacuuaccuuc

SEQ ID NO: 2053308 - RNA, 19 nt, Artificial Sequence
  Description of Artificial Sequence: Synthetic oligonucleotide
  Sense strand starting at position 1185 of SEQ ID NO: 1881550
uaaguaugauauucggaua

SEQ ID NO: 2053309 - RNA, 19 nt, Artificial Sequence
  Description of Artificial Sequence: Synthetic oligonucleotide
  Antisense strand to SEQ ID NO: 2053308
uauccgaauaucauacuua

SEQ ID NO: 2053310 - RNA, 19 nt, Artificial Sequence
  Description of Artificial Sequence: Synthetic oligonucleotide
  Sense strand starting at position 1188 of SEQ ID NO: 1881550
guaugauauucggauauua

SEQ ID NO: 2053311 - RNA, 19 nt, Artificial Sequence
  Description of Artificial Sequence: Synthetic oligonucleotide
  Antisense strand to SEQ ID NO: 2053310
uaauauccgaauaucauac

SEQ ID NO: 2053312 - RNA, 19 nt, Artificial Sequence
  Description of Artificial Sequence: Synthetic oligonucleotide
  Sense strand starting at position 1238 of SEQ ID NO: 1881550
agcacuuguauagguagua

SEQ ID NO: 2053313 - RNA, 19 nt, Artificial Sequence
  Description of Artificial Sequence: Synthetic oligonucleotide
  Antisense strand to SEQ ID NO: 2053312
uacuaccuauacaagugcu

SEQ ID NO: 2053314 - RNA, 19 nt, Artificial Sequence
  Description of Artificial Sequence: Synthetic oligonucleotide
  Sense strand starting at position 1239 of SEQ ID NO: 1881550
gcacuuguauagguaguau

SEQ ID NO: 2053315 - RNA, 19 nt, Artificial Sequence
  Description of Artificial Sequence: Synthetic oligonucleotide
  Antisense strand to SEQ ID NO: 2053314
auacuaccuauacaagugc

SEQ ID NO: 2053316 - RNA, 19 nt, Artificial Sequence
  Description of Artificial Sequence: Synthetic oligonucleotide
  Sense strand starting at position 1243 of SEQ ID NO: 1881550
uuguauagguaguauaaga

SEQ ID NO: 2053317 - RNA, 19 nt, Artificial Sequence
  Description of Artificial Sequence: Synthetic oligonucleotide
  Antisense strand to SEQ ID NO: 2053316
ucuuauacuaccuauacaa

SEQ ID NO: 2053318 - RNA, 19 nt, Artificial Sequence
  Description of Artificial Sequence: Synthetic oligonucleotide
  Sense strand starting at position 1248 of SEQ ID NO: 1881550
uagguaguauaagacauaa

SEQ ID NO: 2053319 - RNA, 19 nt, Artificial Sequence
  Description of Artificial Sequence: Synthetic oligonucleotide
  Antisense strand to SEQ ID NO: 2053318
uuaugucuuauacuaccua

SEQ ID NO: 2053320 - RNA, 19 nt, Artificial Sequence
  Description of Artificial Sequence: Synthetic oligonucleotide
  Sense strand starting at position 1417 of SEQ ID NO: 1881550
gggcguguugggaggcaau

SEQ ID NO: 2053321 - RNA, 19 nt, Artificial Sequence
  Description of Artificial Sequence: Synthetic oligonucleotide
  Antisense strand to SEQ ID NO: 2053320
auugccucccaacacgccc

SEQ ID NO: 2053322 - RNA, 19 nt, Artificial Sequence
  Description of Artificial Sequence: Synthetic oligonucleotide
  Sense strand starting at position 1418 of SEQ ID NO: 1881550
ggcguguugggaggcaauu

SEQ ID NO: 2053323 - RNA, 19 nt, Artificial Sequence
  Description of Artificial Sequence: Synthetic oligonucleotide
  Antisense strand to SEQ ID NO: 2053322
aauugccucccaacacgcc

SEQ ID NO: 2053324 - RNA, 19 nt, Artificial Sequence
  Description of Artificial Sequence: Synthetic oligonucleotide
  Sense strand starting at position 1437 of SEQ ID NO: 1881550
ggaucaucuagcgguuucu

SEQ ID NO: 2053325 - RNA, 19 nt, Artificial Sequence
  Description of Artificial Sequence: Synthetic oligonucleotide
  Antisense strand to SEQ ID NO: 2053324
agaaaccgcuagaugaucc

SEQ ID NO: 2053326 - RNA, 19 nt, Artificial Sequence
  Description of Artificial Sequence: Synthetic oligonucleotide
  Sense strand starting at position 1443 of SEQ ID NO: 1881550
ucuagcgguuucucuuaaa

SEQ ID NO: 2053327 - RNA, 19 nt, Artificial Sequence
  Description of Artificial Sequence: Synthetic oligonucleotide
  Antisense strand to SEQ ID NO: 2053326
uuuaagagaaaccgcuaga

SEQ ID NO: 2053328 - RNA, 19 nt, Artificial Sequence
  Description of Artificial Sequence: Synthetic oligonucleotide
  Sense strand starting at position 1834 of SEQ ID NO: 1881550
gagguuucuuccuccugau

SEQ ID NO: 2053329 - RNA, 19 nt, Artificial Sequence
  Description of Artificial Sequence: Synthetic oligonucleotide
  Antisense strand to SEQ ID NO: 2053328
aucaggaggaagaaaccuc

SEQ ID NO: 2053330 - RNA, 19 nt, Artificial Sequence
  Description of Artificial Sequence: Synthetic oligonucleotide
  Sense strand starting at position 1837 of SEQ ID NO: 1881550
guuucuuccuccugaugga

SEQ ID NO: 2053331 - RNA, 19 nt, Artificial Sequence
  Description of Artificial Sequence: Synthetic oligonucleotide
  Antisense strand to SEQ ID NO: 2053330
uccaucaggaggaagaaac

SEQ ID NO: 2053332 - RNA, 19 nt, Artificial Sequence
  Description of Artificial Sequence: Synthetic oligonucleotide
  Sense strand starting at position 1877 of SEQ ID NO: 1881550
cggagaccuuccuguuaac

SEQ ID NO: 2053333 - RNA, 19 nt, Artificial Sequence
  Description of Artificial Sequence: Synthetic oligonucleotide
  Antisense strand to SEQ ID NO: 2053332
guuaacaggaaggucuccg

SEQ ID NO: 2053334 - RNA, 19 nt, Artificial Sequence
  Description of Artificial Sequence: Synthetic oligonucleotide
  Sense strand starting at position 3304 of SEQ ID NO: 1881550
gacguugagccagaauaag

SEQ ID NO: 2053335 - RNA, 19 nt, Artificial Sequence
  Description of Artificial Sequence: Synthetic oligonucleotide
  Antisense strand to SEQ ID NO: 2053334
cuuauucuggcucaacguc

SEQ ID NO: 2053336 - RNA, 19 nt, Artificial Sequence
  Description of Artificial Sequence: Synthetic oligonucleotide
  Sense strand starting at position 36 of SEQ ID NO: 1881551
acacacaaguguuuccaua

SEQ ID NO: 2053337 - RNA, 19 nt, Artificial Sequence
  Description of Artificial Sequence: Synthetic oligonucleotide
  Antisense strand to SEQ ID NO: 2053336
uauggaaacacuugugugu

SEQ ID NO: 2053338 - RNA, 19 nt, Artificial Sequence
  Description of Artificial Sequence: Synthetic oligonucleotide
  Sense strand starting at position 43 of SEQ ID NO: 1881551
aguguuuccauacguacaa

SEQ ID NO: 2053339 - RNA, 19 nt, Artificial Sequence
  Description of Artificial Sequence: Synthetic oligonucleotide
  Antisense strand to SEQ ID NO: 2053338
uuguacguauggaaacacu

SEQ ID NO: 2053340 - RNA, 19 nt, Artificial Sequence
  Description of Artificial Sequence: Synthetic oligonucleotide
  Sense strand starting at position 44 of SEQ ID NO: 1881551
guguuuccauacguacaaa

SEQ ID NO: 2053341 - RNA, 19 nt, Artificial Sequence
  Description of Artificial Sequence: Synthetic oligonucleotide
  Antisense strand to SEQ ID NO: 2053340
uuuguacguauggaaacac

SEQ ID NO: 2053342 - RNA, 19 nt, Artificial Sequence
  Description of Artificial Sequence: Synthetic oligonucleotide
  Sense strand starting at position 47 of SEQ ID NO: 1881551
uuuccauacguacaaauga

SEQ ID NO: 2053343 - RNA, 19 nt, Artificial Sequence
  Description of Artificial Sequence: Synthetic oligonucleotide
  Antisense strand to SEQ ID NO: 2053342
ucauuuguacguauggaaa

SEQ ID NO: 2053344 - RNA, 19 nt, Artificial Sequence
  Description of Artificial Sequence: Synthetic oligonucleotide
  Sense strand starting at position 55 of SEQ ID NO: 1881551
cguacaaaugaacgcauua

SEQ ID NO: 2053345 - RNA, 19 nt, Artificial Sequence
  Description of Artificial Sequence: Synthetic oligonucleotide
  Antisense strand to SEQ ID NO: 2053344
uaaugcguucauuuguacg

SEQ ID NO: 2053346 - RNA, 19 nt, Artificial Sequence
  Description of Artificial Sequence: Synthetic oligonucleotide
  Sense strand starting at position 151 of SEQ ID NO: 1881551
uucugcagaucugaagaaa

SEQ ID NO: 2053347 - RNA, 19 nt, Artificial Sequence
  Description of Artificial Sequence: Synthetic oligonucleotide
  Antisense strand to SEQ ID NO: 2053346
uuucuucagaucugcagaa

SEQ ID NO: 2053348 - RNA, 19 nt, Artificial Sequence
  Description of Artificial Sequence: Synthetic oligonucleotide
  Sense strand starting at position 197 of SEQ ID NO: 1881551
gaugcaauaccguauuaau

SEQ ID NO: 2053349 - RNA, 19 nt, Artificial Sequence
  Description of Artificial Sequence: Synthetic oligonucleotide
  Antisense strand to SEQ ID NO: 2053348
auuaauacgguauugcauc

SEQ ID NO: 2053350 - RNA, 19 nt, Artificial Sequence
  Description of Artificial Sequence: Synthetic oligonucleotide
  Sense strand starting at position 247 of SEQ ID NO: 1881551
auccacaggucccuuuaua

SEQ ID NO: 2053351 - RNA, 19 nt, Artificial Sequence
  Description of Artificial Sequence: Synthetic oligonucleotide
  Antisense strand to SEQ ID NO: 2053350
uauaaagggaccuguggau

SEQ ID NO: 2053352 - RNA, 19 nt, Artificial Sequence
  Description of Artificial Sequence: Synthetic oligonucleotide
  Sense strand starting at position 388 of SEQ ID NO: 1881551
ggaauccuuuccuucuaag

SEQ ID NO: 2053353 - RNA, 19 nt, Artificial Sequence
  Description of Artificial Sequence: Synthetic oligonucleotide
  Antisense strand to SEQ ID NO: 2053352
cuuagaaggaaaggauucc

SEQ ID NO: 2053354 - RNA, 19 nt, Artificial Sequence
  Description of Artificial Sequence: Synthetic oligonucleotide
  Sense strand starting at position 487 of SEQ ID NO: 1881551
cggaaaucagggcaguaga

SEQ ID NO: 2053355 - RNA, 19 nt, Artificial Sequence
  Description of Artificial Sequence: Synthetic oligonucleotide
  Antisense strand to SEQ ID NO: 2053354
ucuacugcccugauuuccg

SEQ ID NO: 2053356 - RNA, 19 nt, Artificial Sequence
  Description of Artificial Sequence: Synthetic oligonucleotide
  Sense strand starting at position 650 of SEQ ID NO: 1881551
guguauucuugggucauuc

SEQ ID NO: 2053357 - RNA, 19 nt, Artificial Sequence
  Description of Artificial Sequence: Synthetic oligonucleotide
  Antisense strand to SEQ ID NO: 2053356
gaaugacccaagaauacac

SEQ ID NO: 2053358 - RNA, 19 nt, Artificial Sequence
  Description of Artificial Sequence: Synthetic oligonucleotide
  Sense strand starting at position 729 of SEQ ID NO: 1881551
ggcuucuuucgugaauaaa

SEQ ID NO: 2053359 - RNA, 19 nt, Artificial Sequence
  Description of Artificial Sequence: Synthetic oligonucleotide
  Antisense strand to SEQ ID NO: 2053358
uuuauucacgaaagaagcc

SEQ ID NO: 2053360 - RNA, 19 nt, Artificial Sequence
  Description of Artificial Sequence: Synthetic oligonucleotide
  Sense strand starting at position 732 of SEQ ID NO: 1881551
uucuuucgugaauaaacaa

SEQ ID NO: 2053361 - RNA, 19 nt, Artificial Sequence
  Description of Artificial Sequence: Synthetic oligonucleotide
  Antisense strand to SEQ ID NO: 2053360
uuguuuauucacgaaagaa

SEQ ID NO: 2053362 - RNA, 19 nt, Artificial Sequence
  Description of Artificial Sequence: Synthetic oligonucleotide
  Sense strand starting at position 759 of SEQ ID NO: 1881551
uugcuaguggcccauuaau

SEQ ID NO: 2053363 - RNA, 19 nt, Artificial Sequence
  Description of Artificial Sequence: Synthetic oligonucleotide
  Antisense strand to SEQ ID NO: 2053362
auuaaugggccacuagcaa

SEQ ID NO: 2053364 - RNA, 19 nt, Artificial Sequence
  Description of Artificial Sequence: Synthetic oligonucleotide
  Sense strand starting at position 835 of SEQ ID NO: 1881551
gcauuaaagaguucgcgcu

SEQ ID NO: 2053365 - RNA, 19 nt, Artificial Sequence
  Description of Artificial Sequence: Synthetic oligonucleotide
  Antisense strand to SEQ ID NO: 2053364
agcgcgaacucuuuaaugc

SEQ ID NO: 2053366 - RNA, 19 nt, Artificial Sequence
  Description of Artificial Sequence: Synthetic oligonucleotide
  Sense strand starting at position 839 of SEQ ID NO: 1881551
uaaagaguucgcgcugugu

SEQ ID NO: 2053367 - RNA, 19 nt, Artificial Sequence
  Description of Artificial Sequence: Synthetic oligonucleotide
  Antisense strand to SEQ ID NO: 2053366
acacagcgcgaacucuuua

SEQ ID NO: 2053368 - RNA, 19 nt, Artificial Sequence
  Description of Artificial Sequence: Synthetic oligonucleotide
  Sense strand starting at position 869 of SEQ ID NO: 1881551
aagaacuagcuauguggau

SEQ ID NO: 2053369 - RNA, 19 nt, Artificial Sequence
  Description of Artificial Sequence: Synthetic oligonucleotide
  Antisense strand to SEQ ID NO: 2053368
auccacauagcuaguucuu

SEQ ID NO: 2053370 - RNA, 19 nt, Artificial Sequence
  Description of Artificial Sequence: Synthetic oligonucleotide
  Sense strand starting at position 1156 of SEQ ID NO: 1881551
ggcagaaaucaguggucua

SEQ ID NO: 2053371 - RNA, 19 nt, Artificial Sequence
  Description of Artificial Sequence: Synthetic oligonucleotide
  Antisense strand to SEQ ID NO: 2053370
uagaccacugauuucugcc

SEQ ID NO: 2053372 - RNA, 19 nt, Artificial Sequence
  Description of Artificial Sequence: Synthetic oligonucleotide
  Sense strand starting at position 1157 of SEQ ID NO: 1881551
gcagaaaucaguggucuaa

SEQ ID NO: 2053373 - RNA, 19 nt, Artificial Sequence
  Description of Artificial Sequence: Synthetic oligonucleotide
  Antisense strand to SEQ ID NO: 2053372
uuagaccacugauuucugc

SEQ ID NO: 2053374 - RNA, 19 nt, Artificial Sequence
  Description of Artificial Sequence: Synthetic oligonucleotide
  Sense strand starting at position 1159 of SEQ ID NO: 1881551
agaaaucaguggucuaauc

SEQ ID NO: 2053375 - RNA, 19 nt, Artificial Sequence
  Description of Artificial Sequence: Synthetic oligonucleotide
  Antisense strand to SEQ ID NO: 2053374
gauuagaccacugauuucu

SEQ ID NO: 2053376 - RNA, 19 nt, Artificial Sequence
  Description of Artificial Sequence: Synthetic oligonucleotide
  Sense strand starting at position 1414 of SEQ ID NO: 1881551
aagcuagguccucgaguga

SEQ ID NO: 2053377 - RNA, 19 nt, Artificial Sequence
  Description of Artificial Sequence: Synthetic oligonucleotide
  Antisense strand to SEQ ID NO: 2053376
ucacucgaggaccuagcuu

SEQ ID NO: 2053378 - RNA, 19 nt, Artificial Sequence
  Description of Artificial Sequence: Synthetic oligonucleotide
  Sense strand starting at position 1418 of SEQ ID NO: 1881551
uagguccucgagugaguua

SEQ ID NO: 2053379 - RNA, 19 nt, Artificial Sequence
  Description of Artificial Sequence: Synthetic oligonucleotide
  Antisense strand to SEQ ID NO: 2053378
uaacucacucgaggaccua

SEQ ID NO: 2053380 - RNA, 19 nt, Artificial Sequence
  Description of Artificial Sequence: Synthetic oligonucleotide
  Sense strand starting at position 1419 of SEQ ID NO: 1881551
agguccucgagugaguuaa

SEQ ID NO: 2053381 - RNA, 19 nt, Artificial Sequence
  Description of Artificial Sequence: Synthetic oligonucleotide
  Antisense strand to SEQ ID NO: 2053380
uuaacucacucgaggaccu

SEQ ID NO: 2053382 - RNA, 19 nt, Artificial Sequence
  Description of Artificial Sequence: Synthetic oligonucleotide
  Sense strand starting at position 1423 of SEQ ID NO: 1881551
ccucgagugaguuaaucua

SEQ ID NO: 2053383 - RNA, 19 nt, Artificial Sequence
  Description of Artificial Sequence: Synthetic oligonucleotide
  Antisense strand to SEQ ID NO: 2053382
uagauuaacucacucgagg

SEQ ID NO: 2053384 - RNA, 19 nt, Artificial Sequence
  Description of Artificial Sequence: Synthetic oligonucleotide
  Sense strand starting at position 1431 of SEQ ID NO: 1881551
gaguuaaucuacuugguaa

SEQ ID NO: 2053385 - RNA, 19 nt, Artificial Sequence
  Description of Artificial Sequence: Synthetic oligonucleotide
  Antisense strand to SEQ ID NO: 2053384
uuaccaaguagauuaacuc

SEQ ID NO: 2053386 - RNA, 19 nt, Artificial Sequence
  Description of Artificial Sequence: Synthetic oligonucleotide
  Sense strand starting at position 1433 of SEQ ID NO: 1881551
guuaaucuacuugguaagu

SEQ ID NO: 2053387 - RNA, 19 nt, Artificial Sequence
  Description of Artificial Sequence: Synthetic oligonucleotide
  Antisense strand to SEQ ID NO: 2053386
acuuaccaaguagauuaac

SEQ ID NO: 2053388 - RNA, 19 nt, Artificial Sequence
  Description of Artificial Sequence: Synthetic oligonucleotide
  Sense strand starting at position 1434 of SEQ ID NO: 1881551
uuaaucuacuugguaagua

SEQ ID NO: 2053389 - RNA, 19 nt, Artificial Sequence
  Description of Artificial Sequence: Synthetic oligonucleotide
  Antisense strand to SEQ ID NO: 2053388
uacuuaccaaguagauuaa

SEQ ID NO: 2053390 - RNA, 19 nt, Artificial Sequence
  Description of Artificial Sequence: Synthetic oligonucleotide
  Sense strand starting at position 1494 of SEQ ID NO: 1881551
cgcgucugcccgucuguaa

SEQ ID NO: 2053391 - RNA, 19 nt, Artificial Sequence
  Description of Artificial Sequence: Synthetic oligonucleotide
  Antisense strand to SEQ ID NO: 2053390
uuacagacgggcagacgcg

SEQ ID NO: 2053392 - RNA, 19 nt, Artificial Sequence
  Description of Artificial Sequence: Synthetic oligonucleotide
  Sense strand starting at position 1528 of SEQ ID NO: 1881551
cauccuuuagcgugaauuc

SEQ ID NO: 2053393 - RNA, 19 nt, Artificial Sequence
  Description of Artificial Sequence: Synthetic oligonucleotide
  Antisense strand to SEQ ID NO: 2053392
gaauucacgcuaaaggaug

SEQ ID NO: 2053394 - RNA, 19 nt, Artificial Sequence
  Description of Artificial Sequence: Synthetic oligonucleotide
  Sense strand starting at position 1537 of SEQ ID NO: 1881551
gcgugaauuccuccgcuuu

SEQ ID NO: 2053395 - RNA, 19 nt, Artificial Sequence
  Description of Artificial Sequence: Synthetic oligonucleotide
  Antisense strand to SEQ ID NO: 2053394
aaagcggaggaauucacgc

SEQ ID NO: 2053396 - RNA, 19 nt, Artificial Sequence
  Description of Artificial Sequence: Synthetic oligonucleotide
  Sense strand starting at position 1681 of SEQ ID NO: 1881551
cugcuagggucccuuaauu

SEQ ID NO: 2053397 - RNA, 19 nt, Artificial Sequence
  Description of Artificial Sequence: Synthetic oligonucleotide
  Antisense strand to SEQ ID NO: 2053396
aauuaagggacccuagcag

SEQ ID NO: 2053398 - RNA, 19 nt, Artificial Sequence
  Description of Artificial Sequence: Synthetic oligonucleotide
  Sense strand starting at position 1698 of SEQ ID NO: 1881551
uuagguaacccuugccaau

SEQ ID NO: 2053399 - RNA, 19 nt, Artificial Sequence
  Description of Artificial Sequence: Synthetic oligonucleotide
  Antisense strand to SEQ ID NO: 2053398
auuggcaaggguuaccuaa

SEQ ID NO: 2053400 - RNA, 19 nt, Artificial Sequence
  Description of Artificial Sequence: Synthetic oligonucleotide
  Sense strand starting at position 1700 of SEQ ID NO: 1881551
agguaacccuugccaauua

SEQ ID NO: 2053401 - RNA, 19 nt, Artificial Sequence
  Description of Artificial Sequence: Synthetic oligonucleotide
  Antisense strand to SEQ ID NO: 2053400
uaauuggcaaggguuaccu

SEQ ID NO: 2053402 - RNA, 19 nt, Artificial Sequence
  Description of Artificial Sequence: Synthetic oligonucleotide
  Sense strand starting at position 1798 of SEQ ID NO: 1881551
gaauguuagcaucauugga

SEQ ID NO: 2053403 - RNA, 19 nt, Artificial Sequence
  Description of Artificial Sequence: Synthetic oligonucleotide
  Antisense strand to SEQ ID NO: 2053402
uccaaugaugcuaacauuc

SEQ ID NO: 2053404 - RNA, 19 nt, Artificial Sequence
  Description of Artificial Sequence: Synthetic oligonucleotide
  Sense strand starting at position 1800 of SEQ ID NO: 1881551
auguuagcaucauuggaaa

SEQ ID NO: 2053405 - RNA, 19 nt, Artificial Sequence
  Description of Artificial Sequence: Synthetic oligonucleotide
  Antisense strand to SEQ ID NO: 2053404
uuuccaaugaugcuaacau

SEQ ID NO: 2053406 - RNA, 19 nt, Artificial Sequence
  Description of Artificial Sequence: Synthetic oligonucleotide
  Sense strand starting at position 1862 of SEQ ID NO: 1881551
uucgcauuugcugaugcaa

SEQ ID NO: 2053407 - RNA, 19 nt, Artificial Sequence
  Description of Artificial Sequence: Synthetic oligonucleotide
  Antisense strand to SEQ ID NO: 2053406
uugcaucagcaaaugcgaa

SEQ ID NO: 2053408 - RNA, 19 nt, Artificial Sequence
  Description of Artificial Sequence: Synthetic oligonucleotide
  Sense strand starting at position 1976 of SEQ ID NO: 1881551
ggcuguucucgcucucaca

SEQ ID NO: 2053409 - RNA, 19 nt, Artificial Sequence
  Description of Artificial Sequence: Synthetic oligonucleotide
  Antisense strand to SEQ ID NO: 2053408
ugugagagcgagaacagcc

SEQ ID NO: 2053410 - RNA, 19 nt, Artificial Sequence
  Description of Artificial Sequence: Synthetic oligonucleotide
  Sense strand starting at position 2049 of SEQ ID NO: 1881551
ccgcgugacgugucuguuu

SEQ ID NO: 2053411 - RNA, 19 nt, Artificial Sequence
  Description of Artificial Sequence: Synthetic oligonucleotide
  Antisense strand to SEQ ID NO: 2053410
aaacagacacgucacgcgg

SEQ ID NO: 2053412 - RNA, 19 nt, Artificial Sequence
  Description of Artificial Sequence: Synthetic oligonucleotide
  Sense strand starting at position 2115 of SEQ ID NO: 1881551
gggcgauugguuggcagaa

SEQ ID NO: 2053413 - RNA, 19 nt, Artificial Sequence
  Description of Artificial Sequence: Synthetic oligonucleotide
  Antisense strand to SEQ ID NO: 2053412
uucugccaaccaaucgccc

SEQ ID NO: 2053414 - RNA, 19 nt, Artificial Sequence
  Description of Artificial Sequence: Synthetic oligonucleotide
  Sense strand starting at position 2116 of SEQ ID NO: 1881551
ggcgauugguuggcagaau

SEQ ID NO: 2053415 - RNA, 19 nt, Artificial Sequence
  Description of Artificial Sequence: Synthetic oligonucleotide
  Antisense strand to SEQ ID NO: 2053414
auucugccaaccaaucgcc

SEQ ID NO: 2053416 - RNA, 19 nt, Artificial Sequence
  Description of Artificial Sequence: Synthetic oligonucleotide
  Sense strand starting at position 129 of SEQ ID NO: 1881552
ggguucucucaguguuccu

SEQ ID NO: 2053417 - RNA, 19 nt, Artificial Sequence
  Description of Artificial Sequence: Synthetic oligonucleotide
  Antisense strand to SEQ ID NO: 2053416
aggaacacugagagaaccc

SEQ ID NO: 2053418 - RNA, 19 nt, Artificial Sequence
  Description of Artificial Sequence: Synthetic oligonucleotide
  Sense strand starting at position 134 of SEQ ID NO: 1881552
cucucaguguuccugauuu

SEQ ID NO: 2053419 - RNA, 19 nt, Artificial Sequence
  Description of Artificial Sequence: Synthetic oligonucleotide
  Antisense strand to SEQ ID NO: 2053418
aaaucaggaacacugagag

SEQ ID NO: 2053420 - RNA, 19 nt, Artificial Sequence
  Description of Artificial Sequence: Synthetic oligonucleotide
  Sense strand starting at position 342 of SEQ ID NO: 1881552
auauaugaguuacacacuu

SEQ ID NO: 2053421 - RNA, 19 nt, Artificial Sequence
  Description of Artificial Sequence: Synthetic oligonucleotide
  Antisense strand to SEQ ID NO: 2053420
aaguguguaacucauauau

SEQ ID NO: 2053422 - RNA, 19 nt, Artificial Sequence
  Description of Artificial Sequence: Synthetic oligonucleotide
  Sense strand starting at position 488 of SEQ ID NO: 1881552
aaagguaaaucgcagaaug

SEQ ID NO: 2053423 - RNA, 19 nt, Artificial Sequence
  Description of Artificial Sequence: Synthetic oligonucleotide
  Antisense strand to SEQ ID NO: 2053422
cauucugcgauuuaccuuu

SEQ ID NO: 2053424 - RNA, 19 nt, Artificial Sequence
  Description of Artificial Sequence: Synthetic oligonucleotide
  Sense strand starting at position 919 of SEQ ID NO: 1881552
cucacaaaucauugguuga

SEQ ID NO: 2053425 - RNA, 19 nt, Artificial Sequence
  Description of Artificial Sequence: Synthetic oligonucleotide
  Antisense strand to SEQ ID NO: 2053424
ucaaccaaugauuugugag

SEQ ID NO: 2053426 - RNA, 19 nt, Artificial Sequence
  Description of Artificial Sequence: Synthetic oligonucleotide
  Sense strand starting at position 922 of SEQ ID NO: 1881552
acaaaucauugguugaauu

SEQ ID NO: 2053427 - RNA, 19 nt, Artificial Sequence
  Description of Artificial Sequence: Synthetic oligonucleotide
  Antisense strand to SEQ ID NO: 2053426
aauucaaccaaugauuugu

SEQ ID NO: 2053428 - RNA, 19 nt, Artificial Sequence
  Description of Artificial Sequence: Synthetic oligonucleotide
  Sense strand starting at position 988 of SEQ ID NO: 1881552
gauuauguaugauaccuga

SEQ ID NO: 2053429 - RNA, 19 nt, Artificial Sequence
  Description of Artificial Sequence: Synthetic oligonucleotide
  Antisense strand to SEQ ID NO: 2053428
ucagguaucauacauaauc

SEQ ID NO: 2053430 - RNA, 19 nt, Artificial Sequence
  Description of Artificial Sequence: Synthetic oligonucleotide
  Sense strand starting at position 1001 of SEQ ID NO: 1881552
accugauuccagcaguaua

SEQ ID NO: 2053431 - RNA, 19 nt, Artificial Sequence
  Description of Artificial Sequence: Synthetic oligonucleotide
  Antisense strand to SEQ ID NO: 2053430
uauacugcuggaaucaggu

SEQ ID NO: 2053432 - RNA, 19 nt, Artificial Sequence
  Description of Artificial Sequence: Synthetic oligonucleotide
  Sense strand starting at position 1064 of SEQ ID NO: 1881552
acaucaccauuguagugau

SEQ ID NO: 2053433 - RNA, 19 nt, Artificial Sequence
  Description of Artificial Sequence: Synthetic oligonucleotide
  Antisense strand to SEQ ID NO: 2053432
aucacuacaauggugaugu

SEQ ID NO: 2053434 - RNA, 19 nt, Artificial Sequence
  Description of Artificial Sequence: Synthetic oligonucleotide
  Sense strand starting at position 1252 of SEQ ID NO: 1881552
auaaaugaaugcgauggau

SEQ ID NO: 2053435 - RNA, 19 nt, Artificial Sequence
  Description of Artificial Sequence: Synthetic oligonucleotide
  Antisense strand to SEQ ID NO: 2053434
auccaucgcauucauuuau

SEQ ID NO: 2053436 - RNA, 19 nt, Artificial Sequence
  Description of Artificial Sequence: Synthetic oligonucleotide
  Sense strand starting at position 1254 of SEQ ID NO: 1881552
aaaugaaugcgauggauug

SEQ ID NO: 2053437 - RNA, 19 nt, Artificial Sequence
  Description of Artificial Sequence: Synthetic oligonucleotide
  Antisense strand to SEQ ID NO: 2053436
caauccaucgcauucauuu

SEQ ID NO: 2053438 - RNA, 19 nt, Artificial Sequence
  Description of Artificial Sequence: Synthetic oligonucleotide
  Sense strand starting at position 1255 of SEQ ID NO: 1881552
aaugaaugcgauggauugu

SEQ ID NO: 2053439 - RNA, 19 nt, Artificial Sequence
  Description of Artificial Sequence: Synthetic oligonucleotide
  Antisense strand to SEQ ID NO: 2053438
acaauccaucgcauucauu

SEQ ID NO: 2053440 - RNA, 19 nt, Artificial Sequence
  Description of Artificial Sequence: Synthetic oligonucleotide
  Sense strand starting at position 1331 of SEQ ID NO: 1881552
ugaccuaugacuugcagga

SEQ ID NO: 2053441 - RNA, 19 nt, Artificial Sequence
  Description of Artificial Sequence: Synthetic oligonucleotide
  Antisense strand to SEQ ID NO: 2053440
uccugcaagucauagguca

SEQ ID NO: 2053442 - RNA, 19 nt, Artificial Sequence
  Description of Artificial Sequence: Synthetic oligonucleotide
  Sense strand starting at position 1413 of SEQ ID NO: 1881552
uggcuaauagaaugugaga

SEQ ID NO: 2053443 - RNA, 19 nt, Artificial Sequence
  Description of Artificial Sequence: Synthetic oligonucleotide
  Antisense strand to SEQ ID NO: 2053442
ucucacauucuauuagcca

SEQ ID NO: 2053444 - RNA, 19 nt, Artificial Sequence
  Description of Artificial Sequence: Synthetic oligonucleotide
  Sense strand starting at position 1415 of SEQ ID NO: 1881552
gcuaauagaaugugagaaa

SEQ ID NO: 2053445 - RNA, 19 nt, Artificial Sequence
  Description of Artificial Sequence: Synthetic oligonucleotide
  Antisense strand to SEQ ID NO: 2053444
uuucucacauucuauuagc

SEQ ID NO: 2053446 - RNA, 19 nt, Artificial Sequence
  Description of Artificial Sequence: Synthetic oligonucleotide
  Sense strand starting at position 1735 of SEQ ID NO: 1881552
cuuagcucucaugaauugu

SEQ ID NO: 2053447 - RNA, 19 nt, Artificial Sequence
  Description of Artificial Sequence: Synthetic oligonucleotide
  Antisense strand to SEQ ID NO: 2053446
acaauucaugagagcuaag

SEQ ID NO: 2053448 - RNA, 19 nt, Artificial Sequence
  Description of Artificial Sequence: Synthetic oligonucleotide
  Sense strand starting at position 1771 of SEQ ID NO: 1881552
cgcuaacucuugccagauc

SEQ ID NO: 2053449 - RNA, 19 nt, Artificial Sequence
  Description of Artificial Sequence: Synthetic oligonucleotide
  Antisense strand to SEQ ID NO: 2053448
gaucuggcaagaguuagcg

SEQ ID NO: 2053450 - RNA, 19 nt, Artificial Sequence
  Description of Artificial Sequence: Synthetic oligonucleotide
  Sense strand starting at position 1868 of SEQ ID NO: 1881552
gcgcuaaauccauacguuu

SEQ ID NO: 2053451 - RNA, 19 nt, Artificial Sequence
  Description of Artificial Sequence: Synthetic oligonucleotide
  Antisense strand to SEQ ID NO: 2053450
aaacguauggauuuagcgc

SEQ ID NO: 2053452 - RNA, 19 nt, Artificial Sequence
  Description of Artificial Sequence: Synthetic oligonucleotide
  Sense strand starting at position 2076 of SEQ ID NO: 1881552
gcgcguuuagcgcccugaa

SEQ ID NO: 2053453 - RNA, 19 nt, Artificial Sequence
  Description of Artificial Sequence: Synthetic oligonucleotide
  Antisense strand to SEQ ID NO: 2053452
uucagggcgcuaaacgcgc

SEQ ID NO: 2053454 - RNA, 19 nt, Artificial Sequence
  Description of Artificial Sequence: Synthetic oligonucleotide
  Sense strand starting at position 2078 of SEQ ID NO: 1881552
gcguuuagcgcccugaaca

SEQ ID NO: 2053455 - RNA, 19 nt, Artificial Sequence
  Description of Artificial Sequence: Synthetic oligonucleotide
  Antisense strand to SEQ ID NO: 2053454
uguucagggcgcuaaacgc

SEQ ID NO: 2053456 - RNA, 19 nt, Artificial Sequence
  Description of Artificial Sequence: Synthetic oligonucleotide
  Sense strand starting at position 2079 of SEQ ID NO: 1881552
cguuuagcgcccugaacau

SEQ ID NO: 2053457 - RNA, 19 nt, Artificial Sequence
  Description of Artificial Sequence: Synthetic oligonucleotide
  Antisense strand to SEQ ID NO: 2053456
auguucagggcgcuaaacg

SEQ ID NO: 2053458 - RNA, 19 nt, Artificial Sequence
  Description of Artificial Sequence: Synthetic oligonucleotide
  Sense strand starting at position 2262 of SEQ ID NO: 1881552
gggccuggucgagaaggau

SEQ ID NO: 2053459 - RNA, 19 nt, Artificial Sequence
  Description of Artificial Sequence: Synthetic oligonucleotide
  Antisense strand to SEQ ID NO: 2053458
auccuucucgaccaggccc

SEQ ID NO: 2053460 - RNA, 19 nt, Artificial Sequence
  Description of Artificial Sequence: Synthetic oligonucleotide
  Sense strand starting at position 2274 of SEQ ID NO: 1881552
gaaggaugcugucccgaca

SEQ ID NO: 2053461 - RNA, 19 nt, Artificial Sequence
  Description of Artificial Sequence: Synthetic oligonucleotide
  Antisense strand to SEQ ID NO: 2053460
ugucgggacagcauccuuc

SEQ ID NO: 2053462 - RNA, 19 nt, Artificial Sequence
  Description of Artificial Sequence: Synthetic oligonucleotide
  Sense strand starting at position 2277 of SEQ ID NO: 1881552
ggaugcugucccgacagaa

SEQ ID NO: 2053463 - RNA, 19 nt, Artificial Sequence
  Description of Artificial Sequence: Synthetic oligonucleotide
  Antisense strand to SEQ ID NO: 2053462
uucugucgggacagcaucc

SEQ ID NO: 2053464 - RNA, 19 nt, Artificial Sequence
  Description of Artificial Sequence: Synthetic oligonucleotide
  Sense strand starting at position 2696 of SEQ ID NO: 1881552
uuuguugauggucagagaa

SEQ ID NO: 2053465 - RNA, 19 nt, Artificial Sequence
  Description of Artificial Sequence: Synthetic oligonucleotide
  Antisense strand to SEQ ID NO: 2053464
uucucugaccaucaacaaa

SEQ ID NO: 2053466 - RNA, 19 nt, Artificial Sequence
  Description of Artificial Sequence: Synthetic oligonucleotide
  Sense strand starting at position 2698 of SEQ ID NO: 1881552
uguugauggucagagaaag

SEQ ID NO: 2053467 - RNA, 19 nt, Artificial Sequence
  Description of Artificial Sequence: Synthetic oligonucleotide
  Antisense strand to SEQ ID NO: 2053466
cuuucucugaccaucaaca

SEQ ID NO: 2053468 - RNA, 19 nt, Artificial Sequence
  Description of Artificial Sequence: Synthetic oligonucleotide
  Sense strand starting at position 3052 of SEQ ID NO: 1881552
aaggcugucuagucucuua

SEQ ID NO: 2053469 - RNA, 19 nt, Artificial Sequence
  Description of Artificial Sequence: Synthetic oligonucleotide
  Antisense strand to SEQ ID NO: 2053468
uaagagacuagacagccuu

SEQ ID NO: 2053470 - RNA, 19 nt, Artificial Sequence
  Description of Artificial Sequence: Synthetic oligonucleotide
  Sense strand starting at position 3055 of SEQ ID NO: 1881552
gcugucuagucucuuaaug

SEQ ID NO: 2053471 - RNA, 19 nt, Artificial Sequence
  Description of Artificial Sequence: Synthetic oligonucleotide
  Antisense strand to SEQ ID NO: 2053470
cauuaagagacuagacagc

SEQ ID NO: 2053472 - RNA, 19 nt, Artificial Sequence
  Description of Artificial Sequence: Synthetic oligonucleotide
  Sense strand starting at position 3174 of SEQ ID NO: 1881552
uugacugaguccucagaga

SEQ ID NO: 2053473 - RNA, 19 nt, Artificial Sequence
  Description of Artificial Sequence: Synthetic oligonucleotide
  Antisense strand to SEQ ID NO: 2053472
ucucugaggacucagucaa

SEQ ID NO: 2053474 - RNA, 19 nt, Artificial Sequence
  Description of Artificial Sequence: Synthetic oligonucleotide
  Sense strand starting at position 3185 of SEQ ID NO: 1881552
cucagagacacuugacgaa

SEQ ID NO: 2053475 - RNA, 19 nt, Artificial Sequence
  Description of Artificial Sequence: Synthetic oligonucleotide
  Antisense strand to SEQ ID NO: 2053474
uucgucaagugucucugag

SEQ ID NO: 2053476 - RNA, 19 nt, Artificial Sequence
  Description of Artificial Sequence: Synthetic oligonucleotide
  Sense strand starting at position 3234 of SEQ ID NO: 1881552
ugggcauggucagugauac

SEQ ID NO: 2053477 - RNA, 19 nt, Artificial Sequence
  Description of Artificial Sequence: Synthetic oligonucleotide
  Antisense strand to SEQ ID NO: 2053476
guaucacugaccaugccca

SEQ ID NO: 2053478 - RNA, 19 nt, Artificial Sequence
  Description of Artificial Sequence: Synthetic oligonucleotide
  Sense strand starting at position 3244 of SEQ ID NO: 1881552
cagugauacccugagcaau

SEQ ID NO: 2053479 - RNA, 19 nt, Artificial Sequence
  Description of Artificial Sequence: Synthetic oligonucleotide
  Antisense strand to SEQ ID NO: 2053478
auugcucaggguaucacug

SEQ ID NO: 2053480 - RNA, 19 nt, Artificial Sequence
  Description of Artificial Sequence: Synthetic oligonucleotide
  Sense strand starting at position 3246 of SEQ ID NO: 1881552
gugauacccugagcaauca

SEQ ID NO: 2053481 - RNA, 19 nt, Artificial Sequence
  Description of Artificial Sequence: Synthetic oligonucleotide
  Antisense strand to SEQ ID NO: 2053480
ugauugcucaggguaucac

SEQ ID NO: 2053482 - RNA, 19 nt, Artificial Sequence
  Description of Artificial Sequence: Synthetic oligonucleotide
  Sense strand starting at position 3261 of SEQ ID NO: 1881552
aucacauuacuucgcuaga

SEQ ID NO: 2053483 - RNA, 19 nt, Artificial Sequence
  Description of Artificial Sequence: Synthetic oligonucleotide
  Antisense strand to SEQ ID NO: 2053482
ucuagcgaaguaaugugau

SEQ ID NO: 2053484 - RNA, 19 nt, Artificial Sequence
  Description of Artificial Sequence: Synthetic oligonucleotide
  Sense strand starting at position 3262 of SEQ ID NO: 1881552
ucacauuacuucgcuagau

SEQ ID NO: 2053485 - RNA, 19 nt, Artificial Sequence
  Description of Artificial Sequence: Synthetic oligonucleotide
  Antisense strand to SEQ ID NO: 2053484
aucuagcgaaguaauguga

SEQ ID NO: 2053486 - RNA, 19 nt, Artificial Sequence
  Description of Artificial Sequence: Synthetic oligonucleotide
  Sense strand starting at position 3735 of SEQ ID NO: 1881552
guauuaacuguuuaugugu

SEQ ID NO: 2053487 - RNA, 19 nt, Artificial Sequence
  Description of Artificial Sequence: Synthetic oligonucleotide
  Antisense strand to SEQ ID NO: 2053486
acacauaaacaguuaauac

SEQ ID NO: 2053488 - RNA, 19 nt, Artificial Sequence
  Description of Artificial Sequence: Synthetic oligonucleotide
  Sense strand starting at position 3802 of SEQ ID NO: 1881552
ugucuaguaucuuauuugu

SEQ ID NO: 2053489 - RNA, 19 nt, Artificial Sequence
  Description of Artificial Sequence: Synthetic oligonucleotide
  Antisense strand to SEQ ID NO: 2053488
acaaauaagauacuagaca

SEQ ID NO: 2053490 - RNA, 19 nt, Artificial Sequence
  Description of Artificial Sequence: Synthetic oligonucleotide
  Sense strand starting at position 3808 of SEQ ID NO: 1881552
guaucuuauuuguggaaac

SEQ ID NO: 2053491 - RNA, 19 nt, Artificial Sequence
  Description of Artificial Sequence: Synthetic oligonucleotide
  Antisense strand to SEQ ID NO: 2053490
guuuccacaaauaagauac

SEQ ID NO: 2053492 - RNA, 19 nt, Artificial Sequence
  Description of Artificial Sequence: Synthetic oligonucleotide
  Sense strand starting at position 3859 of SEQ ID NO: 1881552
auuguuacacuuugugaua

SEQ ID NO: 2053493 - RNA, 19 nt, Artificial Sequence
  Description of Artificial Sequence: Synthetic oligonucleotide
  Antisense strand to SEQ ID NO: 2053492
uaucacaaaguguaacaau

SEQ ID NO: 2053494 - RNA, 19 nt, Artificial Sequence
  Description of Artificial Sequence: Synthetic oligonucleotide
  Sense strand starting at position 3935 of SEQ ID NO: 1881552
aagagaugauuggaggacu

SEQ ID NO: 2053495 - RNA, 19 nt, Artificial Sequence
  Description of Artificial Sequence: Synthetic oligonucleotide
  Antisense strand to SEQ ID NO: 2053494
aguccuccaaucaucucuu

SEQ ID NO: 2053496 - RNA, 19 nt, Artificial Sequence
  Description of Artificial Sequence: Synthetic oligonucleotide
  Sense strand starting at position 19 of SEQ ID NO: 1881553
accacucugcuuugggaaa

SEQ ID NO: 2053497 - RNA, 19 nt, Artificial Sequence
  Description of Artificial Sequence: Synthetic oligonucleotide
  Antisense strand to SEQ ID NO: 2053496
uuucccaaagcagaguggu

SEQ ID NO: 2053498 - RNA, 19 nt, Artificial Sequence
  Description of Artificial Sequence: Synthetic oligonucleotide
  Sense strand starting at position 49 of SEQ ID NO: 1881553
cagugucauuucgcccaca

SEQ ID NO: 2053499 - RNA, 19 nt, Artificial Sequence
  Description of Artificial Sequence: Synthetic oligonucleotide
  Antisense strand to SEQ ID NO: 2053498
ugugggcgaaaugacacug

SEQ ID NO: 2053500 - RNA, 19 nt, Artificial Sequence
  Description of Artificial Sequence: Synthetic oligonucleotide
  Sense strand starting at position 50 of SEQ ID NO: 1881553
agugucauuucgcccacau

SEQ ID NO: 2053501 - RNA, 19 nt, Artificial Sequence
  Description of Artificial Sequence: Synthetic oligonucleotide
  Antisense strand to SEQ ID NO: 2053500
augugggcgaaaugacacu

SEQ ID NO: 2053502 - RNA, 19 nt, Artificial Sequence
  Description of Artificial Sequence: Synthetic oligonucleotide
  Sense strand starting at position 52 of SEQ ID NO: 1881553
ugucauuucgcccacauau

SEQ ID NO: 2053503 - RNA, 19 nt, Artificial Sequence
  Description of Artificial Sequence: Synthetic oligonucleotide
  Antisense strand to SEQ ID NO: 2053502
auaugugggcgaaaugaca

SEQ ID NO: 2053504 - RNA, 19 nt, Artificial Sequence
  Description of Artificial Sequence: Synthetic oligonucleotide
  Sense strand starting at position 189 of SEQ ID NO: 1881553
cacuguuguuauuugaagu

SEQ ID NO: 2053505 - RNA, 19 nt, Artificial Sequence
  Description of Artificial Sequence: Synthetic oligonucleotide
  Antisense strand to SEQ ID NO: 2053504
acuucaaauaacaacagug

SEQ ID NO: 2053506 - RNA, 19 nt, Artificial Sequence
  Description of Artificial Sequence: Synthetic oligonucleotide
  Sense strand starting at position 190 of SEQ ID NO: 1881553
acuguuguuauuugaaguu

SEQ ID NO: 2053507 - RNA, 19 nt, Artificial Sequence
  Description of Artificial Sequence: Synthetic oligonucleotide
  Antisense strand to SEQ ID NO: 2053506
aacuucaaauaacaacagu

SEQ ID NO: 2053508 - RNA, 19 nt, Artificial Sequence
  Description of Artificial Sequence: Synthetic oligonucleotide
  Sense strand starting at position 434 of SEQ ID NO: 1881553
aguaacucuggcuaaguaa

SEQ ID NO: 2053509 - RNA, 19 nt, Artificial Sequence
  Description of Artificial Sequence: Synthetic oligonucleotide
  Antisense strand to SEQ ID NO: 2053508
uuacuuagccagaguuacu

SEQ ID NO: 2053510 - RNA, 19 nt, Artificial Sequence
  Description of Artificial Sequence: Synthetic oligonucleotide
  Sense strand starting at position 537 of SEQ ID NO: 1881553
augcuaguggcuuaagaua

SEQ ID NO: 2053511 - RNA, 19 nt, Artificial Sequence
  Description of Artificial Sequence: Synthetic oligonucleotide
  Antisense strand to SEQ ID NO: 2053510
uaucuuaagccacuagcau

SEQ ID NO: 2053512 - RNA, 19 nt, Artificial Sequence
  Description of Artificial Sequence: Synthetic oligonucleotide
  Sense strand starting at position 565 of SEQ ID NO: 1881553
acuuacuuggugcagagua

SEQ ID NO: 2053513 - RNA, 19 nt, Artificial Sequence
  Description of Artificial Sequence: Synthetic oligonucleotide
  Antisense strand to SEQ ID NO: 2053512
uacucugcaccaaguaagu

SEQ ID NO: 2053514 - RNA, 19 nt, Artificial Sequence
  Description of Artificial Sequence: Synthetic oligonucleotide
  Sense strand starting at position 803 of SEQ ID NO: 1881553
gccuucucacaucaaggua

SEQ ID NO: 2053515 - RNA, 19 nt, Artificial Sequence
  Description of Artificial Sequence: Synthetic oligonucleotide
  Antisense strand to SEQ ID NO: 2053514
uaccuugaugugagaaggc

SEQ ID NO: 2053516 - RNA, 19 nt, Artificial Sequence
  Description of Artificial Sequence: Synthetic oligonucleotide
  Sense strand starting at position 842 of SEQ ID NO: 1881553
guccuaagagagcaagguu

SEQ ID NO: 2053517 - RNA, 19 nt, Artificial Sequence
  Description of Artificial Sequence: Synthetic oligonucleotide
  Antisense strand to SEQ ID NO: 2053516
aaccuugcucucuuaggac

SEQ ID NO: 2053518 - RNA, 19 nt, Artificial Sequence
  Description of Artificial Sequence: Synthetic oligonucleotide
  Sense strand starting at position 1090 of SEQ ID NO: 1881553
uggccugauuucucuucuu

SEQ ID NO: 2053519 - RNA, 19 nt, Artificial Sequence
  Description of Artificial Sequence: Synthetic oligonucleotide
  Antisense strand to SEQ ID NO: 2053518
aagaagagaaaucaggcca

SEQ ID NO: 2053520 - RNA, 19 nt, Artificial Sequence
  Description of Artificial Sequence: Synthetic oligonucleotide
  Sense strand starting at position 1137 of SEQ ID NO: 1881553
ugguguuuccuacaccaug

SEQ ID NO: 2053521 - RNA, 19 nt, Artificial Sequence
  Description of Artificial Sequence: Synthetic oligonucleotide
  Antisense strand to SEQ ID NO: 2053520
caugguguaggaaacacca

SEQ ID NO: 2053522 - RNA, 19 nt, Artificial Sequence
  Description of Artificial Sequence: Synthetic oligonucleotide
  Sense strand starting at position 1511 of SEQ ID NO: 1881553
uugagauacuugcugauua

SEQ ID NO: 2053523 - RNA, 19 nt, Artificial Sequence
  Description of Artificial Sequence: Synthetic oligonucleotide
  Antisense strand to SEQ ID NO: 2053522
uaaucagcaaguaucucaa

SEQ ID NO: 2053524 - RNA, 19 nt, Artificial Sequence
  Description of Artificial Sequence: Synthetic oligonucleotide
  Sense strand starting at position 1523 of SEQ ID NO: 1881553
cugauuagggcuugagaag

SEQ ID NO: 2053525 - RNA, 19 nt, Artificial Sequence
  Description of Artificial Sequence: Synthetic oligonucleotide
  Antisense strand to SEQ ID NO: 2053524
cuucucaagcccuaaucag

SEQ ID NO: 2053526 - RNA, 19 nt, Artificial Sequence
  Description of Artificial Sequence: Synthetic oligonucleotide
  Sense strand starting at position 1828 of SEQ ID NO: 1881553
ggaggaguaugguuacuac

SEQ ID NO: 2053527 - RNA, 19 nt, Artificial Sequence
  Description of Artificial Sequence: Synthetic oligonucleotide
  Antisense strand to SEQ ID NO: 2053526
guaguaaccauacuccucc

SEQ ID NO: 2053528 - RNA, 19 nt, Artificial Sequence
  Description of Artificial Sequence: Synthetic oligonucleotide
  Sense strand starting at position 1831 of SEQ ID NO: 1881553
ggaguaugguuacuaccau

SEQ ID NO: 2053529 - RNA, 19 nt, Artificial Sequence
  Description of Artificial Sequence: Synthetic oligonucleotide
  Antisense strand to SEQ ID NO: 2053528
augguaguaaccauacucc

SEQ ID NO: 2053530 - RNA, 19 nt, Artificial Sequence
  Description of Artificial Sequence: Synthetic oligonucleotide
  Sense strand starting at position 1900 of SEQ ID NO: 1881553
gccuuucuacuacagaaag

SEQ ID NO: 2053531 - RNA, 19 nt, Artificial Sequence
  Description of Artificial Sequence: Synthetic oligonucleotide
  Antisense strand to SEQ ID NO: 2053530
cuuucuguaguagaaaggc

SEQ ID NO: 2053532 - RNA, 19 nt, Artificial Sequence
  Description of Artificial Sequence: Synthetic oligonucleotide
  Sense strand starting at position 2148 of SEQ ID NO: 1881553
ccugucaaucuuuauggga

SEQ ID NO: 2053533 - RNA, 19 nt, Artificial Sequence
  Description of Artificial Sequence: Synthetic oligonucleotide
  Antisense strand to SEQ ID NO: 2053532
ucccauaaagauugacagg

SEQ ID NO: 2053534 - RNA, 19 nt, Artificial Sequence
  Description of Artificial Sequence: Synthetic oligonucleotide
  Sense strand starting at position 2284 of SEQ ID NO: 1881553
ugcuuugaucgggaugaug

SEQ ID NO: 2053535 - RNA, 19 nt, Artificial Sequence
  Description of Artificial Sequence: Synthetic oligonucleotide
  Antisense strand to SEQ ID NO: 2053534
caucaucccgaucaaagca

SEQ ID NO: 2053536 - RNA, 19 nt, Artificial Sequence
  Description of Artificial Sequence: Synthetic oligonucleotide
  Sense strand starting at position 2313 of SEQ ID NO: 1881553
gaaggaguuguuggauaca

SEQ ID NO: 2053537 - RNA, 19 nt, Artificial Sequence
  Description of Artificial Sequence: Synthetic oligonucleotide
  Antisense strand to SEQ ID NO: 2053536
uguauccaacaacuccuuc

SEQ ID NO: 2053538 - RNA, 19 nt, Artificial Sequence
  Description of Artificial Sequence: Synthetic oligonucleotide
  Sense strand starting at position 2316 of SEQ ID NO: 1881553
ggaguuguuggauacacau

SEQ ID NO: 2053539 - RNA, 19 nt, Artificial Sequence
  Description of Artificial Sequence: Synthetic oligonucleotide
  Antisense strand to SEQ ID NO: 2053538
auguguauccaacaacucc

SEQ ID NO: 2053540 - RNA, 19 nt, Artificial Sequence
  Description of Artificial Sequence: Synthetic oligonucleotide
  Sense strand starting at position 2991 of SEQ ID NO: 1881553
uagacauaacaguguggau

SEQ ID NO: 2053541 - RNA, 19 nt, Artificial Sequence
  Description of Artificial Sequence: Synthetic oligonucleotide
  Antisense strand to SEQ ID NO: 2053540
auccacacuguuaugucua

SEQ ID NO: 2053542 - RNA, 19 nt, Artificial Sequence
  Description of Artificial Sequence: Synthetic oligonucleotide
  Sense strand starting at position 2993 of SEQ ID NO: 1881553
gacauaacaguguggauaa

SEQ ID NO: 2053543 - RNA, 19 nt, Artificial Sequence
  Description of Artificial Sequence: Synthetic oligonucleotide
  Antisense strand to SEQ ID NO: 2053542
uuauccacacuguuauguc

SEQ ID NO: 2053544 - RNA, 19 nt, Artificial Sequence
  Description of Artificial Sequence: Synthetic oligonucleotide
  Sense strand starting at position 3058 of SEQ ID NO: 1881553
cuguguaaacucuauagag

SEQ ID NO: 2053545 - RNA, 19 nt, Artificial Sequence
  Description of Artificial Sequence: Synthetic oligonucleotide
  Antisense strand to SEQ ID NO: 2053544
cucuauagaguuuacacag

SEQ ID NO: 2053546 - RNA, 19 nt, Artificial Sequence
  Description of Artificial Sequence: Synthetic oligonucleotide
  Sense strand starting at position 3060 of SEQ ID NO: 1881553
guguaaacucuauagaguu

SEQ ID NO: 2053547 - RNA, 19 nt, Artificial Sequence
  Description of Artificial Sequence: Synthetic oligonucleotide
  Antisense strand to SEQ ID NO: 2053546
aacucuauagaguuuacac

SEQ ID NO: 2053548 - RNA, 19 nt, Artificial Sequence
  Description of Artificial Sequence: Synthetic oligonucleotide
  Sense strand starting at position 3196 of SEQ ID NO: 1881553
aacugaaugggucgaauuc

SEQ ID NO: 2053549 - RNA, 19 nt, Artificial Sequence
  Description of Artificial Sequence: Synthetic oligonucleotide
  Antisense strand to SEQ ID NO: 2053548
gaauucgacccauucaguu

SEQ ID NO: 2053550 - RNA, 19 nt, Artificial Sequence
  Description of Artificial Sequence: Synthetic oligonucleotide
  Sense strand starting at position 3277 of SEQ ID NO: 1881553
uuauguacccaauaaggua

SEQ ID NO: 2053551 - RNA, 19 nt, Artificial Sequence
  Description of Artificial Sequence: Synthetic oligonucleotide
  Antisense strand to SEQ ID NO: 2053550
uaccuuauuggguacauaa

SEQ ID NO: 2053552 - RNA, 19 nt, Artificial Sequence
  Description of Artificial Sequence: Synthetic oligonucleotide
  Sense strand starting at position 3292 of SEQ ID NO: 1881553
gguagcagaguuuaugaaa

SEQ ID NO: 2053553 - RNA, 19 nt, Artificial Sequence
  Description of Artificial Sequence: Synthetic oligonucleotide
  Antisense strand to SEQ ID NO: 2053552
uuucauaaacucugcuacc

SEQ ID NO: 2053554 - RNA, 19 nt, Artificial Sequence
  Description of Artificial Sequence: Synthetic oligonucleotide
  Sense strand starting at position 3356 of SEQ ID NO: 1881553
cuaagagcucugcauggaa

SEQ ID NO: 2053555 - RNA, 19 nt, Artificial Sequence
  Description of Artificial Sequence: Synthetic oligonucleotide
  Antisense strand to SEQ ID NO: 2053554
uuccaugcagagcucuuag

SEQ ID NO: 2053556 - RNA, 19 nt, Artificial Sequence
  Description of Artificial Sequence: Synthetic oligonucleotide
  Sense strand starting at position 3365 of SEQ ID NO: 1881553
cugcauggaacguauaaua

SEQ ID NO: 2053557 - RNA, 19 nt, Artificial Sequence
  Description of Artificial Sequence: Synthetic oligonucleotide
  Antisense strand to SEQ ID NO: 2053556
uauuauacguuccaugcag

SEQ ID NO: 2053558 - RNA, 19 nt, Artificial Sequence
  Description of Artificial Sequence: Synthetic oligonucleotide
  Sense strand starting at position 3372 of SEQ ID NO: 1881553
gaacguauaauagggaagu

SEQ ID NO: 2053559 - RNA, 19 nt, Artificial Sequence
  Description of Artificial Sequence: Synthetic oligonucleotide
  Antisense strand to SEQ ID NO: 2053558
acuucccuauuauacguuc

SEQ ID NO: 2053560 - RNA, 19 nt, Artificial Sequence
  Description of Artificial Sequence: Synthetic oligonucleotide
  Sense strand starting at position 3578 of SEQ ID NO: 1881553
guguuagaaguucauaagu

SEQ ID NO: 2053561 - RNA, 19 nt, Artificial Sequence
  Description of Artificial Sequence: Synthetic oligonucleotide
  Antisense strand to SEQ ID NO: 2053560
acuuaugaacuucuaacac

SEQ ID NO: 2053562 - RNA, 19 nt, Artificial Sequence
  Description of Artificial Sequence: Synthetic oligonucleotide
  Sense strand starting at position 3591 of SEQ ID NO: 1881553
auaagugcuaaagggauaa

SEQ ID NO: 2053563 - RNA, 19 nt, Artificial Sequence
  Description of Artificial Sequence: Synthetic oligonucleotide
  Antisense strand to SEQ ID NO: 2053562
uuaucccuuuagcacuuau

SEQ ID NO: 2053564 - RNA, 19 nt, Artificial Sequence
  Description of Artificial Sequence: Synthetic oligonucleotide
  Sense strand starting at position 3694 of SEQ ID NO: 1881553
gaaagaggguuuguguaga

SEQ ID NO: 2053565 - RNA, 19 nt, Artificial Sequence
  Description of Artificial Sequence: Synthetic oligonucleotide
  Antisense strand to SEQ ID NO: 2053564
ucuacacaaacccucuuuc

SEQ ID NO: 2053566 - RNA, 19 nt, Artificial Sequence
  Description of Artificial Sequence: Synthetic oligonucleotide
  Sense strand starting at position 3699 of SEQ ID NO: 1881553
aggguuuguguagaugauc

SEQ ID NO: 2053567 - RNA, 19 nt, Artificial Sequence
  Description of Artificial Sequence: Synthetic oligonucleotide
  Antisense strand to SEQ ID NO: 2053566
gaucaucuacacaaacccu

SEQ ID NO: 2053568 - RNA, 19 nt, Artificial Sequence
  Description of Artificial Sequence: Synthetic oligonucleotide
  Sense strand starting at position 3702 of SEQ ID NO: 1881553
guuuguguagaugaucauu

SEQ ID NO: 2053569 - RNA, 19 nt, Artificial Sequence
  Description of Artificial Sequence: Synthetic oligonucleotide
  Antisense strand to SEQ ID NO: 2053568
aaugaucaucuacacaaac

SEQ ID NO: 2053570 - RNA, 19 nt, Artificial Sequence
  Description of Artificial Sequence: Synthetic oligonucleotide
  Sense strand starting at position 3844 of SEQ ID NO: 1881553
gggaaagauuuaggucaga

SEQ ID NO: 2053571 - RNA, 19 nt, Artificial Sequence
  Description of Artificial Sequence: Synthetic oligonucleotide
  Antisense strand to SEQ ID NO: 2053570
ucugaccuaaaucuuuccc

SEQ ID NO: 2053572 - RNA, 19 nt, Artificial Sequence
  Description of Artificial Sequence: Synthetic oligonucleotide
  Sense strand starting at position 3859 of SEQ ID NO: 1881553
cagacuugugucuggacaa

SEQ ID NO: 2053573 - RNA, 19 nt, Artificial Sequence
  Description of Artificial Sequence: Synthetic oligonucleotide
  Antisense strand to SEQ ID NO: 2053572
uuguccagacacaagucug

SEQ ID NO: 2053574 - RNA, 19 nt, Artificial Sequence
  Description of Artificial Sequence: Synthetic oligonucleotide
  Sense strand starting at position 3939 of SEQ ID NO: 1881553
cuacaauucgacuggauaa

SEQ ID NO: 2053575 - RNA, 19 nt, Artificial Sequence
  Description of Artificial Sequence: Synthetic oligonucleotide
  Antisense strand to SEQ ID NO: 2053574
uuauccagucgaauuguag

SEQ ID NO: 2053576 - RNA, 19 nt, Artificial Sequence
  Description of Artificial Sequence: Synthetic oligonucleotide
  Sense strand starting at position 83 of SEQ ID NO: 1881554
aggaauuuaucugacauuc

SEQ ID NO: 2053577 - RNA, 19 nt, Artificial Sequence
  Description of Artificial Sequence: Synthetic oligonucleotide
  Antisense strand to SEQ ID NO: 2053576
gaaugucagauaaauuccu

SEQ ID NO: 2053578 - RNA, 19 nt, Artificial Sequence
  Description of Artificial Sequence: Synthetic oligonucleotide
  Sense strand starting at position 212 of SEQ ID NO: 1881554
guuagcuugccagaagaau

SEQ ID NO: 2053579 - RNA, 19 nt, Artificial Sequence
  Description of Artificial Sequence: Synthetic oligonucleotide
  Antisense strand to SEQ ID NO: 2053578
auucuucuggcaagcuaac

SEQ ID NO: 2053580 - RNA, 19 nt, Artificial Sequence
  Description of Artificial Sequence: Synthetic oligonucleotide
  Sense strand starting at position 450 of SEQ ID NO: 1881554
auugaugaucuauguauca

SEQ ID NO: 2053581 - RNA, 19 nt, Artificial Sequence
  Description of Artificial Sequence: Synthetic oligonucleotide
  Antisense strand to SEQ ID NO: 2053580
ugauacauagaucaucaau

SEQ ID NO: 2053582 - RNA, 19 nt, Artificial Sequence
  Description of Artificial Sequence: Synthetic oligonucleotide
  Sense strand starting at position 526 of SEQ ID NO: 1881554
augcaaguauauuugcgaa

SEQ ID NO: 2053583 - RNA, 19 nt, Artificial Sequence
  Description of Artificial Sequence: Synthetic oligonucleotide
  Antisense strand to SEQ ID NO: 2053582
uucgcaaauauacuugcau

SEQ ID NO: 2053584 - RNA, 19 nt, Artificial Sequence
  Description of Artificial Sequence: Synthetic oligonucleotide
  Sense strand starting at position 551 of SEQ ID NO: 1881554
ccaguauugcuuuagaagu

SEQ ID NO: 2053585 - RNA, 19 nt, Artificial Sequence
  Description of Artificial Sequence: Synthetic oligonucleotide
  Antisense strand to SEQ ID NO: 2053584
acuucuaaagcaauacugg

SEQ ID NO: 2053586 - RNA, 19 nt, Artificial Sequence
  Description of Artificial Sequence: Synthetic oligonucleotide
  Sense strand starting at position 562 of SEQ ID NO: 1881554
uuagaaguguuagugaaua

SEQ ID NO: 2053587 - RNA, 19 nt, Artificial Sequence
  Description of Artificial Sequence: Synthetic oligonucleotide
  Antisense strand to SEQ ID NO: 2053586
uauucacuaacacuucuaa

SEQ ID NO: 2053588 - RNA, 19 nt, Artificial Sequence
  Description of Artificial Sequence: Synthetic oligonucleotide
  Sense strand starting at position 564 of SEQ ID NO: 1881554
agaaguguuagugaauauc

SEQ ID NO: 2053589 - RNA, 19 nt, Artificial Sequence
  Description of Artificial Sequence: Synthetic oligonucleotide
  Antisense strand to SEQ ID NO: 2053588
gauauucacuaacacuucu

SEQ ID NO: 2053590 - RNA, 19 nt, Artificial Sequence
  Description of Artificial Sequence: Synthetic oligonucleotide
  Sense strand starting at position 567 of SEQ ID NO: 1881554
aguguuagugaauauccuu

SEQ ID NO: 2053591 - RNA, 19 nt, Artificial Sequence
  Description of Artificial Sequence: Synthetic oligonucleotide
  Antisense strand to SEQ ID NO: 2053590
aaggauauucacuaacacu

SEQ ID NO: 2053592 - RNA, 19 nt, Artificial Sequence
  Description of Artificial Sequence: Synthetic oligonucleotide
  Sense strand starting at position 808 of SEQ ID NO: 1881554
acugaaaucccaggccauu

SEQ ID NO: 2053593 - RNA, 19 nt, Artificial Sequence
  Description of Artificial Sequence: Synthetic oligonucleotide
  Antisense strand to SEQ ID NO: 2053592
aauggccugggauuucagu

SEQ ID NO: 2053594 - RNA, 19 nt, Artificial Sequence
  Description of Artificial Sequence: Synthetic oligonucleotide
  Sense strand starting at position 961 of SEQ ID NO: 1881554
gucccaguucuaugaugga

SEQ ID NO: 2053595 - RNA, 19 nt, Artificial Sequence
  Description of Artificial Sequence: Synthetic oligonucleotide
  Antisense strand to SEQ ID NO: 2053594
uccaucauagaacugggac

SEQ ID NO: 2053596 - RNA, 19 nt, Artificial Sequence
  Description of Artificial Sequence: Synthetic oligonucleotide
  Sense strand starting at position 1071 of SEQ ID NO: 1881554
uuaaauagugcagauucua

SEQ ID NO: 2053597 - RNA, 19 nt, Artificial Sequence
  Description of Artificial Sequence: Synthetic oligonucleotide
  Antisense strand to SEQ ID NO: 2053596
uagaaucugcacuauuuaa

SEQ ID NO: 2053598 - RNA, 19 nt, Artificial Sequence
  Description of Artificial Sequence: Synthetic oligonucleotide
  Sense strand starting at position 1088 of SEQ ID NO: 1881554
uauagucuggcacaaagau

SEQ ID NO: 2053599 - RNA, 19 nt, Artificial Sequence
  Description of Artificial Sequence: Synthetic oligonucleotide
  Antisense strand to SEQ ID NO: 2053598
aucuuugugccagacuaua

SEQ ID NO: 2053600 - RNA, 19 nt, Artificial Sequence
  Description of Artificial Sequence: Synthetic oligonucleotide
  Sense strand starting at position 1097 of SEQ ID NO: 1881554
gcacaaagaucuuugauca

SEQ ID NO: 2053601 - RNA, 19 nt, Artificial Sequence
  Description of Artificial Sequence: Synthetic oligonucleotide
  Antisense strand to SEQ ID NO: 2053600
ugaucaaagaucuuugugc

SEQ ID NO: 2053602 - RNA, 19 nt, Artificial Sequence
  Description of Artificial Sequence: Synthetic oligonucleotide
  Sense strand starting at position 1155 of SEQ ID NO: 1881554
uggguauggaaauguaaag

SEQ ID NO: 2053603 - RNA, 19 nt, Artificial Sequence
  Description of Artificial Sequence: Synthetic oligonucleotide
  Antisense strand to SEQ ID NO: 2053602
cuuuacauuuccauaccca

SEQ ID NO: 2053604 - RNA, 19 nt, Artificial Sequence
  Description of Artificial Sequence: Synthetic oligonucleotide
  Sense strand starting at position 1271 of SEQ ID NO: 1881554
ggagguacaagauguuaag

SEQ ID NO: 2053605 - RNA, 19 nt, Artificial Sequence
  Description of Artificial Sequence: Synthetic oligonucleotide
  Antisense strand to SEQ ID NO: 2053604
cuuaacaucuuguaccucc

SEQ ID NO: 2053606 - RNA, 19 nt, Artificial Sequence
  Description of Artificial Sequence: Synthetic oligonucleotide
  Sense strand starting at position 1277 of SEQ ID NO: 1881554
acaagauguuaagcccaaa

SEQ ID NO: 2053607 - RNA, 19 nt, Artificial Sequence
  Description of Artificial Sequence: Synthetic oligonucleotide
  Antisense strand to SEQ ID NO: 2053606
uuugggcuuaacaucuugu

SEQ ID NO: 2053608 - RNA, 19 nt, Artificial Sequence
  Description of Artificial Sequence: Synthetic oligonucleotide
  Sense strand starting at position 1315 of SEQ ID NO: 1881554
gugguuuaggcacauauaa

SEQ ID NO: 2053609 - RNA, 19 nt, Artificial Sequence
  Description of Artificial Sequence: Synthetic oligonucleotide
  Antisense strand to SEQ ID NO: 2053608
uuauaugugccuaaaccac

SEQ ID NO: 2053610 - RNA, 19 nt, Artificial Sequence
  Description of Artificial Sequence: Synthetic oligonucleotide
  Sense strand starting at position 1422 of SEQ ID NO: 1881554
gacuuaaguguugaacauc

SEQ ID NO: 2053611 - RNA, 19 nt, Artificial Sequence
  Description of Artificial Sequence: Synthetic oligonucleotide
  Antisense strand to SEQ ID NO: 2053610
gauguucaacacuuaaguc

SEQ ID NO: 2053612 - RNA, 19 nt, Artificial Sequence
  Description of Artificial Sequence: Synthetic oligonucleotide
  Sense strand starting at position 1425 of SEQ ID NO: 1881554
uuaaguguugaacaucaac

SEQ ID NO: 2053613 - RNA, 19 nt, Artificial Sequence
  Description of Artificial Sequence: Synthetic oligonucleotide
  Antisense strand to SEQ ID NO: 2053612
guugauguucaacacuuaa

SEQ ID NO: 2053614 - RNA, 19 nt, Artificial Sequence
  Description of Artificial Sequence: Synthetic oligonucleotide
  Sense strand starting at position 1428 of SEQ ID NO: 1881554
aguguugaacaucaacuau

SEQ ID NO: 2053615 - RNA, 19 nt, Artificial Sequence
  Description of Artificial Sequence: Synthetic oligonucleotide
  Antisense strand to SEQ ID NO: 2053614
auaguugauguucaacacu

SEQ ID NO: 2053616 - RNA, 19 nt, Artificial Sequence
  Description of Artificial Sequence: Synthetic oligonucleotide
  Sense strand starting at position 1681 of SEQ ID NO: 1881554
uuucguuacaggcacagau

SEQ ID NO: 2053617 - RNA, 19 nt, Artificial Sequence
  Description of Artificial Sequence: Synthetic oligonucleotide
  Antisense strand to SEQ ID NO: 2053616
aucugugccuguaacgaaa

SEQ ID NO: 2053618 - RNA, 19 nt, Artificial Sequence
  Description of Artificial Sequence: Synthetic oligonucleotide
  Sense strand starting at position 1729 of SEQ ID NO: 1881554
ggguacccaucacucaaau

SEQ ID NO: 2053619 - RNA, 19 nt, Artificial Sequence
  Description of Artificial Sequence: Synthetic oligonucleotide
  Antisense strand to SEQ ID NO: 2053618
auuugagugauggguaccc

SEQ ID NO: 2053620 - RNA, 19 nt, Artificial Sequence
  Description of Artificial Sequence: Synthetic oligonucleotide
  Sense strand starting at position 1751 of SEQ ID NO: 1881554
guaaauugugcccauuaac

SEQ ID NO: 2053621 - RNA, 19 nt, Artificial Sequence
  Description of Artificial Sequence: Synthetic oligonucleotide
  Antisense strand to SEQ ID NO: 2053620
guuaaugggcacaauuuac

SEQ ID NO: 2053622 - RNA, 19 nt, Artificial Sequence
  Description of Artificial Sequence: Synthetic oligonucleotide
  Sense strand starting at position 1873 of SEQ ID NO: 1881554
ccuacuuaggagugagaau

SEQ ID NO: 2053623 - RNA, 19 nt, Artificial Sequence
  Description of Artificial Sequence: Synthetic oligonucleotide
  Antisense strand to SEQ ID NO: 2053622
auucucacuccuaaguagg

SEQ ID NO: 2053624 - RNA, 19 nt, Artificial Sequence
  Description of Artificial Sequence: Synthetic oligonucleotide
  Sense strand starting at position 2101 of SEQ ID NO: 1881554
uuauucucucagggauaug

SEQ ID NO: 2053625 - RNA, 19 nt, Artificial Sequence
  Description of Artificial Sequence: Synthetic oligonucleotide
  Antisense strand to SEQ ID NO: 2053624
cauaucccugagagaauaa

SEQ ID NO: 2053626 - RNA, 19 nt, Artificial Sequence
  Description of Artificial Sequence: Synthetic oligonucleotide
  Sense strand starting at position 2158 of SEQ ID NO: 1881554
aggagucuaacuuaugguu

SEQ ID NO: 2053627 - RNA, 19 nt, Artificial Sequence
  Description of Artificial Sequence: Synthetic oligonucleotide
  Antisense strand to SEQ ID NO: 2053626
aaccauaaguuagacuccu

SEQ ID NO: 2053628 - RNA, 19 nt, Artificial Sequence
  Description of Artificial Sequence: Synthetic oligonucleotide
  Sense strand starting at position 2167 of SEQ ID NO: 1881554
acuuaugguuuacccuaga

SEQ ID NO: 2053629 - RNA, 19 nt, Artificial Sequence
  Description of Artificial Sequence: Synthetic oligonucleotide
  Antisense strand to SEQ ID NO: 2053628
ucuaggguaaaccauaagu

SEQ ID NO: 2053630 - RNA, 19 nt, Artificial Sequence
  Description of Artificial Sequence: Synthetic oligonucleotide
  Sense strand starting at position 2172 of SEQ ID NO: 1881554
ugguuuacccuagaaggua

SEQ ID NO: 2053631 - RNA, 19 nt, Artificial Sequence
  Description of Artificial Sequence: Synthetic oligonucleotide
  Antisense strand to SEQ ID NO: 2053630
uaccuucuaggguaaacca

SEQ ID NO: 2053632 - RNA, 19 nt, Artificial Sequence
  Description of Artificial Sequence: Synthetic oligonucleotide
  Sense strand starting at position 2265 of SEQ ID NO: 1881554
agcguagaacauuauuauc

SEQ ID NO: 2053633 - RNA, 19 nt, Artificial Sequence
  Description of Artificial Sequence: Synthetic oligonucleotide
  Antisense strand to SEQ ID NO: 2053632
gauaauaauguucuacgcu

SEQ ID NO: 2053634 - RNA, 19 nt, Artificial Sequence
  Description of Artificial Sequence: Synthetic oligonucleotide
  Sense strand starting at position 2267 of SEQ ID NO: 1881554
cguagaacauuauuaucua

SEQ ID NO: 2053635 - RNA, 19 nt, Artificial Sequence
  Description of Artificial Sequence: Synthetic oligonucleotide
  Antisense strand to SEQ ID NO: 2053634
uagauaauaauguucuacg

SEQ ID NO: 2053636 - RNA, 19 nt, Artificial Sequence
  Description of Artificial Sequence: Synthetic oligonucleotide
  Sense strand starting at position 2568 of SEQ ID NO: 1881554
ugguguagccauuacccaa

SEQ ID NO: 2053637 - RNA, 19 nt, Artificial Sequence
  Description of Artificial Sequence: Synthetic oligonucleotide
  Antisense strand to SEQ ID NO: 2053636
uuggguaauggcuacacca

SEQ ID NO: 2053638 - RNA, 19 nt, Artificial Sequence
  Description of Artificial Sequence: Synthetic oligonucleotide
  Sense strand starting at position 2590 of SEQ ID NO: 1881554
guccaaauagucuacauug

SEQ ID NO: 2053639 - RNA, 19 nt, Artificial Sequence
  Description of Artificial Sequence: Synthetic oligonucleotide
  Antisense strand to SEQ ID NO: 2053638
caauguagacuauuuggac

SEQ ID NO: 2053640 - RNA, 19 nt, Artificial Sequence
  Description of Artificial Sequence: Synthetic oligonucleotide
  Sense strand starting at position 2592 of SEQ ID NO: 1881554
ccaaauagucuacauugua

SEQ ID NO: 2053641 - RNA, 19 nt, Artificial Sequence
  Description of Artificial Sequence: Synthetic oligonucleotide
  Antisense strand to SEQ ID NO: 2053640
uacaauguagacuauuugg

SEQ ID NO: 2053642 - RNA, 19 nt, Artificial Sequence
  Description of Artificial Sequence: Synthetic oligonucleotide
  Sense strand starting at position 3055 of SEQ ID NO: 1881554
aguuguuucccuuaagaua

SEQ ID NO: 2053643 - RNA, 19 nt, Artificial Sequence
  Description of Artificial Sequence: Synthetic oligonucleotide
  Antisense strand to SEQ ID NO: 2053642
uaucuuaagggaaacaacu

SEQ ID NO: 2053644 - RNA, 19 nt, Artificial Sequence
  Description of Artificial Sequence: Synthetic oligonucleotide
  Sense strand starting at position 3141 of SEQ ID NO: 1881554
aguauucuauugguuauga

SEQ ID NO: 2053645 - RNA, 19 nt, Artificial Sequence
  Description of Artificial Sequence: Synthetic oligonucleotide
  Antisense strand to SEQ ID NO: 2053644
ucauaaccaauagaauacu

SEQ ID NO: 2053646 - RNA, 19 nt, Artificial Sequence
  Description of Artificial Sequence: Synthetic oligonucleotide
  Sense strand starting at position 3142 of SEQ ID NO: 1881554
guauucuauugguuaugau

SEQ ID NO: 2053647 - RNA, 19 nt, Artificial Sequence
  Description of Artificial Sequence: Synthetic oligonucleotide
  Antisense strand to SEQ ID NO: 2053646
aucauaaccaauagaauac

SEQ ID NO: 2053648 - RNA, 19 nt, Artificial Sequence
  Description of Artificial Sequence: Synthetic oligonucleotide
  Sense strand starting at position 3345 of SEQ ID NO: 1881554
auuaaauacuuggccaaga

SEQ ID NO: 2053649 - RNA, 19 nt, Artificial Sequence
  Description of Artificial Sequence: Synthetic oligonucleotide
  Antisense strand to SEQ ID NO: 2053648
ucuuggccaaguauuuaau

SEQ ID NO: 2053650 - RNA, 19 nt, Artificial Sequence
  Description of Artificial Sequence: Synthetic oligonucleotide
  Sense strand starting at position 3413 of SEQ ID NO: 1881554
uuuacuugagauugucauu

SEQ ID NO: 2053651 - RNA, 19 nt, Artificial Sequence
  Description of Artificial Sequence: Synthetic oligonucleotide
  Antisense strand to SEQ ID NO: 2053650
aaugacaaucucaaguaaa

SEQ ID NO: 2053652 - RNA, 19 nt, Artificial Sequence
  Description of Artificial Sequence: Synthetic oligonucleotide
  Sense strand starting at position 3418 of SEQ ID NO: 1881554
uugagauugucauucuuaa

SEQ ID NO: 2053653 - RNA, 19 nt, Artificial Sequence
  Description of Artificial Sequence: Synthetic oligonucleotide
  Antisense strand to SEQ ID NO: 2053652
uuaagaaugacaaucucaa

SEQ ID NO: 2053654 - RNA, 19 nt, Artificial Sequence
  Description of Artificial Sequence: Synthetic oligonucleotide
  Sense strand starting at position 3533 of SEQ ID NO: 1881554
aguaguagccaguauagac

SEQ ID NO: 2053655 - RNA, 19 nt, Artificial Sequence
  Description of Artificial Sequence: Synthetic oligonucleotide
  Antisense strand to SEQ ID NO: 2053654
gucuauacuggcuacuacu

SEQ ID NO: 2053656 - RNA, 19 nt, Artificial Sequence
  Description of Artificial Sequence: Synthetic oligonucleotide
  Sense strand starting at position 10 of SEQ ID NO: 1881555
acgcauaucguguuucuca

SEQ ID NO: 2053657 - RNA, 19 nt, Artificial Sequence
  Description of Artificial Sequence: Synthetic oligonucleotide
  Antisense strand to SEQ ID NO: 2053656
ugagaaacacgauaugcgu

SEQ ID NO: 2053658 - RNA, 19 nt, Artificial Sequence
  Description of Artificial Sequence: Synthetic oligonucleotide
  Sense strand starting at position 13 of SEQ ID NO: 1881555
cauaucguguuucucagaa

SEQ ID NO: 2053659 - RNA, 19 nt, Artificial Sequence
  Description of Artificial Sequence: Synthetic oligonucleotide
  Antisense strand to SEQ ID NO: 2053658
uucugagaaacacgauaug

SEQ ID NO: 2053660 - RNA, 19 nt, Artificial Sequence
  Description of Artificial Sequence: Synthetic oligonucleotide
  Sense strand starting at position 36 of SEQ ID NO: 1881555
cuguaucauguuggaaguu

SEQ ID NO: 2053661 - RNA, 19 nt, Artificial Sequence
  Description of Artificial Sequence: Synthetic oligonucleotide
  Antisense strand to SEQ ID NO: 2053660
aacuuccaacaugauacag

SEQ ID NO: 2053662 - RNA, 19 nt, Artificial Sequence
  Description of Artificial Sequence: Synthetic oligonucleotide
  Sense strand starting at position 89 of SEQ ID NO: 1881555
aggccaggauuccuacaau

SEQ ID NO: 2053663 - RNA, 19 nt, Artificial Sequence
  Description of Artificial Sequence: Synthetic oligonucleotide
  Antisense strand to SEQ ID NO: 2053662
auuguaggaauccuggccu

SEQ ID NO: 2053664 - RNA, 19 nt, Artificial Sequence
  Description of Artificial Sequence: Synthetic oligonucleotide
  Sense strand starting at position 99 of SEQ ID NO: 1881555
uccuacaauugacaggaaa

SEQ ID NO: 2053665 - RNA, 19 nt, Artificial Sequence
  Description of Artificial Sequence: Synthetic oligonucleotide
  Antisense strand to SEQ ID NO: 2053664
uuuccugucaauuguagga

SEQ ID NO: 2053666 - RNA, 19 nt, Artificial Sequence
  Description of Artificial Sequence: Synthetic oligonucleotide
  Sense strand starting at position 137 of SEQ ID NO: 1881555
cucugauggacuugucaug

SEQ ID NO: 2053667 - RNA, 19 nt, Artificial Sequence
  Description of Artificial Sequence: Synthetic oligonucleotide
  Antisense strand to SEQ ID NO: 2053666
caugacaaguccaucagag

SEQ ID NO: 2053668 - RNA, 19 nt, Artificial Sequence
  Description of Artificial Sequence: Synthetic oligonucleotide
  Sense strand starting at position 144 of SEQ ID NO: 1881555
ggacuugucaugcagucau

SEQ ID NO: 2053669 - RNA, 19 nt, Artificial Sequence
  Description of Artificial Sequence: Synthetic oligonucleotide
  Antisense strand to SEQ ID NO: 2053668
augacugcaugacaagucc

SEQ ID NO: 2053670 - RNA, 19 nt, Artificial Sequence
  Description of Artificial Sequence: Synthetic oligonucleotide
  Sense strand starting at position 151 of SEQ ID NO: 1881555
ucaugcagucauuaaguga

SEQ ID NO: 2053671 - RNA, 19 nt, Artificial Sequence
  Description of Artificial Sequence: Synthetic oligonucleotide
  Antisense strand to SEQ ID NO: 2053670
ucacuuaaugacugcauga

SEQ ID NO: 2053672 - RNA, 19 nt, Artificial Sequence
  Description of Artificial Sequence: Synthetic oligonucleotide
  Sense strand starting at position 154 of SEQ ID NO: 1881555
ugcagucauuaagugaaau

SEQ ID NO: 2053673 - RNA, 19 nt, Artificial Sequence
  Description of Artificial Sequence: Synthetic oligonucleotide
  Antisense strand to SEQ ID NO: 2053672
auuucacuuaaugacugca

SEQ ID NO: 2053674 - RNA, 19 nt, Artificial Sequence
  Description of Artificial Sequence: Synthetic oligonucleotide
  Sense strand starting at position 231 of SEQ ID NO: 1881555
uuccuuugcgaagaucacu

SEQ ID NO: 2053675 - RNA, 19 nt, Artificial Sequence
  Description of Artificial Sequence: Synthetic oligonucleotide
  Antisense strand to SEQ ID NO: 2053674
agugaucuucgcaaaggaa

SEQ ID NO: 2053676 - RNA, 19 nt, Artificial Sequence
  Description of Artificial Sequence: Synthetic oligonucleotide
  Sense strand starting at position 274 of SEQ ID NO: 1881555
uucucugggcuuuaugaaa

SEQ ID NO: 2053677 - RNA, 19 nt, Artificial Sequence
  Description of Artificial Sequence: Synthetic oligonucleotide
  Antisense strand to SEQ ID NO: 2053676
uuucauaaagcccagagaa

SEQ ID NO: 2053678 - RNA, 19 nt, Artificial Sequence
  Description of Artificial Sequence: Synthetic oligonucleotide
  Sense strand starting at position 304 of SEQ ID NO: 1881555
uuuacugucuuagcagaua

SEQ ID NO: 2053679 - RNA, 19 nt, Artificial Sequence
  Description of Artificial Sequence: Synthetic oligonucleotide
  Antisense strand to SEQ ID NO: 2053678
uaucugcuaagacaguaaa

SEQ ID NO: 2053680 - RNA, 19 nt, Artificial Sequence
  Description of Artificial Sequence: Synthetic oligonucleotide
  Sense strand starting at position 424 of SEQ ID NO: 1881555
aguaaacugcuugaaauau

SEQ ID NO: 2053681 - RNA, 19 nt, Artificial Sequence
  Description of Artificial Sequence: Synthetic oligonucleotide
  Antisense strand to SEQ ID NO: 2053680
auauuucaagcaguuuacu

SEQ ID NO: 2053682 - RNA, 19 nt, Artificial Sequence
  Description of Artificial Sequence: Synthetic oligonucleotide
  Sense strand starting at position 570 of SEQ ID NO: 1881555
uuccuugggaaaugguauu

SEQ ID NO: 2053683 - RNA, 19 nt, Artificial Sequence
  Description of Artificial Sequence: Synthetic oligonucleotide
  Antisense strand to SEQ ID NO: 2053682
aauaccauuucccaaggaa

SEQ ID NO: 2053684 - RNA, 19 nt, Artificial Sequence
  Description of Artificial Sequence: Synthetic oligonucleotide
  Sense strand starting at position 847 of SEQ ID NO: 1881555
caugucuguggguaagaga

SEQ ID NO: 2053685 - RNA, 19 nt, Artificial Sequence
  Description of Artificial Sequence: Synthetic oligonucleotide
  Antisense strand to SEQ ID NO: 2053684
ucucuuacccacagacaug

SEQ ID NO: 2053686 - RNA, 19 nt, Artificial Sequence
  Description of Artificial Sequence: Synthetic oligonucleotide
  Sense strand starting at position 1122 of SEQ ID NO: 1881555
acuuauguugcucauucua

SEQ ID NO: 2053687 - RNA, 19 nt, Artificial Sequence
  Description of Artificial Sequence: Synthetic oligonucleotide
  Antisense strand to SEQ ID NO: 2053686
uagaaugagcaacauaagu

SEQ ID NO: 2053688 - RNA, 19 nt, Artificial Sequence
  Description of Artificial Sequence: Synthetic oligonucleotide
  Sense strand starting at position 1657 of SEQ ID NO: 1881555
aagugaacuugagagaacu

SEQ ID NO: 2053689 - RNA, 19 nt, Artificial Sequence
  Description of Artificial Sequence: Synthetic oligonucleotide
  Antisense strand to SEQ ID NO: 2053688
aguucucucaaguucacuu

SEQ ID NO: 2053690 - RNA, 19 nt, Artificial Sequence
  Description of Artificial Sequence: Synthetic oligonucleotide
  Sense strand starting at position 1720 of SEQ ID NO: 1881555
acuggucucuaaucaacga

SEQ ID NO: 2053691 - RNA, 19 nt, Artificial Sequence
  Description of Artificial Sequence: Synthetic oligonucleotide
  Antisense strand to SEQ ID NO: 2053690
ucguugauuagagaccagu

SEQ ID NO: 2053692 - RNA, 19 nt, Artificial Sequence
  Description of Artificial Sequence: Synthetic oligonucleotide
  Sense strand starting at position 1724 of SEQ ID NO: 1881555
gucucuaaucaacgagaau

SEQ ID NO: 2053693 - RNA, 19 nt, Artificial Sequence
  Description of Artificial Sequence: Synthetic oligonucleotide
  Antisense strand to SEQ ID NO: 2053692
auucucguugauuagagac

SEQ ID NO: 2053694 - RNA, 19 nt, Artificial Sequence
  Description of Artificial Sequence: Synthetic oligonucleotide
  Sense strand starting at position 1752 of SEQ ID NO: 1881555
caugcuguauguucugaaa

SEQ ID NO: 2053695 - RNA, 19 nt, Artificial Sequence
  Description of Artificial Sequence: Synthetic oligonucleotide
  Antisense strand to SEQ ID NO: 2053694
uuucagaacauacagcaug

SEQ ID NO: 2053696 - RNA, 19 nt, Artificial Sequence
  Description of Artificial Sequence: Synthetic oligonucleotide
  Sense strand starting at position 1799 of SEQ ID NO: 1881555
auuaaagucccuggaacuu

SEQ ID NO: 2053697 - RNA, 19 nt, Artificial Sequence
  Description of Artificial Sequence: Synthetic oligonucleotide
  Antisense strand to SEQ ID NO: 2053696
aaguuccagggacuuuaau

SEQ ID NO: 2053698 - RNA, 19 nt, Artificial Sequence
  Description of Artificial Sequence: Synthetic oligonucleotide
  Sense strand starting at position 2363 of SEQ ID NO: 1881555
aauacuugacagugaaguc

SEQ ID NO: 2053699 - RNA, 19 nt, Artificial Sequence
  Description of Artificial Sequence: Synthetic oligonucleotide
  Antisense strand to SEQ ID NO: 2053698
gacuucacugucaaguauu

SEQ ID NO: 2053700 - RNA, 19 nt, Artificial Sequence
  Description of Artificial Sequence: Synthetic oligonucleotide
  Sense strand starting at position 2382 of SEQ ID NO: 1881555
ugaugccauccagaagagu

SEQ ID NO: 2053701 - RNA, 19 nt, Artificial Sequence
  Description of Artificial Sequence: Synthetic oligonucleotide
  Antisense strand to SEQ ID NO: 2053700
acucuucuggauggcauca

SEQ ID NO: 2053702 - RNA, 19 nt, Artificial Sequence
  Description of Artificial Sequence: Synthetic oligonucleotide
  Sense strand starting at position 2408 of SEQ ID NO: 1881555
ggagucucuugagcuaaua

SEQ ID NO: 2053703 - RNA, 19 nt, Artificial Sequence
  Description of Artificial Sequence: Synthetic oligonucleotide
  Antisense strand to SEQ ID NO: 2053702
uauuagcucaagagacucc

SEQ ID NO: 2053704 - RNA, 19 nt, Artificial Sequence
  Description of Artificial Sequence: Synthetic oligonucleotide
  Sense strand starting at position 2608 of SEQ ID NO: 1881555
aggucucauuagcccuaaa

SEQ ID NO: 2053705 - RNA, 19 nt, Artificial Sequence
  Description of Artificial Sequence: Synthetic oligonucleotide
  Antisense strand to SEQ ID NO: 2053704
uuuagggcuaaugagaccu

SEQ ID NO: 2053706 - RNA, 19 nt, Artificial Sequence
  Description of Artificial Sequence: Synthetic oligonucleotide
  Sense strand starting at position 2812 of SEQ ID NO: 1881555
uugcccaaucaggaguaau

SEQ ID NO: 2053707 - RNA, 19 nt, Artificial Sequence
  Description of Artificial Sequence: Synthetic oligonucleotide
  Antisense strand to SEQ ID NO: 2053706
auuacuccugauugggcaa

SEQ ID NO: 2053708 - RNA, 19 nt, Artificial Sequence
  Description of Artificial Sequence: Synthetic oligonucleotide
  Sense strand starting at position 2860 of SEQ ID NO: 1881555
aaggcuauauugguuugua

SEQ ID NO: 2053709 - RNA, 19 nt, Artificial Sequence
  Description of Artificial Sequence: Synthetic oligonucleotide
  Antisense strand to SEQ ID NO: 2053708
uacaaaccaauauagccuu

SEQ ID NO: 2053710 - RNA, 19 nt, Artificial Sequence
  Description of Artificial Sequence: Synthetic oligonucleotide
  Sense strand starting at position 2861 of SEQ ID NO: 1881555
aggcuauauugguuuguag

SEQ ID NO: 2053711 - RNA, 19 nt, Artificial Sequence
  Description of Artificial Sequence: Synthetic oligonucleotide
  Antisense strand to SEQ ID NO: 2053710
cuacaaaccaauauagccu

SEQ ID NO: 2053712 - RNA, 19 nt, Artificial Sequence
  Description of Artificial Sequence: Synthetic oligonucleotide
  Sense strand starting at position 2868 of SEQ ID NO: 1881555
auugguuuguaggcacuua

SEQ ID NO: 2053713 - RNA, 19 nt, Artificial Sequence
  Description of Artificial Sequence: Synthetic oligonucleotide
  Antisense strand to SEQ ID NO: 2053712
uaagugccuacaaaccaau

SEQ ID NO: 2053714 - RNA, 19 nt, Artificial Sequence
  Description of Artificial Sequence: Synthetic oligonucleotide
  Sense strand starting at position 2869 of SEQ ID NO: 1881555
uugguuuguaggcacuuaa

SEQ ID NO: 2053715 - RNA, 19 nt, Artificial Sequence
  Description of Artificial Sequence: Synthetic oligonucleotide
  Antisense strand to SEQ ID NO: 2053714
uuaagugccuacaaaccaa

SEQ ID NO: 2053716 - RNA, 19 nt, Artificial Sequence
  Description of Artificial Sequence: Synthetic oligonucleotide
  Sense strand starting at position 3072 of SEQ ID NO: 1881555
ggccuaacuugucucucaa

SEQ ID NO: 2053717 - RNA, 19 nt, Artificial Sequence
  Description of Artificial Sequence: Synthetic oligonucleotide
  Antisense strand to SEQ ID NO: 2053716
uugagagacaaguuaggcc

SEQ ID NO: 2053718 - RNA, 19 nt, Artificial Sequence
  Description of Artificial Sequence: Synthetic oligonucleotide
  Sense strand starting at position 3123 of SEQ ID NO: 1881555
augagagaguagguuucau

SEQ ID NO: 2053719 - RNA, 19 nt, Artificial Sequence
  Description of Artificial Sequence: Synthetic oligonucleotide
  Antisense strand to SEQ ID NO: 2053718
augaaaccuacucucucau

SEQ ID NO: 2053720 - RNA, 19 nt, Artificial Sequence
  Description of Artificial Sequence: Synthetic oligonucleotide
  Sense strand starting at position 3565 of SEQ ID NO: 1881555
uugacagcaucaucuguau

SEQ ID NO: 2053721 - RNA, 19 nt, Artificial Sequence
  Description of Artificial Sequence: Synthetic oligonucleotide
  Antisense strand to SEQ ID NO: 2053720
auacagaugaugcugucaa

SEQ ID NO: 2053722 - RNA, 19 nt, Artificial Sequence
  Description of Artificial Sequence: Synthetic oligonucleotide
  Sense strand starting at position 3568 of SEQ ID NO: 1881555
acagcaucaucuguauuga

SEQ ID NO: 2053723 - RNA, 19 nt, Artificial Sequence
  Description of Artificial Sequence: Synthetic oligonucleotide
  Antisense strand to SEQ ID NO: 2053722
ucaauacagaugaugcugu

SEQ ID NO: 2053724 - RNA, 19 nt, Artificial Sequence
  Description of Artificial Sequence: Synthetic oligonucleotide
  Sense strand starting at position 3708 of SEQ ID NO: 1881555
agcucacuucuagguauuu

SEQ ID NO: 2053725 - RNA, 19 nt, Artificial Sequence
  Description of Artificial Sequence: Synthetic oligonucleotide
  Antisense strand to SEQ ID NO: 2053724
aaauaccuagaagugagcu

SEQ ID NO: 2053726 - RNA, 19 nt, Artificial Sequence
  Description of Artificial Sequence: Synthetic oligonucleotide
  Sense strand starting at position 3808 of SEQ ID NO: 1881555
gcugaaauguucuuaggua

SEQ ID NO: 2053727 - RNA, 19 nt, Artificial Sequence
  Description of Artificial Sequence: Synthetic oligonucleotide
  Antisense strand to SEQ ID NO: 2053726
uaccuaagaacauuucagc

SEQ ID NO: 2053728 - RNA, 19 nt, Artificial Sequence
  Description of Artificial Sequence: Synthetic oligonucleotide
  Sense strand starting at position 3812 of SEQ ID NO: 1881555
aaauguucuuagguaaaug

SEQ ID NO: 2053729 - RNA, 19 nt, Artificial Sequence
  Description of Artificial Sequence: Synthetic oligonucleotide
  Antisense strand to SEQ ID NO: 2053728
cauuuaccuaagaacauuu

SEQ ID NO: 2053730 - RNA, 19 nt, Artificial Sequence
  Description of Artificial Sequence: Synthetic oligonucleotide
  Sense strand starting at position 3839 of SEQ ID NO: 1881555
ugaaauaccacguaacgaa

SEQ ID NO: 2053731 - RNA, 19 nt, Artificial Sequence
  Description of Artificial Sequence: Synthetic oligonucleotide
  Antisense strand to SEQ ID NO: 2053730
uucguuacgugguauuuca

SEQ ID NO: 2053732 - RNA, 19 nt, Artificial Sequence
  Description of Artificial Sequence: Synthetic oligonucleotide
  Sense strand starting at position 3915 of SEQ ID NO: 1881555
ccaaauuguacugagugua

SEQ ID NO: 2053733 - RNA, 19 nt, Artificial Sequence
  Description of Artificial Sequence: Synthetic oligonucleotide
  Antisense strand to SEQ ID NO: 2053732
uacacucaguacaauuugg

SEQ ID NO: 2053734 - RNA, 19 nt, Artificial Sequence
  Description of Artificial Sequence: Synthetic oligonucleotide
  Sense strand starting at position 3918 of SEQ ID NO: 1881555
aauuguacugaguguaaga

SEQ ID NO: 2053735 - RNA, 19 nt, Artificial Sequence
  Description of Artificial Sequence: Synthetic oligonucleotide
  Antisense strand to SEQ ID NO: 2053734
ucuuacacucaguacaauu

SEQ ID NO: 2053736 - RNA, 19 nt, Artificial Sequence
  Description of Artificial Sequence: Synthetic oligonucleotide
  Sense strand starting at position 72 of SEQ ID NO: 1881556
caaagaagauagggauuua

SEQ ID NO: 2053737 - RNA, 19 nt, Artificial Sequence
  Description of Artificial Sequence: Synthetic oligonucleotide
  Antisense strand to SEQ ID NO: 2053736
uaaaucccuaucuucuuug

SEQ ID NO: 2053738 - RNA, 19 nt, Artificial Sequence
  Description of Artificial Sequence: Synthetic oligonucleotide
  Sense strand starting at position 486 of SEQ ID NO: 1881556
cugagcuacuuauccugaa

SEQ ID NO: 2053739 - RNA, 19 nt, Artificial Sequence
  Description of Artificial Sequence: Synthetic oligonucleotide
  Antisense strand to SEQ ID NO: 2053738
uucaggauaaguagcucag

SEQ ID NO: 2053740 - RNA, 19 nt, Artificial Sequence
  Description of Artificial Sequence: Synthetic oligonucleotide
  Sense strand starting at position 487 of SEQ ID NO: 1881556
ugagcuacuuauccugaaa

SEQ ID NO: 2053741 - RNA, 19 nt, Artificial Sequence
  Description of Artificial Sequence: Synthetic oligonucleotide
  Antisense strand to SEQ ID NO: 2053740
uuucaggauaaguagcuca

SEQ ID NO: 2053742 - RNA, 19 nt, Artificial Sequence
  Description of Artificial Sequence: Synthetic oligonucleotide
  Sense strand starting at position 502 of SEQ ID NO: 1881556
gaaaccauuguaugugaga

SEQ ID NO: 2053743 - RNA, 19 nt, Artificial Sequence
  Description of Artificial Sequence: Synthetic oligonucleotide
  Antisense strand to SEQ ID NO: 2053742
ucucacauacaaugguuuc

SEQ ID NO: 2053744 - RNA, 19 nt, Artificial Sequence
  Description of Artificial Sequence: Synthetic oligonucleotide
  Sense strand starting at position 503 of SEQ ID NO: 1881556
aaaccauuguaugugagaa

SEQ ID NO: 2053745 - RNA, 19 nt, Artificial Sequence
  Description of Artificial Sequence: Synthetic oligonucleotide
  Antisense strand to SEQ ID NO: 2053744
uucucacauacaaugguuu

SEQ ID NO: 2053746 - RNA, 19 nt, Artificial Sequence
  Description of Artificial Sequence: Synthetic oligonucleotide
  Sense strand starting at position 547 of SEQ ID NO: 1881556
ggaaaugcuguauggaaag

SEQ ID NO: 2053747 - RNA, 19 nt, Artificial Sequence
  Description of Artificial Sequence: Synthetic oligonucleotide
  Antisense strand to SEQ ID NO: 2053746
cuuuccauacagcauuucc

SEQ ID NO: 2053748 - RNA, 19 nt, Artificial Sequence
  Description of Artificial Sequence: Synthetic oligonucleotide
  Sense strand starting at position 582 of SEQ ID NO: 1881556
gcaccauggcaccagauau

SEQ ID NO: 2053749 - RNA, 19 nt, Artificial Sequence
  Description of Artificial Sequence: Synthetic oligonucleotide
  Antisense strand to SEQ ID NO: 2053748
auaucuggugccauggugc

SEQ ID NO: 2053750 - RNA, 19 nt, Artificial Sequence
  Description of Artificial Sequence: Synthetic oligonucleotide
  Sense strand starting at position 609 of SEQ ID NO: 1881556
agaagccaucuugagugua

SEQ ID NO: 2053751 - RNA, 19 nt, Artificial Sequence
  Description of Artificial Sequence: Synthetic oligonucleotide
  Antisense strand to SEQ ID NO: 2053750
uacacucaagauggcuucu

SEQ ID NO: 2053752 - RNA, 19 nt, Artificial Sequence
  Description of Artificial Sequence: Synthetic oligonucleotide
  Sense strand starting at position 914 of SEQ ID NO: 1881556
ucauguuguuuacuaauga

SEQ ID NO: 2053753 - RNA, 19 nt, Artificial Sequence
  Description of Artificial Sequence: Synthetic oligonucleotide
  Antisense strand to SEQ ID NO: 2053752
ucauuaguaaacaacauga

SEQ ID NO: 2053754 - RNA, 19 nt, Artificial Sequence
  Description of Artificial Sequence: Synthetic oligonucleotide
  Sense strand starting at position 1223 of SEQ ID NO: 1881556
gguuucuuucuugaauaau

SEQ ID NO: 2053755 - RNA, 19 nt, Artificial Sequence
  Description of Artificial Sequence: Synthetic oligonucleotide
  Antisense strand to SEQ ID NO: 2053754
auuauucaagaaagaaacc

SEQ ID NO: 2053756 - RNA, 19 nt, Artificial Sequence
  Description of Artificial Sequence: Synthetic oligonucleotide
  Sense strand starting at position 1235 of SEQ ID NO: 1881556
gaauaaucuguagacgcuu

SEQ ID NO: 2053757 - RNA, 19 nt, Artificial Sequence
  Description of Artificial Sequence: Synthetic oligonucleotide
  Antisense strand to SEQ ID NO: 2053756
aagcgucuacagauuauuc

SEQ ID NO: 2053758 - RNA, 19 nt, Artificial Sequence
  Description of Artificial Sequence: Synthetic oligonucleotide
  Sense strand starting at position 1286 of SEQ ID NO: 1881556
ugcuaaagauuggucuaag

SEQ ID NO: 2053759 - RNA, 19 nt, Artificial Sequence
  Description of Artificial Sequence: Synthetic oligonucleotide
  Antisense strand to SEQ ID NO: 2053758
cuuagaccaaucuuuagca

SEQ ID NO: 2053760 - RNA, 19 nt, Artificial Sequence
  Description of Artificial Sequence: Synthetic oligonucleotide
  Sense strand starting at position 1651 of SEQ ID NO: 1881556
uagagucugcuggaagcaa

SEQ ID NO: 2053761 - RNA, 19 nt, Artificial Sequence
  Description of Artificial Sequence: Synthetic oligonucleotide
  Antisense strand to SEQ ID NO: 2053760
uugcuuccagcagacucua

SEQ ID NO: 2053762 - RNA, 19 nt, Artificial Sequence
  Description of Artificial Sequence: Synthetic oligonucleotide
  Sense strand starting at position 1841 of SEQ ID NO: 1881556
ucuugaauuugagagguuu

SEQ ID NO: 2053763 - RNA, 19 nt, Artificial Sequence
  Description of Artificial Sequence: Synthetic oligonucleotide
  Antisense strand to SEQ ID NO: 2053762
aaaccucucaaauucaaga

SEQ ID NO: 2053764 - RNA, 19 nt, Artificial Sequence
  Description of Artificial Sequence: Synthetic oligonucleotide
  Sense strand starting at position 2173 of SEQ ID NO: 1881556
ugggaaggcuuguuuacag

SEQ ID NO: 2053765 - RNA, 19 nt, Artificial Sequence
  Description of Artificial Sequence: Synthetic oligonucleotide
  Antisense strand to SEQ ID NO: 2053764
cuguaaacaagccuuccca

SEQ ID NO: 2053766 - RNA, 19 nt, Artificial Sequence
  Description of Artificial Sequence: Synthetic oligonucleotide
  Sense strand starting at position 2228 of SEQ ID NO: 1881556
acaagugcucauuacagac

SEQ ID NO: 2053767 - RNA, 19 nt, Artificial Sequence
  Description of Artificial Sequence: Synthetic oligonucleotide
  Antisense strand to SEQ ID NO: 2053766
gucuguaaugagcacuugu

SEQ ID NO: 2053768 - RNA, 19 nt, Artificial Sequence
  Description of Artificial Sequence: Synthetic oligonucleotide
  Sense strand starting at position 2296 of SEQ ID NO: 1881556
agaggaacuuacuauuucu

SEQ ID NO: 2053769 - RNA, 19 nt, Artificial Sequence
  Description of Artificial Sequence: Synthetic oligonucleotide
  Antisense strand to SEQ ID NO: 2053768
agaaauaguaaguuccucu

SEQ ID NO: 2053770 - RNA, 19 nt, Artificial Sequence
  Description of Artificial Sequence: Synthetic oligonucleotide
  Sense strand starting at position 2469 of SEQ ID NO: 1881556
ccaggacucucauuaaguu

SEQ ID NO: 2053771 - RNA, 19 nt, Artificial Sequence
  Description of Artificial Sequence: Synthetic oligonucleotide
  Antisense strand to SEQ ID NO: 2053770
aacuuaaugagaguccugg

SEQ ID NO: 2053772 - RNA, 19 nt, Artificial Sequence
  Description of Artificial Sequence: Synthetic oligonucleotide
  Sense strand starting at position 2510 of SEQ ID NO: 1881556
ugcaccucucagcauaaga

SEQ ID NO: 2053773 - RNA, 19 nt, Artificial Sequence
  Description of Artificial Sequence: Synthetic oligonucleotide
  Antisense strand to SEQ ID NO: 2053772
ucuuaugcugagaggugca

SEQ ID NO: 2053774 - RNA, 19 nt, Artificial Sequence
  Description of Artificial Sequence: Synthetic oligonucleotide
  Sense strand starting at position 2605 of SEQ ID NO: 1881556
uuuacuugaccacgaugau

SEQ ID NO: 2053775 - RNA, 19 nt, Artificial Sequence
  Description of Artificial Sequence: Synthetic oligonucleotide
  Antisense strand to SEQ ID NO: 2053774
aucaucguggucaaguaaa

SEQ ID NO: 2053776 - RNA, 19 nt, Artificial Sequence
  Description of Artificial Sequence: Synthetic oligonucleotide
  Sense strand starting at position 2606 of SEQ ID NO: 1881556
uuacuugaccacgaugauu

SEQ ID NO: 2053777 - RNA, 19 nt, Artificial Sequence
  Description of Artificial Sequence: Synthetic oligonucleotide
  Antisense strand to SEQ ID NO: 2053776
aaucaucguggucaaguaa

SEQ ID NO: 2053778 - RNA, 19 nt, Artificial Sequence
  Description of Artificial Sequence: Synthetic oligonucleotide
  Sense strand starting at position 2615 of SEQ ID NO: 1881556
cacgaugauuuggauacau

SEQ ID NO: 2053779 - RNA, 19 nt, Artificial Sequence
  Description of Artificial Sequence: Synthetic oligonucleotide
  Antisense strand to SEQ ID NO: 2053778
auguauccaaaucaucgug

SEQ ID NO: 2053780 - RNA, 19 nt, Artificial Sequence
  Description of Artificial Sequence: Synthetic oligonucleotide
  Sense strand starting at position 2673 of SEQ ID NO: 1881556
auagacuugugcucauaua

SEQ ID NO: 2053781 - RNA, 19 nt, Artificial Sequence
  Description of Artificial Sequence: Synthetic oligonucleotide
  Antisense strand to SEQ ID NO: 2053780
uauaugagcacaagucuau

SEQ ID NO: 2053782 - RNA, 19 nt, Artificial Sequence
  Description of Artificial Sequence: Synthetic oligonucleotide
  Sense strand starting at position 2990 of SEQ ID NO: 1881556
uucuuuaaaggugguuaua

SEQ ID NO: 2053783 - RNA, 19 nt, Artificial Sequence
  Description of Artificial Sequence: Synthetic oligonucleotide
  Antisense strand to SEQ ID NO: 2053782
uauaaccaccuuuaaagaa

SEQ ID NO: 2053784 - RNA, 19 nt, Artificial Sequence
  Description of Artificial Sequence: Synthetic oligonucleotide
  Sense strand starting at position 2992 of SEQ ID NO: 1881556
cuuuaaaggugguuauaag

SEQ ID NO: 2053785 - RNA, 19 nt, Artificial Sequence
  Description of Artificial Sequence: Synthetic oligonucleotide
  Antisense strand to SEQ ID NO: 2053784
cuuauaaccaccuuuaaag

SEQ ID NO: 2053786 - RNA, 19 nt, Artificial Sequence
  Description of Artificial Sequence: Synthetic oligonucleotide
  Sense strand starting at position 2993 of SEQ ID NO: 1881556
uuuaaaggugguuauaagu

SEQ ID NO: 2053787 - RNA, 19 nt, Artificial Sequence
  Description of Artificial Sequence: Synthetic oligonucleotide
  Antisense strand to SEQ ID NO: 2053786
acuuauaaccaccuuuaaa

SEQ ID NO: 2053788 - RNA, 19 nt, Artificial Sequence
  Description of Artificial Sequence: Synthetic oligonucleotide
  Sense strand starting at position 3074 of SEQ ID NO: 1881556
cuggcuuugacauaaaggu

SEQ ID NO: 2053789 - RNA, 19 nt, Artificial Sequence
  Description of Artificial Sequence: Synthetic oligonucleotide
  Antisense strand to SEQ ID NO: 2053788
accuuuaugucaaagccag

SEQ ID NO: 2053790 - RNA, 19 nt, Artificial Sequence
  Description of Artificial Sequence: Synthetic oligonucleotide
  Sense strand starting at position 3215 of SEQ ID NO: 1881556
agugauagcaccugaggga

SEQ ID NO: 2053791 - RNA, 19 nt, Artificial Sequence
  Description of Artificial Sequence: Synthetic oligonucleotide
  Antisense strand to SEQ ID NO: 2053790
ucccucaggugcuaucacu

SEQ ID NO: 2053792 - RNA, 19 nt, Artificial Sequence
  Description of Artificial Sequence: Synthetic oligonucleotide
  Sense strand starting at position 3320 of SEQ ID NO: 1881556
gcagucauuugguauuucu

SEQ ID NO: 2053793 - RNA, 19 nt, Artificial Sequence
  Description of Artificial Sequence: Synthetic oligonucleotide
  Antisense strand to SEQ ID NO: 2053792
agaaauaccaaaugacugc

SEQ ID NO: 2053794 - RNA, 19 nt, Artificial Sequence
  Description of Artificial Sequence: Synthetic oligonucleotide
  Sense strand starting at position 3329 of SEQ ID NO: 1881556
ugguauuucucuucucagu

SEQ ID NO: 2053795 - RNA, 19 nt, Artificial Sequence
  Description of Artificial Sequence: Synthetic oligonucleotide
  Antisense strand to SEQ ID NO: 2053794
acugagaagagaaauacca

SEQ ID NO: 2053796 - RNA, 19 nt, Artificial Sequence
  Description of Artificial Sequence: Synthetic oligonucleotide
  Sense strand starting at position 3331 of SEQ ID NO: 1881556
guauuucucuucucaguau

SEQ ID NO: 2053797 - RNA, 19 nt, Artificial Sequence
  Description of Artificial Sequence: Synthetic oligonucleotide
  Antisense strand to SEQ ID NO: 2053796
auacugagaagagaaauac

SEQ ID NO: 2053798 - RNA, 19 nt, Artificial Sequence
  Description of Artificial Sequence: Synthetic oligonucleotide
  Sense strand starting at position 3335 of SEQ ID NO: 1881556
uucucuucucaguaucaga

SEQ ID NO: 2053799 - RNA, 19 nt, Artificial Sequence
  Description of Artificial Sequence: Synthetic oligonucleotide
  Antisense strand to SEQ ID NO: 2053798
ucugauacugagaagagaa

SEQ ID NO: 2053800 - RNA, 19 nt, Artificial Sequence
  Description of Artificial Sequence: Synthetic oligonucleotide
  Sense strand starting at position 3727 of SEQ ID NO: 1881556
gugugaauuugacugggcu

SEQ ID NO: 2053801 - RNA, 19 nt, Artificial Sequence
  Description of Artificial Sequence: Synthetic oligonucleotide
  Antisense strand to SEQ ID NO: 2053800
agcccagucaaauucacac

SEQ ID NO: 2053802 - RNA, 19 nt, Artificial Sequence
  Description of Artificial Sequence: Synthetic oligonucleotide
  Sense strand starting at position 3798 of SEQ ID NO: 1881556
agaugagauuaguauuuga

SEQ ID NO: 2053803 - RNA, 19 nt, Artificial Sequence
  Description of Artificial Sequence: Synthetic oligonucleotide
  Antisense strand to SEQ ID NO: 2053802
ucaaauacuaaucucaucu

SEQ ID NO: 2053804 - RNA, 19 nt, Artificial Sequence
  Description of Artificial Sequence: Synthetic oligonucleotide
  Sense strand starting at position 3803 of SEQ ID NO: 1881556
agauuaguauuugaacuga

SEQ ID NO: 2053805 - RNA, 19 nt, Artificial Sequence
  Description of Artificial Sequence: Synthetic oligonucleotide
  Antisense strand to SEQ ID NO: 2053804
ucaguucaaauacuaaucu

SEQ ID NO: 2053806 - RNA, 19 nt, Artificial Sequence
  Description of Artificial Sequence: Synthetic oligonucleotide
  Sense strand starting at position 3814 of SEQ ID NO: 1881556
ugaacugauuaacucagua

SEQ ID NO: 2053807 - RNA, 19 nt, Artificial Sequence
  Description of Artificial Sequence: Synthetic oligonucleotide
  Antisense strand to SEQ ID NO: 2053806
uacugaguuaaucaguuca

SEQ ID NO: 2053808 - RNA, 19 nt, Artificial Sequence
  Description of Artificial Sequence: Synthetic oligonucleotide
  Sense strand starting at position 3818 of SEQ ID NO: 1881556
cugauuaacucaguaaagu

SEQ ID NO: 2053809 - RNA, 19 nt, Artificial Sequence
  Description of Artificial Sequence: Synthetic oligonucleotide
  Antisense strand to SEQ ID NO: 2053808
acuuuacugaguuaaucag

SEQ ID NO: 2053810 - RNA, 19 nt, Artificial Sequence
  Description of Artificial Sequence: Synthetic oligonucleotide
  Sense strand starting at position 3949 of SEQ ID NO: 1881556
ugacauuggucuucucaug

SEQ ID NO: 2053811 - RNA, 19 nt, Artificial Sequence
  Description of Artificial Sequence: Synthetic oligonucleotide
  Antisense strand to SEQ ID NO: 2053810
caugagaagaccaauguca

SEQ ID NO: 2053812 - RNA, 19 nt, Artificial Sequence
  Description of Artificial Sequence: Synthetic oligonucleotide
  Sense strand starting at position 3979 of SEQ ID NO: 1881556
ggaguauaccaucaguuau

SEQ ID NO: 2053813 - RNA, 19 nt, Artificial Sequence
  Description of Artificial Sequence: Synthetic oligonucleotide
  Antisense strand to SEQ ID NO: 2053812
auaacugaugguauacucc

SEQ ID NO: 2053814 - RNA, 19 nt, Artificial Sequence
  Description of Artificial Sequence: Synthetic oligonucleotide
  Sense strand starting at position 3981 of SEQ ID NO: 1881556
aguauaccaucaguuauaa

SEQ ID NO: 2053815 - RNA, 19 nt, Artificial Sequence
  Description of Artificial Sequence: Synthetic oligonucleotide
  Antisense strand to SEQ ID NO: 2053814
uuauaacugaugguauacu

SEQ ID NO: 2053816 - RNA, 19 nt, Artificial Sequence
  Description of Artificial Sequence: Synthetic oligonucleotide
  Sense strand starting at position 201 of SEQ ID NO: 1881557
ggccgaucugcagacaauu

SEQ ID NO: 2053817 - RNA, 19 nt, Artificial Sequence
  Description of Artificial Sequence: Synthetic oligonucleotide
  Antisense strand to SEQ ID NO: 2053816
aauugucugcagaucggcc

SEQ ID NO: 2053818 - RNA, 19 nt, Artificial Sequence
  Description of Artificial Sequence: Synthetic oligonucleotide
  Sense strand starting at position 225 of SEQ ID NO: 1881557
ggguaauacuauccggaaa

SEQ ID NO: 2053819 - RNA, 19 nt, Artificial Sequence
  Description of Artificial Sequence: Synthetic oligonucleotide
  Antisense strand to SEQ ID NO: 2053818
uuuccggauaguauuaccc

SEQ ID NO: 2053820 - RNA, 19 nt, Artificial Sequence
  Description of Artificial Sequence: Synthetic oligonucleotide
  Sense strand starting at position 264 of SEQ ID NO: 1881557
ugacgaggccucugaaauu

SEQ ID NO: 2053821 - RNA, 19 nt, Artificial Sequence
  Description of Artificial Sequence: Synthetic oligonucleotide
  Antisense strand to SEQ ID NO: 2053820
aauuucagaggccucguca

SEQ ID NO: 2053822 - RNA, 19 nt, Artificial Sequence
  Description of Artificial Sequence: Synthetic oligonucleotide
  Sense strand starting at position 400 of SEQ ID NO: 1881557
agaggaagugaguguagau

SEQ ID NO: 2053823 - RNA, 19 nt, Artificial Sequence
  Description of Artificial Sequence: Synthetic oligonucleotide
  Antisense strand to SEQ ID NO: 2053822
aucuacacucacuuccucu

SEQ ID NO: 2053824 - RNA, 19 nt, Artificial Sequence
  Description of Artificial Sequence: Synthetic oligonucleotide
  Sense strand starting at position 770 of SEQ ID NO: 1881557
agcaguuuccuuuaccuca

SEQ ID NO: 2053825 - RNA, 19 nt, Artificial Sequence
  Description of Artificial Sequence: Synthetic oligonucleotide
  Antisense strand to SEQ ID NO: 2053824
ugagguaaaggaaacugcu

SEQ ID NO: 2053826 - RNA, 19 nt, Artificial Sequence
  Description of Artificial Sequence: Synthetic oligonucleotide
  Sense strand starting at position 812 of SEQ ID NO: 1881557
agaguaaagcugcaugaca

SEQ ID NO: 2053827 - RNA, 19 nt, Artificial Sequence
  Description of Artificial Sequence: Synthetic oligonucleotide
  Antisense strand to SEQ ID NO: 2053826
ugucaugcagcuuuacucu

SEQ ID NO: 2053828 - RNA, 19 nt, Artificial Sequence
  Description of Artificial Sequence: Synthetic oligonucleotide
  Sense strand starting at position 814 of SEQ ID NO: 1881557
aguaaagcugcaugacacu

SEQ ID NO: 2053829 - RNA, 19 nt, Artificial Sequence
  Description of Artificial Sequence: Synthetic oligonucleotide
  Antisense strand to SEQ ID NO: 2053828
agugucaugcagcuuuacu

SEQ ID NO: 2053830 - RNA, 19 nt, Artificial Sequence
  Description of Artificial Sequence: Synthetic oligonucleotide
  Sense strand starting at position 1014 of SEQ ID NO: 1881557
ccgaaucaccagggaucau

SEQ ID NO: 2053831 - RNA, 19 nt, Artificial Sequence
  Description of Artificial Sequence: Synthetic oligonucleotide
  Antisense strand to SEQ ID NO: 2053830
augaucccuggugauucgg

SEQ ID NO: 2053832 - RNA, 19 nt, Artificial Sequence
  Description of Artificial Sequence: Synthetic oligonucleotide
  Sense strand starting at position 1541 of SEQ ID NO: 1881557
ccagucugugugcaaacau

SEQ ID NO: 2053833 - RNA, 19 nt, Artificial Sequence
  Description of Artificial Sequence: Synthetic oligonucleotide
  Antisense strand to SEQ ID NO: 2053832
auguuugcacacagacugg

SEQ ID NO: 2053834 - RNA, 19 nt, Artificial Sequence
  Description of Artificial Sequence: Synthetic oligonucleotide
  Sense strand starting at position 1568 of SEQ ID NO: 1881557
aucaauaagccgugaagac

SEQ ID NO: 2053835 - RNA, 19 nt, Artificial Sequence
  Description of Artificial Sequence: Synthetic oligonucleotide
  Antisense strand to SEQ ID NO: 2053834
gucuucacggcuuauugau

SEQ ID NO: 2053836 - RNA, 19 nt, Artificial Sequence
  Description of Artificial Sequence: Synthetic oligonucleotide
  Sense strand starting at position 1569 of SEQ ID NO: 1881557
ucaauaagccgugaagaca

SEQ ID NO: 2053837 - RNA, 19 nt, Artificial Sequence
  Description of Artificial Sequence: Synthetic oligonucleotide
  Antisense strand to SEQ ID NO: 2053836
ugucuucacggcuuauuga

SEQ ID NO: 2053838 - RNA, 19 nt, Artificial Sequence
  Description of Artificial Sequence: Synthetic oligonucleotide
  Sense strand starting at position 1636 of SEQ ID NO: 1881557
auauguuuacgcuaaggua

SEQ ID NO: 2053839 - RNA, 19 nt, Artificial Sequence
  Description of Artificial Sequence: Synthetic oligonucleotide
  Antisense strand to SEQ ID NO: 2053838
uaccuuagcguaaacauau

SEQ ID NO: 2053840 - RNA, 19 nt, Artificial Sequence
  Description of Artificial Sequence: Synthetic oligonucleotide
  Sense strand starting at position 1803 of SEQ ID NO: 1881557
caggaucagagcuggaguu

SEQ ID NO: 2053841 - RNA, 19 nt, Artificial Sequence
  Description of Artificial Sequence: Synthetic oligonucleotide
  Antisense strand to SEQ ID NO: 2053840
aacuccagcucugauccug

SEQ ID NO: 2053842 - RNA, 19 nt, Artificial Sequence
  Description of Artificial Sequence: Synthetic oligonucleotide
  Sense strand starting at position 1826 of SEQ ID NO: 1881557
cccaaacguguuuaggagu

SEQ ID NO: 2053843 - RNA, 19 nt, Artificial Sequence
  Description of Artificial Sequence: Synthetic oligonucleotide
  Antisense strand to SEQ ID NO: 2053842
acuccuaaacacguuuggg

SEQ ID NO: 2053844 - RNA, 19 nt, Artificial Sequence
  Description of Artificial Sequence: Synthetic oligonucleotide
  Sense strand starting at position 2086 of SEQ ID NO: 1881557
uucccacaauguguaaauu

SEQ ID NO: 2053845 - RNA, 19 nt, Artificial Sequence
  Description of Artificial Sequence: Synthetic oligonucleotide
  Antisense strand to SEQ ID NO: 2053844
aauuuacacauugugggaa

SEQ ID NO: 2053846 - RNA, 19 nt, Artificial Sequence
  Description of Artificial Sequence: Synthetic oligonucleotide
  Sense strand starting at position 2087 of SEQ ID NO: 1881557
ucccacaauguguaaauua

SEQ ID NO: 2053847 - RNA, 19 nt, Artificial Sequence
  Description of Artificial Sequence: Synthetic oligonucleotide
  Antisense strand to SEQ ID NO: 2053846
uaauuuacacauuguggga

SEQ ID NO: 2053848 - RNA, 19 nt, Artificial Sequence
  Description of Artificial Sequence: Synthetic oligonucleotide
  Sense strand starting at position 2095 of SEQ ID NO: 1881557
uguguaaauuagucaaucu

SEQ ID NO: 2053849 - RNA, 19 nt, Artificial Sequence
  Description of Artificial Sequence: Synthetic oligonucleotide
  Antisense strand to SEQ ID NO: 2053848
agauugacuaauuuacaca

SEQ ID NO: 2053850 - RNA, 19 nt, Artificial Sequence
  Description of Artificial Sequence: Synthetic oligonucleotide
  Sense strand starting at position 2131 of SEQ ID NO: 1881557
ggccuuugaagcgaucuua

SEQ ID NO: 2053851 - RNA, 19 nt, Artificial Sequence
  Description of Artificial Sequence: Synthetic oligonucleotide
  Antisense strand to SEQ ID NO: 2053850
uaagaucgcuucaaaggcc

SEQ ID NO: 2053852 - RNA, 19 nt, Artificial Sequence
  Description of Artificial Sequence: Synthetic oligonucleotide
  Sense strand starting at position 2159 of SEQ ID NO: 1881557
uccauuagggcuuagugau

SEQ ID NO: 2053853 - RNA, 19 nt, Artificial Sequence
  Description of Artificial Sequence: Synthetic oligonucleotide
  Antisense strand to SEQ ID NO: 2053852
aucacuaagcccuaaugga

SEQ ID NO: 2053854 - RNA, 19 nt, Artificial Sequence
  Description of Artificial Sequence: Synthetic oligonucleotide
  Sense strand starting at position 2237 of SEQ ID NO: 1881557
ggcucaacuuaucuaaaug

SEQ ID NO: 2053855 - RNA, 19 nt, Artificial Sequence
  Description of Artificial Sequence: Synthetic oligonucleotide
  Antisense strand to SEQ ID NO: 2053854
cauuuagauaaguugagcc

SEQ ID NO: 2053856 - RNA, 19 nt, Artificial Sequence
  Description of Artificial Sequence: Synthetic oligonucleotide
  Sense strand starting at position 2375 of SEQ ID NO: 1881557
cagacuaaauugcuguaga

SEQ ID NO: 2053857 - RNA, 19 nt, Artificial Sequence
  Description of Artificial Sequence: Synthetic oligonucleotide
  Antisense strand to SEQ ID NO: 2053856
ucuacagcaauuuagucug

SEQ ID NO: 2053858 - RNA, 19 nt, Artificial Sequence
  Description of Artificial Sequence: Synthetic oligonucleotide
  Sense strand starting at position 2471 of SEQ ID NO: 1881557
agaucaaaggcuggcuauu

SEQ ID NO: 2053859 - RNA, 19 nt, Artificial Sequence
  Description of Artificial Sequence: Synthetic oligonucleotide
  Antisense strand to SEQ ID NO: 2053858
aauagccagccuuugaucu

SEQ ID NO: 2053860 - RNA, 19 nt, Artificial Sequence
  Description of Artificial Sequence: Synthetic oligonucleotide
  Sense strand starting at position 2507 of SEQ ID NO: 1881557
ugaagaauugcucauuguc

SEQ ID NO: 2053861 - RNA, 19 nt, Artificial Sequence
  Description of Artificial Sequence: Synthetic oligonucleotide
  Antisense strand to SEQ ID NO: 2053860
gacaaugagcaauucuuca

SEQ ID NO: 2053862 - RNA, 19 nt, Artificial Sequence
  Description of Artificial Sequence: Synthetic oligonucleotide
  Sense strand starting at position 2509 of SEQ ID NO: 1881557
aagaauugcucauugucag

SEQ ID NO: 2053863 - RNA, 19 nt, Artificial Sequence
  Description of Artificial Sequence: Synthetic oligonucleotide
  Antisense strand to SEQ ID NO: 2053862
cugacaaugagcaauucuu

SEQ ID NO: 2053864 - RNA, 19 nt, Artificial Sequence
  Description of Artificial Sequence: Synthetic oligonucleotide
  Sense strand starting at position 2608 of SEQ ID NO: 1881557
gggauucucugguucagaa

SEQ ID NO: 2053865 - RNA, 19 nt, Artificial Sequence
  Description of Artificial Sequence: Synthetic oligonucleotide
  Antisense strand to SEQ ID NO: 2053864
uucugaaccagagaauccc

SEQ ID NO: 2053866 - RNA, 19 nt, Artificial Sequence
  Description of Artificial Sequence: Synthetic oligonucleotide
  Sense strand starting at position 2773 of SEQ ID NO: 1881557
aagaucuuucgaggcacuu

SEQ ID NO: 2053867 - RNA, 19 nt, Artificial Sequence
  Description of Artificial Sequence: Synthetic oligonucleotide
  Antisense strand to SEQ ID NO: 2053866
aagugccucgaaagaucuu

SEQ ID NO: 2053868 - RNA, 19 nt, Artificial Sequence
  Description of Artificial Sequence: Synthetic oligonucleotide
  Sense strand starting at position 2797 of SEQ ID NO: 1881557
gcgaauuagagcugggaug

SEQ ID NO: 2053869 - RNA, 19 nt, Artificial Sequence
  Description of Artificial Sequence: Synthetic oligonucleotide
  Antisense strand to SEQ ID NO: 2053868
caucccagcucuaauucgc

SEQ ID NO: 2053870 - RNA, 19 nt, Artificial Sequence
  Description of Artificial Sequence: Synthetic oligonucleotide
  Sense strand starting at position 2798 of SEQ ID NO: 1881557
cgaauuagagcugggaugu

SEQ ID NO: 2053871 - RNA, 19 nt, Artificial Sequence
  Description of Artificial Sequence: Synthetic oligonucleotide
  Antisense strand to SEQ ID NO: 2053870
acaucccagcucuaauucg

SEQ ID NO: 2053872 - RNA, 19 nt, Artificial Sequence
  Description of Artificial Sequence: Synthetic oligonucleotide
  Sense strand starting at position 2799 of SEQ ID NO: 1881557
gaauuagagcugggaugug

SEQ ID NO: 2053873 - RNA, 19 nt, Artificial Sequence
  Description of Artificial Sequence: Synthetic oligonucleotide
  Antisense strand to SEQ ID NO: 2053872
cacaucccagcucuaauuc

SEQ ID NO: 2053874 - RNA, 19 nt, Artificial Sequence
  Description of Artificial Sequence: Synthetic oligonucleotide
  Sense strand starting at position 2815 of SEQ ID NO: 1881557
gugcucaucuucuugagga

SEQ ID NO: 2053875 - RNA, 19 nt, Artificial Sequence
  Description of Artificial Sequence: Synthetic oligonucleotide
  Antisense strand to SEQ ID NO: 2053874
uccucaagaagaugagcac

SEQ ID NO: 2053876 - RNA, 19 nt, Artificial Sequence
  Description of Artificial Sequence: Synthetic oligonucleotide
  Sense strand starting at position 2817 of SEQ ID NO: 1881557
gcucaucuucuugaggacu

SEQ ID NO: 2053877 - RNA, 19 nt, Artificial Sequence
  Description of Artificial Sequence: Synthetic oligonucleotide
  Antisense strand to SEQ ID NO: 2053876
aguccucaagaagaugagc

SEQ ID NO: 2053878 - RNA, 19 nt, Artificial Sequence
  Description of Artificial Sequence: Synthetic oligonucleotide
  Sense strand starting at position 3023 of SEQ ID NO: 1881557
gagcucugaccugggugaa

SEQ ID NO: 2053879 - RNA, 19 nt, Artificial Sequence
  Description of Artificial Sequence: Synthetic oligonucleotide
  Antisense strand to SEQ ID NO: 2053878
uucacccaggucagagcuc

SEQ ID NO: 2053880 - RNA, 19 nt, Artificial Sequence
  Description of Artificial Sequence: Synthetic oligonucleotide
  Sense strand starting at position 3024 of SEQ ID NO: 1881557
agcucugaccugggugaau

SEQ ID NO: 2053881 - RNA, 19 nt, Artificial Sequence
  Description of Artificial Sequence: Synthetic oligonucleotide
  Antisense strand to SEQ ID NO: 2053880
auucacccaggucagagcu

SEQ ID NO: 2053882 - RNA, 19 nt, Artificial Sequence
  Description of Artificial Sequence: Synthetic oligonucleotide
  Sense strand starting at position 3050 of SEQ ID NO: 1881557
uugccagggucauuuguaa

SEQ ID NO: 2053883 - RNA, 19 nt, Artificial Sequence
  Description of Artificial Sequence: Synthetic oligonucleotide
  Antisense strand to SEQ ID NO: 2053882
uuacaaaugacccuggcaa

SEQ ID NO: 2053884 - RNA, 19 nt, Artificial Sequence
  Description of Artificial Sequence: Synthetic oligonucleotide
  Sense strand starting at position 3383 of SEQ ID NO: 1881557
guucccuuccguguaucau

SEQ ID NO: 2053885 - RNA, 19 nt, Artificial Sequence
  Description of Artificial Sequence: Synthetic oligonucleotide
  Antisense strand to SEQ ID NO: 2053884
augauacacggaagggaac

SEQ ID NO: 2053886 - RNA, 19 nt, Artificial Sequence
  Description of Artificial Sequence: Synthetic oligonucleotide
  Sense strand starting at position 3391 of SEQ ID NO: 1881557
ccguguaucaugggaauca

SEQ ID NO: 2053887 - RNA, 19 nt, Artificial Sequence
  Description of Artificial Sequence: Synthetic oligonucleotide
  Antisense strand to SEQ ID NO: 2053886
ugauucccaugauacacgg

SEQ ID NO: 2053888 - RNA, 19 nt, Artificial Sequence
  Description of Artificial Sequence: Synthetic oligonucleotide
  Sense strand starting at position 3687 of SEQ ID NO: 1881557
ggccucguaucauuuacuu

SEQ ID NO: 2053889 - RNA, 19 nt, Artificial Sequence
  Description of Artificial Sequence: Synthetic oligonucleotide
  Antisense strand to SEQ ID NO: 2053888
aaguaaaugauacgaggcc

SEQ ID NO: 2053890 - RNA, 19 nt, Artificial Sequence
  Description of Artificial Sequence: Synthetic oligonucleotide
  Sense strand starting at position 3756 of SEQ ID NO: 1881557
ggcugaugauaucucaucu

SEQ ID NO: 2053891 - RNA, 19 nt, Artificial Sequence
  Description of Artificial Sequence: Synthetic oligonucleotide
  Antisense strand to SEQ ID NO: 2053890
agaugagauaucaucagcc

SEQ ID NO: 2053892 - RNA, 19 nt, Artificial Sequence
  Description of Artificial Sequence: Synthetic oligonucleotide
  Sense strand starting at position 3855 of SEQ ID NO: 1881557
guaucucagguauauguua

SEQ ID NO: 2053893 - RNA, 19 nt, Artificial Sequence
  Description of Artificial Sequence: Synthetic oligonucleotide
  Antisense strand to SEQ ID NO: 2053892
uaacauauaccugagauac

SEQ ID NO: 2053894 - RNA, 19 nt, Artificial Sequence
  Description of Artificial Sequence: Synthetic oligonucleotide
  Sense strand starting at position 3937 of SEQ ID NO: 1881557
gggucuaucuaguugacag

SEQ ID NO: 2053895 - RNA, 19 nt, Artificial Sequence
  Description of Artificial Sequence: Synthetic oligonucleotide
  Antisense strand to SEQ ID NO: 2053894
cugucaacuagauagaccc

SEQ ID NO: 2053896 - RNA, 19 nt, Artificial Sequence
  Description of Artificial Sequence: Synthetic oligonucleotide
  Sense strand starting at position 299 of SEQ ID NO: 1881558
ccucccuaugagcaugaua

SEQ ID NO: 2053897 - RNA, 19 nt, Artificial Sequence
  Description of Artificial Sequence: Synthetic oligonucleotide
  Antisense strand to SEQ ID NO: 2053896
uaucaugcucauagggagg

SEQ ID NO: 2053898 - RNA, 19 nt, Artificial Sequence
  Description of Artificial Sequence: Synthetic oligonucleotide
  Sense strand starting at position 301 of SEQ ID NO: 1881558
ucccuaugagcaugauaga

SEQ ID NO: 2053899 - RNA, 19 nt, Artificial Sequence
  Description of Artificial Sequence: Synthetic oligonucleotide
  Antisense strand to SEQ ID NO: 2053898
ucuaucaugcucauaggga

SEQ ID NO: 2053900 - RNA, 19 nt, Artificial Sequence
  Description of Artificial Sequence: Synthetic oligonucleotide
  Sense strand starting at position 329 of SEQ ID NO: 1881558
uucucuauuuccuaggaga

SEQ ID NO: 2053901 - RNA, 19 nt, Artificial Sequence
  Description of Artificial Sequence: Synthetic oligonucleotide
  Antisense strand to SEQ ID NO: 2053900
ucuccuaggaaauagagaa

SEQ ID NO: 2053902 - RNA, 19 nt, Artificial Sequence
  Description of Artificial Sequence: Synthetic oligonucleotide
  Sense strand starting at position 332 of SEQ ID NO: 1881558
ucuauuuccuaggagagaa

SEQ ID NO: 2053903 - RNA, 19 nt, Artificial Sequence
  Description of Artificial Sequence: Synthetic oligonucleotide
  Antisense strand to SEQ ID NO: 2053902
uucucuccuaggaaauaga

SEQ ID NO: 2053904 - RNA, 19 nt, Artificial Sequence
  Description of Artificial Sequence: Synthetic oligonucleotide
  Sense strand starting at position 505 of SEQ ID NO: 1881558
gcagucuuucagggagaaa

SEQ ID NO: 2053905 - RNA, 19 nt, Artificial Sequence
  Description of Artificial Sequence: Synthetic oligonucleotide
  Antisense strand to SEQ ID NO: 2053904
uuucucccugaaagacugc

SEQ ID NO: 2053906 - RNA, 19 nt, Artificial Sequence
  Description of Artificial Sequence: Synthetic oligonucleotide
  Sense strand starting at position 596 of SEQ ID NO: 1881558
ggaaucuaaucuuugaugu

SEQ ID NO: 2053907 - RNA, 19 nt, Artificial Sequence
  Description of Artificial Sequence: Synthetic oligonucleotide
  Antisense strand to SEQ ID NO: 2053906
acaucaaagauuagauucc

SEQ ID NO: 2053908 - RNA, 19 nt, Artificial Sequence
  Description of Artificial Sequence: Synthetic oligonucleotide
  Sense strand starting at position 644 of SEQ ID NO: 1881558
ccugaauaaucuuagauga

SEQ ID NO: 2053909 - RNA, 19 nt, Artificial Sequence
  Description of Artificial Sequence: Synthetic oligonucleotide
  Antisense strand to SEQ ID NO: 2053908
ucaucuaagauuauucagg

SEQ ID NO: 2053910 - RNA, 19 nt, Artificial Sequence
  Description of Artificial Sequence: Synthetic oligonucleotide
  Sense strand starting at position 651 of SEQ ID NO: 1881558
aaucuuagaugauuguaag

SEQ ID NO: 2053911 - RNA, 19 nt, Artificial Sequence
  Description of Artificial Sequence: Synthetic oligonucleotide
  Antisense strand to SEQ ID NO: 2053910
cuuacaaucaucuaagauu

SEQ ID NO: 2053912 - RNA, 19 nt, Artificial Sequence
  Description of Artificial Sequence: Synthetic oligonucleotide
  Sense strand starting at position 788 of SEQ ID NO: 1881558
cugaaauaugacgguaacu

SEQ ID NO: 2053913 - RNA, 19 nt, Artificial Sequence
  Description of Artificial Sequence: Synthetic oligonucleotide
  Antisense strand to SEQ ID NO: 2053912
aguuaccgucauauuucag

SEQ ID NO: 2053914 - RNA, 19 nt, Artificial Sequence
  Description of Artificial Sequence: Synthetic oligonucleotide
  Sense strand starting at position 811 of SEQ ID NO: 1881558
aggucuuucuggucauugu

SEQ ID NO: 2053915 - RNA, 19 nt, Artificial Sequence
  Description of Artificial Sequence: Synthetic oligonucleotide
  Antisense strand to SEQ ID NO: 2053914
acaaugaccagaaagaccu

SEQ ID NO: 2053916 - RNA, 19 nt, Artificial Sequence
  Description of Artificial Sequence: Synthetic oligonucleotide
  Sense strand starting at position 1139 of SEQ ID NO: 1881558
acgugacuacaggguaauu

SEQ ID NO: 2053917 - RNA, 19 nt, Artificial Sequence
  Description of Artificial Sequence: Synthetic oligonucleotide
  Antisense strand to SEQ ID NO: 2053916
aauuacccuguagucacgu

SEQ ID NO: 2053918 - RNA, 19 nt, Artificial Sequence
  Description of Artificial Sequence: Synthetic oligonucleotide
  Sense strand starting at position 1150 of SEQ ID NO: 1881558
ggguaauuggagcauucau

SEQ ID NO: 2053919 - RNA, 19 nt, Artificial Sequence
  Description of Artificial Sequence: Synthetic oligonucleotide
  Antisense strand to SEQ ID NO: 2053918
augaaugcuccaauuaccc

SEQ ID NO: 2053920 - RNA, 19 nt, Artificial Sequence
  Description of Artificial Sequence: Synthetic oligonucleotide
  Sense strand starting at position 1249 of SEQ ID NO: 1881558
ggcuuugggucuucucaga

SEQ ID NO: 2053921 - RNA, 19 nt, Artificial Sequence
  Description of Artificial Sequence: Synthetic oligonucleotide
  Antisense strand to SEQ ID NO: 2053920
ucugagaagacccaaagcc

SEQ ID NO: 2053922 - RNA, 19 nt, Artificial Sequence
  Description of Artificial Sequence: Synthetic oligonucleotide
  Sense strand starting at position 1621 of SEQ ID NO: 1881558
gugaguugagcugaggacu

SEQ ID NO: 2053923 - RNA, 19 nt, Artificial Sequence
  Description of Artificial Sequence: Synthetic oligonucleotide
  Antisense strand to SEQ ID NO: 2053922
aguccucagcucaacucac

SEQ ID NO: 2053924 - RNA, 19 nt, Artificial Sequence
  Description of Artificial Sequence: Synthetic oligonucleotide
  Sense strand starting at position 1640 of SEQ ID NO: 1881558
gucacuuaccuguguggau

SEQ ID NO: 2053925 - RNA, 19 nt, Artificial Sequence
  Description of Artificial Sequence: Synthetic oligonucleotide
  Antisense strand to SEQ ID NO: 2053924
auccacacagguaagugac

SEQ ID NO: 2053926 - RNA, 19 nt, Artificial Sequence
  Description of Artificial Sequence: Synthetic oligonucleotide
  Sense strand starting at position 1722 of SEQ ID NO: 1881558
gggaaagguguucaaggcu

SEQ ID NO: 2053927 - RNA, 19 nt, Artificial Sequence
  Description of Artificial Sequence: Synthetic oligonucleotide
  Antisense strand to SEQ ID NO: 2053926
agccuugaacaccuuuccc

SEQ ID NO: 2053928 - RNA, 19 nt, Artificial Sequence
  Description of Artificial Sequence: Synthetic oligonucleotide
  Sense strand starting at position 1780 of SEQ ID NO: 1881558
cccauugaucgccaaaguu

SEQ ID NO: 2053929 - RNA, 19 nt, Artificial Sequence
  Description of Artificial Sequence: Synthetic oligonucleotide
  Antisense strand to SEQ ID NO: 2053928
aacuuuggcgaucaauggg

SEQ ID NO: 2053930 - RNA, 19 nt, Artificial Sequence
  Description of Artificial Sequence: Synthetic oligonucleotide
  Sense strand starting at position 1918 of SEQ ID NO: 1881558
aggguauaugaguagcuuu

SEQ ID NO: 2053931 - RNA, 19 nt, Artificial Sequence
  Description of Artificial Sequence: Synthetic oligonucleotide
  Antisense strand to SEQ ID NO: 2053930
aaagcuacucauauacccu

SEQ ID NO: 2053932 - RNA, 19 nt, Artificial Sequence
  Description of Artificial Sequence: Synthetic oligonucleotide
  Sense strand starting at position 1987 of SEQ ID NO: 1881558
ggaaucuagugagcaaaga

SEQ ID NO: 2053933 - RNA, 19 nt, Artificial Sequence
  Description of Artificial Sequence: Synthetic oligonucleotide
  Antisense strand to SEQ ID NO: 2053932
ucuuugcucacuagauucc

SEQ ID NO: 2053934 - RNA, 19 nt, Artificial Sequence
  Description of Artificial Sequence: Synthetic oligonucleotide
  Sense strand starting at position 2028 of SEQ ID NO: 1881558
ggcauagaauguucuagag

SEQ ID NO: 2053935 - RNA, 19 nt, Artificial Sequence
  Description of Artificial Sequence: Synthetic oligonucleotide
  Antisense strand to SEQ ID NO: 2053934
cucuagaacauucuaugcc

SEQ ID NO: 2053936 - RNA, 19 nt, Artificial Sequence
  Description of Artificial Sequence: Synthetic oligonucleotide
  Sense strand starting at position 2032 of SEQ ID NO: 1881558
uagaauguucuagagugcu

SEQ ID NO: 2053937 - RNA, 19 nt, Artificial Sequence
  Description of Artificial Sequence: Synthetic oligonucleotide
  Antisense strand to SEQ ID NO: 2053936
agcacucuagaacauucua

SEQ ID NO: 2053938 - RNA, 19 nt, Artificial Sequence
  Description of Artificial Sequence: Synthetic oligonucleotide
  Sense strand starting at position 2035 of SEQ ID NO: 1881558
aauguucuagagugcuaga

SEQ ID NO: 2053939 - RNA, 19 nt, Artificial Sequence
  Description of Artificial Sequence: Synthetic oligonucleotide
  Antisense strand to SEQ ID NO: 2053938
ucuagcacucuagaacauu

SEQ ID NO: 2053940 - RNA, 19 nt, Artificial Sequence
  Description of Artificial Sequence: Synthetic oligonucleotide
  Sense strand starting at position 2040 of SEQ ID NO: 1881558
ucuagagugcuagaaauug

SEQ ID NO: 2053941 - RNA, 19 nt, Artificial Sequence
  Description of Artificial Sequence: Synthetic oligonucleotide
  Antisense strand to SEQ ID NO: 2053940
caauuucuagcacucuaga

SEQ ID NO: 2053942 - RNA, 19 nt, Artificial Sequence
  Description of Artificial Sequence: Synthetic oligonucleotide
  Sense strand starting at position 2045 of SEQ ID NO: 1881558
agugcuagaaauuggaaca

SEQ ID NO: 2053943 - RNA, 19 nt, Artificial Sequence
  Description of Artificial Sequence: Synthetic oligonucleotide
  Antisense strand to SEQ ID NO: 2053942
uguuccaauuucuagcacu

SEQ ID NO: 2053944 - RNA, 19 nt, Artificial Sequence
  Description of Artificial Sequence: Synthetic oligonucleotide
  Sense strand starting at position 2046 of SEQ ID NO: 1881558
gugcuagaaauuggaacau

SEQ ID NO: 2053945 - RNA, 19 nt, Artificial Sequence
  Description of Artificial Sequence: Synthetic oligonucleotide
  Antisense strand to SEQ ID NO: 2053944
auguuccaauuucuagcac

SEQ ID NO: 2053946 - RNA, 19 nt, Artificial Sequence
  Description of Artificial Sequence: Synthetic oligonucleotide
  Sense strand starting at position 2303 of SEQ ID NO: 1881558
cuggguauucucuauauac

SEQ ID NO: 2053947 - RNA, 19 nt, Artificial Sequence
  Description of Artificial Sequence: Synthetic oligonucleotide
  Antisense strand to SEQ ID NO: 2053946
guauauagagaauacccag

SEQ ID NO: 2053948 - RNA, 19 nt, Artificial Sequence
  Description of Artificial Sequence: Synthetic oligonucleotide
  Sense strand starting at position 2305 of SEQ ID NO: 1881558
ggguauucucuauauacac

SEQ ID NO: 2053949 - RNA, 19 nt, Artificial Sequence
  Description of Artificial Sequence: Synthetic oligonucleotide
  Antisense strand to SEQ ID NO: 2053948
guguauauagagaauaccc

SEQ ID NO: 2053950 - RNA, 19 nt, Artificial Sequence
  Description of Artificial Sequence: Synthetic oligonucleotide
  Sense strand starting at position 2616 of SEQ ID NO: 1881558
gggcgucgccaaguucuua

SEQ ID NO: 2053951 - RNA, 19 nt, Artificial Sequence
  Description of Artificial Sequence: Synthetic oligonucleotide
  Antisense strand to SEQ ID NO: 2053950
uaagaacuuggcgacgccc

SEQ ID NO: 2053952 - RNA, 19 nt, Artificial Sequence
  Description of Artificial Sequence: Synthetic oligonucleotide
  Sense strand starting at position 2710 of SEQ ID NO: 1881558
aacaguaccgagugaguca

SEQ ID NO: 2053953 - RNA, 19 nt, Artificial Sequence
  Description of Artificial Sequence: Synthetic oligonucleotide
  Antisense strand to SEQ ID NO: 2053952
ugacucacucgguacuguu

SEQ ID NO: 2053954 - RNA, 19 nt, Artificial Sequence
  Description of Artificial Sequence: Synthetic oligonucleotide
  Sense strand starting at position 2964 of SEQ ID NO: 1881558
gcacaacuguauccaggaa

SEQ ID NO: 2053955 - RNA, 19 nt, Artificial Sequence
  Description of Artificial Sequence: Synthetic oligonucleotide
  Antisense strand to SEQ ID NO: 2053954
uuccuggauacaguugugc

SEQ ID NO: 2053956 - RNA, 19 nt, Artificial Sequence
  Description of Artificial Sequence: Synthetic oligonucleotide
  Sense strand starting at position 2989 of SEQ ID NO: 1881558
guugcuuccaaggaaguga

SEQ ID NO: 2053957 - RNA, 19 nt, Artificial Sequence
  Description of Artificial Sequence: Synthetic oligonucleotide
  Antisense strand to SEQ ID NO: 2053956
ucacuuccuuggaagcaac

SEQ ID NO: 2053958 - RNA, 19 nt, Artificial Sequence
  Description of Artificial Sequence: Synthetic oligonucleotide
  Sense strand starting at position 3028 of SEQ ID NO: 1881558
gaaguuggauccucaagau

SEQ ID NO: 2053959 - RNA, 19 nt, Artificial Sequence
  Description of Artificial Sequence: Synthetic oligonucleotide
  Antisense strand to SEQ ID NO: 2053958
aucuugaggauccaacuuc

SEQ ID NO: 2053960 - RNA, 19 nt, Artificial Sequence
  Description of Artificial Sequence: Synthetic oligonucleotide
  Sense strand starting at position 3445 of SEQ ID NO: 1881558
ggcucagaggccuaaggaa

SEQ ID NO: 2053961 - RNA, 19 nt, Artificial Sequence
  Description of Artificial Sequence: Synthetic oligonucleotide
  Antisense strand to SEQ ID NO: 2053960
uuccuuaggccucugagcc

SEQ ID NO: 2053962 - RNA, 19 nt, Artificial Sequence
  Description of Artificial Sequence: Synthetic oligonucleotide
  Sense strand starting at position 3530 of SEQ ID NO: 1881558
cugacuguuacaggguaau

SEQ ID NO: 2053963 - RNA, 19 nt, Artificial Sequence
  Description of Artificial Sequence: Synthetic oligonucleotide
  Antisense strand to SEQ ID NO: 2053962
auuacccuguaacagucag

SEQ ID NO: 2053964 - RNA, 19 nt, Artificial Sequence
  Description of Artificial Sequence: Synthetic oligonucleotide
  Sense strand starting at position 3655 of SEQ ID NO: 1881558
gcaucuagacucugggaca

SEQ ID NO: 2053965 - RNA, 19 nt, Artificial Sequence
  Description of Artificial Sequence: Synthetic oligonucleotide
  Antisense strand to SEQ ID NO: 2053964
ugucccagagucuagaugc

SEQ ID NO: 2053966 - RNA, 19 nt, Artificial Sequence
  Description of Artificial Sequence: Synthetic oligonucleotide
  Sense strand starting at position 3702 of SEQ ID NO: 1881558
gggcgauaccguguacagu

SEQ ID NO: 2053967 - RNA, 19 nt, Artificial Sequence
  Description of Artificial Sequence: Synthetic oligonucleotide
  Antisense strand to SEQ ID NO: 2053966
acuguacacgguaucgccc

SEQ ID NO: 2053968 - RNA, 19 nt, Artificial Sequence
  Description of Artificial Sequence: Synthetic oligonucleotide
  Sense strand starting at position 3704 of SEQ ID NO: 1881558
gcgauaccguguacaguuu

SEQ ID NO: 2053969 - RNA, 19 nt, Artificial Sequence
  Description of Artificial Sequence: Synthetic oligonucleotide
  Antisense strand to SEQ ID NO: 2053968
aaacuguacacgguaucgc

SEQ ID NO: 2053970 - RNA, 19 nt, Artificial Sequence
  Description of Artificial Sequence: Synthetic oligonucleotide
  Sense strand starting at position 3844 of SEQ ID NO: 1881558
gagagagcccuuugugcaa

SEQ ID NO: 2053971 - RNA, 19 nt, Artificial Sequence
  Description of Artificial Sequence: Synthetic oligonucleotide
  Antisense strand to SEQ ID NO: 2053970
uugcacaaagggcucucuc

SEQ ID NO: 2053972 - RNA, 19 nt, Artificial Sequence
  Description of Artificial Sequence: Synthetic oligonucleotide
  Sense strand starting at position 3911 of SEQ ID NO: 1881558
cacagaggugcgugugaga

SEQ ID NO: 2053973 - RNA, 19 nt, Artificial Sequence
  Description of Artificial Sequence: Synthetic oligonucleotide
  Antisense strand to SEQ ID NO: 2053972
ucucacacgcaccucugug

SEQ ID NO: 2053974 - RNA, 19 nt, Artificial Sequence
  Description of Artificial Sequence: Synthetic oligonucleotide
  Sense strand starting at position 3941 of SEQ ID NO: 1881558
ccuggugccucaucucuua

SEQ ID NO: 2053975 - RNA, 19 nt, Artificial Sequence
  Description of Artificial Sequence: Synthetic oligonucleotide
  Antisense strand to SEQ ID NO: 2053974
uaagagaugaggcaccagg

SEQ ID NO: 2053976 - RNA, 19 nt, Artificial Sequence
  Description of Artificial Sequence: Synthetic oligonucleotide
  Sense strand starting at position 25 of SEQ ID NO: 1881560
gaacaucaucagggugcua

SEQ ID NO: 2053977 - RNA, 19 nt, Artificial Sequence
  Description of Artificial Sequence: Synthetic oligonucleotide
  Antisense strand to SEQ ID NO: 2053976
uagcacccugaugauguuc

SEQ ID NO: 2053978 - RNA, 19 nt, Artificial Sequence
  Description of Artificial Sequence: Synthetic oligonucleotide
  Sense strand starting at position 198 of SEQ ID NO: 1881560
acugaauuaguuuggguca

SEQ ID NO: 2053979 - RNA, 19 nt, Artificial Sequence
  Description of Artificial Sequence: Synthetic oligonucleotide
  Antisense strand to SEQ ID NO: 2053978
ugacccaaacuaauucagu

SEQ ID NO: 2053980 - RNA, 19 nt, Artificial Sequence
  Description of Artificial Sequence: Synthetic oligonucleotide
  Sense strand starting at position 201 of SEQ ID NO: 1881560
gaauuaguuugggucauga

SEQ ID NO: 2053981 - RNA, 19 nt, Artificial Sequence
  Description of Artificial Sequence: Synthetic oligonucleotide
  Antisense strand to SEQ ID NO: 2053980
ucaugacccaaacuaauuc

SEQ ID NO: 2053982 - RNA, 19 nt, Artificial Sequence
  Description of Artificial Sequence: Synthetic oligonucleotide
  Sense strand starting at position 203 of SEQ ID NO: 1881560
auuaguuugggucaugaau

SEQ ID NO: 2053983 - RNA, 19 nt, Artificial Sequence
  Description of Artificial Sequence: Synthetic oligonucleotide
  Antisense strand to SEQ ID NO: 2053982
auucaugacccaaacuaau

SEQ ID NO: 2053984 - RNA, 19 nt, Artificial Sequence
  Description of Artificial Sequence: Synthetic oligonucleotide
  Sense strand starting at position 250 of SEQ ID NO: 1881560
ggguaauucucaucuccua

SEQ ID NO: 2053985 - RNA, 19 nt, Artificial Sequence
  Description of Artificial Sequence: Synthetic oligonucleotide
  Antisense strand to SEQ ID NO: 2053984
uaggagaugagaauuaccc

SEQ ID NO: 2053986 - RNA, 19 nt, Artificial Sequence
  Description of Artificial Sequence: Synthetic oligonucleotide
  Sense strand starting at position 266 of SEQ ID NO: 1881560
cuaccuuaguucuuuggaa

SEQ ID NO: 2053987 - RNA, 19 nt, Artificial Sequence
  Description of Artificial Sequence: Synthetic oligonucleotide
  Antisense strand to SEQ ID NO: 2053986
uuccaaagaacuaagguag

SEQ ID NO: 2053988 - RNA, 19 nt, Artificial Sequence
  Description of Artificial Sequence: Synthetic oligonucleotide
  Sense strand starting at position 558 of SEQ ID NO: 1881560
ugugcuuaucuagaucaaa

SEQ ID NO: 2053989 - RNA, 19 nt, Artificial Sequence
  Description of Artificial Sequence: Synthetic oligonucleotide
  Antisense strand to SEQ ID NO: 2053988
uuugaucuagauaagcaca

SEQ ID NO: 2053990 - RNA, 19 nt, Artificial Sequence
  Description of Artificial Sequence: Synthetic oligonucleotide
  Sense strand starting at position 607 of SEQ ID NO: 1881560
guuguaauauaacuggaga

SEQ ID NO: 2053991 - RNA, 19 nt, Artificial Sequence
  Description of Artificial Sequence: Synthetic oligonucleotide
  Antisense strand to SEQ ID NO: 2053990
ucuccaguuauauuacaac

SEQ ID NO: 2053992 - RNA, 19 nt, Artificial Sequence
  Description of Artificial Sequence: Synthetic oligonucleotide
  Sense strand starting at position 745 of SEQ ID NO: 1881560
guuagaauuagguguagaa

SEQ ID NO: 2053993 - RNA, 19 nt, Artificial Sequence
  Description of Artificial Sequence: Synthetic oligonucleotide
  Antisense strand to SEQ ID NO: 2053992
uucuacaccuaauucuaac

SEQ ID NO: 2053994 - RNA, 19 nt, Artificial Sequence
  Description of Artificial Sequence: Synthetic oligonucleotide
  Sense strand starting at position 807 of SEQ ID NO: 1881560
ucuugcguucugcuuuaaa

SEQ ID NO: 2053995 - RNA, 19 nt, Artificial Sequence
  Description of Artificial Sequence: Synthetic oligonucleotide
  Antisense strand to SEQ ID NO: 2053994
uuuaaagcagaacgcaaga

SEQ ID NO: 2053996 - RNA, 19 nt, Artificial Sequence
  Description of Artificial Sequence: Synthetic oligonucleotide
  Sense strand starting at position 858 of SEQ ID NO: 1881560
gucauuuccucaucuguga

SEQ ID NO: 2053997 - RNA, 19 nt, Artificial Sequence
  Description of Artificial Sequence: Synthetic oligonucleotide
  Antisense strand to SEQ ID NO: 2053996
ucacagaugaggaaaugac

SEQ ID NO: 2053998 - RNA, 19 nt, Artificial Sequence
  Description of Artificial Sequence: Synthetic oligonucleotide
  Sense strand starting at position 893 of SEQ ID NO: 1881560
ugcuaauauuugucaugcu

SEQ ID NO: 2053999 - RNA, 19 nt, Artificial Sequence
  Description of Artificial Sequence: Synthetic oligonucleotide
  Antisense strand to SEQ ID NO: 2053998
agcaugacaaauauuagca

SEQ ID NO: 2054000 - RNA, 19 nt, Artificial Sequence
  Description of Artificial Sequence: Synthetic oligonucleotide
  Sense strand starting at position 943 of SEQ ID NO: 1881560
guagauauaucagugaaca

SEQ ID NO: 2054001 - RNA, 19 nt, Artificial Sequence
  Description of Artificial Sequence: Synthetic oligonucleotide
  Antisense strand to SEQ ID NO: 2054000
uguucacugauauaucuac

SEQ ID NO: 2054002 - RNA, 19 nt, Artificial Sequence
  Description of Artificial Sequence: Synthetic oligonucleotide
  Sense strand starting at position 971 of SEQ ID NO: 1881560
aaauacguacucugauaga

SEQ ID NO: 2054003 - RNA, 19 nt, Artificial Sequence
  Description of Artificial Sequence: Synthetic oligonucleotide
  Antisense strand to SEQ ID NO: 2054002
ucuaucagaguacguauuu

SEQ ID NO: 2054004 - RNA, 19 nt, Artificial Sequence
  Description of Artificial Sequence: Synthetic oligonucleotide
  Sense strand starting at position 976 of SEQ ID NO: 1881560
cguacucugauagaaguua

SEQ ID NO: 2054005 - RNA, 19 nt, Artificial Sequence
  Description of Artificial Sequence: Synthetic oligonucleotide
  Antisense strand to SEQ ID NO: 2054004
uaacuucuaucagaguacg

SEQ ID NO: 2054006 - RNA, 19 nt, Artificial Sequence
  Description of Artificial Sequence: Synthetic oligonucleotide
  Sense strand starting at position 1076 of SEQ ID NO: 1881560
gaacacugccuggaauguu

SEQ ID NO: 2054007 - RNA, 19 nt, Artificial Sequence
  Description of Artificial Sequence: Synthetic oligonucleotide
  Antisense strand to SEQ ID NO: 2054006
aacauuccaggcaguguuc

SEQ ID NO: 2054008 - RNA, 19 nt, Artificial Sequence
  Description of Artificial Sequence: Synthetic oligonucleotide
  Sense strand starting at position 1086 of SEQ ID NO: 1881560
uggaauguuguagaaguuu

SEQ ID NO: 2054009 - RNA, 19 nt, Artificial Sequence
  Description of Artificial Sequence: Synthetic oligonucleotide
  Antisense strand to SEQ ID NO: 2054008
aaacuucuacaacauucca

SEQ ID NO: 2054010 - RNA, 19 nt, Artificial Sequence
  Description of Artificial Sequence: Synthetic oligonucleotide
  Sense strand starting at position 1154 of SEQ ID NO: 1881560
gggagucuguuccuucaga

SEQ ID NO: 2054011 - RNA, 19 nt, Artificial Sequence
  Description of Artificial Sequence: Synthetic oligonucleotide
  Antisense strand to SEQ ID NO: 2054010
ucugaaggaacagacuccc

SEQ ID NO: 2054012 - RNA, 19 nt, Artificial Sequence
  Description of Artificial Sequence: Synthetic oligonucleotide
  Sense strand starting at position 1176 of SEQ ID NO: 1881560
cugauucagcgauggauga

SEQ ID NO: 2054013 - RNA, 19 nt, Artificial Sequence
  Description of Artificial Sequence: Synthetic oligonucleotide
  Antisense strand to SEQ ID NO: 2054012
ucauccaucgcugaaucag

SEQ ID NO: 2054014 - RNA, 19 nt, Artificial Sequence
  Description of Artificial Sequence: Synthetic oligonucleotide
  Sense strand starting at position 1177 of SEQ ID NO: 1881560
ugauucagcgauggaugaa

SEQ ID NO: 2054015 - RNA, 19 nt, Artificial Sequence
  Description of Artificial Sequence: Synthetic oligonucleotide
  Antisense strand to SEQ ID NO: 2054014
uucauccaucgcugaauca

SEQ ID NO: 2054016 - RNA, 19 nt, Artificial Sequence
  Description of Artificial Sequence: Synthetic oligonucleotide
  Sense strand starting at position 1312 of SEQ ID NO: 1881560
cgaggcucucgccauuuau

SEQ ID NO: 2054017 - RNA, 19 nt, Artificial Sequence
  Description of Artificial Sequence: Synthetic oligonucleotide
  Antisense strand to SEQ ID NO: 2054016
auaaauggcgagagccucg

SEQ ID NO: 2054018 - RNA, 19 nt, Artificial Sequence
  Description of Artificial Sequence: Synthetic oligonucleotide
  Sense strand starting at position 1489 of SEQ ID NO: 1881560
gucuuaagccaauauaagu

SEQ ID NO: 2054019 - RNA, 19 nt, Artificial Sequence
  Description of Artificial Sequence: Synthetic oligonucleotide
  Antisense strand to SEQ ID NO: 2054018
acuuauauuggcuuaagac

SEQ ID NO: 2054020 - RNA, 19 nt, Artificial Sequence
  Description of Artificial Sequence: Synthetic oligonucleotide
  Sense strand starting at position 1752 of SEQ ID NO: 1881560
aucaaaguacagugaugaa

SEQ ID NO: 2054021 - RNA, 19 nt, Artificial Sequence
  Description of Artificial Sequence: Synthetic oligonucleotide
  Antisense strand to SEQ ID NO: 2054020
uucaucacuguacuuugau

SEQ ID NO: 2054022 - RNA, 19 nt, Artificial Sequence
  Description of Artificial Sequence: Synthetic oligonucleotide
  Sense strand starting at position 1773 of SEQ ID NO: 1881560
auaggaaaguucuugacac

SEQ ID NO: 2054023 - RNA, 19 nt, Artificial Sequence
  Description of Artificial Sequence: Synthetic oligonucleotide
  Antisense strand to SEQ ID NO: 2054022
gugucaagaacuuuccuau

SEQ ID NO: 2054024 - RNA, 19 nt, Artificial Sequence
  Description of Artificial Sequence: Synthetic oligonucleotide
  Sense strand starting at position 1865 of SEQ ID NO: 1881560
aucagauaguguucuagga

SEQ ID NO: 2054025 - RNA, 19 nt, Artificial Sequence
  Description of Artificial Sequence: Synthetic oligonucleotide
  Antisense strand to SEQ ID NO: 2054024
uccuagaacacuaucugau

SEQ ID NO: 2054026 - RNA, 19 nt, Artificial Sequence
  Description of Artificial Sequence: Synthetic oligonucleotide
  Sense strand starting at position 1875 of SEQ ID NO: 1881560
guucuaggagcuugaaaua

SEQ ID NO: 2054027 - RNA, 19 nt, Artificial Sequence
  Description of Artificial Sequence: Synthetic oligonucleotide
  Antisense strand to SEQ ID NO: 2054026
uauuucaagcuccuagaac

SEQ ID NO: 2054028 - RNA, 19 nt, Artificial Sequence
  Description of Artificial Sequence: Synthetic oligonucleotide
  Sense strand starting at position 1951 of SEQ ID NO: 1881560
guaugaggucccuauucuc

SEQ ID NO: 2054029 - RNA, 19 nt, Artificial Sequence
  Description of Artificial Sequence: Synthetic oligonucleotide
  Antisense strand to SEQ ID NO: 2054028
gagaauagggaccucauac

SEQ ID NO: 2054030 - RNA, 19 nt, Artificial Sequence
  Description of Artificial Sequence: Synthetic oligonucleotide
  Sense strand starting at position 2049 of SEQ ID NO: 1881560
uguuaaggaucucugugaa

SEQ ID NO: 2054031 - RNA, 19 nt, Artificial Sequence
  Description of Artificial Sequence: Synthetic oligonucleotide
  Antisense strand to SEQ ID NO: 2054030
uucacagagauccuuaaca

SEQ ID NO: 2054032 - RNA, 19 nt, Artificial Sequence
  Description of Artificial Sequence: Synthetic oligonucleotide
  Sense strand starting at position 2098 of SEQ ID NO: 1881560
gugacucucaaaggcgaaa

SEQ ID NO: 2054033 - RNA, 19 nt, Artificial Sequence
  Description of Artificial Sequence: Synthetic oligonucleotide
  Antisense strand to SEQ ID NO: 2054032
uuucgccuuugagagucac

SEQ ID NO: 2054034 - RNA, 19 nt, Artificial Sequence
  Description of Artificial Sequence: Synthetic oligonucleotide
  Sense strand starting at position 2352 of SEQ ID NO: 1881560
gaaauaacgcuguagucau

SEQ ID NO: 2054035 - RNA, 19 nt, Artificial Sequence
  Description of Artificial Sequence: Synthetic oligonucleotide
  Antisense strand to SEQ ID NO: 2054034
augacuacagcguuauuuc

SEQ ID NO: 2054036 - RNA, 19 nt, Artificial Sequence
  Description of Artificial Sequence: Synthetic oligonucleotide
  Sense strand starting at position 2362 of SEQ ID NO: 1881560
uguagucauccagaagucu

SEQ ID NO: 2054037 - RNA, 19 nt, Artificial Sequence
  Description of Artificial Sequence: Synthetic oligonucleotide
  Antisense strand to SEQ ID NO: 2054036
agacuucuggaugacuaca

SEQ ID NO: 2054038 - RNA, 19 nt, Artificial Sequence
  Description of Artificial Sequence: Synthetic oligonucleotide
  Sense strand starting at position 2669 of SEQ ID NO: 1881560
uugguaaucccauauugcu

SEQ ID NO: 2054039 - RNA, 19 nt, Artificial Sequence
  Description of Artificial Sequence: Synthetic oligonucleotide
  Antisense strand to SEQ ID NO: 2054038
agcaauaugggauuaccaa

SEQ ID NO: 2054040 - RNA, 19 nt, Artificial Sequence
  Description of Artificial Sequence: Synthetic oligonucleotide
  Sense strand starting at position 2676 of SEQ ID NO: 1881560
ucccauauugcugauguca

SEQ ID NO: 2054041 - RNA, 19 nt, Artificial Sequence
  Description of Artificial Sequence: Synthetic oligonucleotide
  Antisense strand to SEQ ID NO: 2054040
ugacaucagcaauauggga

SEQ ID NO: 2054042 - RNA, 19 nt, Artificial Sequence
  Description of Artificial Sequence: Synthetic oligonucleotide
  Sense strand starting at position 2776 of SEQ ID NO: 1881560
ucaauuuguuguguuguau

SEQ ID NO: 2054043 - RNA, 19 nt, Artificial Sequence
  Description of Artificial Sequence: Synthetic oligonucleotide
  Antisense strand to SEQ ID NO: 2054042
auacaacacaacaaauuga

SEQ ID NO: 2054044 - RNA, 19 nt, Artificial Sequence
  Description of Artificial Sequence: Synthetic oligonucleotide
  Sense strand starting at position 2809 of SEQ ID NO: 1881560
gaagcauaugcaugaagau

SEQ ID NO: 2054045 - RNA, 19 nt, Artificial Sequence
  Description of Artificial Sequence: Synthetic oligonucleotide
  Antisense strand to SEQ ID NO: 2054044
aucuucaugcauaugcuuc

SEQ ID NO: 2054046 - RNA, 19 nt, Artificial Sequence
  Description of Artificial Sequence: Synthetic oligonucleotide
  Sense strand starting at position 2835 of SEQ ID NO: 1881560
acaccauuauguguauuaa

SEQ ID NO: 2054047 - RNA, 19 nt, Artificial Sequence
  Description of Artificial Sequence: Synthetic oligonucleotide
  Antisense strand to SEQ ID NO: 2054046
uuaauacacauaauggugu

SEQ ID NO: 2054048 - RNA, 19 nt, Artificial Sequence
  Description of Artificial Sequence: Synthetic oligonucleotide
  Sense strand starting at position 3581 of SEQ ID NO: 1881560
uuuguuauggcugaauuau

SEQ ID NO: 2054049 - RNA, 19 nt, Artificial Sequence
  Description of Artificial Sequence: Synthetic oligonucleotide
  Antisense strand to SEQ ID NO: 2054048
auaauucagccauaacaaa

SEQ ID NO: 2054050 - RNA, 19 nt, Artificial Sequence
  Description of Artificial Sequence: Synthetic oligonucleotide
  Sense strand starting at position 3851 of SEQ ID NO: 1881560
agauauauacaccguagua

SEQ ID NO: 2054051 - RNA, 19 nt, Artificial Sequence
  Description of Artificial Sequence: Synthetic oligonucleotide
  Antisense strand to SEQ ID NO: 2054050
uacuacgguguauauaucu

SEQ ID NO: 2054052 - RNA, 19 nt, Artificial Sequence
  Description of Artificial Sequence: Synthetic oligonucleotide
  Sense strand starting at position 3853 of SEQ ID NO: 1881560
auauauacaccguaguaga

SEQ ID NO: 2054053 - RNA, 19 nt, Artificial Sequence
  Description of Artificial Sequence: Synthetic oligonucleotide
  Antisense strand to SEQ ID NO: 2054052
ucuacuacgguguauauau

SEQ ID NO: 2054054 - RNA, 19 nt, Artificial Sequence
  Description of Artificial Sequence: Synthetic oligonucleotide
  Sense strand starting at position 3864 of SEQ ID NO: 1881560
guaguagaauugcuagaca

SEQ ID NO: 2054055 - RNA, 19 nt, Artificial Sequence
  Description of Artificial Sequence: Synthetic oligonucleotide
  Antisense strand to SEQ ID NO: 2054054
ugucuagcaauucuacuac

SEQ ID NO: 2054056 - RNA, 19 nt, Artificial Sequence
  Description of Artificial Sequence: Synthetic oligonucleotide
  Sense strand starting at position 47 of SEQ ID NO: 1881559
cugugaugcagguaacauc

SEQ ID NO: 2054057 - RNA, 19 nt, Artificial Sequence
  Description of Artificial Sequence: Synthetic oligonucleotide
  Antisense strand to SEQ ID NO: 2054056
gauguuaccugcaucacag

SEQ ID NO: 2054058 - RNA, 19 nt, Artificial Sequence
  Description of Artificial Sequence: Synthetic oligonucleotide
  Sense strand starting at position 98 of SEQ ID NO: 1881559
cucugagaagucugaugac

SEQ ID NO: 2054059 - RNA, 19 nt, Artificial Sequence
  Description of Artificial Sequence: Synthetic oligonucleotide
  Antisense strand to SEQ ID NO: 2054058
gucaucagacuucucagag

SEQ ID NO: 2054060 - RNA, 19 nt, Artificial Sequence
  Description of Artificial Sequence: Synthetic oligonucleotide
  Sense strand starting at position 127 of SEQ ID NO: 1881559
ucacgaagccaguaaguaa

SEQ ID NO: 2054061 - RNA, 19 nt, Artificial Sequence
  Description of Artificial Sequence: Synthetic oligonucleotide
  Antisense strand to SEQ ID NO: 2054060
uuacuuacuggcuucguga

SEQ ID NO: 2054062 - RNA, 19 nt, Artificial Sequence
  Description of Artificial Sequence: Synthetic oligonucleotide
  Sense strand starting at position 134 of SEQ ID NO: 1881559
gccaguaaguaacuaagaa

SEQ ID NO: 2054063 - RNA, 19 nt, Artificial Sequence
  Description of Artificial Sequence: Synthetic oligonucleotide
  Antisense strand to SEQ ID NO: 2054062
uucuuaguuacuuacuggc

SEQ ID NO: 2054064 - RNA, 19 nt, Artificial Sequence
  Description of Artificial Sequence: Synthetic oligonucleotide
  Sense strand starting at position 404 of SEQ ID NO: 1881559
gagaauuagcccuguuaau

SEQ ID NO: 2054065 - RNA, 19 nt, Artificial Sequence
  Description of Artificial Sequence: Synthetic oligonucleotide
  Antisense strand to SEQ ID NO: 2054064
auuaacagggcuaauucuc

SEQ ID NO: 2054066 - RNA, 19 nt, Artificial Sequence
  Description of Artificial Sequence: Synthetic oligonucleotide
  Sense strand starting at position 787 of SEQ ID NO: 1881559
cuaagauaauguuugcaau

SEQ ID NO: 2054067 - RNA, 19 nt, Artificial Sequence
  Description of Artificial Sequence: Synthetic oligonucleotide
  Antisense strand to SEQ ID NO: 2054066
auugcaaacauuaucuuag

SEQ ID NO: 2054068 - RNA, 19 nt, Artificial Sequence
  Description of Artificial Sequence: Synthetic oligonucleotide
  Sense strand starting at position 843 of SEQ ID NO: 1881559
cagagaaugucaguuacca

SEQ ID NO: 2054069 - RNA, 19 nt, Artificial Sequence
  Description of Artificial Sequence: Synthetic oligonucleotide
  Antisense strand to SEQ ID NO: 2054068
ugguaacugacauucucug

SEQ ID NO: 2054070 - RNA, 19 nt, Artificial Sequence
  Description of Artificial Sequence: Synthetic oligonucleotide
  Sense strand starting at position 910 of SEQ ID NO: 1881559
ugggacagucucgggauua

SEQ ID NO: 2054071 - RNA, 19 nt, Artificial Sequence
  Description of Artificial Sequence: Synthetic oligonucleotide
  Antisense strand to SEQ ID NO: 2054070
uaaucccgagacuguccca

SEQ ID NO: 2054072 - RNA, 19 nt, Artificial Sequence
  Description of Artificial Sequence: Synthetic oligonucleotide
  Sense strand starting at position 915 of SEQ ID NO: 1881559
cagucucgggauuauaaau

SEQ ID NO: 2054073 - RNA, 19 nt, Artificial Sequence
  Description of Artificial Sequence: Synthetic oligonucleotide
  Antisense strand to SEQ ID NO: 2054072
auuuauaaucccgagacug

SEQ ID NO: 2054074 - RNA, 19 nt, Artificial Sequence
  Description of Artificial Sequence: Synthetic oligonucleotide
  Sense strand starting at position 985 of SEQ ID NO: 1881559
auaaguaagcucuagguuu

SEQ ID NO: 2054075 - RNA, 19 nt, Artificial Sequence
  Description of Artificial Sequence: Synthetic oligonucleotide
  Antisense strand to SEQ ID NO: 2054074
aaaccuagagcuuacuuau

SEQ ID NO: 2054076 - RNA, 19 nt, Artificial Sequence
  Description of Artificial Sequence: Synthetic oligonucleotide
  Sense strand starting at position 1008 of SEQ ID NO: 1881559
agagaaacucaauguguau

SEQ ID NO: 2054077 - RNA, 19 nt, Artificial Sequence
  Description of Artificial Sequence: Synthetic oligonucleotide
  Antisense strand to SEQ ID NO: 2054076
auacacauugaguuucucu

SEQ ID NO: 2054078 - RNA, 19 nt, Artificial Sequence
  Description of Artificial Sequence: Synthetic oligonucleotide
  Sense strand starting at position 1072 of SEQ ID NO: 1881559
uuuaaagugaacggcaaau

SEQ ID NO: 2054079 - RNA, 19 nt, Artificial Sequence
  Description of Artificial Sequence: Synthetic oligonucleotide
  Antisense strand to SEQ ID NO: 2054078
auuugccguucacuuuaaa

SEQ ID NO: 2054080 - RNA, 19 nt, Artificial Sequence
  Description of Artificial Sequence: Synthetic oligonucleotide
  Sense strand starting at position 1419 of SEQ ID NO: 1881559
uagcaaauuggagguugua

SEQ ID NO: 2054081 - RNA, 19 nt, Artificial Sequence
  Description of Artificial Sequence: Synthetic oligonucleotide
  Antisense strand to SEQ ID NO: 2054080
uacaaccuccaauuugcua

SEQ ID NO: 2054082 - RNA, 19 nt, Artificial Sequence
  Description of Artificial Sequence: Synthetic oligonucleotide
  Sense strand starting at position 1422 of SEQ ID NO: 1881559
caaauuggagguuguaaau

SEQ ID NO: 2054083 - RNA, 19 nt, Artificial Sequence
  Description of Artificial Sequence: Synthetic oligonucleotide
  Antisense strand to SEQ ID NO: 2054082
auuuacaaccuccaauuug

SEQ ID NO: 2054084 - RNA, 19 nt, Artificial Sequence
  Description of Artificial Sequence: Synthetic oligonucleotide
  Sense strand starting at position 1428 of SEQ ID NO: 1881559
ggagguuguaaauguacca

SEQ ID NO: 2054085 - RNA, 19 nt, Artificial Sequence
  Description of Artificial Sequence: Synthetic oligonucleotide
  Antisense strand to SEQ ID NO: 2054084
ugguacauuuacaaccucc

SEQ ID NO: 2054086 - RNA, 19 nt, Artificial Sequence
  Description of Artificial Sequence: Synthetic oligonucleotide
  Sense strand starting at position 1443 of SEQ ID NO: 1881559
accaauuuaugguaguaaa

SEQ ID NO: 2054087 - RNA, 19 nt, Artificial Sequence
  Description of Artificial Sequence: Synthetic oligonucleotide
  Antisense strand to SEQ ID NO: 2054086
uuuacuaccauaaauuggu

SEQ ID NO: 2054088 - RNA, 19 nt, Artificial Sequence
  Description of Artificial Sequence: Synthetic oligonucleotide
  Sense strand starting at position 1454 of SEQ ID NO: 1881559
guaguaaauugagcaaggu

SEQ ID NO: 2054089 - RNA, 19 nt, Artificial Sequence
  Description of Artificial Sequence: Synthetic oligonucleotide
  Antisense strand to SEQ ID NO: 2054088
accuugcucaauuuacuac

SEQ ID NO: 2054090 - RNA, 19 nt, Artificial Sequence
  Description of Artificial Sequence: Synthetic oligonucleotide
  Sense strand starting at position 1489 of SEQ ID NO: 1881559
gguagugcugacuggaaag

SEQ ID NO: 2054091 - RNA, 19 nt, Artificial Sequence
  Description of Artificial Sequence: Synthetic oligonucleotide
  Antisense strand to SEQ ID NO: 2054090
cuuuccagucagcacuacc

SEQ ID NO: 2054092 - RNA, 19 nt, Artificial Sequence
  Description of Artificial Sequence: Synthetic oligonucleotide
  Sense strand starting at position 1501 of SEQ ID NO: 1881559
uggaaagauugcucagguu

SEQ ID NO: 2054093 - RNA, 19 nt, Artificial Sequence
  Description of Artificial Sequence: Synthetic oligonucleotide
  Antisense strand to SEQ ID NO: 2054092
aaccugagcaaucuuucca

SEQ ID NO: 2054094 - RNA, 19 nt, Artificial Sequence
  Description of Artificial Sequence: Synthetic oligonucleotide
  Sense strand starting at position 1634 of SEQ ID NO: 1881559
gcccauaauguuuauagag

SEQ ID NO: 2054095 - RNA, 19 nt, Artificial Sequence
  Description of Artificial Sequence: Synthetic oligonucleotide
  Antisense strand to SEQ ID NO: 2054094
cucuauaaacauuaugggc

SEQ ID NO: 2054096 - RNA, 19 nt, Artificial Sequence
  Description of Artificial Sequence: Synthetic oligonucleotide
  Sense strand starting at position 1644 of SEQ ID NO: 1881559
uuuauagagagauggcaua

SEQ ID NO: 2054097 - RNA, 19 nt, Artificial Sequence
  Description of Artificial Sequence: Synthetic oligonucleotide
  Antisense strand to SEQ ID NO: 2054096
uaugccaucucucuauaaa

SEQ ID NO: 2054098 - RNA, 19 nt, Artificial Sequence
  Description of Artificial Sequence: Synthetic oligonucleotide
  Sense strand starting at position 1715 of SEQ ID NO: 1881559
ggcuguuuauuucuuaggu

SEQ ID NO: 2054099 - RNA, 19 nt, Artificial Sequence
  Description of Artificial Sequence: Synthetic oligonucleotide
  Antisense strand to SEQ ID NO: 2054098
accuaagaaauaaacagcc

SEQ ID NO: 2054100 - RNA, 19 nt, Artificial Sequence
  Description of Artificial Sequence: Synthetic oligonucleotide
  Sense strand starting at position 1869 of SEQ ID NO: 1881559
uauggagaguacccaugau

SEQ ID NO: 2054101 - RNA, 19 nt, Artificial Sequence
  Description of Artificial Sequence: Synthetic oligonucleotide
  Antisense strand to SEQ ID NO: 2054100
aucauggguacucuccaua

SEQ ID NO: 2054102 - RNA, 19 nt, Artificial Sequence
  Description of Artificial Sequence: Synthetic oligonucleotide
  Sense strand starting at position 1950 of SEQ ID NO: 1881559
ugugccugugucuuguuua

SEQ ID NO: 2054103 - RNA, 19 nt, Artificial Sequence
  Description of Artificial Sequence: Synthetic oligonucleotide
  Antisense strand to SEQ ID NO: 2054102
uaaacaagacacaggcaca

SEQ ID NO: 2054104 - RNA, 19 nt, Artificial Sequence
  Description of Artificial Sequence: Synthetic oligonucleotide
  Sense strand starting at position 2262 of SEQ ID NO: 1881559
augagauuauagcugaagu

SEQ ID NO: 2054105 - RNA, 19 nt, Artificial Sequence
  Description of Artificial Sequence: Synthetic oligonucleotide
  Antisense strand to SEQ ID NO: 2054104
acuucagcuauaaucucau

SEQ ID NO: 2054106 - RNA, 19 nt, Artificial Sequence
  Description of Artificial Sequence: Synthetic oligonucleotide
  Sense strand starting at position 2263 of SEQ ID NO: 1881559
ugagauuauagcugaagua

SEQ ID NO: 2054107 - RNA, 19 nt, Artificial Sequence
  Description of Artificial Sequence: Synthetic oligonucleotide
  Antisense strand to SEQ ID NO: 2054106
uacuucagcuauaaucuca

SEQ ID NO: 2054108 - RNA, 19 nt, Artificial Sequence
  Description of Artificial Sequence: Synthetic oligonucleotide
  Sense strand starting at position 2636 of SEQ ID NO: 1881559
uuaucaugacucugauaug

SEQ ID NO: 2054109 - RNA, 19 nt, Artificial Sequence
  Description of Artificial Sequence: Synthetic oligonucleotide
  Antisense strand to SEQ ID NO: 2054108
cauaucagagucaugauaa

SEQ ID NO: 2054110 - RNA, 19 nt, Artificial Sequence
  Description of Artificial Sequence: Synthetic oligonucleotide
  Sense strand starting at position 2695 of SEQ ID NO: 1881559
gggacaagaucuucuaagu

SEQ ID NO: 2054111 - RNA, 19 nt, Artificial Sequence
  Description of Artificial Sequence: Synthetic oligonucleotide
  Antisense strand to SEQ ID NO: 2054110
acuuagaagaucuuguccc

SEQ ID NO: 2054112 - RNA, 19 nt, Artificial Sequence
  Description of Artificial Sequence: Synthetic oligonucleotide
  Sense strand starting at position 2733 of SEQ ID NO: 1881559
ggguaugugcccaguggua

SEQ ID NO: 2054113 - RNA, 19 nt, Artificial Sequence
  Description of Artificial Sequence: Synthetic oligonucleotide
  Antisense strand to SEQ ID NO: 2054112
uaccacugggcacauaccc

SEQ ID NO: 2054114 - RNA, 19 nt, Artificial Sequence
  Description of Artificial Sequence: Synthetic oligonucleotide
  Sense strand starting at position 2790 of SEQ ID NO: 1881559
cucuguauucgucaacaug

SEQ ID NO: 2054115 - RNA, 19 nt, Artificial Sequence
  Description of Artificial Sequence: Synthetic oligonucleotide
  Antisense strand to SEQ ID NO: 2054114
cauguugacgaauacagag

SEQ ID NO: 2054116 - RNA, 19 nt, Artificial Sequence
  Description of Artificial Sequence: Synthetic oligonucleotide
  Sense strand starting at position 2807 of SEQ ID NO: 1881559
uguuaaccacgccaaauau

SEQ ID NO: 2054117 - RNA, 19 nt, Artificial Sequence
  Description of Artificial Sequence: Synthetic oligonucleotide
  Antisense strand to SEQ ID NO: 2054116
auauuuggcgugguuaaca

SEQ ID NO: 2054118 - RNA, 19 nt, Artificial Sequence
  Description of Artificial Sequence: Synthetic oligonucleotide
  Sense strand starting at position 3035 of SEQ ID NO: 1881559
guauccaaauuugaggaaa

SEQ ID NO: 2054119 - RNA, 19 nt, Artificial Sequence
  Description of Artificial Sequence: Synthetic oligonucleotide
  Antisense strand to SEQ ID NO: 2054118
uuuccucaaauuuggauac

SEQ ID NO: 2054120 - RNA, 19 nt, Artificial Sequence
  Description of Artificial Sequence: Synthetic oligonucleotide
  Sense strand starting at position 3164 of SEQ ID NO: 1881559
ucuugucaugaaggaaagu

SEQ ID NO: 2054121 - RNA, 19 nt, Artificial Sequence
  Description of Artificial Sequence: Synthetic oligonucleotide
  Antisense strand to SEQ ID NO: 2054120
acuuuccuucaugacaaga

SEQ ID NO: 2054122 - RNA, 19 nt, Artificial Sequence
  Description of Artificial Sequence: Synthetic oligonucleotide
  Sense strand starting at position 3540 of SEQ ID NO: 1881559
uuuguaauugagugguaga

SEQ ID NO: 2054123 - RNA, 19 nt, Artificial Sequence
  Description of Artificial Sequence: Synthetic oligonucleotide
  Antisense strand to SEQ ID NO: 2054122
ucuaccacucaauuacaaa

SEQ ID NO: 2054124 - RNA, 19 nt, Artificial Sequence
  Description of Artificial Sequence: Synthetic oligonucleotide
  Sense strand starting at position 3541 of SEQ ID NO: 1881559
uuguaauugagugguagau

SEQ ID NO: 2054125 - RNA, 19 nt, Artificial Sequence
  Description of Artificial Sequence: Synthetic oligonucleotide
  Antisense strand to SEQ ID NO: 2054124
aucuaccacucaauuacaa

SEQ ID NO: 2054126 - RNA, 19 nt, Artificial Sequence
  Description of Artificial Sequence: Synthetic oligonucleotide
  Sense strand starting at position 3609 of SEQ ID NO: 1881559
uucuuaugauggccauaaa

SEQ ID NO: 2054127 - RNA, 19 nt, Artificial Sequence
  Description of Artificial Sequence: Synthetic oligonucleotide
  Antisense strand to SEQ ID NO: 2054126
uuuauggccaucauaagaa

SEQ ID NO: 2054128 - RNA, 19 nt, Artificial Sequence
  Description of Artificial Sequence: Synthetic oligonucleotide
  Sense strand starting at position 3612 of SEQ ID NO: 1881559
uuaugauggccauaaagug

SEQ ID NO: 2054129 - RNA, 19 nt, Artificial Sequence
  Description of Artificial Sequence: Synthetic oligonucleotide
  Antisense strand to SEQ ID NO: 2054128
cacuuuauggccaucauaa

SEQ ID NO: 2054130 - RNA, 19 nt, Artificial Sequence
  Description of Artificial Sequence: Synthetic oligonucleotide
  Sense strand starting at position 3894 of SEQ ID NO: 1881559
acuggaauauucuuuaagu

SEQ ID NO: 2054131 - RNA, 19 nt, Artificial Sequence
  Description of Artificial Sequence: Synthetic oligonucleotide
  Antisense strand to SEQ ID NO: 2054130
acuuaaagaauauuccagu

SEQ ID NO: 2054132 - RNA, 19 nt, Artificial Sequence
  Description of Artificial Sequence: Synthetic oligonucleotide
  Sense strand starting at position 3895 of SEQ ID NO: 1881559
cuggaauauucuuuaagua

SEQ ID NO: 2054133 - RNA, 19 nt, Artificial Sequence
  Description of Artificial Sequence: Synthetic oligonucleotide
  Antisense strand to SEQ ID NO: 2054132
uacuuaaagaauauuccag

SEQ ID NO: 2054134 - RNA, 19 nt, Artificial Sequence
  Description of Artificial Sequence: Synthetic oligonucleotide
  Sense strand starting at position 3915 of SEQ ID NO: 1881559
auaagugaaucauugaugu

SEQ ID NO: 2054135 - RNA, 19 nt, Artificial Sequence
  Description of Artificial Sequence: Synthetic oligonucleotide
  Antisense strand to SEQ ID NO: 2054134
acaucaaugauucacuuau

SEQ ID NO: 2054136 - RNA, 19 nt, Artificial Sequence
  Description of Artificial Sequence: Synthetic oligonucleotide
  Sense strand starting at position 96 of SEQ ID NO: 1881561
gucggaagacagugagaua

SEQ ID NO: 2054137 - RNA, 19 nt, Artificial Sequence
  Description of Artificial Sequence: Synthetic oligonucleotide
  Antisense strand to SEQ ID NO: 2054136
uaucucacugucuuccgac

SEQ ID NO: 2054138 - RNA, 19 nt, Artificial Sequence
  Description of Artificial Sequence: Synthetic oligonucleotide
  Sense strand starting at position 108 of SEQ ID NO: 1881561
ugagauaaagaaugcgaua

SEQ ID NO: 2054139 - RNA, 19 nt, Artificial Sequence
  Description of Artificial Sequence: Synthetic oligonucleotide
  Antisense strand to SEQ ID NO: 2054138
uaucgcauucuuuaucuca

SEQ ID NO: 2054140 - RNA, 19 nt, Artificial Sequence
  Description of Artificial Sequence: Synthetic oligonucleotide
  Sense strand starting at position 110 of SEQ ID NO: 1881561
agauaaagaaugcgauagu

SEQ ID NO: 2054141 - RNA, 19 nt, Artificial Sequence
  Description of Artificial Sequence: Synthetic oligonucleotide
  Antisense strand to SEQ ID NO: 2054140
acuaucgcauucuuuaucu

SEQ ID NO: 2054142 - RNA, 19 nt, Artificial Sequence
  Description of Artificial Sequence: Synthetic oligonucleotide
  Sense strand starting at position 137 of SEQ ID NO: 1881561
aagugcuuccuagagauaa

SEQ ID NO: 2054143 - RNA, 19 nt, Artificial Sequence
  Description of Artificial Sequence: Synthetic oligonucleotide
  Antisense strand to SEQ ID NO: 2054142
uuaucucuaggaagcacuu

SEQ ID NO: 2054144 - RNA, 19 nt, Artificial Sequence
  Description of Artificial Sequence: Synthetic oligonucleotide
  Sense strand starting at position 139 of SEQ ID NO: 1881561
gugcuuccuagagauaagg

SEQ ID NO: 2054145 - RNA, 19 nt, Artificial Sequence
  Description of Artificial Sequence: Synthetic oligonucleotide
  Antisense strand to SEQ ID NO: 2054144
ccuuaucucuaggaagcac

SEQ ID NO: 2054146 - RNA, 19 nt, Artificial Sequence
  Description of Artificial Sequence: Synthetic oligonucleotide
  Sense strand starting at position 336 of SEQ ID NO: 1881561
cuuucuucucugggaauca

SEQ ID NO: 2054147 - RNA, 19 nt, Artificial Sequence
  Description of Artificial Sequence: Synthetic oligonucleotide
  Antisense strand to SEQ ID NO: 2054146
ugauucccagagaagaaag

SEQ ID NO: 2054148 - RNA, 19 nt, Artificial Sequence
  Description of Artificial Sequence: Synthetic oligonucleotide
  Sense strand starting at position 443 of SEQ ID NO: 1881561
auauguuaaagacguuaag

SEQ ID NO: 2054149 - RNA, 19 nt, Artificial Sequence
  Description of Artificial Sequence: Synthetic oligonucleotide
  Antisense strand to SEQ ID NO: 2054148
cuuaacgucuuuaacauau

SEQ ID NO: 2054150 - RNA, 19 nt, Artificial Sequence
  Description of Artificial Sequence: Synthetic oligonucleotide
  Sense strand starting at position 446 of SEQ ID NO: 1881561
uguuaaagacguuaaguaa

SEQ ID NO: 2054151 - RNA, 19 nt, Artificial Sequence
  Description of Artificial Sequence: Synthetic oligonucleotide
  Antisense strand to SEQ ID NO: 2054150
uuacuuaacgucuuuaaca

SEQ ID NO: 2054152 - RNA, 19 nt, Artificial Sequence
  Description of Artificial Sequence: Synthetic oligonucleotide
  Sense strand starting at position 1339 of SEQ ID NO: 1881561
cagauuauaucuguugagu

SEQ ID NO: 2054153 - RNA, 19 nt, Artificial Sequence
  Description of Artificial Sequence: Synthetic oligonucleotide
  Antisense strand to SEQ ID NO: 2054152
acucaacagauauaaucug

SEQ ID NO: 2054154 - RNA, 19 nt, Artificial Sequence
  Description of Artificial Sequence: Synthetic oligonucleotide
  Sense strand starting at position 1403 of SEQ ID NO: 1881561
ggguaacccucacuaacuu

SEQ ID NO: 2054155 - RNA, 19 nt, Artificial Sequence
  Description of Artificial Sequence: Synthetic oligonucleotide
  Antisense strand to SEQ ID NO: 2054154
aaguuagugaggguuaccc

SEQ ID NO: 2054156 - RNA, 19 nt, Artificial Sequence
  Description of Artificial Sequence: Synthetic oligonucleotide
  Sense strand starting at position 1542 of SEQ ID NO: 1881561
aagguagguuaaucacaau

SEQ ID NO: 2054157 - RNA, 19 nt, Artificial Sequence
  Description of Artificial Sequence: Synthetic oligonucleotide
  Antisense strand to SEQ ID NO: 2054156
auugugauuaaccuaccuu

SEQ ID NO: 2054158 - RNA, 19 nt, Artificial Sequence
  Description of Artificial Sequence: Synthetic oligonucleotide
  Sense strand starting at position 1609 of SEQ ID NO: 1881561
accucuuagucugugaaga

SEQ ID NO: 2054159 - RNA, 19 nt, Artificial Sequence
  Description of Artificial Sequence: Synthetic oligonucleotide
  Antisense strand to SEQ ID NO: 2054158
ucuucacagacuaagaggu

SEQ ID NO: 2054160 - RNA, 19 nt, Artificial Sequence
  Description of Artificial Sequence: Synthetic oligonucleotide
  Sense strand starting at position 1619 of SEQ ID NO: 1881561
cugugaagaucaccuacuu

SEQ ID NO: 2054161 - RNA, 19 nt, Artificial Sequence
  Description of Artificial Sequence: Synthetic oligonucleotide
  Antisense strand to SEQ ID NO: 2054160
aaguaggugaucuucacag

SEQ ID NO: 2054162 - RNA, 19 nt, Artificial Sequence
  Description of Artificial Sequence: Synthetic oligonucleotide
  Sense strand starting at position 1918 of SEQ ID NO: 1881561
gaaggagucuuaucaaugu

SEQ ID NO: 2054163 - RNA, 19 nt, Artificial Sequence
  Description of Artificial Sequence: Synthetic oligonucleotide
  Antisense strand to SEQ ID NO: 2054162
acauugauaagacuccuuc

SEQ ID NO: 2054164 - RNA, 19 nt, Artificial Sequence
  Description of Artificial Sequence: Synthetic oligonucleotide
  Sense strand starting at position 1960 of SEQ ID NO: 1881561
guccuuguugucguuuaca

SEQ ID NO: 2054165 - RNA, 19 nt, Artificial Sequence
  Description of Artificial Sequence: Synthetic oligonucleotide
  Antisense strand to SEQ ID NO: 2054164
uguaaacgacaacaaggac

SEQ ID NO: 2054166 - RNA, 19 nt, Artificial Sequence
  Description of Artificial Sequence: Synthetic oligonucleotide
  Sense strand starting at position 1962 of SEQ ID NO: 1881561
ccuuguugucguuuacagu

SEQ ID NO: 2054167 - RNA, 19 nt, Artificial Sequence
  Description of Artificial Sequence: Synthetic oligonucleotide
  Antisense strand to SEQ ID NO: 2054166
acuguaaacgacaacaagg

SEQ ID NO: 2054168 - RNA, 19 nt, Artificial Sequence
  Description of Artificial Sequence: Synthetic oligonucleotide
  Sense strand starting at position 1970 of SEQ ID NO: 1881561
ucguuuacaguacagagau

SEQ ID NO: 2054169 - RNA, 19 nt, Artificial Sequence
  Description of Artificial Sequence: Synthetic oligonucleotide
  Antisense strand to SEQ ID NO: 2054168
aucucuguacuguaaacga

SEQ ID NO: 2054170 - RNA, 19 nt, Artificial Sequence
  Description of Artificial Sequence: Synthetic oligonucleotide
  Sense strand starting at position 1980 of SEQ ID NO: 1881561
uacagagaucuguacugua

SEQ ID NO: 2054171 - RNA, 19 nt, Artificial Sequence
  Description of Artificial Sequence: Synthetic oligonucleotide
  Antisense strand to SEQ ID NO: 2054170
uacaguacagaucucugua

SEQ ID NO: 2054172 - RNA, 19 nt, Artificial Sequence
  Description of Artificial Sequence: Synthetic oligonucleotide
  Sense strand starting at position 2095 of SEQ ID NO: 1881561
ggccuugacccaggaauau

SEQ ID NO: 2054173 - RNA, 19 nt, Artificial Sequence
  Description of Artificial Sequence: Synthetic oligonucleotide
  Antisense strand to SEQ ID NO: 2054172
auauuccugggucaaggcc

SEQ ID NO: 2054174 - RNA, 19 nt, Artificial Sequence
  Description of Artificial Sequence: Synthetic oligonucleotide
  Sense strand starting at position 2221 of SEQ ID NO: 1881561
aucauaaagcuauguaaga

SEQ ID NO: 2054175 - RNA, 19 nt, Artificial Sequence
  Description of Artificial Sequence: Synthetic oligonucleotide
  Antisense strand to SEQ ID NO: 2054174
ucuuacauagcuuuaugau

SEQ ID NO: 2054176 - RNA, 19 nt, Artificial Sequence
  Description of Artificial Sequence: Synthetic oligonucleotide
  Sense strand starting at position 2222 of SEQ ID NO: 1881561
ucauaaagcuauguaagaa

SEQ ID NO: 2054177 - RNA, 19 nt, Artificial Sequence
  Description of Artificial Sequence: Synthetic oligonucleotide
  Antisense strand to SEQ ID NO: 2054176
uucuuacauagcuuuauga

SEQ ID NO: 2054178 - RNA, 19 nt, Artificial Sequence
  Description of Artificial Sequence: Synthetic oligonucleotide
  Sense strand starting at position 2234 of SEQ ID NO: 1881561
guaagaaaugauuguacuu

SEQ ID NO: 2054179 - RNA, 19 nt, Artificial Sequence
  Description of Artificial Sequence: Synthetic oligonucleotide
  Antisense strand to SEQ ID NO: 2054178
aaguacaaucauuucuuac

SEQ ID NO: 2054180 - RNA, 19 nt, Artificial Sequence
  Description of Artificial Sequence: Synthetic oligonucleotide
  Sense strand starting at position 2439 of SEQ ID NO: 1881561
agacuauguauguaagguu

SEQ ID NO: 2054181 - RNA, 19 nt, Artificial Sequence
  Description of Artificial Sequence: Synthetic oligonucleotide
  Antisense strand to SEQ ID NO: 2054180
aaccuuacauacauagucu

SEQ ID NO: 2054182 - RNA, 19 nt, Artificial Sequence
  Description of Artificial Sequence: Synthetic oligonucleotide
  Sense strand starting at position 2483 of SEQ ID NO: 1881561
uauuguuugcuuuggauuu

SEQ ID NO: 2054183 - RNA, 19 nt, Artificial Sequence
  Description of Artificial Sequence: Synthetic oligonucleotide
  Antisense strand to SEQ ID NO: 2054182
aaauccaaagcaaacaaua

SEQ ID NO: 2054184 - RNA, 19 nt, Artificial Sequence
  Description of Artificial Sequence: Synthetic oligonucleotide
  Sense strand starting at position 2683 of SEQ ID NO: 1881561
ugagcuugauuugagaaca

SEQ ID NO: 2054185 - RNA, 19 nt, Artificial Sequence
  Description of Artificial Sequence: Synthetic oligonucleotide
  Antisense strand to SEQ ID NO: 2054184
uguucucaaaucaagcuca

SEQ ID NO: 2054186 - RNA, 19 nt, Artificial Sequence
  Description of Artificial Sequence: Synthetic oligonucleotide
  Sense strand starting at position 2723 of SEQ ID NO: 1881561
gaacuagugguauauuguu

SEQ ID NO: 2054187 - RNA, 19 nt, Artificial Sequence
  Description of Artificial Sequence: Synthetic oligonucleotide
  Antisense strand to SEQ ID NO: 2054186
aacaauauaccacuaguuc

SEQ ID NO: 2054188 - RNA, 19 nt, Artificial Sequence
  Description of Artificial Sequence: Synthetic oligonucleotide
  Sense strand starting at position 2829 of SEQ ID NO: 1881561
ugaaguggauuaccuaaua

SEQ ID NO: 2054189 - RNA, 19 nt, Artificial Sequence
  Description of Artificial Sequence: Synthetic oligonucleotide
  Antisense strand to SEQ ID NO: 2054188
uauuagguaauccacuuca

SEQ ID NO: 2054190 - RNA, 19 nt, Artificial Sequence
  Description of Artificial Sequence: Synthetic oligonucleotide
  Sense strand starting at position 2870 of SEQ ID NO: 1881561
aagguaucacgacauaguc

SEQ ID NO: 2054191 - RNA, 19 nt, Artificial Sequence
  Description of Artificial Sequence: Synthetic oligonucleotide
  Antisense strand to SEQ ID NO: 2054190
gacuaugucgugauaccuu

SEQ ID NO: 2054192 - RNA, 19 nt, Artificial Sequence
  Description of Artificial Sequence: Synthetic oligonucleotide
  Sense strand starting at position 2872 of SEQ ID NO: 1881561
gguaucacgacauagucau

SEQ ID NO: 2054193 - RNA, 19 nt, Artificial Sequence
  Description of Artificial Sequence: Synthetic oligonucleotide
  Antisense strand to SEQ ID NO: 2054192
augacuaugucgugauacc

SEQ ID NO: 2054194 - RNA, 19 nt, Artificial Sequence
  Description of Artificial Sequence: Synthetic oligonucleotide
  Sense strand starting at position 3006 of SEQ ID NO: 1881561
guuuaagagucaucaacac

SEQ ID NO: 2054195 - RNA, 19 nt, Artificial Sequence
  Description of Artificial Sequence: Synthetic oligonucleotide
  Antisense strand to SEQ ID NO: 2054194
guguugaugacucuuaaac

SEQ ID NO: 2054196 - RNA, 19 nt, Artificial Sequence
  Description of Artificial Sequence: Synthetic oligonucleotide
  Sense strand starting at position 3030 of SEQ ID NO: 1881561
gcucauugaccauacgaau

SEQ ID NO: 2054197 - RNA, 19 nt, Artificial Sequence
  Description of Artificial Sequence: Synthetic oligonucleotide
  Antisense strand to SEQ ID NO: 2054196
auucguauggucaaugagc

SEQ ID NO: 2054198 - RNA, 19 nt, Artificial Sequence
  Description of Artificial Sequence: Synthetic oligonucleotide
  Sense strand starting at position 3036 of SEQ ID NO: 1881561
ugaccauacgaaugaguca

SEQ ID NO: 2054199 - RNA, 19 nt, Artificial Sequence
  Description of Artificial Sequence: Synthetic oligonucleotide
  Antisense strand to SEQ ID NO: 2054198
ugacucauucguaugguca

SEQ ID NO: 2054200 - RNA, 19 nt, Artificial Sequence
  Description of Artificial Sequence: Synthetic oligonucleotide
  Sense strand starting at position 3178 of SEQ ID NO: 1881561
gggaguagcaagcaucaca

SEQ ID NO: 2054201 - RNA, 19 nt, Artificial Sequence
  Description of Artificial Sequence: Synthetic oligonucleotide
  Antisense strand to SEQ ID NO: 2054200
ugugaugcuugcuacuccc

SEQ ID NO: 2054202 - RNA, 19 nt, Artificial Sequence
  Description of Artificial Sequence: Synthetic oligonucleotide
  Sense strand starting at position 3302 of SEQ ID NO: 1881561
gcucucaauggcuaaauua

SEQ ID NO: 2054203 - RNA, 19 nt, Artificial Sequence
  Description of Artificial Sequence: Synthetic oligonucleotide
  Antisense strand to SEQ ID NO: 2054202
uaauuuagccauugagagc

SEQ ID NO: 2054204 - RNA, 19 nt, Artificial Sequence
  Description of Artificial Sequence: Synthetic oligonucleotide
  Sense strand starting at position 3338 of SEQ ID NO: 1881561
gucuacacagagcaauaau

SEQ ID NO: 2054205 - RNA, 19 nt, Artificial Sequence
  Description of Artificial Sequence: Synthetic oligonucleotide
  Antisense strand to SEQ ID NO: 2054204
auuauugcucuguguagac

SEQ ID NO: 2054206 - RNA, 19 nt, Artificial Sequence
  Description of Artificial Sequence: Synthetic oligonucleotide
  Sense strand starting at position 3716 of SEQ ID NO: 1881561
ugaugugcuauguagauac

SEQ ID NO: 2054207 - RNA, 19 nt, Artificial Sequence
  Description of Artificial Sequence: Synthetic oligonucleotide
  Antisense strand to SEQ ID NO: 2054206
guaucuacauagcacauca

SEQ ID NO: 2054208 - RNA, 19 nt, Artificial Sequence
  Description of Artificial Sequence: Synthetic oligonucleotide
  Sense strand starting at position 3718 of SEQ ID NO: 1881561
augugcuauguagauacau

SEQ ID NO: 2054209 - RNA, 19 nt, Artificial Sequence
  Description of Artificial Sequence: Synthetic oligonucleotide
  Antisense strand to SEQ ID NO: 2054208
auguaucuacauagcacau

SEQ ID NO: 2054210 - RNA, 19 nt, Artificial Sequence
  Description of Artificial Sequence: Synthetic oligonucleotide
  Sense strand starting at position 3727 of SEQ ID NO: 1881561
guagauacaucucuaacag

SEQ ID NO: 2054211 - RNA, 19 nt, Artificial Sequence
  Description of Artificial Sequence: Synthetic oligonucleotide
  Antisense strand to SEQ ID NO: 2054210
cuguuagagauguaucuac

SEQ ID NO: 2054212 - RNA, 19 nt, Artificial Sequence
  Description of Artificial Sequence: Synthetic oligonucleotide
  Sense strand starting at position 3875 of SEQ ID NO: 1881561
ugaaguaugccucaacuua

SEQ ID NO: 2054213 - RNA, 19 nt, Artificial Sequence
  Description of Artificial Sequence: Synthetic oligonucleotide
  Antisense strand to SEQ ID NO: 2054212
uaaguugaggcauacuuca

SEQ ID NO: 2054214 - RNA, 19 nt, Artificial Sequence
  Description of Artificial Sequence: Synthetic oligonucleotide
  Sense strand starting at position 3972 of SEQ ID NO: 1881561
auaaccuucccuugguaga

SEQ ID NO: 2054215 - RNA, 19 nt, Artificial Sequence
  Description of Artificial Sequence: Synthetic oligonucleotide
  Antisense strand to SEQ ID NO: 2054214
ucuaccaagggaagguuau

SEQ ID NO: 2054216 - RNA, 19 nt, Artificial Sequence
  Description of Artificial Sequence: Synthetic oligonucleotide
  Sense strand starting at position 187 of SEQ ID NO: 1881562
uugugacaccaugacucau

SEQ ID NO: 2054217 - RNA, 19 nt, Artificial Sequence
  Description of Artificial Sequence: Synthetic oligonucleotide
  Antisense strand to SEQ ID NO: 2054216
augagucauggugucacaa

SEQ ID NO: 2054218 - RNA, 19 nt, Artificial Sequence
  Description of Artificial Sequence: Synthetic oligonucleotide
  Sense strand starting at position 261 of SEQ ID NO: 1881562
gaacauuugugacaucaug

SEQ ID NO: 2054219 - RNA, 19 nt, Artificial Sequence
  Description of Artificial Sequence: Synthetic oligonucleotide
  Antisense strand to SEQ ID NO: 2054218
caugaugucacaaauguuc

SEQ ID NO: 2054220 - RNA, 19 nt, Artificial Sequence
  Description of Artificial Sequence: Synthetic oligonucleotide
  Sense strand starting at position 390 of SEQ ID NO: 1881562
agaguaaaggguugguuau

SEQ ID NO: 2054221 - RNA, 19 nt, Artificial Sequence
  Description of Artificial Sequence: Synthetic oligonucleotide
  Antisense strand to SEQ ID NO: 2054220
auaaccaacccuuuacucu

SEQ ID NO: 2054222 - RNA, 19 nt, Artificial Sequence
  Description of Artificial Sequence: Synthetic oligonucleotide
  Sense strand starting at position 392 of SEQ ID NO: 1881562
aguaaaggguugguuauca

SEQ ID NO: 2054223 - RNA, 19 nt, Artificial Sequence
  Description of Artificial Sequence: Synthetic oligonucleotide
  Antisense strand to SEQ ID NO: 2054222
ugauaaccaacccuuuacu

SEQ ID NO: 2054224 - RNA, 19 nt, Artificial Sequence
  Description of Artificial Sequence: Synthetic oligonucleotide
  Sense strand starting at position 503 of SEQ ID NO: 1881562
cagcaaagggccuaugauu

SEQ ID NO: 2054225 - RNA, 19 nt, Artificial Sequence
  Description of Artificial Sequence: Synthetic oligonucleotide
  Antisense strand to SEQ ID NO: 2054224
aaucauaggcccuuugcug

SEQ ID NO: 2054226 - RNA, 19 nt, Artificial Sequence
  Description of Artificial Sequence: Synthetic oligonucleotide
  Sense strand starting at position 704 of SEQ ID NO: 1881562
cauuaagauguauacguua

SEQ ID NO: 2054227 - RNA, 19 nt, Artificial Sequence
  Description of Artificial Sequence: Synthetic oligonucleotide
  Antisense strand to SEQ ID NO: 2054226
uaacguauacaucuuaaug

SEQ ID NO: 2054228 - RNA, 19 nt, Artificial Sequence
  Description of Artificial Sequence: Synthetic oligonucleotide
  Sense strand starting at position 907 of SEQ ID NO: 1881562
agauuaccaacgggauagu

SEQ ID NO: 2054229 - RNA, 19 nt, Artificial Sequence
  Description of Artificial Sequence: Synthetic oligonucleotide
  Antisense strand to SEQ ID NO: 2054228
acuaucccguugguaaucu

SEQ ID NO: 2054230 - RNA, 19 nt, Artificial Sequence
  Description of Artificial Sequence: Synthetic oligonucleotide
  Sense strand starting at position 916 of SEQ ID NO: 1881562
acgggauaguauucagagu

SEQ ID NO: 2054231 - RNA, 19 nt, Artificial Sequence
  Description of Artificial Sequence: Synthetic oligonucleotide
  Antisense strand to SEQ ID NO: 2054230
acucugaauacuaucccgu

SEQ ID NO: 2054232 - RNA, 19 nt, Artificial Sequence
  Description of Artificial Sequence: Synthetic oligonucleotide
  Sense strand starting at position 1003 of SEQ ID NO: 1881562
aguagcaucguuugauuua

SEQ ID NO: 2054233 - RNA, 19 nt, Artificial Sequence
  Description of Artificial Sequence: Synthetic oligonucleotide
  Antisense strand to SEQ ID NO: 2054232
uaaaucaaacgaugcuacu

SEQ ID NO: 2054234 - RNA, 19 nt, Artificial Sequence
  Description of Artificial Sequence: Synthetic oligonucleotide
  Sense strand starting at position 1006 of SEQ ID NO: 1881562
agcaucguuugauuuacuu

SEQ ID NO: 2054235 - RNA, 19 nt, Artificial Sequence
  Description of Artificial Sequence: Synthetic oligonucleotide
  Antisense strand to SEQ ID NO: 2054234
aaguaaaucaaacgaugcu

SEQ ID NO: 2054236 - RNA, 19 nt, Artificial Sequence
  Description of Artificial Sequence: Synthetic oligonucleotide
  Sense strand starting at position 1109 of SEQ ID NO: 1881562
aauuguguagccuagacaa

SEQ ID NO: 2054237 - RNA, 19 nt, Artificial Sequence
  Description of Artificial Sequence: Synthetic oligonucleotide
  Antisense strand to SEQ ID NO: 2054236
uugucuaggcuacacaauu

SEQ ID NO: 2054238 - RNA, 19 nt, Artificial Sequence
  Description of Artificial Sequence: Synthetic oligonucleotide
  Sense strand starting at position 1231 of SEQ ID NO: 1881562
aauccuuaugcagaaggua

SEQ ID NO: 2054239 - RNA, 19 nt, Artificial Sequence
  Description of Artificial Sequence: Synthetic oligonucleotide
  Antisense strand to SEQ ID NO: 2054238
uaccuucugcauaaggauu

SEQ ID NO: 2054240 - RNA, 19 nt, Artificial Sequence
  Description of Artificial Sequence: Synthetic oligonucleotide
  Sense strand starting at position 1287 of SEQ ID NO: 1881562
cugccauagggcuaauuau

SEQ ID NO: 2054241 - RNA, 19 nt, Artificial Sequence
  Description of Artificial Sequence: Synthetic oligonucleotide
  Antisense strand to SEQ ID NO: 2054240
auaauuagcccuauggcag

SEQ ID NO: 2054242 - RNA, 19 nt, Artificial Sequence
  Description of Artificial Sequence: Synthetic oligonucleotide
  Sense strand starting at position 1370 of SEQ ID NO: 1881562
aaccuuagggaguguuaau

SEQ ID NO: 2054243 - RNA, 19 nt, Artificial Sequence
  Description of Artificial Sequence: Synthetic oligonucleotide
  Antisense strand to SEQ ID NO: 2054242
auuaacacucccuaagguu

SEQ ID NO: 2054244 - RNA, 19 nt, Artificial Sequence
  Description of Artificial Sequence: Synthetic oligonucleotide
  Sense strand starting at position 1627 of SEQ ID NO: 1881562
uuuagaucauugguaguaa

SEQ ID NO: 2054245 - RNA, 19 nt, Artificial Sequence
  Description of Artificial Sequence: Synthetic oligonucleotide
  Antisense strand to SEQ ID NO: 2054244
uuacuaccaaugaucuaaa

SEQ ID NO: 2054246 - RNA, 19 nt, Artificial Sequence
  Description of Artificial Sequence: Synthetic oligonucleotide
  Sense strand starting at position 1703 of SEQ ID NO: 1881562
ugaaauugaucuuucuguu

SEQ ID NO: 2054247 - RNA, 19 nt, Artificial Sequence
  Description of Artificial Sequence: Synthetic oligonucleotide
  Antisense strand to SEQ ID NO: 2054246
aacagaaagaucaauuuca

SEQ ID NO: 2054248 - RNA, 19 nt, Artificial Sequence
  Description of Artificial Sequence: Synthetic oligonucleotide
  Sense strand starting at position 1844 of SEQ ID NO: 1881562
uucugcuuacuggauauga

SEQ ID NO: 2054249 - RNA, 19 nt, Artificial Sequence
  Description of Artificial Sequence: Synthetic oligonucleotide
  Antisense strand to SEQ ID NO: 2054248
ucauauccaguaagcagaa

SEQ ID NO: 2054250 - RNA, 19 nt, Artificial Sequence
  Description of Artificial Sequence: Synthetic oligonucleotide
  Sense strand starting at position 1940 of SEQ ID NO: 1881562
ucgauaucccauuaagcuc

SEQ ID NO: 2054251 - RNA, 19 nt, Artificial Sequence
  Description of Artificial Sequence: Synthetic oligonucleotide
  Antisense strand to SEQ ID NO: 2054250
gagcuuaaugggauaucga

SEQ ID NO: 2054252 - RNA, 19 nt, Artificial Sequence
  Description of Artificial Sequence: Synthetic oligonucleotide
  Sense strand starting at position 1986 of SEQ ID NO: 1881562
aguagaauccauuagugca

SEQ ID NO: 2054253 - RNA, 19 nt, Artificial Sequence
  Description of Artificial Sequence: Synthetic oligonucleotide
  Antisense strand to SEQ ID NO: 2054252
ugcacuaauggauucuacu

SEQ ID NO: 2054254 - RNA, 19 nt, Artificial Sequence
  Description of Artificial Sequence: Synthetic oligonucleotide
  Sense strand starting at position 1994 of SEQ ID NO: 1881562
ccauuagugcaagaaagca

SEQ ID NO: 2054255 - RNA, 19 nt, Artificial Sequence
  Description of Artificial Sequence: Synthetic oligonucleotide
  Antisense strand to SEQ ID NO: 2054254
ugcuuucuugcacuaaugg

SEQ ID NO: 2054256 - RNA, 19 nt, Artificial Sequence
  Description of Artificial Sequence: Synthetic oligonucleotide
  Sense strand starting at position 2063 of SEQ ID NO: 1881562
agcacaguuguauaugaau

SEQ ID NO: 2054257 - RNA, 19 nt, Artificial Sequence
  Description of Artificial Sequence: Synthetic oligonucleotide
  Antisense strand to SEQ ID NO: 2054256
auucauauacaacugugcu

SEQ ID NO: 2054258 - RNA, 19 nt, Artificial Sequence
  Description of Artificial Sequence: Synthetic oligonucleotide
  Sense strand starting at position 2074 of SEQ ID NO: 1881562
auaugaaugggcugaucau

SEQ ID NO: 2054259 - RNA, 19 nt, Artificial Sequence
  Description of Artificial Sequence: Synthetic oligonucleotide
  Antisense strand to SEQ ID NO: 2054258
augaucagcccauucauau

SEQ ID NO: 2054260 - RNA, 19 nt, Artificial Sequence
  Description of Artificial Sequence: Synthetic oligonucleotide
  Sense strand starting at position 2178 of SEQ ID NO: 1881562
gaguacgauuuacaagaca

SEQ ID NO: 2054261 - RNA, 19 nt, Artificial Sequence
  Description of Artificial Sequence: Synthetic oligonucleotide
  Antisense strand to SEQ ID NO: 2054260
ugucuuguaaaucguacuc

SEQ ID NO: 2054262 - RNA, 19 nt, Artificial Sequence
  Description of Artificial Sequence: Synthetic oligonucleotide
  Sense strand starting at position 2226 of SEQ ID NO: 1881562
ucuguuugaccuuauagaa

SEQ ID NO: 2054263 - RNA, 19 nt, Artificial Sequence
  Description of Artificial Sequence: Synthetic oligonucleotide
  Antisense strand to SEQ ID NO: 2054262
uucuauaaggucaaacaga

SEQ ID NO: 2054264 - RNA, 19 nt, Artificial Sequence
  Description of Artificial Sequence: Synthetic oligonucleotide
  Sense strand starting at position 2450 of SEQ ID NO: 1881562
aacgaauacugaguaucua

SEQ ID NO: 2054265 - RNA, 19 nt, Artificial Sequence
  Description of Artificial Sequence: Synthetic oligonucleotide
  Antisense strand to SEQ ID NO: 2054264
uagauacucaguauucguu

SEQ ID NO: 2054266 - RNA, 19 nt, Artificial Sequence
  Description of Artificial Sequence: Synthetic oligonucleotide
  Sense strand starting at position 2451 of SEQ ID NO: 1881562
acgaauacugaguaucuau

SEQ ID NO: 2054267 - RNA, 19 nt, Artificial Sequence
  Description of Artificial Sequence: Synthetic oligonucleotide
  Antisense strand to SEQ ID NO: 2054266
auagauacucaguauucgu

SEQ ID NO: 2054268 - RNA, 19 nt, Artificial Sequence
  Description of Artificial Sequence: Synthetic oligonucleotide
  Sense strand starting at position 2757 of SEQ ID NO: 1881562
uuaagccauuguguaauuu

SEQ ID NO: 2054269 - RNA, 19 nt, Artificial Sequence
  Description of Artificial Sequence: Synthetic oligonucleotide
  Antisense strand to SEQ ID NO: 2054268
aaauuacacaauggcuuaa

SEQ ID NO: 2054270 - RNA, 19 nt, Artificial Sequence
  Description of Artificial Sequence: Synthetic oligonucleotide
  Sense strand starting at position 2761 of SEQ ID NO: 1881562
gccauuguguaauuuaauu

SEQ ID NO: 2054271 - RNA, 19 nt, Artificial Sequence
  Description of Artificial Sequence: Synthetic oligonucleotide
  Antisense strand to SEQ ID NO: 2054270
aauuaaauuacacaauggc

SEQ ID NO: 2054272 - RNA, 19 nt, Artificial Sequence
  Description of Artificial Sequence: Synthetic oligonucleotide
  Sense strand starting at position 2992 of SEQ ID NO: 1881562
gaauccacguauucuugaa

SEQ ID NO: 2054273 - RNA, 19 nt, Artificial Sequence
  Description of Artificial Sequence: Synthetic oligonucleotide
  Antisense strand to SEQ ID NO: 2054272
uucaagaauacguggauuc

SEQ ID NO: 2054274 - RNA, 19 nt, Artificial Sequence
  Description of Artificial Sequence: Synthetic oligonucleotide
  Sense strand starting at position 2996 of SEQ ID NO: 1881562
ccacguauucuugaaauaa

SEQ ID NO: 2054275 - RNA, 19 nt, Artificial Sequence
  Description of Artificial Sequence: Synthetic oligonucleotide
  Antisense strand to SEQ ID NO: 2054274
uuauuucaagaauacgugg

SEQ ID NO: 2054276 - RNA, 19 nt, Artificial Sequence
  Description of Artificial Sequence: Synthetic oligonucleotide
  Sense strand starting at position 3166 of SEQ ID NO: 1881562
acaaauauuccugggcaga

SEQ ID NO: 2054277 - RNA, 19 nt, Artificial Sequence
  Description of Artificial Sequence: Synthetic oligonucleotide
  Antisense strand to SEQ ID NO: 2054276
ucugcccaggaauauuugu

SEQ ID NO: 2054278 - RNA, 19 nt, Artificial Sequence
  Description of Artificial Sequence: Synthetic oligonucleotide
  Sense strand starting at position 3188 of SEQ ID NO: 1881562
aauggugucccuuaugaaa

SEQ ID NO: 2054279 - RNA, 19 nt, Artificial Sequence
  Description of Artificial Sequence: Synthetic oligonucleotide
  Antisense strand to SEQ ID NO: 2054278
uuucauaagggacaccauu

SEQ ID NO: 2054280 - RNA, 19 nt, Artificial Sequence
  Description of Artificial Sequence: Synthetic oligonucleotide
  Sense strand starting at position 3286 of SEQ ID NO: 1881562
ccaggaaacucuuuauugu

SEQ ID NO: 2054281 - RNA, 19 nt, Artificial Sequence
  Description of Artificial Sequence: Synthetic oligonucleotide
  Antisense strand to SEQ ID NO: 2054280
acaauaaagaguuuccugg

SEQ ID NO: 2054282 - RNA, 19 nt, Artificial Sequence
  Description of Artificial Sequence: Synthetic oligonucleotide
  Sense strand starting at position 3300 of SEQ ID NO: 1881562
auugucacugaauguaaau

SEQ ID NO: 2054283 - RNA, 19 nt, Artificial Sequence
  Description of Artificial Sequence: Synthetic oligonucleotide
  Antisense strand to SEQ ID NO: 2054282
auuuacauucagugacaau

SEQ ID NO: 2054284 - RNA, 19 nt, Artificial Sequence
  Description of Artificial Sequence: Synthetic oligonucleotide
  Sense strand starting at position 3412 of SEQ ID NO: 1881562
aggaauaaccaacguguca

SEQ ID NO: 2054285 - RNA, 19 nt, Artificial Sequence
  Description of Artificial Sequence: Synthetic oligonucleotide
  Antisense strand to SEQ ID NO: 2054284
ugacacguugguuauuccu

SEQ ID NO: 2054286 - RNA, 19 nt, Artificial Sequence
  Description of Artificial Sequence: Synthetic oligonucleotide
  Sense strand starting at position 3423 of SEQ ID NO: 1881562
acgugucaagaugaggaau

SEQ ID NO: 2054287 - RNA, 19 nt, Artificial Sequence
  Description of Artificial Sequence: Synthetic oligonucleotide
  Antisense strand to SEQ ID NO: 2054286
auuccucaucuugacacgu

SEQ ID NO: 2054288 - RNA, 19 nt, Artificial Sequence
  Description of Artificial Sequence: Synthetic oligonucleotide
  Sense strand starting at position 3446 of SEQ ID NO: 1881562
uuugacaugucauuagacu

SEQ ID NO: 2054289 - RNA, 19 nt, Artificial Sequence
  Description of Artificial Sequence: Synthetic oligonucleotide
  Antisense strand to SEQ ID NO: 2054288
agucuaaugacaugucaaa

SEQ ID NO: 2054290 - RNA, 19 nt, Artificial Sequence
  Description of Artificial Sequence: Synthetic oligonucleotide
  Sense strand starting at position 3452 of SEQ ID NO: 1881562
augucauuagacuaaguua

SEQ ID NO: 2054291 - RNA, 19 nt, Artificial Sequence
  Description of Artificial Sequence: Synthetic oligonucleotide
  Antisense strand to SEQ ID NO: 2054290
uaacuuagucuaaugacau

SEQ ID NO: 2054292 - RNA, 19 nt, Artificial Sequence
  Description of Artificial Sequence: Synthetic oligonucleotide
  Sense strand starting at position 3791 of SEQ ID NO: 1881562
agcugacaugacggagaaa

SEQ ID NO: 2054293 - RNA, 19 nt, Artificial Sequence
  Description of Artificial Sequence: Synthetic oligonucleotide
  Antisense strand to SEQ ID NO: 2054292
uuucuccgucaugucagcu

SEQ ID NO: 2054294 - RNA, 19 nt, Artificial Sequence
  Description of Artificial Sequence: Synthetic oligonucleotide
  Sense strand starting at position 3853 of SEQ ID NO: 1881562
uuaaacuuacugugaagau

SEQ ID NO: 2054295 - RNA, 19 nt, Artificial Sequence
  Description of Artificial Sequence: Synthetic oligonucleotide
  Antisense strand to SEQ ID NO: 2054294
aucuucacaguaaguuuaa

SEQ ID NO: 2054296 - RNA, 19 nt, Artificial Sequence
  Description of Artificial Sequence: Synthetic oligonucleotide
  Sense strand starting at position 98 of SEQ ID NO: 1881563
gcaguaaacagagggauua

SEQ ID NO: 2054297 - RNA, 19 nt, Artificial Sequence
  Description of Artificial Sequence: Synthetic oligonucleotide
  Antisense strand to SEQ ID NO: 2054296
uaaucccucuguuuacugc

SEQ ID NO: 2054298 - RNA, 19 nt, Artificial Sequence
  Description of Artificial Sequence: Synthetic oligonucleotide
  Sense strand starting at position 139 of SEQ ID NO: 1881563
uagcacauaugaguuggaa

SEQ ID NO: 2054299 - RNA, 19 nt, Artificial Sequence
  Description of Artificial Sequence: Synthetic oligonucleotide
  Antisense strand to SEQ ID NO: 2054298
uuccaacucauaugugcua

SEQ ID NO: 2054300 - RNA, 19 nt, Artificial Sequence
  Description of Artificial Sequence: Synthetic oligonucleotide
  Sense strand starting at position 141 of SEQ ID NO: 1881563
gcacauaugaguuggaaau

SEQ ID NO: 2054301 - RNA, 19 nt, Artificial Sequence
  Description of Artificial Sequence: Synthetic oligonucleotide
  Antisense strand to SEQ ID NO: 2054300
auuuccaacucauaugugc

SEQ ID NO: 2054302 - RNA, 19 nt, Artificial Sequence
  Description of Artificial Sequence: Synthetic oligonucleotide
  Sense strand starting at position 142 of SEQ ID NO: 1881563
cacauaugaguuggaaauu

SEQ ID NO: 2054303 - RNA, 19 nt, Artificial Sequence
  Description of Artificial Sequence: Synthetic oligonucleotide
  Antisense strand to SEQ ID NO: 2054302
aauuuccaacucauaugug

SEQ ID NO: 2054304 - RNA, 19 nt, Artificial Sequence
  Description of Artificial Sequence: Synthetic oligonucleotide
  Sense strand starting at position 316 of SEQ ID NO: 1881563
gacugcucagguuauauga

SEQ ID NO: 2054305 - RNA, 19 nt, Artificial Sequence
  Description of Artificial Sequence: Synthetic oligonucleotide
  Antisense strand to SEQ ID NO: 2054304
ucauauaaccugagcaguc

SEQ ID NO: 2054306 - RNA, 19 nt, Artificial Sequence
  Description of Artificial Sequence: Synthetic oligonucleotide
  Sense strand starting at position 544 of SEQ ID NO: 1881563
gugugaauaaauggguaaa

SEQ ID NO: 2054307 - RNA, 19 nt, Artificial Sequence
  Description of Artificial Sequence: Synthetic oligonucleotide
  Antisense strand to SEQ ID NO: 2054306
uuuacccauuuauucacac

SEQ ID NO: 2054308 - RNA, 19 nt, Artificial Sequence
  Description of Artificial Sequence: Synthetic oligonucleotide
  Sense strand starting at position 686 of SEQ ID NO: 1881563
cucuguuauguggaugaag

SEQ ID NO: 2054309 - RNA, 19 nt, Artificial Sequence
  Description of Artificial Sequence: Synthetic oligonucleotide
  Antisense strand to SEQ ID NO: 2054308
cuucauccacauaacagag

SEQ ID NO: 2054310 - RNA, 19 nt, Artificial Sequence
  Description of Artificial Sequence: Synthetic oligonucleotide
  Sense strand starting at position 688 of SEQ ID NO: 1881563
cuguuauguggaugaagau

SEQ ID NO: 2054311 - RNA, 19 nt, Artificial Sequence
  Description of Artificial Sequence: Synthetic oligonucleotide
  Antisense strand to SEQ ID NO: 2054310
aucuucauccacauaacag

SEQ ID NO: 2054312 - RNA, 19 nt, Artificial Sequence
  Description of Artificial Sequence: Synthetic oligonucleotide
  Sense strand starting at position 713 of SEQ ID NO: 1881563
ugcagucaauuucugaguu

SEQ ID NO: 2054313 - RNA, 19 nt, Artificial Sequence
  Description of Artificial Sequence: Synthetic oligonucleotide
  Antisense strand to SEQ ID NO: 2054312
aacucagaaauugacugca

SEQ ID NO: 2054314 - RNA, 19 nt, Artificial Sequence
  Description of Artificial Sequence: Synthetic oligonucleotide
  Sense strand starting at position 1038 of SEQ ID NO: 1881563
gucaucuugcuagaacaag

SEQ ID NO: 2054315 - RNA, 19 nt, Artificial Sequence
  Description of Artificial Sequence: Synthetic oligonucleotide
  Antisense strand to SEQ ID NO: 2054314
cuuguucuagcaagaugac

SEQ ID NO: 2054316 - RNA, 19 nt, Artificial Sequence
  Description of Artificial Sequence: Synthetic oligonucleotide
  Sense strand starting at position 1171 of SEQ ID NO: 1881563
auagauagagccuaugcau

SEQ ID NO: 2054317 - RNA, 19 nt, Artificial Sequence
  Description of Artificial Sequence: Synthetic oligonucleotide
  Antisense strand to SEQ ID NO: 2054316
augcauaggcucuaucuau

SEQ ID NO: 2054318 - RNA, 19 nt, Artificial Sequence
  Description of Artificial Sequence: Synthetic oligonucleotide
  Sense strand starting at position 1665 of SEQ ID NO: 1881563
gagauagagugacuuccau

SEQ ID NO: 2054319 - RNA, 19 nt, Artificial Sequence
  Description of Artificial Sequence: Synthetic oligonucleotide
  Antisense strand to SEQ ID NO: 2054318
auggaagucacucuaucuc

SEQ ID NO: 2054320 - RNA, 19 nt, Artificial Sequence
  Description of Artificial Sequence: Synthetic oligonucleotide
  Sense strand starting at position 1689 of SEQ ID NO: 1881563
agaauaugguauccuuaua

SEQ ID NO: 2054321 - RNA, 19 nt, Artificial Sequence
  Description of Artificial Sequence: Synthetic oligonucleotide
  Antisense strand to SEQ ID NO: 2054320
uauaaggauaccauauucu

SEQ ID NO: 2054322 - RNA, 19 nt, Artificial Sequence
  Description of Artificial Sequence: Synthetic oligonucleotide
  Sense strand starting at position 1873 of SEQ ID NO: 1881563
aacugauggugaucuuacu

SEQ ID NO: 2054323 - RNA, 19 nt, Artificial Sequence
  Description of Artificial Sequence: Synthetic oligonucleotide
  Antisense strand to SEQ ID NO: 2054322
aguaagaucaccaucaguu

SEQ ID NO: 2054324 - RNA, 19 nt, Artificial Sequence
  Description of Artificial Sequence: Synthetic oligonucleotide
  Sense strand starting at position 1957 of SEQ ID NO: 1881563
ugaauuuguugacagaaag

SEQ ID NO: 2054325 - RNA, 19 nt, Artificial Sequence
  Description of Artificial Sequence: Synthetic oligonucleotide
  Antisense strand to SEQ ID NO: 2054324
cuuucugucaacaaauuca

SEQ ID NO: 2054326 - RNA, 19 nt, Artificial Sequence
  Description of Artificial Sequence: Synthetic oligonucleotide
  Sense strand starting at position 1968 of SEQ ID NO: 1881563
acagaaaguaauuggguca

SEQ ID NO: 2054327 - RNA, 19 nt, Artificial Sequence
  Description of Artificial Sequence: Synthetic oligonucleotide
  Antisense strand to SEQ ID NO: 2054326
ugacccaauuacuuucugu

SEQ ID NO: 2054328 - RNA, 19 nt, Artificial Sequence
  Description of Artificial Sequence: Synthetic oligonucleotide
  Sense strand starting at position 1973 of SEQ ID NO: 1881563
aaguaauugggucacugua

SEQ ID NO: 2054329 - RNA, 19 nt, Artificial Sequence
  Description of Artificial Sequence: Synthetic oligonucleotide
  Antisense strand to SEQ ID NO: 2054328
uacagugacccaauuacuu

SEQ ID NO: 2054330 - RNA, 19 nt, Artificial Sequence
  Description of Artificial Sequence: Synthetic oligonucleotide
  Sense strand starting at position 2041 of SEQ ID NO: 1881563
aaccauaguggucgauuaa

SEQ ID NO: 2054331 - RNA, 19 nt, Artificial Sequence
  Description of Artificial Sequence: Synthetic oligonucleotide
  Antisense strand to SEQ ID NO: 2054330
uuaaucgaccacuaugguu

SEQ ID NO: 2054332 - RNA, 19 nt, Artificial Sequence
  Description of Artificial Sequence: Synthetic oligonucleotide
  Sense strand starting at position 2042 of SEQ ID NO: 1881563
accauaguggucgauuaaa

SEQ ID NO: 2054333 - RNA, 19 nt, Artificial Sequence
  Description of Artificial Sequence: Synthetic oligonucleotide
  Antisense strand to SEQ ID NO: 2054332
uuuaaucgaccacuauggu

SEQ ID NO: 2054334 - RNA, 19 nt, Artificial Sequence
  Description of Artificial Sequence: Synthetic oligonucleotide
  Sense strand starting at position 2145 of SEQ ID NO: 1881563
ggcagaaauuucuaagaau

SEQ ID NO: 2054335 - RNA, 19 nt, Artificial Sequence
  Description of Artificial Sequence: Synthetic oligonucleotide
  Antisense strand to SEQ ID NO: 2054334
auucuuagaaauuucugcc

SEQ ID NO: 2054336 - RNA, 19 nt, Artificial Sequence
  Description of Artificial Sequence: Synthetic oligonucleotide
  Sense strand starting at position 2154 of SEQ ID NO: 1881563
uucuaagaauugccuugaa

SEQ ID NO: 2054337 - RNA, 19 nt, Artificial Sequence
  Description of Artificial Sequence: Synthetic oligonucleotide
  Antisense strand to SEQ ID NO: 2054336
uucaaggcaauucuuagaa

SEQ ID NO: 2054338 - RNA, 19 nt, Artificial Sequence
  Description of Artificial Sequence: Synthetic oligonucleotide
  Sense strand starting at position 2158 of SEQ ID NO: 1881563
aagaauugccuugaaugug

SEQ ID NO: 2054339 - RNA, 19 nt, Artificial Sequence
  Description of Artificial Sequence: Synthetic oligonucleotide
  Antisense strand to SEQ ID NO: 2054338
cacauucaaggcaauucuu

SEQ ID NO: 2054340 - RNA, 19 nt, Artificial Sequence
  Description of Artificial Sequence: Synthetic oligonucleotide
  Sense strand starting at position 2246 of SEQ ID NO: 1881563
ucacuuagaugauuacgaa

SEQ ID NO: 2054341 - RNA, 19 nt, Artificial Sequence
  Description of Artificial Sequence: Synthetic oligonucleotide
  Antisense strand to SEQ ID NO: 2054340
uucguaaucaucuaaguga

SEQ ID NO: 2054342 - RNA, 19 nt, Artificial Sequence
  Description of Artificial Sequence: Synthetic oligonucleotide
  Sense strand starting at position 2304 of SEQ ID NO: 1881563
uugaaacagccuuacagua

SEQ ID NO: 2054343 - RNA, 19 nt, Artificial Sequence
  Description of Artificial Sequence: Synthetic oligonucleotide
  Antisense strand to SEQ ID NO: 2054342
uacuguaaggcuguuucaa

SEQ ID NO: 2054344 - RNA, 19 nt, Artificial Sequence
  Description of Artificial Sequence: Synthetic oligonucleotide
  Sense strand starting at position 2426 of SEQ ID NO: 1881563
aggugccuggcagaugaua

SEQ ID NO: 2054345 - RNA, 19 nt, Artificial Sequence
  Description of Artificial Sequence: Synthetic oligonucleotide
  Antisense strand to SEQ ID NO: 2054344
uaucaucugccaggcaccu

SEQ ID NO: 2054346 - RNA, 19 nt, Artificial Sequence
  Description of Artificial Sequence: Synthetic oligonucleotide
  Sense strand starting at position 2439 of SEQ ID NO: 1881563
augauauccgcagauggca

SEQ ID NO: 2054347 - RNA, 19 nt, Artificial Sequence
  Description of Artificial Sequence: Synthetic oligonucleotide
  Antisense strand to SEQ ID NO: 2054346
ugccaucugcggauaucau

SEQ ID NO: 2054348 - RNA, 19 nt, Artificial Sequence
  Description of Artificial Sequence: Synthetic oligonucleotide
  Sense strand starting at position 2561 of SEQ ID NO: 1881563
gaaauagagaguugguuug

SEQ ID NO: 2054349 - RNA, 19 nt, Artificial Sequence
  Description of Artificial Sequence: Synthetic oligonucleotide
  Antisense strand to SEQ ID NO: 2054348
caaaccaacucucuauuuc

SEQ ID NO: 2054350 - RNA, 19 nt, Artificial Sequence
  Description of Artificial Sequence: Synthetic oligonucleotide
  Sense strand starting at position 2563 of SEQ ID NO: 1881563
aauagagaguugguuugau

SEQ ID NO: 2054351 - RNA, 19 nt, Artificial Sequence
  Description of Artificial Sequence: Synthetic oligonucleotide
  Antisense strand to SEQ ID NO: 2054350
aucaaaccaacucucuauu

SEQ ID NO: 2054352 - RNA, 19 nt, Artificial Sequence
  Description of Artificial Sequence: Synthetic oligonucleotide
  Sense strand starting at position 2688 of SEQ ID NO: 1881563
aaguuaucauguccuagga

SEQ ID NO: 2054353 - RNA, 19 nt, Artificial Sequence
  Description of Artificial Sequence: Synthetic oligonucleotide
  Antisense strand to SEQ ID NO: 2054352
uccuaggacaugauaacuu

SEQ ID NO: 2054354 - RNA, 19 nt, Artificial Sequence
  Description of Artificial Sequence: Synthetic oligonucleotide
  Sense strand starting at position 2783 of SEQ ID NO: 1881563
auugacuuucuaggaagua

SEQ ID NO: 2054355 - RNA, 19 nt, Artificial Sequence
  Description of Artificial Sequence: Synthetic oligonucleotide
  Antisense strand to SEQ ID NO: 2054354
uacuuccuagaaagucaau

SEQ ID NO: 2054356 - RNA, 19 nt, Artificial Sequence
  Description of Artificial Sequence: Synthetic oligonucleotide
  Sense strand starting at position 2895 of SEQ ID NO: 1881563
uuuaguugccaagacaauc

SEQ ID NO: 2054357 - RNA, 19 nt, Artificial Sequence
  Description of Artificial Sequence: Synthetic oligonucleotide
  Antisense strand to SEQ ID NO: 2054356
gauugucuuggcaacuaaa

SEQ ID NO: 2054358 - RNA, 19 nt, Artificial Sequence
  Description of Artificial Sequence: Synthetic oligonucleotide
  Sense strand starting at position 3198 of SEQ ID NO: 1881563
gugauagaacugggccuaa

SEQ ID NO: 2054359 - RNA, 19 nt, Artificial Sequence
  Description of Artificial Sequence: Synthetic oligonucleotide
  Antisense strand to SEQ ID NO: 2054358
uuaggcccaguucuaucac

SEQ ID NO: 2054360 - RNA, 19 nt, Artificial Sequence
  Description of Artificial Sequence: Synthetic oligonucleotide
  Sense strand starting at position 3313 of SEQ ID NO: 1881563
uuccuacuuccaggagaug

SEQ ID NO: 2054361 - RNA, 19 nt, Artificial Sequence
  Description of Artificial Sequence: Synthetic oligonucleotide
  Antisense strand to SEQ ID NO: 2054360
caucuccuggaaguaggaa

SEQ ID NO: 2054362 - RNA, 19 nt, Artificial Sequence
  Description of Artificial Sequence: Synthetic oligonucleotide
  Sense strand starting at position 3314 of SEQ ID NO: 1881563
uccuacuuccaggagaugu

SEQ ID NO: 2054363 - RNA, 19 nt, Artificial Sequence
  Description of Artificial Sequence: Synthetic oligonucleotide
  Antisense strand to SEQ ID NO: 2054362
acaucuccuggaaguagga

SEQ ID NO: 2054364 - RNA, 19 nt, Artificial Sequence
  Description of Artificial Sequence: Synthetic oligonucleotide
  Sense strand starting at position 3496 of SEQ ID NO: 1881563
uuauaugucugauuuguuc

SEQ ID NO: 2054365 - RNA, 19 nt, Artificial Sequence
  Description of Artificial Sequence: Synthetic oligonucleotide
  Antisense strand to SEQ ID NO: 2054364
gaacaaaucagacauauaa

SEQ ID NO: 2054366 - RNA, 19 nt, Artificial Sequence
  Description of Artificial Sequence: Synthetic oligonucleotide
  Sense strand starting at position 3532 of SEQ ID NO: 1881563
gguggauagguuuaaguau

SEQ ID NO: 2054367 - RNA, 19 nt, Artificial Sequence
  Description of Artificial Sequence: Synthetic oligonucleotide
  Antisense strand to SEQ ID NO: 2054366
auacuuaaaccuauccacc

SEQ ID NO: 2054368 - RNA, 19 nt, Artificial Sequence
  Description of Artificial Sequence: Synthetic oligonucleotide
  Sense strand starting at position 3555 of SEQ ID NO: 1881563
ccaucauuggcugguauuu

SEQ ID NO: 2054369 - RNA, 19 nt, Artificial Sequence
  Description of Artificial Sequence: Synthetic oligonucleotide
  Antisense strand to SEQ ID NO: 2054368
aaauaccagccaaugaugg

SEQ ID NO: 2054370 - RNA, 19 nt, Artificial Sequence
  Description of Artificial Sequence: Synthetic oligonucleotide
  Sense strand starting at position 3622 of SEQ ID NO: 1881563
acuauagaugcaugauucu

SEQ ID NO: 2054371 - RNA, 19 nt, Artificial Sequence
  Description of Artificial Sequence: Synthetic oligonucleotide
  Antisense strand to SEQ ID NO: 2054370
agaaucaugcaucuauagu

SEQ ID NO: 2054372 - RNA, 19 nt, Artificial Sequence
  Description of Artificial Sequence: Synthetic oligonucleotide
  Sense strand starting at position 3625 of SEQ ID NO: 1881563
auagaugcaugauucugua

SEQ ID NO: 2054373 - RNA, 19 nt, Artificial Sequence
  Description of Artificial Sequence: Synthetic oligonucleotide
  Antisense strand to SEQ ID NO: 2054372
uacagaaucaugcaucuau

SEQ ID NO: 2054374 - RNA, 19 nt, Artificial Sequence
  Description of Artificial Sequence: Synthetic oligonucleotide
  Sense strand starting at position 3851 of SEQ ID NO: 1881563
gucuguauauuucuacuuu

SEQ ID NO: 2054375 - RNA, 19 nt, Artificial Sequence
  Description of Artificial Sequence: Synthetic oligonucleotide
  Antisense strand to SEQ ID NO: 2054374
aaaguagaaauauacagac

SEQ ID NO: 2054376 - RNA, 19 nt, Artificial Sequence
  Description of Artificial Sequence: Synthetic oligonucleotide
  Sense strand starting at position 109 of SEQ ID NO: 1881564
uuuauaguaugguccugaa

SEQ ID NO: 2054377 - RNA, 19 nt, Artificial Sequence
  Description of Artificial Sequence: Synthetic oligonucleotide
  Antisense strand to SEQ ID NO: 2054376
uucaggaccauacuauaaa

SEQ ID NO: 2054378 - RNA, 19 nt, Artificial Sequence
  Description of Artificial Sequence: Synthetic oligonucleotide
  Sense strand starting at position 113 of SEQ ID NO: 1881564
uaguaugguccugaauuaa

SEQ ID NO: 2054379 - RNA, 19 nt, Artificial Sequence
  Description of Artificial Sequence: Synthetic oligonucleotide
  Antisense strand to SEQ ID NO: 2054378
uuaauucaggaccauacua

SEQ ID NO: 2054380 - RNA, 19 nt, Artificial Sequence
  Description of Artificial Sequence: Synthetic oligonucleotide
  Sense strand starting at position 188 of SEQ ID NO: 1881564
ugggaugccagaugucaau

SEQ ID NO: 2054381 - RNA, 19 nt, Artificial Sequence
  Description of Artificial Sequence: Synthetic oligonucleotide
  Antisense strand to SEQ ID NO: 2054380
auugacaucuggcauccca

SEQ ID NO: 2054382 - RNA, 19 nt, Artificial Sequence
  Description of Artificial Sequence: Synthetic oligonucleotide
  Sense strand starting at position 249 of SEQ ID NO: 1881564
uuagcaauauuggcaauaa

SEQ ID NO: 2054383 - RNA, 19 nt, Artificial Sequence
  Description of Artificial Sequence: Synthetic oligonucleotide
  Antisense strand to SEQ ID NO: 2054382
uuauugccaauauugcuaa

SEQ ID NO: 2054384 - RNA, 19 nt, Artificial Sequence
  Description of Artificial Sequence: Synthetic oligonucleotide
  Sense strand starting at position 259 of SEQ ID NO: 1881564
uggcaauaauuacuuugaa

SEQ ID NO: 2054385 - RNA, 19 nt, Artificial Sequence
  Description of Artificial Sequence: Synthetic oligonucleotide
  Antisense strand to SEQ ID NO: 2054384
uucaaaguaauuauugcca

SEQ ID NO: 2054386 - RNA, 19 nt, Artificial Sequence
  Description of Artificial Sequence: Synthetic oligonucleotide
  Sense strand starting at position 260 of SEQ ID NO: 1881564
ggcaauaauuacuuugaau

SEQ ID NO: 2054387 - RNA, 19 nt, Artificial Sequence
  Description of Artificial Sequence: Synthetic oligonucleotide
  Antisense strand to SEQ ID NO: 2054386
auucaaaguaauuauugcc

SEQ ID NO: 2054388 - RNA, 19 nt, Artificial Sequence
  Description of Artificial Sequence: Synthetic oligonucleotide
  Sense strand starting at position 296 of SEQ ID NO: 1881564
ccagcaauuguguaaguaa

SEQ ID NO: 2054389 - RNA, 19 nt, Artificial Sequence
  Description of Artificial Sequence: Synthetic oligonucleotide
  Antisense strand to SEQ ID NO: 2054388
uuacuuacacaauugcugg

SEQ ID NO: 2054390 - RNA, 19 nt, Artificial Sequence
  Description of Artificial Sequence: Synthetic oligonucleotide
  Sense strand starting at position 604 of SEQ ID NO: 1881564
aagagaauuggucagcuuu

SEQ ID NO: 2054391 - RNA, 19 nt, Artificial Sequence
  Description of Artificial Sequence: Synthetic oligonucleotide
  Antisense strand to SEQ ID NO: 2054390
aaagcugaccaauucucuu

SEQ ID NO: 2054392 - RNA, 19 nt, Artificial Sequence
  Description of Artificial Sequence: Synthetic oligonucleotide
  Sense strand starting at position 642 of SEQ ID NO: 1881564
agaaguagaugagugaagu

SEQ ID NO: 2054393 - RNA, 19 nt, Artificial Sequence
  Description of Artificial Sequence: Synthetic oligonucleotide
  Antisense strand to SEQ ID NO: 2054392
acuucacucaucuacuucu

SEQ ID NO: 2054394 - RNA, 19 nt, Artificial Sequence
  Description of Artificial Sequence: Synthetic oligonucleotide
  Sense strand starting at position 648 of SEQ ID NO: 1881564
agaugagugaagugaaugu

SEQ ID NO: 2054395 - RNA, 19 nt, Artificial Sequence
  Description of Artificial Sequence: Synthetic oligonucleotide
  Antisense strand to SEQ ID NO: 2054394
acauucacuucacucaucu

SEQ ID NO: 2054396 - RNA, 19 nt, Artificial Sequence
  Description of Artificial Sequence: Synthetic oligonucleotide
  Sense strand starting at position 652 of SEQ ID NO: 1881564
gagugaagugaauguaaag

SEQ ID NO: 2054397 - RNA, 19 nt, Artificial Sequence
  Description of Artificial Sequence: Synthetic oligonucleotide
  Antisense strand to SEQ ID NO: 2054396
cuuuacauucacuucacuc

SEQ ID NO: 2054398 - RNA, 19 nt, Artificial Sequence
  Description of Artificial Sequence: Synthetic oligonucleotide
  Sense strand starting at position 1031 of SEQ ID NO: 1881564
ggaguugugagugaguaug

SEQ ID NO: 2054399 - RNA, 19 nt, Artificial Sequence
  Description of Artificial Sequence: Synthetic oligonucleotide
  Antisense strand to SEQ ID NO: 2054398
cauacucacucacaacucc

SEQ ID NO: 2054400 - RNA, 19 nt, Artificial Sequence
  Description of Artificial Sequence: Synthetic oligonucleotide
  Sense strand starting at position 1217 of SEQ ID NO: 1881564
aaagauauuguauagcugu

SEQ ID NO: 2054401 - RNA, 19 nt, Artificial Sequence
  Description of Artificial Sequence: Synthetic oligonucleotide
  Antisense strand to SEQ ID NO: 2054400
acagcuauacaauaucuuu

SEQ ID NO: 2054402 - RNA, 19 nt, Artificial Sequence
  Description of Artificial Sequence: Synthetic oligonucleotide
  Sense strand starting at position 1630 of SEQ ID NO: 1881564
aggucaagaucaucaaucu

SEQ ID NO: 2054403 - RNA, 19 nt, Artificial Sequence
  Description of Artificial Sequence: Synthetic oligonucleotide
  Antisense strand to SEQ ID NO: 2054402
agauugaugaucuugaccu

SEQ ID NO: 2054404 - RNA, 19 nt, Artificial Sequence
  Description of Artificial Sequence: Synthetic oligonucleotide
  Sense strand starting at position 1751 of SEQ ID NO: 1881564
uccugaaagacuuacguga

SEQ ID NO: 2054405 - RNA, 19 nt, Artificial Sequence
  Description of Artificial Sequence: Synthetic oligonucleotide
  Antisense strand to SEQ ID NO: 2054404
ucacguaagucuuucagga

SEQ ID NO: 2054406 - RNA, 19 nt, Artificial Sequence
  Description of Artificial Sequence: Synthetic oligonucleotide
  Sense strand starting at position 1755 of SEQ ID NO: 1881564
gaaagacuuacgugagggu

SEQ ID NO: 2054407 - RNA, 19 nt, Artificial Sequence
  Description of Artificial Sequence: Synthetic oligonucleotide
  Antisense strand to SEQ ID NO: 2054406
acccucacguaagucuuuc

SEQ ID NO: 2054408 - RNA, 19 nt, Artificial Sequence
  Description of Artificial Sequence: Synthetic oligonucleotide
  Sense strand starting at position 1795 of SEQ ID NO: 1881564
uuucgauaaguacaaggua

SEQ ID NO: 2054409 - RNA, 19 nt, Artificial Sequence
  Description of Artificial Sequence: Synthetic oligonucleotide
  Antisense strand to SEQ ID NO: 2054408
uaccuuguacuuaucgaaa

SEQ ID NO: 2054410 - RNA, 19 nt, Artificial Sequence
  Description of Artificial Sequence: Synthetic oligonucleotide
  Sense strand starting at position 1982 of SEQ ID NO: 1881564
ggcguauggcucuucuuac

SEQ ID NO: 2054411 - RNA, 19 nt, Artificial Sequence
  Description of Artificial Sequence: Synthetic oligonucleotide
  Antisense strand to SEQ ID NO: 2054410
guaagaagagccauacgcc

SEQ ID NO: 2054412 - RNA, 19 nt, Artificial Sequence
  Description of Artificial Sequence: Synthetic oligonucleotide
  Sense strand starting at position 2107 of SEQ ID NO: 1881564
accggccagugauuuaauu

SEQ ID NO: 2054413 - RNA, 19 nt, Artificial Sequence
  Description of Artificial Sequence: Synthetic oligonucleotide
  Antisense strand to SEQ ID NO: 2054412
aauuaaaucacuggccggu

SEQ ID NO: 2054414 - RNA, 19 nt, Artificial Sequence
  Description of Artificial Sequence: Synthetic oligonucleotide
  Sense strand starting at position 2374 of SEQ ID NO: 1881564
uggcuacaucaucagcaaa

SEQ ID NO: 2054415 - RNA, 19 nt, Artificial Sequence
  Description of Artificial Sequence: Synthetic oligonucleotide
  Antisense strand to SEQ ID NO: 2054414
uuugcugaugauguagcca

SEQ ID NO: 2054416 - RNA, 19 nt, Artificial Sequence
  Description of Artificial Sequence: Synthetic oligonucleotide
  Sense strand starting at position 2487 of SEQ ID NO: 1881564
guaguuggacuccacaaau

SEQ ID NO: 2054417 - RNA, 19 nt, Artificial Sequence
  Description of Artificial Sequence: Synthetic oligonucleotide
  Antisense strand to SEQ ID NO: 2054416
auuuguggaguccaacuac

SEQ ID NO: 2054418 - RNA, 19 nt, Artificial Sequence
  Description of Artificial Sequence: Synthetic oligonucleotide
  Sense strand starting at position 2538 of SEQ ID NO: 1881564
ugagaaugugaaugaguca

SEQ ID NO: 2054419 - RNA, 19 nt, Artificial Sequence
  Description of Artificial Sequence: Synthetic oligonucleotide
  Antisense strand to SEQ ID NO: 2054418
ugacucauucacauucuca

SEQ ID NO: 2054420 - RNA, 19 nt, Artificial Sequence
  Description of Artificial Sequence: Synthetic oligonucleotide
  Sense strand starting at position 2541 of SEQ ID NO: 1881564
gaaugugaaugagucaaug

SEQ ID NO: 2054421 - RNA, 19 nt, Artificial Sequence
  Description of Artificial Sequence: Synthetic oligonucleotide
  Antisense strand to SEQ ID NO: 2054420
cauugacucauucacauuc

SEQ ID NO: 2054422 - RNA, 19 nt, Artificial Sequence
  Description of Artificial Sequence: Synthetic oligonucleotide
  Sense strand starting at position 2551 of SEQ ID NO: 1881564
gagucaauggcagagagua

SEQ ID NO: 2054423 - RNA, 19 nt, Artificial Sequence
  Description of Artificial Sequence: Synthetic oligonucleotide
  Antisense strand to SEQ ID NO: 2054422
uacucucugccauugacuc

SEQ ID NO: 2054424 - RNA, 19 nt, Artificial Sequence
  Description of Artificial Sequence: Synthetic oligonucleotide
  Sense strand starting at position 2702 of SEQ ID NO: 1881564
auccuaucccuguaaugua

SEQ ID NO: 2054425 - RNA, 19 nt, Artificial Sequence
  Description of Artificial Sequence: Synthetic oligonucleotide
  Antisense strand to SEQ ID NO: 2054424
uacauuacagggauaggau

SEQ ID NO: 2054426 - RNA, 19 nt, Artificial Sequence
  Description of Artificial Sequence: Synthetic oligonucleotide
  Sense strand starting at position 2873 of SEQ ID NO: 1881564
uuauaaguggcuuaacuuu

SEQ ID NO: 2054427 - RNA, 19 nt, Artificial Sequence
  Description of Artificial Sequence: Synthetic oligonucleotide
  Antisense strand to SEQ ID NO: 2054426
aaaguuaagccacuuauaa

SEQ ID NO: 2054428 - RNA, 19 nt, Artificial Sequence
  Description of Artificial Sequence: Synthetic oligonucleotide
  Sense strand starting at position 2974 of SEQ ID NO: 1881564
caguuaugagagcaaaucu

SEQ ID NO: 2054429 - RNA, 19 nt, Artificial Sequence
  Description of Artificial Sequence: Synthetic oligonucleotide
  Antisense strand to SEQ ID NO: 2054428
agauuugcucucauaacug

SEQ ID NO: 2054430 - RNA, 19 nt, Artificial Sequence
  Description of Artificial Sequence: Synthetic oligonucleotide
  Sense strand starting at position 3028 of SEQ ID NO: 1881564
auauuaacccaguggguua

SEQ ID NO: 2054431 - RNA, 19 nt, Artificial Sequence
  Description of Artificial Sequence: Synthetic oligonucleotide
  Antisense strand to SEQ ID NO: 2054430
uaacccacuggguuaauau

SEQ ID NO: 2054432 - RNA, 19 nt, Artificial Sequence
  Description of Artificial Sequence: Synthetic oligonucleotide
  Sense strand starting at position 3040 of SEQ ID NO: 1881564
uggguuaugaucugaguua

SEQ ID NO: 2054433 - RNA, 19 nt, Artificial Sequence
  Description of Artificial Sequence: Synthetic oligonucleotide
  Antisense strand to SEQ ID NO: 2054432
uaacucagaucauaaccca

SEQ ID NO: 2054434 - RNA, 19 nt, Artificial Sequence
  Description of Artificial Sequence: Synthetic oligonucleotide
  Sense strand starting at position 3131 of SEQ ID NO: 1881564
auugauagccuccaagagu

SEQ ID NO: 2054435 - RNA, 19 nt, Artificial Sequence
  Description of Artificial Sequence: Synthetic oligonucleotide
  Antisense strand to SEQ ID NO: 2054434
acucuuggaggcuaucaau

SEQ ID NO: 2054436 - RNA, 19 nt, Artificial Sequence
  Description of Artificial Sequence: Synthetic oligonucleotide
  Sense strand starting at position 3134 of SEQ ID NO: 1881564
gauagccuccaagaguuaa

SEQ ID NO: 2054437 - RNA, 19 nt, Artificial Sequence
  Description of Artificial Sequence: Synthetic oligonucleotide
  Antisense strand to SEQ ID NO: 2054436
uuaacucuuggaggcuauc

SEQ ID NO: 2054438 - RNA, 19 nt, Artificial Sequence
  Description of Artificial Sequence: Synthetic oligonucleotide
  Sense strand starting at position 3199 of SEQ ID NO: 1881564
ugagcugugcuauaacaaa

SEQ ID NO: 2054439 - RNA, 19 nt, Artificial Sequence
  Description of Artificial Sequence: Synthetic oligonucleotide
  Antisense strand to SEQ ID NO: 2054438
uuuguuauagcacagcuca

SEQ ID NO: 2054440 - RNA, 19 nt, Artificial Sequence
  Description of Artificial Sequence: Synthetic oligonucleotide
  Sense strand starting at position 3361 of SEQ ID NO: 1881564
aaauucuugguguggacaa

SEQ ID NO: 2054441 - RNA, 19 nt, Artificial Sequence
  Description of Artificial Sequence: Synthetic oligonucleotide
  Antisense strand to SEQ ID NO: 2054440
uuguccacaccaagaauuu

SEQ ID NO: 2054442 - RNA, 19 nt, Artificial Sequence
  Description of Artificial Sequence: Synthetic oligonucleotide
  Sense strand starting at position 3363 of SEQ ID NO: 1881564
auucuugguguggacaauu

SEQ ID NO: 2054443 - RNA, 19 nt, Artificial Sequence
  Description of Artificial Sequence: Synthetic oligonucleotide
  Antisense strand to SEQ ID NO: 2054442
aauuguccacaccaagaau

SEQ ID NO: 2054444 - RNA, 19 nt, Artificial Sequence
  Description of Artificial Sequence: Synthetic oligonucleotide
  Sense strand starting at position 3626 of SEQ ID NO: 1881564
ccuuaauguugauuggaca

SEQ ID NO: 2054445 - RNA, 19 nt, Artificial Sequence
  Description of Artificial Sequence: Synthetic oligonucleotide
  Antisense strand to SEQ ID NO: 2054444
uguccaaucaacauuaagg

SEQ ID NO: 2054446 - RNA, 19 nt, Artificial Sequence
  Description of Artificial Sequence: Synthetic oligonucleotide
  Sense strand starting at position 3627 of SEQ ID NO: 1881564
cuuaauguugauuggacau

SEQ ID NO: 2054447 - RNA, 19 nt, Artificial Sequence
  Description of Artificial Sequence: Synthetic oligonucleotide
  Antisense strand to SEQ ID NO: 2054446
auguccaaucaacauuaag

SEQ ID NO: 2054448 - RNA, 19 nt, Artificial Sequence
  Description of Artificial Sequence: Synthetic oligonucleotide
  Sense strand starting at position 3879 of SEQ ID NO: 1881564
gguacuuuaggcuaauuga

SEQ ID NO: 2054449 - RNA, 19 nt, Artificial Sequence
  Description of Artificial Sequence: Synthetic oligonucleotide
  Antisense strand to SEQ ID NO: 2054448
ucaauuagccuaaaguacc

SEQ ID NO: 2054450 - RNA, 19 nt, Artificial Sequence
  Description of Artificial Sequence: Synthetic oligonucleotide
  Sense strand starting at position 3882 of SEQ ID NO: 1881564
acuuuaggcuaauugacau

SEQ ID NO: 2054451 - RNA, 19 nt, Artificial Sequence
  Description of Artificial Sequence: Synthetic oligonucleotide
  Antisense strand to SEQ ID NO: 2054450
augucaauuagccuaaagu

SEQ ID NO: 2054452 - RNA, 19 nt, Artificial Sequence
  Description of Artificial Sequence: Synthetic oligonucleotide
  Sense strand starting at position 3929 of SEQ ID NO: 1881564
ucagaaauaaggugaugcu

SEQ ID NO: 2054453 - RNA, 19 nt, Artificial Sequence
  Description of Artificial Sequence: Synthetic oligonucleotide
  Antisense strand to SEQ ID NO: 2054452
agcaucaccuuauuucuga

SEQ ID NO: 2054454 - RNA, 19 nt, Artificial Sequence
  Description of Artificial Sequence: Synthetic oligonucleotide
  Sense strand starting at position 3950 of SEQ ID NO: 1881564
uccuaagauuguccaagga

SEQ ID NO: 2054455 - RNA, 19 nt, Artificial Sequence
  Description of Artificial Sequence: Synthetic oligonucleotide
  Antisense strand to SEQ ID NO: 2054454
uccuuggacaaucuuagga

SEQ ID NO: 2054456 - RNA, 19 nt, Artificial Sequence
  Description of Artificial Sequence: Synthetic oligonucleotide
  Sense strand starting at position 52 of SEQ ID NO: 1881565
uuauauuucugcccuguua

SEQ ID NO: 2054457 - RNA, 19 nt, Artificial Sequence
  Description of Artificial Sequence: Synthetic oligonucleotide
  Antisense strand to SEQ ID NO: 2054456
uaacagggcagaaauauaa

SEQ ID NO: 2054458 - RNA, 19 nt, Artificial Sequence
  Description of Artificial Sequence: Synthetic oligonucleotide
  Sense strand starting at position 54 of SEQ ID NO: 1881565
auauuucugcccuguuauu

SEQ ID NO: 2054459 - RNA, 19 nt, Artificial Sequence
  Description of Artificial Sequence: Synthetic oligonucleotide
  Antisense strand to SEQ ID NO: 2054458
aauaacagggcagaaauau

SEQ ID NO: 2054460 - RNA, 19 nt, Artificial Sequence
  Description of Artificial Sequence: Synthetic oligonucleotide
  Sense strand starting at position 80 of SEQ ID NO: 1881565
ugauuugagugcucugcau

SEQ ID NO: 2054461 - RNA, 19 nt, Artificial Sequence
  Description of Artificial Sequence: Synthetic oligonucleotide
  Antisense strand to SEQ ID NO: 2054460
augcagagcacucaaauca

SEQ ID NO: 2054462 - RNA, 19 nt, Artificial Sequence
  Description of Artificial Sequence: Synthetic oligonucleotide
  Sense strand starting at position 82 of SEQ ID NO: 1881565
auuugagugcucugcauac

SEQ ID NO: 2054463 - RNA, 19 nt, Artificial Sequence
  Description of Artificial Sequence: Synthetic oligonucleotide
  Antisense strand to SEQ ID NO: 2054462
guaugcagagcacucaaau

SEQ ID NO: 2054464 - RNA, 19 nt, Artificial Sequence
  Description of Artificial Sequence: Synthetic oligonucleotide
  Sense strand starting at position 94 of SEQ ID NO: 1881565
ugcauacauggauauggua

SEQ ID NO: 2054465 - RNA, 19 nt, Artificial Sequence
  Description of Artificial Sequence: Synthetic oligonucleotide
  Antisense strand to SEQ ID NO: 2054464
uaccauauccauguaugca

SEQ ID NO: 2054466 - RNA, 19 nt, Artificial Sequence
  Description of Artificial Sequence: Synthetic oligonucleotide
  Sense strand starting at position 437 of SEQ ID NO: 1881565
uuagauaguaacuggcaga

SEQ ID NO: 2054467 - RNA, 19 nt, Artificial Sequence
  Description of Artificial Sequence: Synthetic oligonucleotide
  Antisense strand to SEQ ID NO: 2054466
ucugccaguuacuaucuaa

SEQ ID NO: 2054468 - RNA, 19 nt, Artificial Sequence
  Description of Artificial Sequence: Synthetic oligonucleotide
  Sense strand starting at position 541 of SEQ ID NO: 1881565
aguucuuuagauuaucugu

SEQ ID NO: 2054469 - RNA, 19 nt, Artificial Sequence
  Description of Artificial Sequence: Synthetic oligonucleotide
  Antisense strand to SEQ ID NO: 2054468
acagauaaucuaaagaacu

SEQ ID NO: 2054470 - RNA, 19 nt, Artificial Sequence
  Description of Artificial Sequence: Synthetic oligonucleotide
  Sense strand starting at position 543 of SEQ ID NO: 1881565
uucuuuagauuaucuguga

SEQ ID NO: 2054471 - RNA, 19 nt, Artificial Sequence
  Description of Artificial Sequence: Synthetic oligonucleotide
  Antisense strand to SEQ ID NO: 2054470
ucacagauaaucuaaagaa

SEQ ID NO: 2054472 - RNA, 19 nt, Artificial Sequence
  Description of Artificial Sequence: Synthetic oligonucleotide
  Sense strand starting at position 544 of SEQ ID NO: 1881565
ucuuuagauuaucugugau

SEQ ID NO: 2054473 - RNA, 19 nt, Artificial Sequence
  Description of Artificial Sequence: Synthetic oligonucleotide
  Antisense strand to SEQ ID NO: 2054472
aucacagauaaucuaaaga

SEQ ID NO: 2054474 - RNA, 19 nt, Artificial Sequence
  Description of Artificial Sequence: Synthetic oligonucleotide
  Sense strand starting at position 547 of SEQ ID NO: 1881565
uuagauuaucugugaugug

SEQ ID NO: 2054475 - RNA, 19 nt, Artificial Sequence
  Description of Artificial Sequence: Synthetic oligonucleotide
  Antisense strand to SEQ ID NO: 2054474
cacaucacagauaaucuaa

SEQ ID NO: 2054476 - RNA, 19 nt, Artificial Sequence
  Description of Artificial Sequence: Synthetic oligonucleotide
  Sense strand starting at position 686 of SEQ ID NO: 1881565
uacugaaugucuguacuga

SEQ ID NO: 2054477 - RNA, 19 nt, Artificial Sequence
  Description of Artificial Sequence: Synthetic oligonucleotide
  Antisense strand to SEQ ID NO: 2054476
ucaguacagacauucagua

SEQ ID NO: 2054478 - RNA, 19 nt, Artificial Sequence
  Description of Artificial Sequence: Synthetic oligonucleotide
  Sense strand starting at position 844 of SEQ ID NO: 1881565
auguuuauggcacagguaa

SEQ ID NO: 2054479 - RNA, 19 nt, Artificial Sequence
  Description of Artificial Sequence: Synthetic oligonucleotide
  Antisense strand to SEQ ID NO: 2054478
uuaccugugccauaaacau

SEQ ID NO: 2054480 - RNA, 19 nt, Artificial Sequence
  Description of Artificial Sequence: Synthetic oligonucleotide
  Sense strand starting at position 1006 of SEQ ID NO: 1881565
ucccuaucaugaguuagag

SEQ ID NO: 2054481 - RNA, 19 nt, Artificial Sequence
  Description of Artificial Sequence: Synthetic oligonucleotide
  Antisense strand to SEQ ID NO: 2054480
cucuaacucaugauaggga

SEQ ID NO: 2054482 - RNA, 19 nt, Artificial Sequence
  Description of Artificial Sequence: Synthetic oligonucleotide
  Sense strand starting at position 1015 of SEQ ID NO: 1881565
ugaguuagagaaugucacu

SEQ ID NO: 2054483 - RNA, 19 nt, Artificial Sequence
  Description of Artificial Sequence: Synthetic oligonucleotide
  Antisense strand to SEQ ID NO: 2054482
agugacauucucuaacuca

SEQ ID NO: 2054484 - RNA, 19 nt, Artificial Sequence
  Description of Artificial Sequence: Synthetic oligonucleotide
  Sense strand starting at position 1385 of SEQ ID NO: 1881565
gcaaucauaccguauugga

SEQ ID NO: 2054485 - RNA, 19 nt, Artificial Sequence
  Description of Artificial Sequence: Synthetic oligonucleotide
  Antisense strand to SEQ ID NO: 2054484
uccaauacgguaugauugc

SEQ ID NO: 2054486 - RNA, 19 nt, Artificial Sequence
  Description of Artificial Sequence: Synthetic oligonucleotide
  Sense strand starting at position 1394 of SEQ ID NO: 1881565
ccguauuggauccagaucu

SEQ ID NO: 2054487 - RNA, 19 nt, Artificial Sequence
  Description of Artificial Sequence: Synthetic oligonucleotide
  Antisense strand to SEQ ID NO: 2054486
agaucuggauccaauacgg

SEQ ID NO: 2054488 - RNA, 19 nt, Artificial Sequence
  Description of Artificial Sequence: Synthetic oligonucleotide
  Sense strand starting at position 1423 of SEQ ID NO: 1881565
ggaccaguaguuggaugaa

SEQ ID NO: 2054489 - RNA, 19 nt, Artificial Sequence
  Description of Artificial Sequence: Synthetic oligonucleotide
  Antisense strand to SEQ ID NO: 2054488
uucauccaacuacuggucc

SEQ ID NO: 2054490 - RNA, 19 nt, Artificial Sequence
  Description of Artificial Sequence: Synthetic oligonucleotide
  Sense strand starting at position 1426 of SEQ ID NO: 1881565
ccaguaguuggaugaauaa

SEQ ID NO: 2054491 - RNA, 19 nt, Artificial Sequence
  Description of Artificial Sequence: Synthetic oligonucleotide
  Antisense strand to SEQ ID NO: 2054490
uuauucauccaacuacugg

SEQ ID NO: 2054492 - RNA, 19 nt, Artificial Sequence
  Description of Artificial Sequence: Synthetic oligonucleotide
  Sense strand starting at position 1459 of SEQ ID NO: 1881565
augugugcugcguucauau

SEQ ID NO: 2054493 - RNA, 19 nt, Artificial Sequence
  Description of Artificial Sequence: Synthetic oligonucleotide
  Antisense strand to SEQ ID NO: 2054492
auaugaacgcagcacacau

SEQ ID NO: 2054494 - RNA, 19 nt, Artificial Sequence
  Description of Artificial Sequence: Synthetic oligonucleotide
  Sense strand starting at position 1707 of SEQ ID NO: 1881565
ccuacaggaugcucuuuaa

SEQ ID NO: 2054495 - RNA, 19 nt, Artificial Sequence
  Description of Artificial Sequence: Synthetic oligonucleotide
  Antisense strand to SEQ ID NO: 2054494
uuaaagagcauccuguagg

SEQ ID NO: 2054496 - RNA, 19 nt, Artificial Sequence
  Description of Artificial Sequence: Synthetic oligonucleotide
  Sense strand starting at position 1710 of SEQ ID NO: 1881565
acaggaugcucuuuaaccu

SEQ ID NO: 2054497 - RNA, 19 nt, Artificial Sequence
  Description of Artificial Sequence: Synthetic oligonucleotide
  Antisense strand to SEQ ID NO: 2054496
agguuaaagagcauccugu

SEQ ID NO: 2054498 - RNA, 19 nt, Artificial Sequence
  Description of Artificial Sequence: Synthetic oligonucleotide
  Sense strand starting at position 1757 of SEQ ID NO: 1881565
aucucauaugcauguagaa

SEQ ID NO: 2054499 - RNA, 19 nt, Artificial Sequence
  Description of Artificial Sequence: Synthetic oligonucleotide
  Antisense strand to SEQ ID NO: 2054498
uucuacaugcauaugagau

SEQ ID NO: 2054500 - RNA, 19 nt, Artificial Sequence
  Description of Artificial Sequence: Synthetic oligonucleotide
  Sense strand starting at position 2129 of SEQ ID NO: 1881565
cuguguugggacuaaagcu

SEQ ID NO: 2054501 - RNA, 19 nt, Artificial Sequence
  Description of Artificial Sequence: Synthetic oligonucleotide
  Antisense strand to SEQ ID NO: 2054500
agcuuuagucccaacacag

SEQ ID NO: 2054502 - RNA, 19 nt, Artificial Sequence
  Description of Artificial Sequence: Synthetic oligonucleotide
  Sense strand starting at position 2316 of SEQ ID NO: 1881565
cucuuuacagcagauaagu

SEQ ID NO: 2054503 - RNA, 19 nt, Artificial Sequence
  Description of Artificial Sequence: Synthetic oligonucleotide
  Antisense strand to SEQ ID NO: 2054502
acuuaucugcuguaaagag

SEQ ID NO: 2054504 - RNA, 19 nt, Artificial Sequence
  Description of Artificial Sequence: Synthetic oligonucleotide
  Sense strand starting at position 2335 of SEQ ID NO: 1881565
acgcaaauaugaucacaaa

SEQ ID NO: 2054505 - RNA, 19 nt, Artificial Sequence
  Description of Artificial Sequence: Synthetic oligonucleotide
  Antisense strand to SEQ ID NO: 2054504
uuugugaucauauuugcgu

SEQ ID NO: 2054506 - RNA, 19 nt, Artificial Sequence
  Description of Artificial Sequence: Synthetic oligonucleotide
  Sense strand starting at position 2387 of SEQ ID NO: 1881565
augccaagucuuuagauga

SEQ ID NO: 2054507 - RNA, 19 nt, Artificial Sequence
  Description of Artificial Sequence: Synthetic oligonucleotide
  Antisense strand to SEQ ID NO: 2054506
ucaucuaaagacuuggcau

SEQ ID NO: 2054508 - RNA, 19 nt, Artificial Sequence
  Description of Artificial Sequence: Synthetic oligonucleotide
  Sense strand starting at position 2539 of SEQ ID NO: 1881565
uggguugucaacugauuga

SEQ ID NO: 2054509 - RNA, 19 nt, Artificial Sequence
  Description of Artificial Sequence: Synthetic oligonucleotide
  Antisense strand to SEQ ID NO: 2054508
ucaaucaguugacaaccca

SEQ ID NO: 2054510 - RNA, 19 nt, Artificial Sequence
  Description of Artificial Sequence: Synthetic oligonucleotide
  Sense strand starting at position 2542 of SEQ ID NO: 1881565
guugucaacugauugauac

SEQ ID NO: 2054511 - RNA, 19 nt, Artificial Sequence
  Description of Artificial Sequence: Synthetic oligonucleotide
  Antisense strand to SEQ ID NO: 2054510
guaucaaucaguugacaac

SEQ ID NO: 2054512 - RNA, 19 nt, Artificial Sequence
  Description of Artificial Sequence: Synthetic oligonucleotide
  Sense strand starting at position 2543 of SEQ ID NO: 1881565
uugucaacugauugauacu

SEQ ID NO: 2054513 - RNA, 19 nt, Artificial Sequence
  Description of Artificial Sequence: Synthetic oligonucleotide
  Antisense strand to SEQ ID NO: 2054512
aguaucaaucaguugacaa

SEQ ID NO: 2054514 - RNA, 19 nt, Artificial Sequence
  Description of Artificial Sequence: Synthetic oligonucleotide
  Sense strand starting at position 2552 of SEQ ID NO: 1881565
gauugauacucagcuggua

SEQ ID NO: 2054515 - RNA, 19 nt, Artificial Sequence
  Description of Artificial Sequence: Synthetic oligonucleotide
  Antisense strand to SEQ ID NO: 2054514
uaccagcugaguaucaauc

SEQ ID NO: 2054516 - RNA, 19 nt, Artificial Sequence
  Description of Artificial Sequence: Synthetic oligonucleotide
  Sense strand starting at position 2710 of SEQ ID NO: 1881565
ccaaguaauuaggauuucu

SEQ ID NO: 2054517 - RNA, 19 nt, Artificial Sequence
  Description of Artificial Sequence: Synthetic oligonucleotide
  Antisense strand to SEQ ID NO: 2054516
agaaauccuaauuacuugg

SEQ ID NO: 2054518 - RNA, 19 nt, Artificial Sequence
  Description of Artificial Sequence: Synthetic oligonucleotide
  Sense strand starting at position 2766 of SEQ ID NO: 1881565
gucugugggcauuauuaaa

SEQ ID NO: 2054519 - RNA, 19 nt, Artificial Sequence
  Description of Artificial Sequence: Synthetic oligonucleotide
  Antisense strand to SEQ ID NO: 2054518
uuuaauaaugcccacagac

SEQ ID NO: 2054520 - RNA, 19 nt, Artificial Sequence
  Description of Artificial Sequence: Synthetic oligonucleotide
  Sense strand starting at position 2985 of SEQ ID NO: 1881565
uuuauagugcuuuaugaug

SEQ ID NO: 2054521 - RNA, 19 nt, Artificial Sequence
  Description of Artificial Sequence: Synthetic oligonucleotide
  Antisense strand to SEQ ID NO: 2054520
caucauaaagcacuauaaa

SEQ ID NO: 2054522 - RNA, 19 nt, Artificial Sequence
  Description of Artificial Sequence: Synthetic oligonucleotide
  Sense strand starting at position 2993 of SEQ ID NO: 1881565
gcuuuaugaugauuaguag

SEQ ID NO: 2054523 - RNA, 19 nt, Artificial Sequence
  Description of Artificial Sequence: Synthetic oligonucleotide
  Antisense strand to SEQ ID NO: 2054522
cuacuaaucaucauaaagc

SEQ ID NO: 2054524 - RNA, 19 nt, Artificial Sequence
  Description of Artificial Sequence: Synthetic oligonucleotide
  Sense strand starting at position 2996 of SEQ ID NO: 1881565
uuaugaugauuaguagguu

SEQ ID NO: 2054525 - RNA, 19 nt, Artificial Sequence
  Description of Artificial Sequence: Synthetic oligonucleotide
  Antisense strand to SEQ ID NO: 2054524
aaccuacuaaucaucauaa

SEQ ID NO: 2054526 - RNA, 19 nt, Artificial Sequence
  Description of Artificial Sequence: Synthetic oligonucleotide
  Sense strand starting at position 3328 of SEQ ID NO: 1881565
gauuuccuuuacuaggaga

SEQ ID NO: 2054527 - RNA, 19 nt, Artificial Sequence
  Description of Artificial Sequence: Synthetic oligonucleotide
  Antisense strand to SEQ ID NO: 2054526
ucuccuaguaaaggaaauc

SEQ ID NO: 2054528 - RNA, 19 nt, Artificial Sequence
  Description of Artificial Sequence: Synthetic oligonucleotide
  Sense strand starting at position 3330 of SEQ ID NO: 1881565
uuuccuuuacuaggagaua

SEQ ID NO: 2054529 - RNA, 19 nt, Artificial Sequence
  Description of Artificial Sequence: Synthetic oligonucleotide
  Antisense strand to SEQ ID NO: 2054528
uaucuccuaguaaaggaaa

SEQ ID NO: 2054530 - RNA, 19 nt, Artificial Sequence
  Description of Artificial Sequence: Synthetic oligonucleotide
  Sense strand starting at position 3370 of SEQ ID NO: 1881565
agcauugcucuuuagagga

SEQ ID NO: 2054531 - RNA, 19 nt, Artificial Sequence
  Description of Artificial Sequence: Synthetic oligonucleotide
  Antisense strand to SEQ ID NO: 2054530
uccucuaaagagcaaugcu

SEQ ID NO: 2054532 - RNA, 19 nt, Artificial Sequence
  Description of Artificial Sequence: Synthetic oligonucleotide
  Sense strand starting at position 3375 of SEQ ID NO: 1881565
ugcucuuuagaggaagcau

SEQ ID NO: 2054533 - RNA, 19 nt, Artificial Sequence
  Description of Artificial Sequence: Synthetic oligonucleotide
  Antisense strand to SEQ ID NO: 2054532
augcuuccucuaaagagca

SEQ ID NO: 2054534 - RNA, 19 nt, Artificial Sequence
  Description of Artificial Sequence: Synthetic oligonucleotide
  Sense strand starting at position 3417 of SEQ ID NO: 1881565
uuuaauugguuauugggau

SEQ ID NO: 2054535 - RNA, 19 nt, Artificial Sequence
  Description of Artificial Sequence: Synthetic oligonucleotide
  Antisense strand to SEQ ID NO: 2054534
aucccaauaaccaauuaaa

SEQ ID NO: 2054536 - RNA, 19 nt, Artificial Sequence
  Description of Artificial Sequence: Synthetic oligonucleotide
  Sense strand starting at position 20 of SEQ ID NO: 1881566
cagugacaguuuguggaaa

SEQ ID NO: 2054537 - RNA, 19 nt, Artificial Sequence
  Description of Artificial Sequence: Synthetic oligonucleotide
  Antisense strand to SEQ ID NO: 2054536
uuuccacaaacugucacug

SEQ ID NO: 2054538 - RNA, 19 nt, Artificial Sequence
  Description of Artificial Sequence: Synthetic oligonucleotide
  Sense strand starting at position 204 of SEQ ID NO: 1881566
guucuuuaugaugagagcu

SEQ ID NO: 2054539 - RNA, 19 nt, Artificial Sequence
  Description of Artificial Sequence: Synthetic oligonucleotide
  Antisense strand to SEQ ID NO: 2054538
agcucucaucauaaagaac

SEQ ID NO: 2054540 - RNA, 19 nt, Artificial Sequence
  Description of Artificial Sequence: Synthetic oligonucleotide
  Sense strand starting at position 221 of SEQ ID NO: 1881566
cugguaagucaaugaaaca

SEQ ID NO: 2054541 - RNA, 19 nt, Artificial Sequence
  Description of Artificial Sequence: Synthetic oligonucleotide
  Antisense strand to SEQ ID NO: 2054540
uguuucauugacuuaccag

SEQ ID NO: 2054542 - RNA, 19 nt, Artificial Sequence
  Description of Artificial Sequence: Synthetic oligonucleotide
  Sense strand starting at position 384 of SEQ ID NO: 1881566
ggagauagcaagcaguguu

SEQ ID NO: 2054543 - RNA, 19 nt, Artificial Sequence
  Description of Artificial Sequence: Synthetic oligonucleotide
  Antisense strand to SEQ ID NO: 2054542
aacacugcuugcuaucucc

SEQ ID NO: 2054544 - RNA, 19 nt, Artificial Sequence
  Description of Artificial Sequence: Synthetic oligonucleotide
  Sense strand starting at position 754 of SEQ ID NO: 1881566
cgacauguacuugacauaa

SEQ ID NO: 2054545 - RNA, 19 nt, Artificial Sequence
  Description of Artificial Sequence: Synthetic oligonucleotide
  Antisense strand to SEQ ID NO: 2054544
uuaugucaaguacaugucg

SEQ ID NO: 2054546 - RNA, 19 nt, Artificial Sequence
  Description of Artificial Sequence: Synthetic oligonucleotide
  Sense strand starting at position 772 of SEQ ID NO: 1881566
acgugaaguccugugcucu

SEQ ID NO: 2054547 - RNA, 19 nt, Artificial Sequence
  Description of Artificial Sequence: Synthetic oligonucleotide
  Antisense strand to SEQ ID NO: 2054546
agagcacaggacuucacgu

SEQ ID NO: 2054548 - RNA, 19 nt, Artificial Sequence
  Description of Artificial Sequence: Synthetic oligonucleotide
  Sense strand starting at position 811 of SEQ ID NO: 1881566
ugaggugauucuucagaag

SEQ ID NO: 2054549 - RNA, 19 nt, Artificial Sequence
  Description of Artificial Sequence: Synthetic oligonucleotide
  Antisense strand to SEQ ID NO: 2054548
cuucugaagaaucaccuca

SEQ ID NO: 2054550 - RNA, 19 nt, Artificial Sequence
  Description of Artificial Sequence: Synthetic oligonucleotide
  Sense strand starting at position 1085 of SEQ ID NO: 1881566
acaggauugaaauguggua

SEQ ID NO: 2054551 - RNA, 19 nt, Artificial Sequence
  Description of Artificial Sequence: Synthetic oligonucleotide
  Antisense strand to SEQ ID NO: 2054550
uaccacauuucaauccugu

SEQ ID NO: 2054552 - RNA, 19 nt, Artificial Sequence
  Description of Artificial Sequence: Synthetic oligonucleotide
  Sense strand starting at position 1098 of SEQ ID NO: 1881566
gugguaccacuguaaaucu

SEQ ID NO: 2054553 - RNA, 19 nt, Artificial Sequence
  Description of Artificial Sequence: Synthetic oligonucleotide
  Antisense strand to SEQ ID NO: 2054552
agauuuacagugguaccac

SEQ ID NO: 2054554 - RNA, 19 nt, Artificial Sequence
  Description of Artificial Sequence: Synthetic oligonucleotide
  Sense strand starting at position 1389 of SEQ ID NO: 1881566
ugauauauacaauguagca

SEQ ID NO: 2054555 - RNA, 19 nt, Artificial Sequence
  Description of Artificial Sequence: Synthetic oligonucleotide
  Antisense strand to SEQ ID NO: 2054554
ugcuacauuguauauauca

SEQ ID NO: 2054556 - RNA, 19 nt, Artificial Sequence
  Description of Artificial Sequence: Synthetic oligonucleotide
  Sense strand starting at position 1422 of SEQ ID NO: 1881566
gucauuaagcaagagguca

SEQ ID NO: 2054557 - RNA, 19 nt, Artificial Sequence
  Description of Artificial Sequence: Synthetic oligonucleotide
  Antisense strand to SEQ ID NO: 2054556
ugaccucuugcuuaaugac

SEQ ID NO: 2054558 - RNA, 19 nt, Artificial Sequence
  Description of Artificial Sequence: Synthetic oligonucleotide
  Sense strand starting at position 1462 of SEQ ID NO: 1881566
auguucugaaaguguaaga

SEQ ID NO: 2054559 - RNA, 19 nt, Artificial Sequence
  Description of Artificial Sequence: Synthetic oligonucleotide
  Antisense strand to SEQ ID NO: 2054558
ucuuacacuuucagaacau

SEQ ID NO: 2054560 - RNA, 19 nt, Artificial Sequence
  Description of Artificial Sequence: Synthetic oligonucleotide
  Sense strand starting at position 1524 of SEQ ID NO: 1881566
cugagcuuccuauaaguca

SEQ ID NO: 2054561 - RNA, 19 nt, Artificial Sequence
  Description of Artificial Sequence: Synthetic oligonucleotide
  Antisense strand to SEQ ID NO: 2054560
ugacuuauaggaagcucag

SEQ ID NO: 2054562 - RNA, 19 nt, Artificial Sequence
  Description of Artificial Sequence: Synthetic oligonucleotide
  Sense strand starting at position 1527 of SEQ ID NO: 1881566
agcuuccuauaagucagaa

SEQ ID NO: 2054563 - RNA, 19 nt, Artificial Sequence
  Description of Artificial Sequence: Synthetic oligonucleotide
  Antisense strand to SEQ ID NO: 2054562
uucugacuuauaggaagcu

SEQ ID NO: 2054564 - RNA, 19 nt, Artificial Sequence
  Description of Artificial Sequence: Synthetic oligonucleotide
  Sense strand starting at position 1596 of SEQ ID NO: 1881566
uuauuagaaucaccgaauu

SEQ ID NO: 2054565 - RNA, 19 nt, Artificial Sequence
  Description of Artificial Sequence: Synthetic oligonucleotide
  Antisense strand to SEQ ID NO: 2054564
aauucggugauucuaauaa

SEQ ID NO: 2054566 - RNA, 19 nt, Artificial Sequence
  Description of Artificial Sequence: Synthetic oligonucleotide
  Sense strand starting at position 1627 of SEQ ID NO: 1881566
gcaagaucccuugaugauc

SEQ ID NO: 2054567 - RNA, 19 nt, Artificial Sequence
  Description of Artificial Sequence: Synthetic oligonucleotide
  Antisense strand to SEQ ID NO: 2054566
gaucaucaagggaucuugc

SEQ ID NO: 2054568 - RNA, 19 nt, Artificial Sequence
  Description of Artificial Sequence: Synthetic oligonucleotide
  Sense strand starting at position 1738 of SEQ ID NO: 1881566
guguuucucgaugaaauua

SEQ ID NO: 2054569 - RNA, 19 nt, Artificial Sequence
  Description of Artificial Sequence: Synthetic oligonucleotide
  Antisense strand to SEQ ID NO: 2054568
uaauuucaucgagaaacac

SEQ ID NO: 2054570 - RNA, 19 nt, Artificial Sequence
  Description of Artificial Sequence: Synthetic oligonucleotide
  Sense strand starting at position 1853 of SEQ ID NO: 1881566
acccuuccuugagugagaa

SEQ ID NO: 2054571 - RNA, 19 nt, Artificial Sequence
  Description of Artificial Sequence: Synthetic oligonucleotide
  Antisense strand to SEQ ID NO: 2054570
uucucacucaaggaagggu

SEQ ID NO: 2054572 - RNA, 19 nt, Artificial Sequence
  Description of Artificial Sequence: Synthetic oligonucleotide
  Sense strand starting at position 2188 of SEQ ID NO: 1881566
agaugaguaaacggagguu

SEQ ID NO: 2054573 - RNA, 19 nt, Artificial Sequence
  Description of Artificial Sequence: Synthetic oligonucleotide
  Antisense strand to SEQ ID NO: 2054572
aaccuccguuuacucaucu

SEQ ID NO: 2054574 - RNA, 19 nt, Artificial Sequence
  Description of Artificial Sequence: Synthetic oligonucleotide
  Sense strand starting at position 2245 of SEQ ID NO: 1881566
gucaaugguacagguaaga

SEQ ID NO: 2054575 - RNA, 19 nt, Artificial Sequence
  Description of Artificial Sequence: Synthetic oligonucleotide
  Antisense strand to SEQ ID NO: 2054574
ucuuaccuguaccauugac

SEQ ID NO: 2054576 - RNA, 19 nt, Artificial Sequence
  Description of Artificial Sequence: Synthetic oligonucleotide
  Sense strand starting at position 2255 of SEQ ID NO: 1881566
cagguaagaccaugguuau

SEQ ID NO: 2054577 - RNA, 19 nt, Artificial Sequence
  Description of Artificial Sequence: Synthetic oligonucleotide
  Antisense strand to SEQ ID NO: 2054576
auaaccauggucuuaccug

SEQ ID NO: 2054578 - RNA, 19 nt, Artificial Sequence
  Description of Artificial Sequence: Synthetic oligonucleotide
  Sense strand starting at position 2256 of SEQ ID NO: 1881566
agguaagaccaugguuauc

SEQ ID NO: 2054579 - RNA, 19 nt, Artificial Sequence
  Description of Artificial Sequence: Synthetic oligonucleotide
  Antisense strand to SEQ ID NO: 2054578
gauaaccauggucuuaccu

SEQ ID NO: 2054580 - RNA, 19 nt, Artificial Sequence
  Description of Artificial Sequence: Synthetic oligonucleotide
  Sense strand starting at position 2258 of SEQ ID NO: 1881566
guaagaccaugguuaucaa

SEQ ID NO: 2054581 - RNA, 19 nt, Artificial Sequence
  Description of Artificial Sequence: Synthetic oligonucleotide
  Antisense strand to SEQ ID NO: 2054580
uugauaaccauggucuuac

SEQ ID NO: 2054582 - RNA, 19 nt, Artificial Sequence
  Description of Artificial Sequence: Synthetic oligonucleotide
  Sense strand starting at position 2633 of SEQ ID NO: 1881566
aucugagcugggcaugauu

SEQ ID NO: 2054583 - RNA, 19 nt, Artificial Sequence
  Description of Artificial Sequence: Synthetic oligonucleotide
  Antisense strand to SEQ ID NO: 2054582
aaucaugcccagcucagau

SEQ ID NO: 2054584 - RNA, 19 nt, Artificial Sequence
  Description of Artificial Sequence: Synthetic oligonucleotide
  Sense strand starting at position 2663 of SEQ ID NO: 1881566
gauauugaauuugggaaau

SEQ ID NO: 2054585 - RNA, 19 nt, Artificial Sequence
  Description of Artificial Sequence: Synthetic oligonucleotide
  Antisense strand to SEQ ID NO: 2054584
auuucccaaauucaauauc

SEQ ID NO: 2054586 - RNA, 19 nt, Artificial Sequence
  Description of Artificial Sequence: Synthetic oligonucleotide
  Sense strand starting at position 3044 of SEQ ID NO: 1881566
ccaacauguuaaucagaug

SEQ ID NO: 2054587 - RNA, 19 nt, Artificial Sequence
  Description of Artificial Sequence: Synthetic oligonucleotide
  Antisense strand to SEQ ID NO: 2054586
caucugauuaacauguugg

SEQ ID NO: 2054588 - RNA, 19 nt, Artificial Sequence
  Description of Artificial Sequence: Synthetic oligonucleotide
  Sense strand starting at position 3096 of SEQ ID NO: 1881566
gugaguucaccuuggacag

SEQ ID NO: 2054589 - RNA, 19 nt, Artificial Sequence
  Description of Artificial Sequence: Synthetic oligonucleotide
  Antisense strand to SEQ ID NO: 2054588
cuguccaaggugaacucac

SEQ ID NO: 2054590 - RNA, 19 nt, Artificial Sequence
  Description of Artificial Sequence: Synthetic oligonucleotide
  Sense strand starting at position 3126 of SEQ ID NO: 1881566
gagauaagcuaucuaggau

SEQ ID NO: 2054591 - RNA, 19 nt, Artificial Sequence
  Description of Artificial Sequence: Synthetic oligonucleotide
  Antisense strand to SEQ ID NO: 2054590
auccuagauagcuuaucuc

SEQ ID NO: 2054592 - RNA, 19 nt, Artificial Sequence
  Description of Artificial Sequence: Synthetic oligonucleotide
  Sense strand starting at position 3129 of SEQ ID NO: 1881566
auaagcuaucuaggauaag

SEQ ID NO: 2054593 - RNA, 19 nt, Artificial Sequence
  Description of Artificial Sequence: Synthetic oligonucleotide
  Antisense strand to SEQ ID NO: 2054592
cuuauccuagauagcuuau

SEQ ID NO: 2054594 - RNA, 19 nt, Artificial Sequence
  Description of Artificial Sequence: Synthetic oligonucleotide
  Sense strand starting at position 3238 of SEQ ID NO: 1881566
agagaaguagguugcuaug

SEQ ID NO: 2054595 - RNA, 19 nt, Artificial Sequence
  Description of Artificial Sequence: Synthetic oligonucleotide
  Antisense strand to SEQ ID NO: 2054594
cauagcaaccuacuucucu

SEQ ID NO: 2054596 - RNA, 19 nt, Artificial Sequence
  Description of Artificial Sequence: Synthetic oligonucleotide
  Sense strand starting at position 3405 of SEQ ID NO: 1881566
gguguuaaucuccauggga

SEQ ID NO: 2054597 - RNA, 19 nt, Artificial Sequence
  Description of Artificial Sequence: Synthetic oligonucleotide
  Antisense strand to SEQ ID NO: 2054596
ucccauggagauuaacacc

SEQ ID NO: 2054598 - RNA, 19 nt, Artificial Sequence
  Description of Artificial Sequence: Synthetic oligonucleotide
  Sense strand starting at position 3407 of SEQ ID NO: 1881566
uguuaaucuccaugggaac

SEQ ID NO: 2054599 - RNA, 19 nt, Artificial Sequence
  Description of Artificial Sequence: Synthetic oligonucleotide
  Antisense strand to SEQ ID NO: 2054598
guucccauggagauuaaca

SEQ ID NO: 2054600 - RNA, 19 nt, Artificial Sequence
  Description of Artificial Sequence: Synthetic oligonucleotide
  Sense strand starting at position 3470 of SEQ ID NO: 1881566
ugaucauugccagcguguu

SEQ ID NO: 2054601 - RNA, 19 nt, Artificial Sequence
  Description of Artificial Sequence: Synthetic oligonucleotide
  Antisense strand to SEQ ID NO: 2054600
aacacgcuggcaaugauca

SEQ ID NO: 2054602 - RNA, 19 nt, Artificial Sequence
  Description of Artificial Sequence: Synthetic oligonucleotide
  Sense strand starting at position 3664 of SEQ ID NO: 1881566
agucauggaguccacuauu

SEQ ID NO: 2054603 - RNA, 19 nt, Artificial Sequence
  Description of Artificial Sequence: Synthetic oligonucleotide
  Antisense strand to SEQ ID NO: 2054602
aauaguggacuccaugacu

SEQ ID NO: 2054604 - RNA, 19 nt, Artificial Sequence
  Description of Artificial Sequence: Synthetic oligonucleotide
  Sense strand starting at position 3741 of SEQ ID NO: 1881566
aggcauucugucuauagac

SEQ ID NO: 2054605 - RNA, 19 nt, Artificial Sequence
  Description of Artificial Sequence: Synthetic oligonucleotide
  Antisense strand to SEQ ID NO: 2054604
gucuauagacagaaugccu

SEQ ID NO: 2054606 - RNA, 19 nt, Artificial Sequence
  Description of Artificial Sequence: Synthetic oligonucleotide
  Sense strand starting at position 3743 of SEQ ID NO: 1881566
gcauucugucuauagacaa

SEQ ID NO: 2054607 - RNA, 19 nt, Artificial Sequence
  Description of Artificial Sequence: Synthetic oligonucleotide
  Antisense strand to SEQ ID NO: 2054606
uugucuauagacagaaugc

SEQ ID NO: 2054608 - RNA, 19 nt, Artificial Sequence
  Description of Artificial Sequence: Synthetic oligonucleotide
  Sense strand starting at position 3764 of SEQ ID NO: 1881566
ggaacuauuuaaugggaau

SEQ ID NO: 2054609 - RNA, 19 nt, Artificial Sequence
  Description of Artificial Sequence: Synthetic oligonucleotide
  Antisense strand to SEQ ID NO: 2054608
auucccauuaaauaguucc

SEQ ID NO: 2054610 - RNA, 19 nt, Artificial Sequence
  Description of Artificial Sequence: Synthetic oligonucleotide
  Sense strand starting at position 3870 of SEQ ID NO: 1881566
ucguuauaacaugaaaucu

SEQ ID NO: 2054611 - RNA, 19 nt, Artificial Sequence
  Description of Artificial Sequence: Synthetic oligonucleotide
  Antisense strand to SEQ ID NO: 2054610
agauuucauguuauaacga

SEQ ID NO: 2054612 - RNA, 19 nt, Artificial Sequence
  Description of Artificial Sequence: Synthetic oligonucleotide
  Sense strand starting at position 3895 of SEQ ID NO: 1881566
uggccucuuauaggaugaa

SEQ ID NO: 2054613 - RNA, 19 nt, Artificial Sequence
  Description of Artificial Sequence: Synthetic oligonucleotide
  Antisense strand to SEQ ID NO: 2054612
uucauccuauaagaggcca

SEQ ID NO: 2054614 - RNA, 19 nt, Artificial Sequence
  Description of Artificial Sequence: Synthetic oligonucleotide
  Sense strand starting at position 3940 of SEQ ID NO: 1881566
acugaaaguugucuuacaa

SEQ ID NO: 2054615 - RNA, 19 nt, Artificial Sequence
  Description of Artificial Sequence: Synthetic oligonucleotide
  Antisense strand to SEQ ID NO: 2054614
uuguaagacaacuuucagu

SEQ ID NO: 2054616 - RNA, 19 nt, Artificial Sequence
  Description of Artificial Sequence: Synthetic oligonucleotide
  Sense strand starting at position 60 of SEQ ID NO: 1881567
ugccuuacucaagaagcau

SEQ ID NO: 2054617 - RNA, 19 nt, Artificial Sequence
  Description of Artificial Sequence: Synthetic oligonucleotide
  Antisense strand to SEQ ID NO: 2054616
augcuucuugaguaaggca

SEQ ID NO: 2054618 - RNA, 19 nt, Artificial Sequence
  Description of Artificial Sequence: Synthetic oligonucleotide
  Sense strand starting at position 135 of SEQ ID NO: 1881567
gucacugauguauaauuaa

SEQ ID NO: 2054619 - RNA, 19 nt, Artificial Sequence
  Description of Artificial Sequence: Synthetic oligonucleotide
  Antisense strand to SEQ ID NO: 2054618
uuaauuauacaucagugac

SEQ ID NO: 2054620 - RNA, 19 nt, Artificial Sequence
  Description of Artificial Sequence: Synthetic oligonucleotide
  Sense strand starting at position 344 of SEQ ID NO: 1881567
aggcaucacccagaugguu

SEQ ID NO: 2054621 - RNA, 19 nt, Artificial Sequence
  Description of Artificial Sequence: Synthetic oligonucleotide
  Antisense strand to SEQ ID NO: 2054620
aaccaucugggugaugccu

SEQ ID NO: 2054622 - RNA, 19 nt, Artificial Sequence
  Description of Artificial Sequence: Synthetic oligonucleotide
  Sense strand starting at position 605 of SEQ ID NO: 1881567
cuguucucagugggaggaa

SEQ ID NO: 2054623 - RNA, 19 nt, Artificial Sequence
  Description of Artificial Sequence: Synthetic oligonucleotide
  Antisense strand to SEQ ID NO: 2054622
uuccucccacugagaacag

SEQ ID NO: 2054624 - RNA, 19 nt, Artificial Sequence
  Description of Artificial Sequence: Synthetic oligonucleotide
  Sense strand starting at position 732 of SEQ ID NO: 1881567
uauccuuaaguguaaguga

SEQ ID NO: 2054625 - RNA, 19 nt, Artificial Sequence
  Description of Artificial Sequence: Synthetic oligonucleotide
  Antisense strand to SEQ ID NO: 2054624
ucacuuacacuuaaggaua

SEQ ID NO: 2054626 - RNA, 19 nt, Artificial Sequence
  Description of Artificial Sequence: Synthetic oligonucleotide
  Sense strand starting at position 753 of SEQ ID NO: 1881567
ccagcaguguuuccauuua

SEQ ID NO: 2054627 - RNA, 19 nt, Artificial Sequence
  Description of Artificial Sequence: Synthetic oligonucleotide
  Antisense strand to SEQ ID NO: 2054626
uaaauggaaacacugcugg

SEQ ID NO: 2054628 - RNA, 19 nt, Artificial Sequence
  Description of Artificial Sequence: Synthetic oligonucleotide
  Sense strand starting at position 792 of SEQ ID NO: 1881567
gcaguuuaucaaggacaga

SEQ ID NO: 2054629 - RNA, 19 nt, Artificial Sequence
  Description of Artificial Sequence: Synthetic oligonucleotide
  Antisense strand to SEQ ID NO: 2054628
ucuguccuugauaaacugc

SEQ ID NO: 2054630 - RNA, 19 nt, Artificial Sequence
  Description of Artificial Sequence: Synthetic oligonucleotide
  Sense strand starting at position 899 of SEQ ID NO: 1881567
agagucucccauuguaaca

SEQ ID NO: 2054631 - RNA, 19 nt, Artificial Sequence
  Description of Artificial Sequence: Synthetic oligonucleotide
  Antisense strand to SEQ ID NO: 2054630
uguuacaaugggagacucu

SEQ ID NO: 2054632 - RNA, 19 nt, Artificial Sequence
  Description of Artificial Sequence: Synthetic oligonucleotide
  Sense strand starting at position 1010 of SEQ ID NO: 1881567
uuuguuaaccaaggaaauc

SEQ ID NO: 2054633 - RNA, 19 nt, Artificial Sequence
  Description of Artificial Sequence: Synthetic oligonucleotide
  Antisense strand to SEQ ID NO: 2054632
gauuuccuugguuaacaaa

SEQ ID NO: 2054634 - RNA, 19 nt, Artificial Sequence
  Description of Artificial Sequence: Synthetic oligonucleotide
  Sense strand starting at position 1075 of SEQ ID NO: 1881567
cuauguugacagcaaauau

SEQ ID NO: 2054635 - RNA, 19 nt, Artificial Sequence
  Description of Artificial Sequence: Synthetic oligonucleotide
  Antisense strand to SEQ ID NO: 2054634
auauuugcugucaacauag

SEQ ID NO: 2054636 - RNA, 19 nt, Artificial Sequence
  Description of Artificial Sequence: Synthetic oligonucleotide
  Sense strand starting at position 1150 of SEQ ID NO: 1881567
aggcaauugcuacagaaua

SEQ ID NO: 2054637 - RNA, 19 nt, Artificial Sequence
  Description of Artificial Sequence: Synthetic oligonucleotide
  Antisense strand to SEQ ID NO: 2054636
uauucuguagcaauugccu

SEQ ID NO: 2054638 - RNA, 19 nt, Artificial Sequence
  Description of Artificial Sequence: Synthetic oligonucleotide
  Sense strand starting at position 1355 of SEQ ID NO: 1881567
augugaaagugauuaacga

SEQ ID NO: 2054639 - RNA, 19 nt, Artificial Sequence
  Description of Artificial Sequence: Synthetic oligonucleotide
  Antisense strand to SEQ ID NO: 2054638
ucguuaaucacuuucacau

SEQ ID NO: 2054640 - RNA, 19 nt, Artificial Sequence
  Description of Artificial Sequence: Synthetic oligonucleotide
  Sense strand starting at position 1370 of SEQ ID NO: 1881567
acgagaguaaugggaucua

SEQ ID NO: 2054641 - RNA, 19 nt, Artificial Sequence
  Description of Artificial Sequence: Synthetic oligonucleotide
  Antisense strand to SEQ ID NO: 2054640
uagaucccauuacucucgu

SEQ ID NO: 2054642 - RNA, 19 nt, Artificial Sequence
  Description of Artificial Sequence: Synthetic oligonucleotide
  Sense strand starting at position 1381 of SEQ ID NO: 1881567
gggaucuauuuagcgcuaa

SEQ ID NO: 2054643 - RNA, 19 nt, Artificial Sequence
  Description of Artificial Sequence: Synthetic oligonucleotide
  Antisense strand to SEQ ID NO: 2054642
uuagcgcuaaauagauccc

SEQ ID NO: 2054644 - RNA, 19 nt, Artificial Sequence
  Description of Artificial Sequence: Synthetic oligonucleotide
  Sense strand starting at position 1405 of SEQ ID NO: 1881567
gcaugugauuuaccagcau

SEQ ID NO: 2054645 - RNA, 19 nt, Artificial Sequence
  Description of Artificial Sequence: Synthetic oligonucleotide
  Antisense strand to SEQ ID NO: 2054644
augcugguaaaucacaugc

SEQ ID NO: 2054646 - RNA, 19 nt, Artificial Sequence
  Description of Artificial Sequence: Synthetic oligonucleotide
  Sense strand starting at position 1640 of SEQ ID NO: 1881567
ccaaguaauugaucugaug

SEQ ID NO: 2054647 - RNA, 19 nt, Artificial Sequence
  Description of Artificial Sequence: Synthetic oligonucleotide
  Antisense strand to SEQ ID NO: 2054646
caucagaucaauuacuugg

SEQ ID NO: 2054648 - RNA, 19 nt, Artificial Sequence
  Description of Artificial Sequence: Synthetic oligonucleotide
  Sense strand starting at position 1666 of SEQ ID NO: 1881567
ugaaacuuagacgguugaa

SEQ ID NO: 2054649 - RNA, 19 nt, Artificial Sequence
  Description of Artificial Sequence: Synthetic oligonucleotide
  Antisense strand to SEQ ID NO: 2054648
uucaaccgucuaaguuuca

SEQ ID NO: 2054650 - RNA, 19 nt, Artificial Sequence
  Description of Artificial Sequence: Synthetic oligonucleotide
  Sense strand starting at position 1692 of SEQ ID NO: 1881567
aacaaauggcccugauugu

SEQ ID NO: 2054651 - RNA, 19 nt, Artificial Sequence
  Description of Artificial Sequence: Synthetic oligonucleotide
  Antisense strand to SEQ ID NO: 2054650
acaaucagggccauuuguu

SEQ ID NO: 2054652 - RNA, 19 nt, Artificial Sequence
  Description of Artificial Sequence: Synthetic oligonucleotide
  Sense strand starting at position 1962 of SEQ ID NO: 1881567
gaagguaagaguggaagua

SEQ ID NO: 2054653 - RNA, 19 nt, Artificial Sequence
  Description of Artificial Sequence: Synthetic oligonucleotide
  Antisense strand to SEQ ID NO: 2054652
uacuuccacucuuaccuuc

SEQ ID NO: 2054654 - RNA, 19 nt, Artificial Sequence
  Description of Artificial Sequence: Synthetic oligonucleotide
  Sense strand starting at position 1964 of SEQ ID NO: 1881567
agguaagaguggaaguagu

SEQ ID NO: 2054655 - RNA, 19 nt, Artificial Sequence
  Description of Artificial Sequence: Synthetic oligonucleotide
  Antisense strand to SEQ ID NO: 2054654
acuacuuccacucuuaccu

SEQ ID NO: 2054656 - RNA, 19 nt, Artificial Sequence
  Description of Artificial Sequence: Synthetic oligonucleotide
  Sense strand starting at position 2007 of SEQ ID NO: 1881567
auccacuaagcaugagauu

SEQ ID NO: 2054657 - RNA, 19 nt, Artificial Sequence
  Description of Artificial Sequence: Synthetic oligonucleotide
  Antisense strand to SEQ ID NO: 2054656
aaucucaugcuuaguggau

SEQ ID NO: 2054658 - RNA, 19 nt, Artificial Sequence
  Description of Artificial Sequence: Synthetic oligonucleotide
  Sense strand starting at position 2065 of SEQ ID NO: 1881567
aucauaaagucaccuguua

SEQ ID NO: 2054659 - RNA, 19 nt, Artificial Sequence
  Description of Artificial Sequence: Synthetic oligonucleotide
  Antisense strand to SEQ ID NO: 2054658
uaacaggugacuuuaugau

SEQ ID NO: 2054660 - RNA, 19 nt, Artificial Sequence
  Description of Artificial Sequence: Synthetic oligonucleotide
  Sense strand starting at position 2347 of SEQ ID NO: 1881567
gaagcacugguuuaguuau

SEQ ID NO: 2054661 - RNA, 19 nt, Artificial Sequence
  Description of Artificial Sequence: Synthetic oligonucleotide
  Antisense strand to SEQ ID NO: 2054660
auaacuaaaccagugcuuc

SEQ ID NO: 2054662 - RNA, 19 nt, Artificial Sequence
  Description of Artificial Sequence: Synthetic oligonucleotide
  Sense strand starting at position 2504 of SEQ ID NO: 1881567
cgguuaaauccagagccau

SEQ ID NO: 2054663 - RNA, 19 nt, Artificial Sequence
  Description of Artificial Sequence: Synthetic oligonucleotide
  Antisense strand to SEQ ID NO: 2054662
auggcucuggauuuaaccg

SEQ ID NO: 2054664 - RNA, 19 nt, Artificial Sequence
  Description of Artificial Sequence: Synthetic oligonucleotide
  Sense strand starting at position 2540 of SEQ ID NO: 1881567
uguagauuucgcuacaguu

SEQ ID NO: 2054665 - RNA, 19 nt, Artificial Sequence
  Description of Artificial Sequence: Synthetic oligonucleotide
  Antisense strand to SEQ ID NO: 2054664
aacuguagcgaaaucuaca

SEQ ID NO: 2054666 - RNA, 19 nt, Artificial Sequence
  Description of Artificial Sequence: Synthetic oligonucleotide
  Sense strand starting at position 2636 of SEQ ID NO: 1881567
ugugguucugccucuguca

SEQ ID NO: 2054667 - RNA, 19 nt, Artificial Sequence
  Description of Artificial Sequence: Synthetic oligonucleotide
  Antisense strand to SEQ ID NO: 2054666
ugacagaggcagaaccaca

SEQ ID NO: 2054668 - RNA, 19 nt, Artificial Sequence
  Description of Artificial Sequence: Synthetic oligonucleotide
  Sense strand starting at position 2727 of SEQ ID NO: 1881567
gggccauaucucuaugagc

SEQ ID NO: 2054669 - RNA, 19 nt, Artificial Sequence
  Description of Artificial Sequence: Synthetic oligonucleotide
  Antisense strand to SEQ ID NO: 2054668
gcucauagagauauggccc

SEQ ID NO: 2054670 - RNA, 19 nt, Artificial Sequence
  Description of Artificial Sequence: Synthetic oligonucleotide
  Sense strand starting at position 2769 of SEQ ID NO: 1881567
auucuauaugauuggcuca

SEQ ID NO: 2054671 - RNA, 19 nt, Artificial Sequence
  Description of Artificial Sequence: Synthetic oligonucleotide
  Antisense strand to SEQ ID NO: 2054670
ugagccaaucauauagaau

SEQ ID NO: 2054672 - RNA, 19 nt, Artificial Sequence
  Description of Artificial Sequence: Synthetic oligonucleotide
  Sense strand starting at position 2774 of SEQ ID NO: 1881567
auaugauuggcucacccaa

SEQ ID NO: 2054673 - RNA, 19 nt, Artificial Sequence
  Description of Artificial Sequence: Synthetic oligonucleotide
  Antisense strand to SEQ ID NO: 2054672
uugggugagccaaucauau

SEQ ID NO: 2054674 - RNA, 19 nt, Artificial Sequence
  Description of Artificial Sequence: Synthetic oligonucleotide
  Sense strand starting at position 2776 of SEQ ID NO: 1881567
augauuggcucacccaaau

SEQ ID NO: 2054675 - RNA, 19 nt, Artificial Sequence
  Description of Artificial Sequence: Synthetic oligonucleotide
  Antisense strand to SEQ ID NO: 2054674
auuugggugagccaaucau

SEQ ID NO: 2054676 - RNA, 19 nt, Artificial Sequence
  Description of Artificial Sequence: Synthetic oligonucleotide
  Sense strand starting at position 2825 of SEQ ID NO: 1881567
aguaucugguucuuugaaa

SEQ ID NO: 2054677 - RNA, 19 nt, Artificial Sequence
  Description of Artificial Sequence: Synthetic oligonucleotide
  Antisense strand to SEQ ID NO: 2054676
uuucaaagaaccagauacu

SEQ ID NO: 2054678 - RNA, 19 nt, Artificial Sequence
  Description of Artificial Sequence: Synthetic oligonucleotide
  Sense strand starting at position 3001 of SEQ ID NO: 1881567
ccgacacacuugguacaua

SEQ ID NO: 2054679 - RNA, 19 nt, Artificial Sequence
  Description of Artificial Sequence: Synthetic oligonucleotide
  Antisense strand to SEQ ID NO: 2054678
uauguaccaagugugucgg

SEQ ID NO: 2054680 - RNA, 19 nt, Artificial Sequence
  Description of Artificial Sequence: Synthetic oligonucleotide
  Sense strand starting at position 3294 of SEQ ID NO: 1881567
uuugcuagauuaucacaga

SEQ ID NO: 2054681 - RNA, 19 nt, Artificial Sequence
  Description of Artificial Sequence: Synthetic oligonucleotide
  Antisense strand to SEQ ID NO: 2054680
ucugugauaaucuagcaaa

SEQ ID NO: 2054682 - RNA, 19 nt, Artificial Sequence
  Description of Artificial Sequence: Synthetic oligonucleotide
  Sense strand starting at position 3475 of SEQ ID NO: 1881567
ggaguacaugcagaaugua

SEQ ID NO: 2054683 - RNA, 19 nt, Artificial Sequence
  Description of Artificial Sequence: Synthetic oligonucleotide
  Antisense strand to SEQ ID NO: 2054682
uacauucugcauguacucc

SEQ ID NO: 2054684 - RNA, 19 nt, Artificial Sequence
  Description of Artificial Sequence: Synthetic oligonucleotide
  Sense strand starting at position 3497 of SEQ ID NO: 1881567
cuuacuguuggucagaauu

SEQ ID NO: 2054685 - RNA, 19 nt, Artificial Sequence
  Description of Artificial Sequence: Synthetic oligonucleotide
  Antisense strand to SEQ ID NO: 2054684
aauucugaccaacaguaag

SEQ ID NO: 2054686 - RNA, 19 nt, Artificial Sequence
  Description of Artificial Sequence: Synthetic oligonucleotide
  Sense strand starting at position 3531 of SEQ ID NO: 1881567
accauugcucugcaggaua

SEQ ID NO: 2054687 - RNA, 19 nt, Artificial Sequence
  Description of Artificial Sequence: Synthetic oligonucleotide
  Antisense strand to SEQ ID NO: 2054686
uauccugcagagcaauggu

SEQ ID NO: 2054688 - RNA, 19 nt, Artificial Sequence
  Description of Artificial Sequence: Synthetic oligonucleotide
  Sense strand starting at position 3829 of SEQ ID NO: 1881567
aaagaaucauccguggaga

SEQ ID NO: 2054689 - RNA, 19 nt, Artificial Sequence
  Description of Artificial Sequence: Synthetic oligonucleotide
  Antisense strand to SEQ ID NO: 2054688
ucuccacggaugauucuuu

SEQ ID NO: 2054690 - RNA, 19 nt, Artificial Sequence
  Description of Artificial Sequence: Synthetic oligonucleotide
  Sense strand starting at position 3830 of SEQ ID NO: 1881567
aagaaucauccguggagaa

SEQ ID NO: 2054691 - RNA, 19 nt, Artificial Sequence
  Description of Artificial Sequence: Synthetic oligonucleotide
  Antisense strand to SEQ ID NO: 2054690
uucuccacggaugauucuu

SEQ ID NO: 2054692 - RNA, 19 nt, Artificial Sequence
  Description of Artificial Sequence: Synthetic oligonucleotide
  Sense strand starting at position 3831 of SEQ ID NO: 1881567
agaaucauccguggagaaa

SEQ ID NO: 2054693 - RNA, 19 nt, Artificial Sequence
  Description of Artificial Sequence: Synthetic oligonucleotide
  Antisense strand to SEQ ID NO: 2054692
uuucuccacggaugauucu

SEQ ID NO: 2054694 - RNA, 19 nt, Artificial Sequence
  Description of Artificial Sequence: Synthetic oligonucleotide
  Sense strand starting at position 3858 of SEQ ID NO: 1881567
uaggaagguugucccuuaa

SEQ ID NO: 2054695 - RNA, 19 nt, Artificial Sequence
  Description of Artificial Sequence: Synthetic oligonucleotide
  Antisense strand to SEQ ID NO: 2054694
uuaagggacaaccuuccua

SEQ ID NO: 2054696 - RNA, 19 nt, Artificial Sequence
  Description of Artificial Sequence: Synthetic oligonucleotide
  Sense strand starting at position 128 of SEQ ID NO: 1881568
auaagacauuccugaauga

SEQ ID NO: 2054697 - RNA, 19 nt, Artificial Sequence
  Description of Artificial Sequence: Synthetic oligonucleotide
  Antisense strand to SEQ ID NO: 2054696
ucauucaggaaugucuuau

SEQ ID NO: 2054698 - RNA, 19 nt, Artificial Sequence
  Description of Artificial Sequence: Synthetic oligonucleotide
  Sense strand starting at position 715 of SEQ ID NO: 1881568
aauaacaagugguaagauu

SEQ ID NO: 2054699 - RNA, 19 nt, Artificial Sequence
  Description of Artificial Sequence: Synthetic oligonucleotide
  Antisense strand to SEQ ID NO: 2054698
aaucuuaccacuuguuauu

SEQ ID NO: 2054700 - RNA, 19 nt, Artificial Sequence
  Description of Artificial Sequence: Synthetic oligonucleotide
  Sense strand starting at position 771 of SEQ ID NO: 1881568
agaaccagauagcuuuauu

SEQ ID NO: 2054701 - RNA, 19 nt, Artificial Sequence
  Description of Artificial Sequence: Synthetic oligonucleotide
  Antisense strand to SEQ ID NO: 2054700
aauaaagcuaucugguucu

SEQ ID NO: 2054702 - RNA, 19 nt, Artificial Sequence
  Description of Artificial Sequence: Synthetic oligonucleotide
  Sense strand starting at position 890 of SEQ ID NO: 1881568
aggcuagcaucauccugaa

SEQ ID NO: 2054703 - RNA, 19 nt, Artificial Sequence
  Description of Artificial Sequence: Synthetic oligonucleotide
  Antisense strand to SEQ ID NO: 2054702
uucaggaugaugcuagccu

SEQ ID NO: 2054704 - RNA, 19 nt, Artificial Sequence
  Description of Artificial Sequence: Synthetic oligonucleotide
  Sense strand starting at position 951 of SEQ ID NO: 1881568
acaucaauaugcccgauga

SEQ ID NO: 2054705 - RNA, 19 nt, Artificial Sequence
  Description of Artificial Sequence: Synthetic oligonucleotide
  Antisense strand to SEQ ID NO: 2054704
ucaucgggcauauugaugu

SEQ ID NO: 2054706 - RNA, 19 nt, Artificial Sequence
  Description of Artificial Sequence: Synthetic oligonucleotide
  Sense strand starting at position 953 of SEQ ID NO: 1881568
aucaauaugcccgaugaac

SEQ ID NO: 2054707 - RNA, 19 nt, Artificial Sequence
  Description of Artificial Sequence: Synthetic oligonucleotide
  Antisense strand to SEQ ID NO: 2054706
guucaucgggcauauugau

SEQ ID NO: 2054708 - RNA, 19 nt, Artificial Sequence
  Description of Artificial Sequence: Synthetic oligonucleotide
  Sense strand starting at position 1045 of SEQ ID NO: 1881568
caggauuuauucuagggau

SEQ ID NO: 2054709 - RNA, 19 nt, Artificial Sequence
  Description of Artificial Sequence: Synthetic oligonucleotide
  Antisense strand to SEQ ID NO: 2054708
aucccuagaauaaauccug

SEQ ID NO: 2054710 - RNA, 19 nt, Artificial Sequence
  Description of Artificial Sequence: Synthetic oligonucleotide
  Sense strand starting at position 1048 of SEQ ID NO: 1881568
gauuuauucuagggauaga

SEQ ID NO: 2054711 - RNA, 19 nt, Artificial Sequence
  Description of Artificial Sequence: Synthetic oligonucleotide
  Antisense strand to SEQ ID NO: 2054710
ucuaucccuagaauaaauc

SEQ ID NO: 2054712 - RNA, 19 nt, Artificial Sequence
  Description of Artificial Sequence: Synthetic oligonucleotide
  Sense strand starting at position 1178 of SEQ ID NO: 1881568
ucaguaucuccucaugaua

SEQ ID NO: 2054713 - RNA, 19 nt, Artificial Sequence
  Description of Artificial Sequence: Synthetic oligonucleotide
  Antisense strand to SEQ ID NO: 2054712
uaucaugaggagauacuga

SEQ ID NO: 2054714 - RNA, 19 nt, Artificial Sequence
  Description of Artificial Sequence: Synthetic oligonucleotide
  Sense strand starting at position 1588 of SEQ ID NO: 1881568
cgaacuagcugagaaagaa

SEQ ID NO: 2054715 - RNA, 19 nt, Artificial Sequence
  Description of Artificial Sequence: Synthetic oligonucleotide
  Antisense strand to SEQ ID NO: 2054714
uucuuucucagcuaguucg

SEQ ID NO: 2054716 - RNA, 19 nt, Artificial Sequence
  Description of Artificial Sequence: Synthetic oligonucleotide
  Sense strand starting at position 1883 of SEQ ID NO: 1881568
ucacucccaccggaauauu

SEQ ID NO: 2054717 - RNA, 19 nt, Artificial Sequence
  Description of Artificial Sequence: Synthetic oligonucleotide
  Antisense strand to SEQ ID NO: 2054716
aauauuccggugggaguga

SEQ ID NO: 2054718 - RNA, 19 nt, Artificial Sequence
  Description of Artificial Sequence: Synthetic oligonucleotide
  Sense strand starting at position 54 of SEQ ID NO: 1881569
ccugaaauccaguguggag

SEQ ID NO: 2054719 - RNA, 19 nt, Artificial Sequence
  Description of Artificial Sequence: Synthetic oligonucleotide
  Antisense strand to SEQ ID NO: 2054718
cuccacacuggauuucagg

SEQ ID NO: 2054720 - RNA, 19 nt, Artificial Sequence
  Description of Artificial Sequence: Synthetic oligonucleotide
  Sense strand starting at position 87 of SEQ ID NO: 1881569
gugcaagcuaaagagaauu

SEQ ID NO: 2054721 - RNA, 19 nt, Artificial Sequence
  Description of Artificial Sequence: Synthetic oligonucleotide
  Antisense strand to SEQ ID NO: 2054720
aauucucuuuagcuugcac

SEQ ID NO: 2054722 - RNA, 19 nt, Artificial Sequence
  Description of Artificial Sequence: Synthetic oligonucleotide
  Sense strand starting at position 310 of SEQ ID NO: 1881569
gaaagaaguggagguuuau

SEQ ID NO: 2054723 - RNA, 19 nt, Artificial Sequence
  Description of Artificial Sequence: Synthetic oligonucleotide
  Antisense strand to SEQ ID NO: 2054722
auaaaccuccacuucuuuc

SEQ ID NO: 2054724 - RNA, 19 nt, Artificial Sequence
  Description of Artificial Sequence: Synthetic oligonucleotide
  Sense strand starting at position 391 of SEQ ID NO: 1881569
acauauugugauugaaagc

SEQ ID NO: 2054725 - RNA, 19 nt, Artificial Sequence
  Description of Artificial Sequence: Synthetic oligonucleotide
  Antisense strand to SEQ ID NO: 2054724
gcuuucaaucacaauaugu

SEQ ID NO: 2054726 - RNA, 19 nt, Artificial Sequence
  Description of Artificial Sequence: Synthetic oligonucleotide
  Sense strand starting at position 471 of SEQ ID NO: 1881569
ccaaguaaacaacguauua

SEQ ID NO: 2054727 - RNA, 19 nt, Artificial Sequence
  Description of Artificial Sequence: Synthetic oligonucleotide
  Antisense strand to SEQ ID NO: 2054726
uaauacguuguuuacuugg

SEQ ID NO: 2054728 - RNA, 19 nt, Artificial Sequence
  Description of Artificial Sequence: Synthetic oligonucleotide
  Sense strand starting at position 484 of SEQ ID NO: 1881569
guauuaaugagaggucaag

SEQ ID NO: 2054729 - RNA, 19 nt, Artificial Sequence
  Description of Artificial Sequence: Synthetic oligonucleotide
  Antisense strand to SEQ ID NO: 2054728
cuugaccucucauuaauac

SEQ ID NO: 2054730 - RNA, 19 nt, Artificial Sequence
  Description of Artificial Sequence: Synthetic oligonucleotide
  Sense strand starting at position 512 of SEQ ID NO: 1881569
guggaagucagaugaaauc

SEQ ID NO: 2054731 - RNA, 19 nt, Artificial Sequence
  Description of Artificial Sequence: Synthetic oligonucleotide
  Antisense strand to SEQ ID NO: 2054730
gauuucaucugacuuccac

SEQ ID NO: 2054732 - RNA, 19 nt, Artificial Sequence
  Description of Artificial Sequence: Synthetic oligonucleotide
  Sense strand starting at position 521 of SEQ ID NO: 1881569
agaugaaauccuggguuug

SEQ ID NO: 2054733 - RNA, 19 nt, Artificial Sequence
  Description of Artificial Sequence: Synthetic oligonucleotide
  Antisense strand to SEQ ID NO: 2054732
caaacccaggauuucaucu

SEQ ID NO: 2054734 - RNA, 19 nt, Artificial Sequence
  Description of Artificial Sequence: Synthetic oligonucleotide
  Sense strand starting at position 523 of SEQ ID NO: 1881569
augaaauccuggguuugga

SEQ ID NO: 2054735 - RNA, 19 nt, Artificial Sequence
  Description of Artificial Sequence: Synthetic oligonucleotide
  Antisense strand to SEQ ID NO: 2054734
uccaaacccaggauuucau

SEQ ID NO: 2054736 - RNA, 19 nt, Artificial Sequence
  Description of Artificial Sequence: Synthetic oligonucleotide
  Sense strand starting at position 568 of SEQ ID NO: 1881569
guggccuuaagugaauuaa

SEQ ID NO: 2054737 - RNA, 19 nt, Artificial Sequence
  Description of Artificial Sequence: Synthetic oligonucleotide
  Antisense strand to SEQ ID NO: 2054736
uuaauucacuuaaggccac

SEQ ID NO: 2054738 - RNA, 19 nt, Artificial Sequence
  Description of Artificial Sequence: Synthetic oligonucleotide
  Sense strand starting at position 1779 of SEQ ID NO: 1881569
auauaauacgugcaaaguu

SEQ ID NO: 2054739 - RNA, 19 nt, Artificial Sequence
  Description of Artificial Sequence: Synthetic oligonucleotide
  Antisense strand to SEQ ID NO: 2054738
aacuuugcacguauuauau

SEQ ID NO: 2054740 - RNA, 19 nt, Artificial Sequence
  Description of Artificial Sequence: Synthetic oligonucleotide
  Sense strand starting at position 1868 of SEQ ID NO: 1881569
uguuccuuggcugauauau

SEQ ID NO: 2054741 - RNA, 19 nt, Artificial Sequence
  Description of Artificial Sequence: Synthetic oligonucleotide
  Antisense strand to SEQ ID NO: 2054740
auauaucagccaaggaaca

SEQ ID NO: 2054742 - RNA, 19 nt, Artificial Sequence
  Description of Artificial Sequence: Synthetic oligonucleotide
  Sense strand starting at position 1891 of SEQ ID NO: 1881569
cugucuguucugccugcaa

SEQ ID NO: 2054743 - RNA, 19 nt, Artificial Sequence
  Description of Artificial Sequence: Synthetic oligonucleotide
  Antisense strand to SEQ ID NO: 2054742
uugcaggcagaacagacag

SEQ ID NO: 2054744 - RNA, 19 nt, Artificial Sequence
  Description of Artificial Sequence: Synthetic oligonucleotide
  Sense strand starting at position 1984 of SEQ ID NO: 1881569
cccaguguccucuucguua

SEQ ID NO: 2054745 - RNA, 19 nt, Artificial Sequence
  Description of Artificial Sequence: Synthetic oligonucleotide
  Antisense strand to SEQ ID NO: 2054744
uaacgaagaggacacuggg

SEQ ID NO: 2054746 - RNA, 19 nt, Artificial Sequence
  Description of Artificial Sequence: Synthetic oligonucleotide
  Sense strand starting at position 2191 of SEQ ID NO: 1881569
guuugagcgccugcuucua

SEQ ID NO: 2054747 - RNA, 19 nt, Artificial Sequence
  Description of Artificial Sequence: Synthetic oligonucleotide
  Antisense strand to SEQ ID NO: 2054746
uagaagcaggcgcucaaac

SEQ ID NO: 2054748 - RNA, 19 nt, Artificial Sequence
  Description of Artificial Sequence: Synthetic oligonucleotide
  Sense strand starting at position 2265 of SEQ ID NO: 1881569
guuacauucuauucuauga

SEQ ID NO: 2054749 - RNA, 19 nt, Artificial Sequence
  Description of Artificial Sequence: Synthetic oligonucleotide
  Antisense strand to SEQ ID NO: 2054748
ucauagaauagaauguaac

SEQ ID NO: 2054750 - RNA, 19 nt, Artificial Sequence
  Description of Artificial Sequence: Synthetic oligonucleotide
  Sense strand starting at position 2341 of SEQ ID NO: 1881569
ccuuccauacaucgaaaga

SEQ ID NO: 2054751 - RNA, 19 nt, Artificial Sequence
  Description of Artificial Sequence: Synthetic oligonucleotide
  Antisense strand to SEQ ID NO: 2054750
ucuuucgauguauggaagg

SEQ ID NO: 2054752 - RNA, 19 nt, Artificial Sequence
  Description of Artificial Sequence: Synthetic oligonucleotide
  Sense strand starting at position 2543 of SEQ ID NO: 1881569
acaaguuaguucucauaaa

SEQ ID NO: 2054753 - RNA, 19 nt, Artificial Sequence
  Description of Artificial Sequence: Synthetic oligonucleotide
  Antisense strand to SEQ ID NO: 2054752
uuuaugagaacuaacuugu

SEQ ID NO: 2054754 - RNA, 19 nt, Artificial Sequence
  Description of Artificial Sequence: Synthetic oligonucleotide
  Sense strand starting at position 2585 of SEQ ID NO: 1881569
uugccauuuguguauucua

SEQ ID NO: 2054755 - RNA, 19 nt, Artificial Sequence
  Description of Artificial Sequence: Synthetic oligonucleotide
  Antisense strand to SEQ ID NO: 2054754
uagaauacacaaauggcaa

SEQ ID NO: 2054756 - RNA, 19 nt, Artificial Sequence
  Description of Artificial Sequence: Synthetic oligonucleotide
  Sense strand starting at position 2634 of SEQ ID NO: 1881569
uugaauaucugcucuggaa

SEQ ID NO: 2054757 - RNA, 19 nt, Artificial Sequence
  Description of Artificial Sequence: Synthetic oligonucleotide
  Antisense strand to SEQ ID NO: 2054756
uuccagagcagauauucaa

SEQ ID NO: 2054758 - RNA, 19 nt, Artificial Sequence
  Description of Artificial Sequence: Synthetic oligonucleotide
  Sense strand starting at position 2636 of SEQ ID NO: 1881569
gaauaucugcucuggaaug

SEQ ID NO: 2054759 - RNA, 19 nt, Artificial Sequence
  Description of Artificial Sequence: Synthetic oligonucleotide
  Antisense strand to SEQ ID NO: 2054758
cauuccagagcagauauuc

SEQ ID NO: 2054760 - RNA, 19 nt, Artificial Sequence
  Description of Artificial Sequence: Synthetic oligonucleotide
  Sense strand starting at position 2646 of SEQ ID NO: 1881569
ucuggaaugucaucucuca

SEQ ID NO: 2054761 - RNA, 19 nt, Artificial Sequence
  Description of Artificial Sequence: Synthetic oligonucleotide
  Antisense strand to SEQ ID NO: 2054760
ugagagaugacauuccaga

SEQ ID NO: 2054762 - RNA, 19 nt, Artificial Sequence
  Description of Artificial Sequence: Synthetic oligonucleotide
  Sense strand starting at position 2692 of SEQ ID NO: 1881569
uuuguuauacaccauguaa

SEQ ID NO: 2054763 - RNA, 19 nt, Artificial Sequence
  Description of Artificial Sequence: Synthetic oligonucleotide
  Antisense strand to SEQ ID NO: 2054762
uuacaugguguauaacaaa

SEQ ID NO: 2054764 - RNA, 19 nt, Artificial Sequence
  Description of Artificial Sequence: Synthetic oligonucleotide
  Sense strand starting at position 2694 of SEQ ID NO: 1881569
uguuauacaccauguaaug

SEQ ID NO: 2054765 - RNA, 19 nt, Artificial Sequence
  Description of Artificial Sequence: Synthetic oligonucleotide
  Antisense strand to SEQ ID NO: 2054764
cauuacaugguguauaaca

SEQ ID NO: 2054766 - RNA, 19 nt, Artificial Sequence
  Description of Artificial Sequence: Synthetic oligonucleotide
  Sense strand starting at position 2882 of SEQ ID NO: 1881569
uguguauuaguagacucau

SEQ ID NO: 2054767 - RNA, 19 nt, Artificial Sequence
  Description of Artificial Sequence: Synthetic oligonucleotide
  Antisense strand to SEQ ID NO: 2054766
augagucuacuaauacaca

SEQ ID NO: 2054768 - RNA, 19 nt, Artificial Sequence
  Description of Artificial Sequence: Synthetic oligonucleotide
  Sense strand starting at position 2946 of SEQ ID NO: 1881569
ucaaaugccuagucagaau

SEQ ID NO: 2054769 - RNA, 19 nt, Artificial Sequence
  Description of Artificial Sequence: Synthetic oligonucleotide
  Antisense strand to SEQ ID NO: 2054768
auucugacuaggcauuuga

SEQ ID NO: 2054770 - RNA, 19 nt, Artificial Sequence
  Description of Artificial Sequence: Synthetic oligonucleotide
  Sense strand starting at position 2962 of SEQ ID NO: 1881569
aauguugaguccuugaacu

SEQ ID NO: 2054771 - RNA, 19 nt, Artificial Sequence
  Description of Artificial Sequence: Synthetic oligonucleotide
  Antisense strand to SEQ ID NO: 2054770
aguucaaggacucaacauu

SEQ ID NO: 2054772 - RNA, 19 nt, Artificial Sequence
  Description of Artificial Sequence: Synthetic oligonucleotide
  Sense strand starting at position 2970 of SEQ ID NO: 1881569
guccuugaacuggauguaa

SEQ ID NO: 2054773 - RNA, 19 nt, Artificial Sequence
  Description of Artificial Sequence: Synthetic oligonucleotide
  Antisense strand to SEQ ID NO: 2054772
uuacauccaguucaaggac

SEQ ID NO: 2054774 - RNA, 19 nt, Artificial Sequence
  Description of Artificial Sequence: Synthetic oligonucleotide
  Sense strand starting at position 2972 of SEQ ID NO: 1881569
ccuugaacuggauguaaca

SEQ ID NO: 2054775 - RNA, 19 nt, Artificial Sequence
  Description of Artificial Sequence: Synthetic oligonucleotide
  Antisense strand to SEQ ID NO: 2054774
uguuacauccaguucaagg

SEQ ID NO: 2054776 - RNA, 19 nt, Artificial Sequence
  Description of Artificial Sequence: Synthetic oligonucleotide
  Sense strand starting at position 3023 of SEQ ID NO: 1881569
ugacuuaaaucgucuaaga

SEQ ID NO: 2054777 - RNA, 19 nt, Artificial Sequence
  Description of Artificial Sequence: Synthetic oligonucleotide
  Antisense strand to SEQ ID NO: 2054776
ucuuagacgauuuaaguca

SEQ ID NO: 2054778 - RNA, 19 nt, Artificial Sequence
  Description of Artificial Sequence: Synthetic oligonucleotide
  Sense strand starting at position 3252 of SEQ ID NO: 1881569
cagagaccauaguuuguuu

SEQ ID NO: 2054779 - RNA, 19 nt, Artificial Sequence
  Description of Artificial Sequence: Synthetic oligonucleotide
  Antisense strand to SEQ ID NO: 2054778
aaacaaacuauggucucug

SEQ ID NO: 2054780 - RNA, 19 nt, Artificial Sequence
  Description of Artificial Sequence: Synthetic oligonucleotide
  Sense strand starting at position 3428 of SEQ ID NO: 1881569
auaguuucccaacaaguau

SEQ ID NO: 2054781 - RNA, 19 nt, Artificial Sequence
  Description of Artificial Sequence: Synthetic oligonucleotide
  Antisense strand to SEQ ID NO: 2054780
auacuuguugggaaacuau

SEQ ID NO: 2054782 - RNA, 19 nt, Artificial Sequence
  Description of Artificial Sequence: Synthetic oligonucleotide
  Sense strand starting at position 3534 of SEQ ID NO: 1881569
gaucaaugggacuguguau

SEQ ID NO: 2054783 - RNA, 19 nt, Artificial Sequence
  Description of Artificial Sequence: Synthetic oligonucleotide
  Antisense strand to SEQ ID NO: 2054782
auacacagucccauugauc

SEQ ID NO: 2054784 - RNA, 19 nt, Artificial Sequence
  Description of Artificial Sequence: Synthetic oligonucleotide
  Sense strand starting at position 3548 of SEQ ID NO: 1881569
uguauuguuguagaaagug

SEQ ID NO: 2054785 - RNA, 19 nt, Artificial Sequence
  Description of Artificial Sequence: Synthetic oligonucleotide
  Antisense strand to SEQ ID NO: 2054784
cacuuucuacaacaauaca

SEQ ID NO: 2054786 - RNA, 19 nt, Artificial Sequence
  Description of Artificial Sequence: Synthetic oligonucleotide
  Sense strand starting at position 3724 of SEQ ID NO: 1881569
uuaaaugacuucgcauuaa

SEQ ID NO: 2054787 - RNA, 19 nt, Artificial Sequence
  Description of Artificial Sequence: Synthetic oligonucleotide
  Antisense strand to SEQ ID NO: 2054786
uuaaugcgaagucauuuaa

SEQ ID NO: 2054788 - RNA, 19 nt, Artificial Sequence
  Description of Artificial Sequence: Synthetic oligonucleotide
  Sense strand starting at position 3826 of SEQ ID NO: 1881569
gguuuauaugacuauuguc

SEQ ID NO: 2054789 - RNA, 19 nt, Artificial Sequence
  Description of Artificial Sequence: Synthetic oligonucleotide
  Antisense strand to SEQ ID NO: 2054788
gacaauagucauauaaacc

SEQ ID NO: 2054790 - RNA, 19 nt, Artificial Sequence
  Description of Artificial Sequence: Synthetic oligonucleotide
  Sense strand starting at position 3931 of SEQ ID NO: 1881569
gacagaguaggugguuaau

SEQ ID NO: 2054791 - RNA, 19 nt, Artificial Sequence
  Description of Artificial Sequence: Synthetic oligonucleotide
  Antisense strand to SEQ ID NO: 2054790
auuaaccaccuacucuguc

SEQ ID NO: 2054792 - RNA, 19 nt, Artificial Sequence
  Description of Artificial Sequence: Synthetic oligonucleotide
  Sense strand starting at position 3933 of SEQ ID NO: 1881569
cagaguaggugguuaauua

SEQ ID NO: 2054793 - RNA, 19 nt, Artificial Sequence
  Description of Artificial Sequence: Synthetic oligonucleotide
  Antisense strand to SEQ ID NO: 2054792
uaauuaaccaccuacucug

SEQ ID NO: 2054794 - RNA, 19 nt, Artificial Sequence
  Description of Artificial Sequence: Synthetic oligonucleotide
  Sense strand starting at position 3940 of SEQ ID NO: 1881569
ggugguuaauuacuauaua

SEQ ID NO: 2054795 - RNA, 19 nt, Artificial Sequence
  Description of Artificial Sequence: Synthetic oligonucleotide
  Antisense strand to SEQ ID NO: 2054794
uauauaguaauuaaccacc

SEQ ID NO: 2054796 - RNA, 19 nt, Artificial Sequence
  Description of Artificial Sequence: Synthetic oligonucleotide
  Sense strand starting at position 3982 of SEQ ID NO: 1881569
uuauaaguuggugacucau

SEQ ID NO: 2054797 - RNA, 19 nt, Artificial Sequence
  Description of Artificial Sequence: Synthetic oligonucleotide
  Antisense strand to SEQ ID NO: 2054796
augagucaccaacuuauaa

SEQ ID NO: 2054798 - RNA, 19 nt, Artificial Sequence
  Description of Artificial Sequence: Synthetic oligonucleotide
  Sense strand starting at position 95 of SEQ ID NO: 1881570
cugaguaugagagguaaua

SEQ ID NO: 2054799 - RNA, 19 nt, Artificial Sequence
  Description of Artificial Sequence: Synthetic oligonucleotide
  Antisense strand to SEQ ID NO: 2054798
uauuaccucucauacucag

SEQ ID NO: 2054800 - RNA, 19 nt, Artificial Sequence
  Description of Artificial Sequence: Synthetic oligonucleotide
  Sense strand starting at position 385 of SEQ ID NO: 1881570
gcaucuuagggaggugauu

SEQ ID NO: 2054801 - RNA, 19 nt, Artificial Sequence
  Description of Artificial Sequence: Synthetic oligonucleotide
  Antisense strand to SEQ ID NO: 2054800
aaucaccucccuaagaugc

SEQ ID NO: 2054802 - RNA, 19 nt, Artificial Sequence
  Description of Artificial Sequence: Synthetic oligonucleotide
  Sense strand starting at position 418 of SEQ ID NO: 1881570
ugcccucaugaaugauauu

SEQ ID NO: 2054803 - RNA, 19 nt, Artificial Sequence
  Description of Artificial Sequence: Synthetic oligonucleotide
  Antisense strand to SEQ ID NO: 2054802
aauaucauucaugagggca

SEQ ID NO: 2054804 - RNA, 19 nt, Artificial Sequence
  Description of Artificial Sequence: Synthetic oligonucleotide
  Sense strand starting at position 497 of SEQ ID NO: 1881570
acaagauggugccuucuau

SEQ ID NO: 2054805 - RNA, 19 nt, Artificial Sequence
  Description of Artificial Sequence: Synthetic oligonucleotide
  Antisense strand to SEQ ID NO: 2054804
auagaaggcaccaucuugu

SEQ ID NO: 2054806 - RNA, 19 nt, Artificial Sequence
  Description of Artificial Sequence: Synthetic oligonucleotide
  Sense strand starting at position 503 of SEQ ID NO: 1881570
uggugccuucuaugaggaa

SEQ ID NO: 2054807 - RNA, 19 nt, Artificial Sequence
  Description of Artificial Sequence: Synthetic oligonucleotide
  Antisense strand to SEQ ID NO: 2054806
uuccucauagaaggcacca

SEQ ID NO: 2054808 - RNA, 19 nt, Artificial Sequence
  Description of Artificial Sequence: Synthetic oligonucleotide
  Sense strand starting at position 578 of SEQ ID NO: 1881570
caagaauugugagaaauag

SEQ ID NO: 2054809 - RNA, 19 nt, Artificial Sequence
  Description of Artificial Sequence: Synthetic oligonucleotide
  Antisense strand to SEQ ID NO: 2054808
cuauuucucacaauucuug

SEQ ID NO: 2054810 - RNA, 19 nt, Artificial Sequence
  Description of Artificial Sequence: Synthetic oligonucleotide
  Sense strand starting at position 693 of SEQ ID NO: 1881570
ggcacagccuucuuacaau

SEQ ID NO: 2054811 - RNA, 19 nt, Artificial Sequence
  Description of Artificial Sequence: Synthetic oligonucleotide
  Antisense strand to SEQ ID NO: 2054810
auuguaagaaggcugugcc

SEQ ID NO: 2054812 - RNA, 19 nt, Artificial Sequence
  Description of Artificial Sequence: Synthetic oligonucleotide
  Sense strand starting at position 731 of SEQ ID NO: 1881570
ugcugaugguccuuuagga

SEQ ID NO: 2054813 - RNA, 19 nt, Artificial Sequence
  Description of Artificial Sequence: Synthetic oligonucleotide
  Antisense strand to SEQ ID NO: 2054812
uccuaaaggaccaucagca

SEQ ID NO: 2054814 - RNA, 19 nt, Artificial Sequence
  Description of Artificial Sequence: Synthetic oligonucleotide
  Sense strand starting at position 738 of SEQ ID NO: 1881570
gguccuuuaggagaacugu

SEQ ID NO: 2054815 - RNA, 19 nt, Artificial Sequence
  Description of Artificial Sequence: Synthetic oligonucleotide
  Antisense strand to SEQ ID NO: 2054814
acaguucuccuaaaggacc

SEQ ID NO: 2054816 - RNA, 19 nt, Artificial Sequence
  Description of Artificial Sequence: Synthetic oligonucleotide
  Sense strand starting at position 747 of SEQ ID NO: 1881570
ggagaacuguuucugguuu

SEQ ID NO: 2054817 - RNA, 19 nt, Artificial Sequence
  Description of Artificial Sequence: Synthetic oligonucleotide
  Antisense strand to SEQ ID NO: 2054816
aaaccagaaacaguucucc

SEQ ID NO: 2054818 - RNA, 19 nt, Artificial Sequence
  Description of Artificial Sequence: Synthetic oligonucleotide
  Sense strand starting at position 769 of SEQ ID NO: 1881570
uuugguugugaccaagaau

SEQ ID NO: 2054819 - RNA, 19 nt, Artificial Sequence
  Description of Artificial Sequence: Synthetic oligonucleotide
  Antisense strand to SEQ ID NO: 2054818
auucuuggucacaaccaaa

SEQ ID NO: 2054820 - RNA, 19 nt, Artificial Sequence
  Description of Artificial Sequence: Synthetic oligonucleotide
  Sense strand starting at position 843 of SEQ ID NO: 1881570
uuuauuuauuucugucgga

SEQ ID NO: 2054821 - RNA, 19 nt, Artificial Sequence
  Description of Artificial Sequence: Synthetic oligonucleotide
  Antisense strand to SEQ ID NO: 2054820
uccgacagaaauaaauaaa

SEQ ID NO: 2054822 - RNA, 19 nt, Artificial Sequence
  Description of Artificial Sequence: Synthetic oligonucleotide
  Sense strand starting at position 919 of SEQ ID NO: 1881570
ugguuuauaccacacagua

SEQ ID NO: 2054823 - RNA, 19 nt, Artificial Sequence
  Description of Artificial Sequence: Synthetic oligonucleotide
  Antisense strand to SEQ ID NO: 2054822
uacugugugguauaaacca

SEQ ID NO: 2054824 - RNA, 19 nt, Artificial Sequence
  Description of Artificial Sequence: Synthetic oligonucleotide
  Sense strand starting at position 1102 of SEQ ID NO: 1881570
gguccauugaauggucagu

SEQ ID NO: 2054825 - RNA, 19 nt, Artificial Sequence
  Description of Artificial Sequence: Synthetic oligonucleotide
  Antisense strand to SEQ ID NO: 2054824
acugaccauucaauggacc

SEQ ID NO: 2054826 - RNA, 19 nt, Artificial Sequence
  Description of Artificial Sequence: Synthetic oligonucleotide
  Sense strand starting at position 1104 of SEQ ID NO: 1881570
uccauugaauggucaguaa

SEQ ID NO: 2054827 - RNA, 19 nt, Artificial Sequence
  Description of Artificial Sequence: Synthetic oligonucleotide
  Antisense strand to SEQ ID NO: 2054826
uuacugaccauucaaugga

SEQ ID NO: 2054828 - RNA, 19 nt, Artificial Sequence
  Description of Artificial Sequence: Synthetic oligonucleotide
  Sense strand starting at position 1127 of SEQ ID NO: 1881570
gcagaaugggcaugagaca

SEQ ID NO: 2054829 - RNA, 19 nt, Artificial Sequence
  Description of Artificial Sequence: Synthetic oligonucleotide
  Antisense strand to SEQ ID NO: 2054828
ugucucaugcccauucugc

SEQ ID NO: 2054830 - RNA, 19 nt, Artificial Sequence
  Description of Artificial Sequence: Synthetic oligonucleotide
  Sense strand starting at position 1140 of SEQ ID NO: 1881570
gagacaauuugucacaaag

SEQ ID NO: 2054831 - RNA, 19 nt, Artificial Sequence
  Description of Artificial Sequence: Synthetic oligonucleotide
  Antisense strand to SEQ ID NO: 2054830
cuuugugacaaauugucuc

SEQ ID NO: 2054832 - RNA, 19 nt, Artificial Sequence
  Description of Artificial Sequence: Synthetic oligonucleotide
  Sense strand starting at position 1897 of SEQ ID NO: 1881570
gaguucugaagagguaaug

SEQ ID NO: 2054833 - RNA, 19 nt, Artificial Sequence
  Description of Artificial Sequence: Synthetic oligonucleotide
  Antisense strand to SEQ ID NO: 2054832
cauuaccucuucagaacuc

SEQ ID NO: 2054834 - RNA, 19 nt, Artificial Sequence
  Description of Artificial Sequence: Synthetic oligonucleotide
  Sense strand starting at position 2159 of SEQ ID NO: 1881570
accauugcccuuggauaca

SEQ ID NO: 2054835 - RNA, 19 nt, Artificial Sequence
  Description of Artificial Sequence: Synthetic oligonucleotide
  Antisense strand to SEQ ID NO: 2054834
uguauccaagggcaauggu

SEQ ID NO: 2054836 - RNA, 19 nt, Artificial Sequence
  Description of Artificial Sequence: Synthetic oligonucleotide
  Sense strand starting at position 2285 of SEQ ID NO: 1881570
gccggauuccagcaauucu

SEQ ID NO: 2054837 - RNA, 19 nt, Artificial Sequence
  Description of Artificial Sequence: Synthetic oligonucleotide
  Antisense strand to SEQ ID NO: 2054836
agaauugcuggaauccggc

SEQ ID NO: 2054838 - RNA, 19 nt, Artificial Sequence
  Description of Artificial Sequence: Synthetic oligonucleotide
  Sense strand starting at position 2659 of SEQ ID NO: 1881570
agaauucuguuacuuguaa

SEQ ID NO: 2054839 - RNA, 19 nt, Artificial Sequence
  Description of Artificial Sequence: Synthetic oligonucleotide
  Antisense strand to SEQ ID NO: 2054838
uuacaaguaacagaauucu

SEQ ID NO: 2054840 - RNA, 19 nt, Artificial Sequence
  Description of Artificial Sequence: Synthetic oligonucleotide
  Sense strand starting at position 2666 of SEQ ID NO: 1881570
uguuacuuguaauugaaag

SEQ ID NO: 2054841 - RNA, 19 nt, Artificial Sequence
  Description of Artificial Sequence: Synthetic oligonucleotide
  Antisense strand to SEQ ID NO: 2054840
cuuucaauuacaaguaaca

SEQ ID NO: 2054842 - RNA, 19 nt, Artificial Sequence
  Description of Artificial Sequence: Synthetic oligonucleotide
  Sense strand starting at position 2800 of SEQ ID NO: 1881570
gagauaauauuugggcuga

SEQ ID NO: 2054843 - RNA, 19 nt, Artificial Sequence
  Description of Artificial Sequence: Synthetic oligonucleotide
  Antisense strand to SEQ ID NO: 2054842
ucagcccaaauauuaucuc

SEQ ID NO: 2054844 - RNA, 19 nt, Artificial Sequence
  Description of Artificial Sequence: Synthetic oligonucleotide
  Sense strand starting at position 2801 of SEQ ID NO: 1881570
agauaauauuugggcugaa

SEQ ID NO: 2054845 - RNA, 19 nt, Artificial Sequence
  Description of Artificial Sequence: Synthetic oligonucleotide
  Antisense strand to SEQ ID NO: 2054844
uucagcccaaauauuaucu

SEQ ID NO: 2054846 - RNA, 19 nt, Artificial Sequence
  Description of Artificial Sequence: Synthetic oligonucleotide
  Sense strand starting at position 2836 of SEQ ID NO: 1881570
ggguuagccaagugaggau

SEQ ID NO: 2054847 - RNA, 19 nt, Artificial Sequence
  Description of Artificial Sequence: Synthetic oligonucleotide
  Antisense strand to SEQ ID NO: 2054846
auccucacuuggcuaaccc

SEQ ID NO: 2054848 - RNA, 19 nt, Artificial Sequence
  Description of Artificial Sequence: Synthetic oligonucleotide
  Sense strand starting at position 2953 of SEQ ID NO: 1881570
uuugccaggcuaugauuua

SEQ ID NO: 2054849 - RNA, 19 nt, Artificial Sequence
  Description of Artificial Sequence: Synthetic oligonucleotide
  Antisense strand to SEQ ID NO: 2054848
uaaaucauagccuggcaaa

SEQ ID NO: 2054850 - RNA, 19 nt, Artificial Sequence
  Description of Artificial Sequence: Synthetic oligonucleotide
  Sense strand starting at position 2987 of SEQ ID NO: 1881570
uccaguaaugcuuagggau

SEQ ID NO: 2054851 - RNA, 19 nt, Artificial Sequence
  Description of Artificial Sequence: Synthetic oligonucleotide
  Antisense strand to SEQ ID NO: 2054850
aucccuaagcauuacugga

SEQ ID NO: 2054852 - RNA, 19 nt, Artificial Sequence
  Description of Artificial Sequence: Synthetic oligonucleotide
  Sense strand starting at position 3115 of SEQ ID NO: 1881570
guaagagguuaucugcaau

SEQ ID NO: 2054853 - RNA, 19 nt, Artificial Sequence
  Description of Artificial Sequence: Synthetic oligonucleotide
  Antisense strand to SEQ ID NO: 2054852
auugcagauaaccucuuac

SEQ ID NO: 2054854 - RNA, 19 nt, Artificial Sequence
  Description of Artificial Sequence: Synthetic oligonucleotide
  Sense strand starting at position 3118 of SEQ ID NO: 1881570
agagguuaucugcaauugu

SEQ ID NO: 2054855 - RNA, 19 nt, Artificial Sequence
  Description of Artificial Sequence: Synthetic oligonucleotide
  Antisense strand to SEQ ID NO: 2054854
acaauugcagauaaccucu

SEQ ID NO: 2054856 - RNA, 19 nt, Artificial Sequence
  Description of Artificial Sequence: Synthetic oligonucleotide
  Sense strand starting at position 3256 of SEQ ID NO: 1881570
agguaaacauagcuuuaua

SEQ ID NO: 2054857 - RNA, 19 nt, Artificial Sequence
  Description of Artificial Sequence: Synthetic oligonucleotide
  Antisense strand to SEQ ID NO: 2054856
uauaaagcuauguuuaccu

SEQ ID NO: 2054858 - RNA, 19 nt, Artificial Sequence
  Description of Artificial Sequence: Synthetic oligonucleotide
  Sense strand starting at position 3267 of SEQ ID NO: 1881570
gcuuuauagcaucaucaag

SEQ ID NO: 2054859 - RNA, 19 nt, Artificial Sequence
  Description of Artificial Sequence: Synthetic oligonucleotide
  Antisense strand to SEQ ID NO: 2054858
cuugaugaugcuauaaagc

SEQ ID NO: 2054860 - RNA, 19 nt, Artificial Sequence
  Description of Artificial Sequence: Synthetic oligonucleotide
  Sense strand starting at position 3311 of SEQ ID NO: 1881570
agcagaaagcucuaucacu

SEQ ID NO: 2054861 - RNA, 19 nt, Artificial Sequence
  Description of Artificial Sequence: Synthetic oligonucleotide
  Antisense strand to SEQ ID NO: 2054860
agugauagagcuuucugcu

SEQ ID NO: 2054862 - RNA, 19 nt, Artificial Sequence
  Description of Artificial Sequence: Synthetic oligonucleotide
  Sense strand starting at position 3370 of SEQ ID NO: 1881570
acuguaugccaagaaguug

SEQ ID NO: 2054863 - RNA, 19 nt, Artificial Sequence
  Description of Artificial Sequence: Synthetic oligonucleotide
  Antisense strand to SEQ ID NO: 2054862
caacuucuuggcauacagu

SEQ ID NO: 2054864 - RNA, 19 nt, Artificial Sequence
  Description of Artificial Sequence: Synthetic oligonucleotide
  Sense strand starting at position 3411 of SEQ ID NO: 1881570
gcuggagaauuguuggaaa

SEQ ID NO: 2054865 - RNA, 19 nt, Artificial Sequence
  Description of Artificial Sequence: Synthetic oligonucleotide
  Antisense strand to SEQ ID NO: 2054864
uuuccaacaauucuccagc

SEQ ID NO: 2054866 - RNA, 19 nt, Artificial Sequence
  Description of Artificial Sequence: Synthetic oligonucleotide
  Sense strand starting at position 3517 of SEQ ID NO: 1881570
aggccaagauucuuggaaa

SEQ ID NO: 2054867 - RNA, 19 nt, Artificial Sequence
  Description of Artificial Sequence: Synthetic oligonucleotide
  Antisense strand to SEQ ID NO: 2054866
uuuccaagaaucuuggccu

SEQ ID NO: 2054868 - RNA, 19 nt, Artificial Sequence
  Description of Artificial Sequence: Synthetic oligonucleotide
  Sense strand starting at position 3580 of SEQ ID NO: 1881570
gugacuguaccgcaucaau

SEQ ID NO: 2054869 - RNA, 19 nt, Artificial Sequence
  Description of Artificial Sequence: Synthetic oligonucleotide
  Antisense strand to SEQ ID NO: 2054868
auugaugcgguacagucac

SEQ ID NO: 2054870 - RNA, 19 nt, Artificial Sequence
  Description of Artificial Sequence: Synthetic oligonucleotide
  Sense strand starting at position 3583 of SEQ ID NO: 1881570
acuguaccgcaucaaugau

SEQ ID NO: 2054871 - RNA, 19 nt, Artificial Sequence
  Description of Artificial Sequence: Synthetic oligonucleotide
  Antisense strand to SEQ ID NO: 2054870
aucauugaugcgguacagu

SEQ ID NO: 2054872 - RNA, 19 nt, Artificial Sequence
  Description of Artificial Sequence: Synthetic oligonucleotide
  Sense strand starting at position 3610 of SEQ ID NO: 1881570
gcagauguauuugcuaaac

SEQ ID NO: 2054873 - RNA, 19 nt, Artificial Sequence
  Description of Artificial Sequence: Synthetic oligonucleotide
  Antisense strand to SEQ ID NO: 2054872
guuuagcaaauacaucugc

SEQ ID NO: 2054874 - RNA, 19 nt, Artificial Sequence
  Description of Artificial Sequence: Synthetic oligonucleotide
  Sense strand starting at position 3633 of SEQ ID NO: 1881570
gccaguaaucacugaggaa

SEQ ID NO: 2054875 - RNA, 19 nt, Artificial Sequence
  Description of Artificial Sequence: Synthetic oligonucleotide
  Antisense strand to SEQ ID NO: 2054874
uuccucagugauuacuggc

SEQ ID NO: 2054876 - RNA, 19 nt, Artificial Sequence
  Description of Artificial Sequence: Synthetic oligonucleotide
  Sense strand starting at position 3845 of SEQ ID NO: 1881570
cucugagaguauccuagaa

SEQ ID NO: 2054877 - RNA, 19 nt, Artificial Sequence
  Description of Artificial Sequence: Synthetic oligonucleotide
  Antisense strand to SEQ ID NO: 2054876
uucuaggauacucucagag

SEQ ID NO: 2054878 - RNA, 19 nt, Artificial Sequence
  Description of Artificial Sequence: Synthetic oligonucleotide
  Sense strand starting at position 50 of SEQ ID NO: 1881571
gauuguuagcuugaaauug

SEQ ID NO: 2054879 - RNA, 19 nt, Artificial Sequence
  Description of Artificial Sequence: Synthetic oligonucleotide
  Antisense strand to SEQ ID NO: 2054878
caauuucaagcuaacaauc

SEQ ID NO: 2054880 - RNA, 19 nt, Artificial Sequence
  Description of Artificial Sequence: Synthetic oligonucleotide
  Sense strand starting at position 263 of SEQ ID NO: 1881571
auuaucugccuaggaaaga

SEQ ID NO: 2054881 - RNA, 19 nt, Artificial Sequence
  Description of Artificial Sequence: Synthetic oligonucleotide
  Antisense strand to SEQ ID NO: 2054880
ucuuuccuaggcagauaau

SEQ ID NO: 2054882 - RNA, 19 nt, Artificial Sequence
  Description of Artificial Sequence: Synthetic oligonucleotide
  Sense strand starting at position 671 of SEQ ID NO: 1881571
agaaguugugaaugacaca

SEQ ID NO: 2054883 - RNA, 19 nt, Artificial Sequence
  Description of Artificial Sequence: Synthetic oligonucleotide
  Antisense strand to SEQ ID NO: 2054882
ugugucauucacaacuucu

SEQ ID NO: 2054884 - RNA, 19 nt, Artificial Sequence
  Description of Artificial Sequence: Synthetic oligonucleotide
  Sense strand starting at position 718 of SEQ ID NO: 1881571
guaucaacacuuuaaggca

SEQ ID NO: 2054885 - RNA, 19 nt, Artificial Sequence
  Description of Artificial Sequence: Synthetic oligonucleotide
  Antisense strand to SEQ ID NO: 2054884
ugccuuaaaguguugauac

SEQ ID NO: 2054886 - RNA, 19 nt, Artificial Sequence
  Description of Artificial Sequence: Synthetic oligonucleotide
  Sense strand starting at position 888 of SEQ ID NO: 1881571
aaggcuguaucaccugaaa

SEQ ID NO: 2054887 - RNA, 19 nt, Artificial Sequence
  Description of Artificial Sequence: Synthetic oligonucleotide
  Antisense strand to SEQ ID NO: 2054886
uuucaggugauacagccuu

SEQ ID NO: 2054888 - RNA, 19 nt, Artificial Sequence
  Description of Artificial Sequence: Synthetic oligonucleotide
  Sense strand starting at position 891 of SEQ ID NO: 1881571
gcuguaucaccugaaauua

SEQ ID NO: 2054889 - RNA, 19 nt, Artificial Sequence
  Description of Artificial Sequence: Synthetic oligonucleotide
  Antisense strand to SEQ ID NO: 2054888
uaauuucaggugauacagc

SEQ ID NO: 2054890 - RNA, 19 nt, Artificial Sequence
  Description of Artificial Sequence: Synthetic oligonucleotide
  Sense strand starting at position 1080 of SEQ ID NO: 1881571
agcuucuaugcucaagaca

SEQ ID NO: 2054891 - RNA, 19 nt, Artificial Sequence
  Description of Artificial Sequence: Synthetic oligonucleotide
  Antisense strand to SEQ ID NO: 2054890
ugucuugagcauagaagcu

SEQ ID NO: 2054892 - RNA, 19 nt, Artificial Sequence
  Description of Artificial Sequence: Synthetic oligonucleotide
  Sense strand starting at position 1294 of SEQ ID NO: 1881571
uucucauugcuugagaaga

SEQ ID NO: 2054893 - RNA, 19 nt, Artificial Sequence
  Description of Artificial Sequence: Synthetic oligonucleotide
  Antisense strand to SEQ ID NO: 2054892
ucuucucaagcaaugagaa

SEQ ID NO: 2054894 - RNA, 19 nt, Artificial Sequence
  Description of Artificial Sequence: Synthetic oligonucleotide
  Sense strand starting at position 1305 of SEQ ID NO: 1881571
ugagaagaaugagaggaaa

SEQ ID NO: 2054895 - RNA, 19 nt, Artificial Sequence
  Description of Artificial Sequence: Synthetic oligonucleotide
  Antisense strand to SEQ ID NO: 2054894
uuuccucucauucuucuca

SEQ ID NO: 2054896 - RNA, 19 nt, Artificial Sequence
  Description of Artificial Sequence: Synthetic oligonucleotide
  Sense strand starting at position 1348 of SEQ ID NO: 1881571
ucagucgucuaauuuccau

SEQ ID NO: 2054897 - RNA, 19 nt, Artificial Sequence
  Description of Artificial Sequence: Synthetic oligonucleotide
  Antisense strand to SEQ ID NO: 2054896
auggaaauuagacgacuga

SEQ ID NO: 2054898 - RNA, 19 nt, Artificial Sequence
  Description of Artificial Sequence: Synthetic oligonucleotide
  Sense strand starting at position 1391 of SEQ ID NO: 1881571
gcuguugccaaggaaauau

SEQ ID NO: 2054899 - RNA, 19 nt, Artificial Sequence
  Description of Artificial Sequence: Synthetic oligonucleotide
  Antisense strand to SEQ ID NO: 2054898
auauuuccuuggcaacagc

SEQ ID NO: 2054900 - RNA, 19 nt, Artificial Sequence
  Description of Artificial Sequence: Synthetic oligonucleotide
  Sense strand starting at position 1441 of SEQ ID NO: 1881571
uugauugcaccauagacga

SEQ ID NO: 2054901 - RNA, 19 nt, Artificial Sequence
  Description of Artificial Sequence: Synthetic oligonucleotide
  Antisense strand to SEQ ID NO: 2054900
ucgucuauggugcaaucaa

SEQ ID NO: 2054902 - RNA, 19 nt, Artificial Sequence
  Description of Artificial Sequence: Synthetic oligonucleotide
  Sense strand starting at position 1449 of SEQ ID NO: 1881571
accauagacgacuagucau

SEQ ID NO: 2054903 - RNA, 19 nt, Artificial Sequence
  Description of Artificial Sequence: Synthetic oligonucleotide
  Antisense strand to SEQ ID NO: 2054902
augacuagucgucuauggu

SEQ ID NO: 2054904 - RNA, 19 nt, Artificial Sequence
  Description of Artificial Sequence: Synthetic oligonucleotide
  Sense strand starting at position 1462 of SEQ ID NO: 1881571
agucauaugcuuuggagaa

SEQ ID NO: 2054905 - RNA, 19 nt, Artificial Sequence
  Description of Artificial Sequence: Synthetic oligonucleotide
  Antisense strand to SEQ ID NO: 2054904
uucuccaaagcauaugacu

SEQ ID NO: 2054906 - RNA, 19 nt, Artificial Sequence
  Description of Artificial Sequence: Synthetic oligonucleotide
  Sense strand starting at position 1496 of SEQ ID NO: 1881571
agauguuaugaucaguucu

SEQ ID NO: 2054907 - RNA, 19 nt, Artificial Sequence
  Description of Artificial Sequence: Synthetic oligonucleotide
  Antisense strand to SEQ ID NO: 2054906
agaacugaucauaacaucu

SEQ ID NO: 2054908 - RNA, 19 nt, Artificial Sequence
  Description of Artificial Sequence: Synthetic oligonucleotide
  Sense strand starting at position 1982 of SEQ ID NO: 1881571
ugagccucacucgaugaau

SEQ ID NO: 2054909 - RNA, 19 nt, Artificial Sequence
  Description of Artificial Sequence: Synthetic oligonucleotide
  Antisense strand to SEQ ID NO: 2054908
auucaucgagugaggcuca

SEQ ID NO: 2054910 - RNA, 19 nt, Artificial Sequence
  Description of Artificial Sequence: Synthetic oligonucleotide
  Sense strand starting at position 2018 of SEQ ID NO: 1881571
gcucuuugggacuaaacga

SEQ ID NO: 2054911 - RNA, 19 nt, Artificial Sequence
  Description of Artificial Sequence: Synthetic oligonucleotide
  Antisense strand to SEQ ID NO: 2054910
ucguuuagucccaaagagc

SEQ ID NO: 2054912 - RNA, 19 nt, Artificial Sequence
  Description of Artificial Sequence: Synthetic oligonucleotide
  Sense strand starting at position 2278 of SEQ ID NO: 1881571
aacagauggcucuguagga

SEQ ID NO: 2054913 - RNA, 19 nt, Artificial Sequence
  Description of Artificial Sequence: Synthetic oligonucleotide
  Antisense strand to SEQ ID NO: 2054912
uccuacagagccaucuguu

SEQ ID NO: 2054914 - RNA, 19 nt, Artificial Sequence
  Description of Artificial Sequence: Synthetic oligonucleotide
  Sense strand starting at position 2279 of SEQ ID NO: 1881571
acagauggcucuguaggaa

SEQ ID NO: 2054915 - RNA, 19 nt, Artificial Sequence
  Description of Artificial Sequence: Synthetic oligonucleotide
  Antisense strand to SEQ ID NO: 2054914
uuccuacagagccaucugu

SEQ ID NO: 2054916 - RNA, 19 nt, Artificial Sequence
  Description of Artificial Sequence: Synthetic oligonucleotide
  Sense strand starting at position 2282 of SEQ ID NO: 1881571
gauggcucuguaggaagaa

SEQ ID NO: 2054917 - RNA, 19 nt, Artificial Sequence
  Description of Artificial Sequence: Synthetic oligonucleotide
  Antisense strand to SEQ ID NO: 2054916
uucuuccuacagagccauc

SEQ ID NO: 2054918 - RNA, 19 nt, Artificial Sequence
  Description of Artificial Sequence: Synthetic oligonucleotide
  Sense strand starting at position 2441 of SEQ ID NO: 1881571
agcauugcucucuaggaua

SEQ ID NO: 2054919 - RNA, 19 nt, Artificial Sequence
  Description of Artificial Sequence: Synthetic oligonucleotide
  Antisense strand to SEQ ID NO: 2054918
uauccuagagagcaaugcu

SEQ ID NO: 2054920 - RNA, 19 nt, Artificial Sequence
  Description of Artificial Sequence: Synthetic oligonucleotide
  Sense strand starting at position 2493 of SEQ ID NO: 1881571
aucacugugccauaaagua

SEQ ID NO: 2054921 - RNA, 19 nt, Artificial Sequence
  Description of Artificial Sequence: Synthetic oligonucleotide
  Antisense strand to SEQ ID NO: 2054920
uacuuuauggcacagugau

SEQ ID NO: 2054922 - RNA, 19 nt, Artificial Sequence
  Description of Artificial Sequence: Synthetic oligonucleotide
  Sense strand starting at position 2578 of SEQ ID NO: 1881571
gagccucuacuguagacua

SEQ ID NO: 2054923 - RNA, 19 nt, Artificial Sequence
  Description of Artificial Sequence: Synthetic oligonucleotide
  Antisense strand to SEQ ID NO: 2054922
uagucuacaguagaggcuc

SEQ ID NO: 2054924 - RNA, 19 nt, Artificial Sequence
  Description of Artificial Sequence: Synthetic oligonucleotide
  Sense strand starting at position 2602 of SEQ ID NO: 1881571
uguccuagaguuugcauuu

SEQ ID NO: 2054925 - RNA, 19 nt, Artificial Sequence
  Description of Artificial Sequence: Synthetic oligonucleotide
  Antisense strand to SEQ ID NO: 2054924
aaaugcaaacucuaggaca

SEQ ID NO: 2054926 - RNA, 19 nt, Artificial Sequence
  Description of Artificial Sequence: Synthetic oligonucleotide
  Sense strand starting at position 2736 of SEQ ID NO: 1881571
agcaguucugcagaggaaa

SEQ ID NO: 2054927 - RNA, 19 nt, Artificial Sequence
  Description of Artificial Sequence: Synthetic oligonucleotide
  Antisense strand to SEQ ID NO: 2054926
uuuccucugcagaacugcu

SEQ ID NO: 2054928 - RNA, 19 nt, Artificial Sequence
  Description of Artificial Sequence: Synthetic oligonucleotide
  Sense strand starting at position 3064 of SEQ ID NO: 1881571
aaacucaaguguuugaaga

SEQ ID NO: 2054929 - RNA, 19 nt, Artificial Sequence
  Description of Artificial Sequence: Synthetic oligonucleotide
  Antisense strand to SEQ ID NO: 2054928
ucuucaaacacuugaguuu

SEQ ID NO: 2054930 - RNA, 19 nt, Artificial Sequence
  Description of Artificial Sequence: Synthetic oligonucleotide
  Sense strand starting at position 3065 of SEQ ID NO: 1881571
aacucaaguguuugaagac

SEQ ID NO: 2054931 - RNA, 19 nt, Artificial Sequence
  Description of Artificial Sequence: Synthetic oligonucleotide
  Antisense strand to SEQ ID NO: 2054930
gucuucaaacacuugaguu

SEQ ID NO: 2054932 - RNA, 19 nt, Artificial Sequence
  Description of Artificial Sequence: Synthetic oligonucleotide
  Sense strand starting at position 3136 of SEQ ID NO: 1881571
gagcccacagaguaucaau

SEQ ID NO: 2054933 - RNA, 19 nt, Artificial Sequence
  Description of Artificial Sequence: Synthetic oligonucleotide
  Antisense strand to SEQ ID NO: 2054932
auugauacucugugggcuc

SEQ ID NO: 2054934 - RNA, 19 nt, Artificial Sequence
  Description of Artificial Sequence: Synthetic oligonucleotide
  Sense strand starting at position 3194 of SEQ ID NO: 1881571
uaacaaguggugugaggau

SEQ ID NO: 2054935 - RNA, 19 nt, Artificial Sequence
  Description of Artificial Sequence: Synthetic oligonucleotide
  Antisense strand to SEQ ID NO: 2054934
auccucacaccacuuguua

SEQ ID NO: 2054936 - RNA, 19 nt, Artificial Sequence
  Description of Artificial Sequence: Synthetic oligonucleotide
  Sense strand starting at position 3495 of SEQ ID NO: 1881571
uccaacagugaguauucua

SEQ ID NO: 2054937 - RNA, 19 nt, Artificial Sequence
  Description of Artificial Sequence: Synthetic oligonucleotide
  Antisense strand to SEQ ID NO: 2054936
uagaauacucacuguugga

SEQ ID NO: 2054938 - RNA, 19 nt, Artificial Sequence
  Description of Artificial Sequence: Synthetic oligonucleotide
  Sense strand starting at position 3524 of SEQ ID NO: 1881571
ugaugaaugugacuacucu

SEQ ID NO: 2054939 - RNA, 19 nt, Artificial Sequence
  Description of Artificial Sequence: Synthetic oligonucleotide
  Antisense strand to SEQ ID NO: 2054938
agaguagucacauucauca

SEQ ID NO: 2054940 - RNA, 19 nt, Artificial Sequence
  Description of Artificial Sequence: Synthetic oligonucleotide
  Sense strand starting at position 3528 of SEQ ID NO: 1881571
gaaugugacuacucuagga

SEQ ID NO: 2054941 - RNA, 19 nt, Artificial Sequence
  Description of Artificial Sequence: Synthetic oligonucleotide
  Antisense strand to SEQ ID NO: 2054940
uccuagaguagucacauuc

SEQ ID NO: 2054942 - RNA, 19 nt, Artificial Sequence
  Description of Artificial Sequence: Synthetic oligonucleotide
  Sense strand starting at position 3532 of SEQ ID NO: 1881571
gugacuacucuaggaacuu

SEQ ID NO: 2054943 - RNA, 19 nt, Artificial Sequence
  Description of Artificial Sequence: Synthetic oligonucleotide
  Antisense strand to SEQ ID NO: 2054942
aaguuccuagaguagucac

SEQ ID NO: 2054944 - RNA, 19 nt, Artificial Sequence
  Description of Artificial Sequence: Synthetic oligonucleotide
  Sense strand starting at position 3548 of SEQ ID NO: 1881571
cuuuguguaagaggaauca

SEQ ID NO: 2054945 - RNA, 19 nt, Artificial Sequence
  Description of Artificial Sequence: Synthetic oligonucleotide
  Antisense strand to SEQ ID NO: 2054944
ugauuccucuuacacaaag

SEQ ID NO: 2054946 - RNA, 19 nt, Artificial Sequence
  Description of Artificial Sequence: Synthetic oligonucleotide
  Sense strand starting at position 3761 of SEQ ID NO: 1881571
ugaauaacgcugcagauau

SEQ ID NO: 2054947 - RNA, 19 nt, Artificial Sequence
  Description of Artificial Sequence: Synthetic oligonucleotide
  Antisense strand to SEQ ID NO: 2054946
auaucugcagcguuauuca

SEQ ID NO: 2054948 - RNA, 19 nt, Artificial Sequence
  Description of Artificial Sequence: Synthetic oligonucleotide
  Sense strand starting at position 3796 of SEQ ID NO: 1881571
guuugaguccuugcugcua

SEQ ID NO: 2054949 - RNA, 19 nt, Artificial Sequence
  Description of Artificial Sequence: Synthetic oligonucleotide
  Antisense strand to SEQ ID NO: 2054948
uagcagcaaggacucaaac

SEQ ID NO: 2054950 - RNA, 19 nt, Artificial Sequence
  Description of Artificial Sequence: Synthetic oligonucleotide
  Sense strand starting at position 3828 of SEQ ID NO: 1881571
gcaaauauuuguuugaguc

SEQ ID NO: 2054951 - RNA, 19 nt, Artificial Sequence
  Description of Artificial Sequence: Synthetic oligonucleotide
  Antisense strand to SEQ ID NO: 2054950
gacucaaacaaauauuugc

SEQ ID NO: 2054952 - RNA, 19 nt, Artificial Sequence
  Description of Artificial Sequence: Synthetic oligonucleotide
  Sense strand starting at position 3836 of SEQ ID NO: 1881571
uuguuugagucccugauuu

SEQ ID NO: 2054953 - RNA, 19 nt, Artificial Sequence
  Description of Artificial Sequence: Synthetic oligonucleotide
  Antisense strand to SEQ ID NO: 2054952
aaaucagggacucaaacaa

SEQ ID NO: 2054954 - RNA, 19 nt, Artificial Sequence
  Description of Artificial Sequence: Synthetic oligonucleotide
  Sense strand starting at position 3881 of SEQ ID NO: 1881571
guggaauugccauaucaua

SEQ ID NO: 2054955 - RNA, 19 nt, Artificial Sequence
  Description of Artificial Sequence: Synthetic oligonucleotide
  Antisense strand to SEQ ID NO: 2054954
uaugauauggcaauuccac

SEQ ID NO: 2054956 - RNA, 19 nt, Artificial Sequence
  Description of Artificial Sequence: Synthetic oligonucleotide
  Sense strand starting at position 3924 of SEQ ID NO: 1881571
aggaaucacuauccuguuu

SEQ ID NO: 2054957 - RNA, 19 nt, Artificial Sequence
  Description of Artificial Sequence: Synthetic oligonucleotide
  Antisense strand to SEQ ID NO: 2054956
aaacaggauagugauuccu

SEQ ID NO: 2054958 - RNA, 19 nt, Artificial Sequence
  Description of Artificial Sequence: Synthetic oligonucleotide
  Sense strand starting at position 154 of SEQ ID NO: 1881572
uuuacuagucuguagcaau

SEQ ID NO: 2054959 - RNA, 19 nt, Artificial Sequence
  Description of Artificial Sequence: Synthetic oligonucleotide
  Antisense strand to SEQ ID NO: 2054958
auugcuacagacuaguaaa

SEQ ID NO: 2054960 - RNA, 19 nt, Artificial Sequence
  Description of Artificial Sequence: Synthetic oligonucleotide
  Sense strand starting at position 185 of SEQ ID NO: 1881572
aggccaauggcucaaggau

SEQ ID NO: 2054961 - RNA, 19 nt, Artificial Sequence
  Description of Artificial Sequence: Synthetic oligonucleotide
  Antisense strand to SEQ ID NO: 2054960
auccuugagccauuggccu

SEQ ID NO: 2054962 - RNA, 19 nt, Artificial Sequence
  Description of Artificial Sequence: Synthetic oligonucleotide
  Sense strand starting at position 218 of SEQ ID NO: 1881572
aguugugcugaugaucuua

SEQ ID NO: 2054963 - RNA, 19 nt, Artificial Sequence
  Description of Artificial Sequence: Synthetic oligonucleotide
  Antisense strand to SEQ ID NO: 2054962
uaagaucaucagcacaacu

SEQ ID NO: 2054964 - RNA, 19 nt, Artificial Sequence
  Description of Artificial Sequence: Synthetic oligonucleotide
  Sense strand starting at position 263 of SEQ ID NO: 1881572
gagcuaugagcuuaagcau

SEQ ID NO: 2054965 - RNA, 19 nt, Artificial Sequence
  Description of Artificial Sequence: Synthetic oligonucleotide
  Antisense strand to SEQ ID NO: 2054964
augcuuaagcucauagcuc

SEQ ID NO: 2054966 - RNA, 19 nt, Artificial Sequence
  Description of Artificial Sequence: Synthetic oligonucleotide
  Sense strand starting at position 317 of SEQ ID NO: 1881572
agcuuauuuccugguggca

SEQ ID NO: 2054967 - RNA, 19 nt, Artificial Sequence
  Description of Artificial Sequence: Synthetic oligonucleotide
  Antisense strand to SEQ ID NO: 2054966
ugccaccaggaaauaagcu

SEQ ID NO: 2054968 - RNA, 19 nt, Artificial Sequence
  Description of Artificial Sequence: Synthetic oligonucleotide
  Sense strand starting at position 331 of SEQ ID NO: 1881572
uggcaaauccucugaggau

SEQ ID NO: 2054969 - RNA, 19 nt, Artificial Sequence
  Description of Artificial Sequence: Synthetic oligonucleotide
  Antisense strand to SEQ ID NO: 2054968
auccucagaggauuugcca

SEQ ID NO: 2054970 - RNA, 19 nt, Artificial Sequence
  Description of Artificial Sequence: Synthetic oligonucleotide
  Sense strand starting at position 345 of SEQ ID NO: 1881572
aggaucuauguggguugaa

SEQ ID NO: 2054971 - RNA, 19 nt, Artificial Sequence
  Description of Artificial Sequence: Synthetic oligonucleotide
  Antisense strand to SEQ ID NO: 2054970
uucaacccacauagauccu

SEQ ID NO: 2054972 - RNA, 19 nt, Artificial Sequence
  Description of Artificial Sequence: Synthetic oligonucleotide
  Sense strand starting at position 346 of SEQ ID NO: 1881572
ggaucuauguggguugaau

SEQ ID NO: 2054973 - RNA, 19 nt, Artificial Sequence
  Description of Artificial Sequence: Synthetic oligonucleotide
  Antisense strand to SEQ ID NO: 2054972
auucaacccacauagaucc

SEQ ID NO: 2054974 - RNA, 19 nt, Artificial Sequence
  Description of Artificial Sequence: Synthetic oligonucleotide
  Sense strand starting at position 348 of SEQ ID NO: 1881572
aucuauguggguugaauag

SEQ ID NO: 2054975 - RNA, 19 nt, Artificial Sequence
  Description of Artificial Sequence: Synthetic oligonucleotide
  Antisense strand to SEQ ID NO: 2054974
cuauucaacccacauagau

SEQ ID NO: 2054976 - RNA, 19 nt, Artificial Sequence
  Description of Artificial Sequence: Synthetic oligonucleotide
  Sense strand starting at position 422 of SEQ ID NO: 1881572
acagucuuugcagauauaa

SEQ ID NO: 2054977 - RNA, 19 nt, Artificial Sequence
  Description of Artificial Sequence: Synthetic oligonucleotide
  Antisense strand to SEQ ID NO: 2054976
uuauaucugcaaagacugu

SEQ ID NO: 2054978 - RNA, 19 nt, Artificial Sequence
  Description of Artificial Sequence: Synthetic oligonucleotide
  Sense strand starting at position 779 of SEQ ID NO: 1881572
ggugaccagcucuaugaca

SEQ ID NO: 2054979 - RNA, 19 nt, Artificial Sequence
  Description of Artificial Sequence: Synthetic oligonucleotide
  Antisense strand to SEQ ID NO: 2054978
ugucauagagcuggucacc

SEQ ID NO: 2054980 - RNA, 19 nt, Artificial Sequence
  Description of Artificial Sequence: Synthetic oligonucleotide
  Sense strand starting at position 781 of SEQ ID NO: 1881572
ugaccagcucuaugacacu

SEQ ID NO: 2054981 - RNA, 19 nt, Artificial Sequence
  Description of Artificial Sequence: Synthetic oligonucleotide
  Antisense strand to SEQ ID NO: 2054980
agugucauagagcugguca

SEQ ID NO: 2054982 - RNA, 19 nt, Artificial Sequence
  Description of Artificial Sequence: Synthetic oligonucleotide
  Sense strand starting at position 1362 of SEQ ID NO: 1881572
ggugcacuacauuauuauu

SEQ ID NO: 2054983 - RNA, 19 nt, Artificial Sequence
  Description of Artificial Sequence: Synthetic oligonucleotide
  Antisense strand to SEQ ID NO: 2054982
aauaauaauguagugcacc

SEQ ID NO: 2054984 - RNA, 19 nt, Artificial Sequence
  Description of Artificial Sequence: Synthetic oligonucleotide
  Sense strand starting at position 1670 of SEQ ID NO: 1881572
accagugugcuacauuauu

SEQ ID NO: 2054985 - RNA, 19 nt, Artificial Sequence
  Description of Artificial Sequence: Synthetic oligonucleotide
  Antisense strand to SEQ ID NO: 2054984
aauaauguagcacacuggu

SEQ ID NO: 2054986 - RNA, 19 nt, Artificial Sequence
  Description of Artificial Sequence: Synthetic oligonucleotide
  Sense strand starting at position 1705 of SEQ ID NO: 1881572
cgagaauuauaugcuuacu

SEQ ID NO: 2054987 - RNA, 19 nt, Artificial Sequence
  Description of Artificial Sequence: Synthetic oligonucleotide
  Antisense strand to SEQ ID NO: 2054986
aguaagcauauaauucucg

SEQ ID NO: 2054988 - RNA, 19 nt, Artificial Sequence
  Description of Artificial Sequence: Synthetic oligonucleotide
  Sense strand starting at position 1770 of SEQ ID NO: 1881572
agucuuugcccuuaagaug

SEQ ID NO: 2054989 - RNA, 19 nt, Artificial Sequence
  Description of Artificial Sequence: Synthetic oligonucleotide
  Antisense strand to SEQ ID NO: 2054988
caucuuaagggcaaagacu

SEQ ID NO: 2054990 - RNA, 19 nt, Artificial Sequence
  Description of Artificial Sequence: Synthetic oligonucleotide
  Sense strand starting at position 1904 of SEQ ID NO: 1881572
cuaagauaacagugccaga

SEQ ID NO: 2054991 - RNA, 19 nt, Artificial Sequence
  Description of Artificial Sequence: Synthetic oligonucleotide
  Antisense strand to SEQ ID NO: 2054990
ucuggcacuguuaucuuag

SEQ ID NO: 2054992 - RNA, 19 nt, Artificial Sequence
  Description of Artificial Sequence: Synthetic oligonucleotide
  Sense strand starting at position 1909 of SEQ ID NO: 1881572
auaacagugccagaagagu

SEQ ID NO: 2054993 - RNA, 19 nt, Artificial Sequence
  Description of Artificial Sequence: Synthetic oligonucleotide
  Antisense strand to SEQ ID NO: 2054992
acucuucuggcacuguuau

SEQ ID NO: 2054994 - RNA, 19 nt, Artificial Sequence
  Description of Artificial Sequence: Synthetic oligonucleotide
  Sense strand starting at position 1922 of SEQ ID NO: 1881572
aagaguuagugucugauga

SEQ ID NO: 2054995 - RNA, 19 nt, Artificial Sequence
  Description of Artificial Sequence: Synthetic oligonucleotide
  Antisense strand to SEQ ID NO: 2054994
ucaucagacacuaacucuu

SEQ ID NO: 2054996 - RNA, 19 nt, Artificial Sequence
  Description of Artificial Sequence: Synthetic oligonucleotide
  Sense strand starting at position 1923 of SEQ ID NO: 1881572
agaguuagugucugaugag

SEQ ID NO: 2054997 - RNA, 19 nt, Artificial Sequence
  Description of Artificial Sequence: Synthetic oligonucleotide
  Antisense strand to SEQ ID NO: 2054996
cucaucagacacuaacucu

SEQ ID NO: 2054998 - RNA, 19 nt, Artificial Sequence
  Description of Artificial Sequence: Synthetic oligonucleotide
  Sense strand starting at position 1935 of SEQ ID NO: 1881572
ugaugaggucuugaguugu

SEQ ID NO: 2054999 - RNA, 19 nt, Artificial Sequence
  Description of Artificial Sequence: Synthetic oligonucleotide
  Antisense strand to SEQ ID NO: 2054998
acaacucaagaccucauca

SEQ ID NO: 2055000 - RNA, 19 nt, Artificial Sequence
  Description of Artificial Sequence: Synthetic oligonucleotide
  Sense strand starting at position 1939 of SEQ ID NO: 1881572
gaggucuugaguuguagau

SEQ ID NO: 2055001 - RNA, 19 nt, Artificial Sequence
  Description of Artificial Sequence: Synthetic oligonucleotide
  Antisense strand to SEQ ID NO: 2055000
aucuacaacucaagaccuc

SEQ ID NO: 2055002 - RNA, 19 nt, Artificial Sequence
  Description of Artificial Sequence: Synthetic oligonucleotide
  Sense strand starting at position 2040 of SEQ ID NO: 1881572
guucuauuggauuaggguu

SEQ ID NO: 2055003 - RNA, 19 nt, Artificial Sequence
  Description of Artificial Sequence: Synthetic oligonucleotide
  Antisense strand to SEQ ID NO: 2055002
aacccuaauccaauagaac

SEQ ID NO: 2055004 - RNA, 19 nt, Artificial Sequence
  Description of Artificial Sequence: Synthetic oligonucleotide
  Sense strand starting at position 2227 of SEQ ID NO: 1881572
acauaauugccaugugaug

SEQ ID NO: 2055005 - RNA, 19 nt, Artificial Sequence
  Description of Artificial Sequence: Synthetic oligonucleotide
  Antisense strand to SEQ ID NO: 2055004
caucacauggcaauuaugu

SEQ ID NO: 2055006 - RNA, 19 nt, Artificial Sequence
  Description of Artificial Sequence: Synthetic oligonucleotide
  Sense strand starting at position 2233 of SEQ ID NO: 1881572
uugccaugugaugaaacaa

SEQ ID NO: 2055007 - RNA, 19 nt, Artificial Sequence
  Description of Artificial Sequence: Synthetic oligonucleotide
  Antisense strand to SEQ ID NO: 2055006
uuguuucaucacauggcaa

SEQ ID NO: 2055008 - RNA, 19 nt, Artificial Sequence
  Description of Artificial Sequence: Synthetic oligonucleotide
  Sense strand starting at position 2398 of SEQ ID NO: 1881572
acaacaugaucuguugagu

SEQ ID NO: 2055009 - RNA, 19 nt, Artificial Sequence
  Description of Artificial Sequence: Synthetic oligonucleotide
  Antisense strand to SEQ ID NO: 2055008
acucaacagaucauguugu

SEQ ID NO: 2055010 - RNA, 19 nt, Artificial Sequence
  Description of Artificial Sequence: Synthetic oligonucleotide
  Sense strand starting at position 2425 of SEQ ID NO: 1881572
aguaauucaggauggcuga

SEQ ID NO: 2055011 - RNA, 19 nt, Artificial Sequence
  Description of Artificial Sequence: Synthetic oligonucleotide
  Antisense strand to SEQ ID NO: 2055010
ucagccauccugaauuacu

SEQ ID NO: 2055012 - RNA, 19 nt, Artificial Sequence
  Description of Artificial Sequence: Synthetic oligonucleotide
  Sense strand starting at position 2450 of SEQ ID NO: 1881572
cagagaguggcuuagggua

SEQ ID NO: 2055013 - RNA, 19 nt, Artificial Sequence
  Description of Artificial Sequence: Synthetic oligonucleotide
  Antisense strand to SEQ ID NO: 2055012
uacccuaagccacucucug

SEQ ID NO: 2055014 - RNA, 19 nt, Artificial Sequence
  Description of Artificial Sequence: Synthetic oligonucleotide
  Sense strand starting at position 2557 of SEQ ID NO: 1881572
gcuguagucacuguguguu

SEQ ID NO: 2055015 - RNA, 19 nt, Artificial Sequence
  Description of Artificial Sequence: Synthetic oligonucleotide
  Antisense strand to SEQ ID NO: 2055014
aacacacagugacuacagc

SEQ ID NO: 2055016 - RNA, 19 nt, Artificial Sequence
  Description of Artificial Sequence: Synthetic oligonucleotide
  Sense strand starting at position 2610 of SEQ ID NO: 1881572
gccucaguccuagacacau

SEQ ID NO: 2055017 - RNA, 19 nt, Artificial Sequence
  Description of Artificial Sequence: Synthetic oligonucleotide
  Antisense strand to SEQ ID NO: 2055016
augugucuaggacugaggc

SEQ ID NO: 2055018 - RNA, 19 nt, Artificial Sequence
  Description of Artificial Sequence: Synthetic oligonucleotide
  Sense strand starting at position 2705 of SEQ ID NO: 1881572
auagcugcccaguagagaa

SEQ ID NO: 2055019 - RNA, 19 nt, Artificial Sequence
  Description of Artificial Sequence: Synthetic oligonucleotide
  Antisense strand to SEQ ID NO: 2055018
uucucuacugggcagcuau

SEQ ID NO: 2055020 - RNA, 19 nt, Artificial Sequence
  Description of Artificial Sequence: Synthetic oligonucleotide
  Sense strand starting at position 2776 of SEQ ID NO: 1881572
auaauagacuugcccaaga

SEQ ID NO: 2055021 - RNA, 19 nt, Artificial Sequence
  Description of Artificial Sequence: Synthetic oligonucleotide
  Antisense strand to SEQ ID NO: 2055020
ucuugggcaagucuauuau

SEQ ID NO: 2055022 - RNA, 19 nt, Artificial Sequence
  Description of Artificial Sequence: Synthetic oligonucleotide
  Sense strand starting at position 2792 of SEQ ID NO: 1881572
agaucagaggacugugcua

SEQ ID NO: 2055023 - RNA, 19 nt, Artificial Sequence
  Description of Artificial Sequence: Synthetic oligonucleotide
  Antisense strand to SEQ ID NO: 2055022
uagcacaguccucugaucu

SEQ ID NO: 2055024 - RNA, 19 nt, Artificial Sequence
  Description of Artificial Sequence: Synthetic oligonucleotide
  Sense strand starting at position 2895 of SEQ ID NO: 1881572
uugcuucuugugcuguaau

SEQ ID NO: 2055025 - RNA, 19 nt, Artificial Sequence
  Description of Artificial Sequence: Synthetic oligonucleotide
  Antisense strand to SEQ ID NO: 2055024
auuacagcacaagaagcaa

SEQ ID NO: 2055026 - RNA, 19 nt, Artificial Sequence
  Description of Artificial Sequence: Synthetic oligonucleotide
  Sense strand starting at position 3095 of SEQ ID NO: 1881572
ggacacuucgccgagagga

SEQ ID NO: 2055027 - RNA, 19 nt, Artificial Sequence
  Description of Artificial Sequence: Synthetic oligonucleotide
  Antisense strand to SEQ ID NO: 2055026
uccucucggcgaagugucc

SEQ ID NO: 2055028 - RNA, 19 nt, Artificial Sequence
  Description of Artificial Sequence: Synthetic oligonucleotide
  Sense strand starting at position 3397 of SEQ ID NO: 1881572
aggaauggguucccuaagu

SEQ ID NO: 2055029 - RNA, 19 nt, Artificial Sequence
  Description of Artificial Sequence: Synthetic oligonucleotide
  Antisense strand to SEQ ID NO: 2055028
acuuagggaacccauuccu

SEQ ID NO: 2055030 - RNA, 19 nt, Artificial Sequence
  Description of Artificial Sequence: Synthetic oligonucleotide
  Sense strand starting at position 3592 of SEQ ID NO: 1881572
uuauuccaacgugaaguuu

SEQ ID NO: 2055031 - RNA, 19 nt, Artificial Sequence
  Description of Artificial Sequence: Synthetic oligonucleotide
  Antisense strand to SEQ ID NO: 2055030
aaacuucacguuggaauaa

SEQ ID NO: 2055032 - RNA, 19 nt, Artificial Sequence
  Description of Artificial Sequence: Synthetic oligonucleotide
  Sense strand starting at position 3598 of SEQ ID NO: 1881572
caacgugaaguuuaaauuc

SEQ ID NO: 2055033 - RNA, 19 nt, Artificial Sequence
  Description of Artificial Sequence: Synthetic oligonucleotide
  Antisense strand to SEQ ID NO: 2055032
gaauuuaaacuucacguug

SEQ ID NO: 2055034 - RNA, 19 nt, Artificial Sequence
  Description of Artificial Sequence: Synthetic oligonucleotide
  Sense strand starting at position 3614 of SEQ ID NO: 1881572
uucuuauaaguuugggaaa

SEQ ID NO: 2055035 - RNA, 19 nt, Artificial Sequence
  Description of Artificial Sequence: Synthetic oligonucleotide
  Antisense strand to SEQ ID NO: 2055034
uuucccaaacuuauaagaa

SEQ ID NO: 2055036 - RNA, 19 nt, Artificial Sequence
  Description of Artificial Sequence: Synthetic oligonucleotide
  Sense strand starting at position 3883 of SEQ ID NO: 1881572
gccacagucccagagcauu

SEQ ID NO: 2055037 - RNA, 19 nt, Artificial Sequence
  Description of Artificial Sequence: Synthetic oligonucleotide
  Antisense strand to SEQ ID NO: 2055036
aaugcucugggacuguggc

SEQ ID NO: 2055038 - RNA, 19 nt, Artificial Sequence
  Description of Artificial Sequence: Synthetic oligonucleotide
  Sense strand starting at position 1480 of SEQ ID NO: 1881573
auuccugcguggucugaca

SEQ ID NO: 2055039 - RNA, 19 nt, Artificial Sequence
  Description of Artificial Sequence: Synthetic oligonucleotide
  Antisense strand to SEQ ID NO: 2055038
ugucagaccacgcaggaau

SEQ ID NO: 2055040 - RNA, 19 nt, Artificial Sequence
  Description of Artificial Sequence: Synthetic oligonucleotide
  Sense strand starting at position 1514 of SEQ ID NO: 1881573
uguauaaucagagacgcgu

SEQ ID NO: 2055041 - RNA, 19 nt, Artificial Sequence
  Description of Artificial Sequence: Synthetic oligonucleotide
  Antisense strand to SEQ ID NO: 2055040
acgcgucucugauuauaca

SEQ ID NO: 2055042 - RNA, 19 nt, Artificial Sequence
  Description of Artificial Sequence: Synthetic oligonucleotide
  Sense strand starting at position 1896 of SEQ ID NO: 1881573
ucaugcacgucuguuugaa

SEQ ID NO: 2055043 - RNA, 19 nt, Artificial Sequence
  Description of Artificial Sequence: Synthetic oligonucleotide
  Antisense strand to SEQ ID NO: 2055042
uucaaacagacgugcauga

SEQ ID NO: 2055044 - RNA, 19 nt, Artificial Sequence
  Description of Artificial Sequence: Synthetic oligonucleotide
  Sense strand starting at position 1898 of SEQ ID NO: 1881573
augcacgucuguuugaaga

SEQ ID NO: 2055045 - RNA, 19 nt, Artificial Sequence
  Description of Artificial Sequence: Synthetic oligonucleotide
  Antisense strand to SEQ ID NO: 2055044
ucuucaaacagacgugcau

SEQ ID NO: 2055046 - RNA, 19 nt, Artificial Sequence
  Description of Artificial Sequence: Synthetic oligonucleotide
  Sense strand starting at position 2148 of SEQ ID NO: 1881573
aggacuuucgcacgguaau

SEQ ID NO: 2055047 - RNA, 19 nt, Artificial Sequence
  Description of Artificial Sequence: Synthetic oligonucleotide
  Antisense strand to SEQ ID NO: 2055046
auuaccgugcgaaaguccu

SEQ ID NO: 2055048 - RNA, 19 nt, Artificial Sequence
  Description of Artificial Sequence: Synthetic oligonucleotide
  Sense strand starting at position 2149 of SEQ ID NO: 1881573
ggacuuucgcacgguaaug

SEQ ID NO: 2055049 - RNA, 19 nt, Artificial Sequence
  Description of Artificial Sequence: Synthetic oligonucleotide
  Antisense strand to SEQ ID NO: 2055048
cauuaccgugcgaaagucc

SEQ ID NO: 2055050 - RNA, 19 nt, Artificial Sequence
  Description of Artificial Sequence: Synthetic oligonucleotide
  Sense strand starting at position 2159 of SEQ ID NO: 1881573
acgguaaugucaucacuua

SEQ ID NO: 2055051 - RNA, 19 nt, Artificial Sequence
  Description of Artificial Sequence: Synthetic oligonucleotide
  Antisense strand to SEQ ID NO: 2055050
uaagugaugacauuaccgu

SEQ ID NO: 2055052 - RNA, 19 nt, Artificial Sequence
  Description of Artificial Sequence: Synthetic oligonucleotide
  Sense strand starting at position 2160 of SEQ ID NO: 1881573
cgguaaugucaucacuuaa

SEQ ID NO: 2055053 - RNA, 19 nt, Artificial Sequence
  Description of Artificial Sequence: Synthetic oligonucleotide
  Antisense strand to SEQ ID NO: 2055052
uuaagugaugacauuaccg

SEQ ID NO: 2055054 - RNA, 19 nt, Artificial Sequence
  Description of Artificial Sequence: Synthetic oligonucleotide
  Sense strand starting at position 2346 of SEQ ID NO: 1881573
agaaucuguauuggaugua

SEQ ID NO: 2055055 - RNA, 19 nt, Artificial Sequence
  Description of Artificial Sequence: Synthetic oligonucleotide
  Antisense strand to SEQ ID NO: 2055054
uacauccaauacagauucu

SEQ ID NO: 2055056 - RNA, 19 nt, Artificial Sequence
  Description of Artificial Sequence: Synthetic oligonucleotide
  Sense strand starting at position 2347 of SEQ ID NO: 1881573
gaaucuguauuggauguaa

SEQ ID NO: 2055057 - RNA, 19 nt, Artificial Sequence
  Description of Artificial Sequence: Synthetic oligonucleotide
  Antisense strand to SEQ ID NO: 2055056
uuacauccaauacagauuc

SEQ ID NO: 2055058 - RNA, 19 nt, Artificial Sequence
  Description of Artificial Sequence: Synthetic oligonucleotide
  Sense strand starting at position 2351 of SEQ ID NO: 1881573
cuguauuggauguaagcau

SEQ ID NO: 2055059 - RNA, 19 nt, Artificial Sequence
  Description of Artificial Sequence: Synthetic oligonucleotide
  Antisense strand to SEQ ID NO: 2055058
augcuuacauccaauacag

SEQ ID NO: 2055060 - RNA, 19 nt, Artificial Sequence
  Description of Artificial Sequence: Synthetic oligonucleotide
  Sense strand starting at position 2368 of SEQ ID NO: 1881573
auaucugagcagugcaaga

SEQ ID NO: 2055061 - RNA, 19 nt, Artificial Sequence
  Description of Artificial Sequence: Synthetic oligonucleotide
  Antisense strand to SEQ ID NO: 2055060
ucuugcacugcucagauau

SEQ ID NO: 2055062 - RNA, 19 nt, Artificial Sequence
  Description of Artificial Sequence: Synthetic oligonucleotide
  Sense strand starting at position 2510 of SEQ ID NO: 1881573
aucacaguuugucagagga

SEQ ID NO: 2055063 - RNA, 19 nt, Artificial Sequence
  Description of Artificial Sequence: Synthetic oligonucleotide
  Antisense strand to SEQ ID NO: 2055062
uccucugacaaacugugau

SEQ ID NO: 2055064 - RNA, 19 nt, Artificial Sequence
  Description of Artificial Sequence: Synthetic oligonucleotide
  Sense strand starting at position 2537 of SEQ ID NO: 1881573
agaagugagucccaacaau

SEQ ID NO: 2055065 - RNA, 19 nt, Artificial Sequence
  Description of Artificial Sequence: Synthetic oligonucleotide
  Antisense strand to SEQ ID NO: 2055064
auuguugggacucacuucu

SEQ ID NO: 2055066 - RNA, 19 nt, Artificial Sequence
  Description of Artificial Sequence: Synthetic oligonucleotide
  Sense strand starting at position 2654 of SEQ ID NO: 1881573
aguacugguauccaaguuu

SEQ ID NO: 2055067 - RNA, 19 nt, Artificial Sequence
  Description of Artificial Sequence: Synthetic oligonucleotide
  Antisense strand to SEQ ID NO: 2055066
aaacuuggauaccaguacu

SEQ ID NO: 2055068 - RNA, 19 nt, Artificial Sequence
  Description of Artificial Sequence: Synthetic oligonucleotide
  Sense strand starting at position 2733 of SEQ ID NO: 1881573
cuuaacugucaggaagcuu

SEQ ID NO: 2055069 - RNA, 19 nt, Artificial Sequence
  Description of Artificial Sequence: Synthetic oligonucleotide
  Antisense strand to SEQ ID NO: 2055068
aagcuuccugacaguuaag

SEQ ID NO: 2055070 - RNA, 19 nt, Artificial Sequence
  Description of Artificial Sequence: Synthetic oligonucleotide
  Sense strand starting at position 2805 of SEQ ID NO: 1881573
ccagcaauauagcuggaaa

SEQ ID NO: 2055071 - RNA, 19 nt, Artificial Sequence
  Description of Artificial Sequence: Synthetic oligonucleotide
  Antisense strand to SEQ ID NO: 2055070
uuuccagcuauauugcugg

SEQ ID NO: 2055072 - RNA, 19 nt, Artificial Sequence
  Description of Artificial Sequence: Synthetic oligonucleotide
  Sense strand starting at position 2838 of SEQ ID NO: 1881573
uuacucugauggucucaga

SEQ ID NO: 2055073 - RNA, 19 nt, Artificial Sequence
  Description of Artificial Sequence: Synthetic oligonucleotide
  Antisense strand to SEQ ID NO: 2055072
ucugagaccaucagaguaa

SEQ ID NO: 2055074 - RNA, 19 nt, Artificial Sequence
  Description of Artificial Sequence: Synthetic oligonucleotide
  Sense strand starting at position 2841 of SEQ ID NO: 1881573
cucugauggucucagaaug

SEQ ID NO: 2055075 - RNA, 19 nt, Artificial Sequence
  Description of Artificial Sequence: Synthetic oligonucleotide
  Antisense strand to SEQ ID NO: 2055074
cauucugagaccaucagag

SEQ ID NO: 2055076 - RNA, 19 nt, Artificial Sequence
  Description of Artificial Sequence: Synthetic oligonucleotide
  Sense strand starting at position 2846 of SEQ ID NO: 1881573
auggucucagaauguuagu

SEQ ID NO: 2055077 - RNA, 19 nt, Artificial Sequence
  Description of Artificial Sequence: Synthetic oligonucleotide
  Antisense strand to SEQ ID NO: 2055076
acuaacauucugagaccau

SEQ ID NO: 2055078 - RNA, 19 nt, Artificial Sequence
  Description of Artificial Sequence: Synthetic oligonucleotide
  Sense strand starting at position 2851 of SEQ ID NO: 1881573
cucagaauguuaguaacaa

SEQ ID NO: 2055079 - RNA, 19 nt, Artificial Sequence
  Description of Artificial Sequence: Synthetic oligonucleotide
  Antisense strand to SEQ ID NO: 2055078
uuguuacuaacauucugag

SEQ ID NO: 2055080 - RNA, 19 nt, Artificial Sequence
  Description of Artificial Sequence: Synthetic oligonucleotide
  Sense strand starting at position 2852 of SEQ ID NO: 1881573
ucagaauguuaguaacaaa

SEQ ID NO: 2055081 - RNA, 19 nt, Artificial Sequence
  Description of Artificial Sequence: Synthetic oligonucleotide
  Antisense strand to SEQ ID NO: 2055080
uuuguuacuaacauucuga

SEQ ID NO: 2055082 - RNA, 19 nt, Artificial Sequence
  Description of Artificial Sequence: Synthetic oligonucleotide
  Sense strand starting at position 2927 of SEQ ID NO: 1881573
acugauggccuauguuauu

SEQ ID NO: 2055083 - RNA, 19 nt, Artificial Sequence
  Description of Artificial Sequence: Synthetic oligonucleotide
  Antisense strand to SEQ ID NO: 2055082
aauaacauaggccaucagu

SEQ ID NO: 2055084 - RNA, 19 nt, Artificial Sequence
  Description of Artificial Sequence: Synthetic oligonucleotide
  Sense strand starting at position 3094 of SEQ ID NO: 1881573
cuguaauaauuaucucgaa

SEQ ID NO: 2055085 - RNA, 19 nt, Artificial Sequence
  Description of Artificial Sequence: Synthetic oligonucleotide
  Antisense strand to SEQ ID NO: 2055084
uucgagauaauuauuacag

SEQ ID NO: 2055086 - RNA, 19 nt, Artificial Sequence
  Description of Artificial Sequence: Synthetic oligonucleotide
  Sense strand starting at position 3107 of SEQ ID NO: 1881573
cucgaaauaugcuuaugaa

SEQ ID NO: 2055087 - RNA, 19 nt, Artificial Sequence
  Description of Artificial Sequence: Synthetic oligonucleotide
  Antisense strand to SEQ ID NO: 2055086
uucauaagcauauuucgag

SEQ ID NO: 2055088 - RNA, 19 nt, Artificial Sequence
  Description of Artificial Sequence: Synthetic oligonucleotide
  Sense strand starting at position 3108 of SEQ ID NO: 1881573
ucgaaauaugcuuaugaaa

SEQ ID NO: 2055089 - RNA, 19 nt, Artificial Sequence
  Description of Artificial Sequence: Synthetic oligonucleotide
  Antisense strand to SEQ ID NO: 2055088
uuucauaagcauauuucga

SEQ ID NO: 2055090 - RNA, 19 nt, Artificial Sequence
  Description of Artificial Sequence: Synthetic oligonucleotide
  Sense strand starting at position 3126 of SEQ ID NO: 1881573
acaagauagugauugcaaa

SEQ ID NO: 2055091 - RNA, 19 nt, Artificial Sequence
  Description of Artificial Sequence: Synthetic oligonucleotide
  Antisense strand to SEQ ID NO: 2055090
uuugcaaucacuaucuugu

SEQ ID NO: 2055092 - RNA, 19 nt, Artificial Sequence
  Description of Artificial Sequence: Synthetic oligonucleotide
  Sense strand starting at position 3146 of SEQ ID NO: 1881573
ugcaucauuuagugaaaua

SEQ ID NO: 2055093 - RNA, 19 nt, Artificial Sequence
  Description of Artificial Sequence: Synthetic oligonucleotide
  Antisense strand to SEQ ID NO: 2055092
uauuucacuaaaugaugca

SEQ ID NO: 2055094 - RNA, 19 nt, Artificial Sequence
  Description of Artificial Sequence: Synthetic oligonucleotide
  Sense strand starting at position 3206 of SEQ ID NO: 1881573
gaagguaggugucacaaau

SEQ ID NO: 2055095 - RNA, 19 nt, Artificial Sequence
  Description of Artificial Sequence: Synthetic oligonucleotide
  Antisense strand to SEQ ID NO: 2055094
auuugugacaccuaccuuc

SEQ ID NO: 2055096 - RNA, 19 nt, Artificial Sequence
  Description of Artificial Sequence: Synthetic oligonucleotide
  Sense strand starting at position 3296 of SEQ ID NO: 1881573
ggaauagaauauugaaaug

SEQ ID NO: 2055097 - RNA, 19 nt, Artificial Sequence
  Description of Artificial Sequence: Synthetic oligonucleotide
  Antisense strand to SEQ ID NO: 2055096
cauuucaauauucuauucc

SEQ ID NO: 2055098 - RNA, 19 nt, Artificial Sequence
  Description of Artificial Sequence: Synthetic oligonucleotide
  Sense strand starting at position 3301 of SEQ ID NO: 1881573
agaauauugaaaugugguu

SEQ ID NO: 2055099 - RNA, 19 nt, Artificial Sequence
  Description of Artificial Sequence: Synthetic oligonucleotide
  Antisense strand to SEQ ID NO: 2055098
aaccacauuucaauauucu

SEQ ID NO: 2055100 - RNA, 19 nt, Artificial Sequence
  Description of Artificial Sequence: Synthetic oligonucleotide
  Sense strand starting at position 3315 of SEQ ID NO: 1881573
ugguuuauuacauggaaag

SEQ ID NO: 2055101 - RNA, 19 nt, Artificial Sequence
  Description of Artificial Sequence: Synthetic oligonucleotide
  Antisense strand to SEQ ID NO: 2055100
cuuuccauguaauaaacca

SEQ ID NO: 2055102 - RNA, 19 nt, Artificial Sequence
  Description of Artificial Sequence: Synthetic oligonucleotide
  Sense strand starting at position 3316 of SEQ ID NO: 1881573
gguuuauuacauggaaagc

SEQ ID NO: 2055103 - RNA, 19 nt, Artificial Sequence
  Description of Artificial Sequence: Synthetic oligonucleotide
  Antisense strand to SEQ ID NO: 2055102
gcuuuccauguaauaaacc

SEQ ID NO: 2055104 - RNA, 19 nt, Artificial Sequence
  Description of Artificial Sequence: Synthetic oligonucleotide
  Sense strand starting at position 3327 of SEQ ID NO: 1881573
uggaaagcuuuagugagga

SEQ ID NO: 2055105 - RNA, 19 nt, Artificial Sequence
  Description of Artificial Sequence: Synthetic oligonucleotide
  Antisense strand to SEQ ID NO: 2055104
uccucacuaaagcuuucca

SEQ ID NO: 2055106 - RNA, 19 nt, Artificial Sequence
  Description of Artificial Sequence: Synthetic oligonucleotide
  Sense strand starting at position 3389 of SEQ ID NO: 1881573
ucauaaagucaguaauggu

SEQ ID NO: 2055107 - RNA, 19 nt, Artificial Sequence
  Description of Artificial Sequence: Synthetic oligonucleotide
  Antisense strand to SEQ ID NO: 2055106
accauuacugacuuuauga

SEQ ID NO: 2055108 - RNA, 19 nt, Artificial Sequence
  Description of Artificial Sequence: Synthetic oligonucleotide
  Sense strand starting at position 3398 of SEQ ID NO: 1881573
caguaaugguguuuauaau

SEQ ID NO: 2055109 - RNA, 19 nt, Artificial Sequence
  Description of Artificial Sequence: Synthetic oligonucleotide
  Antisense strand to SEQ ID NO: 2055108
auuauaaacaccauuacug

SEQ ID NO: 2055110 - RNA, 19 nt, Artificial Sequence
  Description of Artificial Sequence: Synthetic oligonucleotide
  Sense strand starting at position 3399 of SEQ ID NO: 1881573
aguaaugguguuuauaaug

SEQ ID NO: 2055111 - RNA, 19 nt, Artificial Sequence
  Description of Artificial Sequence: Synthetic oligonucleotide
  Antisense strand to SEQ ID NO: 2055110
cauuauaaacaccauuacu

SEQ ID NO: 2055112 - RNA, 19 nt, Artificial Sequence
  Description of Artificial Sequence: Synthetic oligonucleotide
  Sense strand starting at position 3417 of SEQ ID NO: 1881573
ggugccuaucucugguuaa

SEQ ID NO: 2055113 - RNA, 19 nt, Artificial Sequence
  Description of Artificial Sequence: Synthetic oligonucleotide
  Antisense strand to SEQ ID NO: 2055112
uuaaccagagauaggcacc

SEQ ID NO: 2055114 - RNA, 19 nt, Artificial Sequence
  Description of Artificial Sequence: Synthetic oligonucleotide
  Sense strand starting at position 3420 of SEQ ID NO: 1881573
gccuaucucugguuaaaca

SEQ ID NO: 2055115 - RNA, 19 nt, Artificial Sequence
  Description of Artificial Sequence: Synthetic oligonucleotide
  Antisense strand to SEQ ID NO: 2055114
uguuuaaccagagauaggc

SEQ ID NO: 2055116 - RNA, 19 nt, Artificial Sequence
  Description of Artificial Sequence: Synthetic oligonucleotide
  Sense strand starting at position 3955 of SEQ ID NO: 1881573
gaauaaacaugguaggaaa

SEQ ID NO: 2055117 - RNA, 19 nt, Artificial Sequence
  Description of Artificial Sequence: Synthetic oligonucleotide
  Antisense strand to SEQ ID NO: 2055116
uuuccuaccauguuuauuc

SEQ ID NO: 2055118 - RNA, 19 nt, Artificial Sequence
  Description of Artificial Sequence: Synthetic oligonucleotide
  Sense strand starting at position 650 of SEQ ID NO: 1881574
accguaauacuguacaauc

SEQ ID NO: 2055119 - RNA, 19 nt, Artificial Sequence
  Description of Artificial Sequence: Synthetic oligonucleotide
  Antisense strand to SEQ ID NO: 2055118
gauuguacaguauuacggu

SEQ ID NO: 2055120 - RNA, 19 nt, Artificial Sequence
  Description of Artificial Sequence: Synthetic oligonucleotide
  Sense strand starting at position 731 of SEQ ID NO: 1881574
aaauuaugccagcaagagu

SEQ ID NO: 2055121 - RNA, 19 nt, Artificial Sequence
  Description of Artificial Sequence: Synthetic oligonucleotide
  Antisense strand to SEQ ID NO: 2055120
acucuugcuggcauaauuu

SEQ ID NO: 2055122 - RNA, 19 nt, Artificial Sequence
  Description of Artificial Sequence: Synthetic oligonucleotide
  Sense strand starting at position 753 of SEQ ID NO: 1881574
auaccuaugcaucgaaaug

SEQ ID NO: 2055123 - RNA, 19 nt, Artificial Sequence
  Description of Artificial Sequence: Synthetic oligonucleotide
  Antisense strand to SEQ ID NO: 2055122
cauuucgaugcauagguau

SEQ ID NO: 2055124 - RNA, 19 nt, Artificial Sequence
  Description of Artificial Sequence: Synthetic oligonucleotide
  Sense strand starting at position 762 of SEQ ID NO: 1881574
caucgaaauguacagucaa

SEQ ID NO: 2055125 - RNA, 19 nt, Artificial Sequence
  Description of Artificial Sequence: Synthetic oligonucleotide
  Antisense strand to SEQ ID NO: 2055124
uugacuguacauuucgaug

SEQ ID NO: 2055126 - RNA, 19 nt, Artificial Sequence
  Description of Artificial Sequence: Synthetic oligonucleotide
  Sense strand starting at position 852 of SEQ ID NO: 1881574
caguguuaucacugaccag

SEQ ID NO: 2055127 - RNA, 19 nt, Artificial Sequence
  Description of Artificial Sequence: Synthetic oligonucleotide
  Antisense strand to SEQ ID NO: 2055126
cuggucagugauaacacug

SEQ ID NO: 2055128 - RNA, 19 nt, Artificial Sequence
  Description of Artificial Sequence: Synthetic oligonucleotide
  Sense strand starting at position 864 of SEQ ID NO: 1881574
ugaccagcuguguaaccau

SEQ ID NO: 2055129 - RNA, 19 nt, Artificial Sequence
  Description of Artificial Sequence: Synthetic oligonucleotide
  Antisense strand to SEQ ID NO: 2055128
augguuacacagcugguca

SEQ ID NO: 2055130 - RNA, 19 nt, Artificial Sequence
  Description of Artificial Sequence: Synthetic oligonucleotide
  Sense strand starting at position 1028 of SEQ ID NO: 1881574
gcaaccaacugucuuuaga

SEQ ID NO: 2055131 - RNA, 19 nt, Artificial Sequence
  Description of Artificial Sequence: Synthetic oligonucleotide
  Antisense strand to SEQ ID NO: 2055130
ucuaaagacaguugguugc

SEQ ID NO: 2055132 - RNA, 19 nt, Artificial Sequence
  Description of Artificial Sequence: Synthetic oligonucleotide
  Sense strand starting at position 1315 of SEQ ID NO: 1881574
uccucaucucagggaaaug

SEQ ID NO: 2055133 - RNA, 19 nt, Artificial Sequence
  Description of Artificial Sequence: Synthetic oligonucleotide
  Antisense strand to SEQ ID NO: 2055132
cauuucccugagaugagga

SEQ ID NO: 2055134 - RNA, 19 nt, Artificial Sequence
  Description of Artificial Sequence: Synthetic oligonucleotide
  Sense strand starting at position 1326 of SEQ ID NO: 1881574
gggaaauggaacugugagu

SEQ ID NO: 2055135 - RNA, 19 nt, Artificial Sequence
  Description of Artificial Sequence: Synthetic oligonucleotide
  Antisense strand to SEQ ID NO: 2055134
acucacaguuccauuuccc

SEQ ID NO: 2055136 - RNA, 19 nt, Artificial Sequence
  Description of Artificial Sequence: Synthetic oligonucleotide
  Sense strand starting at position 1395 of SEQ ID NO: 1881574
ggguaucauuuggaaacuu

SEQ ID NO: 2055137 - RNA, 19 nt, Artificial Sequence
  Description of Artificial Sequence: Synthetic oligonucleotide
  Antisense strand to SEQ ID NO: 2055136
aaguuuccaaaugauaccc

SEQ ID NO: 2055138 - RNA, 19 nt, Artificial Sequence
  Description of Artificial Sequence: Synthetic oligonucleotide
  Sense strand starting at position 1476 of SEQ ID NO: 1881574
ugaggcaugccugaacagu

SEQ ID NO: 2055139 - RNA, 19 nt, Artificial Sequence
  Description of Artificial Sequence: Synthetic oligonucleotide
  Antisense strand to SEQ ID NO: 2055138
acuguucaggcaugccuca

SEQ ID NO: 2055140 - RNA, 19 nt, Artificial Sequence
  Description of Artificial Sequence: Synthetic oligonucleotide
  Sense strand starting at position 1528 of SEQ ID NO: 1881574
gcuuucuuccgagaaugaa

SEQ ID NO: 2055141 - RNA, 19 nt, Artificial Sequence
  Description of Artificial Sequence: Synthetic oligonucleotide
  Antisense strand to SEQ ID NO: 2055140
uucauucucggaagaaagc

SEQ ID NO: 2055142 - RNA, 19 nt, Artificial Sequence
  Description of Artificial Sequence: Synthetic oligonucleotide
  Sense strand starting at position 1614 of SEQ ID NO: 1881574
gaaaguacuuaugaauuug

SEQ ID NO: 2055143 - RNA, 19 nt, Artificial Sequence
  Description of Artificial Sequence: Synthetic oligonucleotide
  Antisense strand to SEQ ID NO: 2055142
caaauucauaaguacuuuc

SEQ ID NO: 2055144 - RNA, 19 nt, Artificial Sequence
  Description of Artificial Sequence: Synthetic oligonucleotide
  Sense strand starting at position 1669 of SEQ ID NO: 1881574
ucuaguuaggaggguuuaa

SEQ ID NO: 2055145 - RNA, 19 nt, Artificial Sequence
  Description of Artificial Sequence: Synthetic oligonucleotide
  Antisense strand to SEQ ID NO: 2055144
uuaaacccuccuaacuaga

SEQ ID NO: 2055146 - RNA, 19 nt, Artificial Sequence
  Description of Artificial Sequence: Synthetic oligonucleotide
  Sense strand starting at position 1748 of SEQ ID NO: 1881574
ccaagugccugacuagaaa

SEQ ID NO: 2055147 - RNA, 19 nt, Artificial Sequence
  Description of Artificial Sequence: Synthetic oligonucleotide
  Antisense strand to SEQ ID NO: 2055146
uuucuagucaggcacuugg

SEQ ID NO: 2055148 - RNA, 19 nt, Artificial Sequence
  Description of Artificial Sequence: Synthetic oligonucleotide
  Sense strand starting at position 1913 of SEQ ID NO: 1881574
uuacuucuuaaguggguga

SEQ ID NO: 2055149 - RNA, 19 nt, Artificial Sequence
  Description of Artificial Sequence: Synthetic oligonucleotide
  Antisense strand to SEQ ID NO: 2055148
ucacccacuuaagaaguaa

SEQ ID NO: 2055150 - RNA, 19 nt, Artificial Sequence
  Description of Artificial Sequence: Synthetic oligonucleotide
  Sense strand starting at position 1981 of SEQ ID NO: 1881574
gacacaagagauggcuuua

SEQ ID NO: 2055151 - RNA, 19 nt, Artificial Sequence
  Description of Artificial Sequence: Synthetic oligonucleotide
  Antisense strand to SEQ ID NO: 2055150
uaaagccaucucuuguguc

SEQ ID NO: 2055152 - RNA, 19 nt, Artificial Sequence
  Description of Artificial Sequence: Synthetic oligonucleotide
  Sense strand starting at position 2005 of SEQ ID NO: 1881574
gcacaaauuagaggcugau

SEQ ID NO: 2055153 - RNA, 19 nt, Artificial Sequence
  Description of Artificial Sequence: Synthetic oligonucleotide
  Antisense strand to SEQ ID NO: 2055152
aucagccucuaauuugugc

SEQ ID NO: 2055154 - RNA, 19 nt, Artificial Sequence
  Description of Artificial Sequence: Synthetic oligonucleotide
  Sense strand starting at position 2055 of SEQ ID NO: 1881574
gggcauaaaugagucaaag

SEQ ID NO: 2055155 - RNA, 19 nt, Artificial Sequence
  Description of Artificial Sequence: Synthetic oligonucleotide
  Antisense strand to SEQ ID NO: 2055154
cuuugacucauuuaugccc

SEQ ID NO: 2055156 - RNA, 19 nt, Artificial Sequence
  Description of Artificial Sequence: Synthetic oligonucleotide
  Sense strand starting at position 2065 of SEQ ID NO: 1881574
gagucaaagccuuaguuug

SEQ ID NO: 2055157 - RNA, 19 nt, Artificial Sequence
  Description of Artificial Sequence: Synthetic oligonucleotide
  Antisense strand to SEQ ID NO: 2055156
caaacuaaggcuuugacuc

SEQ ID NO: 2055158 - RNA, 19 nt, Artificial Sequence
  Description of Artificial Sequence: Synthetic oligonucleotide
  Sense strand starting at position 2206 of SEQ ID NO: 1881574
gcaaauauuucuguuagcu

SEQ ID NO: 2055159 - RNA, 19 nt, Artificial Sequence
  Description of Artificial Sequence: Synthetic oligonucleotide
  Antisense strand to SEQ ID NO: 2055158
agcuaacagaaauauuugc

SEQ ID NO: 2055160 - RNA, 19 nt, Artificial Sequence
  Description of Artificial Sequence: Synthetic oligonucleotide
  Sense strand starting at position 2325 of SEQ ID NO: 1881574
uuuagaacagcucaauugu

SEQ ID NO: 2055161 - RNA, 19 nt, Artificial Sequence
  Description of Artificial Sequence: Synthetic oligonucleotide
  Antisense strand to SEQ ID NO: 2055160
acaauugagcuguucuaaa

SEQ ID NO: 2055162 - RNA, 19 nt, Artificial Sequence
  Description of Artificial Sequence: Synthetic oligonucleotide
  Sense strand starting at position 2454 of SEQ ID NO: 1881574
ugggaagccuaccuucuua

SEQ ID NO: 2055163 - RNA, 19 nt, Artificial Sequence
  Description of Artificial Sequence: Synthetic oligonucleotide
  Antisense strand to SEQ ID NO: 2055162
uaagaagguaggcuuccca

SEQ ID NO: 2055164 - RNA, 19 nt, Artificial Sequence
  Description of Artificial Sequence: Synthetic oligonucleotide
  Sense strand starting at position 2647 of SEQ ID NO: 1881574
agcuuaucucuugaguaug

SEQ ID NO: 2055165 - RNA, 19 nt, Artificial Sequence
  Description of Artificial Sequence: Synthetic oligonucleotide
  Antisense strand to SEQ ID NO: 2055164
cauacucaagagauaagcu

SEQ ID NO: 2055166 - RNA, 19 nt, Artificial Sequence
  Description of Artificial Sequence: Synthetic oligonucleotide
  Sense strand starting at position 2650 of SEQ ID NO: 1881574
uuaucucuugaguauguau

SEQ ID NO: 2055167 - RNA, 19 nt, Artificial Sequence
  Description of Artificial Sequence: Synthetic oligonucleotide
  Antisense strand to SEQ ID NO: 2055166
auacauacucaagagauaa

SEQ ID NO: 2055168 - RNA, 19 nt, Artificial Sequence
  Description of Artificial Sequence: Synthetic oligonucleotide
  Sense strand starting at position 2658 of SEQ ID NO: 1881574
ugaguauguauguacaagu

SEQ ID NO: 2055169 - RNA, 19 nt, Artificial Sequence
  Description of Artificial Sequence: Synthetic oligonucleotide
  Antisense strand to SEQ ID NO: 2055168
acuuguacauacauacuca

SEQ ID NO: 2055170 - RNA, 19 nt, Artificial Sequence
  Description of Artificial Sequence: Synthetic oligonucleotide
  Sense strand starting at position 2844 of SEQ ID NO: 1881574
gugacuggcaucugaaauu

SEQ ID NO: 2055171 - RNA, 19 nt, Artificial Sequence
  Description of Artificial Sequence: Synthetic oligonucleotide
  Antisense strand to SEQ ID NO: 2055170
aauuucagaugccagucac

SEQ ID NO: 2055172 - RNA, 19 nt, Artificial Sequence
  Description of Artificial Sequence: Synthetic oligonucleotide
  Sense strand starting at position 2937 of SEQ ID NO: 1881574
uuuguuuaagucugaugga

SEQ ID NO: 2055173 - RNA, 19 nt, Artificial Sequence
  Description of Artificial Sequence: Synthetic oligonucleotide
  Antisense strand to SEQ ID NO: 2055172
uccaucagacuuaaacaaa

SEQ ID NO: 2055174 - RNA, 19 nt, Artificial Sequence
  Description of Artificial Sequence: Synthetic oligonucleotide
  Sense strand starting at position 3007 of SEQ ID NO: 1881574
ccucaaaguguuuaccauu

SEQ ID NO: 2055175 - RNA, 19 nt, Artificial Sequence
  Description of Artificial Sequence: Synthetic oligonucleotide
  Antisense strand to SEQ ID NO: 2055174
aaugguaaacacuuugagg

SEQ ID NO: 2055176 - RNA, 19 nt, Artificial Sequence
  Description of Artificial Sequence: Synthetic oligonucleotide
  Sense strand starting at position 3080 of SEQ ID NO: 1881574
gaauuucuguaagagaucu

SEQ ID NO: 2055177 - RNA, 19 nt, Artificial Sequence
  Description of Artificial Sequence: Synthetic oligonucleotide
  Antisense strand to SEQ ID NO: 2055176
agaucucuuacagaaauuc

SEQ ID NO: 2055178 - RNA, 19 nt, Artificial Sequence
  Description of Artificial Sequence: Synthetic oligonucleotide
  Sense strand starting at position 3088 of SEQ ID NO: 1881574
guaagagaucuggguuuca

SEQ ID NO: 2055179 - RNA, 19 nt, Artificial Sequence
  Description of Artificial Sequence: Synthetic oligonucleotide
  Antisense strand to SEQ ID NO: 2055178
ugaaacccagaucucuuac

SEQ ID NO: 2055180 - RNA, 19 nt, Artificial Sequence
  Description of Artificial Sequence: Synthetic oligonucleotide
  Sense strand starting at position 3202 of SEQ ID NO: 1881574
uuuaccucccuugaagagu

SEQ ID NO: 2055181 - RNA, 19 nt, Artificial Sequence
  Description of Artificial Sequence: Synthetic oligonucleotide
  Antisense strand to SEQ ID NO: 2055180
acucuucaagggagguaaa

SEQ ID NO: 2055182 - RNA, 19 nt, Artificial Sequence
  Description of Artificial Sequence: Synthetic oligonucleotide
  Sense strand starting at position 3242 of SEQ ID NO: 1881574
acuguaagauuagccugaa

SEQ ID NO: 2055183 - RNA, 19 nt, Artificial Sequence
  Description of Artificial Sequence: Synthetic oligonucleotide
  Antisense strand to SEQ ID NO: 2055182
uucaggcuaaucuuacagu

SEQ ID NO: 2055184 - RNA, 19 nt, Artificial Sequence
  Description of Artificial Sequence: Synthetic oligonucleotide
  Sense strand starting at position 3243 of SEQ ID NO: 1881574
cuguaagauuagccugaaa

SEQ ID NO: 2055185 - RNA, 19 nt, Artificial Sequence
  Description of Artificial Sequence: Synthetic oligonucleotide
  Antisense strand to SEQ ID NO: 2055184
uuucaggcuaaucuuacag

SEQ ID NO: 2055186 - RNA, 19 nt, Artificial Sequence
  Description of Artificial Sequence: Synthetic oligonucleotide
  Sense strand starting at position 3280 of SEQ ID NO: 1881574
ucaaaugugagguaguauu

SEQ ID NO: 2055187 - RNA, 19 nt, Artificial Sequence
  Description of Artificial Sequence: Synthetic oligonucleotide
  Antisense strand to SEQ ID NO: 2055186
aauacuaccucacauuuga

SEQ ID NO: 2055188 - RNA, 19 nt, Artificial Sequence
  Description of Artificial Sequence: Synthetic oligonucleotide
  Sense strand starting at position 3403 of SEQ ID NO: 1881574
gggauuuaguggcaagaga

SEQ ID NO: 2055189 - RNA, 19 nt, Artificial Sequence
  Description of Artificial Sequence: Synthetic oligonucleotide
  Antisense strand to SEQ ID NO: 2055188
ucucuugccacuaaauccc

SEQ ID NO: 2055190 - RNA, 19 nt, Artificial Sequence
  Description of Artificial Sequence: Synthetic oligonucleotide
  Sense strand starting at position 3477 of SEQ ID NO: 1881574
cucagugaccugugauaac

SEQ ID NO: 2055191 - RNA, 19 nt, Artificial Sequence
  Description of Artificial Sequence: Synthetic oligonucleotide
  Antisense strand to SEQ ID NO: 2055190
guuaucacaggucacugag

SEQ ID NO: 2055192 - RNA, 19 nt, Artificial Sequence
  Description of Artificial Sequence: Synthetic oligonucleotide
  Sense strand starting at position 3861 of SEQ ID NO: 1881574
uucuguaagugaccucaaa

SEQ ID NO: 2055193 - RNA, 19 nt, Artificial Sequence
  Description of Artificial Sequence: Synthetic oligonucleotide
  Antisense strand to SEQ ID NO: 2055192
uuugaggucacuuacagaa

SEQ ID NO: 2055194 - RNA, 19 nt, Artificial Sequence
  Description of Artificial Sequence: Synthetic oligonucleotide
  Sense strand starting at position 3945 of SEQ ID NO: 1881574
aaaucaggucuuggauaau

SEQ ID NO: 2055195 - RNA, 19 nt, Artificial Sequence
  Description of Artificial Sequence: Synthetic oligonucleotide
  Antisense strand to SEQ ID NO: 2055194
auuauccaagaccugauuu

SEQ ID NO: 2055196 - RNA, 19 nt, Artificial Sequence
  Description of Artificial Sequence: Synthetic oligonucleotide
  Sense strand starting at position 3951 of SEQ ID NO: 1881574
ggucuuggauaauuccuaa

SEQ ID NO: 2055197 - RNA, 19 nt, Artificial Sequence
  Description of Artificial Sequence: Synthetic oligonucleotide
  Antisense strand to SEQ ID NO: 2055196
uuaggaauuauccaagacc

SEQ ID NO: 2055198 - RNA, 19 nt, Artificial Sequence
  Description of Artificial Sequence: Synthetic oligonucleotide
  Sense strand starting at position 235 of SEQ ID NO: 1881575
cuccuagcccaggaguaua

SEQ ID NO: 2055199 - RNA, 19 nt, Artificial Sequence
  Description of Artificial Sequence: Synthetic oligonucleotide
  Antisense strand to SEQ ID NO: 2055198
uauacuccugggcuaggag

SEQ ID NO: 2055200 - RNA, 19 nt, Artificial Sequence
  Description of Artificial Sequence: Synthetic oligonucleotide
  Sense strand starting at position 541 of SEQ ID NO: 1881575
aggaguauauauucuuaag

SEQ ID NO: 2055201 - RNA, 19 nt, Artificial Sequence
  Description of Artificial Sequence: Synthetic oligonucleotide
  Antisense strand to SEQ ID NO: 2055200
cuuaagaauauauacuccu

SEQ ID NO: 2055202 - RNA, 19 nt, Artificial Sequence
  Description of Artificial Sequence: Synthetic oligonucleotide
  Sense strand starting at position 569 of SEQ ID NO: 1881575
ccaucaagauaggugaauu

SEQ ID NO: 2055203 - RNA, 19 nt, Artificial Sequence
  Description of Artificial Sequence: Synthetic oligonucleotide
  Antisense strand to SEQ ID NO: 2055202
aauucaccuaucuugaugg

SEQ ID NO: 2055204 - RNA, 19 nt, Artificial Sequence
  Description of Artificial Sequence: Synthetic oligonucleotide
  Sense strand starting at position 609 of SEQ ID NO: 1881575
aguguaucgaaaugauauc

SEQ ID NO: 2055205 - RNA, 19 nt, Artificial Sequence
  Description of Artificial Sequence: Synthetic oligonucleotide
  Antisense strand to SEQ ID NO: 2055204
gauaucauuucgauacacu

SEQ ID NO: 2055206 - RNA, 19 nt, Artificial Sequence
  Description of Artificial Sequence: Synthetic oligonucleotide
  Sense strand starting at position 610 of SEQ ID NO: 1881575
guguaucgaaaugauaucu

SEQ ID NO: 2055207 - RNA, 19 nt, Artificial Sequence
  Description of Artificial Sequence: Synthetic oligonucleotide
  Antisense strand to SEQ ID NO: 2055206
agauaucauuucgauacac

SEQ ID NO: 2055208 - RNA, 19 nt, Artificial Sequence
  Description of Artificial Sequence: Synthetic oligonucleotide
  Sense strand starting at position 615 of SEQ ID NO: 1881575
ucgaaaugauaucugcauu

SEQ ID NO: 2055209 - RNA, 19 nt, Artificial Sequence
  Description of Artificial Sequence: Synthetic oligonucleotide
  Antisense strand to SEQ ID NO: 2055208
aaugcagauaucauuucga

SEQ ID NO: 2055210 - RNA, 19 nt, Artificial Sequence
  Description of Artificial Sequence: Synthetic oligonucleotide
  Sense strand starting at position 739 of SEQ ID NO: 1881575
gaguauuauuucgccauua

SEQ ID NO: 2055211 - RNA, 19 nt, Artificial Sequence
  Description of Artificial Sequence: Synthetic oligonucleotide
  Antisense strand to SEQ ID NO: 2055210
uaauggcgaaauaauacuc

SEQ ID NO: 2055212 - RNA, 19 nt, Artificial Sequence
  Description of Artificial Sequence: Synthetic oligonucleotide
  Sense strand starting at position 740 of SEQ ID NO: 1881575
aguauuauuucgccauuaa

SEQ ID NO: 2055213 - RNA, 19 nt, Artificial Sequence
  Description of Artificial Sequence: Synthetic oligonucleotide
  Antisense strand to SEQ ID NO: 2055212
uuaauggcgaaauaauacu

SEQ ID NO: 2055214 - RNA, 19 nt, Artificial Sequence
  Description of Artificial Sequence: Synthetic oligonucleotide
  Sense strand starting at position 981 of SEQ ID NO: 1881575
caugguuaauggguacgaa

SEQ ID NO: 2055215 - RNA, 19 nt, Artificial Sequence
  Description of Artificial Sequence: Synthetic oligonucleotide
  Antisense strand to SEQ ID NO: 2055214
uucguacccauuaaccaug

SEQ ID NO: 2055216 - RNA, 19 nt, Artificial Sequence
  Description of Artificial Sequence: Synthetic oligonucleotide
  Sense strand starting at position 1036 of SEQ ID NO: 1881575
gcacaauagcaugacuaca

SEQ ID NO: 2055217 - RNA, 19 nt, Artificial Sequence
  Description of Artificial Sequence: Synthetic oligonucleotide
  Antisense strand to SEQ ID NO: 2055216
uguagucaugcuauugugc

SEQ ID NO: 2055218 - RNA, 19 nt, Artificial Sequence
  Description of Artificial Sequence: Synthetic oligonucleotide
  Sense strand starting at position 1419 of SEQ ID NO: 1881575
gauaaaugcuuguuaugga

SEQ ID NO: 2055219 - RNA, 19 nt, Artificial Sequence
  Description of Artificial Sequence: Synthetic oligonucleotide
  Antisense strand to SEQ ID NO: 2055218
uccauaacaagcauuuauc

SEQ ID NO: 2055220 - RNA, 19 nt, Artificial Sequence
  Description of Artificial Sequence: Synthetic oligonucleotide
  Sense strand starting at position 1709 of SEQ ID NO: 1881575
aacauaggcuucuuguaag

SEQ ID NO: 2055221 - RNA, 19 nt, Artificial Sequence
  Description of Artificial Sequence: Synthetic oligonucleotide
  Antisense strand to SEQ ID NO: 2055220
cuuacaagaagccuauguu

SEQ ID NO: 2055222 - RNA, 19 nt, Artificial Sequence
  Description of Artificial Sequence: Synthetic oligonucleotide
  Sense strand starting at position 1719 of SEQ ID NO: 1881575
ucuuguaaggauugggauu

SEQ ID NO: 2055223 - RNA, 19 nt, Artificial Sequence
  Description of Artificial Sequence: Synthetic oligonucleotide
  Antisense strand to SEQ ID NO: 2055222
aaucccaauccuuacaaga

SEQ ID NO: 2055224 - RNA, 19 nt, Artificial Sequence
  Description of Artificial Sequence: Synthetic oligonucleotide
  Sense strand starting at position 1720 of SEQ ID NO: 1881575
cuuguaaggauugggauua

SEQ ID NO: 2055225 - RNA, 19 nt, Artificial Sequence
  Description of Artificial Sequence: Synthetic oligonucleotide
  Antisense strand to SEQ ID NO: 2055224
uaaucccaauccuuacaag

SEQ ID NO: 2055226 - RNA, 19 nt, Artificial Sequence
  Description of Artificial Sequence: Synthetic oligonucleotide
  Sense strand starting at position 1750 of SEQ ID NO: 1881575
agcuuagcacaguauuauu

SEQ ID NO: 2055227 - RNA, 19 nt, Artificial Sequence
  Description of Artificial Sequence: Synthetic oligonucleotide
  Antisense strand to SEQ ID NO: 2055226
aauaauacugugcuaagcu

SEQ ID NO: 2055228 - RNA, 19 nt, Artificial Sequence
  Description of Artificial Sequence: Synthetic oligonucleotide
  Sense strand starting at position 1755 of SEQ ID NO: 1881575
agcacaguauuauuacuau

SEQ ID NO: 2055229 - RNA, 19 nt, Artificial Sequence
  Description of Artificial Sequence: Synthetic oligonucleotide
  Antisense strand to SEQ ID NO: 2055228
auaguaauaauacugugcu

SEQ ID NO: 2055230 - RNA, 19 nt, Artificial Sequence
  Description of Artificial Sequence: Synthetic oligonucleotide
  Sense strand starting at position 1954 of SEQ ID NO: 1881575
cggagacggguacgaauua

SEQ ID NO: 2055231 - RNA, 19 nt, Artificial Sequence
  Description of Artificial Sequence: Synthetic oligonucleotide
  Antisense strand to SEQ ID NO: 2055230
uaauucguacccgucuccg

SEQ ID NO: 2055232 - RNA, 19 nt, Artificial Sequence
  Description of Artificial Sequence: Synthetic oligonucleotide
  Sense strand starting at position 2050 of SEQ ID NO: 1881575
ucaucauuacgcgcucuua

SEQ ID NO: 2055233 - RNA, 19 nt, Artificial Sequence
  Description of Artificial Sequence: Synthetic oligonucleotide
  Antisense strand to SEQ ID NO: 2055232
uaagagcgcguaaugauga

SEQ ID NO: 2055234 - RNA, 19 nt, Artificial Sequence
  Description of Artificial Sequence: Synthetic oligonucleotide
  Sense strand starting at position 2172 of SEQ ID NO: 1881575
acaagaucguaaguacuga

SEQ ID NO: 2055235 - RNA, 19 nt, Artificial Sequence
  Description of Artificial Sequence: Synthetic oligonucleotide
  Antisense strand to SEQ ID NO: 2055234
ucaguacuuacgaucuugu

SEQ ID NO: 2055236 - RNA, 19 nt, Artificial Sequence
  Description of Artificial Sequence: Synthetic oligonucleotide
  Sense strand starting at position 2177 of SEQ ID NO: 1881575
aucguaaguacugagggaa

SEQ ID NO: 2055237 - RNA, 19 nt, Artificial Sequence
  Description of Artificial Sequence: Synthetic oligonucleotide
  Antisense strand to SEQ ID NO: 2055236
uucccucaguacuuacgau

SEQ ID NO: 2055238 - RNA, 19 nt, Artificial Sequence
  Description of Artificial Sequence: Synthetic oligonucleotide
  Sense strand starting at position 2200 of SEQ ID NO: 1881575
gaacaagcgagcgauugaa

SEQ ID NO: 2055239 - RNA, 19 nt, Artificial Sequence
  Description of Artificial Sequence: Synthetic oligonucleotide
  Antisense strand to SEQ ID NO: 2055238
uucaaucgcucgcuuguuc

SEQ ID NO: 2055240 - RNA, 19 nt, Artificial Sequence
  Description of Artificial Sequence: Synthetic oligonucleotide
  Sense strand starting at position 2206 of SEQ ID NO: 1881575
gcgagcgauugaacguuaa

SEQ ID NO: 2055241 - RNA, 19 nt, Artificial Sequence
  Description of Artificial Sequence: Synthetic oligonucleotide
  Antisense strand to SEQ ID NO: 2055240
uuaacguucaaucgcucgc

SEQ ID NO: 2055242 - RNA, 19 nt, Artificial Sequence
  Description of Artificial Sequence: Synthetic oligonucleotide
  Sense strand starting at position 2701 of SEQ ID NO: 1881575
ccuuuauugccuugggaau

SEQ ID NO: 2055243 - RNA, 19 nt, Artificial Sequence
  Description of Artificial Sequence: Synthetic oligonucleotide
  Antisense strand to SEQ ID NO: 2055242
auucccaaggcaauaaagg

SEQ ID NO: 2055244 - RNA, 19 nt, Artificial Sequence
  Description of Artificial Sequence: Synthetic oligonucleotide
  Sense strand starting at position 3227 of SEQ ID NO: 1881575
uuauaugaguucuucgaau

SEQ ID NO: 2055245 - RNA, 19 nt, Artificial Sequence
  Description of Artificial Sequence: Synthetic oligonucleotide
  Antisense strand to SEQ ID NO: 2055244
auucgaagaacucauauaa

SEQ ID NO: 2055246 - RNA, 19 nt, Artificial Sequence
  Description of Artificial Sequence: Synthetic oligonucleotide
  Sense strand starting at position 3229 of SEQ ID NO: 1881575
auaugaguucuucgaauau

SEQ ID NO: 2055247 - RNA, 19 nt, Artificial Sequence
  Description of Artificial Sequence: Synthetic oligonucleotide
  Antisense strand to SEQ ID NO: 2055246
auauucgaagaacucauau

SEQ ID NO: 2055248 - RNA, 19 nt, Artificial Sequence
  Description of Artificial Sequence: Synthetic oligonucleotide
  Sense strand starting at position 3279 of SEQ ID NO: 1881575
agggcauccauaggucaga

SEQ ID NO: 2055249 - RNA, 19 nt, Artificial Sequence
  Description of Artificial Sequence: Synthetic oligonucleotide
  Antisense strand to SEQ ID NO: 2055248
ucugaccuauggaugcccu

SEQ ID NO: 2055250 - RNA, 19 nt, Artificial Sequence
  Description of Artificial Sequence: Synthetic oligonucleotide
  Sense strand starting at position 3280 of SEQ ID NO: 1881575
gggcauccauaggucagaa

SEQ ID NO: 2055251 - RNA, 19 nt, Artificial Sequence
  Description of Artificial Sequence: Synthetic oligonucleotide
  Antisense strand to SEQ ID NO: 2055250
uucugaccuauggaugccc

SEQ ID NO: 2055252 - RNA, 19 nt, Artificial Sequence
  Description of Artificial Sequence: Synthetic oligonucleotide
  Sense strand starting at position 3302 of SEQ ID NO: 1881575
uugcuauuggaagagcgau

SEQ ID NO: 2055253 - RNA, 19 nt, Artificial Sequence
  Description of Artificial Sequence: Synthetic oligonucleotide
  Antisense strand to SEQ ID NO: 2055252
aucgcucuuccaauagcaa

SEQ ID NO: 2055254 - RNA, 19 nt, Artificial Sequence
  Description of Artificial Sequence: Synthetic oligonucleotide
  Sense strand starting at position 3402 of SEQ ID NO: 1881575
gaucaucuacugugagcua

SEQ ID NO: 2055255 - RNA, 19 nt, Artificial Sequence
  Description of Artificial Sequence: Synthetic oligonucleotide
  Antisense strand to SEQ ID NO: 2055254
uagcucacaguagaugauc

SEQ ID NO: 2055256 - RNA, 19 nt, Artificial Sequence
  Description of Artificial Sequence: Synthetic oligonucleotide
  Sense strand starting at position 3414 of SEQ ID NO: 1881575
ugagcuagacauugagcaa

SEQ ID NO: 2055257 - RNA, 19 nt, Artificial Sequence
  Description of Artificial Sequence: Synthetic oligonucleotide
  Antisense strand to SEQ ID NO: 2055256
uugcucaaugucuagcuca

SEQ ID NO: 2055258 - RNA, 19 nt, Artificial Sequence
  Description of Artificial Sequence: Synthetic oligonucleotide
  Sense strand starting at position 3508 of SEQ ID NO: 1881575
auguccucagaaugcaaau

SEQ ID NO: 2055259 - RNA, 19 nt, Artificial Sequence
  Description of Artificial Sequence: Synthetic oligonucleotide
  Antisense strand to SEQ ID NO: 2055258
auuugcauucugaggacau

SEQ ID NO: 2055260 - RNA, 19 nt, Artificial Sequence
  Description of Artificial Sequence: Synthetic oligonucleotide
  Sense strand starting at position 3521 of SEQ ID NO: 1881575
gcaaaugaguaauugguau

SEQ ID NO: 2055261 - RNA, 19 nt, Artificial Sequence
  Description of Artificial Sequence: Synthetic oligonucleotide
  Antisense strand to SEQ ID NO: 2055260
auaccaauuacucauuugc

SEQ ID NO: 2055262 - RNA, 19 nt, Artificial Sequence
  Description of Artificial Sequence: Synthetic oligonucleotide
  Sense strand starting at position 3682 of SEQ ID NO: 1881575
uguuguauuauaggaauag

SEQ ID NO: 2055263 - RNA, 19 nt, Artificial Sequence
  Description of Artificial Sequence: Synthetic oligonucleotide
  Antisense strand to SEQ ID NO: 2055262
cuauuccuauaauacaaca

SEQ ID NO: 2055264 - RNA, 19 nt, Artificial Sequence
  Description of Artificial Sequence: Synthetic oligonucleotide
  Sense strand starting at position 3772 of SEQ ID NO: 1881575
guuaaugugaaaugagauu

SEQ ID NO: 2055265 - RNA, 19 nt, Artificial Sequence
  Description of Artificial Sequence: Synthetic oligonucleotide
  Antisense strand to SEQ ID NO: 2055264
aaucucauuucacauuaac

SEQ ID NO: 2055266 - RNA, 19 nt, Artificial Sequence
  Description of Artificial Sequence: Synthetic oligonucleotide
  Sense strand starting at position 3799 of SEQ ID NO: 1881575
uuauuaggaacuugguaga

SEQ ID NO: 2055267 - RNA, 19 nt, Artificial Sequence
  Description of Artificial Sequence: Synthetic oligonucleotide
  Antisense strand to SEQ ID NO: 2055266
ucuaccaaguuccuaauaa

SEQ ID NO: 2055268 - RNA, 19 nt, Artificial Sequence
  Description of Artificial Sequence: Synthetic oligonucleotide
  Sense strand starting at position 3828 of SEQ ID NO: 1881575
aaguccuggcaguaugauu

SEQ ID NO: 2055269 - RNA, 19 nt, Artificial Sequence
  Description of Artificial Sequence: Synthetic oligonucleotide
  Antisense strand to SEQ ID NO: 2055268
aaucauacugccaggacuu

SEQ ID NO: 2055270 - RNA, 19 nt, Artificial Sequence
  Description of Artificial Sequence: Synthetic oligonucleotide
  Sense strand starting at position 3862 of SEQ ID NO: 1881575
auuaguuaguuucuuagga

SEQ ID NO: 2055271 - RNA, 19 nt, Artificial Sequence
  Description of Artificial Sequence: Synthetic oligonucleotide
  Antisense strand to SEQ ID NO: 2055270
uccuaagaaacuaacuaau

SEQ ID NO: 2055272 - RNA, 19 nt, Artificial Sequence
  Description of Artificial Sequence: Synthetic oligonucleotide
  Sense strand starting at position 3863 of SEQ ID NO: 1881575
uuaguuaguuucuuaggaa

SEQ ID NO: 2055273 - RNA, 19 nt, Artificial Sequence
  Description of Artificial Sequence: Synthetic oligonucleotide
  Antisense strand to SEQ ID NO: 2055272
uuccuaagaaacuaacuaa

SEQ ID NO: 2055274 - RNA, 19 nt, Artificial Sequence
  Description of Artificial Sequence: Synthetic oligonucleotide
  Sense strand starting at position 3972 of SEQ ID NO: 1881575
cuuaauguagccugaaaga

SEQ ID NO: 2055275 - RNA, 19 nt, Artificial Sequence
  Description of Artificial Sequence: Synthetic oligonucleotide
  Antisense strand to SEQ ID NO: 2055274
ucuuucaggcuacauuaag

SEQ ID NO: 2055276 - RNA, 19 nt, Artificial Sequence
  Description of Artificial Sequence: Synthetic oligonucleotide
  Sense strand starting at position 3981 of SEQ ID NO: 1881575
gccugaaagauugguaaca

SEQ ID NO: 2055277 - RNA, 19 nt, Artificial Sequence
  Description of Artificial Sequence: Synthetic oligonucleotide
  Antisense strand to SEQ ID NO: 2055276
uguuaccaaucuuucaggc

SEQ ID NO: 2055278 - RNA, 19 nt, Artificial Sequence
  Description of Artificial Sequence: Synthetic oligonucleotide
  Sense strand starting at position 100 of SEQ ID NO: 1881576
uguuuauugaaguagaagu

SEQ ID NO: 2055279 - RNA, 19 nt, Artificial Sequence
  Description of Artificial Sequence: Synthetic oligonucleotide
  Antisense strand to SEQ ID NO: 2055278
acuucuacuucaauaaaca

SEQ ID NO: 2055280 - RNA, 19 nt, Artificial Sequence
  Description of Artificial Sequence: Synthetic oligonucleotide
  Sense strand starting at position 189 of SEQ ID NO: 1881576
gcugccugaacugaguuaa

SEQ ID NO: 2055281 - RNA, 19 nt, Artificial Sequence
  Description of Artificial Sequence: Synthetic oligonucleotide
  Antisense strand to SEQ ID NO: 2055280
uuaacucaguucaggcagc

SEQ ID NO: 2055282 - RNA, 19 nt, Artificial Sequence
  Description of Artificial Sequence: Synthetic oligonucleotide
  Sense strand starting at position 520 of SEQ ID NO: 1881576
gcuuaauaacuuuggaaga

SEQ ID NO: 2055283 - RNA, 19 nt, Artificial Sequence
  Description of Artificial Sequence: Synthetic oligonucleotide
  Antisense strand to SEQ ID NO: 2055282
ucuuccaaaguuauuaagc

SEQ ID NO: 2055284 - RNA, 19 nt, Artificial Sequence
  Description of Artificial Sequence: Synthetic oligonucleotide
  Sense strand starting at position 638 of SEQ ID NO: 1881576
ggagcccucacagggauua

SEQ ID NO: 2055285 - RNA, 19 nt, Artificial Sequence
  Description of Artificial Sequence: Synthetic oligonucleotide
  Antisense strand to SEQ ID NO: 2055284
uaaucccugugagggcucc

SEQ ID NO: 2055286 - RNA, 19 nt, Artificial Sequence
  Description of Artificial Sequence: Synthetic oligonucleotide
  Sense strand starting at position 639 of SEQ ID NO: 1881576
gagcccucacagggauuau

SEQ ID NO: 2055287 - RNA, 19 nt, Artificial Sequence
  Description of Artificial Sequence: Synthetic oligonucleotide
  Antisense strand to SEQ ID NO: 2055286
auaaucccugugagggcuc

SEQ ID NO: 2055288 - RNA, 19 nt, Artificial Sequence
  Description of Artificial Sequence: Synthetic oligonucleotide
  Sense strand starting at position 648 of SEQ ID NO: 1881576
cagggauuaucugcugauc

SEQ ID NO: 2055289 - RNA, 19 nt, Artificial Sequence
  Description of Artificial Sequence: Synthetic oligonucleotide
  Antisense strand to SEQ ID NO: 2055288
gaucagcagauaaucccug

SEQ ID NO: 2055290 - RNA, 19 nt, Artificial Sequence
  Description of Artificial Sequence: Synthetic oligonucleotide
  Sense strand starting at position 743 of SEQ ID NO: 1881576
cagggcucgccagaaacuu

SEQ ID NO: 2055291 - RNA, 19 nt, Artificial Sequence
  Description of Artificial Sequence: Synthetic oligonucleotide
  Antisense strand to SEQ ID NO: 2055290
aaguuucuggcgagcccug

SEQ ID NO: 2055292 - RNA, 19 nt, Artificial Sequence
  Description of Artificial Sequence: Synthetic oligonucleotide
  Sense strand starting at position 944 of SEQ ID NO: 1881576
gauguaagugcacgaagaa

SEQ ID NO: 2055293 - RNA, 19 nt, Artificial Sequence
  Description of Artificial Sequence: Synthetic oligonucleotide
  Antisense strand to SEQ ID NO: 2055292
uucuucgugcacuuacauc

SEQ ID NO: 2055294 - RNA, 19 nt, Artificial Sequence
  Description of Artificial Sequence: Synthetic oligonucleotide
  Sense strand starting at position 945 of SEQ ID NO: 1881576
auguaagugcacgaagaau

SEQ ID NO: 2055295 - RNA, 19 nt, Artificial Sequence
  Description of Artificial Sequence: Synthetic oligonucleotide
  Antisense strand to SEQ ID NO: 2055294
auucuucgugcacuuacau

SEQ ID NO: 2055296 - RNA, 19 nt, Artificial Sequence
  Description of Artificial Sequence: Synthetic oligonucleotide
  Sense strand starting at position 1094 of SEQ ID NO: 1881576
aguagaguugacuggguua

SEQ ID NO: 2055297 - RNA, 19 nt, Artificial Sequence
  Description of Artificial Sequence: Synthetic oligonucleotide
  Antisense strand to SEQ ID NO: 2055296
uaacccagucaacucuacu

SEQ ID NO: 2055298 - RNA, 19 nt, Artificial Sequence
  Description of Artificial Sequence: Synthetic oligonucleotide
  Sense strand starting at position 1096 of SEQ ID NO: 1881576
uagaguugacuggguuaga

SEQ ID NO: 2055299 - RNA, 19 nt, Artificial Sequence
  Description of Artificial Sequence: Synthetic oligonucleotide
  Antisense strand to SEQ ID NO: 2055298
ucuaacccagucaacucua

SEQ ID NO: 2055300 - RNA, 19 nt, Artificial Sequence
  Description of Artificial Sequence: Synthetic oligonucleotide
  Sense strand starting at position 1097 of SEQ ID NO: 1881576
agaguugacuggguuagag

SEQ ID NO: 2055301 - RNA, 19 nt, Artificial Sequence
  Description of Artificial Sequence: Synthetic oligonucleotide
  Antisense strand to SEQ ID NO: 2055300
cucuaacccagucaacucu

SEQ ID NO: 2055302 - RNA, 19 nt, Artificial Sequence
  Description of Artificial Sequence: Synthetic oligonucleotide
  Sense strand starting at position 1305 of SEQ ID NO: 1881576
ggcuuugacgagucgugca

SEQ ID NO: 2055303 - RNA, 19 nt, Artificial Sequence
  Description of Artificial Sequence: Synthetic oligonucleotide
  Antisense strand to SEQ ID NO: 2055302
ugcacgacucgucaaagcc

SEQ ID NO: 2055304 - RNA, 19 nt, Artificial Sequence
  Description of Artificial Sequence: Synthetic oligonucleotide
  Sense strand starting at position 1349 of SEQ ID NO: 1881576
gagaucuacccuggaagca

SEQ ID NO: 2055305 - RNA, 19 nt, Artificial Sequence
  Description of Artificial Sequence: Synthetic oligonucleotide
  Antisense strand to SEQ ID NO: 2055304
ugcuuccaggguagaucuc

SEQ ID NO: 2055306 - RNA, 19 nt, Artificial Sequence
  Description of Artificial Sequence: Synthetic oligonucleotide
  Sense strand starting at position 1684 of SEQ ID NO: 1881576
uguguuuacccggcagcga

SEQ ID NO: 2055307 - RNA, 19 nt, Artificial Sequence
  Description of Artificial Sequence: Synthetic oligonucleotide
  Antisense strand to SEQ ID NO: 2055306
ucgcugccggguaaacaca

SEQ ID NO: 2055308 - RNA, 19 nt, Artificial Sequence
  Description of Artificial Sequence: Synthetic oligonucleotide
  Sense strand starting at position 2262 of SEQ ID NO: 1881576
ugaggagacuccuuuccaa

SEQ ID NO: 2055309 - RNA, 19 nt, Artificial Sequence
  Description of Artificial Sequence: Synthetic oligonucleotide
  Antisense strand to SEQ ID NO: 2055308
uuggaaaggagucuccuca

SEQ ID NO: 2055310 - RNA, 19 nt, Artificial Sequence
  Description of Artificial Sequence: Synthetic oligonucleotide
  Sense strand starting at position 2265 of SEQ ID NO: 1881576
ggagacuccuuuccaaauu

SEQ ID NO: 2055311 - RNA, 19 nt, Artificial Sequence
  Description of Artificial Sequence: Synthetic oligonucleotide
  Antisense strand to SEQ ID NO: 2055310
aauuuggaaaggagucucc

SEQ ID NO: 2055312 - RNA, 19 nt, Artificial Sequence
  Description of Artificial Sequence: Synthetic oligonucleotide
  Sense strand starting at position 2377 of SEQ ID NO: 1881576
gggauuaaguuccuuaucu

SEQ ID NO: 2055313 - RNA, 19 nt, Artificial Sequence
  Description of Artificial Sequence: Synthetic oligonucleotide
  Antisense strand to SEQ ID NO: 2055312
agauaaggaacuuaauccc

SEQ ID NO: 2055314 - RNA, 19 nt, Artificial Sequence
  Description of Artificial Sequence: Synthetic oligonucleotide
  Sense strand starting at position 2378 of SEQ ID NO: 1881576
ggauuaaguuccuuaucuu

SEQ ID NO: 2055315 - RNA, 19 nt, Artificial Sequence
  Description of Artificial Sequence: Synthetic oligonucleotide
  Antisense strand to SEQ ID NO: 2055314
aagauaaggaacuuaaucc

SEQ ID NO: 2055316 - RNA, 19 nt, Artificial Sequence
  Description of Artificial Sequence: Synthetic oligonucleotide
  Sense strand starting at position 2392 of SEQ ID NO: 1881576
aucuuacaugauugugaag

SEQ ID NO: 2055317 - RNA, 19 nt, Artificial Sequence
  Description of Artificial Sequence: Synthetic oligonucleotide
  Antisense strand to SEQ ID NO: 2055316
cuucacaaucauguaagau

SEQ ID NO: 2055318 - RNA, 19 nt, Artificial Sequence
  Description of Artificial Sequence: Synthetic oligonucleotide
  Sense strand starting at position 2485 of SEQ ID NO: 1881576
accuauuugccagguauuc

SEQ ID NO: 2055319 - RNA, 19 nt, Artificial Sequence
  Description of Artificial Sequence: Synthetic oligonucleotide
  Antisense strand to SEQ ID NO: 2055318
gaauaccuggcaaauaggu

SEQ ID NO: 2055320 - RNA, 19 nt, Artificial Sequence
  Description of Artificial Sequence: Synthetic oligonucleotide
  Sense strand starting at position 2513 of SEQ ID NO: 1881576
cccugacuccagggaacua

SEQ ID NO: 2055321 - RNA, 19 nt, Artificial Sequence
  Description of Artificial Sequence: Synthetic oligonucleotide
  Antisense strand to SEQ ID NO: 2055320
uaguucccuggagucaggg

SEQ ID NO: 2055322 - RNA, 19 nt, Artificial Sequence
  Description of Artificial Sequence: Synthetic oligonucleotide
  Sense strand starting at position 2666 of SEQ ID NO: 1881576
caguguguucguguuuauu

SEQ ID NO: 2055323 - RNA, 19 nt, Artificial Sequence
  Description of Artificial Sequence: Synthetic oligonucleotide
  Antisense strand to SEQ ID NO: 2055322
aauaaacacgaacacacug

SEQ ID NO: 2055324 - RNA, 19 nt, Artificial Sequence
  Description of Artificial Sequence: Synthetic oligonucleotide
  Sense strand starting at position 2803 of SEQ ID NO: 1881576
caguuucuaggugaacaca

SEQ ID NO: 2055325 - RNA, 19 nt, Artificial Sequence
  Description of Artificial Sequence: Synthetic oligonucleotide
  Antisense strand to SEQ ID NO: 2055324
uguguucaccuagaaacug

SEQ ID NO: 2055326 - RNA, 19 nt, Artificial Sequence
  Description of Artificial Sequence: Synthetic oligonucleotide
  Sense strand starting at position 2840 of SEQ ID NO: 1881576
gcuguaagagcauagauaa

SEQ ID NO: 2055327 - RNA, 19 nt, Artificial Sequence
  Description of Artificial Sequence: Synthetic oligonucleotide
  Antisense strand to SEQ ID NO: 2055326
uuaucuaugcucuuacagc

SEQ ID NO: 2055328 - RNA, 19 nt, Artificial Sequence
  Description of Artificial Sequence: Synthetic oligonucleotide
  Sense strand starting at position 2898 of SEQ ID NO: 1881576
agugguugaugaccuaauu

SEQ ID NO: 2055329 - RNA, 19 nt, Artificial Sequence
  Description of Artificial Sequence: Synthetic oligonucleotide
  Antisense strand to SEQ ID NO: 2055328
aauuaggucaucaaccacu

SEQ ID NO: 2055330 - RNA, 19 nt, Artificial Sequence
  Description of Artificial Sequence: Synthetic oligonucleotide
  Sense strand starting at position 3076 of SEQ ID NO: 1881576
ugagguguaggugaccaaa

SEQ ID NO: 2055331 - RNA, 19 nt, Artificial Sequence
  Description of Artificial Sequence: Synthetic oligonucleotide
  Antisense strand to SEQ ID NO: 2055330
uuuggucaccuacaccuca

SEQ ID NO: 2055332 - RNA, 19 nt, Artificial Sequence
  Description of Artificial Sequence: Synthetic oligonucleotide
  Sense strand starting at position 3087 of SEQ ID NO: 1881576
ugaccaaaugcagagcuau

SEQ ID NO: 2055333 - RNA, 19 nt, Artificial Sequence
  Description of Artificial Sequence: Synthetic oligonucleotide
  Antisense strand to SEQ ID NO: 2055332
auagcucugcauuugguca

SEQ ID NO: 2055334 - RNA, 19 nt, Artificial Sequence
  Description of Artificial Sequence: Synthetic oligonucleotide
  Sense strand starting at position 3211 of SEQ ID NO: 1881576
aggucuucucugcacaauu

SEQ ID NO: 2055335 - RNA, 19 nt, Artificial Sequence
  Description of Artificial Sequence: Synthetic oligonucleotide
  Antisense strand to SEQ ID NO: 2055334
aauugugcagagaagaccu

SEQ ID NO: 2055336 - RNA, 19 nt, Artificial Sequence
  Description of Artificial Sequence: Synthetic oligonucleotide
  Sense strand starting at position 3377 of SEQ ID NO: 1881576
auacauguauuccuacagu

SEQ ID NO: 2055337 - RNA, 19 nt, Artificial Sequence
  Description of Artificial Sequence: Synthetic oligonucleotide
  Antisense strand to SEQ ID NO: 2055336
acuguaggaauacauguau

SEQ ID NO: 2055338 - RNA, 19 nt, Artificial Sequence
  Description of Artificial Sequence: Synthetic oligonucleotide
  Sense strand starting at position 3720 of SEQ ID NO: 1881576
guuaauugaggucagcuga

SEQ ID NO: 2055339 - RNA, 19 nt, Artificial Sequence
  Description of Artificial Sequence: Synthetic oligonucleotide
  Antisense strand to SEQ ID NO: 2055338
ucagcugaccucaauuaac

SEQ ID NO: 2055340 - RNA, 19 nt, Artificial Sequence
  Description of Artificial Sequence: Synthetic oligonucleotide
  Sense strand starting at position 3730 of SEQ ID NO: 1881576
gucagcugacucugaaaca

SEQ ID NO: 2055341 - RNA, 19 nt, Artificial Sequence
  Description of Artificial Sequence: Synthetic oligonucleotide
  Antisense strand to SEQ ID NO: 2055340
uguuucagagucagcugac

SEQ ID NO: 2055342 - RNA, 19 nt, Artificial Sequence
  Description of Artificial Sequence: Synthetic oligonucleotide
  Sense strand starting at position 3778 of SEQ ID NO: 1881576
agagguaaccaauguugau

SEQ ID NO: 2055343 - RNA, 19 nt, Artificial Sequence
  Description of Artificial Sequence: Synthetic oligonucleotide
  Antisense strand to SEQ ID NO: 2055342
aucaacauugguuaccucu

SEQ ID NO: 2055344 - RNA, 19 nt, Artificial Sequence
  Description of Artificial Sequence: Synthetic oligonucleotide
  Sense strand starting at position 3880 of SEQ ID NO: 1881576
ggauuauguuguuccugaa

SEQ ID NO: 2055345 - RNA, 19 nt, Artificial Sequence
  Description of Artificial Sequence: Synthetic oligonucleotide
  Antisense strand to SEQ ID NO: 2055344
uucaggaacaacauaaucc

SEQ ID NO: 2055346 - RNA, 19 nt, Artificial Sequence
  Description of Artificial Sequence: Synthetic oligonucleotide
  Sense strand starting at position 3911 of SEQ ID NO: 1881576
gagguaauauuugaggaau

SEQ ID NO: 2055347 - RNA, 19 nt, Artificial Sequence
  Description of Artificial Sequence: Synthetic oligonucleotide
  Antisense strand to SEQ ID NO: 2055346
auuccucaaauauuaccuc

SEQ ID NO: 2055348 - RNA, 19 nt, Artificial Sequence
  Description of Artificial Sequence: Synthetic oligonucleotide
  Sense strand starting at position 3913 of SEQ ID NO: 1881576
gguaauauuugaggaauca

SEQ ID NO: 2055349 - RNA, 19 nt, Artificial Sequence
  Description of Artificial Sequence: Synthetic oligonucleotide
  Antisense strand to SEQ ID NO: 2055348
ugauuccucaaauauuacc

SEQ ID NO: 2055350 - RNA, 19 nt, Artificial Sequence
  Description of Artificial Sequence: Synthetic oligonucleotide
  Sense strand starting at position 3925 of SEQ ID NO: 1881576
ggaaucaacuugccagaau

SEQ ID NO: 2055351 - RNA, 19 nt, Artificial Sequence
  Description of Artificial Sequence: Synthetic oligonucleotide
  Antisense strand to SEQ ID NO: 2055350
auucuggcaaguugauucc

SEQ ID NO: 2055352 - RNA, 19 nt, Artificial Sequence
  Description of Artificial Sequence: Synthetic oligonucleotide
  Sense strand starting at position 3957 of SEQ ID NO: 1881576
uggagaacugucuguccaa

SEQ ID NO: 2055353 - RNA, 19 nt, Artificial Sequence
  Description of Artificial Sequence: Synthetic oligonucleotide
  Antisense strand to SEQ ID NO: 2055352
uuggacagacaguucucca

SEQ ID NO: 2055354 - RNA, 19 nt, Artificial Sequence
  Description of Artificial Sequence: Synthetic oligonucleotide
  Sense strand starting at position 3958 of SEQ ID NO: 1881576
ggagaacugucuguccaaa

SEQ ID NO: 2055355 - RNA, 19 nt, Artificial Sequence
  Description of Artificial Sequence: Synthetic oligonucleotide
  Antisense strand to SEQ ID NO: 2055354
uuuggacagacaguucucc

SEQ ID NO: 2055356 - RNA, 19 nt, Artificial Sequence
  Description of Artificial Sequence: Synthetic oligonucleotide
  Sense strand starting at position 3960 of SEQ ID NO: 1881576
agaacugucuguccaaauc

SEQ ID NO: 2055357 - RNA, 19 nt, Artificial Sequence
  Description of Artificial Sequence: Synthetic oligonucleotide
  Antisense strand to SEQ ID NO: 2055356
gauuuggacagacaguucu

SEQ ID NO: 2055358 - RNA, 19 nt, Artificial Sequence
  Description of Artificial Sequence: Synthetic oligonucleotide
  Sense strand starting at position 53 of SEQ ID NO: 1881577
ugaacaugugcacagacau

SEQ ID NO: 2055359 - RNA, 19 nt, Artificial Sequence
  Description of Artificial Sequence: Synthetic oligonucleotide
  Antisense strand to SEQ ID NO: 2055358
augucugugcacauguuca

SEQ ID NO: 2055360 - RNA, 19 nt, Artificial Sequence
  Description of Artificial Sequence: Synthetic oligonucleotide
  Sense strand starting at position 262 of SEQ ID NO: 1881577
guaaguuccaaagggacaa

SEQ ID NO: 2055361 - RNA, 19 nt, Artificial Sequence
  Description of Artificial Sequence: Synthetic oligonucleotide
  Antisense strand to SEQ ID NO: 2055360
uugucccuuuggaacuuac

SEQ ID NO: 2055362 - RNA, 19 nt, Artificial Sequence
  Description of Artificial Sequence: Synthetic oligonucleotide
  Sense strand starting at position 391 of SEQ ID NO: 1881577
uugagacaguuucuggcaa

SEQ ID NO: 2055363 - RNA, 19 nt, Artificial Sequence
  Description of Artificial Sequence: Synthetic oligonucleotide
  Antisense strand to SEQ ID NO: 2055362
uugccagaaacugucucaa

SEQ ID NO: 2055364 - RNA, 19 nt, Artificial Sequence
  Description of Artificial Sequence: Synthetic oligonucleotide
  Sense strand starting at position 512 of SEQ ID NO: 1881577
gaaucuaguugagcagaua

SEQ ID NO: 2055365 - RNA, 19 nt, Artificial Sequence
  Description of Artificial Sequence: Synthetic oligonucleotide
  Antisense strand to SEQ ID NO: 2055364
uaucugcucaacuagauuc

SEQ ID NO: 2055366 - RNA, 19 nt, Artificial Sequence
  Description of Artificial Sequence: Synthetic oligonucleotide
  Sense strand starting at position 513 of SEQ ID NO: 1881577
aaucuaguugagcagauau

SEQ ID NO: 2055367 - RNA, 19 nt, Artificial Sequence
  Description of Artificial Sequence: Synthetic oligonucleotide
  Antisense strand to SEQ ID NO: 2055366
auaucugcucaacuagauu

SEQ ID NO: 2055368 - RNA, 19 nt, Artificial Sequence
  Description of Artificial Sequence: Synthetic oligonucleotide
  Sense strand starting at position 515 of SEQ ID NO: 1881577
ucuaguugagcagauauaa

SEQ ID NO: 2055369 - RNA, 19 nt, Artificial Sequence
  Description of Artificial Sequence: Synthetic oligonucleotide
  Antisense strand to SEQ ID NO: 2055368
uuauaucugcucaacuaga

SEQ ID NO: 2055370 - RNA, 19 nt, Artificial Sequence
  Description of Artificial Sequence: Synthetic oligonucleotide
  Sense strand starting at position 582 of SEQ ID NO: 1881577
gaguuuagaagucaagggu

SEQ ID NO: 2055371 - RNA, 19 nt, Artificial Sequence
  Description of Artificial Sequence: Synthetic oligonucleotide
  Antisense strand to SEQ ID NO: 2055370
acccuugacuucuaaacuc

SEQ ID NO: 2055372 - RNA, 19 nt, Artificial Sequence
  Description of Artificial Sequence: Synthetic oligonucleotide
  Sense strand starting at position 710 of SEQ ID NO: 1881577
acuuauuaucuaggugaac

SEQ ID NO: 2055373 - RNA, 19 nt, Artificial Sequence
  Description of Artificial Sequence: Synthetic oligonucleotide
  Antisense strand to SEQ ID NO: 2055372
guucaccuagauaauaagu

SEQ ID NO: 2055374 - RNA, 19 nt, Artificial Sequence
  Description of Artificial Sequence: Synthetic oligonucleotide
  Sense strand starting at position 711 of SEQ ID NO: 1881577
cuuauuaucuaggugaacu

SEQ ID NO: 2055375 - RNA, 19 nt, Artificial Sequence
  Description of Artificial Sequence: Synthetic oligonucleotide
  Antisense strand to SEQ ID NO: 2055374
aguucaccuagauaauaag

SEQ ID NO: 2055376 - RNA, 19 nt, Artificial Sequence
  Description of Artificial Sequence: Synthetic oligonucleotide
  Sense strand starting at position 728 of SEQ ID NO: 1881577
cuugaugaaucccuucgau

SEQ ID NO: 2055377 - RNA, 19 nt, Artificial Sequence
  Description of Artificial Sequence: Synthetic oligonucleotide
  Antisense strand to SEQ ID NO: 2055376
aucgaagggauucaucaag

SEQ ID NO: 2055378 - RNA, 19 nt, Artificial Sequence
  Description of Artificial Sequence: Synthetic oligonucleotide
  Sense strand starting at position 956 of SEQ ID NO: 1881577
caaggagggucacacauuu

SEQ ID NO: 2055379 - RNA, 19 nt, Artificial Sequence
  Description of Artificial Sequence: Synthetic oligonucleotide
  Antisense strand to SEQ ID NO: 2055378
aaaugugugacccuccuug

SEQ ID NO: 2055380 - RNA, 19 nt, Artificial Sequence
  Description of Artificial Sequence: Synthetic oligonucleotide
  Sense strand starting at position 1173 of SEQ ID NO: 1881577
ucucucuaacauugaggga

SEQ ID NO: 2055381 - RNA, 19 nt, Artificial Sequence
  Description of Artificial Sequence: Synthetic oligonucleotide
  Antisense strand to SEQ ID NO: 2055380
ucccucaauguuagagaga

SEQ ID NO: 2055382 - RNA, 19 nt, Artificial Sequence
  Description of Artificial Sequence: Synthetic oligonucleotide
  Sense strand starting at position 1213 of SEQ ID NO: 1881577
cuuacauauccuuggguca

SEQ ID NO: 2055383 - RNA, 19 nt, Artificial Sequence
  Description of Artificial Sequence: Synthetic oligonucleotide
  Antisense strand to SEQ ID NO: 2055382
ugacccaaggauauguaag

SEQ ID NO: 2055384 - RNA, 19 nt, Artificial Sequence
  Description of Artificial Sequence: Synthetic oligonucleotide
  Sense strand starting at position 1216 of SEQ ID NO: 1881577
acauauccuugggucacaa

SEQ ID NO: 2055385 - RNA, 19 nt, Artificial Sequence
  Description of Artificial Sequence: Synthetic oligonucleotide
  Antisense strand to SEQ ID NO: 2055384
uugugacccaaggauaugu

SEQ ID NO: 2055386 - RNA, 19 nt, Artificial Sequence
  Description of Artificial Sequence: Synthetic oligonucleotide
  Sense strand starting at position 1419 of SEQ ID NO: 1881577
gccuccuagccuggaauuu

SEQ ID NO: 2055387 - RNA, 19 nt, Artificial Sequence
  Description of Artificial Sequence: Synthetic oligonucleotide
  Antisense strand to SEQ ID NO: 2055386
aaauuccaggcuaggaggc

SEQ ID NO: 2055388 - RNA, 19 nt, Artificial Sequence
  Description of Artificial Sequence: Synthetic oligonucleotide
  Sense strand starting at position 1472 of SEQ ID NO: 1881577
accagaagcuuccugauac

SEQ ID NO: 2055389 - RNA, 19 nt, Artificial Sequence
  Description of Artificial Sequence: Synthetic oligonucleotide
  Antisense strand to SEQ ID NO: 2055388
guaucaggaagcuucuggu

SEQ ID NO: 2055390 - RNA, 19 nt, Artificial Sequence
  Description of Artificial Sequence: Synthetic oligonucleotide
  Sense strand starting at position 1514 of SEQ ID NO: 1881577
gagaguuaacuggguacuc

SEQ ID NO: 2055391 - RNA, 19 nt, Artificial Sequence
  Description of Artificial Sequence: Synthetic oligonucleotide
  Antisense strand to SEQ ID NO: 2055390
gaguacccaguuaacucuc

SEQ ID NO: 2055392 - RNA, 19 nt, Artificial Sequence
  Description of Artificial Sequence: Synthetic oligonucleotide
  Sense strand starting at position 1515 of SEQ ID NO: 1881577
agaguuaacuggguacuca

SEQ ID NO: 2055393 - RNA, 19 nt, Artificial Sequence
  Description of Artificial Sequence: Synthetic oligonucleotide
  Antisense strand to SEQ ID NO: 2055392
ugaguacccaguuaacucu

SEQ ID NO: 2055394 - RNA, 19 nt, Artificial Sequence
  Description of Artificial Sequence: Synthetic oligonucleotide
  Sense strand starting at position 1546 of SEQ ID NO: 1881577
guaccacuguccucuaaag

SEQ ID NO: 2055395 - RNA, 19 nt, Artificial Sequence
  Description of Artificial Sequence: Synthetic oligonucleotide
  Antisense strand to SEQ ID NO: 2055394
cuuuagaggacagugguac

SEQ ID NO: 2055396 - RNA, 19 nt, Artificial Sequence
  Description of Artificial Sequence: Synthetic oligonucleotide
  Sense strand starting at position 1577 of SEQ ID NO: 1881577
accuucuucguacaaagua

SEQ ID NO: 2055397 - RNA, 19 nt, Artificial Sequence
  Description of Artificial Sequence: Synthetic oligonucleotide
  Antisense strand to SEQ ID NO: 2055396
uacuuuguacgaagaaggu

SEQ ID NO: 2055398 - RNA, 19 nt, Artificial Sequence
  Description of Artificial Sequence: Synthetic oligonucleotide
  Sense strand starting at position 1610 of SEQ ID NO: 1881577
acuauaucaguuugucuaa

SEQ ID NO: 2055399 - RNA, 19 nt, Artificial Sequence
  Description of Artificial Sequence: Synthetic oligonucleotide
  Antisense strand to SEQ ID NO: 2055398
uuagacaaacugauauagu

SEQ ID NO: 2055400 - RNA, 19 nt, Artificial Sequence
  Description of Artificial Sequence: Synthetic oligonucleotide
  Sense strand starting at position 1611 of SEQ ID NO: 1881577
cuauaucaguuugucuaaa

SEQ ID NO: 2055401 - RNA, 19 nt, Artificial Sequence
  Description of Artificial Sequence: Synthetic oligonucleotide
  Antisense strand to SEQ ID NO: 2055400
uuuagacaaacugauauag

SEQ ID NO: 2055402 - RNA, 19 nt, Artificial Sequence
  Description of Artificial Sequence: Synthetic oligonucleotide
  Sense strand starting at position 1651 of SEQ ID NO: 1881577
ggcccaguaugauuucuuu

SEQ ID NO: 2055403 - RNA, 19 nt, Artificial Sequence
  Description of Artificial Sequence: Synthetic oligonucleotide
  Antisense strand to SEQ ID NO: 2055402
aaagaaaucauacugggcc

SEQ ID NO: 2055404 - RNA, 19 nt, Artificial Sequence
  Description of Artificial Sequence: Synthetic oligonucleotide
  Sense strand starting at position 1684 of SEQ ID NO: 1881577
uugcauucuggacagcaua

SEQ ID NO: 2055405 - RNA, 19 nt, Artificial Sequence
  Description of Artificial Sequence: Synthetic oligonucleotide
  Antisense strand to SEQ ID NO: 2055404
uaugcuguccagaaugcaa

SEQ ID NO: 2055406 - RNA, 19 nt, Artificial Sequence
  Description of Artificial Sequence: Synthetic oligonucleotide
  Sense strand starting at position 1702 of SEQ ID NO: 1881577
acuggauugucacccaaua

SEQ ID NO: 2055407 - RNA, 19 nt, Artificial Sequence
  Description of Artificial Sequence: Synthetic oligonucleotide
  Antisense strand to SEQ ID NO: 2055406
uauugggugacaauccagu

SEQ ID NO: 2055408 - RNA, 19 nt, Artificial Sequence
  Description of Artificial Sequence: Synthetic oligonucleotide
  Sense strand starting at position 1951 of SEQ ID NO: 1881577
agaagacaucuaugagcua

SEQ ID NO: 2055409 - RNA, 19 nt, Artificial Sequence
  Description of Artificial Sequence: Synthetic oligonucleotide
  Antisense strand to SEQ ID NO: 2055408
uagcucauagaugucuucu

SEQ ID NO: 2055410 - RNA, 19 nt, Artificial Sequence
  Description of Artificial Sequence: Synthetic oligonucleotide
  Sense strand starting at position 1954 of SEQ ID NO: 1881577
agacaucuaugagcuaagu

SEQ ID NO: 2055411 - RNA, 19 nt, Artificial Sequence
  Description of Artificial Sequence: Synthetic oligonucleotide
  Antisense strand to SEQ ID NO: 2055410
acuuagcucauagaugucu

SEQ ID NO: 2055412 - RNA, 19 nt, Artificial Sequence
  Description of Artificial Sequence: Synthetic oligonucleotide
  Sense strand starting at position 2393 of SEQ ID NO: 1881577
acaguuugucuccagauug

SEQ ID NO: 2055413 - RNA, 19 nt, Artificial Sequence
  Description of Artificial Sequence: Synthetic oligonucleotide
  Antisense strand to SEQ ID NO: 2055412
caaucuggagacaaacugu

SEQ ID NO: 2055414 - RNA, 19 nt, Artificial Sequence
  Description of Artificial Sequence: Synthetic oligonucleotide
  Sense strand starting at position 2617 of SEQ ID NO: 1881577
gucuauguacaguauacua

SEQ ID NO: 2055415 - RNA, 19 nt, Artificial Sequence
  Description of Artificial Sequence: Synthetic oligonucleotide
  Antisense strand to SEQ ID NO: 2055414
uaguauacuguacauagac

SEQ ID NO: 2055416 - RNA, 19 nt, Artificial Sequence
  Description of Artificial Sequence: Synthetic oligonucleotide
  Sense strand starting at position 2730 of SEQ ID NO: 1881577
gcaaauauaguccacuuga

SEQ ID NO: 2055417 - RNA, 19 nt, Artificial Sequence
  Description of Artificial Sequence: Synthetic oligonucleotide
  Antisense strand to SEQ ID NO: 2055416
ucaaguggacuauauuugc

SEQ ID NO: 2055418 - RNA, 19 nt, Artificial Sequence
  Description of Artificial Sequence: Synthetic oligonucleotide
  Sense strand starting at position 2916 of SEQ ID NO: 1881577
guguucuaugugccaagca

SEQ ID NO: 2055419 - RNA, 19 nt, Artificial Sequence
  Description of Artificial Sequence: Synthetic oligonucleotide
  Antisense strand to SEQ ID NO: 2055418
ugcuuggcacauagaacac

SEQ ID NO: 2055420 - RNA, 19 nt, Artificial Sequence
  Description of Artificial Sequence: Synthetic oligonucleotide
  Sense strand starting at position 3027 of SEQ ID NO: 1881577
uagcauggucaugauauac

SEQ ID NO: 2055421 - RNA, 19 nt, Artificial Sequence
  Description of Artificial Sequence: Synthetic oligonucleotide
  Antisense strand to SEQ ID NO: 2055420
guauaucaugaccaugcua

SEQ ID NO: 2055422 - RNA, 19 nt, Artificial Sequence
  Description of Artificial Sequence: Synthetic oligonucleotide
  Sense strand starting at position 3053 of SEQ ID NO: 1881577
aggugaugucauugcauuu

SEQ ID NO: 2055423 - RNA, 19 nt, Artificial Sequence
  Description of Artificial Sequence: Synthetic oligonucleotide
  Antisense strand to SEQ ID NO: 2055422
aaaugcaaugacaucaccu

SEQ ID NO: 2055424 - RNA, 19 nt, Artificial Sequence
  Description of Artificial Sequence: Synthetic oligonucleotide
  Sense strand starting at position 3073 of SEQ ID NO: 1881577
uauaacaaaucugugggau

SEQ ID NO: 2055425 - RNA, 19 nt, Artificial Sequence
  Description of Artificial Sequence: Synthetic oligonucleotide
  Antisense strand to SEQ ID NO: 2055424
aucccacagauuuguuaua

SEQ ID NO: 2055426 - RNA, 19 nt, Artificial Sequence
  Description of Artificial Sequence: Synthetic oligonucleotide
  Sense strand starting at position 3145 of SEQ ID NO: 1881577
uuaaauaacuugcucagga

SEQ ID NO: 2055427 - RNA, 19 nt, Artificial Sequence
  Description of Artificial Sequence: Synthetic oligonucleotide
  Antisense strand to SEQ ID NO: 2055426
uccugagcaaguuauuuaa

SEQ ID NO: 2055428 - RNA, 19 nt, Artificial Sequence
  Description of Artificial Sequence: Synthetic oligonucleotide
  Sense strand starting at position 3279 of SEQ ID NO: 1881577
gcagucagucuaggagaca

SEQ ID NO: 2055429 - RNA, 19 nt, Artificial Sequence
  Description of Artificial Sequence: Synthetic oligonucleotide
  Antisense strand to SEQ ID NO: 2055428
ugucuccuagacugacugc

SEQ ID NO: 2055430 - RNA, 19 nt, Artificial Sequence
  Description of Artificial Sequence: Synthetic oligonucleotide
  Sense strand starting at position 3479 of SEQ ID NO: 1881577
ggcagacauuguccuuuag

SEQ ID NO: 2055431 - RNA, 19 nt, Artificial Sequence
  Description of Artificial Sequence: Synthetic oligonucleotide
  Antisense strand to SEQ ID NO: 2055430
cuaaaggacaaugucugcc

SEQ ID NO: 2055432 - RNA, 19 nt, Artificial Sequence
  Description of Artificial Sequence: Synthetic oligonucleotide
  Sense strand starting at position 3648 of SEQ ID NO: 1881577
aguuuagaguuuccaggaa

SEQ ID NO: 2055433 - RNA, 19 nt, Artificial Sequence
  Description of Artificial Sequence: Synthetic oligonucleotide
  Antisense strand to SEQ ID NO: 2055432
uuccuggaaacucuaaacu

SEQ ID NO: 2055434 - RNA, 19 nt, Artificial Sequence
  Description of Artificial Sequence: Synthetic oligonucleotide
  Sense strand starting at position 3780 of SEQ ID NO: 1881577
accuuaagcccaugaaaug

SEQ ID NO: 2055435 - RNA, 19 nt, Artificial Sequence
  Description of Artificial Sequence: Synthetic oligonucleotide
  Antisense strand to SEQ ID NO: 2055434
cauuucaugggcuuaaggu

SEQ ID NO: 2055436 - RNA, 19 nt, Artificial Sequence
  Description of Artificial Sequence: Synthetic oligonucleotide
  Sense strand starting at position 3911 of SEQ ID NO: 1881577
gagaguuguuaugugagaa

SEQ ID NO: 2055437 - RNA, 19 nt, Artificial Sequence
  Description of Artificial Sequence: Synthetic oligonucleotide
  Antisense strand to SEQ ID NO: 2055436
uucucacauaacaacucuc

SEQ ID NO: 2055438 - RNA, 19 nt, Artificial Sequence
  Description of Artificial Sequence: Synthetic oligonucleotide
  Sense strand starting at position 206 of SEQ ID NO: 1881578
cuguccuugguccauugaa

SEQ ID NO: 2055439 - RNA, 19 nt, Artificial Sequence
  Description of Artificial Sequence: Synthetic oligonucleotide
  Antisense strand to SEQ ID NO: 2055438
uucaauggaccaaggacag

SEQ ID NO: 2055440 - RNA, 19 nt, Artificial Sequence
  Description of Artificial Sequence: Synthetic oligonucleotide
  Sense strand starting at position 361 of SEQ ID NO: 1881578
aguuguauuguguuugcuu

SEQ ID NO: 2055441 - RNA, 19 nt, Artificial Sequence
  Description of Artificial Sequence: Synthetic oligonucleotide
  Antisense strand to SEQ ID NO: 2055440
aagcaaacacaauacaacu

SEQ ID NO: 2055442 - RNA, 19 nt, Artificial Sequence
  Description of Artificial Sequence: Synthetic oligonucleotide
  Sense strand starting at position 563 of SEQ ID NO: 1881578
ccaugauuugcaugucuuu

SEQ ID NO: 2055443 - RNA, 19 nt, Artificial Sequence
  Description of Artificial Sequence: Synthetic oligonucleotide
  Antisense strand to SEQ ID NO: 2055442
aaagacaugcaaaucaugg

SEQ ID NO: 2055444 - RNA, 19 nt, Artificial Sequence
  Description of Artificial Sequence: Synthetic oligonucleotide
  Sense strand starting at position 599 of SEQ ID NO: 1881578
uuuccuuaggcguuuguca

SEQ ID NO: 2055445 - RNA, 19 nt, Artificial Sequence
  Description of Artificial Sequence: Synthetic oligonucleotide
  Antisense strand to SEQ ID NO: 2055444
ugacaaacgccuaaggaaa

SEQ ID NO: 2055446 - RNA, 19 nt, Artificial Sequence
  Description of Artificial Sequence: Synthetic oligonucleotide
  Sense strand starting at position 640 of SEQ ID NO: 1881578
ggguauccuggcuauuaau

SEQ ID NO: 2055447 - RNA, 19 nt, Artificial Sequence
  Description of Artificial Sequence: Synthetic oligonucleotide
  Antisense strand to SEQ ID NO: 2055446
auuaauagccaggauaccc

SEQ ID NO: 2055448 - RNA, 19 nt, Artificial Sequence
  Description of Artificial Sequence: Synthetic oligonucleotide
  Sense strand starting at position 762 of SEQ ID NO: 1881578
gggucacgucuugaugauu

SEQ ID NO: 2055449 - RNA, 19 nt, Artificial Sequence
  Description of Artificial Sequence: Synthetic oligonucleotide
  Antisense strand to SEQ ID NO: 2055448
aaucaucaagacgugaccc

SEQ ID NO: 2055450 - RNA, 19 nt, Artificial Sequence
  Description of Artificial Sequence: Synthetic oligonucleotide
  Sense strand starting at position 765 of SEQ ID NO: 1881578
ucacgucuugaugauucuu

SEQ ID NO: 2055451 - RNA, 19 nt, Artificial Sequence
  Description of Artificial Sequence: Synthetic oligonucleotide
  Antisense strand to SEQ ID NO: 2055450
aagaaucaucaagacguga

SEQ ID NO: 2055452 - RNA, 19 nt, Artificial Sequence
  Description of Artificial Sequence: Synthetic oligonucleotide
  Sense strand starting at position 884 of SEQ ID NO: 1881578
uggaaugacuuucuuuauu

SEQ ID NO: 2055453 - RNA, 19 nt, Artificial Sequence
  Description of Artificial Sequence: Synthetic oligonucleotide
  Antisense strand to SEQ ID NO: 2055452
aauaaagaaagucauucca

SEQ ID NO: 2055454 - RNA, 19 nt, Artificial Sequence
  Description of Artificial Sequence: Synthetic oligonucleotide
  Sense strand starting at position 905 of SEQ ID NO: 1881578
aguuguaacaguuggagga

SEQ ID NO: 2055455 - RNA, 19 nt, Artificial Sequence
  Description of Artificial Sequence: Synthetic oligonucleotide
  Antisense strand to SEQ ID NO: 2055454
uccuccaacuguuacaacu

SEQ ID NO: 2055456 - RNA, 19 nt, Artificial Sequence
  Description of Artificial Sequence: Synthetic oligonucleotide
  Sense strand starting at position 906 of SEQ ID NO: 1881578
guuguaacaguuggaggau

SEQ ID NO: 2055457 - RNA, 19 nt, Artificial Sequence
  Description of Artificial Sequence: Synthetic oligonucleotide
  Antisense strand to SEQ ID NO: 2055456
auccuccaacuguuacaac

SEQ ID NO: 2055458 - RNA, 19 nt, Artificial Sequence
  Description of Artificial Sequence: Synthetic oligonucleotide
  Sense strand starting at position 909 of SEQ ID NO: 1881578
guaacaguuggaggauaau

SEQ ID NO: 2055459 - RNA, 19 nt, Artificial Sequence
  Description of Artificial Sequence: Synthetic oligonucleotide
  Antisense strand to SEQ ID NO: 2055458
auuauccuccaacuguuac

SEQ ID NO: 2055460 - RNA, 19 nt, Artificial Sequence
  Description of Artificial Sequence: Synthetic oligonucleotide
  Sense strand starting at position 1824 of SEQ ID NO: 1881578
gcugcugaagcagagauaa

SEQ ID NO: 2055461 - RNA, 19 nt, Artificial Sequence
  Description of Artificial Sequence: Synthetic oligonucleotide
  Antisense strand to SEQ ID NO: 2055460
uuaucucugcuucagcagc

SEQ ID NO: 2055462 - RNA, 19 nt, Artificial Sequence
  Description of Artificial Sequence: Synthetic oligonucleotide
  Sense strand starting at position 2351 of SEQ ID NO: 1881578
guuguaggugguuugcgaa

SEQ ID NO: 2055463 - RNA, 19 nt, Artificial Sequence
  Description of Artificial Sequence: Synthetic oligonucleotide
  Antisense strand to SEQ ID NO: 2055462
uucgcaaaccaccuacaac

SEQ ID NO: 2055464 - RNA, 19 nt, Artificial Sequence
  Description of Artificial Sequence: Synthetic oligonucleotide
  Sense strand starting at position 2357 of SEQ ID NO: 1881578
ggugguuugcgaaaggcuu

SEQ ID NO: 2055465 - RNA, 19 nt, Artificial Sequence
  Description of Artificial Sequence: Synthetic oligonucleotide
  Antisense strand to SEQ ID NO: 2055464
aagccuuucgcaaaccacc

SEQ ID NO: 2055466 - RNA, 19 nt, Artificial Sequence
  Description of Artificial Sequence: Synthetic oligonucleotide
  Sense strand starting at position 2561 of SEQ ID NO: 1881578
gggcaucuugcccaaagga

SEQ ID NO: 2055467 - RNA, 19 nt, Artificial Sequence
  Description of Artificial Sequence: Synthetic oligonucleotide
  Antisense strand to SEQ ID NO: 2055466
uccuuugggcaagaugccc

SEQ ID NO: 2055468 - RNA, 19 nt, Artificial Sequence
  Description of Artificial Sequence: Synthetic oligonucleotide
  Sense strand starting at position 2770 of SEQ ID NO: 1881578
ucuacucaucaaggcagaa

SEQ ID NO: 2055469 - RNA, 19 nt, Artificial Sequence
  Description of Artificial Sequence: Synthetic oligonucleotide
  Antisense strand to SEQ ID NO: 2055468
uucugccuugaugaguaga

SEQ ID NO: 2055470 - RNA, 19 nt, Artificial Sequence
  Description of Artificial Sequence: Synthetic oligonucleotide
  Sense strand starting at position 2832 of SEQ ID NO: 1881578
agcugaaacuguguaggaa

SEQ ID NO: 2055471 - RNA, 19 nt, Artificial Sequence
  Description of Artificial Sequence: Synthetic oligonucleotide
  Antisense strand to SEQ ID NO: 2055470
uuccuacacaguuucagcu

SEQ ID NO: 2055472 - RNA, 19 nt, Artificial Sequence
  Description of Artificial Sequence: Synthetic oligonucleotide
  Sense strand starting at position 2851 of SEQ ID NO: 1881578
gcggauuucuaccugcaaa

SEQ ID NO: 2055473 - RNA, 19 nt, Artificial Sequence
  Description of Artificial Sequence: Synthetic oligonucleotide
  Antisense strand to SEQ ID NO: 2055472
uuugcagguagaaauccgc

SEQ ID NO: 2055474 - RNA, 19 nt, Artificial Sequence
  Description of Artificial Sequence: Synthetic oligonucleotide
  Sense strand starting at position 2897 of SEQ ID NO: 1881578
gggauacaauuaguuaauu

SEQ ID NO: 2055475 - RNA, 19 nt, Artificial Sequence
  Description of Artificial Sequence: Synthetic oligonucleotide
  Antisense strand to SEQ ID NO: 2055474
aauuaacuaauuguauccc

SEQ ID NO: 2055476 - RNA, 19 nt, Artificial Sequence
  Description of Artificial Sequence: Synthetic oligonucleotide
  Sense strand starting at position 3015 of SEQ ID NO: 1881578
cucugcauuggacaaagua

SEQ ID NO: 2055477 - RNA, 19 nt, Artificial Sequence
  Description of Artificial Sequence: Synthetic oligonucleotide
  Antisense strand to SEQ ID NO: 2055476
uacuuuguccaaugcagag

SEQ ID NO: 2055478 - RNA, 19 nt, Artificial Sequence
  Description of Artificial Sequence: Synthetic oligonucleotide
  Sense strand starting at position 3141 of SEQ ID NO: 1881578
uguacagaugcucacuaaa

SEQ ID NO: 2055479 - RNA, 19 nt, Artificial Sequence
  Description of Artificial Sequence: Synthetic oligonucleotide
  Antisense strand to SEQ ID NO: 2055478
uuuagugagcaucuguaca

SEQ ID NO: 2055480 - RNA, 19 nt, Artificial Sequence
  Description of Artificial Sequence: Synthetic oligonucleotide
  Sense strand starting at position 3144 of SEQ ID NO: 1881578
acagaugcucacuaaagua

SEQ ID NO: 2055481 - RNA, 19 nt, Artificial Sequence
  Description of Artificial Sequence: Synthetic oligonucleotide
  Antisense strand to SEQ ID NO: 2055480
uacuuuagugagcaucugu

SEQ ID NO: 2055482 - RNA, 19 nt, Artificial Sequence
  Description of Artificial Sequence: Synthetic oligonucleotide
  Sense strand starting at position 3277 of SEQ ID NO: 1881578
aaugacuuuggugguauau

SEQ ID NO: 2055483 - RNA, 19 nt, Artificial Sequence
  Description of Artificial Sequence: Synthetic oligonucleotide
  Antisense strand to SEQ ID NO: 2055482
auauaccaccaaagucauu

SEQ ID NO: 2055484 - RNA, 19 nt, Artificial Sequence
  Description of Artificial Sequence: Synthetic oligonucleotide
  Sense strand starting at position 3473 of SEQ ID NO: 1881578
uaggguuaucuguacauuc

SEQ ID NO: 2055485 - RNA, 19 nt, Artificial Sequence
  Description of Artificial Sequence: Synthetic oligonucleotide
  Antisense strand to SEQ ID NO: 2055484
gaauguacagauaacccua

SEQ ID NO: 2055486 - RNA, 19 nt, Artificial Sequence
  Description of Artificial Sequence: Synthetic oligonucleotide
  Sense strand starting at position 3475 of SEQ ID NO: 1881578
ggguuaucuguacauucuu

SEQ ID NO: 2055487 - RNA, 19 nt, Artificial Sequence
  Description of Artificial Sequence: Synthetic oligonucleotide
  Antisense strand to SEQ ID NO: 2055486
aagaauguacagauaaccc

SEQ ID NO: 2055488 - RNA, 19 nt, Artificial Sequence
  Description of Artificial Sequence: Synthetic oligonucleotide
  Sense strand starting at position 3503 of SEQ ID NO: 1881578
gugaguacugcuuagagga

SEQ ID NO: 2055489 - RNA, 19 nt, Artificial Sequence
  Description of Artificial Sequence: Synthetic oligonucleotide
  Antisense strand to SEQ ID NO: 2055488
uccucuaagcaguacucac

SEQ ID NO: 2055490 - RNA, 19 nt, Artificial Sequence
  Description of Artificial Sequence: Synthetic oligonucleotide
  Sense strand starting at position 3516 of SEQ ID NO: 1881578
agaggaguuugcuuuauga

SEQ ID NO: 2055491 - RNA, 19 nt, Artificial Sequence
  Description of Artificial Sequence: Synthetic oligonucleotide
  Antisense strand to SEQ ID NO: 2055490
ucauaaagcaaacuccucu

SEQ ID NO: 2055492 - RNA, 19 nt, Artificial Sequence
  Description of Artificial Sequence: Synthetic oligonucleotide
  Sense strand starting at position 3518 of SEQ ID NO: 1881578
aggaguuugcuuuaugaac

SEQ ID NO: 2055493 - RNA, 19 nt, Artificial Sequence
  Description of Artificial Sequence: Synthetic oligonucleotide
  Antisense strand to SEQ ID NO: 2055492
guucauaaagcaaacuccu

SEQ ID NO: 2055494 - RNA, 19 nt, Artificial Sequence
  Description of Artificial Sequence: Synthetic oligonucleotide
  Sense strand starting at position 3525 of SEQ ID NO: 1881578
ugcuuuaugaacugggaag

SEQ ID NO: 2055495 - RNA, 19 nt, Artificial Sequence
  Description of Artificial Sequence: Synthetic oligonucleotide
  Antisense strand to SEQ ID NO: 2055494
cuucccaguucauaaagca

SEQ ID NO: 2055496 - RNA, 19 nt, Artificial Sequence
  Description of Artificial Sequence: Synthetic oligonucleotide
  Sense strand starting at position 3569 of SEQ ID NO: 1881578
gguuaaagaucuuugguac

SEQ ID NO: 2055497 - RNA, 19 nt, Artificial Sequence
  Description of Artificial Sequence: Synthetic oligonucleotide
  Antisense strand to SEQ ID NO: 2055496
guaccaaagaucuuuaacc

SEQ ID NO: 2055498 - RNA, 19 nt, Artificial Sequence
  Description of Artificial Sequence: Synthetic oligonucleotide
  Sense strand starting at position 3624 of SEQ ID NO: 1881578
accuuuaauuguguaaauc

SEQ ID NO: 2055499 - RNA, 19 nt, Artificial Sequence
  Description of Artificial Sequence: Synthetic oligonucleotide
  Antisense strand to SEQ ID NO: 2055498
gauuuacacaauuaaaggu

SEQ ID NO: 2055500 - RNA, 19 nt, Artificial Sequence
  Description of Artificial Sequence: Synthetic oligonucleotide
  Sense strand starting at position 3625 of SEQ ID NO: 1881578
ccuuuaauuguguaaauca

SEQ ID NO: 2055501 - RNA, 19 nt, Artificial Sequence
  Description of Artificial Sequence: Synthetic oligonucleotide
  Antisense strand to SEQ ID NO: 2055500
ugauuuacacaauuaaagg

SEQ ID NO: 2055502 - RNA, 19 nt, Artificial Sequence
  Description of Artificial Sequence: Synthetic oligonucleotide
  Sense strand starting at position 3676 of SEQ ID NO: 1881578
cagaauuauguugauguca

SEQ ID NO: 2055503 - RNA, 19 nt, Artificial Sequence
  Description of Artificial Sequence: Synthetic oligonucleotide
  Antisense strand to SEQ ID NO: 2055502
ugacaucaacauaauucug

SEQ ID NO: 2055504 - RNA, 19 nt, Artificial Sequence
  Description of Artificial Sequence: Synthetic oligonucleotide
  Sense strand starting at position 3690 of SEQ ID NO: 1881578
ugucauuauuggguaugau

SEQ ID NO: 2055505 - RNA, 19 nt, Artificial Sequence
  Description of Artificial Sequence: Synthetic oligonucleotide
  Antisense strand to SEQ ID NO: 2055504
aucauacccaauaaugaca

SEQ ID NO: 2055506 - RNA, 19 nt, Artificial Sequence
  Description of Artificial Sequence: Synthetic oligonucleotide
  Sense strand starting at position 3691 of SEQ ID NO: 1881578
gucauuauuggguaugauc

SEQ ID NO: 2055507 - RNA, 19 nt, Artificial Sequence
  Description of Artificial Sequence: Synthetic oligonucleotide
  Antisense strand to SEQ ID NO: 2055506
gaucauacccaauaaugac

SEQ ID NO: 2055508 - RNA, 19 nt, Artificial Sequence
  Description of Artificial Sequence: Synthetic oligonucleotide
  Sense strand starting at position 3764 of SEQ ID NO: 1881578
uggaaaguuuaacuuuacu

SEQ ID NO: 2055509 - RNA, 19 nt, Artificial Sequence
  Description of Artificial Sequence: Synthetic oligonucleotide
  Antisense strand to SEQ ID NO: 2055508
aguaaaguuaaacuuucca

SEQ ID NO: 2055510 - RNA, 19 nt, Artificial Sequence
  Description of Artificial Sequence: Synthetic oligonucleotide
  Sense strand starting at position 3775 of SEQ ID NO: 1881578
acuuuacuccuggaugguu

SEQ ID NO: 2055511 - RNA, 19 nt, Artificial Sequence
  Description of Artificial Sequence: Synthetic oligonucleotide
  Antisense strand to SEQ ID NO: 2055510
aaccauccaggaguaaagu

SEQ ID NO: 2055512 - RNA, 19 nt, Artificial Sequence
  Description of Artificial Sequence: Synthetic oligonucleotide
  Sense strand starting at position 3780 of SEQ ID NO: 1881578
acuccuggaugguuuauua

SEQ ID NO: 2055513 - RNA, 19 nt, Artificial Sequence
  Description of Artificial Sequence: Synthetic oligonucleotide
  Antisense strand to SEQ ID NO: 2055512
uaauaaaccauccaggagu

SEQ ID NO: 2055514 - RNA, 19 nt, Artificial Sequence
  Description of Artificial Sequence: Synthetic oligonucleotide
  Sense strand starting at position 3784 of SEQ ID NO: 1881578
cuggaugguuuauuacauu

SEQ ID NO: 2055515 - RNA, 19 nt, Artificial Sequence
  Description of Artificial Sequence: Synthetic oligonucleotide
  Antisense strand to SEQ ID NO: 2055514
aauguaauaaaccauccag

SEQ ID NO: 2055516 - RNA, 19 nt, Artificial Sequence
  Description of Artificial Sequence: Synthetic oligonucleotide
  Sense strand starting at position 3844 of SEQ ID NO: 1881578
aaugcagguccauguauuu

SEQ ID NO: 2055517 - RNA, 19 nt, Artificial Sequence
  Description of Artificial Sequence: Synthetic oligonucleotide
  Antisense strand to SEQ ID NO: 2055516
aaauacauggaccugcauu

SEQ ID NO: 2055518 - RNA, 19 nt, Artificial Sequence
  Description of Artificial Sequence: Synthetic oligonucleotide
  Sense strand starting at position 342 of SEQ ID NO: 1881579
cuuucuguaccagauuaug

SEQ ID NO: 2055519 - RNA, 19 nt, Artificial Sequence
  Description of Artificial Sequence: Synthetic oligonucleotide
  Antisense strand to SEQ ID NO: 2055518
cauaaucugguacagaaag

SEQ ID NO: 2055520 - RNA, 19 nt, Artificial Sequence
  Description of Artificial Sequence: Synthetic oligonucleotide
  Sense strand starting at position 348 of SEQ ID NO: 1881579
guaccagauuaugugacau

SEQ ID NO: 2055521 - RNA, 19 nt, Artificial Sequence
  Description of Artificial Sequence: Synthetic oligonucleotide
  Antisense strand to SEQ ID NO: 2055520
augucacauaaucugguac

SEQ ID NO: 2055522 - RNA, 19 nt, Artificial Sequence
  Description of Artificial Sequence: Synthetic oligonucleotide
  Sense strand starting at position 625 of SEQ ID NO: 1881579
uggaguaaguaaucaagua

SEQ ID NO: 2055523 - RNA, 19 nt, Artificial Sequence
  Description of Artificial Sequence: Synthetic oligonucleotide
  Antisense strand to SEQ ID NO: 2055522
uacuugauuacuuacucca

SEQ ID NO: 2055524 - RNA, 19 nt, Artificial Sequence
  Description of Artificial Sequence: Synthetic oligonucleotide
  Sense strand starting at position 1002 of SEQ ID NO: 1881579
acuuguuaguaaucucuaa

SEQ ID NO: 2055525 - RNA, 19 nt, Artificial Sequence
  Description of Artificial Sequence: Synthetic oligonucleotide
  Antisense strand to SEQ ID NO: 2055524
uuagagauuacuaacaagu

SEQ ID NO: 2055526 - RNA, 19 nt, Artificial Sequence
  Description of Artificial Sequence: Synthetic oligonucleotide
  Sense strand starting at position 1006 of SEQ ID NO: 1881579
guuaguaaucucuaaauac

SEQ ID NO: 2055527 - RNA, 19 nt, Artificial Sequence
  Description of Artificial Sequence: Synthetic oligonucleotide
  Antisense strand to SEQ ID NO: 2055526
guauuuagagauuacuaac

SEQ ID NO: 2055528 - RNA, 19 nt, Artificial Sequence
  Description of Artificial Sequence: Synthetic oligonucleotide
  Sense strand starting at position 1169 of SEQ ID NO: 1881579
guaauucugccugaucauu

SEQ ID NO: 2055529 - RNA, 19 nt, Artificial Sequence
  Description of Artificial Sequence: Synthetic oligonucleotide
  Antisense strand to SEQ ID NO: 2055528
aaugaucaggcagaauuac

SEQ ID NO: 2055530 - RNA, 19 nt, Artificial Sequence
  Description of Artificial Sequence: Synthetic oligonucleotide
  Sense strand starting at position 1234 of SEQ ID NO: 1881579
cauguuaguguugcugcua

SEQ ID NO: 2055531 - RNA, 19 nt, Artificial Sequence
  Description of Artificial Sequence: Synthetic oligonucleotide
  Antisense strand to SEQ ID NO: 2055530
uagcagcaacacuaacaug

SEQ ID NO: 2055532 - RNA, 19 nt, Artificial Sequence
  Description of Artificial Sequence: Synthetic oligonucleotide
  Sense strand starting at position 1443 of SEQ ID NO: 1881579
augugaacauuguuaagac

SEQ ID NO: 2055533 - RNA, 19 nt, Artificial Sequence
  Description of Artificial Sequence: Synthetic oligonucleotide
  Antisense strand to SEQ ID NO: 2055532
gucuuaacaauguucacau

SEQ ID NO: 2055534 - RNA, 19 nt, Artificial Sequence
  Description of Artificial Sequence: Synthetic oligonucleotide
  Sense strand starting at position 1618 of SEQ ID NO: 1881579
ccaggaagguucuuacuga

SEQ ID NO: 2055535 - RNA, 19 nt, Artificial Sequence
  Description of Artificial Sequence: Synthetic oligonucleotide
  Antisense strand to SEQ ID NO: 2055534
ucaguaagaaccuuccugg

SEQ ID NO: 2055536 - RNA, 19 nt, Artificial Sequence
  Description of Artificial Sequence: Synthetic oligonucleotide
  Sense strand starting at position 1663 of SEQ ID NO: 1881579
auaaacaugugguugucua

SEQ ID NO: 2055537 - RNA, 19 nt, Artificial Sequence
  Description of Artificial Sequence: Synthetic oligonucleotide
  Antisense strand to SEQ ID NO: 2055536
uagacaaccacauguuuau

SEQ ID NO: 2055538 - RNA, 19 nt, Artificial Sequence
  Description of Artificial Sequence: Synthetic oligonucleotide
  Sense strand starting at position 1674 of SEQ ID NO: 1881579
guugucuagguagaacuuu

SEQ ID NO: 2055539 - RNA, 19 nt, Artificial Sequence
  Description of Artificial Sequence: Synthetic oligonucleotide
  Antisense strand to SEQ ID NO: 2055538
aaaguucuaccuagacaac

SEQ ID NO: 2055540 - RNA, 19 nt, Artificial Sequence
  Description of Artificial Sequence: Synthetic oligonucleotide
  Sense strand starting at position 1835 of SEQ ID NO: 1881579
gcagacacgaucuacaguu

SEQ ID NO: 2055541 - RNA, 19 nt, Artificial Sequence
  Description of Artificial Sequence: Synthetic oligonucleotide
  Antisense strand to SEQ ID NO: 2055540
aacuguagaucgugucugc

SEQ ID NO: 2055542 - RNA, 19 nt, Artificial Sequence
  Description of Artificial Sequence: Synthetic oligonucleotide
  Sense strand starting at position 1837 of SEQ ID NO: 1881579
agacacgaucuacaguuua

SEQ ID NO: 2055543 - RNA, 19 nt, Artificial Sequence
  Description of Artificial Sequence: Synthetic oligonucleotide
  Antisense strand to SEQ ID NO: 2055542
uaaacuguagaucgugucu

SEQ ID NO: 2055544 - RNA, 19 nt, Artificial Sequence
  Description of Artificial Sequence: Synthetic oligonucleotide
  Sense strand starting at position 1903 of SEQ ID NO: 1881579
guagacauguaaucuagaa

SEQ ID NO: 2055545 - RNA, 19 nt, Artificial Sequence
  Description of Artificial Sequence: Synthetic oligonucleotide
  Antisense strand to SEQ ID NO: 2055544
uucuagauuacaugucuac

SEQ ID NO: 2055546 - RNA, 19 nt, Artificial Sequence
  Description of Artificial Sequence: Synthetic oligonucleotide
  Sense strand starting at position 1984 of SEQ ID NO: 1881579
cgcuucucccaugaaacaa

SEQ ID NO: 2055547 - RNA, 19 nt, Artificial Sequence
  Description of Artificial Sequence: Synthetic oligonucleotide
  Antisense strand to SEQ ID NO: 2055546
uuguuucaugggagaagcg

SEQ ID NO: 2055548 - RNA, 19 nt, Artificial Sequence
  Description of Artificial Sequence: Synthetic oligonucleotide
  Sense strand starting at position 2216 of SEQ ID NO: 1881579
auguauauaucucuuugga

SEQ ID NO: 2055549 - RNA, 19 nt, Artificial Sequence
  Description of Artificial Sequence: Synthetic oligonucleotide
  Antisense strand to SEQ ID NO: 2055548
uccaaagagauauauacau

SEQ ID NO: 2055550 - RNA, 19 nt, Artificial Sequence
  Description of Artificial Sequence: Synthetic oligonucleotide
  Sense strand starting at position 2218 of SEQ ID NO: 1881579
guauauaucucuuuggaag

SEQ ID NO: 2055551 - RNA, 19 nt, Artificial Sequence
  Description of Artificial Sequence: Synthetic oligonucleotide
  Antisense strand to SEQ ID NO: 2055550
cuuccaaagagauauauac

SEQ ID NO: 2055552 - RNA, 19 nt, Artificial Sequence
  Description of Artificial Sequence: Synthetic oligonucleotide
  Sense strand starting at position 2299 of SEQ ID NO: 1881579
cuugucaagguguauagaa

SEQ ID NO: 2055553 - RNA, 19 nt, Artificial Sequence
  Description of Artificial Sequence: Synthetic oligonucleotide
  Antisense strand to SEQ ID NO: 2055552
uucuauacaccuugacaag

SEQ ID NO: 2055554 - RNA, 19 nt, Artificial Sequence
  Description of Artificial Sequence: Synthetic oligonucleotide
  Sense strand starting at position 2331 of SEQ ID NO: 1881579
ugcuuagaagguuaaauua

SEQ ID NO: 2055555 - RNA, 19 nt, Artificial Sequence
  Description of Artificial Sequence: Synthetic oligonucleotide
  Antisense strand to SEQ ID NO: 2055554
uaauuuaaccuucuaagca

SEQ ID NO: 2055556 - RNA, 19 nt, Artificial Sequence
  Description of Artificial Sequence: Synthetic oligonucleotide
  Sense strand starting at position 2396 of SEQ ID NO: 1881579
gagauauugucacuaggua

SEQ ID NO: 2055557 - RNA, 19 nt, Artificial Sequence
  Description of Artificial Sequence: Synthetic oligonucleotide
  Antisense strand to SEQ ID NO: 2055556
uaccuagugacaauaucuc

SEQ ID NO: 2055558 - RNA, 19 nt, Artificial Sequence
  Description of Artificial Sequence: Synthetic oligonucleotide
  Sense strand starting at position 2579 of SEQ ID NO: 1881579
agggcuuaguuagcauuua

SEQ ID NO: 2055559 - RNA, 19 nt, Artificial Sequence
  Description of Artificial Sequence: Synthetic oligonucleotide
  Antisense strand to SEQ ID NO: 2055558
uaaaugcuaacuaagcccu

SEQ ID NO: 2055560 - RNA, 19 nt, Artificial Sequence
  Description of Artificial Sequence: Synthetic oligonucleotide
  Sense strand starting at position 2590 of SEQ ID NO: 1881579
agcauuuaucuuugcuuag

SEQ ID NO: 2055561 - RNA, 19 nt, Artificial Sequence
  Description of Artificial Sequence: Synthetic oligonucleotide
  Antisense strand to SEQ ID NO: 2055560
cuaagcaaagauaaaugcu

SEQ ID NO: 2055562 - RNA, 19 nt, Artificial Sequence
  Description of Artificial Sequence: Synthetic oligonucleotide
  Sense strand starting at position 2591 of SEQ ID NO: 1881579
gcauuuaucuuugcuuagu

SEQ ID NO: 2055563 - RNA, 19 nt, Artificial Sequence
  Description of Artificial Sequence: Synthetic oligonucleotide
  Antisense strand to SEQ ID NO: 2055562
acuaagcaaagauaaaugc

SEQ ID NO: 2055564 - RNA, 19 nt, Artificial Sequence
  Description of Artificial Sequence: Synthetic oligonucleotide
  Sense strand starting at position 2880 of SEQ ID NO: 1881579
ccaacauguuuaguuggaa

SEQ ID NO: 2055565 - RNA, 19 nt, Artificial Sequence
  Description of Artificial Sequence: Synthetic oligonucleotide
  Antisense strand to SEQ ID NO: 2055564
uuccaacuaaacauguugg

SEQ ID NO: 2055566 - RNA, 19 nt, Artificial Sequence
  Description of Artificial Sequence: Synthetic oligonucleotide
  Sense strand starting at position 2881 of SEQ ID NO: 1881579
caacauguuuaguuggaaa

SEQ ID NO: 2055567 - RNA, 19 nt, Artificial Sequence
  Description of Artificial Sequence: Synthetic oligonucleotide
  Antisense strand to SEQ ID NO: 2055566
uuuccaacuaaacauguug

SEQ ID NO: 2055568 - RNA, 19 nt, Artificial Sequence
  Description of Artificial Sequence: Synthetic oligonucleotide
  Sense strand starting at position 3083 of SEQ ID NO: 1881579
cucauaagugcugacuagu

SEQ ID NO: 2055569 - RNA, 19 nt, Artificial Sequence
  Description of Artificial Sequence: Synthetic oligonucleotide
  Antisense strand to SEQ ID NO: 2055568
acuagucagcacuuaugag

SEQ ID NO: 2055570 - RNA, 19 nt, Artificial Sequence
  Description of Artificial Sequence: Synthetic oligonucleotide
  Sense strand starting at position 3086 of SEQ ID NO: 1881579
auaagugcugacuaguuaa

SEQ ID NO: 2055571 - RNA, 19 nt, Artificial Sequence
  Description of Artificial Sequence: Synthetic oligonucleotide
  Antisense strand to SEQ ID NO: 2055570
uuaacuagucagcacuuau

SEQ ID NO: 2055572 - RNA, 19 nt, Artificial Sequence
  Description of Artificial Sequence: Synthetic oligonucleotide
  Sense strand starting at position 3093 of SEQ ID NO: 1881579
cugacuaguuaauuauaag

SEQ ID NO: 2055573 - RNA, 19 nt, Artificial Sequence
  Description of Artificial Sequence: Synthetic oligonucleotide
  Antisense strand to SEQ ID NO: 2055572
cuuauaauuaacuagucag

SEQ ID NO: 2055574 - RNA, 19 nt, Artificial Sequence
  Description of Artificial Sequence: Synthetic oligonucleotide
  Sense strand starting at position 3150 of SEQ ID NO: 1881579
aaagaagcauguguaauua

SEQ ID NO: 2055575 - RNA, 19 nt, Artificial Sequence
  Description of Artificial Sequence: Synthetic oligonucleotide
  Antisense strand to SEQ ID NO: 2055574
uaauuacacaugcuucuuu

SEQ ID NO: 2055576 - RNA, 19 nt, Artificial Sequence
  Description of Artificial Sequence: Synthetic oligonucleotide
  Sense strand starting at position 3154 of SEQ ID NO: 1881579
aagcauguguaauuauaga

SEQ ID NO: 2055577 - RNA, 19 nt, Artificial Sequence
  Description of Artificial Sequence: Synthetic oligonucleotide
  Antisense strand to SEQ ID NO: 2055576
ucuauaauuacacaugcuu

SEQ ID NO: 2055578 - RNA, 19 nt, Artificial Sequence
  Description of Artificial Sequence: Synthetic oligonucleotide
  Sense strand starting at position 3159 of SEQ ID NO: 1881579
uguguaauuauagacugua

SEQ ID NO: 2055579 - RNA, 19 nt, Artificial Sequence
  Description of Artificial Sequence: Synthetic oligonucleotide
  Antisense strand to SEQ ID NO: 2055578
uacagucuauaauuacaca

SEQ ID NO: 2055580 - RNA, 19 nt, Artificial Sequence
  Description of Artificial Sequence: Synthetic oligonucleotide
  Sense strand starting at position 3242 of SEQ ID NO: 1881579
auuauauauucugcaggca

SEQ ID NO: 2055581 - RNA, 19 nt, Artificial Sequence
  Description of Artificial Sequence: Synthetic oligonucleotide
  Antisense strand to SEQ ID NO: 2055580
ugccugcagaauauauaau

SEQ ID NO: 2055582 - RNA, 19 nt, Artificial Sequence
  Description of Artificial Sequence: Synthetic oligonucleotide
  Sense strand starting at position 3437 of SEQ ID NO: 1881579
caauaugaagugugaaggu

SEQ ID NO: 2055583 - RNA, 19 nt, Artificial Sequence
  Description of Artificial Sequence: Synthetic oligonucleotide
  Antisense strand to SEQ ID NO: 2055582
accuucacacuucauauug

SEQ ID NO: 2055584 - RNA, 19 nt, Artificial Sequence
  Description of Artificial Sequence: Synthetic oligonucleotide
  Sense strand starting at position 3608 of SEQ ID NO: 1881579
ucagaaaccucagaggaaa

SEQ ID NO: 2055585 - RNA, 19 nt, Artificial Sequence
  Description of Artificial Sequence: Synthetic oligonucleotide
  Antisense strand to SEQ ID NO: 2055584
uuuccucugagguuucuga

SEQ ID NO: 2055586 - RNA, 19 nt, Artificial Sequence
  Description of Artificial Sequence: Synthetic oligonucleotide
  Sense strand starting at position 3636 of SEQ ID NO: 1881579
agggacugaaaucguguuu

SEQ ID NO: 2055587 - RNA, 19 nt, Artificial Sequence
  Description of Artificial Sequence: Synthetic oligonucleotide
  Antisense strand to SEQ ID NO: 2055586
aaacacgauuucagucccu

SEQ ID NO: 2055588 - RNA, 19 nt, Artificial Sequence
  Description of Artificial Sequence: Synthetic oligonucleotide
  Sense strand starting at position 3686 of SEQ ID NO: 1881579
ugcucucgucuuguguaaa

SEQ ID NO: 2055589 - RNA, 19 nt, Artificial Sequence
  Description of Artificial Sequence: Synthetic oligonucleotide
  Antisense strand to SEQ ID NO: 2055588
uuuacacaagacgagagca

SEQ ID NO: 2055590 - RNA, 19 nt, Artificial Sequence
  Description of Artificial Sequence: Synthetic oligonucleotide
  Sense strand starting at position 3738 of SEQ ID NO: 1881579
acaggaaguuuauucugua

SEQ ID NO: 2055591 - RNA, 19 nt, Artificial Sequence
  Description of Artificial Sequence: Synthetic oligonucleotide
  Antisense strand to SEQ ID NO: 2055590
uacagaauaaacuuccugu

SEQ ID NO: 2055592 - RNA, 19 nt, Artificial Sequence
  Description of Artificial Sequence: Synthetic oligonucleotide
  Sense strand starting at position 3742 of SEQ ID NO: 1881579
gaaguuuauucuguagaag

SEQ ID NO: 2055593 - RNA, 19 nt, Artificial Sequence
  Description of Artificial Sequence: Synthetic oligonucleotide
  Antisense strand to SEQ ID NO: 2055592
cuucuacagaauaaacuuc

SEQ ID NO: 2055594 - RNA, 19 nt, Artificial Sequence
  Description of Artificial Sequence: Synthetic oligonucleotide
  Sense strand starting at position 3816 of SEQ ID NO: 1881579
ggugaugugccauaccaag

SEQ ID NO: 2055595 - RNA, 19 nt, Artificial Sequence
  Description of Artificial Sequence: Synthetic oligonucleotide
  Antisense strand to SEQ ID NO: 2055594
cuugguauggcacaucacc

SEQ ID NO: 2055596 - RNA, 19 nt, Artificial Sequence
  Description of Artificial Sequence: Synthetic oligonucleotide
  Sense strand starting at position 3951 of SEQ ID NO: 1881579
gauucuucucuguagaagc

SEQ ID NO: 2055597 - RNA, 19 nt, Artificial Sequence
  Description of Artificial Sequence: Synthetic oligonucleotide
  Antisense strand to SEQ ID NO: 2055596
gcuucuacagagaagaauc

SEQ ID NO: 2055598 - RNA, 19 nt, Artificial Sequence
  Description of Artificial Sequence: Synthetic oligonucleotide
  Sense strand starting at position 96 of SEQ ID NO: 1881580
auggaaguacuccguggaa

SEQ ID NO: 2055599 - RNA, 19 nt, Artificial Sequence
  Description of Artificial Sequence: Synthetic oligonucleotide
  Antisense strand to SEQ ID NO: 2055598
uuccacggaguacuuccau

SEQ ID NO: 2055600 - RNA, 19 nt, Artificial Sequence
  Description of Artificial Sequence: Synthetic oligonucleotide
  Sense strand starting at position 224 of SEQ ID NO: 1881580
ggaguaagguugucaagua

SEQ ID NO: 2055601 - RNA, 19 nt, Artificial Sequence
  Description of Artificial Sequence: Synthetic oligonucleotide
  Antisense strand to SEQ ID NO: 2055600
uacuugacaaccuuacucc

SEQ ID NO: 2055602 - RNA, 19 nt, Artificial Sequence
  Description of Artificial Sequence: Synthetic oligonucleotide
  Sense strand starting at position 250 of SEQ ID NO: 1881580
ggguguuccagcuaaauuc

SEQ ID NO: 2055603 - RNA, 19 nt, Artificial Sequence
  Description of Artificial Sequence: Synthetic oligonucleotide
  Antisense strand to SEQ ID NO: 2055602
gaauuuagcuggaacaccc

SEQ ID NO: 2055604 - RNA, 19 nt, Artificial Sequence
  Description of Artificial Sequence: Synthetic oligonucleotide
  Sense strand starting at position 310 of SEQ ID NO: 1881580
guaggucucaugcaagauu

SEQ ID NO: 2055605 - RNA, 19 nt, Artificial Sequence
  Description of Artificial Sequence: Synthetic oligonucleotide
  Antisense strand to SEQ ID NO: 2055604
aaucuugcaugagaccuac

SEQ ID NO: 2055606 - RNA, 19 nt, Artificial Sequence
  Description of Artificial Sequence: Synthetic oligonucleotide
  Sense strand starting at position 410 of SEQ ID NO: 1881580
uggcauuccuaaguggaga

SEQ ID NO: 2055607 - RNA, 19 nt, Artificial Sequence
  Description of Artificial Sequence: Synthetic oligonucleotide
  Antisense strand to SEQ ID NO: 2055606
ucuccacuuaggaaugcca

SEQ ID NO: 2055608 - RNA, 19 nt, Artificial Sequence
  Description of Artificial Sequence: Synthetic oligonucleotide
  Sense strand starting at position 411 of SEQ ID NO: 1881580
ggcauuccuaaguggagau

SEQ ID NO: 2055609 - RNA, 19 nt, Artificial Sequence
  Description of Artificial Sequence: Synthetic oligonucleotide
  Antisense strand to SEQ ID NO: 2055608
aucuccacuuaggaaugcc

SEQ ID NO: 2055610 - RNA, 19 nt, Artificial Sequence
  Description of Artificial Sequence: Synthetic oligonucleotide
  Sense strand starting at position 412 of SEQ ID NO: 1881580
gcauuccuaaguggagauu

SEQ ID NO: 2055611 - RNA, 19 nt, Artificial Sequence
  Description of Artificial Sequence: Synthetic oligonucleotide
  Antisense strand to SEQ ID NO: 2055610
aaucuccacuuaggaaugc

SEQ ID NO: 2055612 - RNA, 19 nt, Artificial Sequence
  Description of Artificial Sequence: Synthetic oligonucleotide
  Sense strand starting at position 626 of SEQ ID NO: 1881580
cagugauugggagguucua

SEQ ID NO: 2055613 - RNA, 19 nt, Artificial Sequence
  Description of Artificial Sequence: Synthetic oligonucleotide
  Antisense strand to SEQ ID NO: 2055612
uagaaccucccaaucacug

SEQ ID NO: 2055614 - RNA, 19 nt, Artificial Sequence
  Description of Artificial Sequence: Synthetic oligonucleotide
  Sense strand starting at position 648 of SEQ ID NO: 1881580
gcacuuaauggacagcaau

SEQ ID NO: 2055615 - RNA, 19 nt, Artificial Sequence
  Description of Artificial Sequence: Synthetic oligonucleotide
  Antisense strand to SEQ ID NO: 2055614
auugcuguccauuaagugc

SEQ ID NO: 2055616 - RNA, 19 nt, Artificial Sequence
  Description of Artificial Sequence: Synthetic oligonucleotide
  Sense strand starting at position 668 of SEQ ID NO: 1881580
ccauauguccuguaauaug

SEQ ID NO: 2055617 - RNA, 19 nt, Artificial Sequence
  Description of Artificial Sequence: Synthetic oligonucleotide
  Antisense strand to SEQ ID NO: 2055616
cauauuacaggacauaugg

SEQ ID NO: 2055618 - RNA, 19 nt, Artificial Sequence
  Description of Artificial Sequence: Synthetic oligonucleotide
  Sense strand starting at position 673 of SEQ ID NO: 1881580
uguccuguaauaugugaga

SEQ ID NO: 2055619 - RNA, 19 nt, Artificial Sequence
  Description of Artificial Sequence: Synthetic oligonucleotide
  Antisense strand to SEQ ID NO: 2055618
ucucacauauuacaggaca

SEQ ID NO: 2055620 - RNA, 19 nt, Artificial Sequence
  Description of Artificial Sequence: Synthetic oligonucleotide
  Sense strand starting at position 810 of SEQ ID NO: 1881580
uucuuuaagucuccuggga

SEQ ID NO: 2055621 - RNA, 19 nt, Artificial Sequence
  Description of Artificial Sequence: Synthetic oligonucleotide
  Antisense strand to SEQ ID NO: 2055620
ucccaggagacuuaaagaa

SEQ ID NO: 2055622 - RNA, 19 nt, Artificial Sequence
  Description of Artificial Sequence: Synthetic oligonucleotide
  Sense strand starting at position 828 of SEQ ID NO: 1881580
augcucauacuccaguauu

SEQ ID NO: 2055623 - RNA, 19 nt, Artificial Sequence
  Description of Artificial Sequence: Synthetic oligonucleotide
  Antisense strand to SEQ ID NO: 2055622
aauacuggaguaugagcau

SEQ ID NO: 2055624 - RNA, 19 nt, Artificial Sequence
  Description of Artificial Sequence: Synthetic oligonucleotide
  Sense strand starting at position 1032 of SEQ ID NO: 1881580
aaugaacacuuguuuggua

SEQ ID NO: 2055625 - RNA, 19 nt, Artificial Sequence
  Description of Artificial Sequence: Synthetic oligonucleotide
  Antisense strand to SEQ ID NO: 2055624
uaccaaacaaguguucauu

SEQ ID NO: 2055626 - RNA, 19 nt, Artificial Sequence
  Description of Artificial Sequence: Synthetic oligonucleotide
  Sense strand starting at position 1034 of SEQ ID NO: 1881580
ugaacacuuguuugguaga

SEQ ID NO: 2055627 - RNA, 19 nt, Artificial Sequence
  Description of Artificial Sequence: Synthetic oligonucleotide
  Antisense strand to SEQ ID NO: 2055626
ucuaccaaacaaguguuca

SEQ ID NO: 2055628 - RNA, 19 nt, Artificial Sequence
  Description of Artificial Sequence: Synthetic oligonucleotide
  Sense strand starting at position 1057 of SEQ ID NO: 1881580
agaaguaucgacugagcca

SEQ ID NO: 2055629 - RNA, 19 nt, Artificial Sequence
  Description of Artificial Sequence: Synthetic oligonucleotide
  Antisense strand to SEQ ID NO: 2055628
uggcucagucgauacuucu

SEQ ID NO: 2055630 - RNA, 19 nt, Artificial Sequence
  Description of Artificial Sequence: Synthetic oligonucleotide
  Sense strand starting at position 1085 of SEQ ID NO: 1881580
ucuugacuauaagucaaga

SEQ ID NO: 2055631 - RNA, 19 nt, Artificial Sequence
  Description of Artificial Sequence: Synthetic oligonucleotide
  Antisense strand to SEQ ID NO: 2055630
ucuugacuuauagucaaga

SEQ ID NO: 2055632 - RNA, 19 nt, Artificial Sequence
  Description of Artificial Sequence: Synthetic oligonucleotide
  Sense strand starting at position 1382 of SEQ ID NO: 1881580
uuuggaaggacuuguucca

SEQ ID NO: 2055633 - RNA, 19 nt, Artificial Sequence
  Description of Artificial Sequence: Synthetic oligonucleotide
  Antisense strand to SEQ ID NO: 2055632
uggaacaaguccuuccaaa

SEQ ID NO: 2055634 - RNA, 19 nt, Artificial Sequence
  Description of Artificial Sequence: Synthetic oligonucleotide
  Sense strand starting at position 1627 of SEQ ID NO: 1881580
auguuaguccucuacacau

SEQ ID NO: 2055635 - RNA, 19 nt, Artificial Sequence
  Description of Artificial Sequence: Synthetic oligonucleotide
  Antisense strand to SEQ ID NO: 2055634
auguguagaggacuaacau

SEQ ID NO: 2055636 - RNA, 19 nt, Artificial Sequence
  Description of Artificial Sequence: Synthetic oligonucleotide
  Sense strand starting at position 1758 of SEQ ID NO: 1881580
gccuauuucuggcuucuga

SEQ ID NO: 2055637 - RNA, 19 nt, Artificial Sequence
  Description of Artificial Sequence: Synthetic oligonucleotide
  Antisense strand to SEQ ID NO: 2055636
ucagaagccagaaauaggc

SEQ ID NO: 2055638 - RNA, 19 nt, Artificial Sequence
  Description of Artificial Sequence: Synthetic oligonucleotide
  Sense strand starting at position 1855 of SEQ ID NO: 1881580
ccaaauuuguaacuucguu

SEQ ID NO: 2055639 - RNA, 19 nt, Artificial Sequence
  Description of Artificial Sequence: Synthetic oligonucleotide
  Antisense strand to SEQ ID NO: 2055638
aacgaaguuacaaauuugg

SEQ ID NO: 2055640 - RNA, 19 nt, Artificial Sequence
  Description of Artificial Sequence: Synthetic oligonucleotide
  Sense strand starting at position 1930 of SEQ ID NO: 1881580
uugcauguaagagaaguua

SEQ ID NO: 2055641 - RNA, 19 nt, Artificial Sequence
  Description of Artificial Sequence: Synthetic oligonucleotide
  Antisense strand to SEQ ID NO: 2055640
uaacuucucuuacaugcaa

SEQ ID NO: 2055642 - RNA, 19 nt, Artificial Sequence
  Description of Artificial Sequence: Synthetic oligonucleotide
  Sense strand starting at position 2029 of SEQ ID NO: 1881580
cuuggacauguucgacacu

SEQ ID NO: 2055643 - RNA, 19 nt, Artificial Sequence
  Description of Artificial Sequence: Synthetic oligonucleotide
  Antisense strand to SEQ ID NO: 2055642
agugucgaacauguccaag

SEQ ID NO: 2055644 - RNA, 19 nt, Artificial Sequence
  Description of Artificial Sequence: Synthetic oligonucleotide
  Sense strand starting at position 2032 of SEQ ID NO: 1881580
ggacauguucgacacucau

SEQ ID NO: 2055645 - RNA, 19 nt, Artificial Sequence
  Description of Artificial Sequence: Synthetic oligonucleotide
  Antisense strand to SEQ ID NO: 2055644
augagugucgaacaugucc

SEQ ID NO: 2055646 - RNA, 19 nt, Artificial Sequence
  Description of Artificial Sequence: Synthetic oligonucleotide
  Sense strand starting at position 2188 of SEQ ID NO: 1881580
gaggcuauuucggccauca

SEQ ID NO: 2055647 - RNA, 19 nt, Artificial Sequence
  Description of Artificial Sequence: Synthetic oligonucleotide
  Antisense strand to SEQ ID NO: 2055646
ugauggccgaaauagccuc

SEQ ID NO: 2055648 - RNA, 19 nt, Artificial Sequence
  Description of Artificial Sequence: Synthetic oligonucleotide
  Sense strand starting at position 2218 of SEQ ID NO: 1881580
ccaagcugucacuauguga

SEQ ID NO: 2055649 - RNA, 19 nt, Artificial Sequence
  Description of Artificial Sequence: Synthetic oligonucleotide
  Antisense strand to SEQ ID NO: 2055648
ucacauagugacagcuugg

SEQ ID NO: 2055650 - RNA, 19 nt, Artificial Sequence
  Description of Artificial Sequence: Synthetic oligonucleotide
  Sense strand starting at position 2240 of SEQ ID NO: 1881580
cagagaacugucuggugga

SEQ ID NO: 2055651 - RNA, 19 nt, Artificial Sequence
  Description of Artificial Sequence: Synthetic oligonucleotide
  Antisense strand to SEQ ID NO: 2055650
uccaccagacaguucucug

SEQ ID NO: 2055652 - RNA, 19 nt, Artificial Sequence
  Description of Artificial Sequence: Synthetic oligonucleotide
  Sense strand starting at position 2276 of SEQ ID NO: 1881580
aaugauaggucauuguucu

SEQ ID NO: 2055653 - RNA, 19 nt, Artificial Sequence
  Description of Artificial Sequence: Synthetic oligonucleotide
  Antisense strand to SEQ ID NO: 2055652
agaacaaugaccuaucauu

SEQ ID NO: 2055654 - RNA, 19 nt, Artificial Sequence
  Description of Artificial Sequence: Synthetic oligonucleotide
  Sense strand starting at position 2277 of SEQ ID NO: 1881580
augauaggucauuguucuu

SEQ ID NO: 2055655 - RNA, 19 nt, Artificial Sequence
  Description of Artificial Sequence: Synthetic oligonucleotide
  Antisense strand to SEQ ID NO: 2055654
aagaacaaugaccuaucau

SEQ ID NO: 2055656 - RNA, 19 nt, Artificial Sequence
  Description of Artificial Sequence: Synthetic oligonucleotide
  Sense strand starting at position 2347 of SEQ ID NO: 1881580
gggauuguuauacagcaau

SEQ ID NO: 2055657 - RNA, 19 nt, Artificial Sequence
  Description of Artificial Sequence: Synthetic oligonucleotide
  Antisense strand to SEQ ID NO: 2055656
auugcuguauaacaauccc

SEQ ID NO: 2055658 - RNA, 19 nt, Artificial Sequence
  Description of Artificial Sequence: Synthetic oligonucleotide
  Sense strand starting at position 2350 of SEQ ID NO: 1881580
auuguuauacagcaauuga

SEQ ID NO: 2055659 - RNA, 19 nt, Artificial Sequence
  Description of Artificial Sequence: Synthetic oligonucleotide
  Antisense strand to SEQ ID NO: 2055658
ucaauugcuguauaacaau

SEQ ID NO: 2055660 - RNA, 19 nt, Artificial Sequence
  Description of Artificial Sequence: Synthetic oligonucleotide
  Sense strand starting at position 2505 of SEQ ID NO: 1881580
uuuauuccucuagaggcua

SEQ ID NO: 2055661 - RNA, 19 nt, Artificial Sequence
  Description of Artificial Sequence: Synthetic oligonucleotide
  Antisense strand to SEQ ID NO: 2055660
uagccucuagaggaauaaa

SEQ ID NO: 2055662 - RNA, 19 nt, Artificial Sequence
  Description of Artificial Sequence: Synthetic oligonucleotide
  Sense strand starting at position 2909 of SEQ ID NO: 1881580
auuggagucuucucauucu

SEQ ID NO: 2055663 - RNA, 19 nt, Artificial Sequence
  Description of Artificial Sequence: Synthetic oligonucleotide
  Antisense strand to SEQ ID NO: 2055662
agaaugagaagacuccaau

SEQ ID NO: 2055664 - RNA, 19 nt, Artificial Sequence
  Description of Artificial Sequence: Synthetic oligonucleotide
  Sense strand starting at position 2956 of SEQ ID NO: 1881580
aguauauaauggucaugga

SEQ ID NO: 2055665 - RNA, 19 nt, Artificial Sequence
  Description of Artificial Sequence: Synthetic oligonucleotide
  Antisense strand to SEQ ID NO: 2055664
uccaugaccauuauauacu

SEQ ID NO: 2055666 - RNA, 19 nt, Artificial Sequence
  Description of Artificial Sequence: Synthetic oligonucleotide
  Sense strand starting at position 2960 of SEQ ID NO: 1881580
uauaauggucauggaaggu

SEQ ID NO: 2055667 - RNA, 19 nt, Artificial Sequence
  Description of Artificial Sequence: Synthetic oligonucleotide
  Antisense strand to SEQ ID NO: 2055666
accuuccaugaccauuaua

SEQ ID NO: 2055668 - RNA, 19 nt, Artificial Sequence
  Description of Artificial Sequence: Synthetic oligonucleotide
  Sense strand starting at position 2979 of SEQ ID NO: 1881580
cucugugggaagugacauu

SEQ ID NO: 2055669 - RNA, 19 nt, Artificial Sequence
  Description of Artificial Sequence: Synthetic oligonucleotide
  Antisense strand to SEQ ID NO: 2055668
aaugucacuucccacagag

SEQ ID NO: 2055670 - RNA, 19 nt, Artificial Sequence
  Description of Artificial Sequence: Synthetic oligonucleotide
  Sense strand starting at position 3160 of SEQ ID NO: 1881580
gccauucuccaucagguau

SEQ ID NO: 2055671 - RNA, 19 nt, Artificial Sequence
  Description of Artificial Sequence: Synthetic oligonucleotide
  Antisense strand to SEQ ID NO: 2055670
auaccugauggagaauggc

SEQ ID NO: 2055672 - RNA, 19 nt, Artificial Sequence
  Description of Artificial Sequence: Synthetic oligonucleotide
  Sense strand starting at position 3565 of SEQ ID NO: 1881580
acgauuuccugucucuauu

SEQ ID NO: 2055673 - RNA, 19 nt, Artificial Sequence
  Description of Artificial Sequence: Synthetic oligonucleotide
  Antisense strand to SEQ ID NO: 2055672
aauagagacaggaaaucgu

SEQ ID NO: 2055674 - RNA, 19 nt, Artificial Sequence
  Description of Artificial Sequence: Synthetic oligonucleotide
  Sense strand starting at position 3690 of SEQ ID NO: 1881580
cuacuaucagagugacaug

SEQ ID NO: 2055675 - RNA, 19 nt, Artificial Sequence
  Description of Artificial Sequence: Synthetic oligonucleotide
  Antisense strand to SEQ ID NO: 2055674
caugucacucugauaguag

SEQ ID NO: 2055676 - RNA, 19 nt, Artificial Sequence
  Description of Artificial Sequence: Synthetic oligonucleotide
  Sense strand starting at position 3699 of SEQ ID NO: 1881580
gagugacaugucuaacauu

SEQ ID NO: 2055677 - RNA, 19 nt, Artificial Sequence
  Description of Artificial Sequence: Synthetic oligonucleotide
  Antisense strand to SEQ ID NO: 2055676
aauguuagacaugucacuc

SEQ ID NO: 2055678 - RNA, 19 nt, Artificial Sequence
  Description of Artificial Sequence: Synthetic oligonucleotide
  Sense strand starting at position 12 of SEQ ID NO: 1881581
gcaaacaaguaguuuaaau

SEQ ID NO: 2055679 - RNA, 19 nt, Artificial Sequence
  Description of Artificial Sequence: Synthetic oligonucleotide
  Antisense strand to SEQ ID NO: 2055678
auuuaaacuacuuguuugc

SEQ ID NO: 2055680 - RNA, 19 nt, Artificial Sequence
  Description of Artificial Sequence: Synthetic oligonucleotide
  Sense strand starting at position 85 of SEQ ID NO: 1881581
acaaguagugguuaauuau

SEQ ID NO: 2055681 - RNA, 19 nt, Artificial Sequence
  Description of Artificial Sequence: Synthetic oligonucleotide
  Antisense strand to SEQ ID NO: 2055680
auaauuaaccacuacuugu

SEQ ID NO: 2055682 - RNA, 19 nt, Artificial Sequence
  Description of Artificial Sequence: Synthetic oligonucleotide
  Sense strand starting at position 88 of SEQ ID NO: 1881581
aguagugguuaauuauaga

SEQ ID NO: 2055683 - RNA, 19 nt, Artificial Sequence
  Description of Artificial Sequence: Synthetic oligonucleotide
  Antisense strand to SEQ ID NO: 2055682
ucuauaauuaaccacuacu

SEQ ID NO: 2055684 - RNA, 19 nt, Artificial Sequence
  Description of Artificial Sequence: Synthetic oligonucleotide
  Sense strand starting at position 225 of SEQ ID NO: 1881581
uggcaucacuuguuuauag

SEQ ID NO: 2055685 - RNA, 19 nt, Artificial Sequence
  Description of Artificial Sequence: Synthetic oligonucleotide
  Antisense strand to SEQ ID NO: 2055684
cuauaaacaagugaugcca

SEQ ID NO: 2055686 - RNA, 19 nt, Artificial Sequence
  Description of Artificial Sequence: Synthetic oligonucleotide
  Sense strand starting at position 226 of SEQ ID NO: 1881581
ggcaucacuuguuuauaga

SEQ ID NO: 2055687 - RNA, 19 nt, Artificial Sequence
  Description of Artificial Sequence: Synthetic oligonucleotide
  Antisense strand to SEQ ID NO: 2055686
ucuauaaacaagugaugcc

SEQ ID NO: 2055688 - RNA, 19 nt, Artificial Sequence
  Description of Artificial Sequence: Synthetic oligonucleotide
  Sense strand starting at position 227 of SEQ ID NO: 1881581
gcaucacuuguuuauagaa

SEQ ID NO: 2055689 - RNA, 19 nt, Artificial Sequence
  Description of Artificial Sequence: Synthetic oligonucleotide
  Antisense strand to SEQ ID NO: 2055688
uucuauaaacaagugaugc

SEQ ID NO: 2055690 - RNA, 19 nt, Artificial Sequence
  Description of Artificial Sequence: Synthetic oligonucleotide
  Sense strand starting at position 262 of SEQ ID NO: 1881581
guauuuauuugaggacuca

SEQ ID NO: 2055691 - RNA, 19 nt, Artificial Sequence
  Description of Artificial Sequence: Synthetic oligonucleotide
  Antisense strand to SEQ ID NO: 2055690
ugaguccucaaauaaauac

SEQ ID NO: 2055692 - RNA, 19 nt, Artificial Sequence
  Description of Artificial Sequence: Synthetic oligonucleotide
  Sense strand starting at position 651 of SEQ ID NO: 1881581
uucgcuauuucuggauuua

SEQ ID NO: 2055693 - RNA, 19 nt, Artificial Sequence
  Description of Artificial Sequence: Synthetic oligonucleotide
  Antisense strand to SEQ ID NO: 2055692
uaaauccagaaauagcgaa

SEQ ID NO: 2055694 - RNA, 19 nt, Artificial Sequence
  Description of Artificial Sequence: Synthetic oligonucleotide
  Sense strand starting at position 888 of SEQ ID NO: 1881581
ugucucugcguggaggaaa

SEQ ID NO: 2055695 - RNA, 19 nt, Artificial Sequence
  Description of Artificial Sequence: Synthetic oligonucleotide
  Antisense strand to SEQ ID NO: 2055694
uuuccuccacgcagagaca

SEQ ID NO: 2055696 - RNA, 19 nt, Artificial Sequence
  Description of Artificial Sequence: Synthetic oligonucleotide
  Sense strand starting at position 915 of SEQ ID NO: 1881581
cgaaucccaguuuagauaa

SEQ ID NO: 2055697 - RNA, 19 nt, Artificial Sequence
  Description of Artificial Sequence: Synthetic oligonucleotide
  Antisense strand to SEQ ID NO: 2055696
uuaucuaaacugggauucg

SEQ ID NO: 2055698 - RNA, 19 nt, Artificial Sequence
  Description of Artificial Sequence: Synthetic oligonucleotide
  Sense strand starting at position 1118 of SEQ ID NO: 1881581
cugacaaacgagugauaau

SEQ ID NO: 2055699 - RNA, 19 nt, Artificial Sequence
  Description of Artificial Sequence: Synthetic oligonucleotide
  Antisense strand to SEQ ID NO: 2055698
auuaucacucguuugucag

SEQ ID NO: 2055700 - RNA, 19 nt, Artificial Sequence
  Description of Artificial Sequence: Synthetic oligonucleotide
  Sense strand starting at position 2165 of SEQ ID NO: 1881581
ggcgcuucuccuuucugau

SEQ ID NO: 2055701 - RNA, 19 nt, Artificial Sequence
  Description of Artificial Sequence: Synthetic oligonucleotide
  Antisense strand to SEQ ID NO: 2055700
aucagaaaggagaagcgcc

SEQ ID NO: 2055702 - RNA, 19 nt, Artificial Sequence
  Description of Artificial Sequence: Synthetic oligonucleotide
  Sense strand starting at position 2177 of SEQ ID NO: 1881581
uucugaugccuuuaagauc

SEQ ID NO: 2055703 - RNA, 19 nt, Artificial Sequence
  Description of Artificial Sequence: Synthetic oligonucleotide
  Antisense strand to SEQ ID NO: 2055702
gaucuuaaaggcaucagaa

SEQ ID NO: 2055704 - RNA, 19 nt, Artificial Sequence
  Description of Artificial Sequence: Synthetic oligonucleotide
  Sense strand starting at position 2267 of SEQ ID NO: 1881581
gagggagaguaauagggau

SEQ ID NO: 2055705 - RNA, 19 nt, Artificial Sequence
  Description of Artificial Sequence: Synthetic oligonucleotide
  Antisense strand to SEQ ID NO: 2055704
aucccuauuacucucccuc

SEQ ID NO: 2055706 - RNA, 19 nt, Artificial Sequence
  Description of Artificial Sequence: Synthetic oligonucleotide
  Sense strand starting at position 2273 of SEQ ID NO: 1881581
gaguaauagggauggcgga

SEQ ID NO: 2055707 - RNA, 19 nt, Artificial Sequence
  Description of Artificial Sequence: Synthetic oligonucleotide
  Antisense strand to SEQ ID NO: 2055706
uccgccaucccuauuacuc

SEQ ID NO: 2055708 - RNA, 19 nt, Artificial Sequence
  Description of Artificial Sequence: Synthetic oligonucleotide
  Sense strand starting at position 2347 of SEQ ID NO: 1881581
agcugugaccucggagaga

SEQ ID NO: 2055709 - RNA, 19 nt, Artificial Sequence
  Description of Artificial Sequence: Synthetic oligonucleotide
  Antisense strand to SEQ ID NO: 2055708
ucucuccgaggucacagcu

SEQ ID NO: 2055710 - RNA, 19 nt, Artificial Sequence
  Description of Artificial Sequence: Synthetic oligonucleotide
  Sense strand starting at position 2414 of SEQ ID NO: 1881581
guggguuucgaauguaaga

SEQ ID NO: 2055711 - RNA, 19 nt, Artificial Sequence
  Description of Artificial Sequence: Synthetic oligonucleotide
  Antisense strand to SEQ ID NO: 2055710
ucuuacauucgaaacccac

SEQ ID NO: 2055712 - RNA, 19 nt, Artificial Sequence
  Description of Artificial Sequence: Synthetic oligonucleotide
  Sense strand starting at position 2416 of SEQ ID NO: 1881581
ggguuucgaauguaagaau

SEQ ID NO: 2055713 - RNA, 19 nt, Artificial Sequence
  Description of Artificial Sequence: Synthetic oligonucleotide
  Antisense strand to SEQ ID NO: 2055712
auucuuacauucgaaaccc

SEQ ID NO: 2055714 - RNA, 19 nt, Artificial Sequence
  Description of Artificial Sequence: Synthetic oligonucleotide
  Sense strand starting at position 2521 of SEQ ID NO: 1881581
cugauuccugcguauggga

SEQ ID NO: 2055715 - RNA, 19 nt, Artificial Sequence
  Description of Artificial Sequence: Synthetic oligonucleotide
  Antisense strand to SEQ ID NO: 2055714
ucccauacgcaggaaucag

SEQ ID NO: 2055716 - RNA, 19 nt, Artificial Sequence
  Description of Artificial Sequence: Synthetic oligonucleotide
  Sense strand starting at position 2537 of SEQ ID NO: 1881581
ggagucuaaauuggacauu

SEQ ID NO: 2055717 - RNA, 19 nt, Artificial Sequence
  Description of Artificial Sequence: Synthetic oligonucleotide
  Antisense strand to SEQ ID NO: 2055716
aauguccaauuuagacucc

SEQ ID NO: 2055718 - RNA, 19 nt, Artificial Sequence
  Description of Artificial Sequence: Synthetic oligonucleotide
  Sense strand starting at position 2538 of SEQ ID NO: 1881581
gagucuaaauuggacauuu

SEQ ID NO: 2055719 - RNA, 19 nt, Artificial Sequence
  Description of Artificial Sequence: Synthetic oligonucleotide
  Antisense strand to SEQ ID NO: 2055718
aaauguccaauuuagacuc

SEQ ID NO: 2055720 - RNA, 19 nt, Artificial Sequence
  Description of Artificial Sequence: Synthetic oligonucleotide
  Sense strand starting at position 2571 of SEQ ID NO: 1881581
acguguuaucugcugcaau

SEQ ID NO: 2055721 - RNA, 19 nt, Artificial Sequence
  Description of Artificial Sequence: Synthetic oligonucleotide
  Antisense strand to SEQ ID NO: 2055720
auugcagcagauaacacgu

SEQ ID NO: 2055722 - RNA, 19 nt, Artificial Sequence
  Description of Artificial Sequence: Synthetic oligonucleotide
  Sense strand starting at position 2574 of SEQ ID NO: 1881581
uguuaucugcugcaauaaa

SEQ ID NO: 2055723 - RNA, 19 nt, Artificial Sequence
  Description of Artificial Sequence: Synthetic oligonucleotide
  Antisense strand to SEQ ID NO: 2055722
uuuauugcagcagauaaca

SEQ ID NO: 2055724 - RNA, 19 nt, Artificial Sequence
  Description of Artificial Sequence: Synthetic oligonucleotide
  Sense strand starting at position 2643 of SEQ ID NO: 1881581
uuaggucucugacuucuuu

SEQ ID NO: 2055725 - RNA, 19 nt, Artificial Sequence
  Description of Artificial Sequence: Synthetic oligonucleotide
  Antisense strand to SEQ ID NO: 2055724
aaagaagucagagaccuaa

SEQ ID NO: 2055726 - RNA, 19 nt, Artificial Sequence
  Description of Artificial Sequence: Synthetic oligonucleotide
  Sense strand starting at position 2875 of SEQ ID NO: 1881581
aggacagagucauugcugu

SEQ ID NO: 2055727 - RNA, 19 nt, Artificial Sequence
  Description of Artificial Sequence: Synthetic oligonucleotide
  Antisense strand to SEQ ID NO: 2055726
acagcaaugacucuguccu

SEQ ID NO: 2055728 - RNA, 19 nt, Artificial Sequence
  Description of Artificial Sequence: Synthetic oligonucleotide
  Sense strand starting at position 2882 of SEQ ID NO: 1881581
agucauugcugucugaaac

SEQ ID NO: 2055729 - RNA, 19 nt, Artificial Sequence
  Description of Artificial Sequence: Synthetic oligonucleotide
  Antisense strand to SEQ ID NO: 2055728
guuucagacagcaaugacu

SEQ ID NO: 2055730 - RNA, 19 nt, Artificial Sequence
  Description of Artificial Sequence: Synthetic oligonucleotide
  Sense strand starting at position 3119 of SEQ ID NO: 1881581
guucuauggauggauggua

SEQ ID NO: 2055731 - RNA, 19 nt, Artificial Sequence
  Description of Artificial Sequence: Synthetic oligonucleotide
  Antisense strand to SEQ ID NO: 2055730
uaccauccauccauagaac

SEQ ID NO: 2055732 - RNA, 19 nt, Artificial Sequence
  Description of Artificial Sequence: Synthetic oligonucleotide
  Sense strand starting at position 3173 of SEQ ID NO: 1881581
ccauuaaggugugcacuua

SEQ ID NO: 2055733 - RNA, 19 nt, Artificial Sequence
  Description of Artificial Sequence: Synthetic oligonucleotide
  Antisense strand to SEQ ID NO: 2055732
uaagugcacaccuuaaugg

SEQ ID NO: 2055734 - RNA, 19 nt, Artificial Sequence
  Description of Artificial Sequence: Synthetic oligonucleotide
  Sense strand starting at position 3174 of SEQ ID NO: 1881581
cauuaaggugugcacuuaa

SEQ ID NO: 2055735 - RNA, 19 nt, Artificial Sequence
  Description of Artificial Sequence: Synthetic oligonucleotide
  Antisense strand to SEQ ID NO: 2055734
uuaagugcacaccuuaaug

SEQ ID NO: 2055736 - RNA, 19 nt, Artificial Sequence
  Description of Artificial Sequence: Synthetic oligonucleotide
  Sense strand starting at position 3335 of SEQ ID NO: 1881581
ugaggugugaacugugaca

SEQ ID NO: 2055737 - RNA, 19 nt, Artificial Sequence
  Description of Artificial Sequence: Synthetic oligonucleotide
  Antisense strand to SEQ ID NO: 2055736
ugucacaguucacaccuca

SEQ ID NO: 2055738 - RNA, 19 nt, Artificial Sequence
  Description of Artificial Sequence: Synthetic oligonucleotide
  Sense strand starting at position 3337 of SEQ ID NO: 1881581
aggugugaacugugacauu

SEQ ID NO: 2055739 - RNA, 19 nt, Artificial Sequence
  Description of Artificial Sequence: Synthetic oligonucleotide
  Antisense strand to SEQ ID NO: 2055738
aaugucacaguucacaccu

SEQ ID NO: 2055740 - RNA, 19 nt, Artificial Sequence
  Description of Artificial Sequence: Synthetic oligonucleotide
  Sense strand starting at position 3413 of SEQ ID NO: 1881581
cuuagauaaugucuuagug

SEQ ID NO: 2055741 - RNA, 19 nt, Artificial Sequence
  Description of Artificial Sequence: Synthetic oligonucleotide
  Antisense strand to SEQ ID NO: 2055740
cacuaagacauuaucuaag

SEQ ID NO: 2055742 - RNA, 19 nt, Artificial Sequence
  Description of Artificial Sequence: Synthetic oligonucleotide
  Sense strand starting at position 3438 of SEQ ID NO: 1881581
cauguuguggcauauguga

SEQ ID NO: 2055743 - RNA, 19 nt, Artificial Sequence
  Description of Artificial Sequence: Synthetic oligonucleotide
  Antisense strand to SEQ ID NO: 2055742
ucacauaugccacaacaug

SEQ ID NO: 2055744 - RNA, 19 nt, Artificial Sequence
  Description of Artificial Sequence: Synthetic oligonucleotide
  Sense strand starting at position 3528 of SEQ ID NO: 1881581
caggaccuccugcgaauaa

SEQ ID NO: 2055745 - RNA, 19 nt, Artificial Sequence
  Description of Artificial Sequence: Synthetic oligonucleotide
  Antisense strand to SEQ ID NO: 2055744
uuauucgcaggagguccug

SEQ ID NO: 2055746 - RNA, 19 nt, Artificial Sequence
  Description of Artificial Sequence: Synthetic oligonucleotide
  Sense strand starting at position 3532 of SEQ ID NO: 1881581
accuccugcgaauaacaaa

SEQ ID NO: 2055747 - RNA, 19 nt, Artificial Sequence
  Description of Artificial Sequence: Synthetic oligonucleotide
  Antisense strand to SEQ ID NO: 2055746
uuuguuauucgcaggaggu

SEQ ID NO: 2055748 - RNA, 19 nt, Artificial Sequence
  Description of Artificial Sequence: Synthetic oligonucleotide
  Sense strand starting at position 3604 of SEQ ID NO: 1881581
cuaugcauauccucuugga

SEQ ID NO: 2055749 - RNA, 19 nt, Artificial Sequence
  Description of Artificial Sequence: Synthetic oligonucleotide
  Antisense strand to SEQ ID NO: 2055748
uccaagaggauaugcauag

SEQ ID NO: 2055750 - RNA, 19 nt, Artificial Sequence
  Description of Artificial Sequence: Synthetic oligonucleotide
  Sense strand starting at position 3608 of SEQ ID NO: 1881581
gcauauccucuuggauacu

SEQ ID NO: 2055751 - RNA, 19 nt, Artificial Sequence
  Description of Artificial Sequence: Synthetic oligonucleotide
  Antisense strand to SEQ ID NO: 2055750
aguauccaagaggauaugc

SEQ ID NO: 2055752 - RNA, 19 nt, Artificial Sequence
  Description of Artificial Sequence: Synthetic oligonucleotide
  Sense strand starting at position 3908 of SEQ ID NO: 1881581
gcaaauaucugagucccua

SEQ ID NO: 2055753 - RNA, 19 nt, Artificial Sequence
  Description of Artificial Sequence: Synthetic oligonucleotide
  Antisense strand to SEQ ID NO: 2055752
uagggacucagauauuugc

SEQ ID NO: 2055754 - RNA, 19 nt, Artificial Sequence
  Description of Artificial Sequence: Synthetic oligonucleotide
  Sense strand starting at position 3920 of SEQ ID NO: 1881581
gucccuaggaguuacuuga

SEQ ID NO: 2055755 - RNA, 19 nt, Artificial Sequence
  Description of Artificial Sequence: Synthetic oligonucleotide
  Antisense strand to SEQ ID NO: 2055754
ucaaguaacuccuagggac

SEQ ID NO: 2055756 - RNA, 19 nt, Artificial Sequence
  Description of Artificial Sequence: Synthetic oligonucleotide
  Sense strand starting at position 3927 of SEQ ID NO: 1881581
ggaguuacuugaucaugug

SEQ ID NO: 2055757 - RNA, 19 nt, Artificial Sequence
  Description of Artificial Sequence: Synthetic oligonucleotide
  Antisense strand to SEQ ID NO: 2055756
cacaugaucaaguaacucc

SEQ ID NO: 2055758 - RNA, 19 nt, Artificial Sequence
  Description of Artificial Sequence: Synthetic oligonucleotide
  Sense strand starting at position 81 of SEQ ID NO: 1881582
gcagauauugaaggcuaga

SEQ ID NO: 2055759 - RNA, 19 nt, Artificial Sequence
  Description of Artificial Sequence: Synthetic oligonucleotide
  Antisense strand to SEQ ID NO: 2055758
ucuagccuucaauaucugc

SEQ ID NO: 2055760 - RNA, 19 nt, Artificial Sequence
  Description of Artificial Sequence: Synthetic oligonucleotide
  Sense strand starting at position 434 of SEQ ID NO: 1881582
ggaaauguaguuuguggac

SEQ ID NO: 2055761 - RNA, 19 nt, Artificial Sequence
  Description of Artificial Sequence: Synthetic oligonucleotide
  Antisense strand to SEQ ID NO: 2055760
guccacaaacuacauuucc

SEQ ID NO: 2055762 - RNA, 19 nt, Artificial Sequence
  Description of Artificial Sequence: Synthetic oligonucleotide
  Sense strand starting at position 685 of SEQ ID NO: 1881582
agugaauaauugccuauuc

SEQ ID NO: 2055763 - RNA, 19 nt, Artificial Sequence
  Description of Artificial Sequence: Synthetic oligonucleotide
  Antisense strand to SEQ ID NO: 2055762
gaauaggcaauuauucacu

SEQ ID NO: 2055764 - RNA, 19 nt, Artificial Sequence
  Description of Artificial Sequence: Synthetic oligonucleotide
  Sense strand starting at position 736 of SEQ ID NO: 1881582
cuuaaaugauugccagaua

SEQ ID NO: 2055765 - RNA, 19 nt, Artificial Sequence
  Description of Artificial Sequence: Synthetic oligonucleotide
  Antisense strand to SEQ ID NO: 2055764
uaucuggcaaucauuuaag

SEQ ID NO: 2055766 - RNA, 19 nt, Artificial Sequence
  Description of Artificial Sequence: Synthetic oligonucleotide
  Sense strand starting at position 816 of SEQ ID NO: 1881582
ccaaguagugcugacauua

SEQ ID NO: 2055767 - RNA, 19 nt, Artificial Sequence
  Description of Artificial Sequence: Synthetic oligonucleotide
  Antisense strand to SEQ ID NO: 2055766
uaaugucagcacuacuugg

SEQ ID NO: 2055768 - RNA, 19 nt, Artificial Sequence
  Description of Artificial Sequence: Synthetic oligonucleotide
  Sense strand starting at position 824 of SEQ ID NO: 1881582
ugcugacauuacucaagga

SEQ ID NO: 2055769 - RNA, 19 nt, Artificial Sequence
  Description of Artificial Sequence: Synthetic oligonucleotide
  Antisense strand to SEQ ID NO: 2055768
uccuugaguaaugucagca

SEQ ID NO: 2055770 - RNA, 19 nt, Artificial Sequence
  Description of Artificial Sequence: Synthetic oligonucleotide
  Sense strand starting at position 876 of SEQ ID NO: 1881582
cagaccuaguucuucggaa

SEQ ID NO: 2055771 - RNA, 19 nt, Artificial Sequence
  Description of Artificial Sequence: Synthetic oligonucleotide
  Antisense strand to SEQ ID NO: 2055770
uuccgaagaacuaggucug

SEQ ID NO: 2055772 - RNA, 19 nt, Artificial Sequence
  Description of Artificial Sequence: Synthetic oligonucleotide
  Sense strand starting at position 877 of SEQ ID NO: 1881582
agaccuaguucuucggaaa

SEQ ID NO: 2055773 - RNA, 19 nt, Artificial Sequence
  Description of Artificial Sequence: Synthetic oligonucleotide
  Antisense strand to SEQ ID NO: 2055772
uuuccgaagaacuaggucu

SEQ ID NO: 2055774 - RNA, 19 nt, Artificial Sequence
  Description of Artificial Sequence: Synthetic oligonucleotide
  Sense strand starting at position 878 of SEQ ID NO: 1881582
gaccuaguucuucggaaau

SEQ ID NO: 2055775 - RNA, 19 nt, Artificial Sequence
  Description of Artificial Sequence: Synthetic oligonucleotide
  Antisense strand to SEQ ID NO: 2055774
auuuccgaagaacuagguc

SEQ ID NO: 2055776 - RNA, 19 nt, Artificial Sequence
  Description of Artificial Sequence: Synthetic oligonucleotide
  Sense strand starting at position 922 of SEQ ID NO: 1881582
gggcaugacuaaguagaau

SEQ ID NO: 2055777 - RNA, 19 nt, Artificial Sequence
  Description of Artificial Sequence: Synthetic oligonucleotide
  Antisense strand to SEQ ID NO: 2055776
auucuacuuagucaugccc

SEQ ID NO: 2055778 - RNA, 19 nt, Artificial Sequence
  Description of Artificial Sequence: Synthetic oligonucleotide
  Sense strand starting at position 1118 of SEQ ID NO: 1881582
cacuguaggcuugaaauaa

SEQ ID NO: 2055779 - RNA, 19 nt, Artificial Sequence
  Description of Artificial Sequence: Synthetic oligonucleotide
  Antisense strand to SEQ ID NO: 2055778
uuauuucaagccuacagug

SEQ ID NO: 2055780 - RNA, 19 nt, Artificial Sequence
  Description of Artificial Sequence: Synthetic oligonucleotide
  Sense strand starting at position 1245 of SEQ ID NO: 1881582
ccgcaauccgaguaauuuc

SEQ ID NO: 2055781 - RNA, 19 nt, Artificial Sequence
  Description of Artificial Sequence: Synthetic oligonucleotide
  Antisense strand to SEQ ID NO: 2055780
gaaauuacucggauugcgg

SEQ ID NO: 2055782 - RNA, 19 nt, Artificial Sequence
  Description of Artificial Sequence: Synthetic oligonucleotide
  Sense strand starting at position 1265 of SEQ ID NO: 1881582
ggaagcuauuuguuuccuu

SEQ ID NO: 2055783 - RNA, 19 nt, Artificial Sequence
  Description of Artificial Sequence: Synthetic oligonucleotide
  Antisense strand to SEQ ID NO: 2055782
aaggaaacaaauagcuucc

SEQ ID NO: 2055784 - RNA, 19 nt, Artificial Sequence
  Description of Artificial Sequence: Synthetic oligonucleotide
  Sense strand starting at position 1342 of SEQ ID NO: 1881582
uucugacuccuaggacaua

SEQ ID NO: 2055785 - RNA, 19 nt, Artificial Sequence
  Description of Artificial Sequence: Synthetic oligonucleotide
  Antisense strand to SEQ ID NO: 2055784
uauguccuaggagucagaa

SEQ ID NO: 2055786 - RNA, 19 nt, Artificial Sequence
  Description of Artificial Sequence: Synthetic oligonucleotide
  Sense strand starting at position 1585 of SEQ ID NO: 1881582
cugugagguagacacuuau

SEQ ID NO: 2055787 - RNA, 19 nt, Artificial Sequence
  Description of Artificial Sequence: Synthetic oligonucleotide
  Antisense strand to SEQ ID NO: 2055786
auaagugucuaccucacag

SEQ ID NO: 2055788 - RNA, 19 nt, Artificial Sequence
  Description of Artificial Sequence: Synthetic oligonucleotide
  Sense strand starting at position 1636 of SEQ ID NO: 1881582
ucacgaaggugguuaacua

SEQ ID NO: 2055789 - RNA, 19 nt, Artificial Sequence
  Description of Artificial Sequence: Synthetic oligonucleotide
  Antisense strand to SEQ ID NO: 2055788
uaguuaaccaccuucguga

SEQ ID NO: 2055790 - RNA, 19 nt, Artificial Sequence
  Description of Artificial Sequence: Synthetic oligonucleotide
  Sense strand starting at position 1741 of SEQ ID NO: 1881582
aauuaaagguuaucuggca

SEQ ID NO: 2055791 - RNA, 19 nt, Artificial Sequence
  Description of Artificial Sequence: Synthetic oligonucleotide
  Antisense strand to SEQ ID NO: 2055790
ugccagauaaccuuuaauu

SEQ ID NO: 2055792 - RNA, 19 nt, Artificial Sequence
  Description of Artificial Sequence: Synthetic oligonucleotide
  Sense strand starting at position 1742 of SEQ ID NO: 1881582
auuaaagguuaucuggcaa

SEQ ID NO: 2055793 - RNA, 19 nt, Artificial Sequence
  Description of Artificial Sequence: Synthetic oligonucleotide
  Antisense strand to SEQ ID NO: 2055792
uugccagauaaccuuuaau

SEQ ID NO: 2055794 - RNA, 19 nt, Artificial Sequence
  Description of Artificial Sequence: Synthetic oligonucleotide
  Sense strand starting at position 1774 of SEQ ID NO: 1881582
aggacugucaucuguggaa

SEQ ID NO: 2055795 - RNA, 19 nt, Artificial Sequence
  Description of Artificial Sequence: Synthetic oligonucleotide
  Antisense strand to SEQ ID NO: 2055794
uuccacagaugacaguccu

SEQ ID NO: 2055796 - RNA, 19 nt, Artificial Sequence
  Description of Artificial Sequence: Synthetic oligonucleotide
  Sense strand starting at position 1778 of SEQ ID NO: 1881582
cugucaucuguggaaucaa

SEQ ID NO: 2055797 - RNA, 19 nt, Artificial Sequence
  Description of Artificial Sequence: Synthetic oligonucleotide
  Antisense strand to SEQ ID NO: 2055796
uugauuccacagaugacag

SEQ ID NO: 2055798 - RNA, 19 nt, Artificial Sequence
  Description of Artificial Sequence: Synthetic oligonucleotide
  Sense strand starting at position 1843 of SEQ ID NO: 1881582
ccugcuauccugggaaaga

SEQ ID NO: 2055799 - RNA, 19 nt, Artificial Sequence
  Description of Artificial Sequence: Synthetic oligonucleotide
  Antisense strand to SEQ ID NO: 2055798
ucuuucccaggauagcagg

SEQ ID NO: 2055800 - RNA, 19 nt, Artificial Sequence
  Description of Artificial Sequence: Synthetic oligonucleotide
  Sense strand starting at position 2046 of SEQ ID NO: 1881582
gccggaagucucuacugag

SEQ ID NO: 2055801 - RNA, 19 nt, Artificial Sequence
  Description of Artificial Sequence: Synthetic oligonucleotide
  Antisense strand to SEQ ID NO: 2055800
cucaguagagacuuccggc

SEQ ID NO: 2055802 - RNA, 19 nt, Artificial Sequence
  Description of Artificial Sequence: Synthetic oligonucleotide
  Sense strand starting at position 2281 of SEQ ID NO: 1881582
ugugggagggaucgagaau

SEQ ID NO: 2055803 - RNA, 19 nt, Artificial Sequence
  Description of Artificial Sequence: Synthetic oligonucleotide
  Antisense strand to SEQ ID NO: 2055802
auucucgaucccucccaca

SEQ ID NO: 2055804 - RNA, 19 nt, Artificial Sequence
  Description of Artificial Sequence: Synthetic oligonucleotide
  Sense strand starting at position 2460 of SEQ ID NO: 1881582
gcggucuuuguggugcuaa

SEQ ID NO: 2055805 - RNA, 19 nt, Artificial Sequence
  Description of Artificial Sequence: Synthetic oligonucleotide
  Antisense strand to SEQ ID NO: 2055804
uuagcaccacaaagaccgc

SEQ ID NO: 2055806 - RNA, 19 nt, Artificial Sequence
  Description of Artificial Sequence: Synthetic oligonucleotide
  Sense strand starting at position 2489 of SEQ ID NO: 1881582
aggauuagccuuuaagcuu

SEQ ID NO: 2055807 - RNA, 19 nt, Artificial Sequence
  Description of Artificial Sequence: Synthetic oligonucleotide
  Antisense strand to SEQ ID NO: 2055806
aagcuuaaaggcuaauccu

SEQ ID NO: 2055808 - RNA, 19 nt, Artificial Sequence
  Description of Artificial Sequence: Synthetic oligonucleotide
  Sense strand starting at position 2653 of SEQ ID NO: 1881582
augaaauacguuuacagua

SEQ ID NO: 2055809 - RNA, 19 nt, Artificial Sequence
  Description of Artificial Sequence: Synthetic oligonucleotide
  Antisense strand to SEQ ID NO: 2055808
uacuguaaacguauuucau

SEQ ID NO: 2055810 - RNA, 19 nt, Artificial Sequence
  Description of Artificial Sequence: Synthetic oligonucleotide
  Sense strand starting at position 2677 of SEQ ID NO: 1881582
uuugacaucuuucugaaga

SEQ ID NO: 2055811 - RNA, 19 nt, Artificial Sequence
  Description of Artificial Sequence: Synthetic oligonucleotide
  Antisense strand to SEQ ID NO: 2055810
ucuucagaaagaugucaaa

SEQ ID NO: 2055812 - RNA, 19 nt, Artificial Sequence
  Description of Artificial Sequence: Synthetic oligonucleotide
  Sense strand starting at position 2737 of SEQ ID NO: 1881582
ucuuauauagaguauccuu

SEQ ID NO: 2055813 - RNA, 19 nt, Artificial Sequence
  Description of Artificial Sequence: Synthetic oligonucleotide
  Antisense strand to SEQ ID NO: 2055812
aaggauacucuauauaaga

SEQ ID NO: 2055814 - RNA, 19 nt, Artificial Sequence
  Description of Artificial Sequence: Synthetic oligonucleotide
  Sense strand starting at position 2754 of SEQ ID NO: 1881582
uugucacauccacaguuaa

SEQ ID NO: 2055815 - RNA, 19 nt, Artificial Sequence
  Description of Artificial Sequence: Synthetic oligonucleotide
  Antisense strand to SEQ ID NO: 2055814
uuaacuguggaugugacaa

SEQ ID NO: 2055816 - RNA, 19 nt, Artificial Sequence
  Description of Artificial Sequence: Synthetic oligonucleotide
  Sense strand starting at position 2854 of SEQ ID NO: 1881582
ggcuccauacguuaaggaa

SEQ ID NO: 2055817 - RNA, 19 nt, Artificial Sequence
  Description of Artificial Sequence: Synthetic oligonucleotide
  Antisense strand to SEQ ID NO: 2055816
uuccuuaacguauggagcc

SEQ ID NO: 2055818 - RNA, 19 nt, Artificial Sequence
  Description of Artificial Sequence: Synthetic oligonucleotide
  Sense strand starting at position 2891 of SEQ ID NO: 1881582
acuucucugcugggaaaua

SEQ ID NO: 2055819 - RNA, 19 nt, Artificial Sequence
  Description of Artificial Sequence: Synthetic oligonucleotide
  Antisense strand to SEQ ID NO: 2055818
uauuucccagcagagaagu

SEQ ID NO: 2055820 - RNA, 19 nt, Artificial Sequence
  Description of Artificial Sequence: Synthetic oligonucleotide
  Sense strand starting at position 3104 of SEQ ID NO: 1881582
gcucauagaguguaauuag

SEQ ID NO: 2055821 - RNA, 19 nt, Artificial Sequence
  Description of Artificial Sequence: Synthetic oligonucleotide
  Antisense strand to SEQ ID NO: 2055820
cuaauuacacucuaugagc

SEQ ID NO: 2055822 - RNA, 19 nt, Artificial Sequence
  Description of Artificial Sequence: Synthetic oligonucleotide
  Sense strand starting at position 3107 of SEQ ID NO: 1881582
cauagaguguaauuaguca

SEQ ID NO: 2055823 - RNA, 19 nt, Artificial Sequence
  Description of Artificial Sequence: Synthetic oligonucleotide
  Antisense strand to SEQ ID NO: 2055822
ugacuaauuacacucuaug

SEQ ID NO: 2055824 - RNA, 19 nt, Artificial Sequence
  Description of Artificial Sequence: Synthetic oligonucleotide
  Sense strand starting at position 3112 of SEQ ID NO: 1881582
aguguaauuagucaucuug

SEQ ID NO: 2055825 - RNA, 19 nt, Artificial Sequence
  Description of Artificial Sequence: Synthetic oligonucleotide
  Antisense strand to SEQ ID NO: 2055824
caagaugacuaauuacacu

SEQ ID NO: 2055826 - RNA, 19 nt, Artificial Sequence
  Description of Artificial Sequence: Synthetic oligonucleotide
  Sense strand starting at position 3187 of SEQ ID NO: 1881582
cucuuuauggucugaugaa

SEQ ID NO: 2055827 - RNA, 19 nt, Artificial Sequence
  Description of Artificial Sequence: Synthetic oligonucleotide
  Antisense strand to SEQ ID NO: 2055826
uucaucagaccauaaagag

SEQ ID NO: 2055828 - RNA, 19 nt, Artificial Sequence
  Description of Artificial Sequence: Synthetic oligonucleotide
  Sense strand starting at position 3246 of SEQ ID NO: 1881582
ucagauuuguuccuuuguu

SEQ ID NO: 2055829 - RNA, 19 nt, Artificial Sequence
  Description of Artificial Sequence: Synthetic oligonucleotide
  Antisense strand to SEQ ID NO: 2055828
aacaaaggaacaaaucuga

SEQ ID NO: 2055830 - RNA, 19 nt, Artificial Sequence
  Description of Artificial Sequence: Synthetic oligonucleotide
  Sense strand starting at position 3279 of SEQ ID NO: 1881582
cauuacgaucuugggcaaa

SEQ ID NO: 2055831 - RNA, 19 nt, Artificial Sequence
  Description of Artificial Sequence: Synthetic oligonucleotide
  Antisense strand to SEQ ID NO: 2055830
uuugcccaagaucguaaug

SEQ ID NO: 2055832 - RNA, 19 nt, Artificial Sequence
  Description of Artificial Sequence: Synthetic oligonucleotide
  Sense strand starting at position 3282 of SEQ ID NO: 1881582
uacgaucuugggcaaauca

SEQ ID NO: 2055833 - RNA, 19 nt, Artificial Sequence
  Description of Artificial Sequence: Synthetic oligonucleotide
  Antisense strand to SEQ ID NO: 2055832
ugauuugcccaagaucgua

SEQ ID NO: 2055834 - RNA, 19 nt, Artificial Sequence
  Description of Artificial Sequence: Synthetic oligonucleotide
  Sense strand starting at position 3658 of SEQ ID NO: 1881582
uaagacuuagcuugaguaa

SEQ ID NO: 2055835 - RNA, 19 nt, Artificial Sequence
  Description of Artificial Sequence: Synthetic oligonucleotide
  Antisense strand to SEQ ID NO: 2055834
uuacucaagcuaagucuua

SEQ ID NO: 2055836 - RNA, 19 nt, Artificial Sequence
  Description of Artificial Sequence: Synthetic oligonucleotide
  Sense strand starting at position 3827 of SEQ ID NO: 1881582
ugaaaugcuugggccagaa

SEQ ID NO: 2055837 - RNA, 19 nt, Artificial Sequence
  Description of Artificial Sequence: Synthetic oligonucleotide
  Antisense strand to SEQ ID NO: 2055836
uucuggcccaagcauuuca

SEQ ID NO: 2055838 - RNA, 19 nt, Artificial Sequence
  Description of Artificial Sequence: Synthetic oligonucleotide
  Sense strand starting at position 6 of SEQ ID NO: 1881583
gagauaagcauucgagaga

SEQ ID NO: 2055839 - RNA, 19 nt, Artificial Sequence
  Description of Artificial Sequence: Synthetic oligonucleotide
  Antisense strand to SEQ ID NO: 2055838
ucucucgaaugcuuaucuc

SEQ ID NO: 2055840 - RNA, 19 nt, Artificial Sequence
  Description of Artificial Sequence: Synthetic oligonucleotide
  Sense strand starting at position 101 of SEQ ID NO: 1881583
aagaauggcgaugaguuua

SEQ ID NO: 2055841 - RNA, 19 nt, Artificial Sequence
  Description of Artificial Sequence: Synthetic oligonucleotide
  Antisense strand to SEQ ID NO: 2055840
uaaacucaucgccauucuu

SEQ ID NO: 2055842 - RNA, 19 nt, Artificial Sequence
  Description of Artificial Sequence: Synthetic oligonucleotide
  Sense strand starting at position 117 of SEQ ID NO: 1881583
uuaacagugugaucaugaa

SEQ ID NO: 2055843 - RNA, 19 nt, Artificial Sequence
  Description of Artificial Sequence: Synthetic oligonucleotide
  Antisense strand to SEQ ID NO: 2055842
uucaugaucacacuguuaa

SEQ ID NO: 2055844 - RNA, 19 nt, Artificial Sequence
  Description of Artificial Sequence: Synthetic oligonucleotide
  Sense strand starting at position 173 of SEQ ID NO: 1881583
gaaguauaaugaucguauu

SEQ ID NO: 2055845 - RNA, 19 nt, Artificial Sequence
  Description of Artificial Sequence: Synthetic oligonucleotide
  Antisense strand to SEQ ID NO: 2055844
aauacgaucauuauacuuc

SEQ ID NO: 2055846 - RNA, 19 nt, Artificial Sequence
  Description of Artificial Sequence: Synthetic oligonucleotide
  Sense strand starting at position 224 of SEQ ID NO: 1881583
guuggacuggugugggaaa

SEQ ID NO: 2055847 - RNA, 19 nt, Artificial Sequence
  Description of Artificial Sequence: Synthetic oligonucleotide
  Antisense strand to SEQ ID NO: 2055846
uuucccacaccaguccaac

SEQ ID NO: 2055848 - RNA, 19 nt, Artificial Sequence
  Description of Artificial Sequence: Synthetic oligonucleotide
  Sense strand starting at position 253 of SEQ ID NO: 1881583
auaucuugugaauauugca

SEQ ID NO: 2055849 - RNA, 19 nt, Artificial Sequence
  Description of Artificial Sequence: Synthetic oligonucleotide
  Antisense strand to SEQ ID NO: 2055848
ugcaauauucacaagauau

SEQ ID NO: 2055850 - RNA, 19 nt, Artificial Sequence
  Description of Artificial Sequence: Synthetic oligonucleotide
  Sense strand starting at position 261 of SEQ ID NO: 1881583
ugaauauugcaauaguaca

SEQ ID NO: 2055851 - RNA, 19 nt, Artificial Sequence
  Description of Artificial Sequence: Synthetic oligonucleotide
  Antisense strand to SEQ ID NO: 2055850
uguacuauugcaauauuca

SEQ ID NO: 2055852 - RNA, 19 nt, Artificial Sequence
  Description of Artificial Sequence: Synthetic oligonucleotide
  Sense strand starting at position 269 of SEQ ID NO: 1881583
gcaauaguacaaggaagau

SEQ ID NO: 2055853 - RNA, 19 nt, Artificial Sequence
  Description of Artificial Sequence: Synthetic oligonucleotide
  Antisense strand to SEQ ID NO: 2055852
aucuuccuuguacuauugc

SEQ ID NO: 2055854 - RNA, 19 nt, Artificial Sequence
  Description of Artificial Sequence: Synthetic oligonucleotide
  Sense strand starting at position 289 of SEQ ID NO: 1881583
agucauaagagauggugau

SEQ ID NO: 2055855 - RNA, 19 nt, Artificial Sequence
  Description of Artificial Sequence: Synthetic oligonucleotide
  Antisense strand to SEQ ID NO: 2055854
aucaccaucucuuaugacu

SEQ ID NO: 2055856 - RNA, 19 nt, Artificial Sequence
  Description of Artificial Sequence: Synthetic oligonucleotide
  Sense strand starting at position 290 of SEQ ID NO: 1881583
gucauaagagauggugauu

SEQ ID NO: 2055857 - RNA, 19 nt, Artificial Sequence
  Description of Artificial Sequence: Synthetic oligonucleotide
  Antisense strand to SEQ ID NO: 2055856
aaucaccaucucuuaugac

SEQ ID NO: 2055858 - RNA, 19 nt, Artificial Sequence
  Description of Artificial Sequence: Synthetic oligonucleotide
  Sense strand starting at position 316 of SEQ ID NO: 1881583
ggacuaagacagugagagu

SEQ ID NO: 2055859 - RNA, 19 nt, Artificial Sequence
  Description of Artificial Sequence: Synthetic oligonucleotide
  Antisense strand to SEQ ID NO: 2055858
acucucacugucuuagucc

SEQ ID NO: 2055860 - RNA, 19 nt, Artificial Sequence
  Description of Artificial Sequence: Synthetic oligonucleotide
  Sense strand starting at position 532 of SEQ ID NO: 1881583
aguaaagauguccauguca

SEQ ID NO: 2055861 - RNA, 19 nt, Artificial Sequence
  Description of Artificial Sequence: Synthetic oligonucleotide
  Antisense strand to SEQ ID NO: 2055860
ugacauggacaucuuuacu

SEQ ID NO: 2055862 - RNA, 19 nt, Artificial Sequence
  Description of Artificial Sequence: Synthetic oligonucleotide
  Sense strand starting at position 545 of SEQ ID NO: 1881583
augucaauuugggacauau

SEQ ID NO: 2055863 - RNA, 19 nt, Artificial Sequence
  Description of Artificial Sequence: Synthetic oligonucleotide
  Antisense strand to SEQ ID NO: 2055862
auaugucccaaauugacau

SEQ ID NO: 2055864 - RNA, 19 nt, Artificial Sequence
  Description of Artificial Sequence: Synthetic oligonucleotide
  Sense strand starting at position 556 of SEQ ID NO: 1881583
ggacauauuuaagauacug

SEQ ID NO: 2055865 - RNA, 19 nt, Artificial Sequence
  Description of Artificial Sequence: Synthetic oligonucleotide
  Antisense strand to SEQ ID NO: 2055864
caguaucuuaaauaugucc

SEQ ID NO: 2055866 - RNA, 19 nt, Artificial Sequence
  Description of Artificial Sequence: Synthetic oligonucleotide
  Sense strand starting at position 565 of SEQ ID NO: 1881583
uaagauacugugugaaauc

SEQ ID NO: 2055867 - RNA, 19 nt, Artificial Sequence
  Description of Artificial Sequence: Synthetic oligonucleotide
  Antisense strand to SEQ ID NO: 2055866
gauuucacacaguaucuua

SEQ ID NO: 2055868 - RNA, 19 nt, Artificial Sequence
  Description of Artificial Sequence: Synthetic oligonucleotide
  Sense strand starting at position 576 of SEQ ID NO: 1881583
gugaaauccaaaggauguu

SEQ ID NO: 2055869 - RNA, 19 nt, Artificial Sequence
  Description of Artificial Sequence: Synthetic oligonucleotide
  Antisense strand to SEQ ID NO: 2055868
aacauccuuuggauuucac

SEQ ID NO: 2055870 - RNA, 19 nt, Artificial Sequence
  Description of Artificial Sequence: Synthetic oligonucleotide
  Sense strand starting at position 601 of SEQ ID NO: 1881583
aaauguccgacguauagau

SEQ ID NO: 2055871 - RNA, 19 nt, Artificial Sequence
  Description of Artificial Sequence: Synthetic oligonucleotide
  Antisense strand to SEQ ID NO: 2055870
aucuauacgucggacauuu

SEQ ID NO: 2055872 - RNA, 19 nt, Artificial Sequence
  Description of Artificial Sequence: Synthetic oligonucleotide
  Sense strand starting at position 1040 of SEQ ID NO: 1881583
uccuauuugucuccuguau

SEQ ID NO: 2055873 - RNA, 19 nt, Artificial Sequence
  Description of Artificial Sequence: Synthetic oligonucleotide
  Antisense strand to SEQ ID NO: 2055872
auacaggagacaaauagga

SEQ ID NO: 2055874 - RNA, 19 nt, Artificial Sequence
  Description of Artificial Sequence: Synthetic oligonucleotide
  Sense strand starting at position 1054 of SEQ ID NO: 1881583
uguaucaacgaccaauauu

SEQ ID NO: 2055875 - RNA, 19 nt, Artificial Sequence
  Description of Artificial Sequence: Synthetic oligonucleotide
  Antisense strand to SEQ ID NO: 2055874
aauauuggucguugauaca

SEQ ID NO: 2055876 - RNA, 19 nt, Artificial Sequence
  Description of Artificial Sequence: Synthetic oligonucleotide
  Sense strand starting at position 1198 of SEQ ID NO: 1881583
uugagagauauucgguauc

SEQ ID NO: 2055877 - RNA, 19 nt, Artificial Sequence
  Description of Artificial Sequence: Synthetic oligonucleotide
  Antisense strand to SEQ ID NO: 2055876
gauaccgaauaucucucaa

SEQ ID NO: 2055878 - RNA, 19 nt, Artificial Sequence
  Description of Artificial Sequence: Synthetic oligonucleotide
  Sense strand starting at position 1200 of SEQ ID NO: 1881583
gagagauauucgguaucag

SEQ ID NO: 2055879 - RNA, 19 nt, Artificial Sequence
  Description of Artificial Sequence: Synthetic oligonucleotide
  Antisense strand to SEQ ID NO: 2055878
cugauaccgaauaucucuc

SEQ ID NO: 2055880 - RNA, 19 nt, Artificial Sequence
  Description of Artificial Sequence: Synthetic oligonucleotide
  Sense strand starting at position 1201 of SEQ ID NO: 1881583
agagauauucgguaucagu

SEQ ID NO: 2055881 - RNA, 19 nt, Artificial Sequence
  Description of Artificial Sequence: Synthetic oligonucleotide
  Antisense strand to SEQ ID NO: 2055880
acugauaccgaauaucucu

SEQ ID NO: 2055882 - RNA, 19 nt, Artificial Sequence
  Description of Artificial Sequence: Synthetic oligonucleotide
  Sense strand starting at position 1575 of SEQ ID NO: 1881583
gguggauccgcguucuuga

SEQ ID NO: 2055883 - RNA, 19 nt, Artificial Sequence
  Description of Artificial Sequence: Synthetic oligonucleotide
  Antisense strand to SEQ ID NO: 2055882
ucaagaacgcggauccacc

SEQ ID NO: 2055884 - RNA, 19 nt, Artificial Sequence
  Description of Artificial Sequence: Synthetic oligonucleotide
  Sense strand starting at position 1583 of SEQ ID NO: 1881583
cgcguucuugagcuuagaa

SEQ ID NO: 2055885 - RNA, 19 nt, Artificial Sequence
  Description of Artificial Sequence: Synthetic oligonucleotide
  Antisense strand to SEQ ID NO: 2055884
uucuaagcucaagaacgcg

SEQ ID NO: 2055886 - RNA, 19 nt, Artificial Sequence
  Description of Artificial Sequence: Synthetic oligonucleotide
  Sense strand starting at position 2214 of SEQ ID NO: 1881583
gaggguagagcucaaggua

SEQ ID NO: 2055887 - RNA, 19 nt, Artificial Sequence
  Description of Artificial Sequence: Synthetic oligonucleotide
  Antisense strand to SEQ ID NO: 2055886
uaccuugagcucuacccuc

SEQ ID NO: 2055888 - RNA, 19 nt, Artificial Sequence
  Description of Artificial Sequence: Synthetic oligonucleotide
  Sense strand starting at position 2226 of SEQ ID NO: 1881583
caagguaagucuccgaaac

SEQ ID NO: 2055889 - RNA, 19 nt, Artificial Sequence
  Description of Artificial Sequence: Synthetic oligonucleotide
  Antisense strand to SEQ ID NO: 2055888
guuucggagacuuaccuug

SEQ ID NO: 2055890 - RNA, 19 nt, Artificial Sequence
  Description of Artificial Sequence: Synthetic oligonucleotide
  Sense strand starting at position 2567 of SEQ ID NO: 1881583
cugggauugugaguaauac

SEQ ID NO: 2055891 - RNA, 19 nt, Artificial Sequence
  Description of Artificial Sequence: Synthetic oligonucleotide
  Antisense strand to SEQ ID NO: 2055890
guauuacucacaaucccag

SEQ ID NO: 2055892 - RNA, 19 nt, Artificial Sequence
  Description of Artificial Sequence: Synthetic oligonucleotide
  Sense strand starting at position 2696 of SEQ ID NO: 1881583
gaugacuggacucgugaga

SEQ ID NO: 2055893 - RNA, 19 nt, Artificial Sequence
  Description of Artificial Sequence: Synthetic oligonucleotide
  Antisense strand to SEQ ID NO: 2055892
ucucacgaguccagucauc

SEQ ID NO: 2055894 - RNA, 19 nt, Artificial Sequence
  Description of Artificial Sequence: Synthetic oligonucleotide
  Sense strand starting at position 2742 of SEQ ID NO: 1881583
aguggugauguauauaaag

SEQ ID NO: 2055895 - RNA, 19 nt, Artificial Sequence
  Description of Artificial Sequence: Synthetic oligonucleotide
  Antisense strand to SEQ ID NO: 2055894
cuuuauauacaucaccacu

SEQ ID NO: 2055896 - RNA, 19 nt, Artificial Sequence
  Description of Artificial Sequence: Synthetic oligonucleotide
  Sense strand starting at position 2744 of SEQ ID NO: 1881583
uggugauguauauaaaguu

SEQ ID NO: 2055897 - RNA, 19 nt, Artificial Sequence
  Description of Artificial Sequence: Synthetic oligonucleotide
  Antisense strand to SEQ ID NO: 2055896
aacuuuauauacaucacca

SEQ ID NO: 2055898 - RNA, 19 nt, Artificial Sequence
  Description of Artificial Sequence: Synthetic oligonucleotide
  Sense strand starting at position 2873 of SEQ ID NO: 1881583
cugcaaucugaggauguuu

SEQ ID NO: 2055899 - RNA, 19 nt, Artificial Sequence
  Description of Artificial Sequence: Synthetic oligonucleotide
  Antisense strand to SEQ ID NO: 2055898
aaacauccucagauugcag

SEQ ID NO: 2055900 - RNA, 19 nt, Artificial Sequence
  Description of Artificial Sequence: Synthetic oligonucleotide
  Sense strand starting at position 2932 of SEQ ID NO: 1881583
caaaguaugcagggaauua

SEQ ID NO: 2055901 - RNA, 19 nt, Artificial Sequence
  Description of Artificial Sequence: Synthetic oligonucleotide
  Antisense strand to SEQ ID NO: 2055900
uaauucccugcauacuuug

SEQ ID NO: 2055902 - RNA, 19 nt, Artificial Sequence
  Description of Artificial Sequence: Synthetic oligonucleotide
  Sense strand starting at position 3368 of SEQ ID NO: 1881583
gucuguuggaaaugaacuu

SEQ ID NO: 2055903 - RNA, 19 nt, Artificial Sequence
  Description of Artificial Sequence: Synthetic oligonucleotide
  Antisense strand to SEQ ID NO: 2055902
aaguucauuuccaacagac

SEQ ID NO: 2055904 - RNA, 19 nt, Artificial Sequence
  Description of Artificial Sequence: Synthetic oligonucleotide
  Sense strand starting at position 3579 of SEQ ID NO: 1881583
guaaguaggaguuaauuau

SEQ ID NO: 2055905 - RNA, 19 nt, Artificial Sequence
  Description of Artificial Sequence: Synthetic oligonucleotide
  Antisense strand to SEQ ID NO: 2055904
auaauuaacuccuacuuac

SEQ ID NO: 2055906 - RNA, 19 nt, Artificial Sequence
  Description of Artificial Sequence: Synthetic oligonucleotide
  Sense strand starting at position 3583 of SEQ ID NO: 1881583
guaggaguuaauuauaguc

SEQ ID NO: 2055907 - RNA, 19 nt, Artificial Sequence
  Description of Artificial Sequence: Synthetic oligonucleotide
  Antisense strand to SEQ ID NO: 2055906
gacuauaauuaacuccuac

SEQ ID NO: 2055908 - RNA, 19 nt, Artificial Sequence
  Description of Artificial Sequence: Synthetic oligonucleotide
  Sense strand starting at position 3588 of SEQ ID NO: 1881583
aguuaauuauagucugaga

SEQ ID NO: 2055909 - RNA, 19 nt, Artificial Sequence
  Description of Artificial Sequence: Synthetic oligonucleotide
  Antisense strand to SEQ ID NO: 2055908
ucucagacuauaauuaacu

SEQ ID NO: 2055910 - RNA, 19 nt, Artificial Sequence
  Description of Artificial Sequence: Synthetic oligonucleotide
  Sense strand starting at position 3675 of SEQ ID NO: 1881583
guguuuacuggugauaaac

SEQ ID NO: 2055911 - RNA, 19 nt, Artificial Sequence
  Description of Artificial Sequence: Synthetic oligonucleotide
  Antisense strand to SEQ ID NO: 2055910
guuuaucaccaguaaacac

SEQ ID NO: 2055912 - RNA, 19 nt, Artificial Sequence
  Description of Artificial Sequence: Synthetic oligonucleotide
  Sense strand starting at position 3684 of SEQ ID NO: 1881583
ggugauaaaccaugaaagu

SEQ ID NO: 2055913 - RNA, 19 nt, Artificial Sequence
  Description of Artificial Sequence: Synthetic oligonucleotide
  Antisense strand to SEQ ID NO: 2055912
acuuucaugguuuaucacc

SEQ ID NO: 2055914 - RNA, 19 nt, Artificial Sequence
  Description of Artificial Sequence: Synthetic oligonucleotide
  Sense strand starting at position 3739 of SEQ ID NO: 1881583
guuuguguauuucuuccua

SEQ ID NO: 2055915 - RNA, 19 nt, Artificial Sequence
  Description of Artificial Sequence: Synthetic oligonucleotide
  Antisense strand to SEQ ID NO: 2055914
uaggaagaaauacacaaac

SEQ ID NO: 2055916 - RNA, 19 nt, Artificial Sequence
  Description of Artificial Sequence: Synthetic oligonucleotide
  Sense strand starting at position 3741 of SEQ ID NO: 1881583
uuguguauuucuuccuaac

SEQ ID NO: 2055917 - RNA, 19 nt, Artificial Sequence
  Description of Artificial Sequence: Synthetic oligonucleotide
  Antisense strand to SEQ ID NO: 2055916
guuaggaagaaauacacaa

SEQ ID NO: 2055918 - RNA, 19 nt, Artificial Sequence
  Description of Artificial Sequence: Synthetic oligonucleotide
  Sense strand starting at position 75 of SEQ ID NO: 1881584
gcugaucugacagaguauu

SEQ ID NO: 2055919 - RNA, 19 nt, Artificial Sequence
  Description of Artificial Sequence: Synthetic oligonucleotide
  Antisense strand to SEQ ID NO: 2055918
aauacucugucagaucagc

SEQ ID NO: 2055920 - RNA, 19 nt, Artificial Sequence
  Description of Artificial Sequence: Synthetic oligonucleotide
  Sense strand starting at position 83 of SEQ ID NO: 1881584
gacagaguauuggucauaa

SEQ ID NO: 2055921 - RNA, 19 nt, Artificial Sequence
  Description of Artificial Sequence: Synthetic oligonucleotide
  Antisense strand to SEQ ID NO: 2055920
uuaugaccaauacucuguc

SEQ ID NO: 2055922 - RNA, 19 nt, Artificial Sequence
  Description of Artificial Sequence: Synthetic oligonucleotide
  Sense strand starting at position 117 of SEQ ID NO: 1881584
gccaguuccaguguuuguu

SEQ ID NO: 2055923 - RNA, 19 nt, Artificial Sequence
  Description of Artificial Sequence: Synthetic oligonucleotide
  Antisense strand to SEQ ID NO: 2055922
aacaaacacuggaacuggc

SEQ ID NO: 2055924 - RNA, 19 nt, Artificial Sequence
  Description of Artificial Sequence: Synthetic oligonucleotide
  Sense strand starting at position 292 of SEQ ID NO: 1881584
ggaaucugauggcugcaaa

SEQ ID NO: 2055925 - RNA, 19 nt, Artificial Sequence
  Description of Artificial Sequence: Synthetic oligonucleotide
  Antisense strand to SEQ ID NO: 2055924
uuugcagccaucagauucc

SEQ ID NO: 2055926 - RNA, 19 nt, Artificial Sequence
  Description of Artificial Sequence: Synthetic oligonucleotide
  Sense strand starting at position 493 of SEQ ID NO: 1881584
aguacauagccauauuagu

SEQ ID NO: 2055927 - RNA, 19 nt, Artificial Sequence
  Description of Artificial Sequence: Synthetic oligonucleotide
  Antisense strand to SEQ ID NO: 2055926
acuaauauggcuauguacu

SEQ ID NO: 2055928 - RNA, 19 nt, Artificial Sequence
  Description of Artificial Sequence: Synthetic oligonucleotide
  Sense strand starting at position 777 of SEQ ID NO: 1881584
cuaacacauuggguuuaau

SEQ ID NO: 2055929 - RNA, 19 nt, Artificial Sequence
  Description of Artificial Sequence: Synthetic oligonucleotide
  Antisense strand to SEQ ID NO: 2055928
auuaaacccaauguguuag

SEQ ID NO: 2055930 - RNA, 19 nt, Artificial Sequence
  Description of Artificial Sequence: Synthetic oligonucleotide
  Sense strand starting at position 812 of SEQ ID NO: 1881584
aagagacaccguuaagcaa

SEQ ID NO: 2055931 - RNA, 19 nt, Artificial Sequence
  Description of Artificial Sequence: Synthetic oligonucleotide
  Antisense strand to SEQ ID NO: 2055930
uugcuuaacggugucucuu

SEQ ID NO: 2055932 - RNA, 19 nt, Artificial Sequence
  Description of Artificial Sequence: Synthetic oligonucleotide
  Sense strand starting at position 881 of SEQ ID NO: 1881584
gacaaaggauguguaucua

SEQ ID NO: 2055933 - RNA, 19 nt, Artificial Sequence
  Description of Artificial Sequence: Synthetic oligonucleotide
  Antisense strand to SEQ ID NO: 2055932
uagauacacauccuuuguc

SEQ ID NO: 2055934 - RNA, 19 nt, Artificial Sequence
  Description of Artificial Sequence: Synthetic oligonucleotide
  Sense strand starting at position 1099 of SEQ ID NO: 1881584
caaauaauucuuugacgug

SEQ ID NO: 2055935 - RNA, 19 nt, Artificial Sequence
  Description of Artificial Sequence: Synthetic oligonucleotide
  Antisense strand to SEQ ID NO: 2055934
cacgucaaagaauuauuug

SEQ ID NO: 2055936 - RNA, 19 nt, Artificial Sequence
  Description of Artificial Sequence: Synthetic oligonucleotide
  Sense strand starting at position 1105 of SEQ ID NO: 1881584
auucuuugacgugacauac

SEQ ID NO: 2055937 - RNA, 19 nt, Artificial Sequence
  Description of Artificial Sequence: Synthetic oligonucleotide
  Antisense strand to SEQ ID NO: 2055936
guaugucacgucaaagaau

SEQ ID NO: 2055938 - RNA, 19 nt, Artificial Sequence
  Description of Artificial Sequence: Synthetic oligonucleotide
  Sense strand starting at position 1242 of SEQ ID NO: 1881584
augaaaugguaguuacaca

SEQ ID NO: 2055939 - RNA, 19 nt, Artificial Sequence
  Description of Artificial Sequence: Synthetic oligonucleotide
  Antisense strand to SEQ ID NO: 2055938
uguguaacuaccauuucau

SEQ ID NO: 2055940 - RNA, 19 nt, Artificial Sequence
  Description of Artificial Sequence: Synthetic oligonucleotide
  Sense strand starting at position 1247 of SEQ ID NO: 1881584
augguaguuacacaaguau

SEQ ID NO: 2055941 - RNA, 19 nt, Artificial Sequence
  Description of Artificial Sequence: Synthetic oligonucleotide
  Antisense strand to SEQ ID NO: 2055940
auacuuguguaacuaccau

SEQ ID NO: 2055942 - RNA, 19 nt, Artificial Sequence
  Description of Artificial Sequence: Synthetic oligonucleotide
  Sense strand starting at position 1295 of SEQ ID NO: 1881584
cacuuaagaugugugaauu

SEQ ID NO: 2055943 - RNA, 19 nt, Artificial Sequence
  Description of Artificial Sequence: Synthetic oligonucleotide
  Antisense strand to SEQ ID NO: 2055942
aauucacacaucuuaagug

SEQ ID NO: 2055944 - RNA, 19 nt, Artificial Sequence
  Description of Artificial Sequence: Synthetic oligonucleotide
  Sense strand starting at position 1444 of SEQ ID NO: 1881584
gaaucauaacugugagauu

SEQ ID NO: 2055945 - RNA, 19 nt, Artificial Sequence
  Description of Artificial Sequence: Synthetic oligonucleotide
  Antisense strand to SEQ ID NO: 2055944
aaucucacaguuaugauuc

SEQ ID NO: 2055946 - RNA, 19 nt, Artificial Sequence
  Description of Artificial Sequence: Synthetic oligonucleotide
  Sense strand starting at position 1631 of SEQ ID NO: 1881584
ggguaaaggucuucaaggu

SEQ ID NO: 2055947 - RNA, 19 nt, Artificial Sequence
  Description of Artificial Sequence: Synthetic oligonucleotide
  Antisense strand to SEQ ID NO: 2055946
accuugaagaccuuuaccc

SEQ ID NO: 2055948 - RNA, 19 nt, Artificial Sequence
  Description of Artificial Sequence: Synthetic oligonucleotide
  Sense strand starting at position 1632 of SEQ ID NO: 1881584
gguaaaggucuucaagguu

SEQ ID NO: 2055949 - RNA, 19 nt, Artificial Sequence
  Description of Artificial Sequence: Synthetic oligonucleotide
  Antisense strand to SEQ ID NO: 2055948
aaccuugaagaccuuuacc

SEQ ID NO: 2055950 - RNA, 19 nt, Artificial Sequence
  Description of Artificial Sequence: Synthetic oligonucleotide
  Sense strand starting at position 1875 of SEQ ID NO: 1881584
ggcaaucaucuccaguauc

SEQ ID NO: 2055951 - RNA, 19 nt, Artificial Sequence
  Description of Artificial Sequence: Synthetic oligonucleotide
  Antisense strand to SEQ ID NO: 2055950
gauacuggagaugauugcc

SEQ ID NO: 2055952 - RNA, 19 nt, Artificial Sequence
  Description of Artificial Sequence: Synthetic oligonucleotide
  Sense strand starting at position 2001 of SEQ ID NO: 1881584
uggauuugcuuauucugua

SEQ ID NO: 2055953 - RNA, 19 nt, Artificial Sequence
  Description of Artificial Sequence: Synthetic oligonucleotide
  Antisense strand to SEQ ID NO: 2055952
uacagaauaagcaaaucca

SEQ ID NO: 2055954 - RNA, 19 nt, Artificial Sequence
  Description of Artificial Sequence: Synthetic oligonucleotide
  Sense strand starting at position 2051 of SEQ ID NO: 1881584
ugucauuaucagcauucua

SEQ ID NO: 2055955 - RNA, 19 nt, Artificial Sequence
  Description of Artificial Sequence: Synthetic oligonucleotide
  Antisense strand to SEQ ID NO: 2055954
uagaaugcugauaaugaca

SEQ ID NO: 2055956 - RNA, 19 nt, Artificial Sequence
  Description of Artificial Sequence: Synthetic oligonucleotide
  Sense strand starting at position 2118 of SEQ ID NO: 1881584
uuguuuauacaugagccaa

SEQ ID NO: 2055957 - RNA, 19 nt, Artificial Sequence
  Description of Artificial Sequence: Synthetic oligonucleotide
  Antisense strand to SEQ ID NO: 2055956
uuggcucauguauaaacaa

SEQ ID NO: 2055958 - RNA, 19 nt, Artificial Sequence
  Description of Artificial Sequence: Synthetic oligonucleotide
  Sense strand starting at position 2120 of SEQ ID NO: 1881584
guuuauacaugagccaauu

SEQ ID NO: 2055959 - RNA, 19 nt, Artificial Sequence
  Description of Artificial Sequence: Synthetic oligonucleotide
  Antisense strand to SEQ ID NO: 2055958
aauuggcucauguauaaac

SEQ ID NO: 2055960 - RNA, 19 nt, Artificial Sequence
  Description of Artificial Sequence: Synthetic oligonucleotide
  Sense strand starting at position 2179 of SEQ ID NO: 1881584
auaauacugcugugaagau

SEQ ID NO: 2055961 - RNA, 19 nt, Artificial Sequence
  Description of Artificial Sequence: Synthetic oligonucleotide
  Antisense strand to SEQ ID NO: 2055960
aucuucacagcaguauuau

SEQ ID NO: 2055962 - RNA, 19 nt, Artificial Sequence
  Description of Artificial Sequence: Synthetic oligonucleotide
  Sense strand starting at position 2239 of SEQ ID NO: 1881584
uuggguauauauguaggau

SEQ ID NO: 2055963 - RNA, 19 nt, Artificial Sequence
  Description of Artificial Sequence: Synthetic oligonucleotide
  Antisense strand to SEQ ID NO: 2055962
auccuacauauauacccaa

SEQ ID NO: 2055964 - RNA, 19 nt, Artificial Sequence
  Description of Artificial Sequence: Synthetic oligonucleotide
  Sense strand starting at position 2240 of SEQ ID NO: 1881584
uggguauauauguaggauu

SEQ ID NO: 2055965 - RNA, 19 nt, Artificial Sequence
  Description of Artificial Sequence: Synthetic oligonucleotide
  Antisense strand to SEQ ID NO: 2055964
aauccuacauauauaccca

SEQ ID NO: 2055966 - RNA, 19 nt, Artificial Sequence
  Description of Artificial Sequence: Synthetic oligonucleotide
  Sense strand starting at position 2242 of SEQ ID NO: 1881584
gguauauauguaggauuga

SEQ ID NO: 2055967 - RNA, 19 nt, Artificial Sequence
  Description of Artificial Sequence: Synthetic oligonucleotide
  Antisense strand to SEQ ID NO: 2055966
ucaauccuacauauauacc

SEQ ID NO: 2055968 - RNA, 19 nt, Artificial Sequence
  Description of Artificial Sequence: Synthetic oligonucleotide
  Sense strand starting at position 2257 of SEQ ID NO: 1881584
uugaaaguucugggucaua

SEQ ID NO: 2055969 - RNA, 19 nt, Artificial Sequence
  Description of Artificial Sequence: Synthetic oligonucleotide
  Antisense strand to SEQ ID NO: 2055968
uaugacccagaacuuucaa

SEQ ID NO: 2055970 - RNA, 19 nt, Artificial Sequence
  Description of Artificial Sequence: Synthetic oligonucleotide
  Sense strand starting at position 2270 of SEQ ID NO: 1881584
gucauauaguaacuccaca

SEQ ID NO: 2055971 - RNA, 19 nt, Artificial Sequence
  Description of Artificial Sequence: Synthetic oligonucleotide
  Antisense strand to SEQ ID NO: 2055970
uguggaguuacuauaugac

SEQ ID NO: 2055972 - RNA, 19 nt, Artificial Sequence
  Description of Artificial Sequence: Synthetic oligonucleotide
  Sense strand starting at position 2395 of SEQ ID NO: 1881584
accuguuauugaccauauu

SEQ ID NO: 2055973 - RNA, 19 nt, Artificial Sequence
  Description of Artificial Sequence: Synthetic oligonucleotide
  Antisense strand to SEQ ID NO: 2055972
aauauggucaauaacaggu

SEQ ID NO: 2055974 - RNA, 19 nt, Artificial Sequence
  Description of Artificial Sequence: Synthetic oligonucleotide
  Sense strand starting at position 2466 of SEQ ID NO: 1881584
auuggcauuucccuaaugu

SEQ ID NO: 2055975 - RNA, 19 nt, Artificial Sequence
  Description of Artificial Sequence: Synthetic oligonucleotide
  Antisense strand to SEQ ID NO: 2055974
acauuagggaaaugccaau

SEQ ID NO: 2055976 - RNA, 19 nt, Artificial Sequence
  Description of Artificial Sequence: Synthetic oligonucleotide
  Sense strand starting at position 2560 of SEQ ID NO: 1881584
uuggaaagccuuugagaua

SEQ ID NO: 2055977 - RNA, 19 nt, Artificial Sequence
  Description of Artificial Sequence: Synthetic oligonucleotide
  Antisense strand to SEQ ID NO: 2055976
uaucucaaaggcuuuccaa

SEQ ID NO: 2055978 - RNA, 19 nt, Artificial Sequence
  Description of Artificial Sequence: Synthetic oligonucleotide
  Sense strand starting at position 2567 of SEQ ID NO: 1881584
gccuuugagauaugauuag

SEQ ID NO: 2055979 - RNA, 19 nt, Artificial Sequence
  Description of Artificial Sequence: Synthetic oligonucleotide
  Antisense strand to SEQ ID NO: 2055978
cuaaucauaucucaaaggc

SEQ ID NO: 2055980 - RNA, 19 nt, Artificial Sequence
  Description of Artificial Sequence: Synthetic oligonucleotide
  Sense strand starting at position 2587 of SEQ ID NO: 1881584
uuaugagggcucuacccua

SEQ ID NO: 2055981 - RNA, 19 nt, Artificial Sequence
  Description of Artificial Sequence: Synthetic oligonucleotide
  Antisense strand to SEQ ID NO: 2055980
uaggguagagcccucauaa

SEQ ID NO: 2055982 - RNA, 19 nt, Artificial Sequence
  Description of Artificial Sequence: Synthetic oligonucleotide
  Sense strand starting at position 2592 of SEQ ID NO: 1881584
agggcucuacccuaugaau

SEQ ID NO: 2055983 - RNA, 19 nt, Artificial Sequence
  Description of Artificial Sequence: Synthetic oligonucleotide
  Antisense strand to SEQ ID NO: 2055982
auucauaggguagagcccu

SEQ ID NO: 2055984 - RNA, 19 nt, Artificial Sequence
  Description of Artificial Sequence: Synthetic oligonucleotide
  Sense strand starting at position 2598 of SEQ ID NO: 1881584
cuacccuaugaaugguaau

SEQ ID NO: 2055985 - RNA, 19 nt, Artificial Sequence
  Description of Artificial Sequence: Synthetic oligonucleotide
  Antisense strand to SEQ ID NO: 2055984
auuaccauucauaggguag

SEQ ID NO: 2055986 - RNA, 19 nt, Artificial Sequence
  Description of Artificial Sequence: Synthetic oligonucleotide
  Sense strand starting at position 3070 of SEQ ID NO: 1881584
acauccuuagcagaguaau

SEQ ID NO: 2055987 - RNA, 19 nt, Artificial Sequence
  Description of Artificial Sequence: Synthetic oligonucleotide
  Antisense strand to SEQ ID NO: 2055986
auuacucugcuaaggaugu

SEQ ID NO: 2055988 - RNA, 19 nt, Artificial Sequence
  Description of Artificial Sequence: Synthetic oligonucleotide
  Sense strand starting at position 3073 of SEQ ID NO: 1881584
uccuuagcagaguaauaca

SEQ ID NO: 2055989 - RNA, 19 nt, Artificial Sequence
  Description of Artificial Sequence: Synthetic oligonucleotide
  Antisense strand to SEQ ID NO: 2055988
uguauuacucugcuaagga

SEQ ID NO: 2055990 - RNA, 19 nt, Artificial Sequence
  Description of Artificial Sequence: Synthetic oligonucleotide
  Sense strand starting at position 3083 of SEQ ID NO: 1881584
aguaauacauguguuacaa

SEQ ID NO: 2055991 - RNA, 19 nt, Artificial Sequence
  Description of Artificial Sequence: Synthetic oligonucleotide
  Antisense strand to SEQ ID NO: 2055990
uuguaacacauguauuacu

SEQ ID NO: 2055992 - RNA, 19 nt, Artificial Sequence
  Description of Artificial Sequence: Synthetic oligonucleotide
  Sense strand starting at position 3115 of SEQ ID NO: 1881584
auugauguaucauuaucac

SEQ ID NO: 2055993 - RNA, 19 nt, Artificial Sequence
  Description of Artificial Sequence: Synthetic oligonucleotide
  Antisense strand to SEQ ID NO: 2055992
gugauaaugauacaucaau

SEQ ID NO: 2055994 - RNA, 19 nt, Artificial Sequence
  Description of Artificial Sequence: Synthetic oligonucleotide
  Sense strand starting at position 3156 of SEQ ID NO: 1881584
gauuucucucuugguguuu

SEQ ID NO: 2055995 - RNA, 19 nt, Artificial Sequence
  Description of Artificial Sequence: Synthetic oligonucleotide
  Antisense strand to SEQ ID NO: 2055994
aaacaccaagagagaaauc

SEQ ID NO: 2055996 - RNA, 19 nt, Artificial Sequence
  Description of Artificial Sequence: Synthetic oligonucleotide
  Sense strand starting at position 3340 of SEQ ID NO: 1881584
uuucccagauugucauaua

SEQ ID NO: 2055997 - RNA, 19 nt, Artificial Sequence
  Description of Artificial Sequence: Synthetic oligonucleotide
  Antisense strand to SEQ ID NO: 2055996
uauaugacaaucugggaaa

SEQ ID NO: 2055998 - RNA, 19 nt, Artificial Sequence
  Description of Artificial Sequence: Synthetic oligonucleotide
  Sense strand starting at position 60 of SEQ ID NO: 1881585
cauguuguucucgagauaa

SEQ ID NO: 2055999 - RNA, 19 nt, Artificial Sequence
  Description of Artificial Sequence: Synthetic oligonucleotide
  Antisense strand to SEQ ID NO: 2055998
uuaucucgagaacaacaug

SEQ ID NO: 2056000 - RNA, 19 nt, Artificial Sequence
  Description of Artificial Sequence: Synthetic oligonucleotide
  Sense strand starting at position 62 of SEQ ID NO: 1881585
uguuguucucgagauaaug

SEQ ID NO: 2056001 - RNA, 19 nt, Artificial Sequence
  Description of Artificial Sequence: Synthetic oligonucleotide
  Antisense strand to SEQ ID NO: 2056000
cauuaucucgagaacaaca

SEQ ID NO: 2056002 - RNA, 19 nt, Artificial Sequence
  Description of Artificial Sequence: Synthetic oligonucleotide
  Sense strand starting at position 64 of SEQ ID NO: 1881585
uuguucucgagauaaugag

SEQ ID NO: 2056003 - RNA, 19 nt, Artificial Sequence
  Description of Artificial Sequence: Synthetic oligonucleotide
  Antisense strand to SEQ ID NO: 2056002
cucauuaucucgagaacaa

SEQ ID NO: 2056004 - RNA, 19 nt, Artificial Sequence
  Description of Artificial Sequence: Synthetic oligonucleotide
  Sense strand starting at position 70 of SEQ ID NO: 1881585
ucgagauaaugagugaguu

SEQ ID NO: 2056005 - RNA, 19 nt, Artificial Sequence
  Description of Artificial Sequence: Synthetic oligonucleotide
  Antisense strand to SEQ ID NO: 2056004
aacucacucauuaucucga

SEQ ID NO: 2056006 - RNA, 19 nt, Artificial Sequence
  Description of Artificial Sequence: Synthetic oligonucleotide
  Sense strand starting at position 71 of SEQ ID NO: 1881585
cgagauaaugagugaguuc

SEQ ID NO: 2056007 - RNA, 19 nt, Artificial Sequence
  Description of Artificial Sequence: Synthetic oligonucleotide
  Antisense strand to SEQ ID NO: 2056006
gaacucacucauuaucucg

SEQ ID NO: 2056008 - RNA, 19 nt, Artificial Sequence
  Description of Artificial Sequence: Synthetic oligonucleotide
  Sense strand starting at position 788 of SEQ ID NO: 1881585
ucaugaaucccaggaucua

SEQ ID NO: 2056009 - RNA, 19 nt, Artificial Sequence
  Description of Artificial Sequence: Synthetic oligonucleotide
  Antisense strand to SEQ ID NO: 2056008
uagauccugggauucauga

SEQ ID NO: 2056010 - RNA, 19 nt, Artificial Sequence
  Description of Artificial Sequence: Synthetic oligonucleotide
  Sense strand starting at position 797 of SEQ ID NO: 1881585
ccaggaucuagugggaauu

SEQ ID NO: 2056011 - RNA, 19 nt, Artificial Sequence
  Description of Artificial Sequence: Synthetic oligonucleotide
  Antisense strand to SEQ ID NO: 2056010
aauucccacuagauccugg

SEQ ID NO: 2056012 - RNA, 19 nt, Artificial Sequence
  Description of Artificial Sequence: Synthetic oligonucleotide
  Sense strand starting at position 1542 of SEQ ID NO: 1881585
gaugguguggcugauauaa

SEQ ID NO: 2056013 - RNA, 19 nt, Artificial Sequence
  Description of Artificial Sequence: Synthetic oligonucleotide
  Antisense strand to SEQ ID NO: 2056012
uuauaucagccacaccauc

SEQ ID NO: 2056014 - RNA, 19 nt, Artificial Sequence
  Description of Artificial Sequence: Synthetic oligonucleotide
  Sense strand starting at position 1675 of SEQ ID NO: 1881585
aagagaugugcccaaaguc

SEQ ID NO: 2056015 - RNA, 19 nt, Artificial Sequence
  Description of Artificial Sequence: Synthetic oligonucleotide
  Antisense strand to SEQ ID NO: 2056014
gacuuugggcacaucucuu

SEQ ID NO: 2056016 - RNA, 19 nt, Artificial Sequence
  Description of Artificial Sequence: Synthetic oligonucleotide
  Sense strand starting at position 1687 of SEQ ID NO: 1881585
caaagucgucagcaaauaa

SEQ ID NO: 2056017 - RNA, 19 nt, Artificial Sequence
  Description of Artificial Sequence: Synthetic oligonucleotide
  Antisense strand to SEQ ID NO: 2056016
uuauuugcugacgacuuug

SEQ ID NO: 2056018 - RNA, 19 nt, Artificial Sequence
  Description of Artificial Sequence: Synthetic oligonucleotide
  Sense strand starting at position 1787 of SEQ ID NO: 1881585
gaagguaugggaugcagau

SEQ ID NO: 2056019 - RNA, 19 nt, Artificial Sequence
  Description of Artificial Sequence: Synthetic oligonucleotide
  Antisense strand to SEQ ID NO: 2056018
aucugcaucccauaccuuc

SEQ ID NO: 2056020 - RNA, 19 nt, Artificial Sequence
  Description of Artificial Sequence: Synthetic oligonucleotide
  Sense strand starting at position 1815 of SEQ ID NO: 1881585
uggauauucuuaccuugga

SEQ ID NO: 2056021 - RNA, 19 nt, Artificial Sequence
  Description of Artificial Sequence: Synthetic oligonucleotide
  Antisense strand to SEQ ID NO: 2056020
uccaagguaagaauaucca

SEQ ID NO: 2056022 - RNA, 19 nt, Artificial Sequence
  Description of Artificial Sequence: Synthetic oligonucleotide
  Sense strand starting at position 1816 of SEQ ID NO: 1881585
ggauauucuuaccuuggau

SEQ ID NO: 2056023 - RNA, 19 nt, Artificial Sequence
  Description of Artificial Sequence: Synthetic oligonucleotide
  Antisense strand to SEQ ID NO: 2056022
auccaagguaagaauaucc

SEQ ID NO: 2056024 - RNA, 19 nt, Artificial Sequence
  Description of Artificial Sequence: Synthetic oligonucleotide
  Sense strand starting at position 1859 of SEQ ID NO: 1881585
gcagguuuccugaggugug

SEQ ID NO: 2056025 - RNA, 19 nt, Artificial Sequence
  Description of Artificial Sequence: Synthetic oligonucleotide
  Antisense strand to SEQ ID NO: 2056024
cacaccucaggaaaccugc

SEQ ID NO: 2056026 - RNA, 19 nt, Artificial Sequence
  Description of Artificial Sequence: Synthetic oligonucleotide
  Sense strand starting at position 1864 of SEQ ID NO: 1881585
uuuccugaggugugacaga

SEQ ID NO: 2056027 - RNA, 19 nt, Artificial Sequence
  Description of Artificial Sequence: Synthetic oligonucleotide
  Antisense strand to SEQ ID NO: 2056026
ucugucacaccucaggaaa

SEQ ID NO: 2056028 - RNA, 19 nt, Artificial Sequence
  Description of Artificial Sequence: Synthetic oligonucleotide
  Sense strand starting at position 1991 of SEQ ID NO: 1881585
ggguucuaacugugaauua

SEQ ID NO: 2056029 - RNA, 19 nt, Artificial Sequence
  Description of Artificial Sequence: Synthetic oligonucleotide
  Antisense strand to SEQ ID NO: 2056028
uaauucacaguuagaaccc

SEQ ID NO: 2056030 - RNA, 19 nt, Artificial Sequence
  Description of Artificial Sequence: Synthetic oligonucleotide
  Sense strand starting at position 2076 of SEQ ID NO: 1881585
acugauuggcuguaaacac

SEQ ID NO: 2056031 - RNA, 19 nt, Artificial Sequence
  Description of Artificial Sequence: Synthetic oligonucleotide
  Antisense strand to SEQ ID NO: 2056030
guguuuacagccaaucagu

SEQ ID NO: 2056032 - RNA, 19 nt, Artificial Sequence
  Description of Artificial Sequence: Synthetic oligonucleotide
  Sense strand starting at position 2166 of SEQ ID NO: 1881585
ggugucgagagacauuaaa

SEQ ID NO: 2056033 - RNA, 19 nt, Artificial Sequence
  Description of Artificial Sequence: Synthetic oligonucleotide
  Antisense strand to SEQ ID NO: 2056032
uuuaaugucucucgacacc

SEQ ID NO: 2056034 - RNA, 19 nt, Artificial Sequence
  Description of Artificial Sequence: Synthetic oligonucleotide
  Sense strand starting at position 2178 of SEQ ID NO: 1881585
cauuaaagugguggugaca

SEQ ID NO: 2056035 - RNA, 19 nt, Artificial Sequence
  Description of Artificial Sequence: Synthetic oligonucleotide
  Antisense strand to SEQ ID NO: 2056034
ugucaccaccacuuuaaug

SEQ ID NO: 2056036 - RNA, 19 nt, Artificial Sequence
  Description of Artificial Sequence: Synthetic oligonucleotide
  Sense strand starting at position 2564 of SEQ ID NO: 1881585
cagugauugucacccaaag

SEQ ID NO: 2056037 - RNA, 19 nt, Artificial Sequence
  Description of Artificial Sequence: Synthetic oligonucleotide
  Antisense strand to SEQ ID NO: 2056036
cuuugggugacaaucacug

SEQ ID NO: 2056038 - RNA, 19 nt, Artificial Sequence
  Description of Artificial Sequence: Synthetic oligonucleotide
  Sense strand starting at position 2663 of SEQ ID NO: 1881585
ugugacaacucucugacau

SEQ ID NO: 2056039 - RNA, 19 nt, Artificial Sequence
  Description of Artificial Sequence: Synthetic oligonucleotide
  Antisense strand to SEQ ID NO: 2056038
augucagagaguugucaca

SEQ ID NO: 2056040 - RNA, 19 nt, Artificial Sequence
  Description of Artificial Sequence: Synthetic oligonucleotide
  Sense strand starting at position 2664 of SEQ ID NO: 1881585
gugacaacucucugacauu

SEQ ID NO: 2056041 - RNA, 19 nt, Artificial Sequence
  Description of Artificial Sequence: Synthetic oligonucleotide
  Antisense strand to SEQ ID NO: 2056040
aaugucagagaguugucac

SEQ ID NO: 2056042 - RNA, 19 nt, Artificial Sequence
  Description of Artificial Sequence: Synthetic oligonucleotide
  Sense strand starting at position 2673 of SEQ ID NO: 1881585
cucugacauuuagaagagu

SEQ ID NO: 2056043 - RNA, 19 nt, Artificial Sequence
  Description of Artificial Sequence: Synthetic oligonucleotide
  Antisense strand to SEQ ID NO: 2056042
acucuucuaaaugucagag

SEQ ID NO: 2056044 - RNA, 19 nt, Artificial Sequence
  Description of Artificial Sequence: Synthetic oligonucleotide
  Sense strand starting at position 2713 of SEQ ID NO: 1881585
aguacauaggguugaauga

SEQ ID NO: 2056045 - RNA, 19 nt, Artificial Sequence
  Description of Artificial Sequence: Synthetic oligonucleotide
  Antisense strand to SEQ ID NO: 2056044
ucauucaacccuauguacu

SEQ ID NO: 2056046 - RNA, 19 nt, Artificial Sequence
  Description of Artificial Sequence: Synthetic oligonucleotide
  Sense strand starting at position 2777 of SEQ ID NO: 1881585
uuaauagggucaucgacaa

SEQ ID NO: 2056047 - RNA, 19 nt, Artificial Sequence
  Description of Artificial Sequence: Synthetic oligonucleotide
  Antisense strand to SEQ ID NO: 2056046
uugucgaugacccuauuaa

SEQ ID NO: 2056048 - RNA, 19 nt, Artificial Sequence
  Description of Artificial Sequence: Synthetic oligonucleotide
  Sense strand starting at position 2789 of SEQ ID NO: 1881585
ucgacaagauauccucaau

SEQ ID NO: 2056049 - RNA, 19 nt, Artificial Sequence
  Description of Artificial Sequence: Synthetic oligonucleotide
  Antisense strand to SEQ ID NO: 2056048
auugaggauaucuugucga

SEQ ID NO: 2056050 - RNA, 19 nt, Artificial Sequence
  Description of Artificial Sequence: Synthetic oligonucleotide
  Sense strand starting at position 2866 of SEQ ID NO: 1881585
ucauuugugcuauguaacu

SEQ ID NO: 2056051 - RNA, 19 nt, Artificial Sequence
  Description of Artificial Sequence: Synthetic oligonucleotide
  Antisense strand to SEQ ID NO: 2056050
aguuacauagcacaaauga

SEQ ID NO: 2056052 - RNA, 19 nt, Artificial Sequence
  Description of Artificial Sequence: Synthetic oligonucleotide
  Sense strand starting at position 2988 of SEQ ID NO: 1881585
aaagaugauugguuauccu

SEQ ID NO: 2056053 - RNA, 19 nt, Artificial Sequence
  Description of Artificial Sequence: Synthetic oligonucleotide
  Antisense strand to SEQ ID NO: 2056052
aggauaaccaaucaucuuu

SEQ ID NO: 2056054 - RNA, 19 nt, Artificial Sequence
  Description of Artificial Sequence: Synthetic oligonucleotide
  Sense strand starting at position 2992 of SEQ ID NO: 1881585
augauugguuauccuaauu

SEQ ID NO: 2056055 - RNA, 19 nt, Artificial Sequence
  Description of Artificial Sequence: Synthetic oligonucleotide
  Antisense strand to SEQ ID NO: 2056054
aauuaggauaaccaaucau

SEQ ID NO: 2056056 - RNA, 19 nt, Artificial Sequence
  Description of Artificial Sequence: Synthetic oligonucleotide
  Sense strand starting at position 3013 of SEQ ID NO: 1881585
auaucuuaguugcugagaa

SEQ ID NO: 2056057 - RNA, 19 nt, Artificial Sequence
  Description of Artificial Sequence: Synthetic oligonucleotide
  Antisense strand to SEQ ID NO: 2056056
uucucagcaacuaagauau

SEQ ID NO: 2056058 - RNA, 19 nt, Artificial Sequence
  Description of Artificial Sequence: Synthetic oligonucleotide
  Sense strand starting at position 3015 of SEQ ID NO: 1881585
aucuuaguugcugagaaag

SEQ ID NO: 2056059 - RNA, 19 nt, Artificial Sequence
  Description of Artificial Sequence: Synthetic oligonucleotide
  Antisense strand to SEQ ID NO: 2056058
cuuucucagcaacuaagau

SEQ ID NO: 2056060 - RNA, 19 nt, Artificial Sequence
  Description of Artificial Sequence: Synthetic oligonucleotide
  Sense strand starting at position 3026 of SEQ ID NO: 1881585
ugagaaaggcacuguaauu

SEQ ID NO: 2056061 - RNA, 19 nt, Artificial Sequence
  Description of Artificial Sequence: Synthetic oligonucleotide
  Antisense strand to SEQ ID NO: 2056060
aauuacagugccuuucuca

SEQ ID NO: 2056062 - RNA, 19 nt, Artificial Sequence
  Description of Artificial Sequence: Synthetic oligonucleotide
  Sense strand starting at position 3164 of SEQ ID NO: 1881585
auggcuuuggguuguauuu

SEQ ID NO: 2056063 - RNA, 19 nt, Artificial Sequence
  Description of Artificial Sequence: Synthetic oligonucleotide
  Antisense strand to SEQ ID NO: 2056062
aaauacaacccaaagccau

SEQ ID NO: 2056064 - RNA, 19 nt, Artificial Sequence
  Description of Artificial Sequence: Synthetic oligonucleotide
  Sense strand starting at position 3358 of SEQ ID NO: 1881585
cagagugaacucugcagaa

SEQ ID NO: 2056065 - RNA, 19 nt, Artificial Sequence
  Description of Artificial Sequence: Synthetic oligonucleotide
  Antisense strand to SEQ ID NO: 2056064
uucugcagaguucacucug

SEQ ID NO: 2056066 - RNA, 19 nt, Artificial Sequence
  Description of Artificial Sequence: Synthetic oligonucleotide
  Sense strand starting at position 3404 of SEQ ID NO: 1881585
ugaauaaaggcuuagucau

SEQ ID NO: 2056067 - RNA, 19 nt, Artificial Sequence
  Description of Artificial Sequence: Synthetic oligonucleotide
  Antisense strand to SEQ ID NO: 2056066
augacuaagccuuuauuca

SEQ ID NO: 2056068 - RNA, 19 nt, Artificial Sequence
  Description of Artificial Sequence: Synthetic oligonucleotide
  Sense strand starting at position 3488 of SEQ ID NO: 1881585
gugaguuccggugcaaugu

SEQ ID NO: 2056069 - RNA, 19 nt, Artificial Sequence
  Description of Artificial Sequence: Synthetic oligonucleotide
  Antisense strand to SEQ ID NO: 2056068
acauugcaccggaacucac

SEQ ID NO: 2056070 - RNA, 19 nt, Artificial Sequence
  Description of Artificial Sequence: Synthetic oligonucleotide
  Sense strand starting at position 3594 of SEQ ID NO: 1881585
ccagaacaucuuggauauc

SEQ ID NO: 2056071 - RNA, 19 nt, Artificial Sequence
  Description of Artificial Sequence: Synthetic oligonucleotide
  Antisense strand to SEQ ID NO: 2056070
gauauccaagauguucugg

SEQ ID NO: 2056072 - RNA, 19 nt, Artificial Sequence
  Description of Artificial Sequence: Synthetic oligonucleotide
  Sense strand starting at position 3605 of SEQ ID NO: 1881585
uggauauccucucccugau

SEQ ID NO: 2056073 - RNA, 19 nt, Artificial Sequence
  Description of Artificial Sequence: Synthetic oligonucleotide
  Antisense strand to SEQ ID NO: 2056072
aucagggagaggauaucca

SEQ ID NO: 2056074 - RNA, 19 nt, Artificial Sequence
  Description of Artificial Sequence: Synthetic oligonucleotide
  Sense strand starting at position 3881 of SEQ ID NO: 1881585
ucugaacguguuuauaaag

SEQ ID NO: 2056075 - RNA, 19 nt, Artificial Sequence
  Description of Artificial Sequence: Synthetic oligonucleotide
  Antisense strand to SEQ ID NO: 2056074
cuuuauaaacacguucaga

SEQ ID NO: 2056076 - RNA, 19 nt, Artificial Sequence
  Description of Artificial Sequence: Synthetic oligonucleotide
  Sense strand starting at position 3936 of SEQ ID NO: 1881585
gugugcuuacaggaacaga

SEQ ID NO: 2056077 - RNA, 19 nt, Artificial Sequence
  Description of Artificial Sequence: Synthetic oligonucleotide
  Antisense strand to SEQ ID NO: 2056076
ucuguuccuguaagcacac

SEQ ID NO: 2056078 - RNA, 19 nt, Artificial Sequence
  Description of Artificial Sequence: Synthetic oligonucleotide
  Sense strand starting at position 575 of SEQ ID NO: 1881586
ccauauacaugucuguaau

SEQ ID NO: 2056079 - RNA, 19 nt, Artificial Sequence
  Description of Artificial Sequence: Synthetic oligonucleotide
  Antisense strand to SEQ ID NO: 2056078
auuacagacauguauaugg

SEQ ID NO: 2056080 - RNA, 19 nt, Artificial Sequence
  Description of Artificial Sequence: Synthetic oligonucleotide
  Sense strand starting at position 578 of SEQ ID NO: 1881586
uauacaugucuguaaugug

SEQ ID NO: 2056081 - RNA, 19 nt, Artificial Sequence
  Description of Artificial Sequence: Synthetic oligonucleotide
  Antisense strand to SEQ ID NO: 2056080
cacauuacagacauguaua

SEQ ID NO: 2056082 - RNA, 19 nt, Artificial Sequence
  Description of Artificial Sequence: Synthetic oligonucleotide
  Sense strand starting at position 610 of SEQ ID NO: 1881586
uuagaacagcugugacauc

SEQ ID NO: 2056083 - RNA, 19 nt, Artificial Sequence
  Description of Artificial Sequence: Synthetic oligonucleotide
  Antisense strand to SEQ ID NO: 2056082
gaugucacagcuguucuaa

SEQ ID NO: 2056084 - RNA, 19 nt, Artificial Sequence
  Description of Artificial Sequence: Synthetic oligonucleotide
  Sense strand starting at position 694 of SEQ ID NO: 1881586
aguuaugugauguaugacu

SEQ ID NO: 2056085 - RNA, 19 nt, Artificial Sequence
  Description of Artificial Sequence: Synthetic oligonucleotide
  Antisense strand to SEQ ID NO: 2056084
agucauacaucacauaacu

SEQ ID NO: 2056086 - RNA, 19 nt, Artificial Sequence
  Description of Artificial Sequence: Synthetic oligonucleotide
  Sense strand starting at position 727 of SEQ ID NO: 1881586
ugaauauagugaucaguuc

SEQ ID NO: 2056087 - RNA, 19 nt, Artificial Sequence
  Description of Artificial Sequence: Synthetic oligonucleotide
  Antisense strand to SEQ ID NO: 2056086
gaacugaucacuauauuca

SEQ ID NO: 2056088 - RNA, 19 nt, Artificial Sequence
  Description of Artificial Sequence: Synthetic oligonucleotide
  Sense strand starting at position 753 of SEQ ID NO: 1881586
gggacauacguaggaacua

SEQ ID NO: 2056089 - RNA, 19 nt, Artificial Sequence
  Description of Artificial Sequence: Synthetic oligonucleotide
  Antisense strand to SEQ ID NO: 2056088
uaguuccuacguauguccc

SEQ ID NO: 2056090 - RNA, 19 nt, Artificial Sequence
  Description of Artificial Sequence: Synthetic oligonucleotide
  Sense strand starting at position 811 of SEQ ID NO: 1881586
augcuaauucuggaacuuu

SEQ ID NO: 2056091 - RNA, 19 nt, Artificial Sequence
  Description of Artificial Sequence: Synthetic oligonucleotide
  Antisense strand to SEQ ID NO: 2056090
aaaguuccagaauuagcau

SEQ ID NO: 2056092 - RNA, 19 nt, Artificial Sequence
  Description of Artificial Sequence: Synthetic oligonucleotide
  Sense strand starting at position 906 of SEQ ID NO: 1881586
gugugugagaggagcguua

SEQ ID NO: 2056093 - RNA, 19 nt, Artificial Sequence
  Description of Artificial Sequence: Synthetic oligonucleotide
  Antisense strand to SEQ ID NO: 2056092
uaacgcuccucucacacac

SEQ ID NO: 2056094 - RNA, 19 nt, Artificial Sequence
  Description of Artificial Sequence: Synthetic oligonucleotide
  Sense strand starting at position 913 of SEQ ID NO: 1881586
agaggagcguuauuucgua

SEQ ID NO: 2056095 - RNA, 19 nt, Artificial Sequence
  Description of Artificial Sequence: Synthetic oligonucleotide
  Antisense strand to SEQ ID NO: 2056094
uacgaaauaacgcuccucu

SEQ ID NO: 2056096 - RNA, 19 nt, Artificial Sequence
  Description of Artificial Sequence: Synthetic oligonucleotide
  Sense strand starting at position 1085 of SEQ ID NO: 1881586
guucuaugugcggugcuaa

SEQ ID NO: 2056097 - RNA, 19 nt, Artificial Sequence
  Description of Artificial Sequence: Synthetic oligonucleotide
  Antisense strand to SEQ ID NO: 2056096
uuagcaccgcacauagaac

SEQ ID NO: 2056098 - RNA, 19 nt, Artificial Sequence
  Description of Artificial Sequence: Synthetic oligonucleotide
  Sense strand starting at position 1123 of SEQ ID NO: 1881586
aagcuagaauuugucgcau

SEQ ID NO: 2056099 - RNA, 19 nt, Artificial Sequence
  Description of Artificial Sequence: Synthetic oligonucleotide
  Antisense strand to SEQ ID NO: 2056098
augcgacaaauucuagcuu

SEQ ID NO: 2056100 - RNA, 19 nt, Artificial Sequence
  Description of Artificial Sequence: Synthetic oligonucleotide
  Sense strand starting at position 1129 of SEQ ID NO: 1881586
gaauuugucgcauguauua

SEQ ID NO: 2056101 - RNA, 19 nt, Artificial Sequence
  Description of Artificial Sequence: Synthetic oligonucleotide
  Antisense strand to SEQ ID NO: 2056100
uaauacaugcgacaaauuc

SEQ ID NO: 2056102 - RNA, 19 nt, Artificial Sequence
  Description of Artificial Sequence: Synthetic oligonucleotide
  Sense strand starting at position 1187 of SEQ ID NO: 1881586
uggagugacucaguaauua

SEQ ID NO: 2056103 - RNA, 19 nt, Artificial Sequence
  Description of Artificial Sequence: Synthetic oligonucleotide
  Antisense strand to SEQ ID NO: 2056102
uaauuacugagucacucca

SEQ ID NO: 2056104 - RNA, 19 nt, Artificial Sequence
  Description of Artificial Sequence: Synthetic oligonucleotide
  Sense strand starting at position 1191 of SEQ ID NO: 1881586
gugacucaguaauuauaua

SEQ ID NO: 2056105 - RNA, 19 nt, Artificial Sequence
  Description of Artificial Sequence: Synthetic oligonucleotide
  Antisense strand to SEQ ID NO: 2056104
uauauaauuacugagucac

SEQ ID NO: 2056106 - RNA, 19 nt, Artificial Sequence
  Description of Artificial Sequence: Synthetic oligonucleotide
  Sense strand starting at position 1359 of SEQ ID NO: 1881586
gaaacuguuugagcacuaa

SEQ ID NO: 2056107 - RNA, 19 nt, Artificial Sequence
  Description of Artificial Sequence: Synthetic oligonucleotide
  Antisense strand to SEQ ID NO: 2056106
uuagugcucaaacaguuuc

SEQ ID NO: 2056108 - RNA, 19 nt, Artificial Sequence
  Description of Artificial Sequence: Synthetic oligonucleotide
  Sense strand starting at position 1390 of SEQ ID NO: 1881586
gggaaaugcucauuggagu

SEQ ID NO: 2056109 - RNA, 19 nt, Artificial Sequence
  Description of Artificial Sequence: Synthetic oligonucleotide
  Antisense strand to SEQ ID NO: 2056108
acuccaaugagcauuuccc

SEQ ID NO: 2056110 - RNA, 19 nt, Artificial Sequence
  Description of Artificial Sequence: Synthetic oligonucleotide
  Sense strand starting at position 1752 of SEQ ID NO: 1881586
guuugaaagugaucuacaa

SEQ ID NO: 2056111 - RNA, 19 nt, Artificial Sequence
  Description of Artificial Sequence: Synthetic oligonucleotide
  Antisense strand to SEQ ID NO: 2056110
uuguagaucacuuucaaac

SEQ ID NO: 2056112 - RNA, 19 nt, Artificial Sequence
  Description of Artificial Sequence: Synthetic oligonucleotide
  Sense strand starting at position 2068 of SEQ ID NO: 1881586
aaccgaaaucaaugacgua

SEQ ID NO: 2056113 - RNA, 19 nt, Artificial Sequence
  Description of Artificial Sequence: Synthetic oligonucleotide
  Antisense strand to SEQ ID NO: 2056112
uacgucauugauuucgguu

SEQ ID NO: 2056114 - RNA, 19 nt, Artificial Sequence
  Description of Artificial Sequence: Synthetic oligonucleotide
  Sense strand starting at position 2069 of SEQ ID NO: 1881586
accgaaaucaaugacguau

SEQ ID NO: 2056115 - RNA, 19 nt, Artificial Sequence
  Description of Artificial Sequence: Synthetic oligonucleotide
  Antisense strand to SEQ ID NO: 2056114
auacgucauugauuucggu

SEQ ID NO: 2056116 - RNA, 19 nt, Artificial Sequence
  Description of Artificial Sequence: Synthetic oligonucleotide
  Sense strand starting at position 2083 of SEQ ID NO: 1881586
cguauuaguaaacagugau

SEQ ID NO: 2056117 - RNA, 19 nt, Artificial Sequence
  Description of Artificial Sequence: Synthetic oligonucleotide
  Antisense strand to SEQ ID NO: 2056116
aucacuguuuacuaauacg

SEQ ID NO: 2056118 - RNA, 19 nt, Artificial Sequence
  Description of Artificial Sequence: Synthetic oligonucleotide
  Sense strand starting at position 2086 of SEQ ID NO: 1881586
auuaguaaacagugauucu

SEQ ID NO: 2056119 - RNA, 19 nt, Artificial Sequence
  Description of Artificial Sequence: Synthetic oligonucleotide
  Antisense strand to SEQ ID NO: 2056118
agaaucacuguuuacuaau

SEQ ID NO: 2056120 - RNA, 19 nt, Artificial Sequence
  Description of Artificial Sequence: Synthetic oligonucleotide
  Sense strand starting at position 2142 of SEQ ID NO: 1881586
agaucugacuucuuaagca

SEQ ID NO: 2056121 - RNA, 19 nt, Artificial Sequence
  Description of Artificial Sequence: Synthetic oligonucleotide
  Antisense strand to SEQ ID NO: 2056120
ugcuuaagaagucagaucu

SEQ ID NO: 2056122 - RNA, 19 nt, Artificial Sequence
  Description of Artificial Sequence: Synthetic oligonucleotide
  Sense strand starting at position 2363 of SEQ ID NO: 1881586
cuucuaauggcauaagagu

SEQ ID NO: 2056123 - RNA, 19 nt, Artificial Sequence
  Description of Artificial Sequence: Synthetic oligonucleotide
  Antisense strand to SEQ ID NO: 2056122
acucuuaugccauuagaag

SEQ ID NO: 2056124 - RNA, 19 nt, Artificial Sequence
  Description of Artificial Sequence: Synthetic oligonucleotide
  Sense strand starting at position 2457 of SEQ ID NO: 1881586
guaaucaaauggguaccua

SEQ ID NO: 2056125 - RNA, 19 nt, Artificial Sequence
  Description of Artificial Sequence: Synthetic oligonucleotide
  Antisense strand to SEQ ID NO: 2056124
uagguacccauuugauuac

SEQ ID NO: 2056126 - RNA, 19 nt, Artificial Sequence
  Description of Artificial Sequence: Synthetic oligonucleotide
  Sense strand starting at position 2793 of SEQ ID NO: 1881586
uuccaaauucuguaaggcu

SEQ ID NO: 2056127 - RNA, 19 nt, Artificial Sequence
  Description of Artificial Sequence: Synthetic oligonucleotide
  Antisense strand to SEQ ID NO: 2056126
agccuuacagaauuuggaa

SEQ ID NO: 2056128 - RNA, 19 nt, Artificial Sequence
  Description of Artificial Sequence: Synthetic oligonucleotide
  Sense strand starting at position 2911 of SEQ ID NO: 1881586
gguguuuacuauuugcaac

SEQ ID NO: 2056129 - RNA, 19 nt, Artificial Sequence
  Description of Artificial Sequence: Synthetic oligonucleotide
  Antisense strand to SEQ ID NO: 2056128
guugcaaauaguaaacacc

SEQ ID NO: 2056130 - RNA, 19 nt, Artificial Sequence
  Description of Artificial Sequence: Synthetic oligonucleotide
  Sense strand starting at position 2969 of SEQ ID NO: 1881586
gacagcucucaucaaguga

SEQ ID NO: 2056131 - RNA, 19 nt, Artificial Sequence
  Description of Artificial Sequence: Synthetic oligonucleotide
  Antisense strand to SEQ ID NO: 2056130
ucacuugaugagagcuguc

SEQ ID NO: 2056132 - RNA, 19 nt, Artificial Sequence
  Description of Artificial Sequence: Synthetic oligonucleotide
  Sense strand starting at position 2983 of SEQ ID NO: 1881586
agugaauggauguguccaa

SEQ ID NO: 2056133 - RNA, 19 nt, Artificial Sequence
  Description of Artificial Sequence: Synthetic oligonucleotide
  Antisense strand to SEQ ID NO: 2056132
uuggacacauccauucacu

SEQ ID NO: 2056134 - RNA, 19 nt, Artificial Sequence
  Description of Artificial Sequence: Synthetic oligonucleotide
  Sense strand starting at position 2984 of SEQ ID NO: 1881586
gugaauggauguguccaaa

SEQ ID NO: 2056135 - RNA, 19 nt, Artificial Sequence
  Description of Artificial Sequence: Synthetic oligonucleotide
  Antisense strand to SEQ ID NO: 2056134
uuuggacacauccauucac

SEQ ID NO: 2056136 - RNA, 19 nt, Artificial Sequence
  Description of Artificial Sequence: Synthetic oligonucleotide
  Sense strand starting at position 2987 of SEQ ID NO: 1881586
aauggauguguccaaagca

SEQ ID NO: 2056137 - RNA, 19 nt, Artificial Sequence
  Description of Artificial Sequence: Synthetic oligonucleotide
  Antisense strand to SEQ ID NO: 2056136
ugcuuuggacacauccauu

SEQ ID NO: 2056138 - RNA, 19 nt, Artificial Sequence
  Description of Artificial Sequence: Synthetic oligonucleotide
  Sense strand starting at position 3305 of SEQ ID NO: 1881586
gcuccauaagcagaguuga

SEQ ID NO: 2056139 - RNA, 19 nt, Artificial Sequence
  Description of Artificial Sequence: Synthetic oligonucleotide
  Antisense strand to SEQ ID NO: 2056138
ucaacucugcuuauggagc

SEQ ID NO: 2056140 - RNA, 19 nt, Artificial Sequence
  Description of Artificial Sequence: Synthetic oligonucleotide
  Sense strand starting at position 3505 of SEQ ID NO: 1881586
agccuuuaauaaucagaga

SEQ ID NO: 2056141 - RNA, 19 nt, Artificial Sequence
  Description of Artificial Sequence: Synthetic oligonucleotide
  Antisense strand to SEQ ID NO: 2056140
ucucugauuauuaaaggcu

SEQ ID NO: 2056142 - RNA, 19 nt, Artificial Sequence
  Description of Artificial Sequence: Synthetic oligonucleotide
  Sense strand starting at position 3518 of SEQ ID NO: 1881586
cagagagauugacagaaga

SEQ ID NO: 2056143 - RNA, 19 nt, Artificial Sequence
  Description of Artificial Sequence: Synthetic oligonucleotide
  Antisense strand to SEQ ID NO: 2056142
ucuucugucaaucucucug

SEQ ID NO: 2056144 - RNA, 19 nt, Artificial Sequence
  Description of Artificial Sequence: Synthetic oligonucleotide
  Sense strand starting at position 3582 of SEQ ID NO: 1881586
aaugauguuugguuccuaa

SEQ ID NO: 2056145 - RNA, 19 nt, Artificial Sequence
  Description of Artificial Sequence: Synthetic oligonucleotide
  Antisense strand to SEQ ID NO: 2056144
uuaggaaccaaacaucauu

SEQ ID NO: 2056146 - RNA, 19 nt, Artificial Sequence
  Description of Artificial Sequence: Synthetic oligonucleotide
  Sense strand starting at position 3640 of SEQ ID NO: 1881586
ugggaaaugccacacaguu

SEQ ID NO: 2056147 - RNA, 19 nt, Artificial Sequence
  Description of Artificial Sequence: Synthetic oligonucleotide
  Antisense strand to SEQ ID NO: 2056146
aacuguguggcauuuccca

SEQ ID NO: 2056148 - RNA, 19 nt, Artificial Sequence
  Description of Artificial Sequence: Synthetic oligonucleotide
  Sense strand starting at position 3714 of SEQ ID NO: 1881586
guugauuagaaauguaaga

SEQ ID NO: 2056149 - RNA, 19 nt, Artificial Sequence
  Description of Artificial Sequence: Synthetic oligonucleotide
  Antisense strand to SEQ ID NO: 2056148
ucuuacauuucuaaucaac

SEQ ID NO: 2056150 - RNA, 19 nt, Artificial Sequence
  Description of Artificial Sequence: Synthetic oligonucleotide
  Sense strand starting at position 3733 of SEQ ID NO: 1881586
acucauaaguguuucucaa

SEQ ID NO: 2056151 - RNA, 19 nt, Artificial Sequence
  Description of Artificial Sequence: Synthetic oligonucleotide
  Antisense strand to SEQ ID NO: 2056150
uugagaaacacuuaugagu

SEQ ID NO: 2056152 - RNA, 19 nt, Artificial Sequence
  Description of Artificial Sequence: Synthetic oligonucleotide
  Sense strand starting at position 3778 of SEQ ID NO: 1881586
aggaaaucguuucuaauca

SEQ ID NO: 2056153 - RNA, 19 nt, Artificial Sequence
  Description of Artificial Sequence: Synthetic oligonucleotide
  Antisense strand to SEQ ID NO: 2056152
ugauuagaaacgauuuccu

SEQ ID NO: 2056154 - RNA, 19 nt, Artificial Sequence
  Description of Artificial Sequence: Synthetic oligonucleotide
  Sense strand starting at position 3796 of SEQ ID NO: 1881586
aggucagaagccuagugaa

SEQ ID NO: 2056155 - RNA, 19 nt, Artificial Sequence
  Description of Artificial Sequence: Synthetic oligonucleotide
  Antisense strand to SEQ ID NO: 2056154
uucacuaggcuucugaccu

SEQ ID NO: 2056156 - RNA, 19 nt, Artificial Sequence
  Description of Artificial Sequence: Synthetic oligonucleotide
  Sense strand starting at position 3844 of SEQ ID NO: 1881586
guguucuagcugcuuguua

SEQ ID NO: 2056157 - RNA, 19 nt, Artificial Sequence
  Description of Artificial Sequence: Synthetic oligonucleotide
  Antisense strand to SEQ ID NO: 2056156
uaacaagcagcuagaacac

SEQ ID NO: 2056158 - RNA, 19 nt, Artificial Sequence
  Description of Artificial Sequence: Synthetic oligonucleotide
  Sense strand starting at position 389 of SEQ ID NO: 1881587
gacaaagauugcucaguga

SEQ ID NO: 2056159 - RNA, 19 nt, Artificial Sequence
  Description of Artificial Sequence: Synthetic oligonucleotide
  Antisense strand to SEQ ID NO: 2056158
ucacugagcaaucuuuguc

SEQ ID NO: 2056160 - RNA, 19 nt, Artificial Sequence
  Description of Artificial Sequence: Synthetic oligonucleotide
  Sense strand starting at position 392 of SEQ ID NO: 1881587
aaagauugcucagugauca

SEQ ID NO: 2056161 - RNA, 19 nt, Artificial Sequence
  Description of Artificial Sequence: Synthetic oligonucleotide
  Antisense strand to SEQ ID NO: 2056160
ugaucacugagcaaucuuu

SEQ ID NO: 2056162 - RNA, 19 nt, Artificial Sequence
  Description of Artificial Sequence: Synthetic oligonucleotide
  Sense strand starting at position 393 of SEQ ID NO: 1881587
aagauugcucagugaucag

SEQ ID NO: 2056163 - RNA, 19 nt, Artificial Sequence
  Description of Artificial Sequence: Synthetic oligonucleotide
  Antisense strand to SEQ ID NO: 2056162
cugaucacugagcaaucuu

SEQ ID NO: 2056164 - RNA, 19 nt, Artificial Sequence
  Description of Artificial Sequence: Synthetic oligonucleotide
  Sense strand starting at position 396 of SEQ ID NO: 1881587
auugcucagugaucagaac

SEQ ID NO: 2056165 - RNA, 19 nt, Artificial Sequence
  Description of Artificial Sequence: Synthetic oligonucleotide
  Antisense strand to SEQ ID NO: 2056164
guucugaucacugagcaau

SEQ ID NO: 2056166 - RNA, 19 nt, Artificial Sequence
  Description of Artificial Sequence: Synthetic oligonucleotide
  Sense strand starting at position 440 of SEQ ID NO: 1881587
gccauaaugguuuagcuuu

SEQ ID NO: 2056167 - RNA, 19 nt, Artificial Sequence
  Description of Artificial Sequence: Synthetic oligonucleotide
  Antisense strand to SEQ ID NO: 2056166
aaagcuaaaccauuauggc

SEQ ID NO: 2056168 - RNA, 19 nt, Artificial Sequence
  Description of Artificial Sequence: Synthetic oligonucleotide
  Sense strand starting at position 711 of SEQ ID NO: 1881587
ucaagagcuugcuuaauua

SEQ ID NO: 2056169 - RNA, 19 nt, Artificial Sequence
  Description of Artificial Sequence: Synthetic oligonucleotide
  Antisense strand to SEQ ID NO: 2056168
uaauuaagcaagcucuuga

SEQ ID NO: 2056170 - RNA, 19 nt, Artificial Sequence
  Description of Artificial Sequence: Synthetic oligonucleotide
  Sense strand starting at position 823 of SEQ ID NO: 1881587
auaauuaucuggguaugga

SEQ ID NO: 2056171 - RNA, 19 nt, Artificial Sequence
  Description of Artificial Sequence: Synthetic oligonucleotide
  Antisense strand to SEQ ID NO: 2056170
uccauacccagauaauuau

SEQ ID NO: 2056172 - RNA, 19 nt, Artificial Sequence
  Description of Artificial Sequence: Synthetic oligonucleotide
  Sense strand starting at position 826 of SEQ ID NO: 1881587
auuaucuggguauggaauu

SEQ ID NO: 2056173 - RNA, 19 nt, Artificial Sequence
  Description of Artificial Sequence: Synthetic oligonucleotide
  Antisense strand to SEQ ID NO: 2056172
aauuccauacccagauaau

SEQ ID NO: 2056174 - RNA, 19 nt, Artificial Sequence
  Description of Artificial Sequence: Synthetic oligonucleotide
  Sense strand starting at position 1152 of SEQ ID NO: 1881587
cacugcucugauggagaga

SEQ ID NO: 2056175 - RNA, 19 nt, Artificial Sequence
  Description of Artificial Sequence: Synthetic oligonucleotide
  Antisense strand to SEQ ID NO: 2056174
ucucuccaucagagcagug

SEQ ID NO: 2056176 - RNA, 19 nt, Artificial Sequence
  Description of Artificial Sequence: Synthetic oligonucleotide
  Sense strand starting at position 1197 of SEQ ID NO: 1881587
ugaaguaaugccuauuaug

SEQ ID NO: 2056177 - RNA, 19 nt, Artificial Sequence
  Description of Artificial Sequence: Synthetic oligonucleotide
  Antisense strand to SEQ ID NO: 2056176
cauaauaggcauuacuuca

SEQ ID NO: 2056178 - RNA, 19 nt, Artificial Sequence
  Description of Artificial Sequence: Synthetic oligonucleotide
  Sense strand starting at position 1314 of SEQ ID NO: 1881587
acaggugugauaggaacuu

SEQ ID NO: 2056179 - RNA, 19 nt, Artificial Sequence
  Description of Artificial Sequence: Synthetic oligonucleotide
  Antisense strand to SEQ ID NO: 2056178
aaguuccuaucacaccugu

SEQ ID NO: 2056180 - RNA, 19 nt, Artificial Sequence
  Description of Artificial Sequence: Synthetic oligonucleotide
  Sense strand starting at position 1330 of SEQ ID NO: 1881587
cuugaauaaugagcacaua

SEQ ID NO: 2056181 - RNA, 19 nt, Artificial Sequence
  Description of Artificial Sequence: Synthetic oligonucleotide
  Antisense strand to SEQ ID NO: 2056180
uaugugcucauuauucaag

SEQ ID NO: 2056182 - RNA, 19 nt, Artificial Sequence
  Description of Artificial Sequence: Synthetic oligonucleotide
  Sense strand starting at position 1378 of SEQ ID NO: 1881587
ugccaacuuugcuugaaca

SEQ ID NO: 2056183 - RNA, 19 nt, Artificial Sequence
  Description of Artificial Sequence: Synthetic oligonucleotide
  Antisense strand to SEQ ID NO: 2056182
uguucaagcaaaguuggca

SEQ ID NO: 2056184 - RNA, 19 nt, Artificial Sequence
  Description of Artificial Sequence: Synthetic oligonucleotide
  Sense strand starting at position 1379 of SEQ ID NO: 1881587
gccaacuuugcuugaacaa

SEQ ID NO: 2056185 - RNA, 19 nt, Artificial Sequence
  Description of Artificial Sequence: Synthetic oligonucleotide
  Antisense strand to SEQ ID NO: 2056184
uuguucaagcaaaguuggc

SEQ ID NO: 2056186 - RNA, 19 nt, Artificial Sequence
  Description of Artificial Sequence: Synthetic oligonucleotide
  Sense strand starting at position 1444 of SEQ ID NO: 1881587
gcacuuggcaguuagauug

SEQ ID NO: 2056187 - RNA, 19 nt, Artificial Sequence
  Description of Artificial Sequence: Synthetic oligonucleotide
  Antisense strand to SEQ ID NO: 2056186
caaucuaacugccaagugc

SEQ ID NO: 2056188 - RNA, 19 nt, Artificial Sequence
  Description of Artificial Sequence: Synthetic oligonucleotide
  Sense strand starting at position 1651 of SEQ ID NO: 1881587
cgcaguguugcaguucuua

SEQ ID NO: 2056189 - RNA, 19 nt, Artificial Sequence
  Description of Artificial Sequence: Synthetic oligonucleotide
  Antisense strand to SEQ ID NO: 2056188
uaagaacugcaacacugcg

SEQ ID NO: 2056190 - RNA, 19 nt, Artificial Sequence
  Description of Artificial Sequence: Synthetic oligonucleotide
  Sense strand starting at position 1743 of SEQ ID NO: 1881587
uggucucuggcucaagagu

SEQ ID NO: 2056191 - RNA, 19 nt, Artificial Sequence
  Description of Artificial Sequence: Synthetic oligonucleotide
  Antisense strand to SEQ ID NO: 2056190
acucuugagccagagacca

SEQ ID NO: 2056192 - RNA, 19 nt, Artificial Sequence
  Description of Artificial Sequence: Synthetic oligonucleotide
  Sense strand starting at position 2315 of SEQ ID NO: 1881587
ugccgauugcuauauuuac

SEQ ID NO: 2056193 - RNA, 19 nt, Artificial Sequence
  Description of Artificial Sequence: Synthetic oligonucleotide
  Antisense strand to SEQ ID NO: 2056192
guaaauauagcaaucggca

SEQ ID NO: 2056194 - RNA, 19 nt, Artificial Sequence
  Description of Artificial Sequence: Synthetic oligonucleotide
  Sense strand starting at position 2393 of SEQ ID NO: 1881587
ugucaauuggugcauuaag

SEQ ID NO: 2056195 - RNA, 19 nt, Artificial Sequence
  Description of Artificial Sequence: Synthetic oligonucleotide
  Antisense strand to SEQ ID NO: 2056194
cuuaaugcaccaauugaca

SEQ ID NO: 2056196 - RNA, 19 nt, Artificial Sequence
  Description of Artificial Sequence: Synthetic oligonucleotide
  Sense strand starting at position 3177 of SEQ ID NO: 1881587
gaaccaggcuaaguagaau

SEQ ID NO: 2056197 - RNA, 19 nt, Artificial Sequence
  Description of Artificial Sequence: Synthetic oligonucleotide
  Antisense strand to SEQ ID NO: 2056196
auucuacuuagccugguuc

SEQ ID NO: 2056198 - RNA, 19 nt, Artificial Sequence
  Description of Artificial Sequence: Synthetic oligonucleotide
  Sense strand starting at position 3183 of SEQ ID NO: 1881587
ggcuaaguagaaugguaau

SEQ ID NO: 2056199 - RNA, 19 nt, Artificial Sequence
  Description of Artificial Sequence: Synthetic oligonucleotide
  Antisense strand to SEQ ID NO: 2056198
auuaccauucuacuuagcc

SEQ ID NO: 2056200 - RNA, 19 nt, Artificial Sequence
  Description of Artificial Sequence: Synthetic oligonucleotide
  Sense strand starting at position 3204 of SEQ ID NO: 1881587
ggugguucucacugaaagu

SEQ ID NO: 2056201 - RNA, 19 nt, Artificial Sequence
  Description of Artificial Sequence: Synthetic oligonucleotide
  Antisense strand to SEQ ID NO: 2056200
acuuucagugagaaccacc

SEQ ID NO: 2056202 - RNA, 19 nt, Artificial Sequence
  Description of Artificial Sequence: Synthetic oligonucleotide
  Sense strand starting at position 3205 of SEQ ID NO: 1881587
gugguucucacugaaagua

SEQ ID NO: 2056203 - RNA, 19 nt, Artificial Sequence
  Description of Artificial Sequence: Synthetic oligonucleotide
  Antisense strand to SEQ ID NO: 2056202
uacuuucagugagaaccac

SEQ ID NO: 2056204 - RNA, 19 nt, Artificial Sequence
  Description of Artificial Sequence: Synthetic oligonucleotide
  Sense strand starting at position 3262 of SEQ ID NO: 1881587
ggaccaggcuaaguagaau

SEQ ID NO: 2056205 - RNA, 19 nt, Artificial Sequence
  Description of Artificial Sequence: Synthetic oligonucleotide
  Antisense strand to SEQ ID NO: 2056204
auucuacuuagccuggucc

SEQ ID NO: 2056206 - RNA, 19 nt, Artificial Sequence
  Description of Artificial Sequence: Synthetic oligonucleotide
  Sense strand starting at position 3326 of SEQ ID NO: 1881587
uuuggucacuacucaguaa

SEQ ID NO: 2056207 - RNA, 19 nt, Artificial Sequence
  Description of Artificial Sequence: Synthetic oligonucleotide
  Antisense strand to SEQ ID NO: 2056206
uuacugaguagugaccaaa

SEQ ID NO: 2056208 - RNA, 19 nt, Artificial Sequence
  Description of Artificial Sequence: Synthetic oligonucleotide
  Sense strand starting at position 3330 of SEQ ID NO: 1881587
gucacuacucaguaaugga

SEQ ID NO: 2056209 - RNA, 19 nt, Artificial Sequence
  Description of Artificial Sequence: Synthetic oligonucleotide
  Antisense strand to SEQ ID NO: 2056208
uccauuacugaguagugac

SEQ ID NO: 2056210 - RNA, 19 nt, Artificial Sequence
  Description of Artificial Sequence: Synthetic oligonucleotide
  Sense strand starting at position 3344 of SEQ ID NO: 1881587
auggaaauguuaguguaaa

SEQ ID NO: 2056211 - RNA, 19 nt, Artificial Sequence
  Description of Artificial Sequence: Synthetic oligonucleotide
  Antisense strand to SEQ ID NO: 2056210
uuuacacuaacauuuccau

SEQ ID NO: 2056212 - RNA, 19 nt, Artificial Sequence
  Description of Artificial Sequence: Synthetic oligonucleotide
  Sense strand starting at position 3407 of SEQ ID NO: 1881587
ucuguauguggugaugaua

SEQ ID NO: 2056213 - RNA, 19 nt, Artificial Sequence
  Description of Artificial Sequence: Synthetic oligonucleotide
  Antisense strand to SEQ ID NO: 2056212
uaucaucaccacauacaga

SEQ ID NO: 2056214 - RNA, 19 nt, Artificial Sequence
  Description of Artificial Sequence: Synthetic oligonucleotide
  Sense strand starting at position 3410 of SEQ ID NO: 1881587
guauguggugaugauaauu

SEQ ID NO: 2056215 - RNA, 19 nt, Artificial Sequence
  Description of Artificial Sequence: Synthetic oligonucleotide
  Antisense strand to SEQ ID NO: 2056214
aauuaucaucaccacauac

SEQ ID NO: 2056216 - RNA, 19 nt, Artificial Sequence
  Description of Artificial Sequence: Synthetic oligonucleotide
  Sense strand starting at position 3415 of SEQ ID NO: 1881587
uggugaugauaauuauuac

SEQ ID NO: 2056217 - RNA, 19 nt, Artificial Sequence
  Description of Artificial Sequence: Synthetic oligonucleotide
  Antisense strand to SEQ ID NO: 2056216
guaauaauuaucaucacca

SEQ ID NO: 2056218 - RNA, 19 nt, Artificial Sequence
  Description of Artificial Sequence: Synthetic oligonucleotide
  Sense strand starting at position 3476 of SEQ ID NO: 1881587
acgccuaaagaaugaauga

SEQ ID NO: 2056219 - RNA, 19 nt, Artificial Sequence
  Description of Artificial Sequence: Synthetic oligonucleotide
  Antisense strand to SEQ ID NO: 2056218
ucauucauucuuuaggcgu

SEQ ID NO: 2056220 - RNA, 19 nt, Artificial Sequence
  Description of Artificial Sequence: Synthetic oligonucleotide
  Sense strand starting at position 3486 of SEQ ID NO: 1881587
aaugaaugagguugucaag

SEQ ID NO: 2056221 - RNA, 19 nt, Artificial Sequence
  Description of Artificial Sequence: Synthetic oligonucleotide
  Antisense strand to SEQ ID NO: 2056220
cuugacaaccucauucauu

SEQ ID NO: 2056222 - RNA, 19 nt, Artificial Sequence
  Description of Artificial Sequence: Synthetic oligonucleotide
  Sense strand starting at position 3531 of SEQ ID NO: 1881587
uugacaugcuuucuaguaa

SEQ ID NO: 2056223 - RNA, 19 nt, Artificial Sequence
  Description of Artificial Sequence: Synthetic oligonucleotide
  Antisense strand to SEQ ID NO: 2056222
uuacuagaaagcaugucaa

SEQ ID NO: 2056224 - RNA, 19 nt, Artificial Sequence
  Description of Artificial Sequence: Synthetic oligonucleotide
  Sense strand starting at position 3543 of SEQ ID NO: 1881587
cuaguaauauguuuccaua

SEQ ID NO: 2056225 - RNA, 19 nt, Artificial Sequence
  Description of Artificial Sequence: Synthetic oligonucleotide
  Antisense strand to SEQ ID NO: 2056224
uauggaaacauauuacuag

SEQ ID NO: 2056226 - RNA, 19 nt, Artificial Sequence
  Description of Artificial Sequence: Synthetic oligonucleotide
  Sense strand starting at position 3577 of SEQ ID NO: 1881587
agaggauuauuagaacaau

SEQ ID NO: 2056227 - RNA, 19 nt, Artificial Sequence
  Description of Artificial Sequence: Synthetic oligonucleotide
  Antisense strand to SEQ ID NO: 2056226
auuguucuaauaauccucu

SEQ ID NO: 2056228 - RNA, 19 nt, Artificial Sequence
  Description of Artificial Sequence: Synthetic oligonucleotide
  Sense strand starting at position 3705 of SEQ ID NO: 1881587
cauauuauuuguuucggca

SEQ ID NO: 2056229 - RNA, 19 nt, Artificial Sequence
  Description of Artificial Sequence: Synthetic oligonucleotide
  Antisense strand to SEQ ID NO: 2056228
ugccgaaacaaauaauaug

SEQ ID NO: 2056230 - RNA, 19 nt, Artificial Sequence
  Description of Artificial Sequence: Synthetic oligonucleotide
  Sense strand starting at position 3709 of SEQ ID NO: 1881587
uuauuuguuucggcacacu

SEQ ID NO: 2056231 - RNA, 19 nt, Artificial Sequence
  Description of Artificial Sequence: Synthetic oligonucleotide
  Antisense strand to SEQ ID NO: 2056230
agugugccgaaacaaauaa

SEQ ID NO: 2056232 - RNA, 19 nt, Artificial Sequence
  Description of Artificial Sequence: Synthetic oligonucleotide
  Sense strand starting at position 3737 of SEQ ID NO: 1881587
aaagaaauguuugagaaag

SEQ ID NO: 2056233 - RNA, 19 nt, Artificial Sequence
  Description of Artificial Sequence: Synthetic oligonucleotide
  Antisense strand to SEQ ID NO: 2056232
cuuucucaaacauuucuuu

SEQ ID NO: 2056234 - RNA, 19 nt, Artificial Sequence
  Description of Artificial Sequence: Synthetic oligonucleotide
  Sense strand starting at position 3791 of SEQ ID NO: 1881587
ucuguuaaagucugaaacu

SEQ ID NO: 2056235 - RNA, 19 nt, Artificial Sequence
  Description of Artificial Sequence: Synthetic oligonucleotide
  Antisense strand to SEQ ID NO: 2056234
aguuucagacuuuaacaga

SEQ ID NO: 2056236 - RNA, 19 nt, Artificial Sequence
  Description of Artificial Sequence: Synthetic oligonucleotide
  Sense strand starting at position 3828 of SEQ ID NO: 1881587
ucaucuuuaugacugagau

SEQ ID NO: 2056237 - RNA, 19 nt, Artificial Sequence
  Description of Artificial Sequence: Synthetic oligonucleotide
  Antisense strand to SEQ ID NO: 2056236
aucucagucauaaagauga

SEQ ID NO: 2056238 - RNA, 19 nt, Artificial Sequence
  Description of Artificial Sequence: Synthetic oligonucleotide
  Sense strand starting at position 248 of SEQ ID NO: 1881588
auauuauacgugcauauuc

SEQ ID NO: 2056239 - RNA, 19 nt, Artificial Sequence
  Description of Artificial Sequence: Synthetic oligonucleotide
  Antisense strand to SEQ ID NO: 2056238
gaauaugcacguauaauau

SEQ ID NO: 2056240 - RNA, 19 nt, Artificial Sequence
  Description of Artificial Sequence: Synthetic oligonucleotide
  Sense strand starting at position 250 of SEQ ID NO: 1881588
auuauacgugcauauucua

SEQ ID NO: 2056241 - RNA, 19 nt, Artificial Sequence
  Description of Artificial Sequence: Synthetic oligonucleotide
  Antisense strand to SEQ ID NO: 2056240
uagaauaugcacguauaau

SEQ ID NO: 2056242 - RNA, 19 nt, Artificial Sequence
  Description of Artificial Sequence: Synthetic oligonucleotide
  Sense strand starting at position 333 of SEQ ID NO: 1881588
auuaaugaccucugaguuu

SEQ ID NO: 2056243 - RNA, 19 nt, Artificial Sequence
  Description of Artificial Sequence: Synthetic oligonucleotide
  Antisense strand to SEQ ID NO: 2056242
aaacucagaggucauuaau

SEQ ID NO: 2056244 - RNA, 19 nt, Artificial Sequence
  Description of Artificial Sequence: Synthetic oligonucleotide
  Sense strand starting at position 374 of SEQ ID NO: 1881588
ggagaacuccaucgacaac

SEQ ID NO: 2056245 - RNA, 19 nt, Artificial Sequence
  Description of Artificial Sequence: Synthetic oligonucleotide
  Antisense strand to SEQ ID NO: 2056244
guugucgauggaguucucc

SEQ ID NO: 2056246 - RNA, 19 nt, Artificial Sequence
  Description of Artificial Sequence: Synthetic oligonucleotide
  Sense strand starting at position 681 of SEQ ID NO: 1881588
uugcauaacugaccauagu

SEQ ID NO: 2056247 - RNA, 19 nt, Artificial Sequence
  Description of Artificial Sequence: Synthetic oligonucleotide
  Antisense strand to SEQ ID NO: 2056246
acuauggucaguuaugcaa

SEQ ID NO: 2056248 - RNA, 19 nt, Artificial Sequence
  Description of Artificial Sequence: Synthetic oligonucleotide
  Sense strand starting at position 682 of SEQ ID NO: 1881588
ugcauaacugaccauaguu

SEQ ID NO: 2056249 - RNA, 19 nt, Artificial Sequence
  Description of Artificial Sequence: Synthetic oligonucleotide
  Antisense strand to SEQ ID NO: 2056248
aacuauggucaguuaugca

SEQ ID NO: 2056250 - RNA, 19 nt, Artificial Sequence
  Description of Artificial Sequence: Synthetic oligonucleotide
  Sense strand starting at position 713 of SEQ ID NO: 1881588
agaauaugccauugcaauu

SEQ ID NO: 2056251 - RNA, 19 nt, Artificial Sequence
  Description of Artificial Sequence: Synthetic oligonucleotide
  Antisense strand to SEQ ID NO: 2056250
aauugcaauggcauauucu

SEQ ID NO: 2056252 - RNA, 19 nt, Artificial Sequence
  Description of Artificial Sequence: Synthetic oligonucleotide
  Sense strand starting at position 790 of SEQ ID NO: 1881588
cuucuugaaguuuauauga

SEQ ID NO: 2056253 - RNA, 19 nt, Artificial Sequence
  Description of Artificial Sequence: Synthetic oligonucleotide
  Antisense strand to SEQ ID NO: 2056252
ucauauaaacuucaagaag

SEQ ID NO: 2056254 - RNA, 19 nt, Artificial Sequence
  Description of Artificial Sequence: Synthetic oligonucleotide
  Sense strand starting at position 856 of SEQ ID NO: 1881588
ugagauguuguuaggcgua

SEQ ID NO: 2056255 - RNA, 19 nt, Artificial Sequence
  Description of Artificial Sequence: Synthetic oligonucleotide
  Antisense strand to SEQ ID NO: 2056254
uacgccuaacaacaucuca

SEQ ID NO: 2056256 - RNA, 19 nt, Artificial Sequence
  Description of Artificial Sequence: Synthetic oligonucleotide
  Sense strand starting at position 1048 of SEQ ID NO: 1881588
uucuuauaggagugguuag

SEQ ID NO: 2056257 - RNA, 19 nt, Artificial Sequence
  Description of Artificial Sequence: Synthetic oligonucleotide
  Antisense strand to SEQ ID NO: 2056256
cuaaccacuccuauaagaa

SEQ ID NO: 2056258 - RNA, 19 nt, Artificial Sequence
  Description of Artificial Sequence: Synthetic oligonucleotide
  Sense strand starting at position 1049 of SEQ ID NO: 1881588
ucuuauaggagugguuaga

SEQ ID NO: 2056259 - RNA, 19 nt, Artificial Sequence
  Description of Artificial Sequence: Synthetic oligonucleotide
  Antisense strand to SEQ ID NO: 2056258
ucuaaccacuccuauaaga

SEQ ID NO: 2056260 - RNA, 19 nt, Artificial Sequence
  Description of Artificial Sequence: Synthetic oligonucleotide
  Sense strand starting at position 1139 of SEQ ID NO: 1881588
augaacagguauucugaca

SEQ ID NO: 2056261 - RNA, 19 nt, Artificial Sequence
  Description of Artificial Sequence: Synthetic oligonucleotide
  Antisense strand to SEQ ID NO: 2056260
ugucagaauaccuguucau

SEQ ID NO: 2056262 - RNA, 19 nt, Artificial Sequence
  Description of Artificial Sequence: Synthetic oligonucleotide
  Sense strand starting at position 1392 of SEQ ID NO: 1881588
auuguuuaugagcaccuaa

SEQ ID NO: 2056263 - RNA, 19 nt, Artificial Sequence
  Description of Artificial Sequence: Synthetic oligonucleotide
  Antisense strand to SEQ ID NO: 2056262
uuaggugcucauaaacaau

SEQ ID NO: 2056264 - RNA, 19 nt, Artificial Sequence
  Description of Artificial Sequence: Synthetic oligonucleotide
  Sense strand starting at position 1508 of SEQ ID NO: 1881588
augggauuccuugaggucu

SEQ ID NO: 2056265 - RNA, 19 nt, Artificial Sequence
  Description of Artificial Sequence: Synthetic oligonucleotide
  Antisense strand to SEQ ID NO: 2056264
agaccucaaggaaucccau

SEQ ID NO: 2056266 - RNA, 19 nt, Artificial Sequence
  Description of Artificial Sequence: Synthetic oligonucleotide
  Sense strand starting at position 1842 of SEQ ID NO: 1881588
accugaacucuugaucugu

SEQ ID NO: 2056267 - RNA, 19 nt, Artificial Sequence
  Description of Artificial Sequence: Synthetic oligonucleotide
  Antisense strand to SEQ ID NO: 2056266
acagaucaagaguucaggu

SEQ ID NO: 2056268 - RNA, 19 nt, Artificial Sequence
  Description of Artificial Sequence: Synthetic oligonucleotide
  Sense strand starting at position 1844 of SEQ ID NO: 1881588
cugaacucuugaucuguau

SEQ ID NO: 2056269 - RNA, 19 nt, Artificial Sequence
  Description of Artificial Sequence: Synthetic oligonucleotide
  Antisense strand to SEQ ID NO: 2056268
auacagaucaagaguucag

SEQ ID NO: 2056270 - RNA, 19 nt, Artificial Sequence
  Description of Artificial Sequence: Synthetic oligonucleotide
  Sense strand starting at position 1848 of SEQ ID NO: 1881588
acucuugaucuguauccuu

SEQ ID NO: 2056271 - RNA, 19 nt, Artificial Sequence
  Description of Artificial Sequence: Synthetic oligonucleotide
  Antisense strand to SEQ ID NO: 2056270
aaggauacagaucaagagu

SEQ ID NO: 2056272 - RNA, 19 nt, Artificial Sequence
  Description of Artificial Sequence: Synthetic oligonucleotide
  Sense strand starting at position 1933 of SEQ ID NO: 1881588
gcuuguaauacgcucaguu

SEQ ID NO: 2056273 - RNA, 19 nt, Artificial Sequence
  Description of Artificial Sequence: Synthetic oligonucleotide
  Antisense strand to SEQ ID NO: 2056272
aacugagcguauuacaagc

SEQ ID NO: 2056274 - RNA, 19 nt, Artificial Sequence
  Description of Artificial Sequence: Synthetic oligonucleotide
  Sense strand starting at position 1937 of SEQ ID NO: 1881588
guaauacgcucaguuauuu

SEQ ID NO: 2056275 - RNA, 19 nt, Artificial Sequence
  Description of Artificial Sequence: Synthetic oligonucleotide
  Antisense strand to SEQ ID NO: 2056274
aaauaacugagcguauuac

SEQ ID NO: 2056276 - RNA, 19 nt, Artificial Sequence
  Description of Artificial Sequence: Synthetic oligonucleotide
  Sense strand starting at position 1942 of SEQ ID NO: 1881588
acgcucaguuauuucuuau

SEQ ID NO: 2056277 - RNA, 19 nt, Artificial Sequence
  Description of Artificial Sequence: Synthetic oligonucleotide
  Antisense strand to SEQ ID NO: 2056276
auaagaaauaacugagcgu

SEQ ID NO: 2056278 - RNA, 19 nt, Artificial Sequence
  Description of Artificial Sequence: Synthetic oligonucleotide
  Sense strand starting at position 2040 of SEQ ID NO: 1881588
caaggugaacugcacgaua

SEQ ID NO: 2056279 - RNA, 19 nt, Artificial Sequence
  Description of Artificial Sequence: Synthetic oligonucleotide
  Antisense strand to SEQ ID NO: 2056278
uaucgugcaguucaccuug

SEQ ID NO: 2056280 - RNA, 19 nt, Artificial Sequence
  Description of Artificial Sequence: Synthetic oligonucleotide
  Sense strand starting at position 2042 of SEQ ID NO: 1881588
aggugaacugcacgauaau

SEQ ID NO: 2056281 - RNA, 19 nt, Artificial Sequence
  Description of Artificial Sequence: Synthetic oligonucleotide
  Antisense strand to SEQ ID NO: 2056280
auuaucgugcaguucaccu

SEQ ID NO: 2056282 - RNA, 19 nt, Artificial Sequence
  Description of Artificial Sequence: Synthetic oligonucleotide
  Sense strand starting at position 2043 of SEQ ID NO: 1881588
ggugaacugcacgauaaug

SEQ ID NO: 2056283 - RNA, 19 nt, Artificial Sequence
  Description of Artificial Sequence: Synthetic oligonucleotide
  Antisense strand to SEQ ID NO: 2056282
cauuaucgugcaguucacc

SEQ ID NO: 2056284 - RNA, 19 nt, Artificial Sequence
  Description of Artificial Sequence: Synthetic oligonucleotide
  Sense strand starting at position 2054 of SEQ ID NO: 1881588
cgauaaugcgucaguagug

SEQ ID NO: 2056285 - RNA, 19 nt, Artificial Sequence
  Description of Artificial Sequence: Synthetic oligonucleotide
  Antisense strand to SEQ ID NO: 2056284
cacuacugacgcauuaucg

SEQ ID NO: 2056286 - RNA, 19 nt, Artificial Sequence
  Description of Artificial Sequence: Synthetic oligonucleotide
  Sense strand starting at position 2095 of SEQ ID NO: 1881588
cgugccugucuaucuguua

SEQ ID NO: 2056287 - RNA, 19 nt, Artificial Sequence
  Description of Artificial Sequence: Synthetic oligonucleotide
  Antisense strand to SEQ ID NO: 2056286
uaacagauagacaggcacg

SEQ ID NO: 2056288 - RNA, 19 nt, Artificial Sequence
  Description of Artificial Sequence: Synthetic oligonucleotide
  Sense strand starting at position 2173 of SEQ ID NO: 1881588
cguagcucugugagguaga

SEQ ID NO: 2056289 - RNA, 19 nt, Artificial Sequence
  Description of Artificial Sequence: Synthetic oligonucleotide
  Antisense strand to SEQ ID NO: 2056288
ucuaccucacagagcuacg

SEQ ID NO: 2056290 - RNA, 19 nt, Artificial Sequence
  Description of Artificial Sequence: Synthetic oligonucleotide
  Sense strand starting at position 2178 of SEQ ID NO: 1881588
cucugugagguagauagua

SEQ ID NO: 2056291 - RNA, 19 nt, Artificial Sequence
  Description of Artificial Sequence: Synthetic oligonucleotide
  Antisense strand to SEQ ID NO: 2056290
uacuaucuaccucacagag

SEQ ID NO: 2056292 - RNA, 19 nt, Artificial Sequence
  Description of Artificial Sequence: Synthetic oligonucleotide
  Sense strand starting at position 2180 of SEQ ID NO: 1881588
cugugagguagauaguacu

SEQ ID NO: 2056293 - RNA, 19 nt, Artificial Sequence
  Description of Artificial Sequence: Synthetic oligonucleotide
  Antisense strand to SEQ ID NO: 2056292
aguacuaucuaccucacag

SEQ ID NO: 2056294 - RNA, 19 nt, Artificial Sequence
  Description of Artificial Sequence: Synthetic oligonucleotide
  Sense strand starting at position 2270 of SEQ ID NO: 1881588
agaauauuaugggauuaga

SEQ ID NO: 2056295 - RNA, 19 nt, Artificial Sequence
  Description of Artificial Sequence: Synthetic oligonucleotide
  Antisense strand to SEQ ID NO: 2056294
ucuaaucccauaauauucu

SEQ ID NO: 2056296 - RNA, 19 nt, Artificial Sequence
  Description of Artificial Sequence: Synthetic oligonucleotide
  Sense strand starting at position 2608 of SEQ ID NO: 1881588
guugacaucuuucucauua

SEQ ID NO: 2056297 - RNA, 19 nt, Artificial Sequence
  Description of Artificial Sequence: Synthetic oligonucleotide
  Antisense strand to SEQ ID NO: 2056296
uaaugagaaagaugucaac

SEQ ID NO: 2056298 - RNA, 19 nt, Artificial Sequence
  Description of Artificial Sequence: Synthetic oligonucleotide
  Sense strand starting at position 2627 of SEQ ID NO: 1881588
auaggucaauaugugauaa

SEQ ID NO: 2056299 - RNA, 19 nt, Artificial Sequence
  Description of Artificial Sequence: Synthetic oligonucleotide
  Antisense strand to SEQ ID NO: 2056298
uuaucacauauugaccuau

SEQ ID NO: 2056300 - RNA, 19 nt, Artificial Sequence
  Description of Artificial Sequence: Synthetic oligonucleotide
  Sense strand starting at position 3186 of SEQ ID NO: 1881588
gauggaauaucuuaaagag

SEQ ID NO: 2056301 - RNA, 19 nt, Artificial Sequence
  Description of Artificial Sequence: Synthetic oligonucleotide
  Antisense strand to SEQ ID NO: 2056300
cucuuuaagauauuccauc

SEQ ID NO: 2056302 - RNA, 19 nt, Artificial Sequence
  Description of Artificial Sequence: Synthetic oligonucleotide
  Sense strand starting at position 3254 of SEQ ID NO: 1881588
aggaaacuguugccgagaa

SEQ ID NO: 2056303 - RNA, 19 nt, Artificial Sequence
  Description of Artificial Sequence: Synthetic oligonucleotide
  Antisense strand to SEQ ID NO: 2056302
uucucggcaacaguuuccu

SEQ ID NO: 2056304 - RNA, 19 nt, Artificial Sequence
  Description of Artificial Sequence: Synthetic oligonucleotide
  Sense strand starting at position 3292 of SEQ ID NO: 1881588
gcuguugagaaaugguaau

SEQ ID NO: 2056305 - RNA, 19 nt, Artificial Sequence
  Description of Artificial Sequence: Synthetic oligonucleotide
  Antisense strand to SEQ ID NO: 2056304
auuaccauuucucaacagc

SEQ ID NO: 2056306 - RNA, 19 nt, Artificial Sequence
  Description of Artificial Sequence: Synthetic oligonucleotide
  Sense strand starting at position 3429 of SEQ ID NO: 1881588
agggaaucuuuauuaugua

SEQ ID NO: 2056307 - RNA, 19 nt, Artificial Sequence
  Description of Artificial Sequence: Synthetic oligonucleotide
  Antisense strand to SEQ ID NO: 2056306
uacauaauaaagauucccu

SEQ ID NO: 2056308 - RNA, 19 nt, Artificial Sequence
  Description of Artificial Sequence: Synthetic oligonucleotide
  Sense strand starting at position 3452 of SEQ ID NO: 1881588
ccuuuaacucuccaguguu

SEQ ID NO: 2056309 - RNA, 19 nt, Artificial Sequence
  Description of Artificial Sequence: Synthetic oligonucleotide
  Antisense strand to SEQ ID NO: 2056308
aacacuggagaguuaaagg

SEQ ID NO: 2056310 - RNA, 19 nt, Artificial Sequence
  Description of Artificial Sequence: Synthetic oligonucleotide
  Sense strand starting at position 3615 of SEQ ID NO: 1881588
auggcugguagguauuauu

SEQ ID NO: 2056311 - RNA, 19 nt, Artificial Sequence
  Description of Artificial Sequence: Synthetic oligonucleotide
  Antisense strand to SEQ ID NO: 2056310
aauaauaccuaccagccau

SEQ ID NO: 2056312 - RNA, 19 nt, Artificial Sequence
  Description of Artificial Sequence: Synthetic oligonucleotide
  Sense strand starting at position 3730 of SEQ ID NO: 1881588
ggaaucugcuuuguugaau

SEQ ID NO: 2056313 - RNA, 19 nt, Artificial Sequence
  Description of Artificial Sequence: Synthetic oligonucleotide
  Antisense strand to SEQ ID NO: 2056312
auucaacaaagcagauucc

SEQ ID NO: 2056314 - RNA, 19 nt, Artificial Sequence
  Description of Artificial Sequence: Synthetic oligonucleotide
  Sense strand starting at position 3947 of SEQ ID NO: 1881588
uuuacuauugaggguacua

SEQ ID NO: 2056315 - RNA, 19 nt, Artificial Sequence
  Description of Artificial Sequence: Synthetic oligonucleotide
  Antisense strand to SEQ ID NO: 2056314
uaguacccucaauaguaaa

SEQ ID NO: 2056316 - RNA, 19 nt, Artificial Sequence
  Description of Artificial Sequence: Synthetic oligonucleotide
  Sense strand starting at position 3970 of SEQ ID NO: 1881588
guggaacuuggucaugaca

SEQ ID NO: 2056317 - RNA, 19 nt, Artificial Sequence
  Description of Artificial Sequence: Synthetic oligonucleotide
  Antisense strand to SEQ ID NO: 2056316
ugucaugaccaaguuccac

SEQ ID NO: 2056318 - RNA, 19 nt, Artificial Sequence
  Description of Artificial Sequence: Synthetic oligonucleotide
  Sense strand starting at position 132 of SEQ ID NO: 1881589
guggguaccaaucagaguu

SEQ ID NO: 2056319 - RNA, 19 nt, Artificial Sequence
  Description of Artificial Sequence: Synthetic oligonucleotide
  Antisense strand to SEQ ID NO: 2056318
aacucugauugguacccac

SEQ ID NO: 2056320 - RNA, 19 nt, Artificial Sequence
  Description of Artificial Sequence: Synthetic oligonucleotide
  Sense strand starting at position 175 of SEQ ID NO: 1881589
ggacuaagagccuacaguu

SEQ ID NO: 2056321 - RNA, 19 nt, Artificial Sequence
  Description of Artificial Sequence: Synthetic oligonucleotide
  Antisense strand to SEQ ID NO: 2056320
aacuguaggcucuuagucc

SEQ ID NO: 2056322 - RNA, 19 nt, Artificial Sequence
  Description of Artificial Sequence: Synthetic oligonucleotide
  Sense strand starting at position 191 of SEQ ID NO: 1881589
guuauugugagcugauaga

SEQ ID NO: 2056323 - RNA, 19 nt, Artificial Sequence
  Description of Artificial Sequence: Synthetic oligonucleotide
  Antisense strand to SEQ ID NO: 2056322
ucuaucagcucacaauaac

SEQ ID NO: 2056324 - RNA, 19 nt, Artificial Sequence
  Description of Artificial Sequence: Synthetic oligonucleotide
  Sense strand starting at position 350 of SEQ ID NO: 1881589
gcugguauuggagagccaa

SEQ ID NO: 2056325 - RNA, 19 nt, Artificial Sequence
  Description of Artificial Sequence: Synthetic oligonucleotide
  Antisense strand to SEQ ID NO: 2056324
uuggcucuccaauaccagc

SEQ ID NO: 2056326 - RNA, 19 nt, Artificial Sequence
  Description of Artificial Sequence: Synthetic oligonucleotide
  Sense strand starting at position 369 of SEQ ID NO: 1881589
gaaggacacuguucucauc

SEQ ID NO: 2056327 - RNA, 19 nt, Artificial Sequence
  Description of Artificial Sequence: Synthetic oligonucleotide
  Antisense strand to SEQ ID NO: 2056326
gaugagaacaguguccuuc

SEQ ID NO: 2056328 - RNA, 19 nt, Artificial Sequence
  Description of Artificial Sequence: Synthetic oligonucleotide
  Sense strand starting at position 377 of SEQ ID NO: 1881589
cuguucucauccucaagga

SEQ ID NO: 2056329 - RNA, 19 nt, Artificial Sequence
  Description of Artificial Sequence: Synthetic oligonucleotide
  Antisense strand to SEQ ID NO: 2056328
uccuugaggaugagaacag

SEQ ID NO: 2056330 - RNA, 19 nt, Artificial Sequence
  Description of Artificial Sequence: Synthetic oligonucleotide
  Sense strand starting at position 457 of SEQ ID NO: 1881589
gcuggguauccggagggau

SEQ ID NO: 2056331 - RNA, 19 nt, Artificial Sequence
  Description of Artificial Sequence: Synthetic oligonucleotide
  Antisense strand to SEQ ID NO: 2056330
aucccuccggauacccagc

SEQ ID NO: 2056332 - RNA, 19 nt, Artificial Sequence
  Description of Artificial Sequence: Synthetic oligonucleotide
  Sense strand starting at position 631 of SEQ ID NO: 1881589
acauuacugcuguauaagu

SEQ ID NO: 2056333 - RNA, 19 nt, Artificial Sequence
  Description of Artificial Sequence: Synthetic oligonucleotide
  Antisense strand to SEQ ID NO: 2056332
acuuauacagcaguaaugu

SEQ ID NO: 2056334 - RNA, 19 nt, Artificial Sequence
  Description of Artificial Sequence: Synthetic oligonucleotide
  Sense strand starting at position 633 of SEQ ID NO: 1881589
auuacugcuguauaaguau

SEQ ID NO: 2056335 - RNA, 19 nt, Artificial Sequence
  Description of Artificial Sequence: Synthetic oligonucleotide
  Antisense strand to SEQ ID NO: 2056334
auacuuauacagcaguaau

SEQ ID NO: 2056336 - RNA, 19 nt, Artificial Sequence
  Description of Artificial Sequence: Synthetic oligonucleotide
  Sense strand starting at position 670 of SEQ ID NO: 1881589
ugugacugauccuccuaau

SEQ ID NO: 2056337 - RNA, 19 nt, Artificial Sequence
  Description of Artificial Sequence: Synthetic oligonucleotide
  Antisense strand to SEQ ID NO: 2056336
auuaggaggaucagucaca

SEQ ID NO: 2056338 - RNA, 19 nt, Artificial Sequence
  Description of Artificial Sequence: Synthetic oligonucleotide
  Sense strand starting at position 707 of SEQ ID NO: 1881589
ccggucaccauugguaaga

SEQ ID NO: 2056339 - RNA, 19 nt, Artificial Sequence
  Description of Artificial Sequence: Synthetic oligonucleotide
  Antisense strand to SEQ ID NO: 2056338
ucuuaccaauggugaccgg

SEQ ID NO: 2056340 - RNA, 19 nt, Artificial Sequence
  Description of Artificial Sequence: Synthetic oligonucleotide
  Sense strand starting at position 708 of SEQ ID NO: 1881589
cggucaccauugguaagaa

SEQ ID NO: 2056341 - RNA, 19 nt, Artificial Sequence
  Description of Artificial Sequence: Synthetic oligonucleotide
  Antisense strand to SEQ ID NO: 2056340
uucuuaccaauggugaccg

SEQ ID NO: 2056342 - RNA, 19 nt, Artificial Sequence
  Description of Artificial Sequence: Synthetic oligonucleotide
  Sense strand starting at position 813 of SEQ ID NO: 1881589
ggcagccucauauaagagu

SEQ ID NO: 2056343 - RNA, 19 nt, Artificial Sequence
  Description of Artificial Sequence: Synthetic oligonucleotide
  Antisense strand to SEQ ID NO: 2056342
acucuuauaugaggcugcc

SEQ ID NO: 2056344 - RNA, 19 nt, Artificial Sequence
  Description of Artificial Sequence: Synthetic oligonucleotide
  Sense strand starting at position 1294 of SEQ ID NO: 1881589
uaaggugugcacuagaaca

SEQ ID NO: 2056345 - RNA, 19 nt, Artificial Sequence
  Description of Artificial Sequence: Synthetic oligonucleotide
  Antisense strand to SEQ ID NO: 2056344
uguucuagugcacaccuua

SEQ ID NO: 2056346 - RNA, 19 nt, Artificial Sequence
  Description of Artificial Sequence: Synthetic oligonucleotide
  Sense strand starting at position 1296 of SEQ ID NO: 1881589
aggugugcacuagaacaua

SEQ ID NO: 2056347 - RNA, 19 nt, Artificial Sequence
  Description of Artificial Sequence: Synthetic oligonucleotide
  Antisense strand to SEQ ID NO: 2056346
uauguucuagugcacaccu

SEQ ID NO: 2056348 - RNA, 19 nt, Artificial Sequence
  Description of Artificial Sequence: Synthetic oligonucleotide
  Sense strand starting at position 1330 of SEQ ID NO: 1881589
uuccacaaagggugagauu

SEQ ID NO: 2056349 - RNA, 19 nt, Artificial Sequence
  Description of Artificial Sequence: Synthetic oligonucleotide
  Antisense strand to SEQ ID NO: 2056348
aaucucacccuuuguggaa

SEQ ID NO: 2056350 - RNA, 19 nt, Artificial Sequence
  Description of Artificial Sequence: Synthetic oligonucleotide
  Sense strand starting at position 1384 of SEQ ID NO: 1881589
guuggcuucgaggacauau

SEQ ID NO: 2056351 - RNA, 19 nt, Artificial Sequence
  Description of Artificial Sequence: Synthetic oligonucleotide
  Antisense strand to SEQ ID NO: 2056350
auauguccucgaagccaac

SEQ ID NO: 2056352 - RNA, 19 nt, Artificial Sequence
  Description of Artificial Sequence: Synthetic oligonucleotide
  Sense strand starting at position 1393 of SEQ ID NO: 1881589
gaggacauauuugauauau

SEQ ID NO: 2056353 - RNA, 19 nt, Artificial Sequence
  Description of Artificial Sequence: Synthetic oligonucleotide
  Antisense strand to SEQ ID NO: 2056352
auauaucaaauauguccuc

SEQ ID NO: 2056354 - RNA, 19 nt, Artificial Sequence
  Description of Artificial Sequence: Synthetic oligonucleotide
  Sense strand starting at position 1427 of SEQ ID NO: 1881589
auuuguccauaccagagau

SEQ ID NO: 2056355 - RNA, 19 nt, Artificial Sequence
  Description of Artificial Sequence: Synthetic oligonucleotide
  Antisense strand to SEQ ID NO: 2056354
aucucugguauggacaaau

SEQ ID NO: 2056356 - RNA, 19 nt, Artificial Sequence
  Description of Artificial Sequence: Synthetic oligonucleotide
  Sense strand starting at position 1576 of SEQ ID NO: 1881589
gaaggcagauugcuugaga

SEQ ID NO: 2056357 - RNA, 19 nt, Artificial Sequence
  Description of Artificial Sequence: Synthetic oligonucleotide
  Antisense strand to SEQ ID NO: 2056356
ucucaagcaaucugccuuc

SEQ ID NO: 2056358 - RNA, 19 nt, Artificial Sequence
  Description of Artificial Sequence: Synthetic oligonucleotide
  Sense strand starting at position 1579 of SEQ ID NO: 1881589
ggcagauugcuugagacau

SEQ ID NO: 2056359 - RNA, 19 nt, Artificial Sequence
  Description of Artificial Sequence: Synthetic oligonucleotide
  Antisense strand to SEQ ID NO: 2056358
augucucaagcaaucugcc

SEQ ID NO: 2056360 - RNA, 19 nt, Artificial Sequence
  Description of Artificial Sequence: Synthetic oligonucleotide
  Sense strand starting at position 1585 of SEQ ID NO: 1881589
uugcuugagacaugcagau

SEQ ID NO: 2056361 - RNA, 19 nt, Artificial Sequence
  Description of Artificial Sequence: Synthetic oligonucleotide
  Antisense strand to SEQ ID NO: 2056360
aucugcaugucucaagcaa

SEQ ID NO: 2056362 - RNA, 19 nt, Artificial Sequence
  Description of Artificial Sequence: Synthetic oligonucleotide
  Sense strand starting at position 1587 of SEQ ID NO: 1881589
gcuugagacaugcagauug

SEQ ID NO: 2056363 - RNA, 19 nt, Artificial Sequence
  Description of Artificial Sequence: Synthetic oligonucleotide
  Antisense strand to SEQ ID NO: 2056362
caaucugcaugucucaagc

SEQ ID NO: 2056364 - RNA, 19 nt, Artificial Sequence
  Description of Artificial Sequence: Synthetic oligonucleotide
  Sense strand starting at position 1594 of SEQ ID NO: 1881589
acaugcagauugcuugaau

SEQ ID NO: 2056365 - RNA, 19 nt, Artificial Sequence
  Description of Artificial Sequence: Synthetic oligonucleotide
  Antisense strand to SEQ ID NO: 2056364
auucaagcaaucugcaugu

SEQ ID NO: 2056366 - RNA, 19 nt, Artificial Sequence
  Description of Artificial Sequence: Synthetic oligonucleotide
  Sense strand starting at position 1597 of SEQ ID NO: 1881589
ugcagauugcuugaaucca

SEQ ID NO: 2056367 - RNA, 19 nt, Artificial Sequence
  Description of Artificial Sequence: Synthetic oligonucleotide
  Antisense strand to SEQ ID NO: 2056366
uggauucaagcaaucugca

SEQ ID NO: 2056368 - RNA, 19 nt, Artificial Sequence
  Description of Artificial Sequence: Synthetic oligonucleotide
  Sense strand starting at position 1984 of SEQ ID NO: 1881589
ggaguagaacucugaugug

SEQ ID NO: 2056369 - RNA, 19 nt, Artificial Sequence
  Description of Artificial Sequence: Synthetic oligonucleotide
  Antisense strand to SEQ ID NO: 2056368
cacaucagaguucuacucc

SEQ ID NO: 2056370 - RNA, 19 nt, Artificial Sequence
  Description of Artificial Sequence: Synthetic oligonucleotide
  Sense strand starting at position 2578 of SEQ ID NO: 1881589
ccugaaggucgugauccua

SEQ ID NO: 2056371 - RNA, 19 nt, Artificial Sequence
  Description of Artificial Sequence: Synthetic oligonucleotide
  Antisense strand to SEQ ID NO: 2056370
uaggaucacgaccuucagg

SEQ ID NO: 2056372 - RNA, 19 nt, Artificial Sequence
  Description of Artificial Sequence: Synthetic oligonucleotide
  Sense strand starting at position 2771 of SEQ ID NO: 1881589
gaucauuacugguccacag

SEQ ID NO: 2056373 - RNA, 19 nt, Artificial Sequence
  Description of Artificial Sequence: Synthetic oligonucleotide
  Antisense strand to SEQ ID NO: 2056372
cuguggaccaguaaugauc

SEQ ID NO: 2056374 - RNA, 19 nt, Artificial Sequence
  Description of Artificial Sequence: Synthetic oligonucleotide
  Sense strand starting at position 3012 of SEQ ID NO: 1881589
gacucauucccuugagcag

SEQ ID NO: 2056375 - RNA, 19 nt, Artificial Sequence
  Description of Artificial Sequence: Synthetic oligonucleotide
  Antisense strand to SEQ ID NO: 2056374
cugcucaagggaaugaguc

SEQ ID NO: 2056376 - RNA, 19 nt, Artificial Sequence
  Description of Artificial Sequence: Synthetic oligonucleotide
  Sense strand starting at position 3027 of SEQ ID NO: 1881589
gcaggcauuuggcucauau

SEQ ID NO: 2056377 - RNA, 19 nt, Artificial Sequence
  Description of Artificial Sequence: Synthetic oligonucleotide
  Antisense strand to SEQ ID NO: 2056376
auaugagccaaaugccugc

SEQ ID NO: 2056378 - RNA, 19 nt, Artificial Sequence
  Description of Artificial Sequence: Synthetic oligonucleotide
  Sense strand starting at position 3072 of SEQ ID NO: 1881589
ugcuguaggagcuauauga

SEQ ID NO: 2056379 - RNA, 19 nt, Artificial Sequence
  Description of Artificial Sequence: Synthetic oligonucleotide
  Antisense strand to SEQ ID NO: 2056378
ucauauagcuccuacagca

SEQ ID NO: 2056380 - RNA, 19 nt, Artificial Sequence
  Description of Artificial Sequence: Synthetic oligonucleotide
  Sense strand starting at position 3080 of SEQ ID NO: 1881589
gagcuauaugaacaggugu

SEQ ID NO: 2056381 - RNA, 19 nt, Artificial Sequence
  Description of Artificial Sequence: Synthetic oligonucleotide
  Antisense strand to SEQ ID NO: 2056380
acaccuguucauauagcuc

SEQ ID NO: 2056382 - RNA, 19 nt, Artificial Sequence
  Description of Artificial Sequence: Synthetic oligonucleotide
  Sense strand starting at position 3267 of SEQ ID NO: 1881589
uuaagauucuaucuaggcu

SEQ ID NO: 2056383 - RNA, 19 nt, Artificial Sequence
  Description of Artificial Sequence: Synthetic oligonucleotide
  Antisense strand to SEQ ID NO: 2056382
agccuagauagaaucuuaa

SEQ ID NO: 2056384 - RNA, 19 nt, Artificial Sequence
  Description of Artificial Sequence: Synthetic oligonucleotide
  Sense strand starting at position 3487 of SEQ ID NO: 1881589
ccauauagguuucugacau

SEQ ID NO: 2056385 - RNA, 19 nt, Artificial Sequence
  Description of Artificial Sequence: Synthetic oligonucleotide
  Antisense strand to SEQ ID NO: 2056384
augucagaaaccuauaugg

SEQ ID NO: 2056386 - RNA, 19 nt, Artificial Sequence
  Description of Artificial Sequence: Synthetic oligonucleotide
  Sense strand starting at position 3506 of SEQ ID NO: 1881589
cucucagaaugacuuguaa

SEQ ID NO: 2056387 - RNA, 19 nt, Artificial Sequence
  Description of Artificial Sequence: Synthetic oligonucleotide
  Antisense strand to SEQ ID NO: 2056386
uuacaagucauucugagag

SEQ ID NO: 2056388 - RNA, 19 nt, Artificial Sequence
  Description of Artificial Sequence: Synthetic oligonucleotide
  Sense strand starting at position 3597 of SEQ ID NO: 1881589
auguaaguauugccuagga

SEQ ID NO: 2056389 - RNA, 19 nt, Artificial Sequence
  Description of Artificial Sequence: Synthetic oligonucleotide
  Antisense strand to SEQ ID NO: 2056388
uccuaggcaauacuuacau

SEQ ID NO: 2056390 - RNA, 19 nt, Artificial Sequence
  Description of Artificial Sequence: Synthetic oligonucleotide
  Sense strand starting at position 3599 of SEQ ID NO: 1881589
guaaguauugccuaggaau

SEQ ID NO: 2056391 - RNA, 19 nt, Artificial Sequence
  Description of Artificial Sequence: Synthetic oligonucleotide
  Antisense strand to SEQ ID NO: 2056390
auuccuaggcaauacuuac

SEQ ID NO: 2056392 - RNA, 19 nt, Artificial Sequence
  Description of Artificial Sequence: Synthetic oligonucleotide
  Sense strand starting at position 3611 of SEQ ID NO: 1881589
uaggaaugcguuuaauaca

SEQ ID NO: 2056393 - RNA, 19 nt, Artificial Sequence
  Description of Artificial Sequence: Synthetic oligonucleotide
  Antisense strand to SEQ ID NO: 2056392
uguauuaaacgcauuccua

SEQ ID NO: 2056394 - RNA, 19 nt, Artificial Sequence
  Description of Artificial Sequence: Synthetic oligonucleotide
  Sense strand starting at position 3702 of SEQ ID NO: 1881589
ucugcuauggaaugaauua

SEQ ID NO: 2056395 - RNA, 19 nt, Artificial Sequence
  Description of Artificial Sequence: Synthetic oligonucleotide
  Antisense strand to SEQ ID NO: 2056394
uaauucauuccauagcaga

SEQ ID NO: 2056396 - RNA, 19 nt, Artificial Sequence
  Description of Artificial Sequence: Synthetic oligonucleotide
  Sense strand starting at position 3981 of SEQ ID NO: 1881589
uuaggagcccuuugauauu

SEQ ID NO: 2056397 - RNA, 19 nt, Artificial Sequence
  Description of Artificial Sequence: Synthetic oligonucleotide
  Antisense strand to SEQ ID NO: 2056396
aauaucaaagggcuccuaa

SEQ ID NO: 2056398 - RNA, 19 nt, Artificial Sequence
  Description of Artificial Sequence: Synthetic oligonucleotide
  Sense strand starting at position 2038 of SEQ ID NO: 1881590
ccaaucgcggcuugagauu

SEQ ID NO: 2056399 - RNA, 19 nt, Artificial Sequence
  Description of Artificial Sequence: Synthetic oligonucleotide
  Antisense strand to SEQ ID NO: 2056398
aaucucaagccgcgauugg

SEQ ID NO: 2056400 - RNA, 19 nt, Artificial Sequence
  Description of Artificial Sequence: Synthetic oligonucleotide
  Sense strand starting at position 2147 of SEQ ID NO: 1881590
ggaugagcaauccgaguuc

SEQ ID NO: 2056401 - RNA, 19 nt, Artificial Sequence
  Description of Artificial Sequence: Synthetic oligonucleotide
  Antisense strand to SEQ ID NO: 2056400
gaacucggauugcucaucc

SEQ ID NO: 2056402 - RNA, 19 nt, Artificial Sequence
  Description of Artificial Sequence: Synthetic oligonucleotide
  Sense strand starting at position 2173 of SEQ ID NO: 1881590
agggaacauucugcaguau

SEQ ID NO: 2056403 - RNA, 19 nt, Artificial Sequence
  Description of Artificial Sequence: Synthetic oligonucleotide
  Antisense strand to SEQ ID NO: 2056402
auacugcagaauguucccu

SEQ ID NO: 2056404 - RNA, 19 nt, Artificial Sequence
  Description of Artificial Sequence: Synthetic oligonucleotide
  Sense strand starting at position 2174 of SEQ ID NO: 1881590
gggaacauucugcaguaua

SEQ ID NO: 2056405 - RNA, 19 nt, Artificial Sequence
  Description of Artificial Sequence: Synthetic oligonucleotide
  Antisense strand to SEQ ID NO: 2056404
uauacugcagaauguuccc

SEQ ID NO: 2056406 - RNA, 19 nt, Artificial Sequence
  Description of Artificial Sequence: Synthetic oligonucleotide
  Sense strand starting at position 2301 of SEQ ID NO: 1881590
gcuugagcuucagcggaau

SEQ ID NO: 2056407 - RNA, 19 nt, Artificial Sequence
  Description of Artificial Sequence: Synthetic oligonucleotide
  Antisense strand to SEQ ID NO: 2056406
auuccgcugaagcucaagc

SEQ ID NO: 2056408 - RNA, 19 nt, Artificial Sequence
  Description of Artificial Sequence: Synthetic oligonucleotide
  Sense strand starting at position 2314 of SEQ ID NO: 1881590
cggaauucgaaaugguaaa

SEQ ID NO: 2056409 - RNA, 19 nt, Artificial Sequence
  Description of Artificial Sequence: Synthetic oligonucleotide
  Antisense strand to SEQ ID NO: 2056408
uuuaccauuucgaauuccg

SEQ ID NO: 2056410 - RNA, 19 nt, Artificial Sequence
  Description of Artificial Sequence: Synthetic oligonucleotide
  Sense strand starting at position 2315 of SEQ ID NO: 1881590
ggaauucgaaaugguaaac

SEQ ID NO: 2056411 - RNA, 19 nt, Artificial Sequence
  Description of Artificial Sequence: Synthetic oligonucleotide
  Antisense strand to SEQ ID NO: 2056410
guuuaccauuucgaauucc

SEQ ID NO: 2056412 - RNA, 19 nt, Artificial Sequence
  Description of Artificial Sequence: Synthetic oligonucleotide
  Sense strand starting at position 2325 of SEQ ID NO: 1881590
augguaaacuucgcagaga

SEQ ID NO: 2056413 - RNA, 19 nt, Artificial Sequence
  Description of Artificial Sequence: Synthetic oligonucleotide
  Antisense strand to SEQ ID NO: 2056412
ucucugcgaaguuuaccau

SEQ ID NO: 2056414 - RNA, 19 nt, Artificial Sequence
  Description of Artificial Sequence: Synthetic oligonucleotide
  Sense strand starting at position 2694 of SEQ ID NO: 1881590
ccgccuugguaauucuaua

SEQ ID NO: 2056415 - RNA, 19 nt, Artificial Sequence
  Description of Artificial Sequence: Synthetic oligonucleotide
  Antisense strand to SEQ ID NO: 2056414
uauagaauuaccaaggcgg

SEQ ID NO: 2056416 - RNA, 19 nt, Artificial Sequence
  Description of Artificial Sequence: Synthetic oligonucleotide
  Sense strand starting at position 2837 of SEQ ID NO: 1881590
guaguuguucgugcagucu

SEQ ID NO: 2056417 - RNA, 19 nt, Artificial Sequence
  Description of Artificial Sequence: Synthetic oligonucleotide
  Antisense strand to SEQ ID NO: 2056416
agacugcacgaacaacuac

SEQ ID NO: 2056418 - RNA, 19 nt, Artificial Sequence
  Description of Artificial Sequence: Synthetic oligonucleotide
  Sense strand starting at position 2950 of SEQ ID NO: 1881590
uugggcugcccauacgaua

SEQ ID NO: 2056419 - RNA, 19 nt, Artificial Sequence
  Description of Artificial Sequence: Synthetic oligonucleotide
  Antisense strand to SEQ ID NO: 2056418
uaucguaugggcagcccaa

SEQ ID NO: 2056420 - RNA, 19 nt, Artificial Sequence
  Description of Artificial Sequence: Synthetic oligonucleotide
  Sense strand starting at position 2955 of SEQ ID NO: 1881590
cugcccauacgauaaauau

SEQ ID NO: 2056421 - RNA, 19 nt, Artificial Sequence
  Description of Artificial Sequence: Synthetic oligonucleotide
  Antisense strand to SEQ ID NO: 2056420
auauuuaucguaugggcag

SEQ ID NO: 2056422 - RNA, 19 nt, Artificial Sequence
  Description of Artificial Sequence: Synthetic oligonucleotide
  Sense strand starting at position 2979 of SEQ ID NO: 1881590
ggaggaaucacguguuucg

SEQ ID NO: 2056423 - RNA, 19 nt, Artificial Sequence
  Description of Artificial Sequence: Synthetic oligonucleotide
  Antisense strand to SEQ ID NO: 2056422
cgaaacacgugauuccucc

SEQ ID NO: 2056424 - RNA, 19 nt, Artificial Sequence
  Description of Artificial Sequence: Synthetic oligonucleotide
  Sense strand starting at position 2988 of SEQ ID NO: 1881590
acguguuucgaugucggga

SEQ ID NO: 2056425 - RNA, 19 nt, Artificial Sequence
  Description of Artificial Sequence: Synthetic oligonucleotide
  Antisense strand to SEQ ID NO: 2056424
ucccgacaucgaaacacgu

SEQ ID NO: 2056426 - RNA, 19 nt, Artificial Sequence
  Description of Artificial Sequence: Synthetic oligonucleotide
  Sense strand starting at position 3029 of SEQ ID NO: 1881590
uugcuuuggcgcgcauaua

SEQ ID NO: 2056427 - RNA, 19 nt, Artificial Sequence
  Description of Artificial Sequence: Synthetic oligonucleotide
  Antisense strand to SEQ ID NO: 2056426
uauaugcgcgccaaagcaa

SEQ ID NO: 2056428 - RNA, 19 nt, Artificial Sequence
  Description of Artificial Sequence: Synthetic oligonucleotide
  Sense strand starting at position 3075 of SEQ ID NO: 1881590
gugcauuuauguuugugua

SEQ ID NO: 2056429 - RNA, 19 nt, Artificial Sequence
  Description of Artificial Sequence: Synthetic oligonucleotide
  Antisense strand to SEQ ID NO: 2056428
uacacaaacauaaaugcac

SEQ ID NO: 2056430 - RNA, 19 nt, Artificial Sequence
  Description of Artificial Sequence: Synthetic oligonucleotide
  Sense strand starting at position 3076 of SEQ ID NO: 1881590
ugcauuuauguuuguguau

SEQ ID NO: 2056431 - RNA, 19 nt, Artificial Sequence
  Description of Artificial Sequence: Synthetic oligonucleotide
  Antisense strand to SEQ ID NO: 2056430
auacacaaacauaaaugca

SEQ ID NO: 2056432 - RNA, 19 nt, Artificial Sequence
  Description of Artificial Sequence: Synthetic oligonucleotide
  Sense strand starting at position 3077 of SEQ ID NO: 1881590
gcauuuauguuuguguaug

SEQ ID NO: 2056433 - RNA, 19 nt, Artificial Sequence
  Description of Artificial Sequence: Synthetic oligonucleotide
  Antisense strand to SEQ ID NO: 2056432
cauacacaaacauaaaugc

SEQ ID NO: 2056434 - RNA, 19 nt, Artificial Sequence
  Description of Artificial Sequence: Synthetic oligonucleotide
  Sense strand starting at position 3082 of SEQ ID NO: 1881590
uauguuuguguaugcuuaa

SEQ ID NO: 2056435 - RNA, 19 nt, Artificial Sequence
  Description of Artificial Sequence: Synthetic oligonucleotide
  Antisense strand to SEQ ID NO: 2056434
uuaagcauacacaaacaua

SEQ ID NO: 2056436 - RNA, 19 nt, Artificial Sequence
  Description of Artificial Sequence: Synthetic oligonucleotide
  Sense strand starting at position 3083 of SEQ ID NO: 1881590
auguuuguguaugcuuaaa

SEQ ID NO: 2056437 - RNA, 19 nt, Artificial Sequence
  Description of Artificial Sequence: Synthetic oligonucleotide
  Antisense strand to SEQ ID NO: 2056436
uuuaagcauacacaaacau

SEQ ID NO: 2056438 - RNA, 19 nt, Artificial Sequence
  Description of Artificial Sequence: Synthetic oligonucleotide
  Sense strand starting at position 3111 of SEQ ID NO: 1881590
cccagugggccguauucau

SEQ ID NO: 2056439 - RNA, 19 nt, Artificial Sequence
  Description of Artificial Sequence: Synthetic oligonucleotide
  Antisense strand to SEQ ID NO: 2056438
augaauacggcccacuggg

SEQ ID NO: 2056440 - RNA, 19 nt, Artificial Sequence
  Description of Artificial Sequence: Synthetic oligonucleotide
  Sense strand starting at position 3235 of SEQ ID NO: 1881590
acgccuauaauccggagaa

SEQ ID NO: 2056441 - RNA, 19 nt, Artificial Sequence
  Description of Artificial Sequence: Synthetic oligonucleotide
  Antisense strand to SEQ ID NO: 2056440
uucuccggauuauaggcgu

SEQ ID NO: 2056442 - RNA, 19 nt, Artificial Sequence
  Description of Artificial Sequence: Synthetic oligonucleotide
  Sense strand starting at position 3286 of SEQ ID NO: 1881590
ggaggaaagugaugcaaga

SEQ ID NO: 2056443 - RNA, 19 nt, Artificial Sequence
  Description of Artificial Sequence: Synthetic oligonucleotide
  Antisense strand to SEQ ID NO: 2056442
ucuugcaucacuuuccucc

SEQ ID NO: 2056444 - RNA, 19 nt, Artificial Sequence
  Description of Artificial Sequence: Synthetic oligonucleotide
  Sense strand starting at position 3325 of SEQ ID NO: 1881590
cggcgagaggccuaagaga

SEQ ID NO: 2056445 - RNA, 19 nt, Artificial Sequence
  Description of Artificial Sequence: Synthetic oligonucleotide
  Antisense strand to SEQ ID NO: 2056444
ucucuuaggccucucgccg

SEQ ID NO: 2056446 - RNA, 19 nt, Artificial Sequence
  Description of Artificial Sequence: Synthetic oligonucleotide
  Sense strand starting at position 3352 of SEQ ID NO: 1881590
gggagcugguguucaacaa

SEQ ID NO: 2056447 - RNA, 19 nt, Artificial Sequence
  Description of Artificial Sequence: Synthetic oligonucleotide
  Antisense strand to SEQ ID NO: 2056446
uuguugaacaccagcuccc

SEQ ID NO: 2056448 - RNA, 19 nt, Artificial Sequence
  Description of Artificial Sequence: Synthetic oligonucleotide
  Sense strand starting at position 3356 of SEQ ID NO: 1881590
gcugguguucaacaaggau

SEQ ID NO: 2056449 - RNA, 19 nt, Artificial Sequence
  Description of Artificial Sequence: Synthetic oligonucleotide
  Antisense strand to SEQ ID NO: 2056448
auccuuguugaacaccagc

SEQ ID NO: 2056450 - RNA, 19 nt, Artificial Sequence
  Description of Artificial Sequence: Synthetic oligonucleotide
  Sense strand starting at position 3383 of SEQ ID NO: 1881590
gcuugaguucucugcucuu

SEQ ID NO: 2056451 - RNA, 19 nt, Artificial Sequence
  Description of Artificial Sequence: Synthetic oligonucleotide
  Antisense strand to SEQ ID NO: 2056450
aagagcagagaacucaagc

SEQ ID NO: 2056452 - RNA, 19 nt, Artificial Sequence
  Description of Artificial Sequence: Synthetic oligonucleotide
  Sense strand starting at position 3390 of SEQ ID NO: 1881590
uucucugcucuuggaauua

SEQ ID NO: 2056453 - RNA, 19 nt, Artificial Sequence
  Description of Artificial Sequence: Synthetic oligonucleotide
  Antisense strand to SEQ ID NO: 2056452
uaauuccaagagcagagaa

SEQ ID NO: 2056454 - RNA, 19 nt, Artificial Sequence
  Description of Artificial Sequence: Synthetic oligonucleotide
  Sense strand starting at position 3423 of SEQ ID NO: 1881590
cuguauaucuugccaguca

SEQ ID NO: 2056455 - RNA, 19 nt, Artificial Sequence
  Description of Artificial Sequence: Synthetic oligonucleotide
  Antisense strand to SEQ ID NO: 2056454
ugacuggcaagauauacag

SEQ ID NO: 2056456 - RNA, 19 nt, Artificial Sequence
  Description of Artificial Sequence: Synthetic oligonucleotide
  Sense strand starting at position 3435 of SEQ ID NO: 1881590
ccagucagauagugaggaa

SEQ ID NO: 2056457 - RNA, 19 nt, Artificial Sequence
  Description of Artificial Sequence: Synthetic oligonucleotide
  Antisense strand to SEQ ID NO: 2056456
uuccucacuaucugacugg

SEQ ID NO: 2056458 - RNA, 19 nt, Artificial Sequence
  Description of Artificial Sequence: Synthetic oligonucleotide
  Sense strand starting at position 3452 of SEQ ID NO: 1881590
aacgauuccaguugguaga

SEQ ID NO: 2056459 - RNA, 19 nt, Artificial Sequence
  Description of Artificial Sequence: Synthetic oligonucleotide
  Antisense strand to SEQ ID NO: 2056458
ucuaccaacuggaaucguu

SEQ ID NO: 2056460 - RNA, 19 nt, Artificial Sequence
  Description of Artificial Sequence: Synthetic oligonucleotide
  Sense strand starting at position 3453 of SEQ ID NO: 1881590
acgauuccaguugguagau

SEQ ID NO: 2056461 - RNA, 19 nt, Artificial Sequence
  Description of Artificial Sequence: Synthetic oligonucleotide
  Antisense strand to SEQ ID NO: 2056460
aucuaccaacuggaaucgu

SEQ ID NO: 2056462 - RNA, 19 nt, Artificial Sequence
  Description of Artificial Sequence: Synthetic oligonucleotide
  Sense strand starting at position 3463 of SEQ ID NO: 1881590
uugguagaucugcguuugu

SEQ ID NO: 2056463 - RNA, 19 nt, Artificial Sequence
  Description of Artificial Sequence: Synthetic oligonucleotide
  Antisense strand to SEQ ID NO: 2056462
acaaacgcagaucuaccaa

SEQ ID NO: 2056464 - RNA, 19 nt, Artificial Sequence
  Description of Artificial Sequence: Synthetic oligonucleotide
  Sense strand starting at position 3499 of SEQ ID NO: 1881590
cucugaaucuuggccaaag

SEQ ID NO: 2056465 - RNA, 19 nt, Artificial Sequence
  Description of Artificial Sequence: Synthetic oligonucleotide
  Antisense strand to SEQ ID NO: 2056464
cuuuggccaagauucagag

SEQ ID NO: 2056466 - RNA, 19 nt, Artificial Sequence
  Description of Artificial Sequence: Synthetic oligonucleotide
  Sense strand starting at position 3620 of SEQ ID NO: 1881590
gcaacuugcuauucgugga

SEQ ID NO: 2056467 - RNA, 19 nt, Artificial Sequence
  Description of Artificial Sequence: Synthetic oligonucleotide
  Antisense strand to SEQ ID NO: 2056466
uccacgaauagcaaguugc

SEQ ID NO: 2056468 - RNA, 19 nt, Artificial Sequence
  Description of Artificial Sequence: Synthetic oligonucleotide
  Sense strand starting at position 3624 of SEQ ID NO: 1881590
cuugcuauucguggagaug

SEQ ID NO: 2056469 - RNA, 19 nt, Artificial Sequence
  Description of Artificial Sequence: Synthetic oligonucleotide
  Antisense strand to SEQ ID NO: 2056468
caucuccacgaauagcaag

SEQ ID NO: 2056470 - RNA, 19 nt, Artificial Sequence
  Description of Artificial Sequence: Synthetic oligonucleotide
  Sense strand starting at position 3625 of SEQ ID NO: 1881590
uugcuauucguggagauga

SEQ ID NO: 2056471 - RNA, 19 nt, Artificial Sequence
  Description of Artificial Sequence: Synthetic oligonucleotide
  Antisense strand to SEQ ID NO: 2056470
ucaucuccacgaauagcaa

SEQ ID NO: 2056472 - RNA, 19 nt, Artificial Sequence
  Description of Artificial Sequence: Synthetic oligonucleotide
  Sense strand starting at position 3627 of SEQ ID NO: 1881590
gcuauucguggagaugaag

SEQ ID NO: 2056473 - RNA, 19 nt, Artificial Sequence
  Description of Artificial Sequence: Synthetic oligonucleotide
  Antisense strand to SEQ ID NO: 2056472
cuucaucuccacgaauagc

SEQ ID NO: 2056474 - RNA, 19 nt, Artificial Sequence
  Description of Artificial Sequence: Synthetic oligonucleotide
  Sense strand starting at position 3682 of SEQ ID NO: 1881590
gugguauguuaacuucuaa

SEQ ID NO: 2056475 - RNA, 19 nt, Artificial Sequence
  Description of Artificial Sequence: Synthetic oligonucleotide
  Antisense strand to SEQ ID NO: 2056474
uuagaaguuaacauaccac

SEQ ID NO: 2056476 - RNA, 19 nt, Artificial Sequence
  Description of Artificial Sequence: Synthetic oligonucleotide
  Sense strand starting at position 3789 of SEQ ID NO: 1881590
auggaaguaugguuguauc

SEQ ID NO: 2056477 - RNA, 19 nt, Artificial Sequence
  Description of Artificial Sequence: Synthetic oligonucleotide
  Antisense strand to SEQ ID NO: 2056476
gauacaaccauacuuccau

SEQ ID NO: 2056478 - RNA, 19 nt, Artificial Sequence
  Description of Artificial Sequence: Synthetic oligonucleotide
  Sense strand starting at position 25 of SEQ ID NO: 1881591
gccgcugucuaguugugau

SEQ ID NO: 2056479 - RNA, 19 nt, Artificial Sequence
  Description of Artificial Sequence: Synthetic oligonucleotide
  Antisense strand to SEQ ID NO: 2056478
aucacaacuagacagcggc

SEQ ID NO: 2056480 - RNA, 19 nt, Artificial Sequence
  Description of Artificial Sequence: Synthetic oligonucleotide
  Sense strand starting at position 35 of SEQ ID NO: 1881591
aguugugaucccgauuacu

SEQ ID NO: 2056481 - RNA, 19 nt, Artificial Sequence
  Description of Artificial Sequence: Synthetic oligonucleotide
  Antisense strand to SEQ ID NO: 2056480
aguaaucgggaucacaacu

SEQ ID NO: 2056482 - RNA, 19 nt, Artificial Sequence
  Description of Artificial Sequence: Synthetic oligonucleotide
  Sense strand starting at position 79 of SEQ ID NO: 1881591
acacacauguaucgaagua

SEQ ID NO: 2056483 - RNA, 19 nt, Artificial Sequence
  Description of Artificial Sequence: Synthetic oligonucleotide
  Antisense strand to SEQ ID NO: 2056482
uacuucgauacaugugugu

SEQ ID NO: 2056484 - RNA, 19 nt, Artificial Sequence
  Description of Artificial Sequence: Synthetic oligonucleotide
  Sense strand starting at position 134 of SEQ ID NO: 1881591
gucucacuucuguaagcua

SEQ ID NO: 2056485 - RNA, 19 nt, Artificial Sequence
  Description of Artificial Sequence: Synthetic oligonucleotide
  Antisense strand to SEQ ID NO: 2056484
uagcuuacagaagugagac

SEQ ID NO: 2056486 - RNA, 19 nt, Artificial Sequence
  Description of Artificial Sequence: Synthetic oligonucleotide
  Sense strand starting at position 137 of SEQ ID NO: 1881591
ucacuucuguaagcuagaa

SEQ ID NO: 2056487 - RNA, 19 nt, Artificial Sequence
  Description of Artificial Sequence: Synthetic oligonucleotide
  Antisense strand to SEQ ID NO: 2056486
uucuagcuuacagaaguga

SEQ ID NO: 2056488 - RNA, 19 nt, Artificial Sequence
  Description of Artificial Sequence: Synthetic oligonucleotide
  Sense strand starting at position 141 of SEQ ID NO: 1881591
uucuguaagcuagaagucu

SEQ ID NO: 2056489 - RNA, 19 nt, Artificial Sequence
  Description of Artificial Sequence: Synthetic oligonucleotide
  Antisense strand to SEQ ID NO: 2056488
agacuucuagcuuacagaa

SEQ ID NO: 2056490 - RNA, 19 nt, Artificial Sequence
  Description of Artificial Sequence: Synthetic oligonucleotide
  Sense strand starting at position 255 of SEQ ID NO: 1881591
uuuggcauuuccuuggcua

SEQ ID NO: 2056491 - RNA, 19 nt, Artificial Sequence
  Description of Artificial Sequence: Synthetic oligonucleotide
  Antisense strand to SEQ ID NO: 2056490
uagccaaggaaaugccaaa

SEQ ID NO: 2056492 - RNA, 19 nt, Artificial Sequence
  Description of Artificial Sequence: Synthetic oligonucleotide
  Sense strand starting at position 327 of SEQ ID NO: 1881591
gcuugugucucuguaucca

SEQ ID NO: 2056493 - RNA, 19 nt, Artificial Sequence
  Description of Artificial Sequence: Synthetic oligonucleotide
  Antisense strand to SEQ ID NO: 2056492
uggauacagagacacaagc

SEQ ID NO: 2056494 - RNA, 19 nt, Artificial Sequence
  Description of Artificial Sequence: Synthetic oligonucleotide
  Sense strand starting at position 331 of SEQ ID NO: 1881591
gugucucuguauccaauuu

SEQ ID NO: 2056495 - RNA, 19 nt, Artificial Sequence
  Description of Artificial Sequence: Synthetic oligonucleotide
  Antisense strand to SEQ ID NO: 2056494
aaauuggauacagagacac

SEQ ID NO: 2056496 - RNA, 19 nt, Artificial Sequence
  Description of Artificial Sequence: Synthetic oligonucleotide
  Sense strand starting at position 552 of SEQ ID NO: 1881591
gggcauugucccugauugu

SEQ ID NO: 2056497 - RNA, 19 nt, Artificial Sequence
  Description of Artificial Sequence: Synthetic oligonucleotide
  Antisense strand to SEQ ID NO: 2056496
acaaucagggacaaugccc

SEQ ID NO: 2056498 - RNA, 19 nt, Artificial Sequence
  Description of Artificial Sequence: Synthetic oligonucleotide
  Sense strand starting at position 635 of SEQ ID NO: 1881591
cucugaugcgcugauacuu

SEQ ID NO: 2056499 - RNA, 19 nt, Artificial Sequence
  Description of Artificial Sequence: Synthetic oligonucleotide
  Antisense strand to SEQ ID NO: 2056498
aaguaucagcgcaucagag

SEQ ID NO: 2056500 - RNA, 19 nt, Artificial Sequence
  Description of Artificial Sequence: Synthetic oligonucleotide
  Sense strand starting at position 655 of SEQ ID NO: 1881591
acuguaucagcguggagga

SEQ ID NO: 2056501 - RNA, 19 nt, Artificial Sequence
  Description of Artificial Sequence: Synthetic oligonucleotide
  Antisense strand to SEQ ID NO: 2056500
uccuccacgcugauacagu

SEQ ID NO: 2056502 - RNA, 19 nt, Artificial Sequence
  Description of Artificial Sequence: Synthetic oligonucleotide
  Sense strand starting at position 736 of SEQ ID NO: 1881591
cagggcaucugcuaaagau

SEQ ID NO: 2056503 - RNA, 19 nt, Artificial Sequence
  Description of Artificial Sequence: Synthetic oligonucleotide
  Antisense strand to SEQ ID NO: 2056502
aucuuuagcagaugcccug

SEQ ID NO: 2056504 - RNA, 19 nt, Artificial Sequence
  Description of Artificial Sequence: Synthetic oligonucleotide
  Sense strand starting at position 745 of SEQ ID NO: 1881591
ugcuaaagauagucucaca

SEQ ID NO: 2056505 - RNA, 19 nt, Artificial Sequence
  Description of Artificial Sequence: Synthetic oligonucleotide
  Antisense strand to SEQ ID NO: 2056504
ugugagacuaucuuuagca

SEQ ID NO: 2056506 - RNA, 19 nt, Artificial Sequence
  Description of Artificial Sequence: Synthetic oligonucleotide
  Sense strand starting at position 767 of SEQ ID NO: 1881591
gcucacagauauccuaguu

SEQ ID NO: 2056507 - RNA, 19 nt, Artificial Sequence
  Description of Artificial Sequence: Synthetic oligonucleotide
  Antisense strand to SEQ ID NO: 2056506
aacuaggauaucugugagc

SEQ ID NO: 2056508 - RNA, 19 nt, Artificial Sequence
  Description of Artificial Sequence: Synthetic oligonucleotide
  Sense strand starting at position 1040 of SEQ ID NO: 1881591
ggauguaugaugugggcaa

SEQ ID NO: 2056509 - RNA, 19 nt, Artificial Sequence
  Description of Artificial Sequence: Synthetic oligonucleotide
  Antisense strand to SEQ ID NO: 2056508
uugcccacaucauacaucc

SEQ ID NO: 2056510 - RNA, 19 nt, Artificial Sequence
  Description of Artificial Sequence: Synthetic oligonucleotide
  Sense strand starting at position 1042 of SEQ ID NO: 1881591
auguaugaugugggcaaga

SEQ ID NO: 2056511 - RNA, 19 nt, Artificial Sequence
  Description of Artificial Sequence: Synthetic oligonucleotide
  Antisense strand to SEQ ID NO: 2056510
ucuugcccacaucauacau

SEQ ID NO: 2056512 - RNA, 19 nt, Artificial Sequence
  Description of Artificial Sequence: Synthetic oligonucleotide
  Sense strand starting at position 1044 of SEQ ID NO: 1881591
guaugaugugggcaagaca

SEQ ID NO: 2056513 - RNA, 19 nt, Artificial Sequence
  Description of Artificial Sequence: Synthetic oligonucleotide
  Antisense strand to SEQ ID NO: 2056512
ugucuugcccacaucauac

SEQ ID NO: 2056514 - RNA, 19 nt, Artificial Sequence
  Description of Artificial Sequence: Synthetic oligonucleotide
  Sense strand starting at position 1085 of SEQ ID NO: 1881591
uuguuacuguggcuaacau

SEQ ID NO: 2056515 - RNA, 19 nt, Artificial Sequence
  Description of Artificial Sequence: Synthetic oligonucleotide
  Antisense strand to SEQ ID NO: 2056514
auguuagccacaguaacaa

SEQ ID NO: 2056516 - RNA, 19 nt, Artificial Sequence
  Description of Artificial Sequence: Synthetic oligonucleotide
  Sense strand starting at position 1086 of SEQ ID NO: 1881591
uguuacuguggcuaacaua

SEQ ID NO: 2056517 - RNA, 19 nt, Artificial Sequence
  Description of Artificial Sequence: Synthetic oligonucleotide
  Antisense strand to SEQ ID NO: 2056516
uauguuagccacaguaaca

SEQ ID NO: 2056518 - RNA, 19 nt, Artificial Sequence
  Description of Artificial Sequence: Synthetic oligonucleotide
  Sense strand starting at position 1102 of SEQ ID NO: 1881591
auagcuuauccugacugau

SEQ ID NO: 2056519 - RNA, 19 nt, Artificial Sequence
  Description of Artificial Sequence: Synthetic oligonucleotide
  Antisense strand to SEQ ID NO: 2056518
aucagucaggauaagcuau

SEQ ID NO: 2056520 - RNA, 19 nt, Artificial Sequence
  Description of Artificial Sequence: Synthetic oligonucleotide
  Sense strand starting at position 1133 of SEQ ID NO: 1881591
auaucaaucugacaauggu

SEQ ID NO: 2056521 - RNA, 19 nt, Artificial Sequence
  Description of Artificial Sequence: Synthetic oligonucleotide
  Antisense strand to SEQ ID NO: 2056520
accauugucagauugauau

SEQ ID NO: 2056522 - RNA, 19 nt, Artificial Sequence
  Description of Artificial Sequence: Synthetic oligonucleotide
  Sense strand starting at position 1171 of SEQ ID NO: 1881591
gugagacagucuccaaacu

SEQ ID NO: 2056523 - RNA, 19 nt, Artificial Sequence
  Description of Artificial Sequence: Synthetic oligonucleotide
  Antisense strand to SEQ ID NO: 2056522
aguuuggagacugucucac

SEQ ID NO: 2056524 - RNA, 19 nt, Artificial Sequence
  Description of Artificial Sequence: Synthetic oligonucleotide
  Sense strand starting at position 1268 of SEQ ID NO: 1881591
uucuguggcccagauacuu

SEQ ID NO: 2056525 - RNA, 19 nt, Artificial Sequence
  Description of Artificial Sequence: Synthetic oligonucleotide
  Antisense strand to SEQ ID NO: 2056524
aaguaucugggccacagaa

SEQ ID NO: 2056526 - RNA, 19 nt, Artificial Sequence
  Description of Artificial Sequence: Synthetic oligonucleotide
  Sense strand starting at position 1366 of SEQ ID NO: 1881591
cugccuucuccuugcuaga

SEQ ID NO: 2056527 - RNA, 19 nt, Artificial Sequence
  Description of Artificial Sequence: Synthetic oligonucleotide
  Antisense strand to SEQ ID NO: 2056526
ucuagcaaggagaaggcag

SEQ ID NO: 2056528 - RNA, 19 nt, Artificial Sequence
  Description of Artificial Sequence: Synthetic oligonucleotide
  Sense strand starting at position 1368 of SEQ ID NO: 1881591
gccuucuccuugcuagaaa

SEQ ID NO: 2056529 - RNA, 19 nt, Artificial Sequence
  Description of Artificial Sequence: Synthetic oligonucleotide
  Antisense strand to SEQ ID NO: 2056528
uuucuagcaaggagaaggc

SEQ ID NO: 2056530 - RNA, 19 nt, Artificial Sequence
  Description of Artificial Sequence: Synthetic oligonucleotide
  Sense strand starting at position 1369 of SEQ ID NO: 1881591
ccuucuccuugcuagaaag

SEQ ID NO: 2056531 - RNA, 19 nt, Artificial Sequence
  Description of Artificial Sequence: Synthetic oligonucleotide
  Antisense strand to SEQ ID NO: 2056530
cuuucuagcaaggagaagg

SEQ ID NO: 2056532 - RNA, 19 nt, Artificial Sequence
  Description of Artificial Sequence: Synthetic oligonucleotide
  Sense strand starting at position 1371 of SEQ ID NO: 1881591
uucuccuugcuagaaagua

SEQ ID NO: 2056533 - RNA, 19 nt, Artificial Sequence
  Description of Artificial Sequence: Synthetic oligonucleotide
  Antisense strand to SEQ ID NO: 2056532
uacuuucuagcaaggagaa

SEQ ID NO: 2056534 - RNA, 19 nt, Artificial Sequence
  Description of Artificial Sequence: Synthetic oligonucleotide
  Sense strand starting at position 1486 of SEQ ID NO: 1881591
gucuaaugacacugaauga

SEQ ID NO: 2056535 - RNA, 19 nt, Artificial Sequence
  Description of Artificial Sequence: Synthetic oligonucleotide
  Antisense strand to SEQ ID NO: 2056534
ucauucagugucauuagac

SEQ ID NO: 2056536 - RNA, 19 nt, Artificial Sequence
  Description of Artificial Sequence: Synthetic oligonucleotide
  Sense strand starting at position 1681 of SEQ ID NO: 1881591
cgcuuuaaccucugaccuu

SEQ ID NO: 2056537 - RNA, 19 nt, Artificial Sequence
  Description of Artificial Sequence: Synthetic oligonucleotide
  Antisense strand to SEQ ID NO: 2056536
aaggucagagguuaaagcg

SEQ ID NO: 2056538 - RNA, 19 nt, Artificial Sequence
  Description of Artificial Sequence: Synthetic oligonucleotide
  Sense strand starting at position 1702 of SEQ ID NO: 1881591
gaccucucaugcguacaga

SEQ ID NO: 2056539 - RNA, 19 nt, Artificial Sequence
  Description of Artificial Sequence: Synthetic oligonucleotide
  Antisense strand to SEQ ID NO: 2056538
ucuguacgcaugagagguc

SEQ ID NO: 2056540 - RNA, 19 nt, Artificial Sequence
  Description of Artificial Sequence: Synthetic oligonucleotide
  Sense strand starting at position 1747 of SEQ ID NO: 1881591
gcgucuuccugaccacuga

SEQ ID NO: 2056541 - RNA, 19 nt, Artificial Sequence
  Description of Artificial Sequence: Synthetic oligonucleotide
  Antisense strand to SEQ ID NO: 2056540
ucaguggucaggaagacgc

SEQ ID NO: 2056542 - RNA, 19 nt, Artificial Sequence
  Description of Artificial Sequence: Synthetic oligonucleotide
  Sense strand starting at position 2914 of SEQ ID NO: 1881591
ccgugucuuccgcagggua

SEQ ID NO: 2056543 - RNA, 19 nt, Artificial Sequence
  Description of Artificial Sequence: Synthetic oligonucleotide
  Antisense strand to SEQ ID NO: 2056542
uacccugcggaagacacgg

SEQ ID NO: 2056544 - RNA, 19 nt, Artificial Sequence
  Description of Artificial Sequence: Synthetic oligonucleotide
  Sense strand starting at position 3113 of SEQ ID NO: 1881591
ggaggaggcucgagagaug

SEQ ID NO: 2056545 - RNA, 19 nt, Artificial Sequence
  Description of Artificial Sequence: Synthetic oligonucleotide
  Antisense strand to SEQ ID NO: 2056544
caucucucgagccuccucc

SEQ ID NO: 2056546 - RNA, 19 nt, Artificial Sequence
  Description of Artificial Sequence: Synthetic oligonucleotide
  Sense strand starting at position 3120 of SEQ ID NO: 1881591
gcucgagagaugggaagaa

SEQ ID NO: 2056547 - RNA, 19 nt, Artificial Sequence
  Description of Artificial Sequence: Synthetic oligonucleotide
  Antisense strand to SEQ ID NO: 2056546
uucuucccaucucucgagc

SEQ ID NO: 2056548 - RNA, 19 nt, Artificial Sequence
  Description of Artificial Sequence: Synthetic oligonucleotide
  Sense strand starting at position 3640 of SEQ ID NO: 1881591
ccuuguagucagggagauc

SEQ ID NO: 2056549 - RNA, 19 nt, Artificial Sequence
  Description of Artificial Sequence: Synthetic oligonucleotide
  Antisense strand to SEQ ID NO: 2056548
gaucucccugacuacaagg

SEQ ID NO: 2056550 - RNA, 19 nt, Artificial Sequence
  Description of Artificial Sequence: Synthetic oligonucleotide
  Sense strand starting at position 3671 of SEQ ID NO: 1881591
cugagcuuuccuggaacgu

SEQ ID NO: 2056551 - RNA, 19 nt, Artificial Sequence
  Description of Artificial Sequence: Synthetic oligonucleotide
  Antisense strand to SEQ ID NO: 2056550
acguuccaggaaagcucag

SEQ ID NO: 2056552 - RNA, 19 nt, Artificial Sequence
  Description of Artificial Sequence: Synthetic oligonucleotide
  Sense strand starting at position 3672 of SEQ ID NO: 1881591
ugagcuuuccuggaacgug

SEQ ID NO: 2056553 - RNA, 19 nt, Artificial Sequence
  Description of Artificial Sequence: Synthetic oligonucleotide
  Antisense strand to SEQ ID NO: 2056552
cacguuccaggaaagcuca

SEQ ID NO: 2056554 - RNA, 19 nt, Artificial Sequence
  Description of Artificial Sequence: Synthetic oligonucleotide
  Sense strand starting at position 3702 of SEQ ID NO: 1881591
ggaugcuguuaccaucuga

SEQ ID NO: 2056555 - RNA, 19 nt, Artificial Sequence
  Description of Artificial Sequence: Synthetic oligonucleotide
  Antisense strand to SEQ ID NO: 2056554
ucagaugguaacagcaucc

SEQ ID NO: 2056556 - RNA, 19 nt, Artificial Sequence
  Description of Artificial Sequence: Synthetic oligonucleotide
  Sense strand starting at position 3804 of SEQ ID NO: 1881591
gugaauguugggcauagca

SEQ ID NO: 2056557 - RNA, 19 nt, Artificial Sequence
  Description of Artificial Sequence: Synthetic oligonucleotide
  Antisense strand to SEQ ID NO: 2056556
ugcuaugcccaacauucac

SEQ ID NO: 2056558 - RNA, 19 nt, Artificial Sequence
  Description of Artificial Sequence: Synthetic oligonucleotide
  Sense strand starting at position 124 of SEQ ID NO: 1881592
ggugaaaccuaauaaauga

SEQ ID NO: 2056559 - RNA, 19 nt, Artificial Sequence
  Description of Artificial Sequence: Synthetic oligonucleotide
  Antisense strand to SEQ ID NO: 2056558
ucauuuauuagguuucacc

SEQ ID NO: 2056560 - RNA, 19 nt, Artificial Sequence
  Description of Artificial Sequence: Synthetic oligonucleotide
  Sense strand starting at position 153 of SEQ ID NO: 1881592
auagcauauuuagaaugga

SEQ ID NO: 2056561 - RNA, 19 nt, Artificial Sequence
  Description of Artificial Sequence: Synthetic oligonucleotide
  Antisense strand to SEQ ID NO: 2056560
uccauucuaaauaugcuau

SEQ ID NO: 2056562 - RNA, 19 nt, Artificial Sequence
  Description of Artificial Sequence: Synthetic oligonucleotide
  Sense strand starting at position 172 of SEQ ID NO: 1881592
gguauacagucaguacuua

SEQ ID NO: 2056563 - RNA, 19 nt, Artificial Sequence
  Description of Artificial Sequence: Synthetic oligonucleotide
  Antisense strand to SEQ ID NO: 2056562
uaaguacugacuguauacc

SEQ ID NO: 2056564 - RNA, 19 nt, Artificial Sequence
  Description of Artificial Sequence: Synthetic oligonucleotide
  Sense strand starting at position 176 of SEQ ID NO: 1881592
uacagucaguacuuaguau

SEQ ID NO: 2056565 - RNA, 19 nt, Artificial Sequence
  Description of Artificial Sequence: Synthetic oligonucleotide
  Antisense strand to SEQ ID NO: 2056564
auacuaaguacugacugua

SEQ ID NO: 2056566 - RNA, 19 nt, Artificial Sequence
  Description of Artificial Sequence: Synthetic oligonucleotide
  Sense strand starting at position 189 of SEQ ID NO: 1881592
uaguauuagcuguaaugau

SEQ ID NO: 2056567 - RNA, 19 nt, Artificial Sequence
  Description of Artificial Sequence: Synthetic oligonucleotide
  Antisense strand to SEQ ID NO: 2056566
aucauuacagcuaauacua

SEQ ID NO: 2056568 - RNA, 19 nt, Artificial Sequence
  Description of Artificial Sequence: Synthetic oligonucleotide
  Sense strand starting at position 201 of SEQ ID NO: 1881592
uaaugauagcaguggugau

SEQ ID NO: 2056569 - RNA, 19 nt, Artificial Sequence
  Description of Artificial Sequence: Synthetic oligonucleotide
  Antisense strand to SEQ ID NO: 2056568
aucaccacugcuaucauua

SEQ ID NO: 2056570 - RNA, 19 nt, Artificial Sequence
  Description of Artificial Sequence: Synthetic oligonucleotide
  Sense strand starting at position 226 of SEQ ID NO: 1881592
gauggugucucuuuguaua

SEQ ID NO: 2056571 - RNA, 19 nt, Artificial Sequence
  Description of Artificial Sequence: Synthetic oligonucleotide
  Antisense strand to SEQ ID NO: 2056570
uauacaaagagacaccauc

SEQ ID NO: 2056572 - RNA, 19 nt, Artificial Sequence
  Description of Artificial Sequence: Synthetic oligonucleotide
  Sense strand starting at position 231 of SEQ ID NO: 1881592
ugucucuuuguauauguua

SEQ ID NO: 2056573 - RNA, 19 nt, Artificial Sequence
  Description of Artificial Sequence: Synthetic oligonucleotide
  Antisense strand to SEQ ID NO: 2056572
uaacauauacaaagagaca

SEQ ID NO: 2056574 - RNA, 19 nt, Artificial Sequence
  Description of Artificial Sequence: Synthetic oligonucleotide
  Sense strand starting at position 329 of SEQ ID NO: 1881592
uccagaauguucuccagag

SEQ ID NO: 2056575 - RNA, 19 nt, Artificial Sequence
  Description of Artificial Sequence: Synthetic oligonucleotide
  Antisense strand to SEQ ID NO: 2056574
cucuggagaacauucugga

SEQ ID NO: 2056576 - RNA, 19 nt, Artificial Sequence
  Description of Artificial Sequence: Synthetic oligonucleotide
  Sense strand starting at position 330 of SEQ ID NO: 1881592
ccagaauguucuccagagu

SEQ ID NO: 2056577 - RNA, 19 nt, Artificial Sequence
  Description of Artificial Sequence: Synthetic oligonucleotide
  Antisense strand to SEQ ID NO: 2056576
acucuggagaacauucugg

SEQ ID NO: 2056578 - RNA, 19 nt, Artificial Sequence
  Description of Artificial Sequence: Synthetic oligonucleotide
  Sense strand starting at position 331 of SEQ ID NO: 1881592
cagaauguucuccagaguu

SEQ ID NO: 2056579 - RNA, 19 nt, Artificial Sequence
  Description of Artificial Sequence: Synthetic oligonucleotide
  Antisense strand to SEQ ID NO: 2056578
aacucuggagaacauucug

SEQ ID NO: 2056580 - RNA, 19 nt, Artificial Sequence
  Description of Artificial Sequence: Synthetic oligonucleotide
  Sense strand starting at position 572 of SEQ ID NO: 1881592
aguagaaaggucugugacu

SEQ ID NO: 2056581 - RNA, 19 nt, Artificial Sequence
  Description of Artificial Sequence: Synthetic oligonucleotide
  Antisense strand to SEQ ID NO: 2056580
agucacagaccuuucuacu

SEQ ID NO: 2056582 - RNA, 19 nt, Artificial Sequence
  Description of Artificial Sequence: Synthetic oligonucleotide
  Sense strand starting at position 574 of SEQ ID NO: 1881592
uagaaaggucugugacuuc

SEQ ID NO: 2056583 - RNA, 19 nt, Artificial Sequence
  Description of Artificial Sequence: Synthetic oligonucleotide
  Antisense strand to SEQ ID NO: 2056582
gaagucacagaccuuucua

SEQ ID NO: 2056584 - RNA, 19 nt, Artificial Sequence
  Description of Artificial Sequence: Synthetic oligonucleotide
  Sense strand starting at position 583 of SEQ ID NO: 1881592
cugugacuuccucauguuu

SEQ ID NO: 2056585 - RNA, 19 nt, Artificial Sequence
  Description of Artificial Sequence: Synthetic oligonucleotide
  Antisense strand to SEQ ID NO: 2056584
aaacaugaggaagucacag

SEQ ID NO: 2056586 - RNA, 19 nt, Artificial Sequence
  Description of Artificial Sequence: Synthetic oligonucleotide
  Sense strand starting at position 747 of SEQ ID NO: 1881592
gcuguuaacugucccagaa

SEQ ID NO: 2056587 - RNA, 19 nt, Artificial Sequence
  Description of Artificial Sequence: Synthetic oligonucleotide
  Antisense strand to SEQ ID NO: 2056586
uucugggacaguuaacagc

SEQ ID NO: 2056588 - RNA, 19 nt, Artificial Sequence
  Description of Artificial Sequence: Synthetic oligonucleotide
  Sense strand starting at position 770 of SEQ ID NO: 1881592
agaggaucccuuggcuuua

SEQ ID NO: 2056589 - RNA, 19 nt, Artificial Sequence
  Description of Artificial Sequence: Synthetic oligonucleotide
  Antisense strand to SEQ ID NO: 2056588
uaaagccaagggauccucu

SEQ ID NO: 2056590 - RNA, 19 nt, Artificial Sequence
  Description of Artificial Sequence: Synthetic oligonucleotide
  Sense strand starting at position 1003 of SEQ ID NO: 1881592
uugguucuauaagcaaaga

SEQ ID NO: 2056591 - RNA, 19 nt, Artificial Sequence
  Description of Artificial Sequence: Synthetic oligonucleotide
  Antisense strand to SEQ ID NO: 2056590
ucuuugcuuauagaaccaa

SEQ ID NO: 2056592 - RNA, 19 nt, Artificial Sequence
  Description of Artificial Sequence: Synthetic oligonucleotide
  Sense strand starting at position 1031 of SEQ ID NO: 1881592
gcaauuuauuaacaggaag

SEQ ID NO: 2056593 - RNA, 19 nt, Artificial Sequence
  Description of Artificial Sequence: Synthetic oligonucleotide
  Antisense strand to SEQ ID NO: 2056592
cuuccuguuaauaaauugc

SEQ ID NO: 2056594 - RNA, 19 nt, Artificial Sequence
  Description of Artificial Sequence: Synthetic oligonucleotide
  Sense strand starting at position 1048 of SEQ ID NO: 1881592
agggaaugcuaagugaaua

SEQ ID NO: 2056595 - RNA, 19 nt, Artificial Sequence
  Description of Artificial Sequence: Synthetic oligonucleotide
  Antisense strand to SEQ ID NO: 2056594
uauucacuuagcauucccu

SEQ ID NO: 2056596 - RNA, 19 nt, Artificial Sequence
  Description of Artificial Sequence: Synthetic oligonucleotide
  Sense strand starting at position 1059 of SEQ ID NO: 1881592
agugaauaucagcaaucau

SEQ ID NO: 2056597 - RNA, 19 nt, Artificial Sequence
  Description of Artificial Sequence: Synthetic oligonucleotide
  Antisense strand to SEQ ID NO: 2056596
augauugcugauauucacu

SEQ ID NO: 2056598 - RNA, 19 nt, Artificial Sequence
  Description of Artificial Sequence: Synthetic oligonucleotide
  Sense strand starting at position 1087 of SEQ ID NO: 1881592
uguugugaaugguuucaga

SEQ ID NO: 2056599 - RNA, 19 nt, Artificial Sequence
  Description of Artificial Sequence: Synthetic oligonucleotide
  Antisense strand to SEQ ID NO: 2056598
ucugaaaccauucacaaca

SEQ ID NO: 2056600 - RNA, 19 nt, Artificial Sequence
  Description of Artificial Sequence: Synthetic oligonucleotide
  Sense strand starting at position 1671 of SEQ ID NO: 1881592
ggccuuaccugcucagaag

SEQ ID NO: 2056601 - RNA, 19 nt, Artificial Sequence
  Description of Artificial Sequence: Synthetic oligonucleotide
  Antisense strand to SEQ ID NO: 2056600
cuucugagcagguaaggcc

SEQ ID NO: 2056602 - RNA, 19 nt, Artificial Sequence
  Description of Artificial Sequence: Synthetic oligonucleotide
  Sense strand starting at position 1672 of SEQ ID NO: 1881592
gccuuaccugcucagaagu

SEQ ID NO: 2056603 - RNA, 19 nt, Artificial Sequence
  Description of Artificial Sequence: Synthetic oligonucleotide
  Antisense strand to SEQ ID NO: 2056602
acuucugagcagguaaggc

SEQ ID NO: 2056604 - RNA, 19 nt, Artificial Sequence
  Description of Artificial Sequence: Synthetic oligonucleotide
  Sense strand starting at position 1830 of SEQ ID NO: 1881592
uuccuugugagaggugaca

SEQ ID NO: 2056605 - RNA, 19 nt, Artificial Sequence
  Description of Artificial Sequence: Synthetic oligonucleotide
  Antisense strand to SEQ ID NO: 2056604
ugucaccucucacaaggaa

SEQ ID NO: 2056606 - RNA, 19 nt, Artificial Sequence
  Description of Artificial Sequence: Synthetic oligonucleotide
  Sense strand starting at position 2525 of SEQ ID NO: 1881592
gauuguaaauacgccaauu

SEQ ID NO: 2056607 - RNA, 19 nt, Artificial Sequence
  Description of Artificial Sequence: Synthetic oligonucleotide
  Antisense strand to SEQ ID NO: 2056606
aauuggcguauuuacaauc

SEQ ID NO: 2056608 - RNA, 19 nt, Artificial Sequence
  Description of Artificial Sequence: Synthetic oligonucleotide
  Sense strand starting at position 2527 of SEQ ID NO: 1881592
uuguaaauacgccaauuga

SEQ ID NO: 2056609 - RNA, 19 nt, Artificial Sequence
  Description of Artificial Sequence: Synthetic oligonucleotide
  Antisense strand to SEQ ID NO: 2056608
ucaauuggcguauuuacaa

SEQ ID NO: 2056610 - RNA, 19 nt, Artificial Sequence
  Description of Artificial Sequence: Synthetic oligonucleotide
  Sense strand starting at position 2537 of SEQ ID NO: 1881592
gccaauugauacucuguau

SEQ ID NO: 2056611 - RNA, 19 nt, Artificial Sequence
  Description of Artificial Sequence: Synthetic oligonucleotide
  Antisense strand to SEQ ID NO: 2056610
auacagaguaucaauuggc

SEQ ID NO: 2056612 - RNA, 19 nt, Artificial Sequence
  Description of Artificial Sequence: Synthetic oligonucleotide
  Sense strand starting at position 2550 of SEQ ID NO: 1881592
cuguaucuaccgcaagguu

SEQ ID NO: 2056613 - RNA, 19 nt, Artificial Sequence
  Description of Artificial Sequence: Synthetic oligonucleotide
  Antisense strand to SEQ ID NO: 2056612
aaccuugcgguagauacag

SEQ ID NO: 2056614 - RNA, 19 nt, Artificial Sequence
  Description of Artificial Sequence: Synthetic oligonucleotide
  Sense strand starting at position 2558 of SEQ ID NO: 1881592
accgcaagguuuguaaaca

SEQ ID NO: 2056615 - RNA, 19 nt, Artificial Sequence
  Description of Artificial Sequence: Synthetic oligonucleotide
  Antisense strand to SEQ ID NO: 2056614
uguuuacaaaccuugcggu

SEQ ID NO: 2056616 - RNA, 19 nt, Artificial Sequence
  Description of Artificial Sequence: Synthetic oligonucleotide
  Sense strand starting at position 2674 of SEQ ID NO: 1881592
uggagacucuaucuagcua

SEQ ID NO: 2056617 - RNA, 19 nt, Artificial Sequence
  Description of Artificial Sequence: Synthetic oligonucleotide
  Antisense strand to SEQ ID NO: 2056616
uagcuagauagagucucca

SEQ ID NO: 2056618 - RNA, 19 nt, Artificial Sequence
  Description of Artificial Sequence: Synthetic oligonucleotide
  Sense strand starting at position 3348 of SEQ ID NO: 1881592
ugcgcuuuccguucccaga

SEQ ID NO: 2056619 - RNA, 19 nt, Artificial Sequence
  Description of Artificial Sequence: Synthetic oligonucleotide
  Antisense strand to SEQ ID NO: 2056618
ucugggaacggaaagcgca

SEQ ID NO: 2056620 - RNA, 19 nt, Artificial Sequence
  Description of Artificial Sequence: Synthetic oligonucleotide
  Sense strand starting at position 3692 of SEQ ID NO: 1881592
ucuccagaauuagcagauu

SEQ ID NO: 2056621 - RNA, 19 nt, Artificial Sequence
  Description of Artificial Sequence: Synthetic oligonucleotide
  Antisense strand to SEQ ID NO: 2056620
aaucugcuaauucuggaga

SEQ ID NO: 2056622 - RNA, 19 nt, Artificial Sequence
  Description of Artificial Sequence: Synthetic oligonucleotide
  Sense strand starting at position 3695 of SEQ ID NO: 1881592
ccagaauuagcagauuguu

SEQ ID NO: 2056623 - RNA, 19 nt, Artificial Sequence
  Description of Artificial Sequence: Synthetic oligonucleotide
  Antisense strand to SEQ ID NO: 2056622
aacaaucugcuaauucugg

SEQ ID NO: 2056624 - RNA, 19 nt, Artificial Sequence
  Description of Artificial Sequence: Synthetic oligonucleotide
  Sense strand starting at position 3703 of SEQ ID NO: 1881592
agcagauuguugguauagu

SEQ ID NO: 2056625 - RNA, 19 nt, Artificial Sequence
  Description of Artificial Sequence: Synthetic oligonucleotide
  Antisense strand to SEQ ID NO: 2056624
acuauaccaacaaucugcu

SEQ ID NO: 2056626 - RNA, 19 nt, Artificial Sequence
  Description of Artificial Sequence: Synthetic oligonucleotide
  Sense strand starting at position 3774 of SEQ ID NO: 1881592
acaugugugguggaaacua

SEQ ID NO: 2056627 - RNA, 19 nt, Artificial Sequence
  Description of Artificial Sequence: Synthetic oligonucleotide
  Antisense strand to SEQ ID NO: 2056626
uaguuuccaccacacaugu

SEQ ID NO: 2056628 - RNA, 19 nt, Artificial Sequence
  Description of Artificial Sequence: Synthetic oligonucleotide
  Sense strand starting at position 3826 of SEQ ID NO: 1881592
guuggaagcuuuccuugga

SEQ ID NO: 2056629 - RNA, 19 nt, Artificial Sequence
  Description of Artificial Sequence: Synthetic oligonucleotide
  Antisense strand to SEQ ID NO: 2056628
uccaaggaaagcuuccaac

SEQ ID NO: 2056630 - RNA, 19 nt, Artificial Sequence
  Description of Artificial Sequence: Synthetic oligonucleotide
  Sense strand starting at position 3829 of SEQ ID NO: 1881592
ggaagcuuuccuuggacua

SEQ ID NO: 2056631 - RNA, 19 nt, Artificial Sequence
  Description of Artificial Sequence: Synthetic oligonucleotide
  Antisense strand to SEQ ID NO: 2056630
uaguccaaggaaagcuucc

SEQ ID NO: 2056632 - RNA, 19 nt, Artificial Sequence
  Description of Artificial Sequence: Synthetic oligonucleotide
  Sense strand starting at position 3845 of SEQ ID NO: 1881592
cuaagagcauccuuagcua

SEQ ID NO: 2056633 - RNA, 19 nt, Artificial Sequence
  Description of Artificial Sequence: Synthetic oligonucleotide
  Antisense strand to SEQ ID NO: 2056632
uagcuaaggaugcucuuag

SEQ ID NO: 2056634 - RNA, 19 nt, Artificial Sequence
  Description of Artificial Sequence: Synthetic oligonucleotide
  Sense strand starting at position 3848 of SEQ ID NO: 1881592
agagcauccuuagcuauga

SEQ ID NO: 2056635 - RNA, 19 nt, Artificial Sequence
  Description of Artificial Sequence: Synthetic oligonucleotide
  Antisense strand to SEQ ID NO: 2056634
ucauagcuaaggaugcucu

SEQ ID NO: 2056636 - RNA, 19 nt, Artificial Sequence
  Description of Artificial Sequence: Synthetic oligonucleotide
  Sense strand starting at position 3856 of SEQ ID NO: 1881592
cuuagcuaugaaggcgaau

SEQ ID NO: 2056637 - RNA, 19 nt, Artificial Sequence
  Description of Artificial Sequence: Synthetic oligonucleotide
  Antisense strand to SEQ ID NO: 2056636
auucgccuucauagcuaag

SEQ ID NO: 2056638 - RNA, 19 nt, Artificial Sequence
  Description of Artificial Sequence: Synthetic oligonucleotide
  Sense strand starting at position 211 of SEQ ID NO: 1881593
gggagugggucucccacua

SEQ ID NO: 2056639 - RNA, 19 nt, Artificial Sequence
  Description of Artificial Sequence: Synthetic oligonucleotide
  Antisense strand to SEQ ID NO: 2056638
uagugggagacccacuccc

SEQ ID NO: 2056640 - RNA, 19 nt, Artificial Sequence
  Description of Artificial Sequence: Synthetic oligonucleotide
  Sense strand starting at position 394 of SEQ ID NO: 1881593
acugauguacaaugauauu

SEQ ID NO: 2056641 - RNA, 19 nt, Artificial Sequence
  Description of Artificial Sequence: Synthetic oligonucleotide
  Antisense strand to SEQ ID NO: 2056640
aauaucauuguacaucagu

SEQ ID NO: 2056642 - RNA, 19 nt, Artificial Sequence
  Description of Artificial Sequence: Synthetic oligonucleotide
  Sense strand starting at position 740 of SEQ ID NO: 1881593
ggguuugccacuuauuugu

SEQ ID NO: 2056643 - RNA, 19 nt, Artificial Sequence
  Description of Artificial Sequence: Synthetic oligonucleotide
  Antisense strand to SEQ ID NO: 2056642
acaaauaaguggcaaaccc

SEQ ID NO: 2056644 - RNA, 19 nt, Artificial Sequence
  Description of Artificial Sequence: Synthetic oligonucleotide
  Sense strand starting at position 746 of SEQ ID NO: 1881593
gccacuuauuugucaugua

SEQ ID NO: 2056645 - RNA, 19 nt, Artificial Sequence
  Description of Artificial Sequence: Synthetic oligonucleotide
  Antisense strand to SEQ ID NO: 2056644
uacaugacaaauaaguggc

SEQ ID NO: 2056646 - RNA, 19 nt, Artificial Sequence
  Description of Artificial Sequence: Synthetic oligonucleotide
  Sense strand starting at position 769 of SEQ ID NO: 1881593
caggcaugugccuaaacuu

SEQ ID NO: 2056647 - RNA, 19 nt, Artificial Sequence
  Description of Artificial Sequence: Synthetic oligonucleotide
  Antisense strand to SEQ ID NO: 2056646
aaguuuaggcacaugccug

SEQ ID NO: 2056648 - RNA, 19 nt, Artificial Sequence
  Description of Artificial Sequence: Synthetic oligonucleotide
  Sense strand starting at position 981 of SEQ ID NO: 1881593
auuuguuccucaguuuauu

SEQ ID NO: 2056649 - RNA, 19 nt, Artificial Sequence
  Description of Artificial Sequence: Synthetic oligonucleotide
  Antisense strand to SEQ ID NO: 2056648
aauaaacugaggaacaaau

SEQ ID NO: 2056650 - RNA, 19 nt, Artificial Sequence
  Description of Artificial Sequence: Synthetic oligonucleotide
  Sense strand starting at position 1062 of SEQ ID NO: 1881593
uugcuuagugcucuuguca

SEQ ID NO: 2056651 - RNA, 19 nt, Artificial Sequence
  Description of Artificial Sequence: Synthetic oligonucleotide
  Antisense strand to SEQ ID NO: 2056650
ugacaagagcacuaagcaa

SEQ ID NO: 2056652 - RNA, 19 nt, Artificial Sequence
  Description of Artificial Sequence: Synthetic oligonucleotide
  Sense strand starting at position 1063 of SEQ ID NO: 1881593
ugcuuagugcucuugucag

SEQ ID NO: 2056653 - RNA, 19 nt, Artificial Sequence
  Description of Artificial Sequence: Synthetic oligonucleotide
  Antisense strand to SEQ ID NO: 2056652
cugacaagagcacuaagca

SEQ ID NO: 2056654 - RNA, 19 nt, Artificial Sequence
  Description of Artificial Sequence: Synthetic oligonucleotide
  Sense strand starting at position 1119 of SEQ ID NO: 1881593
auacacuaccuaggaguua

SEQ ID NO: 2056655 - RNA, 19 nt, Artificial Sequence
  Description of Artificial Sequence: Synthetic oligonucleotide
  Antisense strand to SEQ ID NO: 2056654
uaacuccuagguaguguau

SEQ ID NO: 2056656 - RNA, 19 nt, Artificial Sequence
  Description of Artificial Sequence: Synthetic oligonucleotide
  Sense strand starting at position 1302 of SEQ ID NO: 1881593
accuguuauuugcucaaug

SEQ ID NO: 2056657 - RNA, 19 nt, Artificial Sequence
  Description of Artificial Sequence: Synthetic oligonucleotide
  Antisense strand to SEQ ID NO: 2056656
cauugagcaaauaacaggu

SEQ ID NO: 2056658 - RNA, 19 nt, Artificial Sequence
  Description of Artificial Sequence: Synthetic oligonucleotide
  Sense strand starting at position 1303 of SEQ ID NO: 1881593
ccuguuauuugcucaauga

SEQ ID NO: 2056659 - RNA, 19 nt, Artificial Sequence
  Description of Artificial Sequence: Synthetic oligonucleotide
  Antisense strand to SEQ ID NO: 2056658
ucauugagcaaauaacagg

SEQ ID NO: 2056660 - RNA, 19 nt, Artificial Sequence
  Description of Artificial Sequence: Synthetic oligonucleotide
  Sense strand starting at position 1628 of SEQ ID NO: 1881593
uguugcaugcuuguucuua

SEQ ID NO: 2056661 - RNA, 19 nt, Artificial Sequence
  Description of Artificial Sequence: Synthetic oligonucleotide
  Antisense strand to SEQ ID NO: 2056660
uaagaacaagcaugcaaca

SEQ ID NO: 2056662 - RNA, 19 nt, Artificial Sequence
  Description of Artificial Sequence: Synthetic oligonucleotide
  Sense strand starting at position 1751 of SEQ ID NO: 1881593
uuaagaaaugcuuacgaau

SEQ ID NO: 2056663 - RNA, 19 nt, Artificial Sequence
  Description of Artificial Sequence: Synthetic oligonucleotide
  Antisense strand to SEQ ID NO: 2056662
auucguaagcauuucuuaa

SEQ ID NO: 2056664 - RNA, 19 nt, Artificial Sequence
  Description of Artificial Sequence: Synthetic oligonucleotide
  Sense strand starting at position 1762 of SEQ ID NO: 1881593
uuacgaaugucauuugugu

SEQ ID NO: 2056665 - RNA, 19 nt, Artificial Sequence
  Description of Artificial Sequence: Synthetic oligonucleotide
  Antisense strand to SEQ ID NO: 2056664
acacaaaugacauucguaa

SEQ ID NO: 2056666 - RNA, 19 nt, Artificial Sequence
  Description of Artificial Sequence: Synthetic oligonucleotide
  Sense strand starting at position 1806 of SEQ ID NO: 1881593
guagaauucucacuuugaa

SEQ ID NO: 2056667 - RNA, 19 nt, Artificial Sequence
  Description of Artificial Sequence: Synthetic oligonucleotide
  Antisense strand to SEQ ID NO: 2056666
uucaaagugagaauucuac

SEQ ID NO: 2056668 - RNA, 19 nt, Artificial Sequence
  Description of Artificial Sequence: Synthetic oligonucleotide
  Sense strand starting at position 1985 of SEQ ID NO: 1881593
uacagcuuaggcuaagaga

SEQ ID NO: 2056669 - RNA, 19 nt, Artificial Sequence
  Description of Artificial Sequence: Synthetic oligonucleotide
  Antisense strand to SEQ ID NO: 2056668
ucucuuagccuaagcugua

SEQ ID NO: 2056670 - RNA, 19 nt, Artificial Sequence
  Description of Artificial Sequence: Synthetic oligonucleotide
  Sense strand starting at position 2001 of SEQ ID NO: 1881593
agauauccucaagguuaug

SEQ ID NO: 2056671 - RNA, 19 nt, Artificial Sequence
  Description of Artificial Sequence: Synthetic oligonucleotide
  Antisense strand to SEQ ID NO: 2056670
cauaaccuugaggauaucu

SEQ ID NO: 2056672 - RNA, 19 nt, Artificial Sequence
  Description of Artificial Sequence: Synthetic oligonucleotide
  Sense strand starting at position 2011 of SEQ ID NO: 1881593
aagguuauguuaucagcaa

SEQ ID NO: 2056673 - RNA, 19 nt, Artificial Sequence
  Description of Artificial Sequence: Synthetic oligonucleotide
  Antisense strand to SEQ ID NO: 2056672
uugcugauaacauaaccuu

SEQ ID NO: 2056674 - RNA, 19 nt, Artificial Sequence
  Description of Artificial Sequence: Synthetic oligonucleotide
  Sense strand starting at position 2213 of SEQ ID NO: 1881593
aaucuuagggcguacaaua

SEQ ID NO: 2056675 - RNA, 19 nt, Artificial Sequence
  Description of Artificial Sequence: Synthetic oligonucleotide
  Antisense strand to SEQ ID NO: 2056674
uauuguacgcccuaagauu

SEQ ID NO: 2056676 - RNA, 19 nt, Artificial Sequence
  Description of Artificial Sequence: Synthetic oligonucleotide
  Sense strand starting at position 2360 of SEQ ID NO: 1881593
gcaguuuauguucagagga

SEQ ID NO: 2056677 - RNA, 19 nt, Artificial Sequence
  Description of Artificial Sequence: Synthetic oligonucleotide
  Antisense strand to SEQ ID NO: 2056676
uccucugaacauaaacugc

SEQ ID NO: 2056678 - RNA, 19 nt, Artificial Sequence
  Description of Artificial Sequence: Synthetic oligonucleotide
  Sense strand starting at position 2559 of SEQ ID NO: 1881593
aggacauuauuguuugaug

SEQ ID NO: 2056679 - RNA, 19 nt, Artificial Sequence
  Description of Artificial Sequence: Synthetic oligonucleotide
  Antisense strand to SEQ ID NO: 2056678
caucaaacaauaauguccu

SEQ ID NO: 2056680 - RNA, 19 nt, Artificial Sequence
  Description of Artificial Sequence: Synthetic oligonucleotide
  Sense strand starting at position 2570 of SEQ ID NO: 1881593
guuugauggguauaggcaa

SEQ ID NO: 2056681 - RNA, 19 nt, Artificial Sequence
  Description of Artificial Sequence: Synthetic oligonucleotide
  Antisense strand to SEQ ID NO: 2056680
uugccuauacccaucaaac

SEQ ID NO: 2056682 - RNA, 19 nt, Artificial Sequence
  Description of Artificial Sequence: Synthetic oligonucleotide
  Sense strand starting at position 2577 of SEQ ID NO: 1881593
ggguauaggcaauauauuc

SEQ ID NO: 2056683 - RNA, 19 nt, Artificial Sequence
  Description of Artificial Sequence: Synthetic oligonucleotide
  Antisense strand to SEQ ID NO: 2056682
gaauauauugccuauaccc

SEQ ID NO: 2056684 - RNA, 19 nt, Artificial Sequence
  Description of Artificial Sequence: Synthetic oligonucleotide
  Sense strand starting at position 2650 of SEQ ID NO: 1881593
cucgguaaacucugaauug

SEQ ID NO: 2056685 - RNA, 19 nt, Artificial Sequence
  Description of Artificial Sequence: Synthetic oligonucleotide
  Antisense strand to SEQ ID NO: 2056684
caauucagaguuuaccgag

SEQ ID NO: 2056686 - RNA, 19 nt, Artificial Sequence
  Description of Artificial Sequence: Synthetic oligonucleotide
  Sense strand starting at position 2664 of SEQ ID NO: 1881593
aauuguagcugacugguaa

SEQ ID NO: 2056687 - RNA, 19 nt, Artificial Sequence
  Description of Artificial Sequence: Synthetic oligonucleotide
  Antisense strand to SEQ ID NO: 2056686
uuaccagucagcuacaauu

SEQ ID NO: 2056688 - RNA, 19 nt, Artificial Sequence
  Description of Artificial Sequence: Synthetic oligonucleotide
  Sense strand starting at position 2870 of SEQ ID NO: 1881593
cacguuucucauugaaagg

SEQ ID NO: 2056689 - RNA, 19 nt, Artificial Sequence
  Description of Artificial Sequence: Synthetic oligonucleotide
  Antisense strand to SEQ ID NO: 2056688
ccuuucaaugagaaacgug

SEQ ID NO: 2056690 - RNA, 19 nt, Artificial Sequence
  Description of Artificial Sequence: Synthetic oligonucleotide
  Sense strand starting at position 2871 of SEQ ID NO: 1881593
acguuucucauugaaaggu

SEQ ID NO: 2056691 - RNA, 19 nt, Artificial Sequence
  Description of Artificial Sequence: Synthetic oligonucleotide
  Antisense strand to SEQ ID NO: 2056690
accuuucaaugagaaacgu

SEQ ID NO: 2056692 - RNA, 19 nt, Artificial Sequence
  Description of Artificial Sequence: Synthetic oligonucleotide
  Sense strand starting at position 2875 of SEQ ID NO: 1881593
uucucauugaaagguggua

SEQ ID NO: 2056693 - RNA, 19 nt, Artificial Sequence
  Description of Artificial Sequence: Synthetic oligonucleotide
  Antisense strand to SEQ ID NO: 2056692
uaccaccuuucaaugagaa

SEQ ID NO: 2056694 - RNA, 19 nt, Artificial Sequence
  Description of Artificial Sequence: Synthetic oligonucleotide
  Sense strand starting at position 2962 of SEQ ID NO: 1881593
gggagaaucuuguccauug

SEQ ID NO: 2056695 - RNA, 19 nt, Artificial Sequence
  Description of Artificial Sequence: Synthetic oligonucleotide
  Antisense strand to SEQ ID NO: 2056694
caauggacaagauucuccc

SEQ ID NO: 2056696 - RNA, 19 nt, Artificial Sequence
  Description of Artificial Sequence: Synthetic oligonucleotide
  Sense strand starting at position 2964 of SEQ ID NO: 1881593
gagaaucuuguccauugca

SEQ ID NO: 2056697 - RNA, 19 nt, Artificial Sequence
  Description of Artificial Sequence: Synthetic oligonucleotide
  Antisense strand to SEQ ID NO: 2056696
ugcaauggacaagauucuc

SEQ ID NO: 2056698 - RNA, 19 nt, Artificial Sequence
  Description of Artificial Sequence: Synthetic oligonucleotide
  Sense strand starting at position 3055 of SEQ ID NO: 1881593
uuuauuucucuguaugcuu

SEQ ID NO: 2056699 - RNA, 19 nt, Artificial Sequence
  Description of Artificial Sequence: Synthetic oligonucleotide
  Antisense strand to SEQ ID NO: 2056698
aagcauacagagaaauaaa

SEQ ID NO: 2056700 - RNA, 19 nt, Artificial Sequence
  Description of Artificial Sequence: Synthetic oligonucleotide
  Sense strand starting at position 3195 of SEQ ID NO: 1881593
uaggauagaugacauaaga

SEQ ID NO: 2056701 - RNA, 19 nt, Artificial Sequence
  Description of Artificial Sequence: Synthetic oligonucleotide
  Antisense strand to SEQ ID NO: 2056700
ucuuaugucaucuauccua

SEQ ID NO: 2056702 - RNA, 19 nt, Artificial Sequence
  Description of Artificial Sequence: Synthetic oligonucleotide
  Sense strand starting at position 3408 of SEQ ID NO: 1881593
ccuguauaguuauuggauu

SEQ ID NO: 2056703 - RNA, 19 nt, Artificial Sequence
  Description of Artificial Sequence: Synthetic oligonucleotide
  Antisense strand to SEQ ID NO: 2056702
aauccaauaacuauacagg

SEQ ID NO: 2056704 - RNA, 19 nt, Artificial Sequence
  Description of Artificial Sequence: Synthetic oligonucleotide
  Sense strand starting at position 3420 of SEQ ID NO: 1881593
uuggauuuauuagaaacuc

SEQ ID NO: 2056705 - RNA, 19 nt, Artificial Sequence
  Description of Artificial Sequence: Synthetic oligonucleotide
  Antisense strand to SEQ ID NO: 2056704
gaguuucuaauaaauccaa

SEQ ID NO: 2056706 - RNA, 19 nt, Artificial Sequence
  Description of Artificial Sequence: Synthetic oligonucleotide
  Sense strand starting at position 3496 of SEQ ID NO: 1881593
acaacugucuaugugauua

SEQ ID NO: 2056707 - RNA, 19 nt, Artificial Sequence
  Description of Artificial Sequence: Synthetic oligonucleotide
  Antisense strand to SEQ ID NO: 2056706
uaaucacauagacaguugu

SEQ ID NO: 2056708 - RNA, 19 nt, Artificial Sequence
  Description of Artificial Sequence: Synthetic oligonucleotide
  Sense strand starting at position 3500 of SEQ ID NO: 1881593
cugucuaugugauuaauua

SEQ ID NO: 2056709 - RNA, 19 nt, Artificial Sequence
  Description of Artificial Sequence: Synthetic oligonucleotide
  Antisense strand to SEQ ID NO: 2056708
uaauuaaucacauagacag

SEQ ID NO: 2056710 - RNA, 19 nt, Artificial Sequence
  Description of Artificial Sequence: Synthetic oligonucleotide
  Sense strand starting at position 3579 of SEQ ID NO: 1881593
gaguucuuacauuaagugu

SEQ ID NO: 2056711 - RNA, 19 nt, Artificial Sequence
  Description of Artificial Sequence: Synthetic oligonucleotide
  Antisense strand to SEQ ID NO: 2056710
acacuuaauguaagaacuc

SEQ ID NO: 2056712 - RNA, 19 nt, Artificial Sequence
  Description of Artificial Sequence: Synthetic oligonucleotide
  Sense strand starting at position 3586 of SEQ ID NO: 1881593
uacauuaaguguguuauag

SEQ ID NO: 2056713 - RNA, 19 nt, Artificial Sequence
  Description of Artificial Sequence: Synthetic oligonucleotide
  Antisense strand to SEQ ID NO: 2056712
cuauaacacacuuaaugua

SEQ ID NO: 2056714 - RNA, 19 nt, Artificial Sequence
  Description of Artificial Sequence: Synthetic oligonucleotide
  Sense strand starting at position 3619 of SEQ ID NO: 1881593
uucgcuagaguccaaugaa

SEQ ID NO: 2056715 - RNA, 19 nt, Artificial Sequence
  Description of Artificial Sequence: Synthetic oligonucleotide
  Antisense strand to SEQ ID NO: 2056714
uucauuggacucuagcgaa

SEQ ID NO: 2056716 - RNA, 19 nt, Artificial Sequence
  Description of Artificial Sequence: Synthetic oligonucleotide
  Sense strand starting at position 3626 of SEQ ID NO: 1881593
gaguccaaugaauguuaua

SEQ ID NO: 2056717 - RNA, 19 nt, Artificial Sequence
  Description of Artificial Sequence: Synthetic oligonucleotide
  Antisense strand to SEQ ID NO: 2056716
uauaacauucauuggacuc

SEQ ID NO: 2056718 - RNA, 19 nt, Artificial Sequence
  Description of Artificial Sequence: Synthetic oligonucleotide
  Sense strand starting at position 20 of SEQ ID NO: 1881594
uugagauucuggguuauua

SEQ ID NO: 2056719 - RNA, 19 nt, Artificial Sequence
  Description of Artificial Sequence: Synthetic oligonucleotide
  Antisense strand to SEQ ID NO: 2056718
uaauaacccagaaucucaa

SEQ ID NO: 2056720 - RNA, 19 nt, Artificial Sequence
  Description of Artificial Sequence: Synthetic oligonucleotide
  Sense strand starting at position 24 of SEQ ID NO: 1881594
gauucuggguuauuacaau

SEQ ID NO: 2056721 - RNA, 19 nt, Artificial Sequence
  Description of Artificial Sequence: Synthetic oligonucleotide
  Antisense strand to SEQ ID NO: 2056720
auuguaauaacccagaauc

SEQ ID NO: 2056722 - RNA, 19 nt, Artificial Sequence
  Description of Artificial Sequence: Synthetic oligonucleotide
  Sense strand starting at position 111 of SEQ ID NO: 1881594
caugaagucugugauuuaa

SEQ ID NO: 2056723 - RNA, 19 nt, Artificial Sequence
  Description of Artificial Sequence: Synthetic oligonucleotide
  Antisense strand to SEQ ID NO: 2056722
uuaaaucacagacuucaug

SEQ ID NO: 2056724 - RNA, 19 nt, Artificial Sequence
  Description of Artificial Sequence: Synthetic oligonucleotide
  Sense strand starting at position 221 of SEQ ID NO: 1881594
cuucuugaguucucuccuu

SEQ ID NO: 2056725 - RNA, 19 nt, Artificial Sequence
  Description of Artificial Sequence: Synthetic oligonucleotide
  Antisense strand to SEQ ID NO: 2056724
aaggagagaacucaagaag

SEQ ID NO: 2056726 - RNA, 19 nt, Artificial Sequence
  Description of Artificial Sequence: Synthetic oligonucleotide
  Sense strand starting at position 270 of SEQ ID NO: 1881594
caacguucucauugugaau

SEQ ID NO: 2056727 - RNA, 19 nt, Artificial Sequence
  Description of Artificial Sequence: Synthetic oligonucleotide
  Antisense strand to SEQ ID NO: 2056726
auucacaaugagaacguug

SEQ ID NO: 2056728 - RNA, 19 nt, Artificial Sequence
  Description of Artificial Sequence: Synthetic oligonucleotide
  Sense strand starting at position 276 of SEQ ID NO: 1881594
ucucauugugaauaagugu

SEQ ID NO: 2056729 - RNA, 19 nt, Artificial Sequence
  Description of Artificial Sequence: Synthetic oligonucleotide
  Antisense strand to SEQ ID NO: 2056728
acacuuauucacaaugaga

SEQ ID NO: 2056730 - RNA, 19 nt, Artificial Sequence
  Description of Artificial Sequence: Synthetic oligonucleotide
  Sense strand starting at position 283 of SEQ ID NO: 1881594
gugaauaaguguuccaguu

SEQ ID NO: 2056731 - RNA, 19 nt, Artificial Sequence
  Description of Artificial Sequence: Synthetic oligonucleotide
  Antisense strand to SEQ ID NO: 2056730
aacuggaacacuuauucac

SEQ ID NO: 2056732 - RNA, 19 nt, Artificial Sequence
  Description of Artificial Sequence: Synthetic oligonucleotide
  Sense strand starting at position 373 of SEQ ID NO: 1881594
ccaacaauguaucuucgau

SEQ ID NO: 2056733 - RNA, 19 nt, Artificial Sequence
  Description of Artificial Sequence: Synthetic oligonucleotide
  Antisense strand to SEQ ID NO: 2056732
aucgaagauacauuguugg

SEQ ID NO: 2056734 - RNA, 19 nt, Artificial Sequence
  Description of Artificial Sequence: Synthetic oligonucleotide
  Sense strand starting at position 379 of SEQ ID NO: 1881594
auguaucuucgaugcaaag

SEQ ID NO: 2056735 - RNA, 19 nt, Artificial Sequence
  Description of Artificial Sequence: Synthetic oligonucleotide
  Antisense strand to SEQ ID NO: 2056734
cuuugcaucgaagauacau

SEQ ID NO: 2056736 - RNA, 19 nt, Artificial Sequence
  Description of Artificial Sequence: Synthetic oligonucleotide
  Sense strand starting at position 400 of SEQ ID NO: 1881594
acacuuugucaugagguua

SEQ ID NO: 2056737 - RNA, 19 nt, Artificial Sequence
  Description of Artificial Sequence: Synthetic oligonucleotide
  Antisense strand to SEQ ID NO: 2056736
uaaccucaugacaaagugu

SEQ ID NO: 2056738 - RNA, 19 nt, Artificial Sequence
  Description of Artificial Sequence: Synthetic oligonucleotide
  Sense strand starting at position 412 of SEQ ID NO: 1881594
gagguuauuucgcuucucu

SEQ ID NO: 2056739 - RNA, 19 nt, Artificial Sequence
  Description of Artificial Sequence: Synthetic oligonucleotide
  Antisense strand to SEQ ID NO: 2056738
agagaagcgaaauaaccuc

SEQ ID NO: 2056740 - RNA, 19 nt, Artificial Sequence
  Description of Artificial Sequence: Synthetic oligonucleotide
  Sense strand starting at position 1146 of SEQ ID NO: 1881594
gcuagaaacagcugugguu

SEQ ID NO: 2056741 - RNA, 19 nt, Artificial Sequence
  Description of Artificial Sequence: Synthetic oligonucleotide
  Antisense strand to SEQ ID NO: 2056740
aaccacagcuguuucuagc

SEQ ID NO: 2056742 - RNA, 19 nt, Artificial Sequence
  Description of Artificial Sequence: Synthetic oligonucleotide
  Sense strand starting at position 1148 of SEQ ID NO: 1881594
uagaaacagcugugguuua

SEQ ID NO: 2056743 - RNA, 19 nt, Artificial Sequence
  Description of Artificial Sequence: Synthetic oligonucleotide
  Antisense strand to SEQ ID NO: 2056742
uaaaccacagcuguuucua

SEQ ID NO: 2056744 - RNA, 19 nt, Artificial Sequence
  Description of Artificial Sequence: Synthetic oligonucleotide
  Sense strand starting at position 2288 of SEQ ID NO: 1881594
agcagagccguuuauuuac

SEQ ID NO: 2056745 - RNA, 19 nt, Artificial Sequence
  Description of Artificial Sequence: Synthetic oligonucleotide
  Antisense strand to SEQ ID NO: 2056744
guaaauaaacggcucugcu

SEQ ID NO: 2056746 - RNA, 19 nt, Artificial Sequence
  Description of Artificial Sequence: Synthetic oligonucleotide
  Sense strand starting at position 2294 of SEQ ID NO: 1881594
gccguuuauuuacucaguu

SEQ ID NO: 2056747 - RNA, 19 nt, Artificial Sequence
  Description of Artificial Sequence: Synthetic oligonucleotide
  Antisense strand to SEQ ID NO: 2056746
aacugaguaaauaaacggc

SEQ ID NO: 2056748 - RNA, 19 nt, Artificial Sequence
  Description of Artificial Sequence: Synthetic oligonucleotide
  Sense strand starting at position 2378 of SEQ ID NO: 1881594
ccggcauuugugugucuuu

SEQ ID NO: 2056749 - RNA, 19 nt, Artificial Sequence
  Description of Artificial Sequence: Synthetic oligonucleotide
  Antisense strand to SEQ ID NO: 2056748
aaagacacacaaaugccgg

SEQ ID NO: 2056750 - RNA, 19 nt, Artificial Sequence
  Description of Artificial Sequence: Synthetic oligonucleotide
  Sense strand starting at position 2428 of SEQ ID NO: 1881594
gcaacuuugucccucaaug

SEQ ID NO: 2056751 - RNA, 19 nt, Artificial Sequence
  Description of Artificial Sequence: Synthetic oligonucleotide
  Antisense strand to SEQ ID NO: 2056750
cauugagggacaaaguugc

SEQ ID NO: 2056752 - RNA, 19 nt, Artificial Sequence
  Description of Artificial Sequence: Synthetic oligonucleotide
  Sense strand starting at position 2508 of SEQ ID NO: 1881594
uccucaauagagugaguca

SEQ ID NO: 2056753 - RNA, 19 nt, Artificial Sequence
  Description of Artificial Sequence: Synthetic oligonucleotide
  Antisense strand to SEQ ID NO: 2056752
ugacucacucuauugagga

SEQ ID NO: 2056754 - RNA, 19 nt, Artificial Sequence
  Description of Artificial Sequence: Synthetic oligonucleotide
  Sense strand starting at position 2537 of SEQ ID NO: 1881594
ggcacaguuuaucucucau

SEQ ID NO: 2056755 - RNA, 19 nt, Artificial Sequence
  Description of Artificial Sequence: Synthetic oligonucleotide
  Antisense strand to SEQ ID NO: 2056754
augagagauaaacugugcc

SEQ ID NO: 2056756 - RNA, 19 nt, Artificial Sequence
  Description of Artificial Sequence: Synthetic oligonucleotide
  Sense strand starting at position 2597 of SEQ ID NO: 1881594
gagcuagaguaauagaaug

SEQ ID NO: 2056757 - RNA, 19 nt, Artificial Sequence
  Description of Artificial Sequence: Synthetic oligonucleotide
  Antisense strand to SEQ ID NO: 2056756
cauucuauuacucuagcuc

SEQ ID NO: 2056758 - RNA, 19 nt, Artificial Sequence
  Description of Artificial Sequence: Synthetic oligonucleotide
  Sense strand starting at position 2619 of SEQ ID NO: 1881594
augacaggucagugucagu

SEQ ID NO: 2056759 - RNA, 19 nt, Artificial Sequence
  Description of Artificial Sequence: Synthetic oligonucleotide
  Antisense strand to SEQ ID NO: 2056758
acugacacugaccugucau

SEQ ID NO: 2056760 - RNA, 19 nt, Artificial Sequence
  Description of Artificial Sequence: Synthetic oligonucleotide
  Sense strand starting at position 2668 of SEQ ID NO: 1881594
cagucuuuguaacuaggau

SEQ ID NO: 2056761 - RNA, 19 nt, Artificial Sequence
  Description of Artificial Sequence: Synthetic oligonucleotide
  Antisense strand to SEQ ID NO: 2056760
auccuaguuacaaagacug

SEQ ID NO: 2056762 - RNA, 19 nt, Artificial Sequence
  Description of Artificial Sequence: Synthetic oligonucleotide
  Sense strand starting at position 2737 of SEQ ID NO: 1881594
uuguaaugucuccauggca

SEQ ID NO: 2056763 - RNA, 19 nt, Artificial Sequence
  Description of Artificial Sequence: Synthetic oligonucleotide
  Antisense strand to SEQ ID NO: 2056762
ugccauggagacauuacaa

SEQ ID NO: 2056764 - RNA, 19 nt, Artificial Sequence
  Description of Artificial Sequence: Synthetic oligonucleotide
  Sense strand starting at position 2793 of SEQ ID NO: 1881594
acucgacaucuuugagcca

SEQ ID NO: 2056765 - RNA, 19 nt, Artificial Sequence
  Description of Artificial Sequence: Synthetic oligonucleotide
  Antisense strand to SEQ ID NO: 2056764
uggcucaaagaugucgagu

SEQ ID NO: 2056766 - RNA, 19 nt, Artificial Sequence
  Description of Artificial Sequence: Synthetic oligonucleotide
  Sense strand starting at position 2796 of SEQ ID NO: 1881594
cgacaucuuugagccaauc

SEQ ID NO: 2056767 - RNA, 19 nt, Artificial Sequence
  Description of Artificial Sequence: Synthetic oligonucleotide
  Antisense strand to SEQ ID NO: 2056766
gauuggcucaaagaugucg

SEQ ID NO: 2056768 - RNA, 19 nt, Artificial Sequence
  Description of Artificial Sequence: Synthetic oligonucleotide
  Sense strand starting at position 2834 of SEQ ID NO: 1881594
gagacugguuaacucagua

SEQ ID NO: 2056769 - RNA, 19 nt, Artificial Sequence
  Description of Artificial Sequence: Synthetic oligonucleotide
  Antisense strand to SEQ ID NO: 2056768
uacugaguuaaccagucuc

SEQ ID NO: 2056770 - RNA, 19 nt, Artificial Sequence
  Description of Artificial Sequence: Synthetic oligonucleotide
  Sense strand starting at position 2839 of SEQ ID NO: 1881594
ugguuaacucaguaaaggu

SEQ ID NO: 2056771 - RNA, 19 nt, Artificial Sequence
  Description of Artificial Sequence: Synthetic oligonucleotide
  Antisense strand to SEQ ID NO: 2056770
accuuuacugaguuaacca

SEQ ID NO: 2056772 - RNA, 19 nt, Artificial Sequence
  Description of Artificial Sequence: Synthetic oligonucleotide
  Sense strand starting at position 3075 of SEQ ID NO: 1881594
cgcuuuaggaaauguaaac

SEQ ID NO: 2056773 - RNA, 19 nt, Artificial Sequence
  Description of Artificial Sequence: Synthetic oligonucleotide
  Antisense strand to SEQ ID NO: 2056772
guuuacauuuccuaaagcg

SEQ ID NO: 2056774 - RNA, 19 nt, Artificial Sequence
  Description of Artificial Sequence: Synthetic oligonucleotide
  Sense strand starting at position 3084 of SEQ ID NO: 1881594
aaauguaaacaucgugugu

SEQ ID NO: 2056775 - RNA, 19 nt, Artificial Sequence
  Description of Artificial Sequence: Synthetic oligonucleotide
  Antisense strand to SEQ ID NO: 2056774
acacacgauguuuacauuu

SEQ ID NO: 2056776 - RNA, 19 nt, Artificial Sequence
  Description of Artificial Sequence: Synthetic oligonucleotide
  Sense strand starting at position 3112 of SEQ ID NO: 1881594
ugauaaacgugguuccauc

SEQ ID NO: 2056777 - RNA, 19 nt, Artificial Sequence
  Description of Artificial Sequence: Synthetic oligonucleotide
  Antisense strand to SEQ ID NO: 2056776
gauggaaccacguuuauca

SEQ ID NO: 2056778 - RNA, 19 nt, Artificial Sequence
  Description of Artificial Sequence: Synthetic oligonucleotide
  Sense strand starting at position 3254 of SEQ ID NO: 1881594
uggacauggugggaagaau

SEQ ID NO: 2056779 - RNA, 19 nt, Artificial Sequence
  Description of Artificial Sequence: Synthetic oligonucleotide
  Antisense strand to SEQ ID NO: 2056778
auucuucccaccaugucca

SEQ ID NO: 2056780 - RNA, 19 nt, Artificial Sequence
  Description of Artificial Sequence: Synthetic oligonucleotide
  Sense strand starting at position 3263 of SEQ ID NO: 1881594
ugggaagaauaggaaauaa

SEQ ID NO: 2056781 - RNA, 19 nt, Artificial Sequence
  Description of Artificial Sequence: Synthetic oligonucleotide
  Antisense strand to SEQ ID NO: 2056780
uuauuuccuauucuuccca

SEQ ID NO: 2056782 - RNA, 19 nt, Artificial Sequence
  Description of Artificial Sequence: Synthetic oligonucleotide
  Sense strand starting at position 3361 of SEQ ID NO: 1881594
uugaaaucagcacgcagua

SEQ ID NO: 2056783 - RNA, 19 nt, Artificial Sequence
  Description of Artificial Sequence: Synthetic oligonucleotide
  Antisense strand to SEQ ID NO: 2056782
uacugcgugcugauuucaa

SEQ ID NO: 2056784 - RNA, 19 nt, Artificial Sequence
  Description of Artificial Sequence: Synthetic oligonucleotide
  Sense strand starting at position 3391 of SEQ ID NO: 1881594
caguuuguguacuuguuga

SEQ ID NO: 2056785 - RNA, 19 nt, Artificial Sequence
  Description of Artificial Sequence: Synthetic oligonucleotide
  Antisense strand to SEQ ID NO: 2056784
ucaacaaguacacaaacug

SEQ ID NO: 2056786 - RNA, 19 nt, Artificial Sequence
  Description of Artificial Sequence: Synthetic oligonucleotide
  Sense strand starting at position 3401 of SEQ ID NO: 1881594
acuuguugacuuuaguuaa

SEQ ID NO: 2056787 - RNA, 19 nt, Artificial Sequence
  Description of Artificial Sequence: Synthetic oligonucleotide
  Antisense strand to SEQ ID NO: 2056786
uuaacuaaagucaacaagu

SEQ ID NO: 2056788 - RNA, 19 nt, Artificial Sequence
  Description of Artificial Sequence: Synthetic oligonucleotide
  Sense strand starting at position 3459 of SEQ ID NO: 1881594
gugggcuuaaguuauggua

SEQ ID NO: 2056789 - RNA, 19 nt, Artificial Sequence
  Description of Artificial Sequence: Synthetic oligonucleotide
  Antisense strand to SEQ ID NO: 2056788
uaccauaacuuaagcccac

SEQ ID NO: 2056790 - RNA, 19 nt, Artificial Sequence
  Description of Artificial Sequence: Synthetic oligonucleotide
  Sense strand starting at position 3466 of SEQ ID NO: 1881594
uaaguuaugguagaggcau

SEQ ID NO: 2056791 - RNA, 19 nt, Artificial Sequence
  Description of Artificial Sequence: Synthetic oligonucleotide
  Antisense strand to SEQ ID NO: 2056790
augccucuaccauaacuua

SEQ ID NO: 2056792 - RNA, 19 nt, Artificial Sequence
  Description of Artificial Sequence: Synthetic oligonucleotide
  Sense strand starting at position 3505 of SEQ ID NO: 1881594
auauuaaaguaggcauagu

SEQ ID NO: 2056793 - RNA, 19 nt, Artificial Sequence
  Description of Artificial Sequence: Synthetic oligonucleotide
  Antisense strand to SEQ ID NO: 2056792
acuaugccuacuuuaauau

SEQ ID NO: 2056794 - RNA, 19 nt, Artificial Sequence
  Description of Artificial Sequence: Synthetic oligonucleotide
  Sense strand starting at position 3514 of SEQ ID NO: 1881594
uaggcauaguaucuuguau

SEQ ID NO: 2056795 - RNA, 19 nt, Artificial Sequence
  Description of Artificial Sequence: Synthetic oligonucleotide
  Antisense strand to SEQ ID NO: 2056794
auacaagauacuaugccua

SEQ ID NO: 2056796 - RNA, 19 nt, Artificial Sequence
  Description of Artificial Sequence: Synthetic oligonucleotide
  Sense strand starting at position 3526 of SEQ ID NO: 1881594
cuuguauguacacaguaga

SEQ ID NO: 2056797 - RNA, 19 nt, Artificial Sequence
  Description of Artificial Sequence: Synthetic oligonucleotide
  Antisense strand to SEQ ID NO: 2056796
ucuacuguguacauacaag

SEQ ID NO: 2056798 - RNA, 19 nt, Artificial Sequence
  Description of Artificial Sequence: Synthetic oligonucleotide
  Sense strand starting at position 5 of SEQ ID NO: 1881595
ugcuuuaugguagauaaua

SEQ ID NO: 2056799 - RNA, 19 nt, Artificial Sequence
  Description of Artificial Sequence: Synthetic oligonucleotide
  Antisense strand to SEQ ID NO: 2056798
uauuaucuaccauaaagca

SEQ ID NO: 2056800 - RNA, 19 nt, Artificial Sequence
  Description of Artificial Sequence: Synthetic oligonucleotide
  Sense strand starting at position 84 of SEQ ID NO: 1881595
auuucuaguugcugagaac

SEQ ID NO: 2056801 - RNA, 19 nt, Artificial Sequence
  Description of Artificial Sequence: Synthetic oligonucleotide
  Antisense strand to SEQ ID NO: 2056800
guucucagcaacuagaaau

SEQ ID NO: 2056802 - RNA, 19 nt, Artificial Sequence
  Description of Artificial Sequence: Synthetic oligonucleotide
  Sense strand starting at position 164 of SEQ ID NO: 1881595
ccaguuaagugaccacuca

SEQ ID NO: 2056803 - RNA, 19 nt, Artificial Sequence
  Description of Artificial Sequence: Synthetic oligonucleotide
  Antisense strand to SEQ ID NO: 2056802
ugaguggucacuuaacugg

SEQ ID NO: 2056804 - RNA, 19 nt, Artificial Sequence
  Description of Artificial Sequence: Synthetic oligonucleotide
  Sense strand starting at position 210 of SEQ ID NO: 1881595
aggucaagaguuggguuua

SEQ ID NO: 2056805 - RNA, 19 nt, Artificial Sequence
  Description of Artificial Sequence: Synthetic oligonucleotide
  Antisense strand to SEQ ID NO: 2056804
uaaacccaacucuugaccu

SEQ ID NO: 2056806 - RNA, 19 nt, Artificial Sequence
  Description of Artificial Sequence: Synthetic oligonucleotide
  Sense strand starting at position 257 of SEQ ID NO: 1881595
gcaagaauaagccguagau

SEQ ID NO: 2056807 - RNA, 19 nt, Artificial Sequence
  Description of Artificial Sequence: Synthetic oligonucleotide
  Antisense strand to SEQ ID NO: 2056806
aucuacggcuuauucuugc

SEQ ID NO: 2056808 - RNA, 19 nt, Artificial Sequence
  Description of Artificial Sequence: Synthetic oligonucleotide
  Sense strand starting at position 259 of SEQ ID NO: 1881595
aagaauaagccguagauua

SEQ ID NO: 2056809 - RNA, 19 nt, Artificial Sequence
  Description of Artificial Sequence: Synthetic oligonucleotide
  Antisense strand to SEQ ID NO: 2056808
uaaucuacggcuuauucuu

SEQ ID NO: 2056810 - RNA, 19 nt, Artificial Sequence
  Description of Artificial Sequence: Synthetic oligonucleotide
  Sense strand starting at position 261 of SEQ ID NO: 1881595
gaauaagccguagauuaau

SEQ ID NO: 2056811 - RNA, 19 nt, Artificial Sequence
  Description of Artificial Sequence: Synthetic oligonucleotide
  Antisense strand to SEQ ID NO: 2056810
auuaaucuacggcuuauuc

SEQ ID NO: 2056812 - RNA, 19 nt, Artificial Sequence
  Description of Artificial Sequence: Synthetic oligonucleotide
  Sense strand starting at position 267 of SEQ ID NO: 1881595
gccguagauuaaucucuua

SEQ ID NO: 2056813 - RNA, 19 nt, Artificial Sequence
  Description of Artificial Sequence: Synthetic oligonucleotide
  Antisense strand to SEQ ID NO: 2056812
uaagagauuaaucuacggc

SEQ ID NO: 2056814 - RNA, 19 nt, Artificial Sequence
  Description of Artificial Sequence: Synthetic oligonucleotide
  Sense strand starting at position 439 of SEQ ID NO: 1881595
aggugacaauaaugcuaua

SEQ ID NO: 2056815 - RNA, 19 nt, Artificial Sequence
  Description of Artificial Sequence: Synthetic oligonucleotide
  Antisense strand to SEQ ID NO: 2056814
uauagcauuauugucaccu

SEQ ID NO: 2056816 - RNA, 19 nt, Artificial Sequence
  Description of Artificial Sequence: Synthetic oligonucleotide
  Sense strand starting at position 499 of SEQ ID NO: 1881595
cuguuucuggaguacucua

SEQ ID NO: 2056817 - RNA, 19 nt, Artificial Sequence
  Description of Artificial Sequence: Synthetic oligonucleotide
  Antisense strand to SEQ ID NO: 2056816
uagaguacuccagaaacag

SEQ ID NO: 2056818 - RNA, 19 nt, Artificial Sequence
  Description of Artificial Sequence: Synthetic oligonucleotide
  Sense strand starting at position 504 of SEQ ID NO: 1881595
ucuggaguacucuagguau

SEQ ID NO: 2056819 - RNA, 19 nt, Artificial Sequence
  Description of Artificial Sequence: Synthetic oligonucleotide
  Antisense strand to SEQ ID NO: 2056818
auaccuagaguacuccaga

SEQ ID NO: 2056820 - RNA, 19 nt, Artificial Sequence
  Description of Artificial Sequence: Synthetic oligonucleotide
  Sense strand starting at position 506 of SEQ ID NO: 1881595
uggaguacucuagguauuc

SEQ ID NO: 2056821 - RNA, 19 nt, Artificial Sequence
  Description of Artificial Sequence: Synthetic oligonucleotide
  Antisense strand to SEQ ID NO: 2056820
gaauaccuagaguacucca

SEQ ID NO: 2056822 - RNA, 19 nt, Artificial Sequence
  Description of Artificial Sequence: Synthetic oligonucleotide
  Sense strand starting at position 507 of SEQ ID NO: 1881595
ggaguacucuagguauucu

SEQ ID NO: 2056823 - RNA, 19 nt, Artificial Sequence
  Description of Artificial Sequence: Synthetic oligonucleotide
  Antisense strand to SEQ ID NO: 2056822
agaauaccuagaguacucc

SEQ ID NO: 2056824 - RNA, 19 nt, Artificial Sequence
  Description of Artificial Sequence: Synthetic oligonucleotide
  Sense strand starting at position 515 of SEQ ID NO: 1881595
cuagguauucugcaucuuu

SEQ ID NO: 2056825 - RNA, 19 nt, Artificial Sequence
  Description of Artificial Sequence: Synthetic oligonucleotide
  Antisense strand to SEQ ID NO: 2056824
aaagaugcagaauaccuag

SEQ ID NO: 2056826 - RNA, 19 nt, Artificial Sequence
  Description of Artificial Sequence: Synthetic oligonucleotide
  Sense strand starting at position 578 of SEQ ID NO: 1881595
gcagaucacuuaucagacu

SEQ ID NO: 2056827 - RNA, 19 nt, Artificial Sequence
  Description of Artificial Sequence: Synthetic oligonucleotide
  Antisense strand to SEQ ID NO: 2056826
agucugauaagugaucugc

SEQ ID NO: 2056828 - RNA, 19 nt, Artificial Sequence
  Description of Artificial Sequence: Synthetic oligonucleotide
  Sense strand starting at position 610 of SEQ ID NO: 1881595
agguacauucggugucuga

SEQ ID NO: 2056829 - RNA, 19 nt, Artificial Sequence
  Description of Artificial Sequence: Synthetic oligonucleotide
  Antisense strand to SEQ ID NO: 2056828
ucagacaccgaauguaccu

SEQ ID NO: 2056830 - RNA, 19 nt, Artificial Sequence
  Description of Artificial Sequence: Synthetic oligonucleotide
  Sense strand starting at position 617 of SEQ ID NO: 1881595
uucggugucugaccuguaa

SEQ ID NO: 2056831 - RNA, 19 nt, Artificial Sequence
  Description of Artificial Sequence: Synthetic oligonucleotide
  Antisense strand to SEQ ID NO: 2056830
uuacaggucagacaccgaa

SEQ ID NO: 2056832 - RNA, 19 nt, Artificial Sequence
  Description of Artificial Sequence: Synthetic oligonucleotide
  Sense strand starting at position 619 of SEQ ID NO: 1881595
cggugucugaccuguaaca

SEQ ID NO: 2056833 - RNA, 19 nt, Artificial Sequence
  Description of Artificial Sequence: Synthetic oligonucleotide
  Antisense strand to SEQ ID NO: 2056832
uguuacaggucagacaccg

SEQ ID NO: 2056834 - RNA, 19 nt, Artificial Sequence
  Description of Artificial Sequence: Synthetic oligonucleotide
  Sense strand starting at position 621 of SEQ ID NO: 1881595
gugucugaccuguaacaag

SEQ ID NO: 2056835 - RNA, 19 nt, Artificial Sequence
  Description of Artificial Sequence: Synthetic oligonucleotide
  Antisense strand to SEQ ID NO: 2056834
cuuguuacaggucagacac

SEQ ID NO: 2056836 - RNA, 19 nt, Artificial Sequence
  Description of Artificial Sequence: Synthetic oligonucleotide
  Sense strand starting at position 830 of SEQ ID NO: 1881595
uacugucuggguugcuuaa

SEQ ID NO: 2056837 - RNA, 19 nt, Artificial Sequence
  Description of Artificial Sequence: Synthetic oligonucleotide
  Antisense strand to SEQ ID NO: 2056836
uuaagcaacccagacagua

SEQ ID NO: 2056838 - RNA, 19 nt, Artificial Sequence
  Description of Artificial Sequence: Synthetic oligonucleotide
  Sense strand starting at position 832 of SEQ ID NO: 1881595
cugucuggguugcuuaaua

SEQ ID NO: 2056839 - RNA, 19 nt, Artificial Sequence
  Description of Artificial Sequence: Synthetic oligonucleotide
  Antisense strand to SEQ ID NO: 2056838
uauuaagcaacccagacag

SEQ ID NO: 2056840 - RNA, 19 nt, Artificial Sequence
  Description of Artificial Sequence: Synthetic oligonucleotide
  Sense strand starting at position 843 of SEQ ID NO: 1881595
gcuuaauacuggcccaaac

SEQ ID NO: 2056841 - RNA, 19 nt, Artificial Sequence
  Description of Artificial Sequence: Synthetic oligonucleotide
  Antisense strand to SEQ ID NO: 2056840
guuugggccaguauuaagc

SEQ ID NO: 2056842 - RNA, 19 nt, Artificial Sequence
  Description of Artificial Sequence: Synthetic oligonucleotide
  Sense strand starting at position 860 of SEQ ID NO: 1881595
accucaguguccuaggaua

SEQ ID NO: 2056843 - RNA, 19 nt, Artificial Sequence
  Description of Artificial Sequence: Synthetic oligonucleotide
  Antisense strand to SEQ ID NO: 2056842
uauccuaggacacugaggu

SEQ ID NO: 2056844 - RNA, 19 nt, Artificial Sequence
  Description of Artificial Sequence: Synthetic oligonucleotide
  Sense strand starting at position 862 of SEQ ID NO: 1881595
cucaguguccuaggauaau

SEQ ID NO: 2056845 - RNA, 19 nt, Artificial Sequence
  Description of Artificial Sequence: Synthetic oligonucleotide
  Antisense strand to SEQ ID NO: 2056844
auuauccuaggacacugag

SEQ ID NO: 2056846 - RNA, 19 nt, Artificial Sequence
  Description of Artificial Sequence: Synthetic oligonucleotide
  Sense strand starting at position 919 of SEQ ID NO: 1881595
gucccaagaugucaaauug

SEQ ID NO: 2056847 - RNA, 19 nt, Artificial Sequence
  Description of Artificial Sequence: Synthetic oligonucleotide
  Antisense strand to SEQ ID NO: 2056846
caauuugacaucuugggac

SEQ ID NO: 2056848 - RNA, 19 nt, Artificial Sequence
  Description of Artificial Sequence: Synthetic oligonucleotide
  Sense strand starting at position 927 of SEQ ID NO: 1881595
augucaaauugccuggagu

SEQ ID NO: 2056849 - RNA, 19 nt, Artificial Sequence
  Description of Artificial Sequence: Synthetic oligonucleotide
  Antisense strand to SEQ ID NO: 2056848
acuccaggcaauuugacau

SEQ ID NO: 2056850 - RNA, 19 nt, Artificial Sequence
  Description of Artificial Sequence: Synthetic oligonucleotide
  Sense strand starting at position 928 of SEQ ID NO: 1881595
ugucaaauugccuggagug

SEQ ID NO: 2056851 - RNA, 19 nt, Artificial Sequence
  Description of Artificial Sequence: Synthetic oligonucleotide
  Antisense strand to SEQ ID NO: 2056850
cacuccaggcaauuugaca

SEQ ID NO: 2056852 - RNA, 19 nt, Artificial Sequence
  Description of Artificial Sequence: Synthetic oligonucleotide
  Sense strand starting at position 992 of SEQ ID NO: 1881595
agauuucucuuugcaaguc

SEQ ID NO: 2056853 - RNA, 19 nt, Artificial Sequence
  Description of Artificial Sequence: Synthetic oligonucleotide
  Antisense strand to SEQ ID NO: 2056852
gacuugcaaagagaaaucu

SEQ ID NO: 2056854 - RNA, 19 nt, Artificial Sequence
  Description of Artificial Sequence: Synthetic oligonucleotide
  Sense strand starting at position 1008 of SEQ ID NO: 1881595
gucaaaggcuaguuacuau

SEQ ID NO: 2056855 - RNA, 19 nt, Artificial Sequence
  Description of Artificial Sequence: Synthetic oligonucleotide
  Antisense strand to SEQ ID NO: 2056854
auaguaacuagccuuugac

SEQ ID NO: 2056856 - RNA, 19 nt, Artificial Sequence
  Description of Artificial Sequence: Synthetic oligonucleotide
  Sense strand starting at position 1463 of SEQ ID NO: 1881595
cgacguccugugcuuaaau

SEQ ID NO: 2056857 - RNA, 19 nt, Artificial Sequence
  Description of Artificial Sequence: Synthetic oligonucleotide
  Antisense strand to SEQ ID NO: 2056856
auuuaagcacaggacgucg

SEQ ID NO: 2056858 - RNA, 19 nt, Artificial Sequence
  Description of Artificial Sequence: Synthetic oligonucleotide
  Sense strand starting at position 1464 of SEQ ID NO: 1881595
gacguccugugcuuaaaug

SEQ ID NO: 2056859 - RNA, 19 nt, Artificial Sequence
  Description of Artificial Sequence: Synthetic oligonucleotide
  Antisense strand to SEQ ID NO: 2056858
cauuuaagcacaggacguc

SEQ ID NO: 2056860 - RNA, 19 nt, Artificial Sequence
  Description of Artificial Sequence: Synthetic oligonucleotide
  Sense strand starting at position 1465 of SEQ ID NO: 1881595
acguccugugcuuaaaugu

SEQ ID NO: 2056861 - RNA, 19 nt, Artificial Sequence
  Description of Artificial Sequence: Synthetic oligonucleotide
  Antisense strand to SEQ ID NO: 2056860
acauuuaagcacaggacgu

SEQ ID NO: 2056862 - RNA, 19 nt, Artificial Sequence
  Description of Artificial Sequence: Synthetic oligonucleotide
  Sense strand starting at position 1472 of SEQ ID NO: 1881595
gugcuuaaauguucugaca

SEQ ID NO: 2056863 - RNA, 19 nt, Artificial Sequence
  Description of Artificial Sequence: Synthetic oligonucleotide
  Antisense strand to SEQ ID NO: 2056862
ugucagaacauuuaagcac

SEQ ID NO: 2056864 - RNA, 19 nt, Artificial Sequence
  Description of Artificial Sequence: Synthetic oligonucleotide
  Sense strand starting at position 1527 of SEQ ID NO: 1881595
ggaccaaugcguugucaaa

SEQ ID NO: 2056865 - RNA, 19 nt, Artificial Sequence
  Description of Artificial Sequence: Synthetic oligonucleotide
  Antisense strand to SEQ ID NO: 2056864
uuugacaacgcauuggucc

SEQ ID NO: 2056866 - RNA, 19 nt, Artificial Sequence
  Description of Artificial Sequence: Synthetic oligonucleotide
  Sense strand starting at position 1529 of SEQ ID NO: 1881595
accaaugcguugucaaaca

SEQ ID NO: 2056867 - RNA, 19 nt, Artificial Sequence
  Description of Artificial Sequence: Synthetic oligonucleotide
  Antisense strand to SEQ ID NO: 2056866
uguuugacaacgcauuggu

SEQ ID NO: 2056868 - RNA, 19 nt, Artificial Sequence
  Description of Artificial Sequence: Synthetic oligonucleotide
  Sense strand starting at position 1580 of SEQ ID NO: 1881595
cacagaagauuccagcgua

SEQ ID NO: 2056869 - RNA, 19 nt, Artificial Sequence
  Description of Artificial Sequence: Synthetic oligonucleotide
  Antisense strand to SEQ ID NO: 2056868
uacgcuggaaucuucugug

SEQ ID NO: 2056870 - RNA, 19 nt, Artificial Sequence
  Description of Artificial Sequence: Synthetic oligonucleotide
  Sense strand starting at position 1654 of SEQ ID NO: 1881595
cgccuaccucccugaucaa

SEQ ID NO: 2056871 - RNA, 19 nt, Artificial Sequence
  Description of Artificial Sequence: Synthetic oligonucleotide
  Antisense strand to SEQ ID NO: 2056870
uugaucagggagguaggcg

SEQ ID NO: 2056872 - RNA, 19 nt, Artificial Sequence
  Description of Artificial Sequence: Synthetic oligonucleotide
  Sense strand starting at position 2921 of SEQ ID NO: 1881595
cccuuucucccgugacagu

SEQ ID NO: 2056873 - RNA, 19 nt, Artificial Sequence
  Description of Artificial Sequence: Synthetic oligonucleotide
  Antisense strand to SEQ ID NO: 2056872
acugucacgggagaaaggg

SEQ ID NO: 2056874 - RNA, 19 nt, Artificial Sequence
  Description of Artificial Sequence: Synthetic oligonucleotide
  Sense strand starting at position 3803 of SEQ ID NO: 1881595
cguagguuccgggacaugu

SEQ ID NO: 2056875 - RNA, 19 nt, Artificial Sequence
  Description of Artificial Sequence: Synthetic oligonucleotide
  Antisense strand to SEQ ID NO: 2056874
acaugucccggaaccuacg

SEQ ID NO: 2056876 - RNA, 19 nt, Artificial Sequence
  Description of Artificial Sequence: Synthetic oligonucleotide
  Sense strand starting at position 3982 of SEQ ID NO: 1881595
ccuacuaucgguggugcua

SEQ ID NO: 2056877 - RNA, 19 nt, Artificial Sequence
  Description of Artificial Sequence: Synthetic oligonucleotide
  Antisense strand to SEQ ID NO: 2056876
uagcaccaccgauaguagg

SEQ ID NO: 2056878 - RNA, 19 nt, Artificial Sequence
  Description of Artificial Sequence: Synthetic oligonucleotide
  Sense strand starting at position 245 of SEQ ID NO: 1881596
uguucucaauacugugcaa

SEQ ID NO: 2056879 - RNA, 19 nt, Artificial Sequence
  Description of Artificial Sequence: Synthetic oligonucleotide
  Antisense strand to SEQ ID NO: 2056878
uugcacaguauugagaaca

SEQ ID NO: 2056880 - RNA, 19 nt, Artificial Sequence
  Description of Artificial Sequence: Synthetic oligonucleotide
  Sense strand starting at position 274 of SEQ ID NO: 1881596
uaaguagacucuugaggcu

SEQ ID NO: 2056881 - RNA, 19 nt, Artificial Sequence
  Description of Artificial Sequence: Synthetic oligonucleotide
  Antisense strand to SEQ ID NO: 2056880
agccucaagagucuacuua

SEQ ID NO: 2056882 - RNA, 19 nt, Artificial Sequence
  Description of Artificial Sequence: Synthetic oligonucleotide
  Sense strand starting at position 277 of SEQ ID NO: 1881596
guagacucuugaggcugaa

SEQ ID NO: 2056883 - RNA, 19 nt, Artificial Sequence
  Description of Artificial Sequence: Synthetic oligonucleotide
  Antisense strand to SEQ ID NO: 2056882
uucagccucaagagucuac

SEQ ID NO: 2056884 - RNA, 19 nt, Artificial Sequence
  Description of Artificial Sequence: Synthetic oligonucleotide
  Sense strand starting at position 2107 of SEQ ID NO: 1881596
uggugucaauuccugauau

SEQ ID NO: 2056885 - RNA, 19 nt, Artificial Sequence
  Description of Artificial Sequence: Synthetic oligonucleotide
  Antisense strand to SEQ ID NO: 2056884
auaucaggaauugacacca

SEQ ID NO: 2056886 - RNA, 19 nt, Artificial Sequence
  Description of Artificial Sequence: Synthetic oligonucleotide
  Sense strand starting at position 2108 of SEQ ID NO: 1881596
ggugucaauuccugauauc

SEQ ID NO: 2056887 - RNA, 19 nt, Artificial Sequence
  Description of Artificial Sequence: Synthetic oligonucleotide
  Antisense strand to SEQ ID NO: 2056886
gauaucaggaauugacacc

SEQ ID NO: 2056888 - RNA, 19 nt, Artificial Sequence
  Description of Artificial Sequence: Synthetic oligonucleotide
  Sense strand starting at position 2109 of SEQ ID NO: 1881596
gugucaauuccugauauca

SEQ ID NO: 2056889 - RNA, 19 nt, Artificial Sequence
  Description of Artificial Sequence: Synthetic oligonucleotide
  Antisense strand to SEQ ID NO: 2056888
ugauaucaggaauugacac

SEQ ID NO: 2056890 - RNA, 19 nt, Artificial Sequence
  Description of Artificial Sequence: Synthetic oligonucleotide
  Sense strand starting at position 2111 of SEQ ID NO: 1881596
gucaauuccugauaucagg

SEQ ID NO: 2056891 - RNA, 19 nt, Artificial Sequence
  Description of Artificial Sequence: Synthetic oligonucleotide
  Antisense strand to SEQ ID NO: 2056890
ccugauaucaggaauugac

SEQ ID NO: 2056892 - RNA, 19 nt, Artificial Sequence
  Description of Artificial Sequence: Synthetic oligonucleotide
  Sense strand starting at position 2207 of SEQ ID NO: 1881596
ccaaaugagucuccugcua

SEQ ID NO: 2056893 - RNA, 19 nt, Artificial Sequence
  Description of Artificial Sequence: Synthetic oligonucleotide
  Antisense strand to SEQ ID NO: 2056892
uagcaggagacucauuugg

SEQ ID NO: 2056894 - RNA, 19 nt, Artificial Sequence
  Description of Artificial Sequence: Synthetic oligonucleotide
  Sense strand starting at position 2212 of SEQ ID NO: 1881596
ugagucuccugcuaacaaa

SEQ ID NO: 2056895 - RNA, 19 nt, Artificial Sequence
  Description of Artificial Sequence: Synthetic oligonucleotide
  Antisense strand to SEQ ID NO: 2056894
uuuguuagcaggagacuca

SEQ ID NO: 2056896 - RNA, 19 nt, Artificial Sequence
  Description of Artificial Sequence: Synthetic oligonucleotide
  Sense strand starting at position 2256 of SEQ ID NO: 1881596
gugcaaagggccuaacuau

SEQ ID NO: 2056897 - RNA, 19 nt, Artificial Sequence
  Description of Artificial Sequence: Synthetic oligonucleotide
  Antisense strand to SEQ ID NO: 2056896
auaguuaggcccuuugcac

SEQ ID NO: 2056898 - RNA, 19 nt, Artificial Sequence
  Description of Artificial Sequence: Synthetic oligonucleotide
  Sense strand starting at position 2263 of SEQ ID NO: 1881596
gggccuaacuauuagauaa

SEQ ID NO: 2056899 - RNA, 19 nt, Artificial Sequence
  Description of Artificial Sequence: Synthetic oligonucleotide
  Antisense strand to SEQ ID NO: 2056898
uuaucuaauaguuaggccc

SEQ ID NO: 2056900 - RNA, 19 nt, Artificial Sequence
  Description of Artificial Sequence: Synthetic oligonucleotide
  Sense strand starting at position 2339 of SEQ ID NO: 1881596
aaguuaagguagcuugaga

SEQ ID NO: 2056901 - RNA, 19 nt, Artificial Sequence
  Description of Artificial Sequence: Synthetic oligonucleotide
  Antisense strand to SEQ ID NO: 2056900
ucucaagcuaccuuaacuu

SEQ ID NO: 2056902 - RNA, 19 nt, Artificial Sequence
  Description of Artificial Sequence: Synthetic oligonucleotide
  Sense strand starting at position 2344 of SEQ ID NO: 1881596
aagguagcuugagauguuu

SEQ ID NO: 2056903 - RNA, 19 nt, Artificial Sequence
  Description of Artificial Sequence: Synthetic oligonucleotide
  Antisense strand to SEQ ID NO: 2056902
aaacaucucaagcuaccuu

SEQ ID NO: 2056904 - RNA, 19 nt, Artificial Sequence
  Description of Artificial Sequence: Synthetic oligonucleotide
  Sense strand starting at position 2346 of SEQ ID NO: 1881596
gguagcuugagauguuucu

SEQ ID NO: 2056905 - RNA, 19 nt, Artificial Sequence
  Description of Artificial Sequence: Synthetic oligonucleotide
  Antisense strand to SEQ ID NO: 2056904
agaaacaucucaagcuacc

SEQ ID NO: 2056906 - RNA, 19 nt, Artificial Sequence
  Description of Artificial Sequence: Synthetic oligonucleotide
  Sense strand starting at position 2438 of SEQ ID NO: 1881596
ucguuugaggccuagaguu

SEQ ID NO: 2056907 - RNA, 19 nt, Artificial Sequence
  Description of Artificial Sequence: Synthetic oligonucleotide
  Antisense strand to SEQ ID NO: 2056906
aacucuaggccucaaacga

SEQ ID NO: 2056908 - RNA, 19 nt, Artificial Sequence
  Description of Artificial Sequence: Synthetic oligonucleotide
  Sense strand starting at position 2663 of SEQ ID NO: 1881596
gaaaguugguaggguuaaa

SEQ ID NO: 2056909 - RNA, 19 nt, Artificial Sequence
  Description of Artificial Sequence: Synthetic oligonucleotide
  Antisense strand to SEQ ID NO: 2056908
uuuaacccuaccaacuuuc

SEQ ID NO: 2056910 - RNA, 19 nt, Artificial Sequence
  Description of Artificial Sequence: Synthetic oligonucleotide
  Sense strand starting at position 2674 of SEQ ID NO: 1881596
ggguuaaauuugcauccca

SEQ ID NO: 2056911 - RNA, 19 nt, Artificial Sequence
  Description of Artificial Sequence: Synthetic oligonucleotide
  Antisense strand to SEQ ID NO: 2056910
ugggaugcaaauuuaaccc

SEQ ID NO: 2056912 - RNA, 19 nt, Artificial Sequence
  Description of Artificial Sequence: Synthetic oligonucleotide
  Sense strand starting at position 2745 of SEQ ID NO: 1881596
ugaggaguuucacucguug

SEQ ID NO: 2056913 - RNA, 19 nt, Artificial Sequence
  Description of Artificial Sequence: Synthetic oligonucleotide
  Antisense strand to SEQ ID NO: 2056912
caacgagugaaacuccuca

SEQ ID NO: 2056914 - RNA, 19 nt, Artificial Sequence
  Description of Artificial Sequence: Synthetic oligonucleotide
  Sense strand starting at position 3325 of SEQ ID NO: 1881596
cuggcaaggaugugcauua

SEQ ID NO: 2056915 - RNA, 19 nt, Artificial Sequence
  Description of Artificial Sequence: Synthetic oligonucleotide
  Antisense strand to SEQ ID NO: 2056914
uaaugcacauccuugccag

SEQ ID NO: 2056916 - RNA, 19 nt, Artificial Sequence
  Description of Artificial Sequence: Synthetic oligonucleotide
  Sense strand starting at position 3347 of SEQ ID NO: 1881596
uuauaauacuggcucguua

SEQ ID NO: 2056917 - RNA, 19 nt, Artificial Sequence
  Description of Artificial Sequence: Synthetic oligonucleotide
  Antisense strand to SEQ ID NO: 2056916
uaacgagccaguauuauaa

SEQ ID NO: 2056918 - RNA, 19 nt, Artificial Sequence
  Description of Artificial Sequence: Synthetic oligonucleotide
  Sense strand starting at position 3349 of SEQ ID NO: 1881596
auaauacuggcucguuaua

SEQ ID NO: 2056919 - RNA, 19 nt, Artificial Sequence
  Description of Artificial Sequence: Synthetic oligonucleotide
  Antisense strand to SEQ ID NO: 2056918
uauaacgagccaguauuau

SEQ ID NO: 2056920 - RNA, 19 nt, Artificial Sequence
  Description of Artificial Sequence: Synthetic oligonucleotide
  Sense strand starting at position 3351 of SEQ ID NO: 1881596
aauacuggcucguuauaag

SEQ ID NO: 2056921 - RNA, 19 nt, Artificial Sequence
  Description of Artificial Sequence: Synthetic oligonucleotide
  Antisense strand to SEQ ID NO: 2056920
cuuauaacgagccaguauu

SEQ ID NO: 2056922 - RNA, 19 nt, Artificial Sequence
  Description of Artificial Sequence: Synthetic oligonucleotide
  Sense strand starting at position 3354 of SEQ ID NO: 1881596
acuggcucguuauaagaau

SEQ ID NO: 2056923 - RNA, 19 nt, Artificial Sequence
  Description of Artificial Sequence: Synthetic oligonucleotide
  Antisense strand to SEQ ID NO: 2056922
auucuuauaacgagccagu

SEQ ID NO: 2056924 - RNA, 19 nt, Artificial Sequence
  Description of Artificial Sequence: Synthetic oligonucleotide
  Sense strand starting at position 3380 of SEQ ID NO: 1881596
agaauuggcuauccacuuu

SEQ ID NO: 2056925 - RNA, 19 nt, Artificial Sequence
  Description of Artificial Sequence: Synthetic oligonucleotide
  Antisense strand to SEQ ID NO: 2056924
aaaguggauagccaauucu

SEQ ID NO: 2056926 - RNA, 19 nt, Artificial Sequence
  Description of Artificial Sequence: Synthetic oligonucleotide
  Sense strand starting at position 3474 of SEQ ID NO: 1881596
aaagaugaaucugaguuau

SEQ ID NO: 2056927 - RNA, 19 nt, Artificial Sequence
  Description of Artificial Sequence: Synthetic oligonucleotide
  Antisense strand to SEQ ID NO: 2056926
auaacucagauucaucuuu

SEQ ID NO: 2056928 - RNA, 19 nt, Artificial Sequence
  Description of Artificial Sequence: Synthetic oligonucleotide
  Sense strand starting at position 3476 of SEQ ID NO: 1881596
agaugaaucugaguuauua

SEQ ID NO: 2056929 - RNA, 19 nt, Artificial Sequence
  Description of Artificial Sequence: Synthetic oligonucleotide
  Antisense strand to SEQ ID NO: 2056928
uaauaacucagauucaucu

SEQ ID NO: 2056930 - RNA, 19 nt, Artificial Sequence
  Description of Artificial Sequence: Synthetic oligonucleotide
  Sense strand starting at position 3480 of SEQ ID NO: 1881596
gaaucugaguuauuaguau

SEQ ID NO: 2056931 - RNA, 19 nt, Artificial Sequence
  Description of Artificial Sequence: Synthetic oligonucleotide
  Antisense strand to SEQ ID NO: 2056930
auacuaauaacucagauuc

SEQ ID NO: 2056932 - RNA, 19 nt, Artificial Sequence
  Description of Artificial Sequence: Synthetic oligonucleotide
  Sense strand starting at position 3606 of SEQ ID NO: 1881596
gguuaauauuucuagguuc

SEQ ID NO: 2056933 - RNA, 19 nt, Artificial Sequence
  Description of Artificial Sequence: Synthetic oligonucleotide
  Antisense strand to SEQ ID NO: 2056932
gaaccuagaaauauuaacc

SEQ ID NO: 2056934 - RNA, 19 nt, Artificial Sequence
  Description of Artificial Sequence: Synthetic oligonucleotide
  Sense strand starting at position 3621 of SEQ ID NO: 1881596
guucuauuuccaugucuua

SEQ ID NO: 2056935 - RNA, 19 nt, Artificial Sequence
  Description of Artificial Sequence: Synthetic oligonucleotide
  Antisense strand to SEQ ID NO: 2056934
uaagacauggaaauagaac

SEQ ID NO: 2056936 - RNA, 19 nt, Artificial Sequence
  Description of Artificial Sequence: Synthetic oligonucleotide
  Sense strand starting at position 3644 of SEQ ID NO: 1881596
gcauuauggccuugguguu

SEQ ID NO: 2056937 - RNA, 19 nt, Artificial Sequence
  Description of Artificial Sequence: Synthetic oligonucleotide
  Antisense strand to SEQ ID NO: 2056936
aacaccaaggccauaaugc

SEQ ID NO: 2056938 - RNA, 19 nt, Artificial Sequence
  Description of Artificial Sequence: Synthetic oligonucleotide
  Sense strand starting at position 135 of SEQ ID NO: 1881597
ucucuuuagguuugaaaug

SEQ ID NO: 2056939 - RNA, 19 nt, Artificial Sequence
  Description of Artificial Sequence: Synthetic oligonucleotide
  Antisense strand to SEQ ID NO: 2056938
cauuucaaaccuaaagaga

SEQ ID NO: 2056940 - RNA, 19 nt, Artificial Sequence
  Description of Artificial Sequence: Synthetic oligonucleotide
  Sense strand starting at position 142 of SEQ ID NO: 1881597
agguuugaaauguagcaca

SEQ ID NO: 2056941 - RNA, 19 nt, Artificial Sequence
  Description of Artificial Sequence: Synthetic oligonucleotide
  Antisense strand to SEQ ID NO: 2056940
ugugcuacauuucaaaccu

SEQ ID NO: 2056942 - RNA, 19 nt, Artificial Sequence
  Description of Artificial Sequence: Synthetic oligonucleotide
  Sense strand starting at position 187 of SEQ ID NO: 1881597
aguaauaugcauuaguaag

SEQ ID NO: 2056943 - RNA, 19 nt, Artificial Sequence
  Description of Artificial Sequence: Synthetic oligonucleotide
  Antisense strand to SEQ ID NO: 2056942
cuuacuaaugcauauuacu

SEQ ID NO: 2056944 - RNA, 19 nt, Artificial Sequence
  Description of Artificial Sequence: Synthetic oligonucleotide
  Sense strand starting at position 197 of SEQ ID NO: 1881597
auuaguaagugagcuauaa

SEQ ID NO: 2056945 - RNA, 19 nt, Artificial Sequence
  Description of Artificial Sequence: Synthetic oligonucleotide
  Antisense strand to SEQ ID NO: 2056944
uuauagcucacuuacuaau

SEQ ID NO: 2056946 - RNA, 19 nt, Artificial Sequence
  Description of Artificial Sequence: Synthetic oligonucleotide
  Sense strand starting at position 201 of SEQ ID NO: 1881597
guaagugagcuauaagaac

SEQ ID NO: 2056947 - RNA, 19 nt, Artificial Sequence
  Description of Artificial Sequence: Synthetic oligonucleotide
  Antisense strand to SEQ ID NO: 2056946
guucuuauagcucacuuac

SEQ ID NO: 2056948 - RNA, 19 nt, Artificial Sequence
  Description of Artificial Sequence: Synthetic oligonucleotide
  Sense strand starting at position 287 of SEQ ID NO: 1881597
gucaauauacgauaaaguu

SEQ ID NO: 2056949 - RNA, 19 nt, Artificial Sequence
  Description of Artificial Sequence: Synthetic oligonucleotide
  Antisense strand to SEQ ID NO: 2056948
aacuuuaucguauauugac

SEQ ID NO: 2056950 - RNA, 19 nt, Artificial Sequence
  Description of Artificial Sequence: Synthetic oligonucleotide
  Sense strand starting at position 418 of SEQ ID NO: 1881597
uuaucauagcuauguaaga

SEQ ID NO: 2056951 - RNA, 19 nt, Artificial Sequence
  Description of Artificial Sequence: Synthetic oligonucleotide
  Antisense strand to SEQ ID NO: 2056950
ucuuacauagcuaugauaa

SEQ ID NO: 2056952 - RNA, 19 nt, Artificial Sequence
  Description of Artificial Sequence: Synthetic oligonucleotide
  Sense strand starting at position 1044 of SEQ ID NO: 1881597
gagaaagauccagguagcu

SEQ ID NO: 2056953 - RNA, 19 nt, Artificial Sequence
  Description of Artificial Sequence: Synthetic oligonucleotide
  Antisense strand to SEQ ID NO: 2056952
agcuaccuggaucuuucuc

SEQ ID NO: 2056954 - RNA, 19 nt, Artificial Sequence
  Description of Artificial Sequence: Synthetic oligonucleotide
  Sense strand starting at position 1152 of SEQ ID NO: 1881597
ucagaaagcuggccucaga

SEQ ID NO: 2056955 - RNA, 19 nt, Artificial Sequence
  Description of Artificial Sequence: Synthetic oligonucleotide
  Antisense strand to SEQ ID NO: 2056954
ucugaggccagcuuucuga

SEQ ID NO: 2056956 - RNA, 19 nt, Artificial Sequence
  Description of Artificial Sequence: Synthetic oligonucleotide
  Sense strand starting at position 1155 of SEQ ID NO: 1881597
gaaagcuggccucagaugu

SEQ ID NO: 2056957 - RNA, 19 nt, Artificial Sequence
  Description of Artificial Sequence: Synthetic oligonucleotide
  Antisense strand to SEQ ID NO: 2056956
acaucugaggccagcuuuc

SEQ ID NO: 2056958 - RNA, 19 nt, Artificial Sequence
  Description of Artificial Sequence: Synthetic oligonucleotide
  Sense strand starting at position 1228 of SEQ ID NO: 1881597
guguuaagcaaauauugag

SEQ ID NO: 2056959 - RNA, 19 nt, Artificial Sequence
  Description of Artificial Sequence: Synthetic oligonucleotide
  Antisense strand to SEQ ID NO: 2056958
cucaauauuugcuuaacac

SEQ ID NO: 2056960 - RNA, 19 nt, Artificial Sequence
  Description of Artificial Sequence: Synthetic oligonucleotide
  Sense strand starting at position 1243 of SEQ ID NO: 1881597
ugaggugauagcuggaaug

SEQ ID NO: 2056961 - RNA, 19 nt, Artificial Sequence
  Description of Artificial Sequence: Synthetic oligonucleotide
  Antisense strand to SEQ ID NO: 2056960
cauuccagcuaucaccuca

SEQ ID NO: 2056962 - RNA, 19 nt, Artificial Sequence
  Description of Artificial Sequence: Synthetic oligonucleotide
  Sense strand starting at position 1286 of SEQ ID NO: 1881597
acacucauuguuuaaagua

SEQ ID NO: 2056963 - RNA, 19 nt, Artificial Sequence
  Description of Artificial Sequence: Synthetic oligonucleotide
  Antisense strand to SEQ ID NO: 2056962
uacuuuaaacaaugagugu

SEQ ID NO: 2056964 - RNA, 19 nt, Artificial Sequence
  Description of Artificial Sequence: Synthetic oligonucleotide
  Sense strand starting at position 1326 of SEQ ID NO: 1881597
ugaaguacauaucugcaau

SEQ ID NO: 2056965 - RNA, 19 nt, Artificial Sequence
  Description of Artificial Sequence: Synthetic oligonucleotide
  Antisense strand to SEQ ID NO: 2056964
auugcagauauguacuuca

SEQ ID NO: 2056966 - RNA, 19 nt, Artificial Sequence
  Description of Artificial Sequence: Synthetic oligonucleotide
  Sense strand starting at position 1329 of SEQ ID NO: 1881597
aguacauaucugcaauagu

SEQ ID NO: 2056967 - RNA, 19 nt, Artificial Sequence
  Description of Artificial Sequence: Synthetic oligonucleotide
  Antisense strand to SEQ ID NO: 2056966
acuauugcagauauguacu

SEQ ID NO: 2056968 - RNA, 19 nt, Artificial Sequence
  Description of Artificial Sequence: Synthetic oligonucleotide
  Sense strand starting at position 1925 of SEQ ID NO: 1881597
ggugauaaugacuauagcu

SEQ ID NO: 2056969 - RNA, 19 nt, Artificial Sequence
  Description of Artificial Sequence: Synthetic oligonucleotide
  Antisense strand to SEQ ID NO: 2056968
agcuauagucauuaucacc

SEQ ID NO: 2056970 - RNA, 19 nt, Artificial Sequence
  Description of Artificial Sequence: Synthetic oligonucleotide
  Sense strand starting at position 2161 of SEQ ID NO: 1881597
agcaaucucugacucugau

SEQ ID NO: 2056971 - RNA, 19 nt, Artificial Sequence
  Description of Artificial Sequence: Synthetic oligonucleotide
  Antisense strand to SEQ ID NO: 2056970
aucagagucagagauugcu

SEQ ID NO: 2056972 - RNA, 19 nt, Artificial Sequence
  Description of Artificial Sequence: Synthetic oligonucleotide
  Sense strand starting at position 2243 of SEQ ID NO: 1881597
uugaguuuaggucacuauc

SEQ ID NO: 2056973 - RNA, 19 nt, Artificial Sequence
  Description of Artificial Sequence: Synthetic oligonucleotide
  Antisense strand to SEQ ID NO: 2056972
gauagugaccuaaacucaa

SEQ ID NO: 2056974 - RNA, 19 nt, Artificial Sequence
  Description of Artificial Sequence: Synthetic oligonucleotide
  Sense strand starting at position 2556 of SEQ ID NO: 1881597
cuucuuggccuccaagacu

SEQ ID NO: 2056975 - RNA, 19 nt, Artificial Sequence
  Description of Artificial Sequence: Synthetic oligonucleotide
  Antisense strand to SEQ ID NO: 2056974
agucuuggaggccaagaag

SEQ ID NO: 2056976 - RNA, 19 nt, Artificial Sequence
  Description of Artificial Sequence: Synthetic oligonucleotide
  Sense strand starting at position 2622 of SEQ ID NO: 1881597
ucuagauaauucucaggua

SEQ ID NO: 2056977 - RNA, 19 nt, Artificial Sequence
  Description of Artificial Sequence: Synthetic oligonucleotide
  Antisense strand to SEQ ID NO: 2056976
uaccugagaauuaucuaga

SEQ ID NO: 2056978 - RNA, 19 nt, Artificial Sequence
  Description of Artificial Sequence: Synthetic oligonucleotide
  Sense strand starting at position 2688 of SEQ ID NO: 1881597
gcccuucuagguuaagaua

SEQ ID NO: 2056979 - RNA, 19 nt, Artificial Sequence
  Description of Artificial Sequence: Synthetic oligonucleotide
  Antisense strand to SEQ ID NO: 2056978
uaucuuaaccuagaagggc

SEQ ID NO: 2056980 - RNA, 19 nt, Artificial Sequence
  Description of Artificial Sequence: Synthetic oligonucleotide
  Sense strand starting at position 2696 of SEQ ID NO: 1881597
agguuaagauauguccuau

SEQ ID NO: 2056981 - RNA, 19 nt, Artificial Sequence
  Description of Artificial Sequence: Synthetic oligonucleotide
  Antisense strand to SEQ ID NO: 2056980
auaggacauaucuuaaccu

SEQ ID NO: 2056982 - RNA, 19 nt, Artificial Sequence
  Description of Artificial Sequence: Synthetic oligonucleotide
  Sense strand starting at position 2860 of SEQ ID NO: 1881597
uauaguugaugccuagaaa

SEQ ID NO: 2056983 - RNA, 19 nt, Artificial Sequence
  Description of Artificial Sequence: Synthetic oligonucleotide
  Antisense strand to SEQ ID NO: 2056982
uuucuaggcaucaacuaua

SEQ ID NO: 2056984 - RNA, 19 nt, Artificial Sequence
  Description of Artificial Sequence: Synthetic oligonucleotide
  Sense strand starting at position 2861 of SEQ ID NO: 1881597
auaguugaugccuagaaac

SEQ ID NO: 2056985 - RNA, 19 nt, Artificial Sequence
  Description of Artificial Sequence: Synthetic oligonucleotide
  Antisense strand to SEQ ID NO: 2056984
guuucuaggcaucaacuau

SEQ ID NO: 2056986 - RNA, 19 nt, Artificial Sequence
  Description of Artificial Sequence: Synthetic oligonucleotide
  Sense strand starting at position 2863 of SEQ ID NO: 1881597
aguugaugccuagaaacuu

SEQ ID NO: 2056987 - RNA, 19 nt, Artificial Sequence
  Description of Artificial Sequence: Synthetic oligonucleotide
  Antisense strand to SEQ ID NO: 2056986
aaguuucuaggcaucaacu

SEQ ID NO: 2056988 - RNA, 19 nt, Artificial Sequence
  Description of Artificial Sequence: Synthetic oligonucleotide
  Sense strand starting at position 2896 of SEQ ID NO: 1881597
gcgguaagcaaauaaauac

SEQ ID NO: 2056989 - RNA, 19 nt, Artificial Sequence
  Description of Artificial Sequence: Synthetic oligonucleotide
  Antisense strand to SEQ ID NO: 2056988
guauuuauuugcuuaccgc

SEQ ID NO: 2056990 - RNA, 19 nt, Artificial Sequence
  Description of Artificial Sequence: Synthetic oligonucleotide
  Sense strand starting at position 2936 of SEQ ID NO: 1881597
aagguucuuagguauggua

SEQ ID NO: 2056991 - RNA, 19 nt, Artificial Sequence
  Description of Artificial Sequence: Synthetic oligonucleotide
  Antisense strand to SEQ ID NO: 2056990
uaccauaccuaagaaccuu

SEQ ID NO: 2056992 - RNA, 19 nt, Artificial Sequence
  Description of Artificial Sequence: Synthetic oligonucleotide
  Sense strand starting at position 3035 of SEQ ID NO: 1881597
gaguuaguucuccaagguu

SEQ ID NO: 2056993 - RNA, 19 nt, Artificial Sequence
  Description of Artificial Sequence: Synthetic oligonucleotide
  Antisense strand to SEQ ID NO: 2056992
aaccuuggagaacuaacuc

SEQ ID NO: 2056994 - RNA, 19 nt, Artificial Sequence
  Description of Artificial Sequence: Synthetic oligonucleotide
  Sense strand starting at position 3074 of SEQ ID NO: 1881597
gauggagucucaucaccau

SEQ ID NO: 2056995 - RNA, 19 nt, Artificial Sequence
  Description of Artificial Sequence: Synthetic oligonucleotide
  Antisense strand to SEQ ID NO: 2056994
auggugaugagacuccauc

SEQ ID NO: 2056996 - RNA, 19 nt, Artificial Sequence
  Description of Artificial Sequence: Synthetic oligonucleotide
  Sense strand starting at position 3193 of SEQ ID NO: 1881597
acaucauaugcugggagaa

SEQ ID NO: 2056997 - RNA, 19 nt, Artificial Sequence
  Description of Artificial Sequence: Synthetic oligonucleotide
  Antisense strand to SEQ ID NO: 2056996
uucucccagcauaugaugu

SEQ ID NO: 2056998 - RNA, 19 nt, Artificial Sequence
  Description of Artificial Sequence: Synthetic oligonucleotide
  Sense strand starting at position 3194 of SEQ ID NO: 1881597
caucauaugcugggagaaa

SEQ ID NO: 2056999 - RNA, 19 nt, Artificial Sequence
  Description of Artificial Sequence: Synthetic oligonucleotide
  Antisense strand to SEQ ID NO: 2056998
uuucucccagcauaugaug

SEQ ID NO: 2057000 - RNA, 19 nt, Artificial Sequence
  Description of Artificial Sequence: Synthetic oligonucleotide
  Sense strand starting at position 3255 of SEQ ID NO: 1881597
ucagaauguuccucuugga

SEQ ID NO: 2057001 - RNA, 19 nt, Artificial Sequence
  Description of Artificial Sequence: Synthetic oligonucleotide
  Antisense strand to SEQ ID NO: 2057000
uccaagaggaacauucuga

SEQ ID NO: 2057002 - RNA, 19 nt, Artificial Sequence
  Description of Artificial Sequence: Synthetic oligonucleotide
  Sense strand starting at position 3416 of SEQ ID NO: 1881597
agaaauaacugguuauucu

SEQ ID NO: 2057003 - RNA, 19 nt, Artificial Sequence
  Description of Artificial Sequence: Synthetic oligonucleotide
  Antisense strand to SEQ ID NO: 2057002
agaauaaccaguuauuucu

SEQ ID NO: 2057004 - RNA, 19 nt, Artificial Sequence
  Description of Artificial Sequence: Synthetic oligonucleotide
  Sense strand starting at position 3527 of SEQ ID NO: 1881597
uuggaaucaugucucuaug

SEQ ID NO: 2057005 - RNA, 19 nt, Artificial Sequence
  Description of Artificial Sequence: Synthetic oligonucleotide
  Antisense strand to SEQ ID NO: 2057004
cauagagacaugauuccaa

SEQ ID NO: 2057006 - RNA, 19 nt, Artificial Sequence
  Description of Artificial Sequence: Synthetic oligonucleotide
  Sense strand starting at position 3561 of SEQ ID NO: 1881597
aguucucucuuauuuguau

SEQ ID NO: 2057007 - RNA, 19 nt, Artificial Sequence
  Description of Artificial Sequence: Synthetic oligonucleotide
  Antisense strand to SEQ ID NO: 2057006
auacaaauaagagagaacu

SEQ ID NO: 2057008 - RNA, 19 nt, Artificial Sequence
  Description of Artificial Sequence: Synthetic oligonucleotide
  Sense strand starting at position 3562 of SEQ ID NO: 1881597
guucucucuuauuuguauu

SEQ ID NO: 2057009 - RNA, 19 nt, Artificial Sequence
  Description of Artificial Sequence: Synthetic oligonucleotide
  Antisense strand to SEQ ID NO: 2057008
aauacaaauaagagagaac

SEQ ID NO: 2057010 - RNA, 19 nt, Artificial Sequence
  Description of Artificial Sequence: Synthetic oligonucleotide
  Sense strand starting at position 3687 of SEQ ID NO: 1881597
cguauuagccaugaauuac

SEQ ID NO: 2057011 - RNA, 19 nt, Artificial Sequence
  Description of Artificial Sequence: Synthetic oligonucleotide
  Antisense strand to SEQ ID NO: 2057010
guaauucauggcuaauacg

SEQ ID NO: 2057012 - RNA, 19 nt, Artificial Sequence
  Description of Artificial Sequence: Synthetic oligonucleotide
  Sense strand starting at position 3753 of SEQ ID NO: 1881597
auuauuggagaucgacaau

SEQ ID NO: 2057013 - RNA, 19 nt, Artificial Sequence
  Description of Artificial Sequence: Synthetic oligonucleotide
  Antisense strand to SEQ ID NO: 2057012
auugucgaucuccaauaau

SEQ ID NO: 2057014 - RNA, 19 nt, Artificial Sequence
  Description of Artificial Sequence: Synthetic oligonucleotide
  Sense strand starting at position 3759 of SEQ ID NO: 1881597
ggagaucgacaauggguuu

SEQ ID NO: 2057015 - RNA, 19 nt, Artificial Sequence
  Description of Artificial Sequence: Synthetic oligonucleotide
  Antisense strand to SEQ ID NO: 2057014
aaacccauugucgaucucc

SEQ ID NO: 2057016 - RNA, 19 nt, Artificial Sequence
  Description of Artificial Sequence: Synthetic oligonucleotide
  Sense strand starting at position 3916 of SEQ ID NO: 1881597
ggugauauggaagguccau

SEQ ID NO: 2057017 - RNA, 19 nt, Artificial Sequence
  Description of Artificial Sequence: Synthetic oligonucleotide
  Antisense strand to SEQ ID NO: 2057016
auggaccuuccauaucacc

SEQ ID NO: 2057018 - RNA, 19 nt, Artificial Sequence
  Description of Artificial Sequence: Synthetic oligonucleotide
  Sense strand starting at position 149 of SEQ ID NO: 1881598
agaaguaugugagaauuug

SEQ ID NO: 2057019 - RNA, 19 nt, Artificial Sequence
  Description of Artificial Sequence: Synthetic oligonucleotide
  Antisense strand to SEQ ID NO: 2057018
caaauucucacauacuucu

SEQ ID NO: 2057020 - RNA, 19 nt, Artificial Sequence
  Description of Artificial Sequence: Synthetic oligonucleotide
  Sense strand starting at position 310 of SEQ ID NO: 1881598
aacuuuccugguggaaaug

SEQ ID NO: 2057021 - RNA, 19 nt, Artificial Sequence
  Description of Artificial Sequence: Synthetic oligonucleotide
  Antisense strand to SEQ ID NO: 2057020
cauuuccaccaggaaaguu

SEQ ID NO: 2057022 - RNA, 19 nt, Artificial Sequence
  Description of Artificial Sequence: Synthetic oligonucleotide
  Sense strand starting at position 332 of SEQ ID NO: 1881598
ucggcuaugagguauuaag

SEQ ID NO: 2057023 - RNA, 19 nt, Artificial Sequence
  Description of Artificial Sequence: Synthetic oligonucleotide
  Antisense strand to SEQ ID NO: 2057022
cuuaauaccucauagccga

SEQ ID NO: 2057024 - RNA, 19 nt, Artificial Sequence
  Description of Artificial Sequence: Synthetic oligonucleotide
  Sense strand starting at position 365 of SEQ ID NO: 1881598
gauauuuggugucucuagu

SEQ ID NO: 2057025 - RNA, 19 nt, Artificial Sequence
  Description of Artificial Sequence: Synthetic oligonucleotide
  Antisense strand to SEQ ID NO: 2057024
acuagagacaccaaauauc

SEQ ID NO: 2057026 - RNA, 19 nt, Artificial Sequence
  Description of Artificial Sequence: Synthetic oligonucleotide
  Sense strand starting at position 536 of SEQ ID NO: 1881598
aggucugcgcuuuccuuaa

SEQ ID NO: 2057027 - RNA, 19 nt, Artificial Sequence
  Description of Artificial Sequence: Synthetic oligonucleotide
  Antisense strand to SEQ ID NO: 2057026
uuaaggaaagcgcagaccu

SEQ ID NO: 2057028 - RNA, 19 nt, Artificial Sequence
  Description of Artificial Sequence: Synthetic oligonucleotide
  Sense strand starting at position 1010 of SEQ ID NO: 1881598
cgcuuagauauuuggaggu

SEQ ID NO: 2057029 - RNA, 19 nt, Artificial Sequence
  Description of Artificial Sequence: Synthetic oligonucleotide
  Antisense strand to SEQ ID NO: 2057028
accuccaaauaucuaagcg

SEQ ID NO: 2057030 - RNA, 19 nt, Artificial Sequence
  Description of Artificial Sequence: Synthetic oligonucleotide
  Sense strand starting at position 1137 of SEQ ID NO: 1881598
ggagcaaauuuacauagaa

SEQ ID NO: 2057031 - RNA, 19 nt, Artificial Sequence
  Description of Artificial Sequence: Synthetic oligonucleotide
  Antisense strand to SEQ ID NO: 2057030
uucuauguaaauuugcucc

SEQ ID NO: 2057032 - RNA, 19 nt, Artificial Sequence
  Description of Artificial Sequence: Synthetic oligonucleotide
  Sense strand starting at position 1169 of SEQ ID NO: 1881598
aauagugcccuagaugagu

SEQ ID NO: 2057033 - RNA, 19 nt, Artificial Sequence
  Description of Artificial Sequence: Synthetic oligonucleotide
  Antisense strand to SEQ ID NO: 2057032
acucaucuagggcacuauu

SEQ ID NO: 2057034 - RNA, 19 nt, Artificial Sequence
  Description of Artificial Sequence: Synthetic oligonucleotide
  Sense strand starting at position 1195 of SEQ ID NO: 1881598
uugggaaacgcugagcuaa

SEQ ID NO: 2057035 - RNA, 19 nt, Artificial Sequence
  Description of Artificial Sequence: Synthetic oligonucleotide
  Antisense strand to SEQ ID NO: 2057034
uuagcucagcguuucccaa

SEQ ID NO: 2057036 - RNA, 19 nt, Artificial Sequence
  Description of Artificial Sequence: Synthetic oligonucleotide
  Sense strand starting at position 1257 of SEQ ID NO: 1881598
cgagguuccgcccauuuga

SEQ ID NO: 2057037 - RNA, 19 nt, Artificial Sequence
  Description of Artificial Sequence: Synthetic oligonucleotide
  Antisense strand to SEQ ID NO: 2057036
ucaaaugggcggaaccucg

SEQ ID NO: 2057038 - RNA, 19 nt, Artificial Sequence
  Description of Artificial Sequence: Synthetic oligonucleotide
  Sense strand starting at position 1487 of SEQ ID NO: 1881598
gucugagucagucacccaa

SEQ ID NO: 2057039 - RNA, 19 nt, Artificial Sequence
  Description of Artificial Sequence: Synthetic oligonucleotide
  Antisense strand to SEQ ID NO: 2057038
uugggugacugacucagac

SEQ ID NO: 2057040 - RNA, 19 nt, Artificial Sequence
  Description of Artificial Sequence: Synthetic oligonucleotide
  Sense strand starting at position 2037 of SEQ ID NO: 1881598
gguaaauuuccucagcgca

SEQ ID NO: 2057041 - RNA, 19 nt, Artificial Sequence
  Description of Artificial Sequence: Synthetic oligonucleotide
  Antisense strand to SEQ ID NO: 2057040
ugcgcugaggaaauuuacc

SEQ ID NO: 2057042 - RNA, 19 nt, Artificial Sequence
  Description of Artificial Sequence: Synthetic oligonucleotide
  Sense strand starting at position 2128 of SEQ ID NO: 1881598
cgguaagugauccaagaac

SEQ ID NO: 2057043 - RNA, 19 nt, Artificial Sequence
  Description of Artificial Sequence: Synthetic oligonucleotide
  Antisense strand to SEQ ID NO: 2057042
guucuuggaucacuuaccg

SEQ ID NO: 2057044 - RNA, 19 nt, Artificial Sequence
  Description of Artificial Sequence: Synthetic oligonucleotide
  Sense strand starting at position 2260 of SEQ ID NO: 1881598
ccaaguuauuuacucggua

SEQ ID NO: 2057045 - RNA, 19 nt, Artificial Sequence
  Description of Artificial Sequence: Synthetic oligonucleotide
  Antisense strand to SEQ ID NO: 2057044
uaccgaguaaauaacuugg

SEQ ID NO: 2057046 - RNA, 19 nt, Artificial Sequence
  Description of Artificial Sequence: Synthetic oligonucleotide
  Sense strand starting at position 2284 of SEQ ID NO: 1881598
caugaauuugcccgggugu

SEQ ID NO: 2057047 - RNA, 19 nt, Artificial Sequence
  Description of Artificial Sequence: Synthetic oligonucleotide
  Antisense strand to SEQ ID NO: 2057046
acacccgggcaaauucaug

SEQ ID NO: 2057048 - RNA, 19 nt, Artificial Sequence
  Description of Artificial Sequence: Synthetic oligonucleotide
  Sense strand starting at position 2390 of SEQ ID NO: 1881598
gccugaacccgauaccuua

SEQ ID NO: 2057049 - RNA, 19 nt, Artificial Sequence
  Description of Artificial Sequence: Synthetic oligonucleotide
  Antisense strand to SEQ ID NO: 2057048
uaagguaucggguucaggc

SEQ ID NO: 2057050 - RNA, 19 nt, Artificial Sequence
  Description of Artificial Sequence: Synthetic oligonucleotide
  Sense strand starting at position 2427 of SEQ ID NO: 1881598
gugaguuuaccagauugau

SEQ ID NO: 2057051 - RNA, 19 nt, Artificial Sequence
  Description of Artificial Sequence: Synthetic oligonucleotide
  Antisense strand to SEQ ID NO: 2057050
aucaaucugguaaacucac

SEQ ID NO: 2057052 - RNA, 19 nt, Artificial Sequence
  Description of Artificial Sequence: Synthetic oligonucleotide
  Sense strand starting at position 2430 of SEQ ID NO: 1881598
aguuuaccagauugaucuu

SEQ ID NO: 2057053 - RNA, 19 nt, Artificial Sequence
  Description of Artificial Sequence: Synthetic oligonucleotide
  Antisense strand to SEQ ID NO: 2057052
aagaucaaucugguaaacu

SEQ ID NO: 2057054 - RNA, 19 nt, Artificial Sequence
  Description of Artificial Sequence: Synthetic oligonucleotide
  Sense strand starting at position 2463 of SEQ ID NO: 1881598
ggagacaguucucuuggga

SEQ ID NO: 2057055 - RNA, 19 nt, Artificial Sequence
  Description of Artificial Sequence: Synthetic oligonucleotide
  Antisense strand to SEQ ID NO: 2057054
ucccaagagaacugucucc

SEQ ID NO: 2057056 - RNA, 19 nt, Artificial Sequence
  Description of Artificial Sequence: Synthetic oligonucleotide
  Sense strand starting at position 2466 of SEQ ID NO: 1881598
gacaguucucuugggagaa

SEQ ID NO: 2057057 - RNA, 19 nt, Artificial Sequence
  Description of Artificial Sequence: Synthetic oligonucleotide
  Antisense strand to SEQ ID NO: 2057056
uucucccaagagaacuguc

SEQ ID NO: 2057058 - RNA, 19 nt, Artificial Sequence
  Description of Artificial Sequence: Synthetic oligonucleotide
  Sense strand starting at position 2481 of SEQ ID NO: 1881598
agaagugguguccauccua

SEQ ID NO: 2057059 - RNA, 19 nt, Artificial Sequence
  Description of Artificial Sequence: Synthetic oligonucleotide
  Antisense strand to SEQ ID NO: 2057058
uaggauggacaccacuucu

SEQ ID NO: 2057060 - RNA, 19 nt, Artificial Sequence
  Description of Artificial Sequence: Synthetic oligonucleotide
  Sense strand starting at position 2561 of SEQ ID NO: 1881598
ugaggugaucuggaguuau

SEQ ID NO: 2057061 - RNA, 19 nt, Artificial Sequence
  Description of Artificial Sequence: Synthetic oligonucleotide
  Antisense strand to SEQ ID NO: 2057060
auaacuccagaucaccuca

SEQ ID NO: 2057062 - RNA, 19 nt, Artificial Sequence
  Description of Artificial Sequence: Synthetic oligonucleotide
  Sense strand starting at position 2589 of SEQ ID NO: 1881598
gggaaaggguucguggauu

SEQ ID NO: 2057063 - RNA, 19 nt, Artificial Sequence
  Description of Artificial Sequence: Synthetic oligonucleotide
  Antisense strand to SEQ ID NO: 2057062
aauccacgaacccuuuccc

SEQ ID NO: 2057064 - RNA, 19 nt, Artificial Sequence
  Description of Artificial Sequence: Synthetic oligonucleotide
  Sense strand starting at position 2602 of SEQ ID NO: 1881598
uggauuauauagccuuuga

SEQ ID NO: 2057065 - RNA, 19 nt, Artificial Sequence
  Description of Artificial Sequence: Synthetic oligonucleotide
  Antisense strand to SEQ ID NO: 2057064
ucaaaggcuauauaaucca

SEQ ID NO: 2057066 - RNA, 19 nt, Artificial Sequence
  Description of Artificial Sequence: Synthetic oligonucleotide
  Sense strand starting at position 2736 of SEQ ID NO: 1881598
aagcuuguccuugaaguag

SEQ ID NO: 2057067 - RNA, 19 nt, Artificial Sequence
  Description of Artificial Sequence: Synthetic oligonucleotide
  Antisense strand to SEQ ID NO: 2057066
cuacuucaaggacaagcuu

SEQ ID NO: 2057068 - RNA, 19 nt, Artificial Sequence
  Description of Artificial Sequence: Synthetic oligonucleotide
  Sense strand starting at position 2862 of SEQ ID NO: 1881598
auaguauuguacuuacaag

SEQ ID NO: 2057069 - RNA, 19 nt, Artificial Sequence
  Description of Artificial Sequence: Synthetic oligonucleotide
  Antisense strand to SEQ ID NO: 2057068
cuuguaaguacaauacuau

SEQ ID NO: 2057070 - RNA, 19 nt, Artificial Sequence
  Description of Artificial Sequence: Synthetic oligonucleotide
  Sense strand starting at position 2874 of SEQ ID NO: 1881598
uuacaagcucaguauugau

SEQ ID NO: 2057071 - RNA, 19 nt, Artificial Sequence
  Description of Artificial Sequence: Synthetic oligonucleotide
  Antisense strand to SEQ ID NO: 2057070
aucaauacugagcuuguaa

SEQ ID NO: 2057072 - RNA, 19 nt, Artificial Sequence
  Description of Artificial Sequence: Synthetic oligonucleotide
  Sense strand starting at position 2941 of SEQ ID NO: 1881598
cccguaaguaauuggaaga

SEQ ID NO: 2057073 - RNA, 19 nt, Artificial Sequence
  Description of Artificial Sequence: Synthetic oligonucleotide
  Antisense strand to SEQ ID NO: 2057072
ucuuccaauuacuuacggg

SEQ ID NO: 2057074 - RNA, 19 nt, Artificial Sequence
  Description of Artificial Sequence: Synthetic oligonucleotide
  Sense strand starting at position 2942 of SEQ ID NO: 1881598
ccguaaguaauuggaagau

SEQ ID NO: 2057075 - RNA, 19 nt, Artificial Sequence
  Description of Artificial Sequence: Synthetic oligonucleotide
  Antisense strand to SEQ ID NO: 2057074
aucuuccaauuacuuacgg

SEQ ID NO: 2057076 - RNA, 19 nt, Artificial Sequence
  Description of Artificial Sequence: Synthetic oligonucleotide
  Sense strand starting at position 3139 of SEQ ID NO: 1881598
uaggguuaagugcaaauau

SEQ ID NO: 2057077 - RNA, 19 nt, Artificial Sequence
  Description of Artificial Sequence: Synthetic oligonucleotide
  Antisense strand to SEQ ID NO: 2057076
auauuugcacuuaacccua

SEQ ID NO: 2057078 - RNA, 19 nt, Artificial Sequence
  Description of Artificial Sequence: Synthetic oligonucleotide
  Sense strand starting at position 3303 of SEQ ID NO: 1881598
aacguauuuauaugggugu

SEQ ID NO: 2057079 - RNA, 19 nt, Artificial Sequence
  Description of Artificial Sequence: Synthetic oligonucleotide
  Antisense strand to SEQ ID NO: 2057078
acacccauauaaauacguu

SEQ ID NO: 2057080 - RNA, 19 nt, Artificial Sequence
  Description of Artificial Sequence: Synthetic oligonucleotide
  Sense strand starting at position 3453 of SEQ ID NO: 1881598
caguguaaggcucauggau

SEQ ID NO: 2057081 - RNA, 19 nt, Artificial Sequence
  Description of Artificial Sequence: Synthetic oligonucleotide
  Antisense strand to SEQ ID NO: 2057080
auccaugagccuuacacug

SEQ ID NO: 2057082 - RNA, 19 nt, Artificial Sequence
  Description of Artificial Sequence: Synthetic oligonucleotide
  Sense strand starting at position 3462 of SEQ ID NO: 1881598
gcucauggauaugcaauaa

SEQ ID NO: 2057083 - RNA, 19 nt, Artificial Sequence
  Description of Artificial Sequence: Synthetic oligonucleotide
  Antisense strand to SEQ ID NO: 2057082
uuauugcauauccaugagc

SEQ ID NO: 2057084 - RNA, 19 nt, Artificial Sequence
  Description of Artificial Sequence: Synthetic oligonucleotide
  Sense strand starting at position 3595 of SEQ ID NO: 1881598
guagaauucuggguuauag

SEQ ID NO: 2057085 - RNA, 19 nt, Artificial Sequence
  Description of Artificial Sequence: Synthetic oligonucleotide
  Antisense strand to SEQ ID NO: 2057084
cuauaacccagaauucuac

SEQ ID NO: 2057086 - RNA, 19 nt, Artificial Sequence
  Description of Artificial Sequence: Synthetic oligonucleotide
  Sense strand starting at position 3702 of SEQ ID NO: 1881598
uggugaaagugacuauaaa

SEQ ID NO: 2057087 - RNA, 19 nt, Artificial Sequence
  Description of Artificial Sequence: Synthetic oligonucleotide
  Antisense strand to SEQ ID NO: 2057086
uuuauagucacuuucacca

SEQ ID NO: 2057088 - RNA, 19 nt, Artificial Sequence
  Description of Artificial Sequence: Synthetic oligonucleotide
  Sense strand starting at position 3812 of SEQ ID NO: 1881598
ggauacaaucuuugcacau

SEQ ID NO: 2057089 - RNA, 19 nt, Artificial Sequence
  Description of Artificial Sequence: Synthetic oligonucleotide
  Antisense strand to SEQ ID NO: 2057088
augugcaaagauuguaucc

SEQ ID NO: 2057090 - RNA, 19 nt, Artificial Sequence
  Description of Artificial Sequence: Synthetic oligonucleotide
  Sense strand starting at position 3848 of SEQ ID NO: 1881598
uugggaauucuuggugaaa

SEQ ID NO: 2057091 - RNA, 19 nt, Artificial Sequence
  Description of Artificial Sequence: Synthetic oligonucleotide
  Antisense strand to SEQ ID NO: 2057090
uuucaccaagaauucccaa

SEQ ID NO: 2057092 - RNA, 19 nt, Artificial Sequence
  Description of Artificial Sequence: Synthetic oligonucleotide
  Sense strand starting at position 3849 of SEQ ID NO: 1881598
ugggaauucuuggugaaau

SEQ ID NO: 2057093 - RNA, 19 nt, Artificial Sequence
  Description of Artificial Sequence: Synthetic oligonucleotide
  Antisense strand to SEQ ID NO: 2057092
auuucaccaagaauuccca

SEQ ID NO: 2057094 - RNA, 19 nt, Artificial Sequence
  Description of Artificial Sequence: Synthetic oligonucleotide
  Sense strand starting at position 3921 of SEQ ID NO: 1881598
ccacauaugguggauguga

SEQ ID NO: 2057095 - RNA, 19 nt, Artificial Sequence
  Description of Artificial Sequence: Synthetic oligonucleotide
  Antisense strand to SEQ ID NO: 2057094
ucacauccaccauaugugg

SEQ ID NO: 2057096 - RNA, 19 nt, Artificial Sequence
  Description of Artificial Sequence: Synthetic oligonucleotide
  Sense strand starting at position 3923 of SEQ ID NO: 1881598
acauaugguggaugugaga

SEQ ID NO: 2057097 - RNA, 19 nt, Artificial Sequence
  Description of Artificial Sequence: Synthetic oligonucleotide
  Antisense strand to SEQ ID NO: 2057096
ucucacauccaccauaugu

SEQ ID NO: 2057098 - RNA, 19 nt, Artificial Sequence
  Description of Artificial Sequence: Synthetic oligonucleotide
  Sense strand starting at position 37 of SEQ ID NO: 1881599
ugcuuugaauucuccauga

SEQ ID NO: 2057099 - RNA, 19 nt, Artificial Sequence
  Description of Artificial Sequence: Synthetic oligonucleotide
  Antisense strand to SEQ ID NO: 2057098
ucauggagaauucaaagca

SEQ ID NO: 2057100 - RNA, 19 nt, Artificial Sequence
  Description of Artificial Sequence: Synthetic oligonucleotide
  Sense strand starting at position 72 of SEQ ID NO: 1881599
ggaugaccugccugguaau

SEQ ID NO: 2057101 - RNA, 19 nt, Artificial Sequence
  Description of Artificial Sequence: Synthetic oligonucleotide
  Antisense strand to SEQ ID NO: 2057100
auuaccaggcaggucaucc

SEQ ID NO: 2057102 - RNA, 19 nt, Artificial Sequence
  Description of Artificial Sequence: Synthetic oligonucleotide
  Sense strand starting at position 280 of SEQ ID NO: 1881599
auugauacaugagaagaua

SEQ ID NO: 2057103 - RNA, 19 nt, Artificial Sequence
  Description of Artificial Sequence: Synthetic oligonucleotide
  Antisense strand to SEQ ID NO: 2057102
uaucuucucauguaucaau

SEQ ID NO: 2057104 - RNA, 19 nt, Artificial Sequence
  Description of Artificial Sequence: Synthetic oligonucleotide
  Sense strand starting at position 311 of SEQ ID NO: 1881599
gauggaaugcuuugaagac

SEQ ID NO: 2057105 - RNA, 19 nt, Artificial Sequence
  Description of Artificial Sequence: Synthetic oligonucleotide
  Antisense strand to SEQ ID NO: 2057104
gucuucaaagcauuccauc

SEQ ID NO: 2057106 - RNA, 19 nt, Artificial Sequence
  Description of Artificial Sequence: Synthetic oligonucleotide
  Sense strand starting at position 412 of SEQ ID NO: 1881599
gugaaagauuucuaucaau

SEQ ID NO: 2057107 - RNA, 19 nt, Artificial Sequence
  Description of Artificial Sequence: Synthetic oligonucleotide
  Antisense strand to SEQ ID NO: 2057106
auugauagaaaucuuucac

SEQ ID NO: 2057108 - RNA, 19 nt, Artificial Sequence
  Description of Artificial Sequence: Synthetic oligonucleotide
  Sense strand starting at position 459 of SEQ ID NO: 1881599
uguuaucugggcuaacuuu

SEQ ID NO: 2057109 - RNA, 19 nt, Artificial Sequence
  Description of Artificial Sequence: Synthetic oligonucleotide
  Antisense strand to SEQ ID NO: 2057108
aaaguuagcccagauaaca

SEQ ID NO: 2057110 - RNA, 19 nt, Artificial Sequence
  Description of Artificial Sequence: Synthetic oligonucleotide
  Sense strand starting at position 563 of SEQ ID NO: 1881599
cugauaugguaauuacagu

SEQ ID NO: 2057111 - RNA, 19 nt, Artificial Sequence
  Description of Artificial Sequence: Synthetic oligonucleotide
  Antisense strand to SEQ ID NO: 2057110
acuguaauuaccauaucag

SEQ ID NO: 2057112 - RNA, 19 nt, Artificial Sequence
  Description of Artificial Sequence: Synthetic oligonucleotide
  Sense strand starting at position 570 of SEQ ID NO: 1881599
gguaauuacagugagcuaa

SEQ ID NO: 2057113 - RNA, 19 nt, Artificial Sequence
  Description of Artificial Sequence: Synthetic oligonucleotide
  Antisense strand to SEQ ID NO: 2057112
uuagcucacuguaauuacc

SEQ ID NO: 2057114 - RNA, 19 nt, Artificial Sequence
  Description of Artificial Sequence: Synthetic oligonucleotide
  Sense strand starting at position 799 of SEQ ID NO: 1881599
acccuaguauuaguuauua

SEQ ID NO: 2057115 - RNA, 19 nt, Artificial Sequence
  Description of Artificial Sequence: Synthetic oligonucleotide
  Antisense strand to SEQ ID NO: 2057114
uaauaacuaauacuagggu

SEQ ID NO: 2057116 - RNA, 19 nt, Artificial Sequence
  Description of Artificial Sequence: Synthetic oligonucleotide
  Sense strand starting at position 861 of SEQ ID NO: 1881599
auguacugggcuugaauau

SEQ ID NO: 2057117 - RNA, 19 nt, Artificial Sequence
  Description of Artificial Sequence: Synthetic oligonucleotide
  Antisense strand to SEQ ID NO: 2057116
auauucaagcccaguacau

SEQ ID NO: 2057118 - RNA, 19 nt, Artificial Sequence
  Description of Artificial Sequence: Synthetic oligonucleotide
  Sense strand starting at position 1266 of SEQ ID NO: 1881599
acccuaguauuaguuauaa

SEQ ID NO: 2057119 - RNA, 19 nt, Artificial Sequence
  Description of Artificial Sequence: Synthetic oligonucleotide
  Antisense strand to SEQ ID NO: 2057118
uuauaacuaauacuagggu

SEQ ID NO: 2057120 - RNA, 19 nt, Artificial Sequence
  Description of Artificial Sequence: Synthetic oligonucleotide
  Sense strand starting at position 1333 of SEQ ID NO: 1881599
cuugcauauggguaguauu

SEQ ID NO: 2057121 - RNA, 19 nt, Artificial Sequence
  Description of Artificial Sequence: Synthetic oligonucleotide
  Antisense strand to SEQ ID NO: 2057120
aauacuacccauaugcaag

SEQ ID NO: 2057122 - RNA, 19 nt, Artificial Sequence
  Description of Artificial Sequence: Synthetic oligonucleotide
  Sense strand starting at position 1499 of SEQ ID NO: 1881599
uaguuuaugccagauauag

SEQ ID NO: 2057123 - RNA, 19 nt, Artificial Sequence
  Description of Artificial Sequence: Synthetic oligonucleotide
  Antisense strand to SEQ ID NO: 2057122
cuauaucuggcauaaacua

SEQ ID NO: 2057124 - RNA, 19 nt, Artificial Sequence
  Description of Artificial Sequence: Synthetic oligonucleotide
  Sense strand starting at position 1501 of SEQ ID NO: 1881599
guuuaugccagauauagug

SEQ ID NO: 2057125 - RNA, 19 nt, Artificial Sequence
  Description of Artificial Sequence: Synthetic oligonucleotide
  Antisense strand to SEQ ID NO: 2057124
cacuauaucuggcauaaac

SEQ ID NO: 2057126 - RNA, 19 nt, Artificial Sequence
  Description of Artificial Sequence: Synthetic oligonucleotide
  Sense strand starting at position 1508 of SEQ ID NO: 1881599
ccagauauagugugcaaag

SEQ ID NO: 2057127 - RNA, 19 nt, Artificial Sequence
  Description of Artificial Sequence: Synthetic oligonucleotide
  Antisense strand to SEQ ID NO: 2057126
cuuugcacacuauaucugg

SEQ ID NO: 2057128 - RNA, 19 nt, Artificial Sequence
  Description of Artificial Sequence: Synthetic oligonucleotide
  Sense strand starting at position 1510 of SEQ ID NO: 1881599
agauauagugugcaaagca

SEQ ID NO: 2057129 - RNA, 19 nt, Artificial Sequence
  Description of Artificial Sequence: Synthetic oligonucleotide
  Antisense strand to SEQ ID NO: 2057128
ugcuuugcacacuauaucu

SEQ ID NO: 2057130 - RNA, 19 nt, Artificial Sequence
  Description of Artificial Sequence: Synthetic oligonucleotide
  Sense strand starting at position 1628 of SEQ ID NO: 1881599
augagagaagauugcagua

SEQ ID NO: 2057131 - RNA, 19 nt, Artificial Sequence
  Description of Artificial Sequence: Synthetic oligonucleotide
  Antisense strand to SEQ ID NO: 2057130
uacugcaaucuucucucau

SEQ ID NO: 2057132 - RNA, 19 nt, Artificial Sequence
  Description of Artificial Sequence: Synthetic oligonucleotide
  Sense strand starting at position 2064 of SEQ ID NO: 1881599
uacaguaggcuuuauaaug

SEQ ID NO: 2057133 - RNA, 19 nt, Artificial Sequence
  Description of Artificial Sequence: Synthetic oligonucleotide
  Antisense strand to SEQ ID NO: 2057132
cauuauaaagccuacugua

SEQ ID NO: 2057134 - RNA, 19 nt, Artificial Sequence
  Description of Artificial Sequence: Synthetic oligonucleotide
  Sense strand starting at position 2099 of SEQ ID NO: 1881599
gauagucuugcauacuaga

SEQ ID NO: 2057135 - RNA, 19 nt, Artificial Sequence
  Description of Artificial Sequence: Synthetic oligonucleotide
  Antisense strand to SEQ ID NO: 2057134
ucuaguaugcaagacuauc

SEQ ID NO: 2057136 - RNA, 19 nt, Artificial Sequence
  Description of Artificial Sequence: Synthetic oligonucleotide
  Sense strand starting at position 2104 of SEQ ID NO: 1881599
ucuugcauacuagauuaga

SEQ ID NO: 2057137 - RNA, 19 nt, Artificial Sequence
  Description of Artificial Sequence: Synthetic oligonucleotide
  Antisense strand to SEQ ID NO: 2057136
ucuaaucuaguaugcaaga

SEQ ID NO: 2057138 - RNA, 19 nt, Artificial Sequence
  Description of Artificial Sequence: Synthetic oligonucleotide
  Sense strand starting at position 2209 of SEQ ID NO: 1881599
ggagaaguguaaguucaga

SEQ ID NO: 2057139 - RNA, 19 nt, Artificial Sequence
  Description of Artificial Sequence: Synthetic oligonucleotide
  Antisense strand to SEQ ID NO: 2057138
ucugaacuuacacuucucc

SEQ ID NO: 2057140 - RNA, 19 nt, Artificial Sequence
  Description of Artificial Sequence: Synthetic oligonucleotide
  Sense strand starting at position 2462 of SEQ ID NO: 1881599
gaguauuuccuaugcuguu

SEQ ID NO: 2057141 - RNA, 19 nt, Artificial Sequence
  Description of Artificial Sequence: Synthetic oligonucleotide
  Antisense strand to SEQ ID NO: 2057140
aacagcauaggaaauacuc

SEQ ID NO: 2057142 - RNA, 19 nt, Artificial Sequence
  Description of Artificial Sequence: Synthetic oligonucleotide
  Sense strand starting at position 2537 of SEQ ID NO: 1881599
uuuaguguccuagaaacug

SEQ ID NO: 2057143 - RNA, 19 nt, Artificial Sequence
  Description of Artificial Sequence: Synthetic oligonucleotide
  Antisense strand to SEQ ID NO: 2057142
caguuucuaggacacuaaa

SEQ ID NO: 2057144 - RNA, 19 nt, Artificial Sequence
  Description of Artificial Sequence: Synthetic oligonucleotide
  Sense strand starting at position 2603 of SEQ ID NO: 1881599
guuccuuuauaagugaaag

SEQ ID NO: 2057145 - RNA, 19 nt, Artificial Sequence
  Description of Artificial Sequence: Synthetic oligonucleotide
  Antisense strand to SEQ ID NO: 2057144
cuuucacuuauaaaggaac

SEQ ID NO: 2057146 - RNA, 19 nt, Artificial Sequence
  Description of Artificial Sequence: Synthetic oligonucleotide
  Sense strand starting at position 2707 of SEQ ID NO: 1881599
gcuaaacuagacugaagua

SEQ ID NO: 2057147 - RNA, 19 nt, Artificial Sequence
  Description of Artificial Sequence: Synthetic oligonucleotide
  Antisense strand to SEQ ID NO: 2057146
uacuucagucuaguuuagc

SEQ ID NO: 2057148 - RNA, 19 nt, Artificial Sequence
  Description of Artificial Sequence: Synthetic oligonucleotide
  Sense strand starting at position 2717 of SEQ ID NO: 1881599
acugaaguaauguggguau

SEQ ID NO: 2057149 - RNA, 19 nt, Artificial Sequence
  Description of Artificial Sequence: Synthetic oligonucleotide
  Antisense strand to SEQ ID NO: 2057148
auacccacauuacuucagu

SEQ ID NO: 2057150 - RNA, 19 nt, Artificial Sequence
  Description of Artificial Sequence: Synthetic oligonucleotide
  Sense strand starting at position 2719 of SEQ ID NO: 1881599
ugaaguaauguggguauga

SEQ ID NO: 2057151 - RNA, 19 nt, Artificial Sequence
  Description of Artificial Sequence: Synthetic oligonucleotide
  Antisense strand to SEQ ID NO: 2057150
ucauacccacauuacuuca

SEQ ID NO: 2057152 - RNA, 19 nt, Artificial Sequence
  Description of Artificial Sequence: Synthetic oligonucleotide
  Sense strand starting at position 2720 of SEQ ID NO: 1881599
gaaguaauguggguaugag

SEQ ID NO: 2057153 - RNA, 19 nt, Artificial Sequence
  Description of Artificial Sequence: Synthetic oligonucleotide
  Antisense strand to SEQ ID NO: 2057152
cucauacccacauuacuuc

SEQ ID NO: 2057154 - RNA, 19 nt, Artificial Sequence
  Description of Artificial Sequence: Synthetic oligonucleotide
  Sense strand starting at position 2804 of SEQ ID NO: 1881599
aaugcaaaccugugaguua

SEQ ID NO: 2057155 - RNA, 19 nt, Artificial Sequence
  Description of Artificial Sequence: Synthetic oligonucleotide
  Antisense strand to SEQ ID NO: 2057154
uaacucacagguuugcauu

SEQ ID NO: 2057156 - RNA, 19 nt, Artificial Sequence
  Description of Artificial Sequence: Synthetic oligonucleotide
  Sense strand starting at position 2852 of SEQ ID NO: 1881599
cagcauaaccgagauggua

SEQ ID NO: 2057157 - RNA, 19 nt, Artificial Sequence
  Description of Artificial Sequence: Synthetic oligonucleotide
  Antisense strand to SEQ ID NO: 2057156
uaccaucucgguuaugcug

SEQ ID NO: 2057158 - RNA, 19 nt, Artificial Sequence
  Description of Artificial Sequence: Synthetic oligonucleotide
  Sense strand starting at position 2854 of SEQ ID NO: 1881599
gcauaaccgagaugguaug

SEQ ID NO: 2057159 - RNA, 19 nt, Artificial Sequence
  Description of Artificial Sequence: Synthetic oligonucleotide
  Antisense strand to SEQ ID NO: 2057158
cauaccaucucgguuaugc

SEQ ID NO: 2057160 - RNA, 19 nt, Artificial Sequence
  Description of Artificial Sequence: Synthetic oligonucleotide
  Sense strand starting at position 3118 of SEQ ID NO: 1881599
cagggaaaguaauuagguu

SEQ ID NO: 2057161 - RNA, 19 nt, Artificial Sequence
  Description of Artificial Sequence: Synthetic oligonucleotide
  Antisense strand to SEQ ID NO: 2057160
aaccuaauuacuuucccug

SEQ ID NO: 2057162 - RNA, 19 nt, Artificial Sequence
  Description of Artificial Sequence: Synthetic oligonucleotide
  Sense strand starting at position 3122 of SEQ ID NO: 1881599
gaaaguaauuagguuagca

SEQ ID NO: 2057163 - RNA, 19 nt, Artificial Sequence
  Description of Artificial Sequence: Synthetic oligonucleotide
  Antisense strand to SEQ ID NO: 2057162
ugcuaaccuaauuacuuuc

SEQ ID NO: 2057164 - RNA, 19 nt, Artificial Sequence
  Description of Artificial Sequence: Synthetic oligonucleotide
  Sense strand starting at position 3124 of SEQ ID NO: 1881599
aaguaauuagguuagcauc

SEQ ID NO: 2057165 - RNA, 19 nt, Artificial Sequence
  Description of Artificial Sequence: Synthetic oligonucleotide
  Antisense strand to SEQ ID NO: 2057164
gaugcuaaccuaauuacuu

SEQ ID NO: 2057166 - RNA, 19 nt, Artificial Sequence
  Description of Artificial Sequence: Synthetic oligonucleotide
  Sense strand starting at position 3316 of SEQ ID NO: 1881599
uuagaauucgacuguagaa

SEQ ID NO: 2057167 - RNA, 19 nt, Artificial Sequence
  Description of Artificial Sequence: Synthetic oligonucleotide
  Antisense strand to SEQ ID NO: 2057166
uucuacagucgaauucuaa

SEQ ID NO: 2057168 - RNA, 19 nt, Artificial Sequence
  Description of Artificial Sequence: Synthetic oligonucleotide
  Sense strand starting at position 3342 of SEQ ID NO: 1881599
ggaugaauucacuggaugu

SEQ ID NO: 2057169 - RNA, 19 nt, Artificial Sequence
  Description of Artificial Sequence: Synthetic oligonucleotide
  Antisense strand to SEQ ID NO: 2057168
acauccagugaauucaucc

SEQ ID NO: 2057170 - RNA, 19 nt, Artificial Sequence
  Description of Artificial Sequence: Synthetic oligonucleotide
  Sense strand starting at position 3467 of SEQ ID NO: 1881599
gucuauaaaugcucauaug

SEQ ID NO: 2057171 - RNA, 19 nt, Artificial Sequence
  Description of Artificial Sequence: Synthetic oligonucleotide
  Antisense strand to SEQ ID NO: 2057170
cauaugagcauuuauagac

SEQ ID NO: 2057172 - RNA, 19 nt, Artificial Sequence
  Description of Artificial Sequence: Synthetic oligonucleotide
  Sense strand starting at position 3532 of SEQ ID NO: 1881599
augguaugccacuauggua

SEQ ID NO: 2057173 - RNA, 19 nt, Artificial Sequence
  Description of Artificial Sequence: Synthetic oligonucleotide
  Antisense strand to SEQ ID NO: 2057172
uaccauaguggcauaccau

SEQ ID NO: 2057174 - RNA, 19 nt, Artificial Sequence
  Description of Artificial Sequence: Synthetic oligonucleotide
  Sense strand starting at position 3544 of SEQ ID NO: 1881599
uaugguagagugggugaaa

SEQ ID NO: 2057175 - RNA, 19 nt, Artificial Sequence
  Description of Artificial Sequence: Synthetic oligonucleotide
  Antisense strand to SEQ ID NO: 2057174
uuucacccacucuaccaua

SEQ ID NO: 2057176 - RNA, 19 nt, Artificial Sequence
  Description of Artificial Sequence: Synthetic oligonucleotide
  Sense strand starting at position 3639 of SEQ ID NO: 1881599
gcugaaauaugggcauaau

SEQ ID NO: 2057177 - RNA, 19 nt, Artificial Sequence
  Description of Artificial Sequence: Synthetic oligonucleotide
  Antisense strand to SEQ ID NO: 2057176
auuaugcccauauuucagc

SEQ ID NO: 2057178 - RNA, 19 nt, Artificial Sequence
  Description of Artificial Sequence: Synthetic oligonucleotide
  Sense strand starting at position 27 of SEQ ID NO: 1881600
cuaccauucugagcacaug

SEQ ID NO: 2057179 - RNA, 19 nt, Artificial Sequence
  Description of Artificial Sequence: Synthetic oligonucleotide
  Antisense strand to SEQ ID NO: 2057178
caugugcucagaaugguag

SEQ ID NO: 2057180 - RNA, 19 nt, Artificial Sequence
  Description of Artificial Sequence: Synthetic oligonucleotide
  Sense strand starting at position 187 of SEQ ID NO: 1881600
ugauguaaagcuuaucuag

SEQ ID NO: 2057181 - RNA, 19 nt, Artificial Sequence
  Description of Artificial Sequence: Synthetic oligonucleotide
  Antisense strand to SEQ ID NO: 2057180
cuagauaagcuuuacauca

SEQ ID NO: 2057182 - RNA, 19 nt, Artificial Sequence
  Description of Artificial Sequence: Synthetic oligonucleotide
  Sense strand starting at position 325 of SEQ ID NO: 1881600
uugguugcucaagauccaa

SEQ ID NO: 2057183 - RNA, 19 nt, Artificial Sequence
  Description of Artificial Sequence: Synthetic oligonucleotide
  Antisense strand to SEQ ID NO: 2057182
uuggaucuugagcaaccaa

SEQ ID NO: 2057184 - RNA, 19 nt, Artificial Sequence
  Description of Artificial Sequence: Synthetic oligonucleotide
  Sense strand starting at position 352 of SEQ ID NO: 1881600
ucuuuaucugagcaagcaa

SEQ ID NO: 2057185 - RNA, 19 nt, Artificial Sequence
  Description of Artificial Sequence: Synthetic oligonucleotide
  Antisense strand to SEQ ID NO: 2057184
uugcuugcucagauaaaga

SEQ ID NO: 2057186 - RNA, 19 nt, Artificial Sequence
  Description of Artificial Sequence: Synthetic oligonucleotide
  Sense strand starting at position 419 of SEQ ID NO: 1881600
uuggaaguuguccaccaca

SEQ ID NO: 2057187 - RNA, 19 nt, Artificial Sequence
  Description of Artificial Sequence: Synthetic oligonucleotide
  Antisense strand to SEQ ID NO: 2057186
ugugguggacaacuuccaa

SEQ ID NO: 2057188 - RNA, 19 nt, Artificial Sequence
  Description of Artificial Sequence: Synthetic oligonucleotide
  Sense strand starting at position 460 of SEQ ID NO: 1881600
uuugauuauugcccagaac

SEQ ID NO: 2057189 - RNA, 19 nt, Artificial Sequence
  Description of Artificial Sequence: Synthetic oligonucleotide
  Antisense strand to SEQ ID NO: 2057188
guucugggcaauaaucaaa

SEQ ID NO: 2057190 - RNA, 19 nt, Artificial Sequence
  Description of Artificial Sequence: Synthetic oligonucleotide
  Sense strand starting at position 461 of SEQ ID NO: 1881600
uugauuauugcccagaacu

SEQ ID NO: 2057191 - RNA, 19 nt, Artificial Sequence
  Description of Artificial Sequence: Synthetic oligonucleotide
  Antisense strand to SEQ ID NO: 2057190
aguucugggcaauaaucaa

SEQ ID NO: 2057192 - RNA, 19 nt, Artificial Sequence
  Description of Artificial Sequence: Synthetic oligonucleotide
  Sense strand starting at position 471 of SEQ ID NO: 1881600
cccagaacuuagucaugua

SEQ ID NO: 2057193 - RNA, 19 nt, Artificial Sequence
  Description of Artificial Sequence: Synthetic oligonucleotide
  Antisense strand to SEQ ID NO: 2057192
uacaugacuaaguucuggg

SEQ ID NO: 2057194 - RNA, 19 nt, Artificial Sequence
  Description of Artificial Sequence: Synthetic oligonucleotide
  Sense strand starting at position 815 of SEQ ID NO: 1881600
gccacacuuguauacaagu

SEQ ID NO: 2057195 - RNA, 19 nt, Artificial Sequence
  Description of Artificial Sequence: Synthetic oligonucleotide
  Antisense strand to SEQ ID NO: 2057194
acuuguauacaaguguggc

SEQ ID NO: 2057196 - RNA, 19 nt, Artificial Sequence
  Description of Artificial Sequence: Synthetic oligonucleotide
  Sense strand starting at position 911 of SEQ ID NO: 1881600
acuauaguuguacguauuu

SEQ ID NO: 2057197 - RNA, 19 nt, Artificial Sequence
  Description of Artificial Sequence: Synthetic oligonucleotide
  Antisense strand to SEQ ID NO: 2057196
aaauacguacaacuauagu

SEQ ID NO: 2057198 - RNA, 19 nt, Artificial Sequence
  Description of Artificial Sequence: Synthetic oligonucleotide
  Sense strand starting at position 957 of SEQ ID NO: 1881600
cguauacaacgugaaauga

SEQ ID NO: 2057199 - RNA, 19 nt, Artificial Sequence
  Description of Artificial Sequence: Synthetic oligonucleotide
  Antisense strand to SEQ ID NO: 2057198
ucauuucacguuguauacg

SEQ ID NO: 2057200 - RNA, 19 nt, Artificial Sequence
  Description of Artificial Sequence: Synthetic oligonucleotide
  Sense strand starting at position 1227 of SEQ ID NO: 1881600
uuguguuuggaacauuaca

SEQ ID NO: 2057201 - RNA, 19 nt, Artificial Sequence
  Description of Artificial Sequence: Synthetic oligonucleotide
  Antisense strand to SEQ ID NO: 2057200
uguaauguuccaaacacaa

SEQ ID NO: 2057202 - RNA, 19 nt, Artificial Sequence
  Description of Artificial Sequence: Synthetic oligonucleotide
  Sense strand starting at position 1412 of SEQ ID NO: 1881600
uuggcaugcuaauuucuga

SEQ ID NO: 2057203 - RNA, 19 nt, Artificial Sequence
  Description of Artificial Sequence: Synthetic oligonucleotide
  Antisense strand to SEQ ID NO: 2057202
ucagaaauuagcaugccaa

SEQ ID NO: 2057204 - RNA, 19 nt, Artificial Sequence
  Description of Artificial Sequence: Synthetic oligonucleotide
  Sense strand starting at position 1539 of SEQ ID NO: 1881600
ucugguuguggagaauuca

SEQ ID NO: 2057205 - RNA, 19 nt, Artificial Sequence
  Description of Artificial Sequence: Synthetic oligonucleotide
  Antisense strand to SEQ ID NO: 2057204
ugaauucuccacaaccaga

SEQ ID NO: 2057206 - RNA, 19 nt, Artificial Sequence
  Description of Artificial Sequence: Synthetic oligonucleotide
  Sense strand starting at position 1609 of SEQ ID NO: 1881600
ggcuaaugacuccacuagu

SEQ ID NO: 2057207 - RNA, 19 nt, Artificial Sequence
  Description of Artificial Sequence: Synthetic oligonucleotide
  Antisense strand to SEQ ID NO: 2057206
acuaguggagucauuagcc

SEQ ID NO: 2057208 - RNA, 19 nt, Artificial Sequence
  Description of Artificial Sequence: Synthetic oligonucleotide
  Sense strand starting at position 1657 of SEQ ID NO: 1881600
gaccucuuagauggucauu

SEQ ID NO: 2057209 - RNA, 19 nt, Artificial Sequence
  Description of Artificial Sequence: Synthetic oligonucleotide
  Antisense strand to SEQ ID NO: 2057208
aaugaccaucuaagagguc

SEQ ID NO: 2057210 - RNA, 19 nt, Artificial Sequence
  Description of Artificial Sequence: Synthetic oligonucleotide
  Sense strand starting at position 1786 of SEQ ID NO: 1881600
gcagaaguucucuaauaua

SEQ ID NO: 2057211 - RNA, 19 nt, Artificial Sequence
  Description of Artificial Sequence: Synthetic oligonucleotide
  Antisense strand to SEQ ID NO: 2057210
uauauuagagaacuucugc

SEQ ID NO: 2057212 - RNA, 19 nt, Artificial Sequence
  Description of Artificial Sequence: Synthetic oligonucleotide
  Sense strand starting at position 1838 of SEQ ID NO: 1881600
acucucauuuguguucuau

SEQ ID NO: 2057213 - RNA, 19 nt, Artificial Sequence
  Description of Artificial Sequence: Synthetic oligonucleotide
  Antisense strand to SEQ ID NO: 2057212
auagaacacaaaugagagu

SEQ ID NO: 2057214 - RNA, 19 nt, Artificial Sequence
  Description of Artificial Sequence: Synthetic oligonucleotide
  Sense strand starting at position 1840 of SEQ ID NO: 1881600
ucucauuuguguucuauac

SEQ ID NO: 2057215 - RNA, 19 nt, Artificial Sequence
  Description of Artificial Sequence: Synthetic oligonucleotide
  Antisense strand to SEQ ID NO: 2057214
guauagaacacaaaugaga

SEQ ID NO: 2057216 - RNA, 19 nt, Artificial Sequence
  Description of Artificial Sequence: Synthetic oligonucleotide
  Sense strand starting at position 2040 of SEQ ID NO: 1881600
aaacauaacgcugauguca

SEQ ID NO: 2057217 - RNA, 19 nt, Artificial Sequence
  Description of Artificial Sequence: Synthetic oligonucleotide
  Antisense strand to SEQ ID NO: 2057216
ugacaucagcguuauguuu

SEQ ID NO: 2057218 - RNA, 19 nt, Artificial Sequence
  Description of Artificial Sequence: Synthetic oligonucleotide
  Sense strand starting at position 2110 of SEQ ID NO: 1881600
gguggcuugaaauaguaga

SEQ ID NO: 2057219 - RNA, 19 nt, Artificial Sequence
  Description of Artificial Sequence: Synthetic oligonucleotide
  Antisense strand to SEQ ID NO: 2057218
ucuacuauuucaagccacc

SEQ ID NO: 2057220 - RNA, 19 nt, Artificial Sequence
  Description of Artificial Sequence: Synthetic oligonucleotide
  Sense strand starting at position 2330 of SEQ ID NO: 1881600
uuuagaguuuacuuggaua

SEQ ID NO: 2057221 - RNA, 19 nt, Artificial Sequence
  Description of Artificial Sequence: Synthetic oligonucleotide
  Antisense strand to SEQ ID NO: 2057220
uauccaaguaaacucuaaa

SEQ ID NO: 2057222 - RNA, 19 nt, Artificial Sequence
  Description of Artificial Sequence: Synthetic oligonucleotide
  Sense strand starting at position 2332 of SEQ ID NO: 1881600
uagaguuuacuuggauaau

SEQ ID NO: 2057223 - RNA, 19 nt, Artificial Sequence
  Description of Artificial Sequence: Synthetic oligonucleotide
  Antisense strand to SEQ ID NO: 2057222
auuauccaaguaaacucua

SEQ ID NO: 2057224 - RNA, 19 nt, Artificial Sequence
  Description of Artificial Sequence: Synthetic oligonucleotide
  Sense strand starting at position 2476 of SEQ ID NO: 1881600
uugaacauuuggcaaauaa

SEQ ID NO: 2057225 - RNA, 19 nt, Artificial Sequence
  Description of Artificial Sequence: Synthetic oligonucleotide
  Antisense strand to SEQ ID NO: 2057224
uuauuugccaaauguucaa

SEQ ID NO: 2057226 - RNA, 19 nt, Artificial Sequence
  Description of Artificial Sequence: Synthetic oligonucleotide
  Sense strand starting at position 2518 of SEQ ID NO: 1881600
aauugacagcgugaaguau

SEQ ID NO: 2057227 - RNA, 19 nt, Artificial Sequence
  Description of Artificial Sequence: Synthetic oligonucleotide
  Antisense strand to SEQ ID NO: 2057226
auacuucacgcugucaauu

SEQ ID NO: 2057228 - RNA, 19 nt, Artificial Sequence
  Description of Artificial Sequence: Synthetic oligonucleotide
  Sense strand starting at position 2530 of SEQ ID NO: 1881600
gaaguaucuccuggaguag

SEQ ID NO: 2057229 - RNA, 19 nt, Artificial Sequence
  Description of Artificial Sequence: Synthetic oligonucleotide
  Antisense strand to SEQ ID NO: 2057228
cuacuccaggagauacuuc

SEQ ID NO: 2057230 - RNA, 19 nt, Artificial Sequence
  Description of Artificial Sequence: Synthetic oligonucleotide
  Sense strand starting at position 2631 of SEQ ID NO: 1881600
uuaccuuaucuguagaggu

SEQ ID NO: 2057231 - RNA, 19 nt, Artificial Sequence
  Description of Artificial Sequence: Synthetic oligonucleotide
  Antisense strand to SEQ ID NO: 2057230
accucuacagauaagguaa

SEQ ID NO: 2057232 - RNA, 19 nt, Artificial Sequence
  Description of Artificial Sequence: Synthetic oligonucleotide
  Sense strand starting at position 2686 of SEQ ID NO: 1881600
uccagaaaucuuugacugu

SEQ ID NO: 2057233 - RNA, 19 nt, Artificial Sequence
  Description of Artificial Sequence: Synthetic oligonucleotide
  Antisense strand to SEQ ID NO: 2057232
acagucaaagauuucugga

SEQ ID NO: 2057234 - RNA, 19 nt, Artificial Sequence
  Description of Artificial Sequence: Synthetic oligonucleotide
  Sense strand starting at position 2699 of SEQ ID NO: 1881600
gacugucacuauuuguagu

SEQ ID NO: 2057235 - RNA, 19 nt, Artificial Sequence
  Description of Artificial Sequence: Synthetic oligonucleotide
  Antisense strand to SEQ ID NO: 2057234
acuacaaauagugacaguc

SEQ ID NO: 2057236 - RNA, 19 nt, Artificial Sequence
  Description of Artificial Sequence: Synthetic oligonucleotide
  Sense strand starting at position 2701 of SEQ ID NO: 1881600
cugucacuauuuguaguau

SEQ ID NO: 2057237 - RNA, 19 nt, Artificial Sequence
  Description of Artificial Sequence: Synthetic oligonucleotide
  Antisense strand to SEQ ID NO: 2057236
auacuacaaauagugacag

SEQ ID NO: 2057238 - RNA, 19 nt, Artificial Sequence
  Description of Artificial Sequence: Synthetic oligonucleotide
  Sense strand starting at position 2908 of SEQ ID NO: 1881600
aggugacuccaucacaagu

SEQ ID NO: 2057239 - RNA, 19 nt, Artificial Sequence
  Description of Artificial Sequence: Synthetic oligonucleotide
  Antisense strand to SEQ ID NO: 2057238
acuugugauggagucaccu

SEQ ID NO: 2057240 - RNA, 19 nt, Artificial Sequence
  Description of Artificial Sequence: Synthetic oligonucleotide
  Sense strand starting at position 3144 of SEQ ID NO: 1881600
ggacaacuugcagguagau

SEQ ID NO: 2057241 - RNA, 19 nt, Artificial Sequence
  Description of Artificial Sequence: Synthetic oligonucleotide
  Antisense strand to SEQ ID NO: 2057240
aucuaccugcaaguugucc

SEQ ID NO: 2057242 - RNA, 19 nt, Artificial Sequence
  Description of Artificial Sequence: Synthetic oligonucleotide
  Sense strand starting at position 3160 of SEQ ID NO: 1881600
gauggaaauaggugugacu

SEQ ID NO: 2057243 - RNA, 19 nt, Artificial Sequence
  Description of Artificial Sequence: Synthetic oligonucleotide
  Antisense strand to SEQ ID NO: 2057242
agucacaccuauuuccauc

SEQ ID NO: 2057244 - RNA, 19 nt, Artificial Sequence
  Description of Artificial Sequence: Synthetic oligonucleotide
  Sense strand starting at position 3167 of SEQ ID NO: 1881600
auaggugugacuggacuuu

SEQ ID NO: 2057245 - RNA, 19 nt, Artificial Sequence
  Description of Artificial Sequence: Synthetic oligonucleotide
  Antisense strand to SEQ ID NO: 2057244
aaaguccagucacaccuau

SEQ ID NO: 2057246 - RNA, 19 nt, Artificial Sequence
  Description of Artificial Sequence: Synthetic oligonucleotide
  Sense strand starting at position 3192 of SEQ ID NO: 1881600
gcagauuugucagucaucu

SEQ ID NO: 2057247 - RNA, 19 nt, Artificial Sequence
  Description of Artificial Sequence: Synthetic oligonucleotide
  Antisense strand to SEQ ID NO: 2057246
agaugacugacaaaucugc

SEQ ID NO: 2057248 - RNA, 19 nt, Artificial Sequence
  Description of Artificial Sequence: Synthetic oligonucleotide
  Sense strand starting at position 3218 of SEQ ID NO: 1881600
auagguagugcugauaaga

SEQ ID NO: 2057249 - RNA, 19 nt, Artificial Sequence
  Description of Artificial Sequence: Synthetic oligonucleotide
  Antisense strand to SEQ ID NO: 2057248
ucuuaucagcacuaccuau

SEQ ID NO: 2057250 - RNA, 19 nt, Artificial Sequence
  Description of Artificial Sequence: Synthetic oligonucleotide
  Sense strand starting at position 3282 of SEQ ID NO: 1881600
uggguuugggauggucaga

SEQ ID NO: 2057251 - RNA, 19 nt, Artificial Sequence
  Description of Artificial Sequence: Synthetic oligonucleotide
  Antisense strand to SEQ ID NO: 2057250
ucugaccaucccaaaccca

SEQ ID NO: 2057252 - RNA, 19 nt, Artificial Sequence
  Description of Artificial Sequence: Synthetic oligonucleotide
  Sense strand starting at position 3394 of SEQ ID NO: 1881600
gaagauggguuguuucuga

SEQ ID NO: 2057253 - RNA, 19 nt, Artificial Sequence
  Description of Artificial Sequence: Synthetic oligonucleotide
  Antisense strand to SEQ ID NO: 2057252
ucagaaacaacccaucuuc

SEQ ID NO: 2057254 - RNA, 19 nt, Artificial Sequence
  Description of Artificial Sequence: Synthetic oligonucleotide
  Sense strand starting at position 3422 of SEQ ID NO: 1881600
ccacuuuagcaagaguuug

SEQ ID NO: 2057255 - RNA, 19 nt, Artificial Sequence
  Description of Artificial Sequence: Synthetic oligonucleotide
  Antisense strand to SEQ ID NO: 2057254
caaacucuugcuaaagugg

SEQ ID NO: 2057256 - RNA, 19 nt, Artificial Sequence
  Description of Artificial Sequence: Synthetic oligonucleotide
  Sense strand starting at position 3517 of SEQ ID NO: 1881600
uuagcuaaggcuuaauaag

SEQ ID NO: 2057257 - RNA, 19 nt, Artificial Sequence
  Description of Artificial Sequence: Synthetic oligonucleotide
  Antisense strand to SEQ ID NO: 2057256
cuuauuaagccuuagcuaa

SEQ ID NO: 2057258 - RNA, 19 nt, Artificial Sequence
  Description of Artificial Sequence: Synthetic oligonucleotide
  Sense strand starting at position 685 of SEQ ID NO: 1881601
gggccugucauuuauguuc

SEQ ID NO: 2057259 - RNA, 19 nt, Artificial Sequence
  Description of Artificial Sequence: Synthetic oligonucleotide
  Antisense strand to SEQ ID NO: 2057258
gaacauaaaugacaggccc

SEQ ID NO: 2057260 - RNA, 19 nt, Artificial Sequence
  Description of Artificial Sequence: Synthetic oligonucleotide
  Sense strand starting at position 725 of SEQ ID NO: 1881601
aucagauugccucagacau

SEQ ID NO: 2057261 - RNA, 19 nt, Artificial Sequence
  Description of Artificial Sequence: Synthetic oligonucleotide
  Antisense strand to SEQ ID NO: 2057260
augucugaggcaaucugau

SEQ ID NO: 2057262 - RNA, 19 nt, Artificial Sequence
  Description of Artificial Sequence: Synthetic oligonucleotide
  Sense strand starting at position 832 of SEQ ID NO: 1881601
gggucauacagccaguaau

SEQ ID NO: 2057263 - RNA, 19 nt, Artificial Sequence
  Description of Artificial Sequence: Synthetic oligonucleotide
  Antisense strand to SEQ ID NO: 2057262
auuacuggcuguaugaccc

SEQ ID NO: 2057264 - RNA, 19 nt, Artificial Sequence
  Description of Artificial Sequence: Synthetic oligonucleotide
  Sense strand starting at position 1477 of SEQ ID NO: 1881601
ugacaucugguacauugua

SEQ ID NO: 2057265 - RNA, 19 nt, Artificial Sequence
  Description of Artificial Sequence: Synthetic oligonucleotide
  Antisense strand to SEQ ID NO: 2057264
uacaauguaccagauguca

SEQ ID NO: 2057266 - RNA, 19 nt, Artificial Sequence
  Description of Artificial Sequence: Synthetic oligonucleotide
  Sense strand starting at position 1552 of SEQ ID NO: 1881601
cagaguaacuaaguaucga

SEQ ID NO: 2057267 - RNA, 19 nt, Artificial Sequence
  Description of Artificial Sequence: Synthetic oligonucleotide
  Antisense strand to SEQ ID NO: 2057266
ucgauacuuaguuacucug

SEQ ID NO: 2057268 - RNA, 19 nt, Artificial Sequence
  Description of Artificial Sequence: Synthetic oligonucleotide
  Sense strand starting at position 1569 of SEQ ID NO: 1881601
gagauuggauugccucaaa

SEQ ID NO: 2057269 - RNA, 19 nt, Artificial Sequence
  Description of Artificial Sequence: Synthetic oligonucleotide
  Antisense strand to SEQ ID NO: 2057268
uuugaggcaauccaaucuc

SEQ ID NO: 2057270 - RNA, 19 nt, Artificial Sequence
  Description of Artificial Sequence: Synthetic oligonucleotide
  Sense strand starting at position 1603 of SEQ ID NO: 1881601
uggauugcccaugaguuau

SEQ ID NO: 2057271 - RNA, 19 nt, Artificial Sequence
  Description of Artificial Sequence: Synthetic oligonucleotide
  Antisense strand to SEQ ID NO: 2057270
auaacucaugggcaaucca

SEQ ID NO: 2057272 - RNA, 19 nt, Artificial Sequence
  Description of Artificial Sequence: Synthetic oligonucleotide
  Sense strand starting at position 1638 of SEQ ID NO: 1881601
gcugauacuccugcguauu

SEQ ID NO: 2057273 - RNA, 19 nt, Artificial Sequence
  Description of Artificial Sequence: Synthetic oligonucleotide
  Antisense strand to SEQ ID NO: 2057272
aauacgcaggaguaucagc

SEQ ID NO: 2057274 - RNA, 19 nt, Artificial Sequence
  Description of Artificial Sequence: Synthetic oligonucleotide
  Sense strand starting at position 1834 of SEQ ID NO: 1881601
aagggaaacugcuugugau

SEQ ID NO: 2057275 - RNA, 19 nt, Artificial Sequence
  Description of Artificial Sequence: Synthetic oligonucleotide
  Antisense strand to SEQ ID NO: 2057274
aucacaagcaguuucccuu

SEQ ID NO: 2057276 - RNA, 19 nt, Artificial Sequence
  Description of Artificial Sequence: Synthetic oligonucleotide
  Sense strand starting at position 1835 of SEQ ID NO: 1881601
agggaaacugcuugugaua

SEQ ID NO: 2057277 - RNA, 19 nt, Artificial Sequence
  Description of Artificial Sequence: Synthetic oligonucleotide
  Antisense strand to SEQ ID NO: 2057276
uaucacaagcaguuucccu

SEQ ID NO: 2057278 - RNA, 19 nt, Artificial Sequence
  Description of Artificial Sequence: Synthetic oligonucleotide
  Sense strand starting at position 1873 of SEQ ID NO: 1881601
agugguuucccucaauuga

SEQ ID NO: 2057279 - RNA, 19 nt, Artificial Sequence
  Description of Artificial Sequence: Synthetic oligonucleotide
  Antisense strand to SEQ ID NO: 2057278
ucaauugagggaaaccacu

SEQ ID NO: 2057280 - RNA, 19 nt, Artificial Sequence
  Description of Artificial Sequence: Synthetic oligonucleotide
  Sense strand starting at position 1993 of SEQ ID NO: 1881601
agaacagucuucccugaag

SEQ ID NO: 2057281 - RNA, 19 nt, Artificial Sequence
  Description of Artificial Sequence: Synthetic oligonucleotide
  Antisense strand to SEQ ID NO: 2057280
cuucagggaagacuguucu

SEQ ID NO: 2057282 - RNA, 19 nt, Artificial Sequence
  Description of Artificial Sequence: Synthetic oligonucleotide
  Sense strand starting at position 1996 of SEQ ID NO: 1881601
acagucuucccugaagacu

SEQ ID NO: 2057283 - RNA, 19 nt, Artificial Sequence
  Description of Artificial Sequence: Synthetic oligonucleotide
  Antisense strand to SEQ ID NO: 2057282
agucuucagggaagacugu

SEQ ID NO: 2057284 - RNA, 19 nt, Artificial Sequence
  Description of Artificial Sequence: Synthetic oligonucleotide
  Sense strand starting at position 2098 of SEQ ID NO: 1881601
cugggcuuauaucuaauaa

SEQ ID NO: 2057285 - RNA, 19 nt, Artificial Sequence
  Description of Artificial Sequence: Synthetic oligonucleotide
  Antisense strand to SEQ ID NO: 2057284
uuauuagauauaagcccag

SEQ ID NO: 2057286 - RNA, 19 nt, Artificial Sequence
  Description of Artificial Sequence: Synthetic oligonucleotide
  Sense strand starting at position 2437 of SEQ ID NO: 1881601
uggaaugaguuauccaauu

SEQ ID NO: 2057287 - RNA, 19 nt, Artificial Sequence
  Description of Artificial Sequence: Synthetic oligonucleotide
  Antisense strand to SEQ ID NO: 2057286
aauuggauaacucauucca

SEQ ID NO: 2057288 - RNA, 19 nt, Artificial Sequence
  Description of Artificial Sequence: Synthetic oligonucleotide
  Sense strand starting at position 2526 of SEQ ID NO: 1881601
ucagauguccaucagagua

SEQ ID NO: 2057289 - RNA, 19 nt, Artificial Sequence
  Description of Artificial Sequence: Synthetic oligonucleotide
  Antisense strand to SEQ ID NO: 2057288
uacucugauggacaucuga

SEQ ID NO: 2057290 - RNA, 19 nt, Artificial Sequence
  Description of Artificial Sequence: Synthetic oligonucleotide
  Sense strand starting at position 2547 of SEQ ID NO: 1881601
aggucaggugucuaucaga

SEQ ID NO: 2057291 - RNA, 19 nt, Artificial Sequence
  Description of Artificial Sequence: Synthetic oligonucleotide
  Antisense strand to SEQ ID NO: 2057290
ucugauagacaccugaccu

SEQ ID NO: 2057292 - RNA, 19 nt, Artificial Sequence
  Description of Artificial Sequence: Synthetic oligonucleotide
  Sense strand starting at position 2657 of SEQ ID NO: 1881601
aaaugaaugccuuggcaag

SEQ ID NO: 2057293 - RNA, 19 nt, Artificial Sequence
  Description of Artificial Sequence: Synthetic oligonucleotide
  Antisense strand to SEQ ID NO: 2057292
cuugccaaggcauucauuu

SEQ ID NO: 2057294 - RNA, 19 nt, Artificial Sequence
  Description of Artificial Sequence: Synthetic oligonucleotide
  Sense strand starting at position 2667 of SEQ ID NO: 1881601
cuuggcaagcuuuaagaua

SEQ ID NO: 2057295 - RNA, 19 nt, Artificial Sequence
  Description of Artificial Sequence: Synthetic oligonucleotide
  Antisense strand to SEQ ID NO: 2057294
uaucuuaaagcuugccaag

SEQ ID NO: 2057296 - RNA, 19 nt, Artificial Sequence
  Description of Artificial Sequence: Synthetic oligonucleotide
  Sense strand starting at position 2776 of SEQ ID NO: 1881601
gcuccucaaguugaaacau

SEQ ID NO: 2057297 - RNA, 19 nt, Artificial Sequence
  Description of Artificial Sequence: Synthetic oligonucleotide
  Antisense strand to SEQ ID NO: 2057296
auguuucaacuugaggagc

SEQ ID NO: 2057298 - RNA, 19 nt, Artificial Sequence
  Description of Artificial Sequence: Synthetic oligonucleotide
  Sense strand starting at position 2885 of SEQ ID NO: 1881601
gugguacuaccucauaaua

SEQ ID NO: 2057299 - RNA, 19 nt, Artificial Sequence
  Description of Artificial Sequence: Synthetic oligonucleotide
  Antisense strand to SEQ ID NO: 2057298
uauuaugagguaguaccac

SEQ ID NO: 2057300 - RNA, 19 nt, Artificial Sequence
  Description of Artificial Sequence: Synthetic oligonucleotide
  Sense strand starting at position 3102 of SEQ ID NO: 1881601
guaagacaaauucggugaa

SEQ ID NO: 2057301 - RNA, 19 nt, Artificial Sequence
  Description of Artificial Sequence: Synthetic oligonucleotide
  Antisense strand to SEQ ID NO: 2057300
uucaccgaauuugucuuac

SEQ ID NO: 2057302 - RNA, 19 nt, Artificial Sequence
  Description of Artificial Sequence: Synthetic oligonucleotide
  Sense strand starting at position 3104 of SEQ ID NO: 1881601
aagacaaauucggugaacu

SEQ ID NO: 2057303 - RNA, 19 nt, Artificial Sequence
  Description of Artificial Sequence: Synthetic oligonucleotide
  Antisense strand to SEQ ID NO: 2057302
aguucaccgaauuugucuu

SEQ ID NO: 2057304 - RNA, 19 nt, Artificial Sequence
  Description of Artificial Sequence: Synthetic oligonucleotide
  Sense strand starting at position 3105 of SEQ ID NO: 1881601
agacaaauucggugaacua

SEQ ID NO: 2057305 - RNA, 19 nt, Artificial Sequence
  Description of Artificial Sequence: Synthetic oligonucleotide
  Antisense strand to SEQ ID NO: 2057304
uaguucaccgaauuugucu

SEQ ID NO: 2057306 - RNA, 19 nt, Artificial Sequence
  Description of Artificial Sequence: Synthetic oligonucleotide
  Sense strand starting at position 3194 of SEQ ID NO: 1881601
agucauaggaugugacaau

SEQ ID NO: 2057307 - RNA, 19 nt, Artificial Sequence
  Description of Artificial Sequence: Synthetic oligonucleotide
  Antisense strand to SEQ ID NO: 2057306
auugucacauccuaugacu

SEQ ID NO: 2057308 - RNA, 19 nt, Artificial Sequence
  Description of Artificial Sequence: Synthetic oligonucleotide
  Sense strand starting at position 3201 of SEQ ID NO: 1881601
ggaugugacaaucaucugu

SEQ ID NO: 2057309 - RNA, 19 nt, Artificial Sequence
  Description of Artificial Sequence: Synthetic oligonucleotide
  Antisense strand to SEQ ID NO: 2057308
acagaugauugucacaucc

SEQ ID NO: 2057310 - RNA, 19 nt, Artificial Sequence
  Description of Artificial Sequence: Synthetic oligonucleotide
  Sense strand starting at position 3211 of SEQ ID NO: 1881601
aucaucugucaccauaguu

SEQ ID NO: 2057311 - RNA, 19 nt, Artificial Sequence
  Description of Artificial Sequence: Synthetic oligonucleotide
  Antisense strand to SEQ ID NO: 2057310
aacuauggugacagaugau

SEQ ID NO: 2057312 - RNA, 19 nt, Artificial Sequence
  Description of Artificial Sequence: Synthetic oligonucleotide
  Sense strand starting at position 3242 of SEQ ID NO: 1881601
augcauccguauuucuaua

SEQ ID NO: 2057313 - RNA, 19 nt, Artificial Sequence
  Description of Artificial Sequence: Synthetic oligonucleotide
  Antisense strand to SEQ ID NO: 2057312
uauagaaauacggaugcau

SEQ ID NO: 2057314 - RNA, 19 nt, Artificial Sequence
  Description of Artificial Sequence: Synthetic oligonucleotide
  Sense strand starting at position 3244 of SEQ ID NO: 1881601
gcauccguauuucuauaga

SEQ ID NO: 2057315 - RNA, 19 nt, Artificial Sequence
  Description of Artificial Sequence: Synthetic oligonucleotide
  Antisense strand to SEQ ID NO: 2057314
ucuauagaaauacggaugc

SEQ ID NO: 2057316 - RNA, 19 nt, Artificial Sequence
  Description of Artificial Sequence: Synthetic oligonucleotide
  Sense strand starting at position 3278 of SEQ ID NO: 1881601
uagauuugcugcucugauu

SEQ ID NO: 2057317 - RNA, 19 nt, Artificial Sequence
  Description of Artificial Sequence: Synthetic oligonucleotide
  Antisense strand to SEQ ID NO: 2057316
aaucagagcagcaaaucua

SEQ ID NO: 2057318 - RNA, 19 nt, Artificial Sequence
  Description of Artificial Sequence: Synthetic oligonucleotide
  Sense strand starting at position 3376 of SEQ ID NO: 1881601
guuuauauguaauugagag

SEQ ID NO: 2057319 - RNA, 19 nt, Artificial Sequence
  Description of Artificial Sequence: Synthetic oligonucleotide
  Antisense strand to SEQ ID NO: 2057318
cucucaauuacauauaaac

SEQ ID NO: 2057320 - RNA, 19 nt, Artificial Sequence
  Description of Artificial Sequence: Synthetic oligonucleotide
  Sense strand starting at position 3507 of SEQ ID NO: 1881601
agucaaugacuaggaguaa

SEQ ID NO: 2057321 - RNA, 19 nt, Artificial Sequence
  Description of Artificial Sequence: Synthetic oligonucleotide
  Antisense strand to SEQ ID NO: 2057320
uuacuccuagucauugacu

SEQ ID NO: 2057322 - RNA, 19 nt, Artificial Sequence
  Description of Artificial Sequence: Synthetic oligonucleotide
  Sense strand starting at position 3637 of SEQ ID NO: 1881601
auauuaaagaugggcuuga

SEQ ID NO: 2057323 - RNA, 19 nt, Artificial Sequence
  Description of Artificial Sequence: Synthetic oligonucleotide
  Antisense strand to SEQ ID NO: 2057322
ucaagcccaucuuuaauau

SEQ ID NO: 2057324 - RNA, 19 nt, Artificial Sequence
  Description of Artificial Sequence: Synthetic oligonucleotide
  Sense strand starting at position 3638 of SEQ ID NO: 1881601
uauuaaagaugggcuugau

SEQ ID NO: 2057325 - RNA, 19 nt, Artificial Sequence
  Description of Artificial Sequence: Synthetic oligonucleotide
  Antisense strand to SEQ ID NO: 2057324
aucaagcccaucuuuaaua

SEQ ID NO: 2057326 - RNA, 19 nt, Artificial Sequence
  Description of Artificial Sequence: Synthetic oligonucleotide
  Sense strand starting at position 3641 of SEQ ID NO: 1881601
uaaagaugggcuugauuga

SEQ ID NO: 2057327 - RNA, 19 nt, Artificial Sequence
  Description of Artificial Sequence: Synthetic oligonucleotide
  Antisense strand to SEQ ID NO: 2057326
ucaaucaagcccaucuuua

SEQ ID NO: 2057328 - RNA, 19 nt, Artificial Sequence
  Description of Artificial Sequence: Synthetic oligonucleotide
  Sense strand starting at position 3688 of SEQ ID NO: 1881601
acacuuccuuuaguagaua

SEQ ID NO: 2057329 - RNA, 19 nt, Artificial Sequence
  Description of Artificial Sequence: Synthetic oligonucleotide
  Antisense strand to SEQ ID NO: 2057328
uaucuacuaaaggaagugu

SEQ ID NO: 2057330 - RNA, 19 nt, Artificial Sequence
  Description of Artificial Sequence: Synthetic oligonucleotide
  Sense strand starting at position 3754 of SEQ ID NO: 1881601
uucuauaaccgugaauaug

SEQ ID NO: 2057331 - RNA, 19 nt, Artificial Sequence
  Description of Artificial Sequence: Synthetic oligonucleotide
  Antisense strand to SEQ ID NO: 2057330
cauauucacgguuauagaa

SEQ ID NO: 2057332 - RNA, 19 nt, Artificial Sequence
  Description of Artificial Sequence: Synthetic oligonucleotide
  Sense strand starting at position 3821 of SEQ ID NO: 1881601
gugaauaaguaucugugaa

SEQ ID NO: 2057333 - RNA, 19 nt, Artificial Sequence
  Description of Artificial Sequence: Synthetic oligonucleotide
  Antisense strand to SEQ ID NO: 2057332
uucacagauacuuauucac

SEQ ID NO: 2057334 - RNA, 19 nt, Artificial Sequence
  Description of Artificial Sequence: Synthetic oligonucleotide
  Sense strand starting at position 3823 of SEQ ID NO: 1881601
gaauaaguaucugugaaac

SEQ ID NO: 2057335 - RNA, 19 nt, Artificial Sequence
  Description of Artificial Sequence: Synthetic oligonucleotide
  Antisense strand to SEQ ID NO: 2057334
guuucacagauacuuauuc

SEQ ID NO: 2057336 - RNA, 19 nt, Artificial Sequence
  Description of Artificial Sequence: Synthetic oligonucleotide
  Sense strand starting at position 3836 of SEQ ID NO: 1881601
ugaaacuguguauacugau

SEQ ID NO: 2057337 - RNA, 19 nt, Artificial Sequence
  Description of Artificial Sequence: Synthetic oligonucleotide
  Antisense strand to SEQ ID NO: 2057336
aucaguauacacaguuuca

SEQ ID NO: 2057338 - RNA, 19 nt, Artificial Sequence
  Description of Artificial Sequence: Synthetic oligonucleotide
  Sense strand starting at position 2 of SEQ ID NO: 1881602
gacucuacucccugaaggu

SEQ ID NO: 2057339 - RNA, 19 nt, Artificial Sequence
  Description of Artificial Sequence: Synthetic oligonucleotide
  Antisense strand to SEQ ID NO: 2057338
accuucagggaguagaguc

SEQ ID NO: 2057340 - RNA, 19 nt, Artificial Sequence
  Description of Artificial Sequence: Synthetic oligonucleotide
  Sense strand starting at position 53 of SEQ ID NO: 1881602
caacaauuacgaugugauc

SEQ ID NO: 2057341 - RNA, 19 nt, Artificial Sequence
  Description of Artificial Sequence: Synthetic oligonucleotide
  Antisense strand to SEQ ID NO: 2057340
gaucacaucguaauuguug

SEQ ID NO: 2057342 - RNA, 19 nt, Artificial Sequence
  Description of Artificial Sequence: Synthetic oligonucleotide
  Sense strand starting at position 88 of SEQ ID NO: 1881602
aauggaaauugucugaguc

SEQ ID NO: 2057343 - RNA, 19 nt, Artificial Sequence
  Description of Artificial Sequence: Synthetic oligonucleotide
  Antisense strand to SEQ ID NO: 2057342
gacucagacaauuuccauu

SEQ ID NO: 2057344 - RNA, 19 nt, Artificial Sequence
  Description of Artificial Sequence: Synthetic oligonucleotide
  Sense strand starting at position 89 of SEQ ID NO: 1881602
auggaaauugucugaguca

SEQ ID NO: 2057345 - RNA, 19 nt, Artificial Sequence
  Description of Artificial Sequence: Synthetic oligonucleotide
  Antisense strand to SEQ ID NO: 2057344
ugacucagacaauuuccau

SEQ ID NO: 2057346 - RNA, 19 nt, Artificial Sequence
  Description of Artificial Sequence: Synthetic oligonucleotide
  Sense strand starting at position 113 of SEQ ID NO: 1881602
ggucaaagccaagacuauu

SEQ ID NO: 2057347 - RNA, 19 nt, Artificial Sequence
  Description of Artificial Sequence: Synthetic oligonucleotide
  Antisense strand to SEQ ID NO: 2057346
aauagucuuggcuuugacc

SEQ ID NO: 2057348 - RNA, 19 nt, Artificial Sequence
  Description of Artificial Sequence: Synthetic oligonucleotide
  Sense strand starting at position 135 of SEQ ID NO: 1881602
gcaacacgcugacuuauuu

SEQ ID NO: 2057349 - RNA, 19 nt, Artificial Sequence
  Description of Artificial Sequence: Synthetic oligonucleotide
  Antisense strand to SEQ ID NO: 2057348
aaauaagucagcguguugc

SEQ ID NO: 2057350 - RNA, 19 nt, Artificial Sequence
  Description of Artificial Sequence: Synthetic oligonucleotide
  Sense strand starting at position 199 of SEQ ID NO: 1881602
guguuacauuuggagaaag

SEQ ID NO: 2057351 - RNA, 19 nt, Artificial Sequence
  Description of Artificial Sequence: Synthetic oligonucleotide
  Antisense strand to SEQ ID NO: 2057350
cuuucuccaaauguaacac

SEQ ID NO: 2057352 - RNA, 19 nt, Artificial Sequence
  Description of Artificial Sequence: Synthetic oligonucleotide
  Sense strand starting at position 209 of SEQ ID NO: 1881602
uggagaaagugcucucaaa

SEQ ID NO: 2057353 - RNA, 19 nt, Artificial Sequence
  Description of Artificial Sequence: Synthetic oligonucleotide
  Antisense strand to SEQ ID NO: 2057352
uuugagagcacuuucucca

SEQ ID NO: 2057354 - RNA, 19 nt, Artificial Sequence
  Description of Artificial Sequence: Synthetic oligonucleotide
  Sense strand starting at position 264 of SEQ ID NO: 1881602
agugaacugacauggcuua

SEQ ID NO: 2057355 - RNA, 19 nt, Artificial Sequence
  Description of Artificial Sequence: Synthetic oligonucleotide
  Antisense strand to SEQ ID NO: 2057354
uaagccaugucaguucacu

SEQ ID NO: 2057356 - RNA, 19 nt, Artificial Sequence
  Description of Artificial Sequence: Synthetic oligonucleotide
  Sense strand starting at position 287 of SEQ ID NO: 1881602
guuaacuuguaucuagaau

SEQ ID NO: 2057357 - RNA, 19 nt, Artificial Sequence
  Description of Artificial Sequence: Synthetic oligonucleotide
  Antisense strand to SEQ ID NO: 2057356
auucuagauacaaguuaac

SEQ ID NO: 2057358 - RNA, 19 nt, Artificial Sequence
  Description of Artificial Sequence: Synthetic oligonucleotide
  Sense strand starting at position 909 of SEQ ID NO: 1881602
uggcauguucuuuaaagac

SEQ ID NO: 2057359 - RNA, 19 nt, Artificial Sequence
  Description of Artificial Sequence: Synthetic oligonucleotide
  Antisense strand to SEQ ID NO: 2057358
gucuuuaaagaacaugcca

SEQ ID NO: 2057360 - RNA, 19 nt, Artificial Sequence
  Description of Artificial Sequence: Synthetic oligonucleotide
  Sense strand starting at position 1025 of SEQ ID NO: 1881602
agguguguuccuuagauag

SEQ ID NO: 2057361 - RNA, 19 nt, Artificial Sequence
  Description of Artificial Sequence: Synthetic oligonucleotide
  Antisense strand to SEQ ID NO: 2057360
cuaucuaaggaacacaccu

SEQ ID NO: 2057362 - RNA, 19 nt, Artificial Sequence
  Description of Artificial Sequence: Synthetic oligonucleotide
  Sense strand starting at position 1029 of SEQ ID NO: 1881602
guguuccuuagauaggcaa

SEQ ID NO: 2057363 - RNA, 19 nt, Artificial Sequence
  Description of Artificial Sequence: Synthetic oligonucleotide
  Antisense strand to SEQ ID NO: 2057362
uugccuaucuaaggaacac

SEQ ID NO: 2057364 - RNA, 19 nt, Artificial Sequence
  Description of Artificial Sequence: Synthetic oligonucleotide
  Sense strand starting at position 1199 of SEQ ID NO: 1881602
ggcaaaucauaauuaagug

SEQ ID NO: 2057365 - RNA, 19 nt, Artificial Sequence
  Description of Artificial Sequence: Synthetic oligonucleotide
  Antisense strand to SEQ ID NO: 2057364
cacuuaauuaugauuugcc

SEQ ID NO: 2057366 - RNA, 19 nt, Artificial Sequence
  Description of Artificial Sequence: Synthetic oligonucleotide
  Sense strand starting at position 1438 of SEQ ID NO: 1881602
gucuaaagcccucagaaga

SEQ ID NO: 2057367 - RNA, 19 nt, Artificial Sequence
  Description of Artificial Sequence: Synthetic oligonucleotide
  Antisense strand to SEQ ID NO: 2057366
ucuucugagggcuuuagac

SEQ ID NO: 2057368 - RNA, 19 nt, Artificial Sequence
  Description of Artificial Sequence: Synthetic oligonucleotide
  Sense strand starting at position 1596 of SEQ ID NO: 1881602
ugagcucuugcacaauaaa

SEQ ID NO: 2057369 - RNA, 19 nt, Artificial Sequence
  Description of Artificial Sequence: Synthetic oligonucleotide
  Antisense strand to SEQ ID NO: 2057368
uuuauugugcaagagcuca

SEQ ID NO: 2057370 - RNA, 19 nt, Artificial Sequence
  Description of Artificial Sequence: Synthetic oligonucleotide
  Sense strand starting at position 1780 of SEQ ID NO: 1881602
uuaaaccuggcauaguuaa

SEQ ID NO: 2057371 - RNA, 19 nt, Artificial Sequence
  Description of Artificial Sequence: Synthetic oligonucleotide
  Antisense strand to SEQ ID NO: 2057370
uuaacuaugccagguuuaa

SEQ ID NO: 2057372 - RNA, 19 nt, Artificial Sequence
  Description of Artificial Sequence: Synthetic oligonucleotide
  Sense strand starting at position 1791 of SEQ ID NO: 1881602
auaguuaaguucuuaucag

SEQ ID NO: 2057373 - RNA, 19 nt, Artificial Sequence
  Description of Artificial Sequence: Synthetic oligonucleotide
  Antisense strand to SEQ ID NO: 2057372
cugauaagaacuuaacuau

SEQ ID NO: 2057374 - RNA, 19 nt, Artificial Sequence
  Description of Artificial Sequence: Synthetic oligonucleotide
  Sense strand starting at position 1818 of SEQ ID NO: 1881602
acacgugcuauauaggaaa

SEQ ID NO: 2057375 - RNA, 19 nt, Artificial Sequence
  Description of Artificial Sequence: Synthetic oligonucleotide
  Antisense strand to SEQ ID NO: 2057374
uuuccuauauagcacgugu

SEQ ID NO: 2057376 - RNA, 19 nt, Artificial Sequence
  Description of Artificial Sequence: Synthetic oligonucleotide
  Sense strand starting at position 1991 of SEQ ID NO: 1881602
gcgagaguggcuuaaacag

SEQ ID NO: 2057377 - RNA, 19 nt, Artificial Sequence
  Description of Artificial Sequence: Synthetic oligonucleotide
  Antisense strand to SEQ ID NO: 2057376
cuguuuaagccacucucgc

SEQ ID NO: 2057378 - RNA, 19 nt, Artificial Sequence
  Description of Artificial Sequence: Synthetic oligonucleotide
  Sense strand starting at position 2110 of SEQ ID NO: 1881602
cuagauuucucguuugggu

SEQ ID NO: 2057379 - RNA, 19 nt, Artificial Sequence
  Description of Artificial Sequence: Synthetic oligonucleotide
  Antisense strand to SEQ ID NO: 2057378
acccaaacgagaaaucuag

SEQ ID NO: 2057380 - RNA, 19 nt, Artificial Sequence
  Description of Artificial Sequence: Synthetic oligonucleotide
  Sense strand starting at position 2112 of SEQ ID NO: 1881602
agauuucucguuuggguuu

SEQ ID NO: 2057381 - RNA, 19 nt, Artificial Sequence
  Description of Artificial Sequence: Synthetic oligonucleotide
  Antisense strand to SEQ ID NO: 2057380
aaacccaaacgagaaaucu

SEQ ID NO: 2057382 - RNA, 19 nt, Artificial Sequence
  Description of Artificial Sequence: Synthetic oligonucleotide
  Sense strand starting at position 2200 of SEQ ID NO: 1881602
ccagauucccgagagcacu

SEQ ID NO: 2057383 - RNA, 19 nt, Artificial Sequence
  Description of Artificial Sequence: Synthetic oligonucleotide
  Antisense strand to SEQ ID NO: 2057382
agugcucucgggaaucugg

SEQ ID NO: 2057384 - RNA, 19 nt, Artificial Sequence
  Description of Artificial Sequence: Synthetic oligonucleotide
  Sense strand starting at position 2390 of SEQ ID NO: 1881602
accgacugauacucauaga

SEQ ID NO: 2057385 - RNA, 19 nt, Artificial Sequence
  Description of Artificial Sequence: Synthetic oligonucleotide
  Antisense strand to SEQ ID NO: 2057384
ucuaugaguaucagucggu

SEQ ID NO: 2057386 - RNA, 19 nt, Artificial Sequence
  Description of Artificial Sequence: Synthetic oligonucleotide
  Sense strand starting at position 2490 of SEQ ID NO: 1881602
gcuugaugccauuauauaa

SEQ ID NO: 2057387 - RNA, 19 nt, Artificial Sequence
  Description of Artificial Sequence: Synthetic oligonucleotide
  Antisense strand to SEQ ID NO: 2057386
uuauauaauggcaucaagc

SEQ ID NO: 2057388 - RNA, 19 nt, Artificial Sequence
  Description of Artificial Sequence: Synthetic oligonucleotide
  Sense strand starting at position 2519 of SEQ ID NO: 1881602
uggcucuauugauugggau

SEQ ID NO: 2057389 - RNA, 19 nt, Artificial Sequence
  Description of Artificial Sequence: Synthetic oligonucleotide
  Antisense strand to SEQ ID NO: 2057388
aucccaaucaauagagcca

SEQ ID NO: 2057390 - RNA, 19 nt, Artificial Sequence
  Description of Artificial Sequence: Synthetic oligonucleotide
  Sense strand starting at position 2520 of SEQ ID NO: 1881602
ggcucuauugauugggauc

SEQ ID NO: 2057391 - RNA, 19 nt, Artificial Sequence
  Description of Artificial Sequence: Synthetic oligonucleotide
  Antisense strand to SEQ ID NO: 2057390
gaucccaaucaauagagcc

SEQ ID NO: 2057392 - RNA, 19 nt, Artificial Sequence
  Description of Artificial Sequence: Synthetic oligonucleotide
  Sense strand starting at position 2521 of SEQ ID NO: 1881602
gcucuauugauugggauca

SEQ ID NO: 2057393 - RNA, 19 nt, Artificial Sequence
  Description of Artificial Sequence: Synthetic oligonucleotide
  Antisense strand to SEQ ID NO: 2057392
ugaucccaaucaauagagc

SEQ ID NO: 2057394 - RNA, 19 nt, Artificial Sequence
  Description of Artificial Sequence: Synthetic oligonucleotide
  Sense strand starting at position 2531 of SEQ ID NO: 1881602
uugggaucaucuuccauua

SEQ ID NO: 2057395 - RNA, 19 nt, Artificial Sequence
  Description of Artificial Sequence: Synthetic oligonucleotide
  Antisense strand to SEQ ID NO: 2057394
uaauggaagaugaucccaa

SEQ ID NO: 2057396 - RNA, 19 nt, Artificial Sequence
  Description of Artificial Sequence: Synthetic oligonucleotide
  Sense strand starting at position 2557 of SEQ ID NO: 1881602
uucuaucaucggcaagaga

SEQ ID NO: 2057397 - RNA, 19 nt, Artificial Sequence
  Description of Artificial Sequence: Synthetic oligonucleotide
  Antisense strand to SEQ ID NO: 2057396
ucucuugccgaugauagaa

SEQ ID NO: 2057398 - RNA, 19 nt, Artificial Sequence
  Description of Artificial Sequence: Synthetic oligonucleotide
  Sense strand starting at position 2666 of SEQ ID NO: 1881602
accaauuccugggucuaaa

SEQ ID NO: 2057399 - RNA, 19 nt, Artificial Sequence
  Description of Artificial Sequence: Synthetic oligonucleotide
  Antisense strand to SEQ ID NO: 2057398
uuuagacccaggaauuggu

SEQ ID NO: 2057400 - RNA, 19 nt, Artificial Sequence
  Description of Artificial Sequence: Synthetic oligonucleotide
  Sense strand starting at position 2851 of SEQ ID NO: 1881602
uaucauaaauguguaagag

SEQ ID NO: 2057401 - RNA, 19 nt, Artificial Sequence
  Description of Artificial Sequence: Synthetic oligonucleotide
  Antisense strand to SEQ ID NO: 2057400
cucuuacacauuuaugaua

SEQ ID NO: 2057402 - RNA, 19 nt, Artificial Sequence
  Description of Artificial Sequence: Synthetic oligonucleotide
  Sense strand starting at position 2852 of SEQ ID NO: 1881602
aucauaaauguguaagagu

SEQ ID NO: 2057403 - RNA, 19 nt, Artificial Sequence
  Description of Artificial Sequence: Synthetic oligonucleotide
  Antisense strand to SEQ ID NO: 2057402
acucuuacacauuuaugau

SEQ ID NO: 2057404 - RNA, 19 nt, Artificial Sequence
  Description of Artificial Sequence: Synthetic oligonucleotide
  Sense strand starting at position 2934 of SEQ ID NO: 1881602
gagaacgugcuaugagaga

SEQ ID NO: 2057405 - RNA, 19 nt, Artificial Sequence
  Description of Artificial Sequence: Synthetic oligonucleotide
  Antisense strand to SEQ ID NO: 2057404
ucucucauagcacguucuc

SEQ ID NO: 2057406 - RNA, 19 nt, Artificial Sequence
  Description of Artificial Sequence: Synthetic oligonucleotide
  Sense strand starting at position 3201 of SEQ ID NO: 1881602
gcgcuucugccuucuggua

SEQ ID NO: 2057407 - RNA, 19 nt, Artificial Sequence
  Description of Artificial Sequence: Synthetic oligonucleotide
  Antisense strand to SEQ ID NO: 2057406
uaccagaaggcagaagcgc

SEQ ID NO: 2057408 - RNA, 19 nt, Artificial Sequence
  Description of Artificial Sequence: Synthetic oligonucleotide
  Sense strand starting at position 3385 of SEQ ID NO: 1881602
uggacuaagaccggauauu

SEQ ID NO: 2057409 - RNA, 19 nt, Artificial Sequence
  Description of Artificial Sequence: Synthetic oligonucleotide
  Antisense strand to SEQ ID NO: 2057408
aauauccggucuuagucca

SEQ ID NO: 2057410 - RNA, 19 nt, Artificial Sequence
  Description of Artificial Sequence: Synthetic oligonucleotide
  Sense strand starting at position 3433 of SEQ ID NO: 1881602
ugaguuguaggguauguga

SEQ ID NO: 2057411 - RNA, 19 nt, Artificial Sequence
  Description of Artificial Sequence: Synthetic oligonucleotide
  Antisense strand to SEQ ID NO: 2057410
ucacauacccuacaacuca

SEQ ID NO: 2057412 - RNA, 19 nt, Artificial Sequence
  Description of Artificial Sequence: Synthetic oligonucleotide
  Sense strand starting at position 3518 of SEQ ID NO: 1881602
gccuuuggacuuuauucua

SEQ ID NO: 2057413 - RNA, 19 nt, Artificial Sequence
  Description of Artificial Sequence: Synthetic oligonucleotide
  Antisense strand to SEQ ID NO: 2057412
uagaauaaaguccaaaggc

SEQ ID NO: 2057414 - RNA, 19 nt, Artificial Sequence
  Description of Artificial Sequence: Synthetic oligonucleotide
  Sense strand starting at position 3800 of SEQ ID NO: 1881602
aauagaaggucugcaggua

SEQ ID NO: 2057415 - RNA, 19 nt, Artificial Sequence
  Description of Artificial Sequence: Synthetic oligonucleotide
  Antisense strand to SEQ ID NO: 2057414
uaccugcagaccuucuauu

SEQ ID NO: 2057416 - RNA, 19 nt, Artificial Sequence
  Description of Artificial Sequence: Synthetic oligonucleotide
  Sense strand starting at position 3830 of SEQ ID NO: 1881602
gaguuagcucaggacucau

SEQ ID NO: 2057417 - RNA, 19 nt, Artificial Sequence
  Description of Artificial Sequence: Synthetic oligonucleotide
  Antisense strand to SEQ ID NO: 2057416
augaguccugagcuaacuc

SEQ ID NO: 2057418 - RNA, 19 nt, Artificial Sequence
  Description of Artificial Sequence: Synthetic oligonucleotide
  Sense strand starting at position 381 of SEQ ID NO: 1881603
aggauuccuugagccagaa

SEQ ID NO: 2057419 - RNA, 19 nt, Artificial Sequence
  Description of Artificial Sequence: Synthetic oligonucleotide
  Antisense strand to SEQ ID NO: 2057418
uucuggcucaaggaauccu

SEQ ID NO: 2057420 - RNA, 19 nt, Artificial Sequence
  Description of Artificial Sequence: Synthetic oligonucleotide
  Sense strand starting at position 534 of SEQ ID NO: 1881603
ugaaguaaauugccuguaa

SEQ ID NO: 2057421 - RNA, 19 nt, Artificial Sequence
  Description of Artificial Sequence: Synthetic oligonucleotide
  Antisense strand to SEQ ID NO: 2057420
uuacaggcaauuuacuuca

SEQ ID NO: 2057422 - RNA, 19 nt, Artificial Sequence
  Description of Artificial Sequence: Synthetic oligonucleotide
  Sense strand starting at position 535 of SEQ ID NO: 1881603
gaaguaaauugccuguaaa

SEQ ID NO: 2057423 - RNA, 19 nt, Artificial Sequence
  Description of Artificial Sequence: Synthetic oligonucleotide
  Antisense strand to SEQ ID NO: 2057422
uuuacaggcaauuuacuuc

SEQ ID NO: 2057424 - RNA, 19 nt, Artificial Sequence
  Description of Artificial Sequence: Synthetic oligonucleotide
  Sense strand starting at position 676 of SEQ ID NO: 1881603
gagcgauccucccgccuaa

SEQ ID NO: 2057425 - RNA, 19 nt, Artificial Sequence
  Description of Artificial Sequence: Synthetic oligonucleotide
  Antisense strand to SEQ ID NO: 2057424
uuaggcgggaggaucgcuc

SEQ ID NO: 2057426 - RNA, 19 nt, Artificial Sequence
  Description of Artificial Sequence: Synthetic oligonucleotide
  Sense strand starting at position 930 of SEQ ID NO: 1881603
agcgcucacuugcauauaa

SEQ ID NO: 2057427 - RNA, 19 nt, Artificial Sequence
  Description of Artificial Sequence: Synthetic oligonucleotide
  Antisense strand to SEQ ID NO: 2057426
uuauaugcaagugagcgcu

SEQ ID NO: 2057428 - RNA, 19 nt, Artificial Sequence
  Description of Artificial Sequence: Synthetic oligonucleotide
  Sense strand starting at position 932 of SEQ ID NO: 1881603
cgcucacuugcauauaauu

SEQ ID NO: 2057429 - RNA, 19 nt, Artificial Sequence
  Description of Artificial Sequence: Synthetic oligonucleotide
  Antisense strand to SEQ ID NO: 2057428
aauuauaugcaagugagcg

SEQ ID NO: 2057430 - RNA, 19 nt, Artificial Sequence
  Description of Artificial Sequence: Synthetic oligonucleotide
  Sense strand starting at position 1027 of SEQ ID NO: 1881603
uccagugcuugaucgcuua

SEQ ID NO: 2057431 - RNA, 19 nt, Artificial Sequence
  Description of Artificial Sequence: Synthetic oligonucleotide
  Antisense strand to SEQ ID NO: 2057430
uaagcgaucaagcacugga

SEQ ID NO: 2057432 - RNA, 19 nt, Artificial Sequence
  Description of Artificial Sequence: Synthetic oligonucleotide
  Sense strand starting at position 1030 of SEQ ID NO: 1881603
agugcuugaucgcuuauau

SEQ ID NO: 2057433 - RNA, 19 nt, Artificial Sequence
  Description of Artificial Sequence: Synthetic oligonucleotide
  Antisense strand to SEQ ID NO: 2057432
auauaagcgaucaagcacu

SEQ ID NO: 2057434 - RNA, 19 nt, Artificial Sequence
  Description of Artificial Sequence: Synthetic oligonucleotide
  Sense strand starting at position 1034 of SEQ ID NO: 1881603
cuugaucgcuuauauaauc

SEQ ID NO: 2057435 - RNA, 19 nt, Artificial Sequence
  Description of Artificial Sequence: Synthetic oligonucleotide
  Antisense strand to SEQ ID NO: 2057434
gauuauauaagcgaucaag

SEQ ID NO: 2057436 - RNA, 19 nt, Artificial Sequence
  Description of Artificial Sequence: Synthetic oligonucleotide
  Sense strand starting at position 2207 of SEQ ID NO: 1881603
gcagucuucucgucagagu

SEQ ID NO: 2057437 - RNA, 19 nt, Artificial Sequence
  Description of Artificial Sequence: Synthetic oligonucleotide
  Antisense strand to SEQ ID NO: 2057436
acucugacgagaagacugc

SEQ ID NO: 2057438 - RNA, 19 nt, Artificial Sequence
  Description of Artificial Sequence: Synthetic oligonucleotide
  Sense strand starting at position 2208 of SEQ ID NO: 1881603
cagucuucucgucagagug

SEQ ID NO: 2057439 - RNA, 19 nt, Artificial Sequence
  Description of Artificial Sequence: Synthetic oligonucleotide
  Antisense strand to SEQ ID NO: 2057438
cacucugacgagaagacug

SEQ ID NO: 2057440 - RNA, 19 nt, Artificial Sequence
  Description of Artificial Sequence: Synthetic oligonucleotide
  Sense strand starting at position 2261 of SEQ ID NO: 1881603
guguguugccagccgaaga

SEQ ID NO: 2057441 - RNA, 19 nt, Artificial Sequence
  Description of Artificial Sequence: Synthetic oligonucleotide
  Antisense strand to SEQ ID NO: 2057440
ucuucggcuggcaacacac

SEQ ID NO: 2057442 - RNA, 19 nt, Artificial Sequence
  Description of Artificial Sequence: Synthetic oligonucleotide
  Sense strand starting at position 2262 of SEQ ID NO: 1881603
uguguugccagccgaagaa

SEQ ID NO: 2057443 - RNA, 19 nt, Artificial Sequence
  Description of Artificial Sequence: Synthetic oligonucleotide
  Antisense strand to SEQ ID NO: 2057442
uucuucggcuggcaacaca

SEQ ID NO: 2057444 - RNA, 19 nt, Artificial Sequence
  Description of Artificial Sequence: Synthetic oligonucleotide
  Sense strand starting at position 2818 of SEQ ID NO: 1881603
cuauguugcccgggucagu

SEQ ID NO: 2057445 - RNA, 19 nt, Artificial Sequence
  Description of Artificial Sequence: Synthetic oligonucleotide
  Antisense strand to SEQ ID NO: 2057444
acugacccgggcaacauag

SEQ ID NO: 2057446 - RNA, 19 nt, Artificial Sequence
  Description of Artificial Sequence: Synthetic oligonucleotide
  Sense strand starting at position 3425 of SEQ ID NO: 1881603
gugaaagcaugucucuaga

SEQ ID NO: 2057447 - RNA, 19 nt, Artificial Sequence
  Description of Artificial Sequence: Synthetic oligonucleotide
  Antisense strand to SEQ ID NO: 2057446
ucuagagacaugcuuucac

SEQ ID NO: 2057448 - RNA, 19 nt, Artificial Sequence
  Description of Artificial Sequence: Synthetic oligonucleotide
  Sense strand starting at position 3548 of SEQ ID NO: 1881603
acagucuuauuaguuguua

SEQ ID NO: 2057449 - RNA, 19 nt, Artificial Sequence
  Description of Artificial Sequence: Synthetic oligonucleotide
  Antisense strand to SEQ ID NO: 2057448
uaacaacuaauaagacugu

SEQ ID NO: 2057450 - RNA, 19 nt, Artificial Sequence
  Description of Artificial Sequence: Synthetic oligonucleotide
  Sense strand starting at position 409 of SEQ ID NO: 1881604
uugguugcaauagaguuua

SEQ ID NO: 2057451 - RNA, 19 nt, Artificial Sequence
  Description of Artificial Sequence: Synthetic oligonucleotide
  Antisense strand to SEQ ID NO: 2057450
uaaacucuauugcaaccaa

SEQ ID NO: 2057452 - RNA, 19 nt, Artificial Sequence
  Description of Artificial Sequence: Synthetic oligonucleotide
  Sense strand starting at position 764 of SEQ ID NO: 1881604
gguaauucuggcuauuaau

SEQ ID NO: 2057453 - RNA, 19 nt, Artificial Sequence
  Description of Artificial Sequence: Synthetic oligonucleotide
  Antisense strand to SEQ ID NO: 2057452
auuaauagccagaauuacc

SEQ ID NO: 2057454 - RNA, 19 nt, Artificial Sequence
  Description of Artificial Sequence: Synthetic oligonucleotide
  Sense strand starting at position 782 of SEQ ID NO: 1881604
uauacuguauggcugaaua

SEQ ID NO: 2057455 - RNA, 19 nt, Artificial Sequence
  Description of Artificial Sequence: Synthetic oligonucleotide
  Antisense strand to SEQ ID NO: 2057454
uauucagccauacaguaua

SEQ ID NO: 2057456 - RNA, 19 nt, Artificial Sequence
  Description of Artificial Sequence: Synthetic oligonucleotide
  Sense strand starting at position 784 of SEQ ID NO: 1881604
uacuguauggcugaauaaa

SEQ ID NO: 2057457 - RNA, 19 nt, Artificial Sequence
  Description of Artificial Sequence: Synthetic oligonucleotide
  Antisense strand to SEQ ID NO: 2057456
uuuauucagccauacagua

SEQ ID NO: 2057458 - RNA, 19 nt, Artificial Sequence
  Description of Artificial Sequence: Synthetic oligonucleotide
  Sense strand starting at position 1312 of SEQ ID NO: 1881604
uuaagcaaauucucggaau

SEQ ID NO: 2057459 - RNA, 19 nt, Artificial Sequence
  Description of Artificial Sequence: Synthetic oligonucleotide
  Antisense strand to SEQ ID NO: 2057458
auuccgagaauuugcuuaa

SEQ ID NO: 2057460 - RNA, 19 nt, Artificial Sequence
  Description of Artificial Sequence: Synthetic oligonucleotide
  Sense strand starting at position 1350 of SEQ ID NO: 1881604
aacuguauucugugaauga

SEQ ID NO: 2057461 - RNA, 19 nt, Artificial Sequence
  Description of Artificial Sequence: Synthetic oligonucleotide
  Antisense strand to SEQ ID NO: 2057460
ucauucacagaauacaguu

SEQ ID NO: 2057462 - RNA, 19 nt, Artificial Sequence
  Description of Artificial Sequence: Synthetic oligonucleotide
  Sense strand starting at position 1357 of SEQ ID NO: 1881604
uucugugaaugacuuauau

SEQ ID NO: 2057463 - RNA, 19 nt, Artificial Sequence
  Description of Artificial Sequence: Synthetic oligonucleotide
  Antisense strand to SEQ ID NO: 2057462
auauaagucauucacagaa

SEQ ID NO: 2057464 - RNA, 19 nt, Artificial Sequence
  Description of Artificial Sequence: Synthetic oligonucleotide
  Sense strand starting at position 1378 of SEQ ID NO: 1881604
aaauauguuguguagguga

SEQ ID NO: 2057465 - RNA, 19 nt, Artificial Sequence
  Description of Artificial Sequence: Synthetic oligonucleotide
  Antisense strand to SEQ ID NO: 2057464
ucaccuacacaacauauuu

SEQ ID NO: 2057466 - RNA, 19 nt, Artificial Sequence
  Description of Artificial Sequence: Synthetic oligonucleotide
  Sense strand starting at position 1513 of SEQ ID NO: 1881604
aagguuuagcauuggauau

SEQ ID NO: 2057467 - RNA, 19 nt, Artificial Sequence
  Description of Artificial Sequence: Synthetic oligonucleotide
  Antisense strand to SEQ ID NO: 2057466
auauccaaugcuaaaccuu

SEQ ID NO: 2057468 - RNA, 19 nt, Artificial Sequence
  Description of Artificial Sequence: Synthetic oligonucleotide
  Sense strand starting at position 1514 of SEQ ID NO: 1881604
agguuuagcauuggauaua

SEQ ID NO: 2057469 - RNA, 19 nt, Artificial Sequence
  Description of Artificial Sequence: Synthetic oligonucleotide
  Antisense strand to SEQ ID NO: 2057468
uauauccaaugcuaaaccu

SEQ ID NO: 2057470 - RNA, 19 nt, Artificial Sequence
  Description of Artificial Sequence: Synthetic oligonucleotide
  Sense strand starting at position 2238 of SEQ ID NO: 1881604
aagaaagcauaugugugaa

SEQ ID NO: 2057471 - RNA, 19 nt, Artificial Sequence
  Description of Artificial Sequence: Synthetic oligonucleotide
  Antisense strand to SEQ ID NO: 2057470
uucacacauaugcuuucuu

SEQ ID NO: 2057472 - RNA, 19 nt, Artificial Sequence
  Description of Artificial Sequence: Synthetic oligonucleotide
  Sense strand starting at position 2250 of SEQ ID NO: 1881604
gugugaaguacugagcaca

SEQ ID NO: 2057473 - RNA, 19 nt, Artificial Sequence
  Description of Artificial Sequence: Synthetic oligonucleotide
  Antisense strand to SEQ ID NO: 2057472
ugugcucaguacuucacac

SEQ ID NO: 2057474 - RNA, 19 nt, Artificial Sequence
  Description of Artificial Sequence: Synthetic oligonucleotide
  Sense strand starting at position 2387 of SEQ ID NO: 1881604
acauucucuuaccuagagu

SEQ ID NO: 2057475 - RNA, 19 nt, Artificial Sequence
  Description of Artificial Sequence: Synthetic oligonucleotide
  Antisense strand to SEQ ID NO: 2057474
acucuagguaagagaaugu

SEQ ID NO: 2057476 - RNA, 19 nt, Artificial Sequence
  Description of Artificial Sequence: Synthetic oligonucleotide
  Sense strand starting at position 2390 of SEQ ID NO: 1881604
uucucuuaccuagagugga

SEQ ID NO: 2057477 - RNA, 19 nt, Artificial Sequence
  Description of Artificial Sequence: Synthetic oligonucleotide
  Antisense strand to SEQ ID NO: 2057476
uccacucuagguaagagaa

SEQ ID NO: 2057478 - RNA, 19 nt, Artificial Sequence
  Description of Artificial Sequence: Synthetic oligonucleotide
  Sense strand starting at position 2639 of SEQ ID NO: 1881604
aguaaacuucucuaacgag

SEQ ID NO: 2057479 - RNA, 19 nt, Artificial Sequence
  Description of Artificial Sequence: Synthetic oligonucleotide
  Antisense strand to SEQ ID NO: 2057478
cucguuagagaaguuuacu

SEQ ID NO: 2057480 - RNA, 19 nt, Artificial Sequence
  Description of Artificial Sequence: Synthetic oligonucleotide
  Sense strand starting at position 2648 of SEQ ID NO: 1881604
cucuaacgagauugacauu

SEQ ID NO: 2057481 - RNA, 19 nt, Artificial Sequence
  Description of Artificial Sequence: Synthetic oligonucleotide
  Antisense strand to SEQ ID NO: 2057480
aaugucaaucucguuagag

SEQ ID NO: 2057482 - RNA, 19 nt, Artificial Sequence
  Description of Artificial Sequence: Synthetic oligonucleotide
  Sense strand starting at position 2712 of SEQ ID NO: 1881604
ucauuacuucgugagaacc

SEQ ID NO: 2057483 - RNA, 19 nt, Artificial Sequence
  Description of Artificial Sequence: Synthetic oligonucleotide
  Antisense strand to SEQ ID NO: 2057482
gguucucacgaaguaauga

SEQ ID NO: 2057484 - RNA, 19 nt, Artificial Sequence
  Description of Artificial Sequence: Synthetic oligonucleotide
  Sense strand starting at position 2733 of SEQ ID NO: 1881604
uauggaaaguguucuauca

SEQ ID NO: 2057485 - RNA, 19 nt, Artificial Sequence
  Description of Artificial Sequence: Synthetic oligonucleotide
  Antisense strand to SEQ ID NO: 2057484
ugauagaacacuuuccaua

SEQ ID NO: 2057486 - RNA, 19 nt, Artificial Sequence
  Description of Artificial Sequence: Synthetic oligonucleotide
  Sense strand starting at position 2743 of SEQ ID NO: 1881604
guucuaucauuugagagaa

SEQ ID NO: 2057487 - RNA, 19 nt, Artificial Sequence
  Description of Artificial Sequence: Synthetic oligonucleotide
  Antisense strand to SEQ ID NO: 2057486
uucucucaaaugauagaac

SEQ ID NO: 2057488 - RNA, 19 nt, Artificial Sequence
  Description of Artificial Sequence: Synthetic oligonucleotide
  Sense strand starting at position 2745 of SEQ ID NO: 1881604
ucuaucauuugagagaaau

SEQ ID NO: 2057489 - RNA, 19 nt, Artificial Sequence
  Description of Artificial Sequence: Synthetic oligonucleotide
  Antisense strand to SEQ ID NO: 2057488
auuucucucaaaugauaga

SEQ ID NO: 2057490 - RNA, 19 nt, Artificial Sequence
  Description of Artificial Sequence: Synthetic oligonucleotide
  Sense strand starting at position 2881 of SEQ ID NO: 1881604
aauauugcugauggauuga

SEQ ID NO: 2057491 - RNA, 19 nt, Artificial Sequence
  Description of Artificial Sequence: Synthetic oligonucleotide
  Antisense strand to SEQ ID NO: 2057490
ucaauccaucagcaauauu

SEQ ID NO: 2057492 - RNA, 19 nt, Artificial Sequence
  Description of Artificial Sequence: Synthetic oligonucleotide
  Sense strand starting at position 3034 of SEQ ID NO: 1881604
cuuagaaaugauuguugac

SEQ ID NO: 2057493 - RNA, 19 nt, Artificial Sequence
  Description of Artificial Sequence: Synthetic oligonucleotide
  Antisense strand to SEQ ID NO: 2057492
gucaacaaucauuucuaag

SEQ ID NO: 2057494 - RNA, 19 nt, Artificial Sequence
  Description of Artificial Sequence: Synthetic oligonucleotide
  Sense strand starting at position 3036 of SEQ ID NO: 1881604
uagaaaugauuguugacau

SEQ ID NO: 2057495 - RNA, 19 nt, Artificial Sequence
  Description of Artificial Sequence: Synthetic oligonucleotide
  Antisense strand to SEQ ID NO: 2057494
augucaacaaucauuucua

SEQ ID NO: 2057496 - RNA, 19 nt, Artificial Sequence
  Description of Artificial Sequence: Synthetic oligonucleotide
  Sense strand starting at position 3046 of SEQ ID NO: 1881604
uguugacauguccaaaguu

SEQ ID NO: 2057497 - RNA, 19 nt, Artificial Sequence
  Description of Artificial Sequence: Synthetic oligonucleotide
  Antisense strand to SEQ ID NO: 2057496
aacuuuggacaugucaaca

SEQ ID NO: 2057498 - RNA, 19 nt, Artificial Sequence
  Description of Artificial Sequence: Synthetic oligonucleotide
  Sense strand starting at position 3235 of SEQ ID NO: 1881604
uuacuauggucacuuuaua

SEQ ID NO: 2057499 - RNA, 19 nt, Artificial Sequence
  Description of Artificial Sequence: Synthetic oligonucleotide
  Antisense strand to SEQ ID NO: 2057498
uauaaagugaccauaguaa

SEQ ID NO: 2057500 - RNA, 19 nt, Artificial Sequence
  Description of Artificial Sequence: Synthetic oligonucleotide
  Sense strand starting at position 3256 of SEQ ID NO: 1881604
acucucagauaguuagcaa

SEQ ID NO: 2057501 - RNA, 19 nt, Artificial Sequence
  Description of Artificial Sequence: Synthetic oligonucleotide
  Antisense strand to SEQ ID NO: 2057500
uugcuaacuaucugagagu

SEQ ID NO: 2057502 - RNA, 19 nt, Artificial Sequence
  Description of Artificial Sequence: Synthetic oligonucleotide
  Sense strand starting at position 3259 of SEQ ID NO: 1881604
cucagauaguuagcaauau

SEQ ID NO: 2057503 - RNA, 19 nt, Artificial Sequence
  Description of Artificial Sequence: Synthetic oligonucleotide
  Antisense strand to SEQ ID NO: 2057502
auauugcuaacuaucugag

SEQ ID NO: 2057504 - RNA, 19 nt, Artificial Sequence
  Description of Artificial Sequence: Synthetic oligonucleotide
  Sense strand starting at position 3263 of SEQ ID NO: 1881604
gauaguuagcaauauuagu

SEQ ID NO: 2057505 - RNA, 19 nt, Artificial Sequence
  Description of Artificial Sequence: Synthetic oligonucleotide
  Antisense strand to SEQ ID NO: 2057504
acuaauauugcuaacuauc

SEQ ID NO: 2057506 - RNA, 19 nt, Artificial Sequence
  Description of Artificial Sequence: Synthetic oligonucleotide
  Sense strand starting at position 3277 of SEQ ID NO: 1881604
uuaguaugucuugaaugag

SEQ ID NO: 2057507 - RNA, 19 nt, Artificial Sequence
  Description of Artificial Sequence: Synthetic oligonucleotide
  Antisense strand to SEQ ID NO: 2057506
cucauucaagacauacuaa

SEQ ID NO: 2057508 - RNA, 19 nt, Artificial Sequence
  Description of Artificial Sequence: Synthetic oligonucleotide
  Sense strand starting at position 3280 of SEQ ID NO: 1881604
guaugucuugaaugagaaa

SEQ ID NO: 2057509 - RNA, 19 nt, Artificial Sequence
  Description of Artificial Sequence: Synthetic oligonucleotide
  Antisense strand to SEQ ID NO: 2057508
uuucucauucaagacauac

SEQ ID NO: 2057510 - RNA, 19 nt, Artificial Sequence
  Description of Artificial Sequence: Synthetic oligonucleotide
  Sense strand starting at position 3463 of SEQ ID NO: 1881604
gcaaacagguaauuaguua

SEQ ID NO: 2057511 - RNA, 19 nt, Artificial Sequence
  Description of Artificial Sequence: Synthetic oligonucleotide
  Antisense strand to SEQ ID NO: 2057510
uaacuaauuaccuguuugc

SEQ ID NO: 2057512 - RNA, 19 nt, Artificial Sequence
  Description of Artificial Sequence: Synthetic oligonucleotide
  Sense strand starting at position 3467 of SEQ ID NO: 1881604
acagguaauuaguuacuaa

SEQ ID NO: 2057513 - RNA, 19 nt, Artificial Sequence
  Description of Artificial Sequence: Synthetic oligonucleotide
  Antisense strand to SEQ ID NO: 2057512
uuaguaacuaauuaccugu

SEQ ID NO: 2057514 - RNA, 19 nt, Artificial Sequence
  Description of Artificial Sequence: Synthetic oligonucleotide
  Sense strand starting at position 3492 of SEQ ID NO: 1881604
auuguaagaugucuauaca

SEQ ID NO: 2057515 - RNA, 19 nt, Artificial Sequence
  Description of Artificial Sequence: Synthetic oligonucleotide
  Antisense strand to SEQ ID NO: 2057514
uguauagacaucuuacaau

SEQ ID NO: 2057516 - RNA, 19 nt, Artificial Sequence
  Description of Artificial Sequence: Synthetic oligonucleotide
  Sense strand starting at position 3493 of SEQ ID NO: 1881604
uuguaagaugucuauacau

SEQ ID NO: 2057517 - RNA, 19 nt, Artificial Sequence
  Description of Artificial Sequence: Synthetic oligonucleotide
  Antisense strand to SEQ ID NO: 2057516
auguauagacaucuuacaa

SEQ ID NO: 2057518 - RNA, 19 nt, Artificial Sequence
  Description of Artificial Sequence: Synthetic oligonucleotide
  Sense strand starting at position 3495 of SEQ ID NO: 1881604
guaagaugucuauacaugu

SEQ ID NO: 2057519 - RNA, 19 nt, Artificial Sequence
  Description of Artificial Sequence: Synthetic oligonucleotide
  Antisense strand to SEQ ID NO: 2057518
acauguauagacaucuuac

SEQ ID NO: 2057520 - RNA, 19 nt, Artificial Sequence
  Description of Artificial Sequence: Synthetic oligonucleotide
  Sense strand starting at position 3533 of SEQ ID NO: 1881604
augggagaucauggguuau

SEQ ID NO: 2057521 - RNA, 19 nt, Artificial Sequence
  Description of Artificial Sequence: Synthetic oligonucleotide
  Antisense strand to SEQ ID NO: 2057520
auaacccaugaucucccau

SEQ ID NO: 2057522 - RNA, 19 nt, Artificial Sequence
  Description of Artificial Sequence: Synthetic oligonucleotide
  Sense strand starting at position 3539 of SEQ ID NO: 1881604
gaucauggguuauuacuuu

SEQ ID NO: 2057523 - RNA, 19 nt, Artificial Sequence
  Description of Artificial Sequence: Synthetic oligonucleotide
  Antisense strand to SEQ ID NO: 2057522
aaaguaauaacccaugauc

SEQ ID NO: 2057524 - RNA, 19 nt, Artificial Sequence
  Description of Artificial Sequence: Synthetic oligonucleotide
  Sense strand starting at position 3545 of SEQ ID NO: 1881604
ggguuauuacuuuauucuc

SEQ ID NO: 2057525 - RNA, 19 nt, Artificial Sequence
  Description of Artificial Sequence: Synthetic oligonucleotide
  Antisense strand to SEQ ID NO: 2057524
gagaauaaaguaauaaccc

SEQ ID NO: 2057526 - RNA, 19 nt, Artificial Sequence
  Description of Artificial Sequence: Synthetic oligonucleotide
  Sense strand starting at position 3813 of SEQ ID NO: 1881604
ggaagacuaucuuuggcag

SEQ ID NO: 2057527 - RNA, 19 nt, Artificial Sequence
  Description of Artificial Sequence: Synthetic oligonucleotide
  Antisense strand to SEQ ID NO: 2057526
cugccaaagauagucuucc

SEQ ID NO: 2057528 - RNA, 19 nt, Artificial Sequence
  Description of Artificial Sequence: Synthetic oligonucleotide
  Sense strand starting at position 3980 of SEQ ID NO: 1881604
ugucaaauccuuuggaaga

SEQ ID NO: 2057529 - RNA, 19 nt, Artificial Sequence
  Description of Artificial Sequence: Synthetic oligonucleotide
  Antisense strand to SEQ ID NO: 2057528
ucuuccaaaggauuugaca

SEQ ID NO: 2057530 - RNA, 19 nt, Artificial Sequence
  Description of Artificial Sequence: Synthetic oligonucleotide
  Sense strand starting at position 4 of SEQ ID NO: 1881605
ccaacuguguuauccuaca

SEQ ID NO: 2057531 - RNA, 19 nt, Artificial Sequence
  Description of Artificial Sequence: Synthetic oligonucleotide
  Antisense strand to SEQ ID NO: 2057530
uguaggauaacacaguugg

SEQ ID NO: 2057532 - RNA, 19 nt, Artificial Sequence
  Description of Artificial Sequence: Synthetic oligonucleotide
  Sense strand starting at position 29 of SEQ ID NO: 1881605
aggucagaaguccaaguua

SEQ ID NO: 2057533 - RNA, 19 nt, Artificial Sequence
  Description of Artificial Sequence: Synthetic oligonucleotide
  Antisense strand to SEQ ID NO: 2057532
uaacuuggacuucugaccu

SEQ ID NO: 2057534 - RNA, 19 nt, Artificial Sequence
  Description of Artificial Sequence: Synthetic oligonucleotide
  Sense strand starting at position 291 of SEQ ID NO: 1881605
uuaaucucaucugcgaaau

SEQ ID NO: 2057535 - RNA, 19 nt, Artificial Sequence
  Description of Artificial Sequence: Synthetic oligonucleotide
  Antisense strand to SEQ ID NO: 2057534
auuucgcagaugagauuaa

SEQ ID NO: 2057536 - RNA, 19 nt, Artificial Sequence
  Description of Artificial Sequence: Synthetic oligonucleotide
  Sense strand starting at position 550 of SEQ ID NO: 1881605
ccugacuccugguuugaau

SEQ ID NO: 2057537 - RNA, 19 nt, Artificial Sequence
  Description of Artificial Sequence: Synthetic oligonucleotide
  Antisense strand to SEQ ID NO: 2057536
auucaaaccaggagucagg

SEQ ID NO: 2057538 - RNA, 19 nt, Artificial Sequence
  Description of Artificial Sequence: Synthetic oligonucleotide
  Sense strand starting at position 552 of SEQ ID NO: 1881605
ugacuccugguuugaauaa

SEQ ID NO: 2057539 - RNA, 19 nt, Artificial Sequence
  Description of Artificial Sequence: Synthetic oligonucleotide
  Antisense strand to SEQ ID NO: 2057538
uuauucaaaccaggaguca

SEQ ID NO: 2057540 - RNA, 19 nt, Artificial Sequence
  Description of Artificial Sequence: Synthetic oligonucleotide
  Sense strand starting at position 577 of SEQ ID NO: 1881605
aguguauuucuagguagua

SEQ ID NO: 2057541 - RNA, 19 nt, Artificial Sequence
  Description of Artificial Sequence: Synthetic oligonucleotide
  Antisense strand to SEQ ID NO: 2057540
uacuaccuagaaauacacu

SEQ ID NO: 2057542 - RNA, 19 nt, Artificial Sequence
  Description of Artificial Sequence: Synthetic oligonucleotide
  Sense strand starting at position 578 of SEQ ID NO: 1881605
guguauuucuagguaguag

SEQ ID NO: 2057543 - RNA, 19 nt, Artificial Sequence
  Description of Artificial Sequence: Synthetic oligonucleotide
  Antisense strand to SEQ ID NO: 2057542
cuacuaccuagaaauacac

SEQ ID NO: 2057544 - RNA, 19 nt, Artificial Sequence
  Description of Artificial Sequence: Synthetic oligonucleotide
  Sense strand starting at position 1039 of SEQ ID NO: 1881605
aggguaagcucuuugacac

SEQ ID NO: 2057545 - RNA, 19 nt, Artificial Sequence
  Description of Artificial Sequence: Synthetic oligonucleotide
  Antisense strand to SEQ ID NO: 2057544
gugucaaagagcuuacccu

SEQ ID NO: 2057546 - RNA, 19 nt, Artificial Sequence
  Description of Artificial Sequence: Synthetic oligonucleotide
  Sense strand starting at position 1040 of SEQ ID NO: 1881605
ggguaagcucuuugacaca

SEQ ID NO: 2057547 - RNA, 19 nt, Artificial Sequence
  Description of Artificial Sequence: Synthetic oligonucleotide
  Antisense strand to SEQ ID NO: 2057546
ugugucaaagagcuuaccc

SEQ ID NO: 2057548 - RNA, 19 nt, Artificial Sequence
  Description of Artificial Sequence: Synthetic oligonucleotide
  Sense strand starting at position 1091 of SEQ ID NO: 1881605
ugugauacuugauugagca

SEQ ID NO: 2057549 - RNA, 19 nt, Artificial Sequence
  Description of Artificial Sequence: Synthetic oligonucleotide
  Antisense strand to SEQ ID NO: 2057548
ugcucaaucaaguaucaca

SEQ ID NO: 2057550 - RNA, 19 nt, Artificial Sequence
  Description of Artificial Sequence: Synthetic oligonucleotide
  Sense strand starting at position 1092 of SEQ ID NO: 1881605
gugauacuugauugagcau

SEQ ID NO: 2057551 - RNA, 19 nt, Artificial Sequence
  Description of Artificial Sequence: Synthetic oligonucleotide
  Antisense strand to SEQ ID NO: 2057550
augcucaaucaaguaucac

SEQ ID NO: 2057552 - RNA, 19 nt, Artificial Sequence
  Description of Artificial Sequence: Synthetic oligonucleotide
  Sense strand starting at position 1095 of SEQ ID NO: 1881605
auacuugauugagcauaau

SEQ ID NO: 2057553 - RNA, 19 nt, Artificial Sequence
  Description of Artificial Sequence: Synthetic oligonucleotide
  Antisense strand to SEQ ID NO: 2057552
auuaugcucaaucaaguau

SEQ ID NO: 2057554 - RNA, 19 nt, Artificial Sequence
  Description of Artificial Sequence: Synthetic oligonucleotide
  Sense strand starting at position 1173 of SEQ ID NO: 1881605
guggguuauucucuccaaa

SEQ ID NO: 2057555 - RNA, 19 nt, Artificial Sequence
  Description of Artificial Sequence: Synthetic oligonucleotide
  Antisense strand to SEQ ID NO: 2057554
uuuggagagaauaacccac

SEQ ID NO: 2057556 - RNA, 19 nt, Artificial Sequence
  Description of Artificial Sequence: Synthetic oligonucleotide
  Sense strand starting at position 1175 of SEQ ID NO: 1881605
ggguuauucucuccaaauu

SEQ ID NO: 2057557 - RNA, 19 nt, Artificial Sequence
  Description of Artificial Sequence: Synthetic oligonucleotide
  Antisense strand to SEQ ID NO: 2057556
aauuuggagagaauaaccc

SEQ ID NO: 2057558 - RNA, 19 nt, Artificial Sequence
  Description of Artificial Sequence: Synthetic oligonucleotide
  Sense strand starting at position 1237 of SEQ ID NO: 1881605
aaaugaagcgugcaaagau

SEQ ID NO: 2057559 - RNA, 19 nt, Artificial Sequence
  Description of Artificial Sequence: Synthetic oligonucleotide
  Antisense strand to SEQ ID NO: 2057558
aucuuugcacgcuucauuu

SEQ ID NO: 2057560 - RNA, 19 nt, Artificial Sequence
  Description of Artificial Sequence: Synthetic oligonucleotide
  Sense strand starting at position 1245 of SEQ ID NO: 1881605
cgugcaaagauguaagagu

SEQ ID NO: 2057561 - RNA, 19 nt, Artificial Sequence
  Description of Artificial Sequence: Synthetic oligonucleotide
  Antisense strand to SEQ ID NO: 2057560
acucuuacaucuuugcacg

SEQ ID NO: 2057562 - RNA, 19 nt, Artificial Sequence
  Description of Artificial Sequence: Synthetic oligonucleotide
  Sense strand starting at position 1256 of SEQ ID NO: 1881605
guaagaguauuaucacgag

SEQ ID NO: 2057563 - RNA, 19 nt, Artificial Sequence
  Description of Artificial Sequence: Synthetic oligonucleotide
  Antisense strand to SEQ ID NO: 2057562
cucgugauaauacucuuac

SEQ ID NO: 2057564 - RNA, 19 nt, Artificial Sequence
  Description of Artificial Sequence: Synthetic oligonucleotide
  Sense strand starting at position 1262 of SEQ ID NO: 1881605
guauuaucacgagaaccca

SEQ ID NO: 2057565 - RNA, 19 nt, Artificial Sequence
  Description of Artificial Sequence: Synthetic oligonucleotide
  Antisense strand to SEQ ID NO: 2057564
uggguucucgugauaauac

SEQ ID NO: 2057566 - RNA, 19 nt, Artificial Sequence
  Description of Artificial Sequence: Synthetic oligonucleotide
  Sense strand starting at position 1475 of SEQ ID NO: 1881605
ccagauuuaucccaguaag

SEQ ID NO: 2057567 - RNA, 19 nt, Artificial Sequence
  Description of Artificial Sequence: Synthetic oligonucleotide
  Antisense strand to SEQ ID NO: 2057566
cuuacugggauaaaucugg

SEQ ID NO: 2057568 - RNA, 19 nt, Artificial Sequence
  Description of Artificial Sequence: Synthetic oligonucleotide
  Sense strand starting at position 1529 of SEQ ID NO: 1881605
uuuguuuccucaguacaaa

SEQ ID NO: 2057569 - RNA, 19 nt, Artificial Sequence
  Description of Artificial Sequence: Synthetic oligonucleotide
  Antisense strand to SEQ ID NO: 2057568
uuuguacugaggaaacaaa

SEQ ID NO: 2057570 - RNA, 19 nt, Artificial Sequence
  Description of Artificial Sequence: Synthetic oligonucleotide
  Sense strand starting at position 1608 of SEQ ID NO: 1881605
agauucaggugugcuagau

SEQ ID NO: 2057571 - RNA, 19 nt, Artificial Sequence
  Description of Artificial Sequence: Synthetic oligonucleotide
  Antisense strand to SEQ ID NO: 2057570
aucuagcacaccugaaucu

SEQ ID NO: 2057572 - RNA, 19 nt, Artificial Sequence
  Description of Artificial Sequence: Synthetic oligonucleotide
  Sense strand starting at position 1612 of SEQ ID NO: 1881605
ucaggugugcuagauggua

SEQ ID NO: 2057573 - RNA, 19 nt, Artificial Sequence
  Description of Artificial Sequence: Synthetic oligonucleotide
  Antisense strand to SEQ ID NO: 2057572
uaccaucuagcacaccuga

SEQ ID NO: 2057574 - RNA, 19 nt, Artificial Sequence
  Description of Artificial Sequence: Synthetic oligonucleotide
  Sense strand starting at position 1639 of SEQ ID NO: 1881605
agaugaaaccgucacagua

SEQ ID NO: 2057575 - RNA, 19 nt, Artificial Sequence
  Description of Artificial Sequence: Synthetic oligonucleotide
  Antisense strand to SEQ ID NO: 2057574
uacugugacgguuucaucu

SEQ ID NO: 2057576 - RNA, 19 nt, Artificial Sequence
  Description of Artificial Sequence: Synthetic oligonucleotide
  Sense strand starting at position 1720 of SEQ ID NO: 1881605
guuuccuugagucaaggca

SEQ ID NO: 2057577 - RNA, 19 nt, Artificial Sequence
  Description of Artificial Sequence: Synthetic oligonucleotide
  Antisense strand to SEQ ID NO: 2057576
ugccuugacucaaggaaac

SEQ ID NO: 2057578 - RNA, 19 nt, Artificial Sequence
  Description of Artificial Sequence: Synthetic oligonucleotide
  Sense strand starting at position 1998 of SEQ ID NO: 1881605
gccguuagaccauaauaca

SEQ ID NO: 2057579 - RNA, 19 nt, Artificial Sequence
  Description of Artificial Sequence: Synthetic oligonucleotide
  Antisense strand to SEQ ID NO: 2057578
uguauuauggucuaacggc

SEQ ID NO: 2057580 - RNA, 19 nt, Artificial Sequence
  Description of Artificial Sequence: Synthetic oligonucleotide
  Sense strand starting at position 2527 of SEQ ID NO: 1881605
guaugagcagugcacauau

SEQ ID NO: 2057581 - RNA, 19 nt, Artificial Sequence
  Description of Artificial Sequence: Synthetic oligonucleotide
  Antisense strand to SEQ ID NO: 2057580
auaugugcacugcucauac

SEQ ID NO: 2057582 - RNA, 19 nt, Artificial Sequence
  Description of Artificial Sequence: Synthetic oligonucleotide
  Sense strand starting at position 2632 of SEQ ID NO: 1881605
ggacgauuagaggguaauc

SEQ ID NO: 2057583 - RNA, 19 nt, Artificial Sequence
  Description of Artificial Sequence: Synthetic oligonucleotide
  Antisense strand to SEQ ID NO: 2057582
gauuacccucuaaucgucc

SEQ ID NO: 2057584 - RNA, 19 nt, Artificial Sequence
  Description of Artificial Sequence: Synthetic oligonucleotide
  Sense strand starting at position 2664 of SEQ ID NO: 1881605
gggcuucagcuacagugau

SEQ ID NO: 2057585 - RNA, 19 nt, Artificial Sequence
  Description of Artificial Sequence: Synthetic oligonucleotide
  Antisense strand to SEQ ID NO: 2057584
aucacuguagcugaagccc

SEQ ID NO: 2057586 - RNA, 19 nt, Artificial Sequence
  Description of Artificial Sequence: Synthetic oligonucleotide
  Sense strand starting at position 2672 of SEQ ID NO: 1881605
gcuacagugaugggugaga

SEQ ID NO: 2057587 - RNA, 19 nt, Artificial Sequence
  Description of Artificial Sequence: Synthetic oligonucleotide
  Antisense strand to SEQ ID NO: 2057586
ucucacccaucacuguagc

SEQ ID NO: 2057588 - RNA, 19 nt, Artificial Sequence
  Description of Artificial Sequence: Synthetic oligonucleotide
  Sense strand starting at position 3023 of SEQ ID NO: 1881605
aguauucuacuugaagcaa

SEQ ID NO: 2057589 - RNA, 19 nt, Artificial Sequence
  Description of Artificial Sequence: Synthetic oligonucleotide
  Antisense strand to SEQ ID NO: 2057588
uugcuucaaguagaauacu

SEQ ID NO: 2057590 - RNA, 19 nt, Artificial Sequence
  Description of Artificial Sequence: Synthetic oligonucleotide
  Sense strand starting at position 3232 of SEQ ID NO: 1881605
gaagaaggcuuaucaagca

SEQ ID NO: 2057591 - RNA, 19 nt, Artificial Sequence
  Description of Artificial Sequence: Synthetic oligonucleotide
  Antisense strand to SEQ ID NO: 2057590
ugcuugauaagccuucuuc

SEQ ID NO: 2057592 - RNA, 19 nt, Artificial Sequence
  Description of Artificial Sequence: Synthetic oligonucleotide
  Sense strand starting at position 3378 of SEQ ID NO: 1881605
acaggacuuccuggugacu

SEQ ID NO: 2057593 - RNA, 19 nt, Artificial Sequence
  Description of Artificial Sequence: Synthetic oligonucleotide
  Antisense strand to SEQ ID NO: 2057592
agucaccaggaaguccugu

SEQ ID NO: 2057594 - RNA, 19 nt, Artificial Sequence
  Description of Artificial Sequence: Synthetic oligonucleotide
  Sense strand starting at position 3389 of SEQ ID NO: 1881605
uggugacucuggguaaagu

SEQ ID NO: 2057595 - RNA, 19 nt, Artificial Sequence
  Description of Artificial Sequence: Synthetic oligonucleotide
  Antisense strand to SEQ ID NO: 2057594
acuuuacccagagucacca

SEQ ID NO: 2057596 - RNA, 19 nt, Artificial Sequence
  Description of Artificial Sequence: Synthetic oligonucleotide
  Sense strand starting at position 3404 of SEQ ID NO: 1881605
aagucauuguugcuggaag

SEQ ID NO: 2057597 - RNA, 19 nt, Artificial Sequence
  Description of Artificial Sequence: Synthetic oligonucleotide
  Antisense strand to SEQ ID NO: 2057596
cuuccagcaacaaugacuu

SEQ ID NO: 2057598 - RNA, 19 nt, Artificial Sequence
  Description of Artificial Sequence: Synthetic oligonucleotide
  Sense strand starting at position 3470 of SEQ ID NO: 1881605
augugaggaacuuggcaaa

SEQ ID NO: 2057599 - RNA, 19 nt, Artificial Sequence
  Description of Artificial Sequence: Synthetic oligonucleotide
  Antisense strand to SEQ ID NO: 2057598
uuugccaaguuccucacau

SEQ ID NO: 2057600 - RNA, 19 nt, Artificial Sequence
  Description of Artificial Sequence: Synthetic oligonucleotide
  Sense strand starting at position 3496 of SEQ ID NO: 1881605
gugcaagaagucuauggga

SEQ ID NO: 2057601 - RNA, 19 nt, Artificial Sequence
  Description of Artificial Sequence: Synthetic oligonucleotide
  Antisense strand to SEQ ID NO: 2057600
ucccauagacuucuugcac

SEQ ID NO: 2057602 - RNA, 19 nt, Artificial Sequence
  Description of Artificial Sequence: Synthetic oligonucleotide
  Sense strand starting at position 3498 of SEQ ID NO: 1881605
gcaagaagucuaugggaca

SEQ ID NO: 2057603 - RNA, 19 nt, Artificial Sequence
  Description of Artificial Sequence: Synthetic oligonucleotide
  Antisense strand to SEQ ID NO: 2057602
ugucccauagacuucuugc

SEQ ID NO: 2057604 - RNA, 19 nt, Artificial Sequence
  Description of Artificial Sequence: Synthetic oligonucleotide
  Sense strand starting at position 3637 of SEQ ID NO: 1881605
uuguaauauuaucuggcca

SEQ ID NO: 2057605 - RNA, 19 nt, Artificial Sequence
  Description of Artificial Sequence: Synthetic oligonucleotide
  Antisense strand to SEQ ID NO: 2057604
uggccagauaauauuacaa

SEQ ID NO: 2057606 - RNA, 19 nt, Artificial Sequence
  Description of Artificial Sequence: Synthetic oligonucleotide
  Sense strand starting at position 3657 of SEQ ID NO: 1881605
uuuaguagccuauagguau

SEQ ID NO: 2057607 - RNA, 19 nt, Artificial Sequence
  Description of Artificial Sequence: Synthetic oligonucleotide
  Antisense strand to SEQ ID NO: 2057606
auaccuauaggcuacuaaa

SEQ ID NO: 2057608 - RNA, 19 nt, Artificial Sequence
  Description of Artificial Sequence: Synthetic oligonucleotide
  Sense strand starting at position 3668 of SEQ ID NO: 1881605
auagguauuguuuaaggca

SEQ ID NO: 2057609 - RNA, 19 nt, Artificial Sequence
  Description of Artificial Sequence: Synthetic oligonucleotide
  Antisense strand to SEQ ID NO: 2057608
ugccuuaaacaauaccuau

SEQ ID NO: 2057610 - RNA, 19 nt, Artificial Sequence
  Description of Artificial Sequence: Synthetic oligonucleotide
  Sense strand starting at position 2036 of SEQ ID NO: 1881607
aagugcuagccugagucau

SEQ ID NO: 2057611 - RNA, 19 nt, Artificial Sequence
  Description of Artificial Sequence: Synthetic oligonucleotide
  Antisense strand to SEQ ID NO: 2057610
augacucaggcuagcacuu

SEQ ID NO: 2057612 - RNA, 19 nt, Artificial Sequence
  Description of Artificial Sequence: Synthetic oligonucleotide
  Sense strand starting at position 2038 of SEQ ID NO: 1881607
gugcuagccugagucauug

SEQ ID NO: 2057613 - RNA, 19 nt, Artificial Sequence
  Description of Artificial Sequence: Synthetic oligonucleotide
  Antisense strand to SEQ ID NO: 2057612
caaugacucaggcuagcac

SEQ ID NO: 2057614 - RNA, 19 nt, Artificial Sequence
  Description of Artificial Sequence: Synthetic oligonucleotide
  Sense strand starting at position 2846 of SEQ ID NO: 1881607
gguaaagcuugucaauuuc

SEQ ID NO: 2057615 - RNA, 19 nt, Artificial Sequence
  Description of Artificial Sequence: Synthetic oligonucleotide
  Antisense strand to SEQ ID NO: 2057614
gaaauugacaagcuuuacc

SEQ ID NO: 2057616 - RNA, 19 nt, Artificial Sequence
  Description of Artificial Sequence: Synthetic oligonucleotide
  Sense strand starting at position 3923 of SEQ ID NO: 1881607
uagaaauuguacugagguc

SEQ ID NO: 2057617 - RNA, 19 nt, Artificial Sequence
  Description of Artificial Sequence: Synthetic oligonucleotide
  Antisense strand to SEQ ID NO: 2057616
gaccucaguacaauuucua

SEQ ID NO: 2057618 - RNA, 19 nt, Artificial Sequence
  Description of Artificial Sequence: Synthetic oligonucleotide
  Sense strand starting at position 441 of SEQ ID NO: 1881606
ugagauuauugacuggcuu

SEQ ID NO: 2057619 - RNA, 19 nt, Artificial Sequence
  Description of Artificial Sequence: Synthetic oligonucleotide
  Antisense strand to SEQ ID NO: 2057618
aagccagucaauaaucuca

SEQ ID NO: 2057620 - RNA, 19 nt, Artificial Sequence
  Description of Artificial Sequence: Synthetic oligonucleotide
  Sense strand starting at position 442 of SEQ ID NO: 1881606
gagauuauugacuggcuuu

SEQ ID NO: 2057621 - RNA, 19 nt, Artificial Sequence
  Description of Artificial Sequence: Synthetic oligonucleotide
  Antisense strand to SEQ ID NO: 2057620
aaagccagucaauaaucuc

SEQ ID NO: 2057622 - RNA, 19 nt, Artificial Sequence
  Description of Artificial Sequence: Synthetic oligonucleotide
  Sense strand starting at position 523 of SEQ ID NO: 1881606
uuaucuaugugcuuugaaa

SEQ ID NO: 2057623 - RNA, 19 nt, Artificial Sequence
  Description of Artificial Sequence: Synthetic oligonucleotide
  Antisense strand to SEQ ID NO: 2057622
uuucaaagcacauagauaa

SEQ ID NO: 2057624 - RNA, 19 nt, Artificial Sequence
  Description of Artificial Sequence: Synthetic oligonucleotide
  Sense strand starting at position 1255 of SEQ ID NO: 1881606
gucccucacgccuguaauu

SEQ ID NO: 2057625 - RNA, 19 nt, Artificial Sequence
  Description of Artificial Sequence: Synthetic oligonucleotide
  Antisense strand to SEQ ID NO: 2057624
aauuacaggcgugagggac

SEQ ID NO: 2057626 - RNA, 19 nt, Artificial Sequence
  Description of Artificial Sequence: Synthetic oligonucleotide
  Sense strand starting at position 1264 of SEQ ID NO: 1881606
gccuguaauuccgacaacu

SEQ ID NO: 2057627 - RNA, 19 nt, Artificial Sequence
  Description of Artificial Sequence: Synthetic oligonucleotide
  Antisense strand to SEQ ID NO: 2057626
aguugucggaauuacaggc

SEQ ID NO: 2057628 - RNA, 19 nt, Artificial Sequence
  Description of Artificial Sequence: Synthetic oligonucleotide
  Sense strand starting at position 1266 of SEQ ID NO: 1881606
cuguaauuccgacaacucu

SEQ ID NO: 2057629 - RNA, 19 nt, Artificial Sequence
  Description of Artificial Sequence: Synthetic oligonucleotide
  Antisense strand to SEQ ID NO: 2057628
agaguugucggaauuacag

SEQ ID NO: 2057630 - RNA, 19 nt, Artificial Sequence
  Description of Artificial Sequence: Synthetic oligonucleotide
  Sense strand starting at position 2317 of SEQ ID NO: 1881606
uuacuugguugggagucau

SEQ ID NO: 2057631 - RNA, 19 nt, Artificial Sequence
  Description of Artificial Sequence: Synthetic oligonucleotide
  Antisense strand to SEQ ID NO: 2057630
augacucccaaccaaguaa

SEQ ID NO: 2057632 - RNA, 19 nt, Artificial Sequence
  Description of Artificial Sequence: Synthetic oligonucleotide
  Sense strand starting at position 2374 of SEQ ID NO: 1881606
gcagaagcauuaggagauu

SEQ ID NO: 2057633 - RNA, 19 nt, Artificial Sequence
  Description of Artificial Sequence: Synthetic oligonucleotide
  Antisense strand to SEQ ID NO: 2057632
aaucuccuaaugcuucugc

SEQ ID NO: 2057634 - RNA, 19 nt, Artificial Sequence
  Description of Artificial Sequence: Synthetic oligonucleotide
  Sense strand starting at position 2418 of SEQ ID NO: 1881606
agauacagguguuagagau

SEQ ID NO: 2057635 - RNA, 19 nt, Artificial Sequence
  Description of Artificial Sequence: Synthetic oligonucleotide
  Antisense strand to SEQ ID NO: 2057634
aucucuaacaccuguaucu

SEQ ID NO: 2057636 - RNA, 19 nt, Artificial Sequence
  Description of Artificial Sequence: Synthetic oligonucleotide
  Sense strand starting at position 2563 of SEQ ID NO: 1881606
uuguuagagguauguaauu

SEQ ID NO: 2057637 - RNA, 19 nt, Artificial Sequence
  Description of Artificial Sequence: Synthetic oligonucleotide
  Antisense strand to SEQ ID NO: 2057636
aauuacauaccucuaacaa

SEQ ID NO: 2057638 - RNA, 19 nt, Artificial Sequence
  Description of Artificial Sequence: Synthetic oligonucleotide
  Sense strand starting at position 2572 of SEQ ID NO: 1881606
guauguaauuugucagcau

SEQ ID NO: 2057639 - RNA, 19 nt, Artificial Sequence
  Description of Artificial Sequence: Synthetic oligonucleotide
  Antisense strand to SEQ ID NO: 2057638
augcugacaaauuacauac

SEQ ID NO: 2057640 - RNA, 19 nt, Artificial Sequence
  Description of Artificial Sequence: Synthetic oligonucleotide
  Sense strand starting at position 2575 of SEQ ID NO: 1881606
uguaauuugucagcaucga

SEQ ID NO: 2057641 - RNA, 19 nt, Artificial Sequence
  Description of Artificial Sequence: Synthetic oligonucleotide
  Antisense strand to SEQ ID NO: 2057640
ucgaugcugacaaauuaca

SEQ ID NO: 2057642 - RNA, 19 nt, Artificial Sequence
  Description of Artificial Sequence: Synthetic oligonucleotide
  Sense strand starting at position 2590 of SEQ ID NO: 1881606
ucgaaauggagucacuuau

SEQ ID NO: 2057643 - RNA, 19 nt, Artificial Sequence
  Description of Artificial Sequence: Synthetic oligonucleotide
  Antisense strand to SEQ ID NO: 2057642
auaagugacuccauuucga

SEQ ID NO: 2057644 - RNA, 19 nt, Artificial Sequence
  Description of Artificial Sequence: Synthetic oligonucleotide
  Sense strand starting at position 2597 of SEQ ID NO: 1881606
ggagucacuuauguuaaga

SEQ ID NO: 2057645 - RNA, 19 nt, Artificial Sequence
  Description of Artificial Sequence: Synthetic oligonucleotide
  Antisense strand to SEQ ID NO: 2057644
ucuuaacauaagugacucc

SEQ ID NO: 2057646 - RNA, 19 nt, Artificial Sequence
  Description of Artificial Sequence: Synthetic oligonucleotide
  Sense strand starting at position 2599 of SEQ ID NO: 1881606
agucacuuauguuaagaua

SEQ ID NO: 2057647 - RNA, 19 nt, Artificial Sequence
  Description of Artificial Sequence: Synthetic oligonucleotide
  Antisense strand to SEQ ID NO: 2057646
uaucuuaacauaagugacu

SEQ ID NO: 2057648 - RNA, 19 nt, Artificial Sequence
  Description of Artificial Sequence: Synthetic oligonucleotide
  Sense strand starting at position 2647 of SEQ ID NO: 1881606
ugaagaggauucucaugcu

SEQ ID NO: 2057649 - RNA, 19 nt, Artificial Sequence
  Description of Artificial Sequence: Synthetic oligonucleotide
  Antisense strand to SEQ ID NO: 2057648
agcaugagaauccucuuca

SEQ ID NO: 2057650 - RNA, 19 nt, Artificial Sequence
  Description of Artificial Sequence: Synthetic oligonucleotide
  Sense strand starting at position 2650 of SEQ ID NO: 1881606
agaggauucucaugcuuac

SEQ ID NO: 2057651 - RNA, 19 nt, Artificial Sequence
  Description of Artificial Sequence: Synthetic oligonucleotide
  Antisense strand to SEQ ID NO: 2057650
guaagcaugagaauccucu

SEQ ID NO: 2057652 - RNA, 19 nt, Artificial Sequence
  Description of Artificial Sequence: Synthetic oligonucleotide
  Sense strand starting at position 2653 of SEQ ID NO: 1881606
ggauucucaugcuuacaug

SEQ ID NO: 2057653 - RNA, 19 nt, Artificial Sequence
  Description of Artificial Sequence: Synthetic oligonucleotide
  Antisense strand to SEQ ID NO: 2057652
cauguaagcaugagaaucc

SEQ ID NO: 2057654 - RNA, 19 nt, Artificial Sequence
  Description of Artificial Sequence: Synthetic oligonucleotide
  Sense strand starting at position 2665 of SEQ ID NO: 1881606
uuacaugccugcuaacaga

SEQ ID NO: 2057655 - RNA, 19 nt, Artificial Sequence
  Description of Artificial Sequence: Synthetic oligonucleotide
  Antisense strand to SEQ ID NO: 2057654
ucuguuagcaggcauguaa

SEQ ID NO: 2057656 - RNA, 19 nt, Artificial Sequence
  Description of Artificial Sequence: Synthetic oligonucleotide
  Sense strand starting at position 2809 of SEQ ID NO: 1881606
uugcuauuguucucuguag

SEQ ID NO: 2057657 - RNA, 19 nt, Artificial Sequence
  Description of Artificial Sequence: Synthetic oligonucleotide
  Antisense strand to SEQ ID NO: 2057656
cuacagagaacaauagcaa

SEQ ID NO: 2057658 - RNA, 19 nt, Artificial Sequence
  Description of Artificial Sequence: Synthetic oligonucleotide
  Sense strand starting at position 2820 of SEQ ID NO: 1881606
cucuguagcccaggauaau

SEQ ID NO: 2057659 - RNA, 19 nt, Artificial Sequence
  Description of Artificial Sequence: Synthetic oligonucleotide
  Antisense strand to SEQ ID NO: 2057658
auuauccugggcuacagag

SEQ ID NO: 2057660 - RNA, 19 nt, Artificial Sequence
  Description of Artificial Sequence: Synthetic oligonucleotide
  Sense strand starting at position 2821 of SEQ ID NO: 1881606
ucuguagcccaggauaauu

SEQ ID NO: 2057661 - RNA, 19 nt, Artificial Sequence
  Description of Artificial Sequence: Synthetic oligonucleotide
  Antisense strand to SEQ ID NO: 2057660
aauuauccugggcuacaga

SEQ ID NO: 2057662 - RNA, 19 nt, Artificial Sequence
  Description of Artificial Sequence: Synthetic oligonucleotide
  Sense strand starting at position 2937 of SEQ ID NO: 1881606
gcauauuuccacugcagug

SEQ ID NO: 2057663 - RNA, 19 nt, Artificial Sequence
  Description of Artificial Sequence: Synthetic oligonucleotide
  Antisense strand to SEQ ID NO: 2057662
cacugcaguggaaauaugc

SEQ ID NO: 2057664 - RNA, 19 nt, Artificial Sequence
  Description of Artificial Sequence: Synthetic oligonucleotide
  Sense strand starting at position 3022 of SEQ ID NO: 1881606
accuuaagcaauuguggga

SEQ ID NO: 2057665 - RNA, 19 nt, Artificial Sequence
  Description of Artificial Sequence: Synthetic oligonucleotide
  Antisense strand to SEQ ID NO: 2057664
ucccacaauugcuuaaggu

SEQ ID NO: 2057666 - RNA, 19 nt, Artificial Sequence
  Description of Artificial Sequence: Synthetic oligonucleotide
  Sense strand starting at position 3035 of SEQ ID NO: 1881606
gugggagcugguuaaguca

SEQ ID NO: 2057667 - RNA, 19 nt, Artificial Sequence
  Description of Artificial Sequence: Synthetic oligonucleotide
  Antisense strand to SEQ ID NO: 2057666
ugacuuaaccagcucccac

SEQ ID NO: 2057668 - RNA, 19 nt, Artificial Sequence
  Description of Artificial Sequence: Synthetic oligonucleotide
  Sense strand starting at position 3042 of SEQ ID NO: 1881606
cugguuaagucaucucuga

SEQ ID NO: 2057669 - RNA, 19 nt, Artificial Sequence
  Description of Artificial Sequence: Synthetic oligonucleotide
  Antisense strand to SEQ ID NO: 2057668
ucagagaugacuuaaccag

SEQ ID NO: 2057670 - RNA, 19 nt, Artificial Sequence
  Description of Artificial Sequence: Synthetic oligonucleotide
  Sense strand starting at position 3079 of SEQ ID NO: 1881606
gagggaaguugacgucuau

SEQ ID NO: 2057671 - RNA, 19 nt, Artificial Sequence
  Description of Artificial Sequence: Synthetic oligonucleotide
  Antisense strand to SEQ ID NO: 2057670
auagacgucaacuucccuc

SEQ ID NO: 2057672 - RNA, 19 nt, Artificial Sequence
  Description of Artificial Sequence: Synthetic oligonucleotide
  Sense strand starting at position 3105 of SEQ ID NO: 1881606
gcaguugagaaguguguua

SEQ ID NO: 2057673 - RNA, 19 nt, Artificial Sequence
  Description of Artificial Sequence: Synthetic oligonucleotide
  Antisense strand to SEQ ID NO: 2057672
uaacacacuucucaacugc

SEQ ID NO: 2057674 - RNA, 19 nt, Artificial Sequence
  Description of Artificial Sequence: Synthetic oligonucleotide
  Sense strand starting at position 3112 of SEQ ID NO: 1881606
agaaguguguuaggcuguu

SEQ ID NO: 2057675 - RNA, 19 nt, Artificial Sequence
  Description of Artificial Sequence: Synthetic oligonucleotide
  Antisense strand to SEQ ID NO: 2057674
aacagccuaacacacuucu

SEQ ID NO: 2057676 - RNA, 19 nt, Artificial Sequence
  Description of Artificial Sequence: Synthetic oligonucleotide
  Sense strand starting at position 3183 of SEQ ID NO: 1881606
cguuuaaaugguucacgcu

SEQ ID NO: 2057677 - RNA, 19 nt, Artificial Sequence
  Description of Artificial Sequence: Synthetic oligonucleotide
  Antisense strand to SEQ ID NO: 2057676
agcgugaaccauuuaaacg

SEQ ID NO: 2057678 - RNA, 19 nt, Artificial Sequence
  Description of Artificial Sequence: Synthetic oligonucleotide
  Sense strand starting at position 3216 of SEQ ID NO: 1881606
aggaaacauagcugcagua

SEQ ID NO: 2057679 - RNA, 19 nt, Artificial Sequence
  Description of Artificial Sequence: Synthetic oligonucleotide
  Antisense strand to SEQ ID NO: 2057678
uacugcagcuauguuuccu

SEQ ID NO: 2057680 - RNA, 19 nt, Artificial Sequence
  Description of Artificial Sequence: Synthetic oligonucleotide
  Sense strand starting at position 3218 of SEQ ID NO: 1881606
gaaacauagcugcaguauc

SEQ ID NO: 2057681 - RNA, 19 nt, Artificial Sequence
  Description of Artificial Sequence: Synthetic oligonucleotide
  Antisense strand to SEQ ID NO: 2057680
gauacugcagcuauguuuc

SEQ ID NO: 2057682 - RNA, 19 nt, Artificial Sequence
  Description of Artificial Sequence: Synthetic oligonucleotide
  Sense strand starting at position 3290 of SEQ ID NO: 1881606
uugcauguugcauggugaa

SEQ ID NO: 2057683 - RNA, 19 nt, Artificial Sequence
  Description of Artificial Sequence: Synthetic oligonucleotide
  Antisense strand to SEQ ID NO: 2057682
uucaccaugcaacaugcaa

SEQ ID NO: 2057684 - RNA, 19 nt, Artificial Sequence
  Description of Artificial Sequence: Synthetic oligonucleotide
  Sense strand starting at position 3293 of SEQ ID NO: 1881606
cauguugcauggugaaagu

SEQ ID NO: 2057685 - RNA, 19 nt, Artificial Sequence
  Description of Artificial Sequence: Synthetic oligonucleotide
  Antisense strand to SEQ ID NO: 2057684
acuuucaccaugcaacaug

SEQ ID NO: 2057686 - RNA, 19 nt, Artificial Sequence
  Description of Artificial Sequence: Synthetic oligonucleotide
  Sense strand starting at position 3490 of SEQ ID NO: 1881606
agauuugggugggacaagu

SEQ ID NO: 2057687 - RNA, 19 nt, Artificial Sequence
  Description of Artificial Sequence: Synthetic oligonucleotide
  Antisense strand to SEQ ID NO: 2057686
acuugucccacccaaaucu

SEQ ID NO: 2057688 - RNA, 19 nt, Artificial Sequence
  Description of Artificial Sequence: Synthetic oligonucleotide
  Sense strand starting at position 3929 of SEQ ID NO: 1881606
ugcugcaucugagcuugau

SEQ ID NO: 2057689 - RNA, 19 nt, Artificial Sequence
  Description of Artificial Sequence: Synthetic oligonucleotide
  Antisense strand to SEQ ID NO: 2057688
aucaagcucagaugcagca

SEQ ID NO: 2057690 - RNA, 19 nt, Artificial Sequence
  Description of Artificial Sequence: Synthetic oligonucleotide
  Sense strand starting at position 3941 of SEQ ID NO: 1881606
gcuugauggugaccuugaa

SEQ ID NO: 2057691 - RNA, 19 nt, Artificial Sequence
  Description of Artificial Sequence: Synthetic oligonucleotide
  Antisense strand to SEQ ID NO: 2057690
uucaaggucaccaucaagc

SEQ ID NO: 2057692 - RNA, 19 nt, Artificial Sequence
  Description of Artificial Sequence: Synthetic oligonucleotide
  Sense strand starting at position 3953 of SEQ ID NO: 1881606
ccuugaacguccugcagua

SEQ ID NO: 2057693 - RNA, 19 nt, Artificial Sequence
  Description of Artificial Sequence: Synthetic oligonucleotide
  Antisense strand to SEQ ID NO: 2057692
uacugcaggacguucaagg

SEQ ID NO: 2057694 - RNA, 19 nt, Artificial Sequence
  Description of Artificial Sequence: Synthetic oligonucleotide
  Sense strand starting at position 35 of SEQ ID NO: 1881608
cuuggcucuagggaaaguu

SEQ ID NO: 2057695 - RNA, 19 nt, Artificial Sequence
  Description of Artificial Sequence: Synthetic oligonucleotide
  Antisense strand to SEQ ID NO: 2057694
aacuuucccuagagccaag

SEQ ID NO: 2057696 - RNA, 19 nt, Artificial Sequence
  Description of Artificial Sequence: Synthetic oligonucleotide
  Sense strand starting at position 45 of SEQ ID NO: 1881608
gggaaaguucagcaaggca

SEQ ID NO: 2057697 - RNA, 19 nt, Artificial Sequence
  Description of Artificial Sequence: Synthetic oligonucleotide
  Antisense strand to SEQ ID NO: 2057696
ugccuugcugaacuuuccc

SEQ ID NO: 2057698 - RNA, 19 nt, Artificial Sequence
  Description of Artificial Sequence: Synthetic oligonucleotide
  Sense strand starting at position 346 of SEQ ID NO: 1881608
gagcaagugccauaugaca

SEQ ID NO: 2057699 - RNA, 19 nt, Artificial Sequence
  Description of Artificial Sequence: Synthetic oligonucleotide
  Antisense strand to SEQ ID NO: 2057698
ugucauauggcacuugcuc

SEQ ID NO: 2057700 - RNA, 19 nt, Artificial Sequence
  Description of Artificial Sequence: Synthetic oligonucleotide
  Sense strand starting at position 354 of SEQ ID NO: 1881608
gccauaugacacgguggaa

SEQ ID NO: 2057701 - RNA, 19 nt, Artificial Sequence
  Description of Artificial Sequence: Synthetic oligonucleotide
  Antisense strand to SEQ ID NO: 2057700
uuccaccgugucauauggc

SEQ ID NO: 2057702 - RNA, 19 nt, Artificial Sequence
  Description of Artificial Sequence: Synthetic oligonucleotide
  Sense strand starting at position 439 of SEQ ID NO: 1881608
gaucuuaggugagucacua

SEQ ID NO: 2057703 - RNA, 19 nt, Artificial Sequence
  Description of Artificial Sequence: Synthetic oligonucleotide
  Antisense strand to SEQ ID NO: 2057702
uagugacucaccuaagauc

SEQ ID NO: 2057704 - RNA, 19 nt, Artificial Sequence
  Description of Artificial Sequence: Synthetic oligonucleotide
  Sense strand starting at position 472 of SEQ ID NO: 1881608
uugguuucuugaucuuaaa

SEQ ID NO: 2057705 - RNA, 19 nt, Artificial Sequence
  Description of Artificial Sequence: Synthetic oligonucleotide
  Antisense strand to SEQ ID NO: 2057704
uuuaagaucaagaaaccaa

SEQ ID NO: 2057706 - RNA, 19 nt, Artificial Sequence
  Description of Artificial Sequence: Synthetic oligonucleotide
  Sense strand starting at position 502 of SEQ ID NO: 1881608
cuuacaguaugguuguaga

SEQ ID NO: 2057707 - RNA, 19 nt, Artificial Sequence
  Description of Artificial Sequence: Synthetic oligonucleotide
  Antisense strand to SEQ ID NO: 2057706
ucuacaaccauacuguaag

SEQ ID NO: 2057708 - RNA, 19 nt, Artificial Sequence
  Description of Artificial Sequence: Synthetic oligonucleotide
  Sense strand starting at position 510 of SEQ ID NO: 1881608
augguuguagagugaaacu

SEQ ID NO: 2057709 - RNA, 19 nt, Artificial Sequence
  Description of Artificial Sequence: Synthetic oligonucleotide
  Antisense strand to SEQ ID NO: 2057708
aguuucacucuacaaccau

SEQ ID NO: 2057710 - RNA, 19 nt, Artificial Sequence
  Description of Artificial Sequence: Synthetic oligonucleotide
  Sense strand starting at position 538 of SEQ ID NO: 1881608
gagaaagagugcuuuguau

SEQ ID NO: 2057711 - RNA, 19 nt, Artificial Sequence
  Description of Artificial Sequence: Synthetic oligonucleotide
  Antisense strand to SEQ ID NO: 2057710
auacaaagcacucuuucuc

SEQ ID NO: 2057712 - RNA, 19 nt, Artificial Sequence
  Description of Artificial Sequence: Synthetic oligonucleotide
  Sense strand starting at position 540 of SEQ ID NO: 1881608
gaaagagugcuuuguauaa

SEQ ID NO: 2057713 - RNA, 19 nt, Artificial Sequence
  Description of Artificial Sequence: Synthetic oligonucleotide
  Antisense strand to SEQ ID NO: 2057712
uuauacaaagcacucuuuc

SEQ ID NO: 2057714 - RNA, 19 nt, Artificial Sequence
  Description of Artificial Sequence: Synthetic oligonucleotide
  Sense strand starting at position 551 of SEQ ID NO: 1881608
uuguauaauguugacacaa

SEQ ID NO: 2057715 - RNA, 19 nt, Artificial Sequence
  Description of Artificial Sequence: Synthetic oligonucleotide
  Antisense strand to SEQ ID NO: 2057714
uugugucaacauuauacaa

SEQ ID NO: 2057716 - RNA, 19 nt, Artificial Sequence
  Description of Artificial Sequence: Synthetic oligonucleotide
  Sense strand starting at position 733 of SEQ ID NO: 1881608
gugucucagucauuuagca

SEQ ID NO: 2057717 - RNA, 19 nt, Artificial Sequence
  Description of Artificial Sequence: Synthetic oligonucleotide
  Antisense strand to SEQ ID NO: 2057716
ugcuaaaugacugagacac

SEQ ID NO: 2057718 - RNA, 19 nt, Artificial Sequence
  Description of Artificial Sequence: Synthetic oligonucleotide
  Sense strand starting at position 767 of SEQ ID NO: 1881608
gacuguucugggcagguau

SEQ ID NO: 2057719 - RNA, 19 nt, Artificial Sequence
  Description of Artificial Sequence: Synthetic oligonucleotide
  Antisense strand to SEQ ID NO: 2057718
auaccugcccagaacaguc

SEQ ID NO: 2057720 - RNA, 19 nt, Artificial Sequence
  Description of Artificial Sequence: Synthetic oligonucleotide
  Sense strand starting at position 1325 of SEQ ID NO: 1881608
gugcuagcgaaauauugag

SEQ ID NO: 2057721 - RNA, 19 nt, Artificial Sequence
  Description of Artificial Sequence: Synthetic oligonucleotide
  Antisense strand to SEQ ID NO: 2057720
cucaauauuucgcuagcac

SEQ ID NO: 2057722 - RNA, 19 nt, Artificial Sequence
  Description of Artificial Sequence: Synthetic oligonucleotide
  Sense strand starting at position 1437 of SEQ ID NO: 1881608
agggcagugucacucauuu

SEQ ID NO: 2057723 - RNA, 19 nt, Artificial Sequence
  Description of Artificial Sequence: Synthetic oligonucleotide
  Antisense strand to SEQ ID NO: 2057722
aaaugagugacacugcccu

SEQ ID NO: 2057724 - RNA, 19 nt, Artificial Sequence
  Description of Artificial Sequence: Synthetic oligonucleotide
  Sense strand starting at position 1541 of SEQ ID NO: 1881608
guuacagagcaagguaaau

SEQ ID NO: 2057725 - RNA, 19 nt, Artificial Sequence
  Description of Artificial Sequence: Synthetic oligonucleotide
  Antisense strand to SEQ ID NO: 2057724
auuuaccuugcucuguaac

SEQ ID NO: 2057726 - RNA, 19 nt, Artificial Sequence
  Description of Artificial Sequence: Synthetic oligonucleotide
  Sense strand starting at position 1635 of SEQ ID NO: 1881608
ugaaauuagacgugggauu

SEQ ID NO: 2057727 - RNA, 19 nt, Artificial Sequence
  Description of Artificial Sequence: Synthetic oligonucleotide
  Antisense strand to SEQ ID NO: 2057726
aaucccacgucuaauuuca

SEQ ID NO: 2057728 - RNA, 19 nt, Artificial Sequence
  Description of Artificial Sequence: Synthetic oligonucleotide
  Sense strand starting at position 1636 of SEQ ID NO: 1881608
gaaauuagacgugggauua

SEQ ID NO: 2057729 - RNA, 19 nt, Artificial Sequence
  Description of Artificial Sequence: Synthetic oligonucleotide
  Antisense strand to SEQ ID NO: 2057728
uaaucccacgucuaauuuc

SEQ ID NO: 2057730 - RNA, 19 nt, Artificial Sequence
  Description of Artificial Sequence: Synthetic oligonucleotide
  Sense strand starting at position 1637 of SEQ ID NO: 1881608
aaauuagacgugggauuag

SEQ ID NO: 2057731 - RNA, 19 nt, Artificial Sequence
  Description of Artificial Sequence: Synthetic oligonucleotide
  Antisense strand to SEQ ID NO: 2057730
cuaaucccacgucuaauuu

SEQ ID NO: 2057732 - RNA, 19 nt, Artificial Sequence
  Description of Artificial Sequence: Synthetic oligonucleotide
  Sense strand starting at position 1646 of SEQ ID NO: 1881608
gugggauuagugggaacca

SEQ ID NO: 2057733 - RNA, 19 nt, Artificial Sequence
  Description of Artificial Sequence: Synthetic oligonucleotide
  Antisense strand to SEQ ID NO: 2057732
ugguucccacuaaucccac

SEQ ID NO: 2057734 - RNA, 19 nt, Artificial Sequence
  Description of Artificial Sequence: Synthetic oligonucleotide
  Sense strand starting at position 2460 of SEQ ID NO: 1881608
uuaaaugaucucuaagcug

SEQ ID NO: 2057735 - RNA, 19 nt, Artificial Sequence
  Description of Artificial Sequence: Synthetic oligonucleotide
  Antisense strand to SEQ ID NO: 2057734
cagcuuagagaucauuuaa

SEQ ID NO: 2057736 - RNA, 19 nt, Artificial Sequence
  Description of Artificial Sequence: Synthetic oligonucleotide
  Sense strand starting at position 2937 of SEQ ID NO: 1881608
ugaugaugaugugugaagu

SEQ ID NO: 2057737 - RNA, 19 nt, Artificial Sequence
  Description of Artificial Sequence: Synthetic oligonucleotide
  Antisense strand to SEQ ID NO: 2057736
acuucacacaucaucauca

SEQ ID NO: 2057738 - RNA, 19 nt, Artificial Sequence
  Description of Artificial Sequence: Synthetic oligonucleotide
  Sense strand starting at position 2938 of SEQ ID NO: 1881608
gaugaugaugugugaaguu

SEQ ID NO: 2057739 - RNA, 19 nt, Artificial Sequence
  Description of Artificial Sequence: Synthetic oligonucleotide
  Antisense strand to SEQ ID NO: 2057738
aacuucacacaucaucauc

SEQ ID NO: 2057740 - RNA, 19 nt, Artificial Sequence
  Description of Artificial Sequence: Synthetic oligonucleotide
  Sense strand starting at position 2945 of SEQ ID NO: 1881608
augugugaaguuuacuaug

SEQ ID NO: 2057741 - RNA, 19 nt, Artificial Sequence
  Description of Artificial Sequence: Synthetic oligonucleotide
  Antisense strand to SEQ ID NO: 2057740
cauaguaaacuucacacau

SEQ ID NO: 2057742 - RNA, 19 nt, Artificial Sequence
  Description of Artificial Sequence: Synthetic oligonucleotide
  Sense strand starting at position 3020 of SEQ ID NO: 1881608
gugcuucuaggcuagaaga

SEQ ID NO: 2057743 - RNA, 19 nt, Artificial Sequence
  Description of Artificial Sequence: Synthetic oligonucleotide
  Antisense strand to SEQ ID NO: 2057742
ucuucuagccuagaagcac

SEQ ID NO: 2057744 - RNA, 19 nt, Artificial Sequence
  Description of Artificial Sequence: Synthetic oligonucleotide
  Sense strand starting at position 3170 of SEQ ID NO: 1881608
aaucaaaggucuccaggau

SEQ ID NO: 2057745 - RNA, 19 nt, Artificial Sequence
  Description of Artificial Sequence: Synthetic oligonucleotide
  Antisense strand to SEQ ID NO: 2057744
auccuggagaccuuugauu

SEQ ID NO: 2057746 - RNA, 19 nt, Artificial Sequence
  Description of Artificial Sequence: Synthetic oligonucleotide
  Sense strand starting at position 3265 of SEQ ID NO: 1881608
cuuuaaggauaagucguau

SEQ ID NO: 2057747 - RNA, 19 nt, Artificial Sequence
  Description of Artificial Sequence: Synthetic oligonucleotide
  Antisense strand to SEQ ID NO: 2057746
auacgacuuauccuuaaag

SEQ ID NO: 2057748 - RNA, 19 nt, Artificial Sequence
  Description of Artificial Sequence: Synthetic oligonucleotide
  Sense strand starting at position 3276 of SEQ ID NO: 1881608
agucguauuucaguaggca

SEQ ID NO: 2057749 - RNA, 19 nt, Artificial Sequence
  Description of Artificial Sequence: Synthetic oligonucleotide
  Antisense strand to SEQ ID NO: 2057748
ugccuacugaaauacgacu

SEQ ID NO: 2057750 - RNA, 19 nt, Artificial Sequence
  Description of Artificial Sequence: Synthetic oligonucleotide
  Sense strand starting at position 3277 of SEQ ID NO: 1881608
gucguauuucaguaggcag

SEQ ID NO: 2057751 - RNA, 19 nt, Artificial Sequence
  Description of Artificial Sequence: Synthetic oligonucleotide
  Antisense strand to SEQ ID NO: 2057750
cugccuacugaaauacgac

SEQ ID NO: 2057752 - RNA, 19 nt, Artificial Sequence
  Description of Artificial Sequence: Synthetic oligonucleotide
  Sense strand starting at position 3279 of SEQ ID NO: 1881608
cguauuucaguaggcagaa

SEQ ID NO: 2057753 - RNA, 19 nt, Artificial Sequence
  Description of Artificial Sequence: Synthetic oligonucleotide
  Antisense strand to SEQ ID NO: 2057752
uucugccuacugaaauacg

SEQ ID NO: 2057754 - RNA, 19 nt, Artificial Sequence
  Description of Artificial Sequence: Synthetic oligonucleotide
  Sense strand starting at position 3318 of SEQ ID NO: 1881608
augagaaagccauaguggu

SEQ ID NO: 2057755 - RNA, 19 nt, Artificial Sequence
  Description of Artificial Sequence: Synthetic oligonucleotide
  Antisense strand to SEQ ID NO: 2057754
accacuauggcuuucucau

SEQ ID NO: 2057756 - RNA, 19 nt, Artificial Sequence
  Description of Artificial Sequence: Synthetic oligonucleotide
  Sense strand starting at position 3346 of SEQ ID NO: 1881608
caaaguguacugcagaaca

SEQ ID NO: 2057757 - RNA, 19 nt, Artificial Sequence
  Description of Artificial Sequence: Synthetic oligonucleotide
  Antisense strand to SEQ ID NO: 2057756
uguucugcaguacacuuug

SEQ ID NO: 2057758 - RNA, 19 nt, Artificial Sequence
  Description of Artificial Sequence: Synthetic oligonucleotide
  Sense strand starting at position 3416 of SEQ ID NO: 1881608
gaugguguaucaguuauca

SEQ ID NO: 2057759 - RNA, 19 nt, Artificial Sequence
  Description of Artificial Sequence: Synthetic oligonucleotide
  Antisense strand to SEQ ID NO: 2057758
ugauaacugauacaccauc

SEQ ID NO: 2057760 - RNA, 19 nt, Artificial Sequence
  Description of Artificial Sequence: Synthetic oligonucleotide
  Sense strand starting at position 3432 of SEQ ID NO: 1881608
ucaguugcugcauaauaca

SEQ ID NO: 2057761 - RNA, 19 nt, Artificial Sequence
  Description of Artificial Sequence: Synthetic oligonucleotide
  Antisense strand to SEQ ID NO: 2057760
uguauuaugcagcaacuga

SEQ ID NO: 2057762 - RNA, 19 nt, Artificial Sequence
  Description of Artificial Sequence: Synthetic oligonucleotide
  Sense strand starting at position 3633 of SEQ ID NO: 1881608
gcuugaauuuccucacagc

SEQ ID NO: 2057763 - RNA, 19 nt, Artificial Sequence
  Description of Artificial Sequence: Synthetic oligonucleotide
  Antisense strand to SEQ ID NO: 2057762
gcugugaggaaauucaagc

SEQ ID NO: 2057764 - RNA, 19 nt, Artificial Sequence
  Description of Artificial Sequence: Synthetic oligonucleotide
  Sense strand starting at position 3702 of SEQ ID NO: 1881608
agcucuuggagucauagua

SEQ ID NO: 2057765 - RNA, 19 nt, Artificial Sequence
  Description of Artificial Sequence: Synthetic oligonucleotide
  Antisense strand to SEQ ID NO: 2057764
uacuaugacuccaagagcu

SEQ ID NO: 2057766 - RNA, 19 nt, Artificial Sequence
  Description of Artificial Sequence: Synthetic oligonucleotide
  Sense strand starting at position 3793 of SEQ ID NO: 1881608
gugucagagucaccauaag

SEQ ID NO: 2057767 - RNA, 19 nt, Artificial Sequence
  Description of Artificial Sequence: Synthetic oligonucleotide
  Antisense strand to SEQ ID NO: 2057766
cuuauggugacucugacac

SEQ ID NO: 2057768 - RNA, 19 nt, Artificial Sequence
  Description of Artificial Sequence: Synthetic oligonucleotide
  Sense strand starting at position 3832 of SEQ ID NO: 1881608
guauuauuguagccaauuu

SEQ ID NO: 2057769 - RNA, 19 nt, Artificial Sequence
  Description of Artificial Sequence: Synthetic oligonucleotide
  Antisense strand to SEQ ID NO: 2057768
aaauuggcuacaauaauac

SEQ ID NO: 2057770 - RNA, 19 nt, Artificial Sequence
  Description of Artificial Sequence: Synthetic oligonucleotide
  Sense strand starting at position 3868 of SEQ ID NO: 1881608
acucuuaacgcaugaaaua

SEQ ID NO: 2057771 - RNA, 19 nt, Artificial Sequence
  Description of Artificial Sequence: Synthetic oligonucleotide
  Antisense strand to SEQ ID NO: 2057770
uauuucaugcguuaagagu

SEQ ID NO: 2057772 - RNA, 19 nt, Artificial Sequence
  Description of Artificial Sequence: Synthetic oligonucleotide
  Sense strand starting at position 3869 of SEQ ID NO: 1881608
cucuuaacgcaugaaauac

SEQ ID NO: 2057773 - RNA, 19 nt, Artificial Sequence
  Description of Artificial Sequence: Synthetic oligonucleotide
  Antisense strand to SEQ ID NO: 2057772
guauuucaugcguuaagag

SEQ ID NO: 2057774 - RNA, 19 nt, Artificial Sequence
  Description of Artificial Sequence: Synthetic oligonucleotide
  Sense strand starting at position 513 of SEQ ID NO: 1881609
gugggaacuucagugagua

SEQ ID NO: 2057775 - RNA, 19 nt, Artificial Sequence
  Description of Artificial Sequence: Synthetic oligonucleotide
  Antisense strand to SEQ ID NO: 2057774
uacucacugaaguucccac

SEQ ID NO: 2057776 - RNA, 19 nt, Artificial Sequence
  Description of Artificial Sequence: Synthetic oligonucleotide
  Sense strand starting at position 514 of SEQ ID NO: 1881609
ugggaacuucagugaguag

SEQ ID NO: 2057777 - RNA, 19 nt, Artificial Sequence
  Description of Artificial Sequence: Synthetic oligonucleotide
  Antisense strand to SEQ ID NO: 2057776
cuacucacugaaguuccca

SEQ ID NO: 2057778 - RNA, 19 nt, Artificial Sequence
  Description of Artificial Sequence: Synthetic oligonucleotide
  Sense strand starting at position 788 of SEQ ID NO: 1881609
aaggaagucugaguguuua

SEQ ID NO: 2057779 - RNA, 19 nt, Artificial Sequence
  Description of Artificial Sequence: Synthetic oligonucleotide
  Antisense strand to SEQ ID NO: 2057778
uaaacacucagacuuccuu

SEQ ID NO: 2057780 - RNA, 19 nt, Artificial Sequence
  Description of Artificial Sequence: Synthetic oligonucleotide
  Sense strand starting at position 843 of SEQ ID NO: 1881609
uucggucucggacgaaaga

SEQ ID NO: 2057781 - RNA, 19 nt, Artificial Sequence
  Description of Artificial Sequence: Synthetic oligonucleotide
  Antisense strand to SEQ ID NO: 2057780
ucuuucguccgagaccgaa

SEQ ID NO: 2057782 - RNA, 19 nt, Artificial Sequence
  Description of Artificial Sequence: Synthetic oligonucleotide
  Sense strand starting at position 1004 of SEQ ID NO: 1881609
ugacucagcugaccugaaa

SEQ ID NO: 2057783 - RNA, 19 nt, Artificial Sequence
  Description of Artificial Sequence: Synthetic oligonucleotide
  Antisense strand to SEQ ID NO: 2057782
uuucaggucagcugaguca

SEQ ID NO: 2057784 - RNA, 19 nt, Artificial Sequence
  Description of Artificial Sequence: Synthetic oligonucleotide
  Sense strand starting at position 1064 of SEQ ID NO: 1881609
agguuagagguuugauuac

SEQ ID NO: 2057785 - RNA, 19 nt, Artificial Sequence
  Description of Artificial Sequence: Synthetic oligonucleotide
  Antisense strand to SEQ ID NO: 2057784
guaaucaaaccucuaaccu

SEQ ID NO: 2057786 - RNA, 19 nt, Artificial Sequence
  Description of Artificial Sequence: Synthetic oligonucleotide
  Sense strand starting at position 1309 of SEQ ID NO: 1881609
aguguuauucacggaugac

SEQ ID NO: 2057787 - RNA, 19 nt, Artificial Sequence
  Description of Artificial Sequence: Synthetic oligonucleotide
  Antisense strand to SEQ ID NO: 2057786
gucauccgugaauaacacu

SEQ ID NO: 2057788 - RNA, 19 nt, Artificial Sequence
  Description of Artificial Sequence: Synthetic oligonucleotide
  Sense strand starting at position 1329 of SEQ ID NO: 1881609
ccuaaaucacggcgagagu

SEQ ID NO: 2057789 - RNA, 19 nt, Artificial Sequence
  Description of Artificial Sequence: Synthetic oligonucleotide
  Antisense strand to SEQ ID NO: 2057788
acucucgccgugauuuagg

SEQ ID NO: 2057790 - RNA, 19 nt, Artificial Sequence
  Description of Artificial Sequence: Synthetic oligonucleotide
  Sense strand starting at position 1330 of SEQ ID NO: 1881609
cuaaaucacggcgagagua

SEQ ID NO: 2057791 - RNA, 19 nt, Artificial Sequence
  Description of Artificial Sequence: Synthetic oligonucleotide
  Antisense strand to SEQ ID NO: 2057790
uacucucgccgugauuuag

SEQ ID NO: 2057792 - RNA, 19 nt, Artificial Sequence
  Description of Artificial Sequence: Synthetic oligonucleotide
  Sense strand starting at position 1530 of SEQ ID NO: 1881609
accugucaucuugacaagu

SEQ ID NO: 2057793 - RNA, 19 nt, Artificial Sequence
  Description of Artificial Sequence: Synthetic oligonucleotide
  Antisense strand to SEQ ID NO: 2057792
acuugucaagaugacaggu

SEQ ID NO: 2057794 - RNA, 19 nt, Artificial Sequence
  Description of Artificial Sequence: Synthetic oligonucleotide
  Sense strand starting at position 1562 of SEQ ID NO: 1881609
agucaaggauuauaaauga

SEQ ID NO: 2057795 - RNA, 19 nt, Artificial Sequence
  Description of Artificial Sequence: Synthetic oligonucleotide
  Antisense strand to SEQ ID NO: 2057794
ucauuuauaauccuugacu

SEQ ID NO: 2057796 - RNA, 19 nt, Artificial Sequence
  Description of Artificial Sequence: Synthetic oligonucleotide
  Sense strand starting at position 2802 of SEQ ID NO: 1881609
guggaucacggcugaaacu

SEQ ID NO: 2057797 - RNA, 19 nt, Artificial Sequence
  Description of Artificial Sequence: Synthetic oligonucleotide
  Antisense strand to SEQ ID NO: 2057796
aguuucagccgugauccac

SEQ ID NO: 2057798 - RNA, 19 nt, Artificial Sequence
  Description of Artificial Sequence: Synthetic oligonucleotide
  Sense strand starting at position 2803 of SEQ ID NO: 1881609
uggaucacggcugaaacuu

SEQ ID NO: 2057799 - RNA, 19 nt, Artificial Sequence
  Description of Artificial Sequence: Synthetic oligonucleotide
  Antisense strand to SEQ ID NO: 2057798
aaguuucagccgugaucca

SEQ ID NO: 2057800 - RNA, 19 nt, Artificial Sequence
  Description of Artificial Sequence: Synthetic oligonucleotide
  Sense strand starting at position 2812 of SEQ ID NO: 1881609
gcugaaacuugaucgggaa

SEQ ID NO: 2057801 - RNA, 19 nt, Artificial Sequence
  Description of Artificial Sequence: Synthetic oligonucleotide
  Antisense strand to SEQ ID NO: 2057800
uucccgaucaaguuucagc

SEQ ID NO: 2057802 - RNA, 19 nt, Artificial Sequence
  Description of Artificial Sequence: Synthetic oligonucleotide
  Sense strand starting at position 2898 of SEQ ID NO: 1881609
ugagccugcaacugagauu

SEQ ID NO: 2057803 - RNA, 19 nt, Artificial Sequence
  Description of Artificial Sequence: Synthetic oligonucleotide
  Antisense strand to SEQ ID NO: 2057802
aaucucaguugcaggcuca

SEQ ID NO: 2057804 - RNA, 19 nt, Artificial Sequence
  Description of Artificial Sequence: Synthetic oligonucleotide
  Sense strand starting at position 2979 of SEQ ID NO: 1881609
gguugugucugauugaucu

SEQ ID NO: 2057805 - RNA, 19 nt, Artificial Sequence
  Description of Artificial Sequence: Synthetic oligonucleotide
  Antisense strand to SEQ ID NO: 2057804
agaucaaucagacacaacc

SEQ ID NO: 2057806 - RNA, 19 nt, Artificial Sequence
  Description of Artificial Sequence: Synthetic oligonucleotide
  Sense strand starting at position 2986 of SEQ ID NO: 1881609
ucugauugaucuuugcuga

SEQ ID NO: 2057807 - RNA, 19 nt, Artificial Sequence
  Description of Artificial Sequence: Synthetic oligonucleotide
  Antisense strand to SEQ ID NO: 2057806
ucagcaaagaucaaucaga

SEQ ID NO: 2057808 - RNA, 19 nt, Artificial Sequence
  Description of Artificial Sequence: Synthetic oligonucleotide
  Sense strand starting at position 2987 of SEQ ID NO: 1881609
cugauugaucuuugcugag

SEQ ID NO: 2057809 - RNA, 19 nt, Artificial Sequence
  Description of Artificial Sequence: Synthetic oligonucleotide
  Antisense strand to SEQ ID NO: 2057808
cucagcaaagaucaaucag

SEQ ID NO: 2057810 - RNA, 19 nt, Artificial Sequence
  Description of Artificial Sequence: Synthetic oligonucleotide
  Sense strand starting at position 2989 of SEQ ID NO: 1881609
gauugaucuuugcugagca

SEQ ID NO: 2057811 - RNA, 19 nt, Artificial Sequence
  Description of Artificial Sequence: Synthetic oligonucleotide
  Antisense strand to SEQ ID NO: 2057810
ugcucagcaaagaucaauc

SEQ ID NO: 2057812 - RNA, 19 nt, Artificial Sequence
  Description of Artificial Sequence: Synthetic oligonucleotide
  Sense strand starting at position 3038 of SEQ ID NO: 1881609
cugccucaccuuuaaggua

SEQ ID NO: 2057813 - RNA, 19 nt, Artificial Sequence
  Description of Artificial Sequence: Synthetic oligonucleotide
  Antisense strand to SEQ ID NO: 2057812
uaccuuaaaggugaggcag

SEQ ID NO: 2057814 - RNA, 19 nt, Artificial Sequence
  Description of Artificial Sequence: Synthetic oligonucleotide
  Sense strand starting at position 3106 of SEQ ID NO: 1881609
acuuguaccguguaauaca

SEQ ID NO: 2057815 - RNA, 19 nt, Artificial Sequence
  Description of Artificial Sequence: Synthetic oligonucleotide
  Antisense strand to SEQ ID NO: 2057814
uguauuacacgguacaagu

SEQ ID NO: 2057816 - RNA, 19 nt, Artificial Sequence
  Description of Artificial Sequence: Synthetic oligonucleotide
  Sense strand starting at position 3319 of SEQ ID NO: 1881609
uuugucaaacauugguaga

SEQ ID NO: 2057817 - RNA, 19 nt, Artificial Sequence
  Description of Artificial Sequence: Synthetic oligonucleotide
  Antisense strand to SEQ ID NO: 2057816
ucuaccaauguuugacaaa

SEQ ID NO: 2057818 - RNA, 19 nt, Artificial Sequence
  Description of Artificial Sequence: Synthetic oligonucleotide
  Sense strand starting at position 3321 of SEQ ID NO: 1881609
ugucaaacauugguagacu

SEQ ID NO: 2057819 - RNA, 19 nt, Artificial Sequence
  Description of Artificial Sequence: Synthetic oligonucleotide
  Antisense strand to SEQ ID NO: 2057818
agucuaccaauguuugaca

SEQ ID NO: 2057820 - RNA, 19 nt, Artificial Sequence
  Description of Artificial Sequence: Synthetic oligonucleotide
  Sense strand starting at position 3329 of SEQ ID NO: 1881609
auugguagacucuggcaga

SEQ ID NO: 2057821 - RNA, 19 nt, Artificial Sequence
  Description of Artificial Sequence: Synthetic oligonucleotide
  Antisense strand to SEQ ID NO: 2057820
ucugccagagucuaccaau

SEQ ID NO: 2057822 - RNA, 19 nt, Artificial Sequence
  Description of Artificial Sequence: Synthetic oligonucleotide
  Sense strand starting at position 3376 of SEQ ID NO: 1881609
uagacauauguugaggcau

SEQ ID NO: 2057823 - RNA, 19 nt, Artificial Sequence
  Description of Artificial Sequence: Synthetic oligonucleotide
  Antisense strand to SEQ ID NO: 2057822
augccucaacauaugucua

SEQ ID NO: 2057824 - RNA, 19 nt, Artificial Sequence
  Description of Artificial Sequence: Synthetic oligonucleotide
  Sense strand starting at position 3433 of SEQ ID NO: 1881609
auggcaucucuggaaagcu

SEQ ID NO: 2057825 - RNA, 19 nt, Artificial Sequence
  Description of Artificial Sequence: Synthetic oligonucleotide
  Antisense strand to SEQ ID NO: 2057824
agcuuuccagagaugccau

SEQ ID NO: 2057826 - RNA, 19 nt, Artificial Sequence
  Description of Artificial Sequence: Synthetic oligonucleotide
  Sense strand starting at position 3471 of SEQ ID NO: 1881609
augguauuguaacugaaca

SEQ ID NO: 2057827 - RNA, 19 nt, Artificial Sequence
  Description of Artificial Sequence: Synthetic oligonucleotide
  Antisense strand to SEQ ID NO: 2057826
uguucaguuacaauaccau

SEQ ID NO: 2057828 - RNA, 19 nt, Artificial Sequence
  Description of Artificial Sequence: Synthetic oligonucleotide
  Sense strand starting at position 3484 of SEQ ID NO: 1881609
ugaacagaacuuggugauu

SEQ ID NO: 2057829 - RNA, 19 nt, Artificial Sequence
  Description of Artificial Sequence: Synthetic oligonucleotide
  Antisense strand to SEQ ID NO: 2057828
aaucaccaaguucuguuca

SEQ ID NO: 2057830 - RNA, 19 nt, Artificial Sequence
  Description of Artificial Sequence: Synthetic oligonucleotide
  Sense strand starting at position 3486 of SEQ ID NO: 1881609
aacagaacuuggugauuug

SEQ ID NO: 2057831 - RNA, 19 nt, Artificial Sequence
  Description of Artificial Sequence: Synthetic oligonucleotide
  Antisense strand to SEQ ID NO: 2057830
caaaucaccaaguucuguu

SEQ ID NO: 2057832 - RNA, 19 nt, Artificial Sequence
  Description of Artificial Sequence: Synthetic oligonucleotide
  Sense strand starting at position 3501 of SEQ ID NO: 1881609
uuugaucccuuagugaauu

SEQ ID NO: 2057833 - RNA, 19 nt, Artificial Sequence
  Description of Artificial Sequence: Synthetic oligonucleotide
  Antisense strand to SEQ ID NO: 2057832
aauucacuaagggaucaaa

SEQ ID NO: 2057834 - RNA, 19 nt, Artificial Sequence
  Description of Artificial Sequence: Synthetic oligonucleotide
  Sense strand starting at position 3556 of SEQ ID NO: 1881609
ugccuacuuggagaaguau

SEQ ID NO: 2057835 - RNA, 19 nt, Artificial Sequence
  Description of Artificial Sequence: Synthetic oligonucleotide
  Antisense strand to SEQ ID NO: 2057834
auacuucuccaaguaggca

SEQ ID NO: 2057836 - RNA, 19 nt, Artificial Sequence
  Description of Artificial Sequence: Synthetic oligonucleotide
  Sense strand starting at position 3624 of SEQ ID NO: 1881609
aagagcaacuguguaauaa

SEQ ID NO: 2057837 - RNA, 19 nt, Artificial Sequence
  Description of Artificial Sequence: Synthetic oligonucleotide
  Antisense strand to SEQ ID NO: 2057836
uuauuacacaguugcucuu

SEQ ID NO: 2057838 - RNA, 19 nt, Artificial Sequence
  Description of Artificial Sequence: Synthetic oligonucleotide
  Sense strand starting at position 3625 of SEQ ID NO: 1881609
agagcaacuguguaauaau

SEQ ID NO: 2057839 - RNA, 19 nt, Artificial Sequence
  Description of Artificial Sequence: Synthetic oligonucleotide
  Antisense strand to SEQ ID NO: 2057838
auuauuacacaguugcucu

SEQ ID NO: 2057840 - RNA, 19 nt, Artificial Sequence
  Description of Artificial Sequence: Synthetic oligonucleotide
  Sense strand starting at position 3735 of SEQ ID NO: 1881609
aaacuucgagcauguauau

SEQ ID NO: 2057841 - RNA, 19 nt, Artificial Sequence
  Description of Artificial Sequence: Synthetic oligonucleotide
  Antisense strand to SEQ ID NO: 2057840
auauacaugcucgaaguuu

SEQ ID NO: 2057842 - RNA, 19 nt, Artificial Sequence
  Description of Artificial Sequence: Synthetic oligonucleotide
  Sense strand starting at position 3771 of SEQ ID NO: 1881609
uuguaugagcccugaaagu

SEQ ID NO: 2057843 - RNA, 19 nt, Artificial Sequence
  Description of Artificial Sequence: Synthetic oligonucleotide
  Antisense strand to SEQ ID NO: 2057842
acuuucagggcucauacaa

SEQ ID NO: 2057844 - RNA, 19 nt, Artificial Sequence
  Description of Artificial Sequence: Synthetic oligonucleotide
  Sense strand starting at position 3835 of SEQ ID NO: 1881609
cuaagagugagagguuagu

SEQ ID NO: 2057845 - RNA, 19 nt, Artificial Sequence
  Description of Artificial Sequence: Synthetic oligonucleotide
  Antisense strand to SEQ ID NO: 2057844
acuaaccucucacucuuag

SEQ ID NO: 2057846 - RNA, 19 nt, Artificial Sequence
  Description of Artificial Sequence: Synthetic oligonucleotide
  Sense strand starting at position 3841 of SEQ ID NO: 1881609
gugagagguuaguucagua

SEQ ID NO: 2057847 - RNA, 19 nt, Artificial Sequence
  Description of Artificial Sequence: Synthetic oligonucleotide
  Antisense strand to SEQ ID NO: 2057846
uacugaacuaaccucucac

SEQ ID NO: 2057848 - RNA, 19 nt, Artificial Sequence
  Description of Artificial Sequence: Synthetic oligonucleotide
  Sense strand starting at position 3941 of SEQ ID NO: 1881609
gaguuuaguuauucuauug

SEQ ID NO: 2057849 - RNA, 19 nt, Artificial Sequence
  Description of Artificial Sequence: Synthetic oligonucleotide
  Antisense strand to SEQ ID NO: 2057848
caauagaauaacuaaacuc

SEQ ID NO: 2057850 - RNA, 19 nt, Artificial Sequence
  Description of Artificial Sequence: Synthetic oligonucleotide
  Sense strand starting at position 3966 of SEQ ID NO: 1881609
ucaggauugucuguaucuc

SEQ ID NO: 2057851 - RNA, 19 nt, Artificial Sequence
  Description of Artificial Sequence: Synthetic oligonucleotide
  Antisense strand to SEQ ID NO: 2057850
gagauacagacaauccuga

SEQ ID NO: 2057852 - RNA, 19 nt, Artificial Sequence
  Description of Artificial Sequence: Synthetic oligonucleotide
  Sense strand starting at position 3967 of SEQ ID NO: 1881609
caggauugucuguaucucu

SEQ ID NO: 2057853 - RNA, 19 nt, Artificial Sequence
  Description of Artificial Sequence: Synthetic oligonucleotide
  Antisense strand to SEQ ID NO: 2057852
agagauacagacaauccug

SEQ ID NO: 2057854 - RNA, 19 nt, Artificial Sequence
  Description of Artificial Sequence: Synthetic oligonucleotide
  Sense strand starting at position 1106 of SEQ ID NO: 1881610
aaguacaagugggagaaau

SEQ ID NO: 2057855 - RNA, 19 nt, Artificial Sequence
  Description of Artificial Sequence: Synthetic oligonucleotide
  Antisense strand to SEQ ID NO: 2057854
auuucucccacuuguacuu

SEQ ID NO: 2057856 - RNA, 19 nt, Artificial Sequence
  Description of Artificial Sequence: Synthetic oligonucleotide
  Sense strand starting at position 1146 of SEQ ID NO: 1881610
ugagcuugauauucucaua

SEQ ID NO: 2057857 - RNA, 19 nt, Artificial Sequence
  Description of Artificial Sequence: Synthetic oligonucleotide
  Antisense strand to SEQ ID NO: 2057856
uaugagaauaucaagcuca

SEQ ID NO: 2057858 - RNA, 19 nt, Artificial Sequence
  Description of Artificial Sequence: Synthetic oligonucleotide
  Sense strand starting at position 1157 of SEQ ID NO: 1881610
uucucauauccgggaguca

SEQ ID NO: 2057859 - RNA, 19 nt, Artificial Sequence
  Description of Artificial Sequence: Synthetic oligonucleotide
  Antisense strand to SEQ ID NO: 2057858
ugacucccggauaugagaa

SEQ ID NO: 2057860 - RNA, 19 nt, Artificial Sequence
  Description of Artificial Sequence: Synthetic oligonucleotide
  Sense strand starting at position 1158 of SEQ ID NO: 1881610
ucucauauccgggagucaa

SEQ ID NO: 2057861 - RNA, 19 nt, Artificial Sequence
  Description of Artificial Sequence: Synthetic oligonucleotide
  Antisense strand to SEQ ID NO: 2057860
uugacucccggauaugaga

SEQ ID NO: 2057862 - RNA, 19 nt, Artificial Sequence
  Description of Artificial Sequence: Synthetic oligonucleotide
  Sense strand starting at position 1212 of SEQ ID NO: 1881610
gcaggaaggucaucgcaaa

SEQ ID NO: 2057863 - RNA, 19 nt, Artificial Sequence
  Description of Artificial Sequence: Synthetic oligonucleotide
  Antisense strand to SEQ ID NO: 2057862
uuugcgaugaccuuccugc

SEQ ID NO: 2057864 - RNA, 19 nt, Artificial Sequence
  Description of Artificial Sequence: Synthetic oligonucleotide
  Sense strand starting at position 1232 of SEQ ID NO: 1881610
gcuccaaucucguaacaac

SEQ ID NO: 2057865 - RNA, 19 nt, Artificial Sequence
  Description of Artificial Sequence: Synthetic oligonucleotide
  Antisense strand to SEQ ID NO: 2057864
guuguuacgagauuggagc

SEQ ID NO: 2057866 - RNA, 19 nt, Artificial Sequence
  Description of Artificial Sequence: Synthetic oligonucleotide
  Sense strand starting at position 1342 of SEQ ID NO: 1881610
ggucaugacucuuuacaac

SEQ ID NO: 2057867 - RNA, 19 nt, Artificial Sequence
  Description of Artificial Sequence: Synthetic oligonucleotide
  Antisense strand to SEQ ID NO: 2057866
guuguaaagagucaugacc

SEQ ID NO: 2057868 - RNA, 19 nt, Artificial Sequence
  Description of Artificial Sequence: Synthetic oligonucleotide
  Sense strand starting at position 2225 of SEQ ID NO: 1881610
ggcguugauucuaggguca

SEQ ID NO: 2057869 - RNA, 19 nt, Artificial Sequence
  Description of Artificial Sequence: Synthetic oligonucleotide
  Antisense strand to SEQ ID NO: 2057868
ugacccuagaaucaacgcc

SEQ ID NO: 2057870 - RNA, 19 nt, Artificial Sequence
  Description of Artificial Sequence: Synthetic oligonucleotide
  Sense strand starting at position 2284 of SEQ ID NO: 1881610
acgcuaguuuaaggaaaua

SEQ ID NO: 2057871 - RNA, 19 nt, Artificial Sequence
  Description of Artificial Sequence: Synthetic oligonucleotide
  Antisense strand to SEQ ID NO: 2057870
uauuuccuuaaacuagcgu

SEQ ID NO: 2057872 - RNA, 19 nt, Artificial Sequence
  Description of Artificial Sequence: Synthetic oligonucleotide
  Sense strand starting at position 2296 of SEQ ID NO: 1881610
ggaaauaucugacgcugau

SEQ ID NO: 2057873 - RNA, 19 nt, Artificial Sequence
  Description of Artificial Sequence: Synthetic oligonucleotide
  Antisense strand to SEQ ID NO: 2057872
aucagcgucagauauuucc

SEQ ID NO: 2057874 - RNA, 19 nt, Artificial Sequence
  Description of Artificial Sequence: Synthetic oligonucleotide
  Sense strand starting at position 2308 of SEQ ID NO: 1881610
cgcugauaaccauguccca

SEQ ID NO: 2057875 - RNA, 19 nt, Artificial Sequence
  Description of Artificial Sequence: Synthetic oligonucleotide
  Antisense strand to SEQ ID NO: 2057874
ugggacaugguuaucagcg

SEQ ID NO: 2057876 - RNA, 19 nt, Artificial Sequence
  Description of Artificial Sequence: Synthetic oligonucleotide
  Sense strand starting at position 2341 of SEQ ID NO: 1881610
uucccaauguguccggaau

SEQ ID NO: 2057877 - RNA, 19 nt, Artificial Sequence
  Description of Artificial Sequence: Synthetic oligonucleotide
  Antisense strand to SEQ ID NO: 2057876
auuccggacacauugggaa

SEQ ID NO: 2057878 - RNA, 19 nt, Artificial Sequence
  Description of Artificial Sequence: Synthetic oligonucleotide
  Sense strand starting at position 2535 of SEQ ID NO: 1881610
ccuguuacggcucauaaag

SEQ ID NO: 2057879 - RNA, 19 nt, Artificial Sequence
  Description of Artificial Sequence: Synthetic oligonucleotide
  Antisense strand to SEQ ID NO: 2057878
cuuuaugagccguaacagg

SEQ ID NO: 2057880 - RNA, 19 nt, Artificial Sequence
  Description of Artificial Sequence: Synthetic oligonucleotide
  Sense strand starting at position 2797 of SEQ ID NO: 1881610
agcagagucgauugguaua

SEQ ID NO: 2057881 - RNA, 19 nt, Artificial Sequence
  Description of Artificial Sequence: Synthetic oligonucleotide
  Antisense strand to SEQ ID NO: 2057880
uauaccaaucgacucugcu

SEQ ID NO: 2057882 - RNA, 19 nt, Artificial Sequence
  Description of Artificial Sequence: Synthetic oligonucleotide
  Sense strand starting at position 2799 of SEQ ID NO: 1881610
cagagucgauugguauauu

SEQ ID NO: 2057883 - RNA, 19 nt, Artificial Sequence
  Description of Artificial Sequence: Synthetic oligonucleotide
  Antisense strand to SEQ ID NO: 2057882
aauauaccaaucgacucug

SEQ ID NO: 2057884 - RNA, 19 nt, Artificial Sequence
  Description of Artificial Sequence: Synthetic oligonucleotide
  Sense strand starting at position 3905 of SEQ ID NO: 1881610
guggucccguuagaauauu

SEQ ID NO: 2057885 - RNA, 19 nt, Artificial Sequence
  Description of Artificial Sequence: Synthetic oligonucleotide
  Antisense strand to SEQ ID NO: 2057884
aauauucuaacgggaccac

SEQ ID NO: 2057886 - RNA, 19 nt, Artificial Sequence
  Description of Artificial Sequence: Synthetic oligonucleotide
  Sense strand starting at position 167 of SEQ ID NO: 1881611
uuaacaaauaguggcgaua

SEQ ID NO: 2057887 - RNA, 19 nt, Artificial Sequence
  Description of Artificial Sequence: Synthetic oligonucleotide
  Antisense strand to SEQ ID NO: 2057886
uaucgccacuauuuguuaa

SEQ ID NO: 2057888 - RNA, 19 nt, Artificial Sequence
  Description of Artificial Sequence: Synthetic oligonucleotide
  Sense strand starting at position 225 of SEQ ID NO: 1881611
uugacaggcuuugcucaaa

SEQ ID NO: 2057889 - RNA, 19 nt, Artificial Sequence
  Description of Artificial Sequence: Synthetic oligonucleotide
  Antisense strand to SEQ ID NO: 2057888
uuugagcaaagccugucaa

SEQ ID NO: 2057890 - RNA, 19 nt, Artificial Sequence
  Description of Artificial Sequence: Synthetic oligonucleotide
  Sense strand starting at position 228 of SEQ ID NO: 1881611
acaggcuuugcucaaauaa

SEQ ID NO: 2057891 - RNA, 19 nt, Artificial Sequence
  Description of Artificial Sequence: Synthetic oligonucleotide
  Antisense strand to SEQ ID NO: 2057890
uuauuugagcaaagccugu

SEQ ID NO: 2057892 - RNA, 19 nt, Artificial Sequence
  Description of Artificial Sequence: Synthetic oligonucleotide
  Sense strand starting at position 357 of SEQ ID NO: 1881611
gcuuaucucuagucaaaga

SEQ ID NO: 2057893 - RNA, 19 nt, Artificial Sequence
  Description of Artificial Sequence: Synthetic oligonucleotide
  Antisense strand to SEQ ID NO: 2057892
ucuuugacuagagauaagc

SEQ ID NO: 2057894 - RNA, 19 nt, Artificial Sequence
  Description of Artificial Sequence: Synthetic oligonucleotide
  Sense strand starting at position 525 of SEQ ID NO: 1881611
cucuuaauuccggaacucu

SEQ ID NO: 2057895 - RNA, 19 nt, Artificial Sequence
  Description of Artificial Sequence: Synthetic oligonucleotide
  Antisense strand to SEQ ID NO: 2057894
agaguuccggaauuaagag

SEQ ID NO: 2057896 - RNA, 19 nt, Artificial Sequence
  Description of Artificial Sequence: Synthetic oligonucleotide
  Sense strand starting at position 612 of SEQ ID NO: 1881611
aaacuauugcuuuggagag

SEQ ID NO: 2057897 - RNA, 19 nt, Artificial Sequence
  Description of Artificial Sequence: Synthetic oligonucleotide
  Antisense strand to SEQ ID NO: 2057896
cucuccaaagcaauaguuu

SEQ ID NO: 2057898 - RNA, 19 nt, Artificial Sequence
  Description of Artificial Sequence: Synthetic oligonucleotide
  Sense strand starting at position 770 of SEQ ID NO: 1881611
ggauaagugccugauccca

SEQ ID NO: 2057899 - RNA, 19 nt, Artificial Sequence
  Description of Artificial Sequence: Synthetic oligonucleotide
  Antisense strand to SEQ ID NO: 2057898
ugggaucaggcacuuaucc

SEQ ID NO: 2057900 - RNA, 19 nt, Artificial Sequence
  Description of Artificial Sequence: Synthetic oligonucleotide
  Sense strand starting at position 966 of SEQ ID NO: 1881611
gugaauuggaugugggcua

SEQ ID NO: 2057901 - RNA, 19 nt, Artificial Sequence
  Description of Artificial Sequence: Synthetic oligonucleotide
  Antisense strand to SEQ ID NO: 2057900
uagcccacauccaauucac

SEQ ID NO: 2057902 - RNA, 19 nt, Artificial Sequence
  Description of Artificial Sequence: Synthetic oligonucleotide
  Sense strand starting at position 1071 of SEQ ID NO: 1881611
agggaagggucagaagaau

SEQ ID NO: 2057903 - RNA, 19 nt, Artificial Sequence
  Description of Artificial Sequence: Synthetic oligonucleotide
  Antisense strand to SEQ ID NO: 2057902
auucuucugacccuucccu

SEQ ID NO: 2057904 - RNA, 19 nt, Artificial Sequence
  Description of Artificial Sequence: Synthetic oligonucleotide
  Sense strand starting at position 1239 of SEQ ID NO: 1881611
cugaucuacucuguccaga

SEQ ID NO: 2057905 - RNA, 19 nt, Artificial Sequence
  Description of Artificial Sequence: Synthetic oligonucleotide
  Antisense strand to SEQ ID NO: 2057904
ucuggacagaguagaucag

SEQ ID NO: 2057906 - RNA, 19 nt, Artificial Sequence
  Description of Artificial Sequence: Synthetic oligonucleotide
  Sense strand starting at position 1244 of SEQ ID NO: 1881611
cuacucuguccagauagca

SEQ ID NO: 2057907 - RNA, 19 nt, Artificial Sequence
  Description of Artificial Sequence: Synthetic oligonucleotide
  Antisense strand to SEQ ID NO: 2057906
ugcuaucuggacagaguag

SEQ ID NO: 2057908 - RNA, 19 nt, Artificial Sequence
  Description of Artificial Sequence: Synthetic oligonucleotide
  Sense strand starting at position 1437 of SEQ ID NO: 1881611
uugaguaucuaucuuguaa

SEQ ID NO: 2057909 - RNA, 19 nt, Artificial Sequence
  Description of Artificial Sequence: Synthetic oligonucleotide
  Antisense strand to SEQ ID NO: 2057908
uuacaagauagauacucaa

SEQ ID NO: 2057910 - RNA, 19 nt, Artificial Sequence
  Description of Artificial Sequence: Synthetic oligonucleotide
  Sense strand starting at position 1448 of SEQ ID NO: 1881611
ucuuguaauggacauucua

SEQ ID NO: 2057911 - RNA, 19 nt, Artificial Sequence
  Description of Artificial Sequence: Synthetic oligonucleotide
  Antisense strand to SEQ ID NO: 2057910
uagaauguccauuacaaga

SEQ ID NO: 2057912 - RNA, 19 nt, Artificial Sequence
  Description of Artificial Sequence: Synthetic oligonucleotide
  Sense strand starting at position 1509 of SEQ ID NO: 1881611
ugugauauauucccuaaga

SEQ ID NO: 2057913 - RNA, 19 nt, Artificial Sequence
  Description of Artificial Sequence: Synthetic oligonucleotide
  Antisense strand to SEQ ID NO: 2057912
ucuuagggaauauaucaca

SEQ ID NO: 2057914 - RNA, 19 nt, Artificial Sequence
  Description of Artificial Sequence: Synthetic oligonucleotide
  Sense strand starting at position 1510 of SEQ ID NO: 1881611
gugauauauucccuaagaa

SEQ ID NO: 2057915 - RNA, 19 nt, Artificial Sequence
  Description of Artificial Sequence: Synthetic oligonucleotide
  Antisense strand to SEQ ID NO: 2057914
uucuuagggaauauaucac

SEQ ID NO: 2057916 - RNA, 19 nt, Artificial Sequence
  Description of Artificial Sequence: Synthetic oligonucleotide
  Sense strand starting at position 1594 of SEQ ID NO: 1881611
gaagauggccuguaugucu

SEQ ID NO: 2057917 - RNA, 19 nt, Artificial Sequence
  Description of Artificial Sequence: Synthetic oligonucleotide
  Antisense strand to SEQ ID NO: 2057916
agacauacaggccaucuuc

SEQ ID NO: 2057918 - RNA, 19 nt, Artificial Sequence
  Description of Artificial Sequence: Synthetic oligonucleotide
  Sense strand starting at position 1679 of SEQ ID NO: 1881611
agaccagucugauuaucau

SEQ ID NO: 2057919 - RNA, 19 nt, Artificial Sequence
  Description of Artificial Sequence: Synthetic oligonucleotide
  Antisense strand to SEQ ID NO: 2057918
augauaaucagacuggucu

SEQ ID NO: 2057920 - RNA, 19 nt, Artificial Sequence
  Description of Artificial Sequence: Synthetic oligonucleotide
  Sense strand starting at position 1700 of SEQ ID NO: 1881611
gaguuacacugcuuaacag

SEQ ID NO: 2057921 - RNA, 19 nt, Artificial Sequence
  Description of Artificial Sequence: Synthetic oligonucleotide
  Antisense strand to SEQ ID NO: 2057920
cuguuaagcaguguaacuc

SEQ ID NO: 2057922 - RNA, 19 nt, Artificial Sequence
  Description of Artificial Sequence: Synthetic oligonucleotide
  Sense strand starting at position 1701 of SEQ ID NO: 1881611
aguuacacugcuuaacaga

SEQ ID NO: 2057923 - RNA, 19 nt, Artificial Sequence
  Description of Artificial Sequence: Synthetic oligonucleotide
  Antisense strand to SEQ ID NO: 2057922
ucuguuaagcaguguaacu

SEQ ID NO: 2057924 - RNA, 19 nt, Artificial Sequence
  Description of Artificial Sequence: Synthetic oligonucleotide
  Sense strand starting at position 1747 of SEQ ID NO: 1881611
aauuguggugauuaauacu

SEQ ID NO: 2057925 - RNA, 19 nt, Artificial Sequence
  Description of Artificial Sequence: Synthetic oligonucleotide
  Antisense strand to SEQ ID NO: 2057924
aguauuaaucaccacaauu

SEQ ID NO: 2057926 - RNA, 19 nt, Artificial Sequence
  Description of Artificial Sequence: Synthetic oligonucleotide
  Sense strand starting at position 1879 of SEQ ID NO: 1881611
uacuuaaucuuggugagca

SEQ ID NO: 2057927 - RNA, 19 nt, Artificial Sequence
  Description of Artificial Sequence: Synthetic oligonucleotide
  Antisense strand to SEQ ID NO: 2057926
ugcucaccaagauuaagua

SEQ ID NO: 2057928 - RNA, 19 nt, Artificial Sequence
  Description of Artificial Sequence: Synthetic oligonucleotide
  Sense strand starting at position 1881 of SEQ ID NO: 1881611
cuuaaucuuggugagcaca

SEQ ID NO: 2057929 - RNA, 19 nt, Artificial Sequence
  Description of Artificial Sequence: Synthetic oligonucleotide
  Antisense strand to SEQ ID NO: 2057928
ugugcucaccaagauuaag

SEQ ID NO: 2057930 - RNA, 19 nt, Artificial Sequence
  Description of Artificial Sequence: Synthetic oligonucleotide
  Sense strand starting at position 1883 of SEQ ID NO: 1881611
uaaucuuggugagcacaau

SEQ ID NO: 2057931 - RNA, 19 nt, Artificial Sequence
  Description of Artificial Sequence: Synthetic oligonucleotide
  Antisense strand to SEQ ID NO: 2057930
auugugcucaccaagauua

SEQ ID NO: 2057932 - RNA, 19 nt, Artificial Sequence
  Description of Artificial Sequence: Synthetic oligonucleotide
  Sense strand starting at position 2109 of SEQ ID NO: 1881611
gugaguuaauaugccuuaa

SEQ ID NO: 2057933 - RNA, 19 nt, Artificial Sequence
  Description of Artificial Sequence: Synthetic oligonucleotide
  Antisense strand to SEQ ID NO: 2057932
uuaaggcauauuaacucac

SEQ ID NO: 2057934 - RNA, 19 nt, Artificial Sequence
  Description of Artificial Sequence: Synthetic oligonucleotide
  Sense strand starting at position 2276 of SEQ ID NO: 1881611
ggcuucuuaaagugauuag

SEQ ID NO: 2057935 - RNA, 19 nt, Artificial Sequence
  Description of Artificial Sequence: Synthetic oligonucleotide
  Antisense strand to SEQ ID NO: 2057934
cuaaucacuuuaagaagcc

SEQ ID NO: 2057936 - RNA, 19 nt, Artificial Sequence
  Description of Artificial Sequence: Synthetic oligonucleotide
  Sense strand starting at position 2279 of SEQ ID NO: 1881611
uucuuaaagugauuagcca

SEQ ID NO: 2057937 - RNA, 19 nt, Artificial Sequence
  Description of Artificial Sequence: Synthetic oligonucleotide
  Antisense strand to SEQ ID NO: 2057936
uggcuaaucacuuuaagaa

SEQ ID NO: 2057938 - RNA, 19 nt, Artificial Sequence
  Description of Artificial Sequence: Synthetic oligonucleotide
  Sense strand starting at position 2280 of SEQ ID NO: 1881611
ucuuaaagugauuagccau

SEQ ID NO: 2057939 - RNA, 19 nt, Artificial Sequence
  Description of Artificial Sequence: Synthetic oligonucleotide
  Antisense strand to SEQ ID NO: 2057938
auggcuaaucacuuuaaga

SEQ ID NO: 2057940 - RNA, 19 nt, Artificial Sequence
  Description of Artificial Sequence: Synthetic oligonucleotide
  Sense strand starting at position 2341 of SEQ ID NO: 1881611
caguccuuggugugaacaa

SEQ ID NO: 2057941 - RNA, 19 nt, Artificial Sequence
  Description of Artificial Sequence: Synthetic oligonucleotide
  Antisense strand to SEQ ID NO: 2057940
uuguucacaccaaggacug

SEQ ID NO: 2057942 - RNA, 19 nt, Artificial Sequence
  Description of Artificial Sequence: Synthetic oligonucleotide
  Sense strand starting at position 2352 of SEQ ID NO: 1881611
gugaacaauuuagagaguu

SEQ ID NO: 2057943 - RNA, 19 nt, Artificial Sequence
  Description of Artificial Sequence: Synthetic oligonucleotide
  Antisense strand to SEQ ID NO: 2057942
aacucucuaaauuguucac

SEQ ID NO: 2057944 - RNA, 19 nt, Artificial Sequence
  Description of Artificial Sequence: Synthetic oligonucleotide
  Sense strand starting at position 2360 of SEQ ID NO: 1881611
uuuagagaguuauuaugca

SEQ ID NO: 2057945 - RNA, 19 nt, Artificial Sequence
  Description of Artificial Sequence: Synthetic oligonucleotide
  Antisense strand to SEQ ID NO: 2057944
ugcauaauaacucucuaaa

SEQ ID NO: 2057946 - RNA, 19 nt, Artificial Sequence
  Description of Artificial Sequence: Synthetic oligonucleotide
  Sense strand starting at position 2425 of SEQ ID NO: 1881611
ggaguuuagugacucaaua

SEQ ID NO: 2057947 - RNA, 19 nt, Artificial Sequence
  Description of Artificial Sequence: Synthetic oligonucleotide
  Antisense strand to SEQ ID NO: 2057946
uauugagucacuaaacucc

SEQ ID NO: 2057948 - RNA, 19 nt, Artificial Sequence
  Description of Artificial Sequence: Synthetic oligonucleotide
  Sense strand starting at position 2533 of SEQ ID NO: 1881611
aaacgaacucagggauucu

SEQ ID NO: 2057949 - RNA, 19 nt, Artificial Sequence
  Description of Artificial Sequence: Synthetic oligonucleotide
  Antisense strand to SEQ ID NO: 2057948
agaaucccugaguucguuu

SEQ ID NO: 2057950 - RNA, 19 nt, Artificial Sequence
  Description of Artificial Sequence: Synthetic oligonucleotide
  Sense strand starting at position 2784 of SEQ ID NO: 1881611
ggauaugugagaggacuuu

SEQ ID NO: 2057951 - RNA, 19 nt, Artificial Sequence
  Description of Artificial Sequence: Synthetic oligonucleotide
  Antisense strand to SEQ ID NO: 2057950
aaaguccucucacauaucc

SEQ ID NO: 2057952 - RNA, 19 nt, Artificial Sequence
  Description of Artificial Sequence: Synthetic oligonucleotide
  Sense strand starting at position 2986 of SEQ ID NO: 1881611
gcaguugcuaggcaagaua

SEQ ID NO: 2057953 - RNA, 19 nt, Artificial Sequence
  Description of Artificial Sequence: Synthetic oligonucleotide
  Antisense strand to SEQ ID NO: 2057952
uaucuugccuagcaacugc

SEQ ID NO: 2057954 - RNA, 19 nt, Artificial Sequence
  Description of Artificial Sequence: Synthetic oligonucleotide
  Sense strand starting at position 3306 of SEQ ID NO: 1881611
ggaguuaauaaagguucua

SEQ ID NO: 2057955 - RNA, 19 nt, Artificial Sequence
  Description of Artificial Sequence: Synthetic oligonucleotide
  Antisense strand to SEQ ID NO: 2057954
uagaaccuuuauuaacucc

SEQ ID NO: 2057956 - RNA, 19 nt, Artificial Sequence
  Description of Artificial Sequence: Synthetic oligonucleotide
  Sense strand starting at position 3364 of SEQ ID NO: 1881611
gauggcucacugugagaga

SEQ ID NO: 2057957 - RNA, 19 nt, Artificial Sequence
  Description of Artificial Sequence: Synthetic oligonucleotide
  Antisense strand to SEQ ID NO: 2057956
ucucucacagugagccauc

SEQ ID NO: 2057958 - RNA, 19 nt, Artificial Sequence
  Description of Artificial Sequence: Synthetic oligonucleotide
  Sense strand starting at position 3568 of SEQ ID NO: 1881611
ugaagaguucuguaucugu

SEQ ID NO: 2057959 - RNA, 19 nt, Artificial Sequence
  Description of Artificial Sequence: Synthetic oligonucleotide
  Antisense strand to SEQ ID NO: 2057958
acagauacagaacucuuca

SEQ ID NO: 2057960 - RNA, 19 nt, Artificial Sequence
  Description of Artificial Sequence: Synthetic oligonucleotide
  Sense strand starting at position 3753 of SEQ ID NO: 1881611
agcagcaaucgggauagau

SEQ ID NO: 2057961 - RNA, 19 nt, Artificial Sequence
  Description of Artificial Sequence: Synthetic oligonucleotide
  Antisense strand to SEQ ID NO: 2057960
aucuaucccgauugcugcu

SEQ ID NO: 2057962 - RNA, 19 nt, Artificial Sequence
  Description of Artificial Sequence: Synthetic oligonucleotide
  Sense strand starting at position 3800 of SEQ ID NO: 1881611
aguuaaucacagugauccu

SEQ ID NO: 2057963 - RNA, 19 nt, Artificial Sequence
  Description of Artificial Sequence: Synthetic oligonucleotide
  Antisense strand to SEQ ID NO: 2057962
aggaucacugugauuaacu

SEQ ID NO: 2057964 - RNA, 19 nt, Artificial Sequence
  Description of Artificial Sequence: Synthetic oligonucleotide
  Sense strand starting at position 3966 of SEQ ID NO: 1881611
acagaacccuuugcaugaa

SEQ ID NO: 2057965 - RNA, 19 nt, Artificial Sequence
  Description of Artificial Sequence: Synthetic oligonucleotide
  Antisense strand to SEQ ID NO: 2057964
uucaugcaaaggguucugu

SEQ ID NO: 2057966 - RNA, 19 nt, Artificial Sequence
  Description of Artificial Sequence: Synthetic oligonucleotide
  Sense strand starting at position 126 of SEQ ID NO: 1881612
cacacuuggcuccaggaua

SEQ ID NO: 2057967 - RNA, 19 nt, Artificial Sequence
  Description of Artificial Sequence: Synthetic oligonucleotide
  Antisense strand to SEQ ID NO: 2057966
uauccuggagccaagugug

SEQ ID NO: 2057968 - RNA, 19 nt, Artificial Sequence
  Description of Artificial Sequence: Synthetic oligonucleotide
  Sense strand starting at position 173 of SEQ ID NO: 1881612
aagcuuccguuaucuggaa

SEQ ID NO: 2057969 - RNA, 19 nt, Artificial Sequence
  Description of Artificial Sequence: Synthetic oligonucleotide
  Antisense strand to SEQ ID NO: 2057968
uuccagauaacggaagcuu

SEQ ID NO: 2057970 - RNA, 19 nt, Artificial Sequence
  Description of Artificial Sequence: Synthetic oligonucleotide
  Sense strand starting at position 177 of SEQ ID NO: 1881612
uuccguuaucuggaaggaa

SEQ ID NO: 2057971 - RNA, 19 nt, Artificial Sequence
  Description of Artificial Sequence: Synthetic oligonucleotide
  Antisense strand to SEQ ID NO: 2057970
uuccuuccagauaacggaa

SEQ ID NO: 2057972 - RNA, 19 nt, Artificial Sequence
  Description of Artificial Sequence: Synthetic oligonucleotide
  Sense strand starting at position 234 of SEQ ID NO: 1881612
guaccaggcucucuggaau

SEQ ID NO: 2057973 - RNA, 19 nt, Artificial Sequence
  Description of Artificial Sequence: Synthetic oligonucleotide
  Antisense strand to SEQ ID NO: 2057972
auuccagagagccugguac

SEQ ID NO: 2057974 - RNA, 19 nt, Artificial Sequence
  Description of Artificial Sequence: Synthetic oligonucleotide
  Sense strand starting at position 363 of SEQ ID NO: 1881612
ccagaaagaucaucuaguc

SEQ ID NO: 2057975 - RNA, 19 nt, Artificial Sequence
  Description of Artificial Sequence: Synthetic oligonucleotide
  Antisense strand to SEQ ID NO: 2057974
gacuagaugaucuuucugg

SEQ ID NO: 2057976 - RNA, 19 nt, Artificial Sequence
  Description of Artificial Sequence: Synthetic oligonucleotide
  Sense strand starting at position 1258 of SEQ ID NO: 1881612
uccugcauuugagaugaga

SEQ ID NO: 2057977 - RNA, 19 nt, Artificial Sequence
  Description of Artificial Sequence: Synthetic oligonucleotide
  Antisense strand to SEQ ID NO: 2057976
ucucaucucaaaugcagga

SEQ ID NO: 2057978 - RNA, 19 nt, Artificial Sequence
  Description of Artificial Sequence: Synthetic oligonucleotide
  Sense strand starting at position 1285 of SEQ ID NO: 1881612
cccagauggucggcauagu

SEQ ID NO: 2057979 - RNA, 19 nt, Artificial Sequence
  Description of Artificial Sequence: Synthetic oligonucleotide
  Antisense strand to SEQ ID NO: 2057978
acuaugccgaccaucuggg

SEQ ID NO: 2057980 - RNA, 19 nt, Artificial Sequence
  Description of Artificial Sequence: Synthetic oligonucleotide
  Sense strand starting at position 1286 of SEQ ID NO: 1881612
ccagauggucggcauaguu

SEQ ID NO: 2057981 - RNA, 19 nt, Artificial Sequence
  Description of Artificial Sequence: Synthetic oligonucleotide
  Antisense strand to SEQ ID NO: 2057980
aacuaugccgaccaucugg

SEQ ID NO: 2057982 - RNA, 19 nt, Artificial Sequence
  Description of Artificial Sequence: Synthetic oligonucleotide
  Sense strand starting at position 1351 of SEQ ID NO: 1881612
gcaaccguaucuuaaugaa

SEQ ID NO: 2057983 - RNA, 19 nt, Artificial Sequence
  Description of Artificial Sequence: Synthetic oligonucleotide
  Antisense strand to SEQ ID NO: 2057982
uucauuaagauacgguugc

SEQ ID NO: 2057984 - RNA, 19 nt, Artificial Sequence
  Description of Artificial Sequence: Synthetic oligonucleotide
  Sense strand starting at position 1354 of SEQ ID NO: 1881612
accguaucuuaaugaagag

SEQ ID NO: 2057985 - RNA, 19 nt, Artificial Sequence
  Description of Artificial Sequence: Synthetic oligonucleotide
  Antisense strand to SEQ ID NO: 2057984
cucuucauuaagauacggu

SEQ ID NO: 2057986 - RNA, 19 nt, Artificial Sequence
  Description of Artificial Sequence: Synthetic oligonucleotide
  Sense strand starting at position 1504 of SEQ ID NO: 1881612
aggugagcgcccuguuaag

SEQ ID NO: 2057987 - RNA, 19 nt, Artificial Sequence
  Description of Artificial Sequence: Synthetic oligonucleotide
  Antisense strand to SEQ ID NO: 2057986
cuuaacagggcgcucaccu

SEQ ID NO: 2057988 - RNA, 19 nt, Artificial Sequence
  Description of Artificial Sequence: Synthetic oligonucleotide
  Sense strand starting at position 1615 of SEQ ID NO: 1881612
cgggcuugcuacugggauu

SEQ ID NO: 2057989 - RNA, 19 nt, Artificial Sequence
  Description of Artificial Sequence: Synthetic oligonucleotide
  Antisense strand to SEQ ID NO: 2057988
aaucccaguagcaagcccg

SEQ ID NO: 2057990 - RNA, 19 nt, Artificial Sequence
  Description of Artificial Sequence: Synthetic oligonucleotide
  Sense strand starting at position 1732 of SEQ ID NO: 1881612
gcaggagaccugugaucua

SEQ ID NO: 2057991 - RNA, 19 nt, Artificial Sequence
  Description of Artificial Sequence: Synthetic oligonucleotide
  Antisense strand to SEQ ID NO: 2057990
uagaucacaggucuccugc

SEQ ID NO: 2057992 - RNA, 19 nt, Artificial Sequence
  Description of Artificial Sequence: Synthetic oligonucleotide
  Sense strand starting at position 2086 of SEQ ID NO: 1881612
ucaacuucuccaugcggaa

SEQ ID NO: 2057993 - RNA, 19 nt, Artificial Sequence
  Description of Artificial Sequence: Synthetic oligonucleotide
  Antisense strand to SEQ ID NO: 2057992
uuccgcauggagaaguuga

SEQ ID NO: 2057994 - RNA, 19 nt, Artificial Sequence
  Description of Artificial Sequence: Synthetic oligonucleotide
  Sense strand starting at position 2143 of SEQ ID NO: 1881612
gguucuucucccgcgagua

SEQ ID NO: 2057995 - RNA, 19 nt, Artificial Sequence
  Description of Artificial Sequence: Synthetic oligonucleotide
  Antisense strand to SEQ ID NO: 2057994
uacucgcgggagaagaacc

SEQ ID NO: 2057996 - RNA, 19 nt, Artificial Sequence
  Description of Artificial Sequence: Synthetic oligonucleotide
  Sense strand starting at position 2144 of SEQ ID NO: 1881612
guucuucucccgcgaguac

SEQ ID NO: 2057997 - RNA, 19 nt, Artificial Sequence
  Description of Artificial Sequence: Synthetic oligonucleotide
  Antisense strand to SEQ ID NO: 2057996
guacucgcgggagaagaac

SEQ ID NO: 2057998 - RNA, 19 nt, Artificial Sequence
  Description of Artificial Sequence: Synthetic oligonucleotide
  Sense strand starting at position 2257 of SEQ ID NO: 1881612
gcgccaucuuccucugcga

SEQ ID NO: 2057999 - RNA, 19 nt, Artificial Sequence
  Description of Artificial Sequence: Synthetic oligonucleotide
  Antisense strand to SEQ ID NO: 2057998
ucgcagaggaagauggcgc

SEQ ID NO: 2058000 - RNA, 19 nt, Artificial Sequence
  Description of Artificial Sequence: Synthetic oligonucleotide
  Sense strand starting at position 2342 of SEQ ID NO: 1881612
gcggucuccugggaauugu

SEQ ID NO: 2058001 - RNA, 19 nt, Artificial Sequence
  Description of Artificial Sequence: Synthetic oligonucleotide
  Antisense strand to SEQ ID NO: 2058000
acaauucccaggagaccgc

SEQ ID NO: 2058002 - RNA, 19 nt, Artificial Sequence
  Description of Artificial Sequence: Synthetic oligonucleotide
  Sense strand starting at position 2355 of SEQ ID NO: 1881612
aauuguaguuccuccguga

SEQ ID NO: 2058003 - RNA, 19 nt, Artificial Sequence
  Description of Artificial Sequence: Synthetic oligonucleotide
  Antisense strand to SEQ ID NO: 2058002
ucacggaggaacuacaauu

SEQ ID NO: 2058004 - RNA, 19 nt, Artificial Sequence
  Description of Artificial Sequence: Synthetic oligonucleotide
  Sense strand starting at position 2433 of SEQ ID NO: 1881612
gcaagcguuucccaggcaa

SEQ ID NO: 2058005 - RNA, 19 nt, Artificial Sequence
  Description of Artificial Sequence: Synthetic oligonucleotide
  Antisense strand to SEQ ID NO: 2058004
uugccugggaaacgcuugc

SEQ ID NO: 2058006 - RNA, 19 nt, Artificial Sequence
  Description of Artificial Sequence: Synthetic oligonucleotide
  Sense strand starting at position 2634 of SEQ ID NO: 1881612
ggcugagccugauaaugcu

SEQ ID NO: 2058007 - RNA, 19 nt, Artificial Sequence
  Description of Artificial Sequence: Synthetic oligonucleotide
  Antisense strand to SEQ ID NO: 2058006
agcauuaucaggcucagcc

SEQ ID NO: 2058008 - RNA, 19 nt, Artificial Sequence
  Description of Artificial Sequence: Synthetic oligonucleotide
  Sense strand starting at position 2949 of SEQ ID NO: 1881612
gagccaaaguuagcauaga

SEQ ID NO: 2058009 - RNA, 19 nt, Artificial Sequence
  Description of Artificial Sequence: Synthetic oligonucleotide
  Antisense strand to SEQ ID NO: 2058008
ucuaugcuaacuuuggcuc

SEQ ID NO: 2058010 - RNA, 19 nt, Artificial Sequence
  Description of Artificial Sequence: Synthetic oligonucleotide
  Sense strand starting at position 3086 of SEQ ID NO: 1881612
gggagcucaucuggcaaga

SEQ ID NO: 2058011 - RNA, 19 nt, Artificial Sequence
  Description of Artificial Sequence: Synthetic oligonucleotide
  Antisense strand to SEQ ID NO: 2058010
ucuugccagaugagcuccc

SEQ ID NO: 2058012 - RNA, 19 nt, Artificial Sequence
  Description of Artificial Sequence: Synthetic oligonucleotide
  Sense strand starting at position 3088 of SEQ ID NO: 1881612
gagcucaucuggcaagaau

SEQ ID NO: 2058013 - RNA, 19 nt, Artificial Sequence
  Description of Artificial Sequence: Synthetic oligonucleotide
  Antisense strand to SEQ ID NO: 2058012
auucuugccagaugagcuc

SEQ ID NO: 2058014 - RNA, 19 nt, Artificial Sequence
  Description of Artificial Sequence: Synthetic oligonucleotide
  Sense strand starting at position 3201 of SEQ ID NO: 1881612
ugggcaucuugagaggaau

SEQ ID NO: 2058015 - RNA, 19 nt, Artificial Sequence
  Description of Artificial Sequence: Synthetic oligonucleotide
  Antisense strand to SEQ ID NO: 2058014
auuccucucaagaugccca

SEQ ID NO: 2058016 - RNA, 19 nt, Artificial Sequence
  Description of Artificial Sequence: Synthetic oligonucleotide
  Sense strand starting at position 3203 of SEQ ID NO: 1881612
ggcaucuugagaggaauua

SEQ ID NO: 2058017 - RNA, 19 nt, Artificial Sequence
  Description of Artificial Sequence: Synthetic oligonucleotide
  Antisense strand to SEQ ID NO: 2058016
uaauuccucucaagaugcc

SEQ ID NO: 2058018 - RNA, 19 nt, Artificial Sequence
  Description of Artificial Sequence: Synthetic oligonucleotide
  Sense strand starting at position 3252 of SEQ ID NO: 1881612
gggauagggucucugucau

SEQ ID NO: 2058019 - RNA, 19 nt, Artificial Sequence
  Description of Artificial Sequence: Synthetic oligonucleotide
  Antisense strand to SEQ ID NO: 2058018
augacagagacccuauccc

SEQ ID NO: 2058020 - RNA, 19 nt, Artificial Sequence
  Description of Artificial Sequence: Synthetic oligonucleotide
  Sense strand starting at position 3364 of SEQ ID NO: 1881612
gaacuauaggugcguguca

SEQ ID NO: 2058021 - RNA, 19 nt, Artificial Sequence
  Description of Artificial Sequence: Synthetic oligonucleotide
  Antisense strand to SEQ ID NO: 2058020
ugacacgcaccuauaguuc

SEQ ID NO: 2058022 - RNA, 19 nt, Artificial Sequence
  Description of Artificial Sequence: Synthetic oligonucleotide
  Sense strand starting at position 3416 of SEQ ID NO: 1881612
gaaauuaggucucccuaug

SEQ ID NO: 2058023 - RNA, 19 nt, Artificial Sequence
  Description of Artificial Sequence: Synthetic oligonucleotide
  Antisense strand to SEQ ID NO: 2058022
cauagggagaccuaauuuc

SEQ ID NO: 2058024 - RNA, 19 nt, Artificial Sequence
  Description of Artificial Sequence: Synthetic oligonucleotide
  Sense strand starting at position 3545 of SEQ ID NO: 1881612
aauuguaucuuguguuguu

SEQ ID NO: 2058025 - RNA, 19 nt, Artificial Sequence
  Description of Artificial Sequence: Synthetic oligonucleotide
  Antisense strand to SEQ ID NO: 2058024
aacaacacaagauacaauu

SEQ ID NO: 2058026 - RNA, 19 nt, Artificial Sequence
  Description of Artificial Sequence: Synthetic oligonucleotide
  Sense strand starting at position 3550 of SEQ ID NO: 1881612
uaucuuguguuguuccaga

SEQ ID NO: 2058027 - RNA, 19 nt, Artificial Sequence
  Description of Artificial Sequence: Synthetic oligonucleotide
  Antisense strand to SEQ ID NO: 2058026
ucuggaacaacacaagaua

SEQ ID NO: 2058028 - RNA, 19 nt, Artificial Sequence
  Description of Artificial Sequence: Synthetic oligonucleotide
  Sense strand starting at position 3555 of SEQ ID NO: 1881612
uguguuguuccagagaaga

SEQ ID NO: 2058029 - RNA, 19 nt, Artificial Sequence
  Description of Artificial Sequence: Synthetic oligonucleotide
  Antisense strand to SEQ ID NO: 2058028
ucuucucuggaacaacaca

SEQ ID NO: 2058030 - RNA, 19 nt, Artificial Sequence
  Description of Artificial Sequence: Synthetic oligonucleotide
  Sense strand starting at position 3557 of SEQ ID NO: 1881612
uguuguuccagagaagauu

SEQ ID NO: 2058031 - RNA, 19 nt, Artificial Sequence
  Description of Artificial Sequence: Synthetic oligonucleotide
  Antisense strand to SEQ ID NO: 2058030
aaucuucucuggaacaaca

SEQ ID NO: 2058032 - RNA, 19 nt, Artificial Sequence
  Description of Artificial Sequence: Synthetic oligonucleotide
  Sense strand starting at position 3587 of SEQ ID NO: 1881612
gaaucaaggugaucugcuu

SEQ ID NO: 2058033 - RNA, 19 nt, Artificial Sequence
  Description of Artificial Sequence: Synthetic oligonucleotide
  Antisense strand to SEQ ID NO: 2058032
aagcagaucaccuugauuc

SEQ ID NO: 2058034 - RNA, 19 nt, Artificial Sequence
  Description of Artificial Sequence: Synthetic oligonucleotide
  Sense strand starting at position 3669 of SEQ ID NO: 1881612
ugaguuguuucaggcaaga

SEQ ID NO: 2058035 - RNA, 19 nt, Artificial Sequence
  Description of Artificial Sequence: Synthetic oligonucleotide
  Antisense strand to SEQ ID NO: 2058034
ucuugccugaaacaacuca

SEQ ID NO: 2058036 - RNA, 19 nt, Artificial Sequence
  Description of Artificial Sequence: Synthetic oligonucleotide
  Sense strand starting at position 3731 of SEQ ID NO: 1881612
uucccaauaugggauguau

SEQ ID NO: 2058037 - RNA, 19 nt, Artificial Sequence
  Description of Artificial Sequence: Synthetic oligonucleotide
  Antisense strand to SEQ ID NO: 2058036
auacaucccauauugggaa

SEQ ID NO: 2058038 - RNA, 19 nt, Artificial Sequence
  Description of Artificial Sequence: Synthetic oligonucleotide
  Sense strand starting at position 3834 of SEQ ID NO: 1881612
ugcugucauugccaucauu

SEQ ID NO: 2058039 - RNA, 19 nt, Artificial Sequence
  Description of Artificial Sequence: Synthetic oligonucleotide
  Antisense strand to SEQ ID NO: 2058038
aaugauggcaaugacagca

SEQ ID NO: 2058040 - RNA, 19 nt, Artificial Sequence
  Description of Artificial Sequence: Synthetic oligonucleotide
  Sense strand starting at position 3837 of SEQ ID NO: 1881612
ugucauugccaucauugca

SEQ ID NO: 2058041 - RNA, 19 nt, Artificial Sequence
  Description of Artificial Sequence: Synthetic oligonucleotide
  Antisense strand to SEQ ID NO: 2058040
ugcaaugauggcaaugaca

SEQ ID NO: 2058042 - RNA, 19 nt, Artificial Sequence
  Description of Artificial Sequence: Synthetic oligonucleotide
  Sense strand starting at position 3894 of SEQ ID NO: 1881612
ggccuagauucucaccugu

SEQ ID NO: 2058043 - RNA, 19 nt, Artificial Sequence
  Description of Artificial Sequence: Synthetic oligonucleotide
  Antisense strand to SEQ ID NO: 2058042
acaggugagaaucuaggcc

SEQ ID NO: 2058044 - RNA, 19 nt, Artificial Sequence
  Description of Artificial Sequence: Synthetic oligonucleotide
  Sense strand starting at position 3956 of SEQ ID NO: 1881612
aucuccuggugccuagaau

SEQ ID NO: 2058045 - RNA, 19 nt, Artificial Sequence
  Description of Artificial Sequence: Synthetic oligonucleotide
  Antisense strand to SEQ ID NO: 2058044
auucuaggcaccaggagau

SEQ ID NO: 2058046 - RNA, 19 nt, Artificial Sequence
  Description of Artificial Sequence: Synthetic oligonucleotide
  Sense strand starting at position 1 of SEQ ID NO: 1881613
ugacuaucugcaugacuau

SEQ ID NO: 2058047 - RNA, 19 nt, Artificial Sequence
  Description of Artificial Sequence: Synthetic oligonucleotide
  Antisense strand to SEQ ID NO: 2058046
auagucaugcagauaguca

SEQ ID NO: 2058048 - RNA, 19 nt, Artificial Sequence
  Description of Artificial Sequence: Synthetic oligonucleotide
  Sense strand starting at position 24 of SEQ ID NO: 1881613
aucagaagcuaugcaauca

SEQ ID NO: 2058049 - RNA, 19 nt, Artificial Sequence
  Description of Artificial Sequence: Synthetic oligonucleotide
  Antisense strand to SEQ ID NO: 2058048
ugauugcauagcuucugau

SEQ ID NO: 2058050 - RNA, 19 nt, Artificial Sequence
  Description of Artificial Sequence: Synthetic oligonucleotide
  Sense strand starting at position 34 of SEQ ID NO: 1881613
augcaaucacucuggaaua

SEQ ID NO: 2058051 - RNA, 19 nt, Artificial Sequence
  Description of Artificial Sequence: Synthetic oligonucleotide
  Antisense strand to SEQ ID NO: 2058050
uauuccagagugauugcau

SEQ ID NO: 2058052 - RNA, 19 nt, Artificial Sequence
  Description of Artificial Sequence: Synthetic oligonucleotide
  Sense strand starting at position 93 of SEQ ID NO: 1881613
gaagaauccuuuccggaga

SEQ ID NO: 2058053 - RNA, 19 nt, Artificial Sequence
  Description of Artificial Sequence: Synthetic oligonucleotide
  Antisense strand to SEQ ID NO: 2058052
ucuccggaaaggauucuuc

SEQ ID NO: 2058054 - RNA, 19 nt, Artificial Sequence
  Description of Artificial Sequence: Synthetic oligonucleotide
  Sense strand starting at position 96 of SEQ ID NO: 1881613
gaauccuuuccggagaccu

SEQ ID NO: 2058055 - RNA, 19 nt, Artificial Sequence
  Description of Artificial Sequence: Synthetic oligonucleotide
  Antisense strand to SEQ ID NO: 2058054
aggucuccggaaaggauuc

SEQ ID NO: 2058056 - RNA, 19 nt, Artificial Sequence
  Description of Artificial Sequence: Synthetic oligonucleotide
  Sense strand starting at position 329 of SEQ ID NO: 1881613
accacaauguccuuguaua

SEQ ID NO: 2058057 - RNA, 19 nt, Artificial Sequence
  Description of Artificial Sequence: Synthetic oligonucleotide
  Antisense strand to SEQ ID NO: 2058056
uauacaaggacauuguggu

SEQ ID NO: 2058058 - RNA, 19 nt, Artificial Sequence
  Description of Artificial Sequence: Synthetic oligonucleotide
  Sense strand starting at position 330 of SEQ ID NO: 1881613
ccacaauguccuuguauag

SEQ ID NO: 2058059 - RNA, 19 nt, Artificial Sequence
  Description of Artificial Sequence: Synthetic oligonucleotide
  Antisense strand to SEQ ID NO: 2058058
cuauacaaggacauugugg

SEQ ID NO: 2058060 - RNA, 19 nt, Artificial Sequence
  Description of Artificial Sequence: Synthetic oligonucleotide
  Sense strand starting at position 393 of SEQ ID NO: 1881613
ccaccaaugucacugagua

SEQ ID NO: 2058061 - RNA, 19 nt, Artificial Sequence
  Description of Artificial Sequence: Synthetic oligonucleotide
  Antisense strand to SEQ ID NO: 2058060
uacucagugacauuggugg

SEQ ID NO: 2058062 - RNA, 19 nt, Artificial Sequence
  Description of Artificial Sequence: Synthetic oligonucleotide
  Sense strand starting at position 452 of SEQ ID NO: 1881613
aggcuagaccuuugguaac

SEQ ID NO: 2058063 - RNA, 19 nt, Artificial Sequence
  Description of Artificial Sequence: Synthetic oligonucleotide
  Antisense strand to SEQ ID NO: 2058062
guuaccaaaggucuagccu

SEQ ID NO: 2058064 - RNA, 19 nt, Artificial Sequence
  Description of Artificial Sequence: Synthetic oligonucleotide
  Sense strand starting at position 464 of SEQ ID NO: 1881613
ugguaacgucagcaacauu

SEQ ID NO: 2058065 - RNA, 19 nt, Artificial Sequence
  Description of Artificial Sequence: Synthetic oligonucleotide
  Antisense strand to SEQ ID NO: 2058064
aauguugcugacguuacca

SEQ ID NO: 2058066 - RNA, 19 nt, Artificial Sequence
  Description of Artificial Sequence: Synthetic oligonucleotide
  Sense strand starting at position 619 of SEQ ID NO: 1881613
gcuuaaguccuggaaucca

SEQ ID NO: 2058067 - RNA, 19 nt, Artificial Sequence
  Description of Artificial Sequence: Synthetic oligonucleotide
  Antisense strand to SEQ ID NO: 2058066
uggauuccaggacuuaagc

SEQ ID NO: 2058068 - RNA, 19 nt, Artificial Sequence
  Description of Artificial Sequence: Synthetic oligonucleotide
  Sense strand starting at position 687 of SEQ ID NO: 1881613
auaaaccgcuaguuaauaa

SEQ ID NO: 2058069 - RNA, 19 nt, Artificial Sequence
  Description of Artificial Sequence: Synthetic oligonucleotide
  Antisense strand to SEQ ID NO: 2058068
uuauuaacuagcgguuuau

SEQ ID NO: 2058070 - RNA, 19 nt, Artificial Sequence
  Description of Artificial Sequence: Synthetic oligonucleotide
  Sense strand starting at position 725 of SEQ ID NO: 1881613
ucugcuuuccuaugaagac

SEQ ID NO: 2058071 - RNA, 19 nt, Artificial Sequence
  Description of Artificial Sequence: Synthetic oligonucleotide
  Antisense strand to SEQ ID NO: 2058070
gucuucauaggaaagcaga

SEQ ID NO: 2058072 - RNA, 19 nt, Artificial Sequence
  Description of Artificial Sequence: Synthetic oligonucleotide
  Sense strand starting at position 822 of SEQ ID NO: 1881613
gaaacaauacguggucacu

SEQ ID NO: 2058073 - RNA, 19 nt, Artificial Sequence
  Description of Artificial Sequence: Synthetic oligonucleotide
  Antisense strand to SEQ ID NO: 2058072
agugaccacguauuguuuc

SEQ ID NO: 2058074 - RNA, 19 nt, Artificial Sequence
  Description of Artificial Sequence: Synthetic oligonucleotide
  Sense strand starting at position 824 of SEQ ID NO: 1881613
aacaauacguggucacuca

SEQ ID NO: 2058075 - RNA, 19 nt, Artificial Sequence
  Description of Artificial Sequence: Synthetic oligonucleotide
  Antisense strand to SEQ ID NO: 2058074
ugagugaccacguauuguu

SEQ ID NO: 2058076 - RNA, 19 nt, Artificial Sequence
  Description of Artificial Sequence: Synthetic oligonucleotide
  Sense strand starting at position 825 of SEQ ID NO: 1881613
acaauacguggucacucau

SEQ ID NO: 2058077 - RNA, 19 nt, Artificial Sequence
  Description of Artificial Sequence: Synthetic oligonucleotide
  Antisense strand to SEQ ID NO: 2058076
augagugaccacguauugu

SEQ ID NO: 2058078 - RNA, 19 nt, Artificial Sequence
  Description of Artificial Sequence: Synthetic oligonucleotide
  Sense strand starting at position 1178 of SEQ ID NO: 1881613
cuaggaaagcuaugaccuu

SEQ ID NO: 2058079 - RNA, 19 nt, Artificial Sequence
  Description of Artificial Sequence: Synthetic oligonucleotide
  Antisense strand to SEQ ID NO: 2058078
aaggucauagcuuuccuag

SEQ ID NO: 2058080 - RNA, 19 nt, Artificial Sequence
  Description of Artificial Sequence: Synthetic oligonucleotide
  Sense strand starting at position 1185 of SEQ ID NO: 1881613
agcuaugaccuugaucuuu

SEQ ID NO: 2058081 - RNA, 19 nt, Artificial Sequence
  Description of Artificial Sequence: Synthetic oligonucleotide
  Antisense strand to SEQ ID NO: 2058080
aaagaucaaggucauagcu

SEQ ID NO: 2058082 - RNA, 19 nt, Artificial Sequence
  Description of Artificial Sequence: Synthetic oligonucleotide
  Sense strand starting at position 1353 of SEQ ID NO: 1881613
gacggcaagagcuguauuu

SEQ ID NO: 2058083 - RNA, 19 nt, Artificial Sequence
  Description of Artificial Sequence: Synthetic oligonucleotide
  Antisense strand to SEQ ID NO: 2058082
aaauacagcucuugccguc

SEQ ID NO: 2058084 - RNA, 19 nt, Artificial Sequence
  Description of Artificial Sequence: Synthetic oligonucleotide
  Sense strand starting at position 1376 of SEQ ID NO: 1881613
uuuggugacgcccaucaaa

SEQ ID NO: 2058085 - RNA, 19 nt, Artificial Sequence
  Description of Artificial Sequence: Synthetic oligonucleotide
  Antisense strand to SEQ ID NO: 2058084
uuugaugggcgucaccaaa

SEQ ID NO: 2058086 - RNA, 19 nt, Artificial Sequence
  Description of Artificial Sequence: Synthetic oligonucleotide
  Sense strand starting at position 1420 of SEQ ID NO: 1881613
ugagguuucucccuacagu

SEQ ID NO: 2058087 - RNA, 19 nt, Artificial Sequence
  Description of Artificial Sequence: Synthetic oligonucleotide
  Antisense strand to SEQ ID NO: 2058086
acuguagggagaaaccuca

SEQ ID NO: 2058088 - RNA, 19 nt, Artificial Sequence
  Description of Artificial Sequence: Synthetic oligonucleotide
  Sense strand starting at position 1421 of SEQ ID NO: 1881613
gagguuucucccuacaguu

SEQ ID NO: 2058089 - RNA, 19 nt, Artificial Sequence
  Description of Artificial Sequence: Synthetic oligonucleotide
  Antisense strand to SEQ ID NO: 2058088
aacuguagggagaaaccuc

SEQ ID NO: 2058090 - RNA, 19 nt, Artificial Sequence
  Description of Artificial Sequence: Synthetic oligonucleotide
  Sense strand starting at position 2105 of SEQ ID NO: 1881613
ccggguuuccucucguuca

SEQ ID NO: 2058091 - RNA, 19 nt, Artificial Sequence
  Description of Artificial Sequence: Synthetic oligonucleotide
  Antisense strand to SEQ ID NO: 2058090
ugaacgagaggaaacccgg

SEQ ID NO: 2058092 - RNA, 19 nt, Artificial Sequence
  Description of Artificial Sequence: Synthetic oligonucleotide
  Sense strand starting at position 2149 of SEQ ID NO: 1881613
cgguuuccaccuugaauuc

SEQ ID NO: 2058093 - RNA, 19 nt, Artificial Sequence
  Description of Artificial Sequence: Synthetic oligonucleotide
  Antisense strand to SEQ ID NO: 2058092
gaauucaagguggaaaccg

SEQ ID NO: 2058094 - RNA, 19 nt, Artificial Sequence
  Description of Artificial Sequence: Synthetic oligonucleotide
  Sense strand starting at position 2462 of SEQ ID NO: 1881613
ccgacuucccaacggaaga

SEQ ID NO: 2058095 - RNA, 19 nt, Artificial Sequence
  Description of Artificial Sequence: Synthetic oligonucleotide
  Antisense strand to SEQ ID NO: 2058094
ucuuccguugggaagucgg

SEQ ID NO: 2058096 - RNA, 19 nt, Artificial Sequence
  Description of Artificial Sequence: Synthetic oligonucleotide
  Sense strand starting at position 2513 of SEQ ID NO: 1881613
acagaaacucccgaagcau

SEQ ID NO: 2058097 - RNA, 19 nt, Artificial Sequence
  Description of Artificial Sequence: Synthetic oligonucleotide
  Antisense strand to SEQ ID NO: 2058096
augcuucgggaguuucugu

SEQ ID NO: 2058098 - RNA, 19 nt, Artificial Sequence
  Description of Artificial Sequence: Synthetic oligonucleotide
  Sense strand starting at position 2708 of SEQ ID NO: 1881613
auuaaaccaccuuguguuu

SEQ ID NO: 2058099 - RNA, 19 nt, Artificial Sequence
  Description of Artificial Sequence: Synthetic oligonucleotide
  Antisense strand to SEQ ID NO: 2058098
aaacacaaggugguuuaau

SEQ ID NO: 2058100 - RNA, 19 nt, Artificial Sequence
  Description of Artificial Sequence: Synthetic oligonucleotide
  Sense strand starting at position 2808 of SEQ ID NO: 1881613
gggagaaccuccgcuugga

SEQ ID NO: 2058101 - RNA, 19 nt, Artificial Sequence
  Description of Artificial Sequence: Synthetic oligonucleotide
  Antisense strand to SEQ ID NO: 2058100
uccaagcggagguucuccc

SEQ ID NO: 2058102 - RNA, 19 nt, Artificial Sequence
  Description of Artificial Sequence: Synthetic oligonucleotide
  Sense strand starting at position 2870 of SEQ ID NO: 1881613
ggaaucuuucucugucuua

SEQ ID NO: 2058103 - RNA, 19 nt, Artificial Sequence
  Description of Artificial Sequence: Synthetic oligonucleotide
  Antisense strand to SEQ ID NO: 2058102
uaagacagagaaagauucc

SEQ ID NO: 2058104 - RNA, 19 nt, Artificial Sequence
  Description of Artificial Sequence: Synthetic oligonucleotide
  Sense strand starting at position 2910 of SEQ ID NO: 1881613
aggaaaguguuauuccuca

SEQ ID NO: 2058105 - RNA, 19 nt, Artificial Sequence
  Description of Artificial Sequence: Synthetic oligonucleotide
  Antisense strand to SEQ ID NO: 2058104
ugaggaauaacacuuuccu

SEQ ID NO: 2058106 - RNA, 19 nt, Artificial Sequence
  Description of Artificial Sequence: Synthetic oligonucleotide
  Sense strand starting at position 2914 of SEQ ID NO: 1881613
aaguguuauuccucaagug

SEQ ID NO: 2058107 - RNA, 19 nt, Artificial Sequence
  Description of Artificial Sequence: Synthetic oligonucleotide
  Antisense strand to SEQ ID NO: 2058106
cacuugaggaauaacacuu

SEQ ID NO: 2058108 - RNA, 19 nt, Artificial Sequence
  Description of Artificial Sequence: Synthetic oligonucleotide
  Sense strand starting at position 2915 of SEQ ID NO: 1881613
aguguuauuccucaagugu

SEQ ID NO: 2058109 - RNA, 19 nt, Artificial Sequence
  Description of Artificial Sequence: Synthetic oligonucleotide
  Antisense strand to SEQ ID NO: 2058108
acacuugaggaauaacacu

SEQ ID NO: 2058110 - RNA, 19 nt, Artificial Sequence
  Description of Artificial Sequence: Synthetic oligonucleotide
  Sense strand starting at position 2976 of SEQ ID NO: 1881613
uacagugaggugcacaaau

SEQ ID NO: 2058111 - RNA, 19 nt, Artificial Sequence
  Description of Artificial Sequence: Synthetic oligonucleotide
  Antisense strand to SEQ ID NO: 2058110
auuugugcaccucacugua

SEQ ID NO: 2058112 - RNA, 19 nt, Artificial Sequence
  Description of Artificial Sequence: Synthetic oligonucleotide
  Sense strand starting at position 3048 of SEQ ID NO: 1881613
cguguccugguugagauuu

SEQ ID NO: 2058113 - RNA, 19 nt, Artificial Sequence
  Description of Artificial Sequence: Synthetic oligonucleotide
  Antisense strand to SEQ ID NO: 2058112
aaaucucaaccaggacacg

SEQ ID NO: 2058114 - RNA, 19 nt, Artificial Sequence
  Description of Artificial Sequence: Synthetic oligonucleotide
  Sense strand starting at position 3056 of SEQ ID NO: 1881613
gguugagauuuaggacauu

SEQ ID NO: 2058115 - RNA, 19 nt, Artificial Sequence
  Description of Artificial Sequence: Synthetic oligonucleotide
  Antisense strand to SEQ ID NO: 2058114
aauguccuaaaucucaacc

SEQ ID NO: 2058116 - RNA, 19 nt, Artificial Sequence
  Description of Artificial Sequence: Synthetic oligonucleotide
  Sense strand starting at position 3068 of SEQ ID NO: 1881613
ggacauuucccguggcaca

SEQ ID NO: 2058117 - RNA, 19 nt, Artificial Sequence
  Description of Artificial Sequence: Synthetic oligonucleotide
  Antisense strand to SEQ ID NO: 2058116
ugugccacgggaaaugucc

SEQ ID NO: 2058118 - RNA, 19 nt, Artificial Sequence
  Description of Artificial Sequence: Synthetic oligonucleotide
  Sense strand starting at position 3441 of SEQ ID NO: 1881613
gagguuguuuaacccucua

SEQ ID NO: 2058119 - RNA, 19 nt, Artificial Sequence
  Description of Artificial Sequence: Synthetic oligonucleotide
  Antisense strand to SEQ ID NO: 2058118
uagaggguuaaacaaccuc

SEQ ID NO: 2058120 - RNA, 19 nt, Artificial Sequence
  Description of Artificial Sequence: Synthetic oligonucleotide
  Sense strand starting at position 3594 of SEQ ID NO: 1881613
gaucaugaccagugacaca

SEQ ID NO: 2058121 - RNA, 19 nt, Artificial Sequence
  Description of Artificial Sequence: Synthetic oligonucleotide
  Antisense strand to SEQ ID NO: 2058120
ugugucacuggucaugauc

SEQ ID NO: 2058122 - RNA, 19 nt, Artificial Sequence
  Description of Artificial Sequence: Synthetic oligonucleotide
  Sense strand starting at position 3696 of SEQ ID NO: 1881613
aucaguacaugugagauuu

SEQ ID NO: 2058123 - RNA, 19 nt, Artificial Sequence
  Description of Artificial Sequence: Synthetic oligonucleotide
  Antisense strand to SEQ ID NO: 2058122
aaaucucacauguacugau

SEQ ID NO: 2058124 - RNA, 19 nt, Artificial Sequence
  Description of Artificial Sequence: Synthetic oligonucleotide
  Sense strand starting at position 3803 of SEQ ID NO: 1881613
uugaaagagugcuuaucua

SEQ ID NO: 2058125 - RNA, 19 nt, Artificial Sequence
  Description of Artificial Sequence: Synthetic oligonucleotide
  Antisense strand to SEQ ID NO: 2058124
uagauaagcacucuuucaa

SEQ ID NO: 2058126 - RNA, 19 nt, Artificial Sequence
  Description of Artificial Sequence: Synthetic oligonucleotide
  Sense strand starting at position 153 of SEQ ID NO: 1881614
uugugauuugcugguugag

SEQ ID NO: 2058127 - RNA, 19 nt, Artificial Sequence
  Description of Artificial Sequence: Synthetic oligonucleotide
  Antisense strand to SEQ ID NO: 2058126
cucaaccagcaaaucacaa

SEQ ID NO: 2058128 - RNA, 19 nt, Artificial Sequence
  Description of Artificial Sequence: Synthetic oligonucleotide
  Sense strand starting at position 238 of SEQ ID NO: 1881614
uggguuuggacucagcauu

SEQ ID NO: 2058129 - RNA, 19 nt, Artificial Sequence
  Description of Artificial Sequence: Synthetic oligonucleotide
  Antisense strand to SEQ ID NO: 2058128
aaugcugaguccaaaccca

SEQ ID NO: 2058130 - RNA, 19 nt, Artificial Sequence
  Description of Artificial Sequence: Synthetic oligonucleotide
  Sense strand starting at position 291 of SEQ ID NO: 1881614
ggguuaagugguuauccag

SEQ ID NO: 2058131 - RNA, 19 nt, Artificial Sequence
  Description of Artificial Sequence: Synthetic oligonucleotide
  Antisense strand to SEQ ID NO: 2058130
cuggauaaccacuuaaccc

SEQ ID NO: 2058132 - RNA, 19 nt, Artificial Sequence
  Description of Artificial Sequence: Synthetic oligonucleotide
  Sense strand starting at position 300 of SEQ ID NO: 1881614
gguuauccagcuggaagaa

SEQ ID NO: 2058133 - RNA, 19 nt, Artificial Sequence
  Description of Artificial Sequence: Synthetic oligonucleotide
  Antisense strand to SEQ ID NO: 2058132
uucuuccagcuggauaacc

SEQ ID NO: 2058134 - RNA, 19 nt, Artificial Sequence
  Description of Artificial Sequence: Synthetic oligonucleotide
  Sense strand starting at position 301 of SEQ ID NO: 1881614
guuauccagcuggaagaau

SEQ ID NO: 2058135 - RNA, 19 nt, Artificial Sequence
  Description of Artificial Sequence: Synthetic oligonucleotide
  Antisense strand to SEQ ID NO: 2058134
auucuuccagcuggauaac

SEQ ID NO: 2058136 - RNA, 19 nt, Artificial Sequence
  Description of Artificial Sequence: Synthetic oligonucleotide
  Sense strand starting at position 445 of SEQ ID NO: 1881614
gccagcuugggacacuaau

SEQ ID NO: 2058137 - RNA, 19 nt, Artificial Sequence
  Description of Artificial Sequence: Synthetic oligonucleotide
  Antisense strand to SEQ ID NO: 2058136
auuagugucccaagcuggc

SEQ ID NO: 2058138 - RNA, 19 nt, Artificial Sequence
  Description of Artificial Sequence: Synthetic oligonucleotide
  Sense strand starting at position 520 of SEQ ID NO: 1881614
gauguagggccauggauua

SEQ ID NO: 2058139 - RNA, 19 nt, Artificial Sequence
  Description of Artificial Sequence: Synthetic oligonucleotide
  Antisense strand to SEQ ID NO: 2058138
uaauccauggcccuacauc

SEQ ID NO: 2058140 - RNA, 19 nt, Artificial Sequence
  Description of Artificial Sequence: Synthetic oligonucleotide
  Sense strand starting at position 595 of SEQ ID NO: 1881614
ucuugaaagguggguggau

SEQ ID NO: 2058141 - RNA, 19 nt, Artificial Sequence
  Description of Artificial Sequence: Synthetic oligonucleotide
  Antisense strand to SEQ ID NO: 2058140
auccacccaccuuucaaga

SEQ ID NO: 2058142 - RNA, 19 nt, Artificial Sequence
  Description of Artificial Sequence: Synthetic oligonucleotide
  Sense strand starting at position 635 of SEQ ID NO: 1881614
aaggaaugucuuggugaga

SEQ ID NO: 2058143 - RNA, 19 nt, Artificial Sequence
  Description of Artificial Sequence: Synthetic oligonucleotide
  Antisense strand to SEQ ID NO: 2058142
ucucaccaagacauuccuu

SEQ ID NO: 2058144 - RNA, 19 nt, Artificial Sequence
  Description of Artificial Sequence: Synthetic oligonucleotide
  Sense strand starting at position 636 of SEQ ID NO: 1881614
aggaaugucuuggugagag

SEQ ID NO: 2058145 - RNA, 19 nt, Artificial Sequence
  Description of Artificial Sequence: Synthetic oligonucleotide
  Antisense strand to SEQ ID NO: 2058144
cucucaccaagacauuccu

SEQ ID NO: 2058146 - RNA, 19 nt, Artificial Sequence
  Description of Artificial Sequence: Synthetic oligonucleotide
  Sense strand starting at position 809 of SEQ ID NO: 1881614
auaauuuccucaggaagga

SEQ ID NO: 2058147 - RNA, 19 nt, Artificial Sequence
  Description of Artificial Sequence: Synthetic oligonucleotide
  Antisense strand to SEQ ID NO: 2058146
uccuuccugaggaaauuau

SEQ ID NO: 2058148 - RNA, 19 nt, Artificial Sequence
  Description of Artificial Sequence: Synthetic oligonucleotide
  Sense strand starting at position 920 of SEQ ID NO: 1881614
gcagucaacauaugggaaa

SEQ ID NO: 2058149 - RNA, 19 nt, Artificial Sequence
  Description of Artificial Sequence: Synthetic oligonucleotide
  Antisense strand to SEQ ID NO: 2058148
uuucccauauguugacugc

SEQ ID NO: 2058150 - RNA, 19 nt, Artificial Sequence
  Description of Artificial Sequence: Synthetic oligonucleotide
  Sense strand starting at position 1036 of SEQ ID NO: 1881614
ccaaaugcugcuuagaaga

SEQ ID NO: 2058151 - RNA, 19 nt, Artificial Sequence
  Description of Artificial Sequence: Synthetic oligonucleotide
  Antisense strand to SEQ ID NO: 2058150
ucuucuaagcagcauuugg

SEQ ID NO: 2058152 - RNA, 19 nt, Artificial Sequence
  Description of Artificial Sequence: Synthetic oligonucleotide
  Sense strand starting at position 1094 of SEQ ID NO: 1881614
uugugaucucaguaggaau

SEQ ID NO: 2058153 - RNA, 19 nt, Artificial Sequence
  Description of Artificial Sequence: Synthetic oligonucleotide
  Antisense strand to SEQ ID NO: 2058152
auuccuacugagaucacaa

SEQ ID NO: 2058154 - RNA, 19 nt, Artificial Sequence
  Description of Artificial Sequence: Synthetic oligonucleotide
  Sense strand starting at position 1096 of SEQ ID NO: 1881614
gugaucucaguaggaauaa

SEQ ID NO: 2058155 - RNA, 19 nt, Artificial Sequence
  Description of Artificial Sequence: Synthetic oligonucleotide
  Antisense strand to SEQ ID NO: 2058154
uuauuccuacugagaucac

SEQ ID NO: 2058156 - RNA, 19 nt, Artificial Sequence
  Description of Artificial Sequence: Synthetic oligonucleotide
  Sense strand starting at position 1106 of SEQ ID NO: 1881614
uaggaauaacugugacuuu

SEQ ID NO: 2058157 - RNA, 19 nt, Artificial Sequence
  Description of Artificial Sequence: Synthetic oligonucleotide
  Antisense strand to SEQ ID NO: 2058156
aaagucacaguuauuccua

SEQ ID NO: 2058158 - RNA, 19 nt, Artificial Sequence
  Description of Artificial Sequence: Synthetic oligonucleotide
  Sense strand starting at position 1123 of SEQ ID NO: 1881614
uugcuauugcaugaugaga

SEQ ID NO: 2058159 - RNA, 19 nt, Artificial Sequence
  Description of Artificial Sequence: Synthetic oligonucleotide
  Antisense strand to SEQ ID NO: 2058158
ucucaucaugcaauagcaa

SEQ ID NO: 2058160 - RNA, 19 nt, Artificial Sequence
  Description of Artificial Sequence: Synthetic oligonucleotide
  Sense strand starting at position 1210 of SEQ ID NO: 1881614
ugaguaguuguuuacuaga

SEQ ID NO: 2058161 - RNA, 19 nt, Artificial Sequence
  Description of Artificial Sequence: Synthetic oligonucleotide
  Antisense strand to SEQ ID NO: 2058160
ucuaguaaacaacuacuca

SEQ ID NO: 2058162 - RNA, 19 nt, Artificial Sequence
  Description of Artificial Sequence: Synthetic oligonucleotide
  Sense strand starting at position 1547 of SEQ ID NO: 1881614
ggauuagaggcaugggcua

SEQ ID NO: 2058163 - RNA, 19 nt, Artificial Sequence
  Description of Artificial Sequence: Synthetic oligonucleotide
  Antisense strand to SEQ ID NO: 2058162
uagcccaugccucuaaucc

SEQ ID NO: 2058164 - RNA, 19 nt, Artificial Sequence
  Description of Artificial Sequence: Synthetic oligonucleotide
  Sense strand starting at position 2239 of SEQ ID NO: 1881614
guucucgaucauggauaaa

SEQ ID NO: 2058165 - RNA, 19 nt, Artificial Sequence
  Description of Artificial Sequence: Synthetic oligonucleotide
  Antisense strand to SEQ ID NO: 2058164
uuuauccaugaucgagaac

SEQ ID NO: 2058166 - RNA, 19 nt, Artificial Sequence
  Description of Artificial Sequence: Synthetic oligonucleotide
  Sense strand starting at position 2251 of SEQ ID NO: 1881614
ggauaaauaugcuccucaa

SEQ ID NO: 2058167 - RNA, 19 nt, Artificial Sequence
  Description of Artificial Sequence: Synthetic oligonucleotide
  Antisense strand to SEQ ID NO: 2058166
uugaggagcauauuuaucc

SEQ ID NO: 2058168 - RNA, 19 nt, Artificial Sequence
  Description of Artificial Sequence: Synthetic oligonucleotide
  Sense strand starting at position 2294 of SEQ ID NO: 1881614
uguggaacauaugucauaa

SEQ ID NO: 2058169 - RNA, 19 nt, Artificial Sequence
  Description of Artificial Sequence: Synthetic oligonucleotide
  Antisense strand to SEQ ID NO: 2058168
uuaugacauauguuccaca

SEQ ID NO: 2058170 - RNA, 19 nt, Artificial Sequence
  Description of Artificial Sequence: Synthetic oligonucleotide
  Sense strand starting at position 2449 of SEQ ID NO: 1881614
aaguuucuggcacacaaga

SEQ ID NO: 2058171 - RNA, 19 nt, Artificial Sequence
  Description of Artificial Sequence: Synthetic oligonucleotide
  Antisense strand to SEQ ID NO: 2058170
ucuugugugccagaaacuu

SEQ ID NO: 2058172 - RNA, 19 nt, Artificial Sequence
  Description of Artificial Sequence: Synthetic oligonucleotide
  Sense strand starting at position 2513 of SEQ ID NO: 1881614
gaaccucaugcuggagaau

SEQ ID NO: 2058173 - RNA, 19 nt, Artificial Sequence
  Description of Artificial Sequence: Synthetic oligonucleotide
  Antisense strand to SEQ ID NO: 2058172
auucuccagcaugagguuc

SEQ ID NO: 2058174 - RNA, 19 nt, Artificial Sequence
  Description of Artificial Sequence: Synthetic oligonucleotide
  Sense strand starting at position 2598 of SEQ ID NO: 1881614
agacuuuggccuuaagucu

SEQ ID NO: 2058175 - RNA, 19 nt, Artificial Sequence
  Description of Artificial Sequence: Synthetic oligonucleotide
  Antisense strand to SEQ ID NO: 2058174
agacuuaaggccaaagucu

SEQ ID NO: 2058176 - RNA, 19 nt, Artificial Sequence
  Description of Artificial Sequence: Synthetic oligonucleotide
  Sense strand starting at position 2660 of SEQ ID NO: 1881614
aucuguuaccaacauguuu

SEQ ID NO: 2058177 - RNA, 19 nt, Artificial Sequence
  Description of Artificial Sequence: Synthetic oligonucleotide
  Antisense strand to SEQ ID NO: 2058176
aaacauguugguaacagau

SEQ ID NO: 2058178 - RNA, 19 nt, Artificial Sequence
  Description of Artificial Sequence: Synthetic oligonucleotide
  Sense strand starting at position 2737 of SEQ ID NO: 1881614
uggccaaauguauggauga

SEQ ID NO: 2058179 - RNA, 19 nt, Artificial Sequence
  Description of Artificial Sequence: Synthetic oligonucleotide
  Antisense strand to SEQ ID NO: 2058178
ucauccauacauuuggcca

SEQ ID NO: 2058180 - RNA, 19 nt, Artificial Sequence
  Description of Artificial Sequence: Synthetic oligonucleotide
  Sense strand starting at position 2747 of SEQ ID NO: 1881614
uauggaugaccuugaagca

SEQ ID NO: 2058181 - RNA, 19 nt, Artificial Sequence
  Description of Artificial Sequence: Synthetic oligonucleotide
  Antisense strand to SEQ ID NO: 2058180
ugcuucaaggucauccaua

SEQ ID NO: 2058182 - RNA, 19 nt, Artificial Sequence
  Description of Artificial Sequence: Synthetic oligonucleotide
  Sense strand starting at position 2815 of SEQ ID NO: 1881614
ggcauuucuucugcuaauu

SEQ ID NO: 2058183 - RNA, 19 nt, Artificial Sequence
  Description of Artificial Sequence: Synthetic oligonucleotide
  Antisense strand to SEQ ID NO: 2058182
aauuagcagaagaaaugcc

SEQ ID NO: 2058184 - RNA, 19 nt, Artificial Sequence
  Description of Artificial Sequence: Synthetic oligonucleotide
  Sense strand starting at position 2989 of SEQ ID NO: 1881614
guugucauuguguuuguga

SEQ ID NO: 2058185 - RNA, 19 nt, Artificial Sequence
  Description of Artificial Sequence: Synthetic oligonucleotide
  Antisense strand to SEQ ID NO: 2058184
ucacaaacacaaugacaac

SEQ ID NO: 2058186 - RNA, 19 nt, Artificial Sequence
  Description of Artificial Sequence: Synthetic oligonucleotide
  Sense strand starting at position 3097 of SEQ ID NO: 1881614
ugcaaauaagcauauugau

SEQ ID NO: 2058187 - RNA, 19 nt, Artificial Sequence
  Description of Artificial Sequence: Synthetic oligonucleotide
  Antisense strand to SEQ ID NO: 2058186
aucaauaugcuuauuugca

SEQ ID NO: 2058188 - RNA, 19 nt, Artificial Sequence
  Description of Artificial Sequence: Synthetic oligonucleotide
  Sense strand starting at position 3278 of SEQ ID NO: 1881614
gccagaugccuuuaggaaa

SEQ ID NO: 2058189 - RNA, 19 nt, Artificial Sequence
  Description of Artificial Sequence: Synthetic oligonucleotide
  Antisense strand to SEQ ID NO: 2058188
uuuccuaaaggcaucuggc

SEQ ID NO: 2058190 - RNA, 19 nt, Artificial Sequence
  Description of Artificial Sequence: Synthetic oligonucleotide
  Sense strand starting at position 3348 of SEQ ID NO: 1881614
gcuuauugcccauaagaga

SEQ ID NO: 2058191 - RNA, 19 nt, Artificial Sequence
  Description of Artificial Sequence: Synthetic oligonucleotide
  Antisense strand to SEQ ID NO: 2058190
ucucuuaugggcaauaagc

SEQ ID NO: 2058192 - RNA, 19 nt, Artificial Sequence
  Description of Artificial Sequence: Synthetic oligonucleotide
  Sense strand starting at position 3368 of SEQ ID NO: 1881614
aagguagguaaugaguuua

SEQ ID NO: 2058193 - RNA, 19 nt, Artificial Sequence
  Description of Artificial Sequence: Synthetic oligonucleotide
  Antisense strand to SEQ ID NO: 2058192
uaaacucauuaccuaccuu

SEQ ID NO: 2058194 - RNA, 19 nt, Artificial Sequence
  Description of Artificial Sequence: Synthetic oligonucleotide
  Sense strand starting at position 3382 of SEQ ID NO: 1881614
guuuacucugagcacaacu

SEQ ID NO: 2058195 - RNA, 19 nt, Artificial Sequence
  Description of Artificial Sequence: Synthetic oligonucleotide
  Antisense strand to SEQ ID NO: 2058194
aguugugcucagaguaaac

SEQ ID NO: 2058196 - RNA, 19 nt, Artificial Sequence
  Description of Artificial Sequence: Synthetic oligonucleotide
  Sense strand starting at position 3856 of SEQ ID NO: 1881614
ccugacuuccaggacaguu

SEQ ID NO: 2058197 - RNA, 19 nt, Artificial Sequence
  Description of Artificial Sequence: Synthetic oligonucleotide
  Antisense strand to SEQ ID NO: 2058196
aacuguccuggaagucagg

SEQ ID NO: 2058198 - RNA, 19 nt, Artificial Sequence
  Description of Artificial Sequence: Synthetic oligonucleotide
  Sense strand starting at position 3887 of SEQ ID NO: 1881614
aggcauaaaugguugauua

SEQ ID NO: 2058199 - RNA, 19 nt, Artificial Sequence
  Description of Artificial Sequence: Synthetic oligonucleotide
  Antisense strand to SEQ ID NO: 2058198
uaaucaaccauuuaugccu

SEQ ID NO: 2058200 - RNA, 19 nt, Artificial Sequence
  Description of Artificial Sequence: Synthetic oligonucleotide
  Sense strand starting at position 3888 of SEQ ID NO: 1881614
ggcauaaaugguugauuau

SEQ ID NO: 2058201 - RNA, 19 nt, Artificial Sequence
  Description of Artificial Sequence: Synthetic oligonucleotide
  Antisense strand to SEQ ID NO: 2058200
auaaucaaccauuuaugcc

SEQ ID NO: 2058202 - RNA, 19 nt, Artificial Sequence
  Description of Artificial Sequence: Synthetic oligonucleotide
  Sense strand starting at position 3889 of SEQ ID NO: 1881614
gcauaaaugguugauuauu

SEQ ID NO: 2058203 - RNA, 19 nt, Artificial Sequence
  Description of Artificial Sequence: Synthetic oligonucleotide
  Antisense strand to SEQ ID NO: 2058202
aauaaucaaccauuuaugc

SEQ ID NO: 2058204 - RNA, 19 nt, Artificial Sequence
  Description of Artificial Sequence: Synthetic oligonucleotide
  Sense strand starting at position 3931 of SEQ ID NO: 1881614
auagguuugcuuuaaauag

SEQ ID NO: 2058205 - RNA, 19 nt, Artificial Sequence
  Description of Artificial Sequence: Synthetic oligonucleotide
  Antisense strand to SEQ ID NO: 2058204
cuauuuaaagcaaaccuau

SEQ ID NO: 2058206 - RNA, 19 nt, Artificial Sequence
  Description of Artificial Sequence: Synthetic oligonucleotide
  Sense strand starting at position 230 of SEQ ID NO: 1881615
agcgaaacuuuacuuaaga

SEQ ID NO: 2058207 - RNA, 19 nt, Artificial Sequence
  Description of Artificial Sequence: Synthetic oligonucleotide
  Antisense strand to SEQ ID NO: 2058206
ucuuaaguaaaguuucgcu

SEQ ID NO: 2058208 - RNA, 19 nt, Artificial Sequence
  Description of Artificial Sequence: Synthetic oligonucleotide
  Sense strand starting at position 231 of SEQ ID NO: 1881615
gcgaaacuuuacuuaagaa

SEQ ID NO: 2058209 - RNA, 19 nt, Artificial Sequence
  Description of Artificial Sequence: Synthetic oligonucleotide
  Antisense strand to SEQ ID NO: 2058208
uucuuaaguaaaguuucgc

SEQ ID NO: 2058210 - RNA, 19 nt, Artificial Sequence
  Description of Artificial Sequence: Synthetic oligonucleotide
  Sense strand starting at position 275 of SEQ ID NO: 1881615
cugacugaugcccaccaua

SEQ ID NO: 2058211 - RNA, 19 nt, Artificial Sequence
  Description of Artificial Sequence: Synthetic oligonucleotide
  Antisense strand to SEQ ID NO: 2058210
uauggugggcaucagucag

SEQ ID NO: 2058212 - RNA, 19 nt, Artificial Sequence
  Description of Artificial Sequence: Synthetic oligonucleotide
  Sense strand starting at position 323 of SEQ ID NO: 1881615
cuauaauauguguacauuc

SEQ ID NO: 2058213 - RNA, 19 nt, Artificial Sequence
  Description of Artificial Sequence: Synthetic oligonucleotide
  Antisense strand to SEQ ID NO: 2058212
gaauguacacauauuauag

SEQ ID NO: 2058214 - RNA, 19 nt, Artificial Sequence
  Description of Artificial Sequence: Synthetic oligonucleotide
  Sense strand starting at position 356 of SEQ ID NO: 1881615
aaguuauaugcucagcaag

SEQ ID NO: 2058215 - RNA, 19 nt, Artificial Sequence
  Description of Artificial Sequence: Synthetic oligonucleotide
  Antisense strand to SEQ ID NO: 2058214
cuugcugagcauauaacuu

SEQ ID NO: 2058216 - RNA, 19 nt, Artificial Sequence
  Description of Artificial Sequence: Synthetic oligonucleotide
  Sense strand starting at position 552 of SEQ ID NO: 1881615
uugaauuauggguaugucu

SEQ ID NO: 2058217 - RNA, 19 nt, Artificial Sequence
  Description of Artificial Sequence: Synthetic oligonucleotide
  Antisense strand to SEQ ID NO: 2058216
agacauacccauaauucaa

SEQ ID NO: 2058218 - RNA, 19 nt, Artificial Sequence
  Description of Artificial Sequence: Synthetic oligonucleotide
  Sense strand starting at position 554 of SEQ ID NO: 1881615
gaauuauggguaugucuga

SEQ ID NO: 2058219 - RNA, 19 nt, Artificial Sequence
  Description of Artificial Sequence: Synthetic oligonucleotide
  Antisense strand to SEQ ID NO: 2058218
ucagacauacccauaauuc

SEQ ID NO: 2058220 - RNA, 19 nt, Artificial Sequence
  Description of Artificial Sequence: Synthetic oligonucleotide
  Sense strand starting at position 555 of SEQ ID NO: 1881615
aauuauggguaugucugaa

SEQ ID NO: 2058221 - RNA, 19 nt, Artificial Sequence
  Description of Artificial Sequence: Synthetic oligonucleotide
  Antisense strand to SEQ ID NO: 2058220
uucagacauacccauaauu

SEQ ID NO: 2058222 - RNA, 19 nt, Artificial Sequence
  Description of Artificial Sequence: Synthetic oligonucleotide
  Sense strand starting at position 655 of SEQ ID NO: 1881615
acugacugccuuuaacaga

SEQ ID NO: 2058223 - RNA, 19 nt, Artificial Sequence
  Description of Artificial Sequence: Synthetic oligonucleotide
  Antisense strand to SEQ ID NO: 2058222
ucuguuaaaggcagucagu

SEQ ID NO: 2058224 - RNA, 19 nt, Artificial Sequence
  Description of Artificial Sequence: Synthetic oligonucleotide
  Sense strand starting at position 684 of SEQ ID NO: 1881615
gugagacaaugccuacaaa

SEQ ID NO: 2058225 - RNA, 19 nt, Artificial Sequence
  Description of Artificial Sequence: Synthetic oligonucleotide
  Antisense strand to SEQ ID NO: 2058224
uuuguaggcauugucucac

SEQ ID NO: 2058226 - RNA, 19 nt, Artificial Sequence
  Description of Artificial Sequence: Synthetic oligonucleotide
  Sense strand starting at position 780 of SEQ ID NO: 1881615
aaaggucuugacuggacau

SEQ ID NO: 2058227 - RNA, 19 nt, Artificial Sequence
  Description of Artificial Sequence: Synthetic oligonucleotide
  Antisense strand to SEQ ID NO: 2058226
auguccagucaagaccuuu

SEQ ID NO: 2058228 - RNA, 19 nt, Artificial Sequence
  Description of Artificial Sequence: Synthetic oligonucleotide
  Sense strand starting at position 794 of SEQ ID NO: 1881615
gacaucagaucauugguaa

SEQ ID NO: 2058229 - RNA, 19 nt, Artificial Sequence
  Description of Artificial Sequence: Synthetic oligonucleotide
  Antisense strand to SEQ ID NO: 2058228
uuaccaaugaucugauguc

SEQ ID NO: 2058230 - RNA, 19 nt, Artificial Sequence
  Description of Artificial Sequence: Synthetic oligonucleotide
  Sense strand starting at position 1083 of SEQ ID NO: 1881615
agugaaauagcacauguaa

SEQ ID NO: 2058231 - RNA, 19 nt, Artificial Sequence
  Description of Artificial Sequence: Synthetic oligonucleotide
  Antisense strand to SEQ ID NO: 2058230
uuacaugugcuauuucacu

SEQ ID NO: 2058232 - RNA, 19 nt, Artificial Sequence
  Description of Artificial Sequence: Synthetic oligonucleotide
  Sense strand starting at position 1133 of SEQ ID NO: 1881615
cuaugauuauuguucugaa

SEQ ID NO: 2058233 - RNA, 19 nt, Artificial Sequence
  Description of Artificial Sequence: Synthetic oligonucleotide
  Antisense strand to SEQ ID NO: 2058232
uucagaacaauaaucauag

SEQ ID NO: 2058234 - RNA, 19 nt, Artificial Sequence
  Description of Artificial Sequence: Synthetic oligonucleotide
  Sense strand starting at position 1262 of SEQ ID NO: 1881615
agagauugcugaucacuuu

SEQ ID NO: 2058235 - RNA, 19 nt, Artificial Sequence
  Description of Artificial Sequence: Synthetic oligonucleotide
  Antisense strand to SEQ ID NO: 2058234
aaagugaucagcaaucucu

SEQ ID NO: 2058236 - RNA, 19 nt, Artificial Sequence
  Description of Artificial Sequence: Synthetic oligonucleotide
  Sense strand starting at position 1279 of SEQ ID NO: 1881615
uugaauggucagcaucauu

SEQ ID NO: 2058237 - RNA, 19 nt, Artificial Sequence
  Description of Artificial Sequence: Synthetic oligonucleotide
  Antisense strand to SEQ ID NO: 2058236
aaugaugcugaccauucaa

SEQ ID NO: 2058238 - RNA, 19 nt, Artificial Sequence
  Description of Artificial Sequence: Synthetic oligonucleotide
  Sense strand starting at position 1284 of SEQ ID NO: 1881615
uggucagcaucauuaauaa

SEQ ID NO: 2058239 - RNA, 19 nt, Artificial Sequence
  Description of Artificial Sequence: Synthetic oligonucleotide
  Antisense strand to SEQ ID NO: 2058238
uuauuaaugaugcugacca

SEQ ID NO: 2058240 - RNA, 19 nt, Artificial Sequence
  Description of Artificial Sequence: Synthetic oligonucleotide
  Sense strand starting at position 1316 of SEQ ID NO: 1881615
augacuauuugguaaugau

SEQ ID NO: 2058241 - RNA, 19 nt, Artificial Sequence
  Description of Artificial Sequence: Synthetic oligonucleotide
  Antisense strand to SEQ ID NO: 2058240
aucauuaccaaauagucau

SEQ ID NO: 2058242 - RNA, 19 nt, Artificial Sequence
  Description of Artificial Sequence: Synthetic oligonucleotide
  Sense strand starting at position 1544 of SEQ ID NO: 1881615
cguuuaaaccugggagacu

SEQ ID NO: 2058243 - RNA, 19 nt, Artificial Sequence
  Description of Artificial Sequence: Synthetic oligonucleotide
  Antisense strand to SEQ ID NO: 2058242
agucucccagguuuaaacg

SEQ ID NO: 2058244 - RNA, 19 nt, Artificial Sequence
  Description of Artificial Sequence: Synthetic oligonucleotide
  Sense strand starting at position 1890 of SEQ ID NO: 1881615
aauggaagucucuguaaua

SEQ ID NO: 2058245 - RNA, 19 nt, Artificial Sequence
  Description of Artificial Sequence: Synthetic oligonucleotide
  Antisense strand to SEQ ID NO: 2058244
uauuacagagacuuccauu

SEQ ID NO: 2058246 - RNA, 19 nt, Artificial Sequence
  Description of Artificial Sequence: Synthetic oligonucleotide
  Sense strand starting at position 1891 of SEQ ID NO: 1881615
auggaagucucuguaauag

SEQ ID NO: 2058247 - RNA, 19 nt, Artificial Sequence
  Description of Artificial Sequence: Synthetic oligonucleotide
  Antisense strand to SEQ ID NO: 2058246
cuauuacagagacuuccau

SEQ ID NO: 2058248 - RNA, 19 nt, Artificial Sequence
  Description of Artificial Sequence: Synthetic oligonucleotide
  Sense strand starting at position 2017 of SEQ ID NO: 1881615
ggcccaguuacaggaauaa

SEQ ID NO: 2058249 - RNA, 19 nt, Artificial Sequence
  Description of Artificial Sequence: Synthetic oligonucleotide
  Antisense strand to SEQ ID NO: 2058248
uuauuccuguaacugggcc

SEQ ID NO: 2058250 - RNA, 19 nt, Artificial Sequence
  Description of Artificial Sequence: Synthetic oligonucleotide
  Sense strand starting at position 2070 of SEQ ID NO: 1881615
uuggcacaccuaugaaaua

SEQ ID NO: 2058251 - RNA, 19 nt, Artificial Sequence
  Description of Artificial Sequence: Synthetic oligonucleotide
  Antisense strand to SEQ ID NO: 2058250
uauuucauaggugugccaa

SEQ ID NO: 2058252 - RNA, 19 nt, Artificial Sequence
  Description of Artificial Sequence: Synthetic oligonucleotide
  Sense strand starting at position 2253 of SEQ ID NO: 1881615
ucuauaacuugggcaucau

SEQ ID NO: 2058253 - RNA, 19 nt, Artificial Sequence
  Description of Artificial Sequence: Synthetic oligonucleotide
  Antisense strand to SEQ ID NO: 2058252
augaugcccaaguuauaga

SEQ ID NO: 2058254 - RNA, 19 nt, Artificial Sequence
  Description of Artificial Sequence: Synthetic oligonucleotide
  Sense strand starting at position 2254 of SEQ ID NO: 1881615
cuauaacuugggcaucauu

SEQ ID NO: 2058255 - RNA, 19 nt, Artificial Sequence
  Description of Artificial Sequence: Synthetic oligonucleotide
  Antisense strand to SEQ ID NO: 2058254
aaugaugcccaaguuauag

SEQ ID NO: 2058256 - RNA, 19 nt, Artificial Sequence
  Description of Artificial Sequence: Synthetic oligonucleotide
  Sense strand starting at position 2334 of SEQ ID NO: 1881615
ugacuuuaaaugugggagu

SEQ ID NO: 2058257 - RNA, 19 nt, Artificial Sequence
  Description of Artificial Sequence: Synthetic oligonucleotide
  Antisense strand to SEQ ID NO: 2058256
acucccacauuuaaaguca

SEQ ID NO: 2058258 - RNA, 19 nt, Artificial Sequence
  Description of Artificial Sequence: Synthetic oligonucleotide
  Sense strand starting at position 2590 of SEQ ID NO: 1881615
agcccucugcuggaugaaa

SEQ ID NO: 2058259 - RNA, 19 nt, Artificial Sequence
  Description of Artificial Sequence: Synthetic oligonucleotide
  Antisense strand to SEQ ID NO: 2058258
uuucauccagcagagggcu

SEQ ID NO: 2058260 - RNA, 19 nt, Artificial Sequence
  Description of Artificial Sequence: Synthetic oligonucleotide
  Sense strand starting at position 2592 of SEQ ID NO: 1881615
cccucugcuggaugaaaga

SEQ ID NO: 2058261 - RNA, 19 nt, Artificial Sequence
  Description of Artificial Sequence: Synthetic oligonucleotide
  Antisense strand to SEQ ID NO: 2058260
ucuuucauccagcagaggg

SEQ ID NO: 2058262 - RNA, 19 nt, Artificial Sequence
  Description of Artificial Sequence: Synthetic oligonucleotide
  Sense strand starting at position 2630 of SEQ ID NO: 1881615
gaaguacuauuugaggauu

SEQ ID NO: 2058263 - RNA, 19 nt, Artificial Sequence
  Description of Artificial Sequence: Synthetic oligonucleotide
  Antisense strand to SEQ ID NO: 2058262
aauccucaaauaguacuuc

SEQ ID NO: 2058264 - RNA, 19 nt, Artificial Sequence
  Description of Artificial Sequence: Synthetic oligonucleotide
  Sense strand starting at position 2664 of SEQ ID NO: 1881615
gguuuagagggcuacuuua

SEQ ID NO: 2058265 - RNA, 19 nt, Artificial Sequence
  Description of Artificial Sequence: Synthetic oligonucleotide
  Antisense strand to SEQ ID NO: 2058264
uaaaguagcccucuaaacc

SEQ ID NO: 2058266 - RNA, 19 nt, Artificial Sequence
  Description of Artificial Sequence: Synthetic oligonucleotide
  Sense strand starting at position 2678 of SEQ ID NO: 1881615
cuuuaacauuugcugugua

SEQ ID NO: 2058267 - RNA, 19 nt, Artificial Sequence
  Description of Artificial Sequence: Synthetic oligonucleotide
  Antisense strand to SEQ ID NO: 2058266
uacacagcaaauguuaaag

SEQ ID NO: 2058268 - RNA, 19 nt, Artificial Sequence
  Description of Artificial Sequence: Synthetic oligonucleotide
  Sense strand starting at position 2721 of SEQ ID NO: 1881615
uucugcuuugcagaagaga

SEQ ID NO: 2058269 - RNA, 19 nt, Artificial Sequence
  Description of Artificial Sequence: Synthetic oligonucleotide
  Antisense strand to SEQ ID NO: 2058268
ucucuucugcaaagcagaa

SEQ ID NO: 2058270 - RNA, 19 nt, Artificial Sequence
  Description of Artificial Sequence: Synthetic oligonucleotide
  Sense strand starting at position 3040 of SEQ ID NO: 1881615
aguuaaaucuagucuuaca

SEQ ID NO: 2058271 - RNA, 19 nt, Artificial Sequence
  Description of Artificial Sequence: Synthetic oligonucleotide
  Antisense strand to SEQ ID NO: 2058270
uguaagacuagauuuaacu

SEQ ID NO: 2058272 - RNA, 19 nt, Artificial Sequence
  Description of Artificial Sequence: Synthetic oligonucleotide
  Sense strand starting at position 3263 of SEQ ID NO: 1881615
ugauuuaauguguguuuga

SEQ ID NO: 2058273 - RNA, 19 nt, Artificial Sequence
  Description of Artificial Sequence: Synthetic oligonucleotide
  Antisense strand to SEQ ID NO: 2058272
ucaaacacacauuaaauca

SEQ ID NO: 2058274 - RNA, 19 nt, Artificial Sequence
  Description of Artificial Sequence: Synthetic oligonucleotide
  Sense strand starting at position 3276 of SEQ ID NO: 1881615
guuugacagcaauaguaaa

SEQ ID NO: 2058275 - RNA, 19 nt, Artificial Sequence
  Description of Artificial Sequence: Synthetic oligonucleotide
  Antisense strand to SEQ ID NO: 2058274
uuuacuauugcugucaaac

SEQ ID NO: 2058276 - RNA, 19 nt, Artificial Sequence
  Description of Artificial Sequence: Synthetic oligonucleotide
  Sense strand starting at position 3697 of SEQ ID NO: 1881615
agggcuaccuacucauaaa

SEQ ID NO: 2058277 - RNA, 19 nt, Artificial Sequence
  Description of Artificial Sequence: Synthetic oligonucleotide
  Antisense strand to SEQ ID NO: 2058276
uuuaugaguagguagcccu

SEQ ID NO: 2058278 - RNA, 19 nt, Artificial Sequence
  Description of Artificial Sequence: Synthetic oligonucleotide
  Sense strand starting at position 3785 of SEQ ID NO: 1881615
cagcuuugccugucugcua

SEQ ID NO: 2058279 - RNA, 19 nt, Artificial Sequence
  Description of Artificial Sequence: Synthetic oligonucleotide
  Antisense strand to SEQ ID NO: 2058278
uagcagacaggcaaagcug

SEQ ID NO: 2058280 - RNA, 19 nt, Artificial Sequence
  Description of Artificial Sequence: Synthetic oligonucleotide
  Sense strand starting at position 3829 of SEQ ID NO: 1881615
cucucaaucugauuggauu

SEQ ID NO: 2058281 - RNA, 19 nt, Artificial Sequence
  Description of Artificial Sequence: Synthetic oligonucleotide
  Antisense strand to SEQ ID NO: 2058280
aauccaaucagauugagag

SEQ ID NO: 2058282 - RNA, 19 nt, Artificial Sequence
  Description of Artificial Sequence: Synthetic oligonucleotide
  Sense strand starting at position 3830 of SEQ ID NO: 1881615
ucucaaucugauuggauuc

SEQ ID NO: 2058283 - RNA, 19 nt, Artificial Sequence
  Description of Artificial Sequence: Synthetic oligonucleotide
  Antisense strand to SEQ ID NO: 2058282
gaauccaaucagauugaga

SEQ ID NO: 2058284 - RNA, 19 nt, Artificial Sequence
  Description of Artificial Sequence: Synthetic oligonucleotide
  Sense strand starting at position 3837 of SEQ ID NO: 1881615
cugauuggauucucaccua

SEQ ID NO: 2058285 - RNA, 19 nt, Artificial Sequence
  Description of Artificial Sequence: Synthetic oligonucleotide
  Antisense strand to SEQ ID NO: 2058284
uaggugagaauccaaucag

SEQ ID NO: 2058286 - RNA, 19 nt, Artificial Sequence
  Description of Artificial Sequence: Synthetic oligonucleotide
  Sense strand starting at position 361 of SEQ ID NO: 1881616
uaugguaaucugugaucca

SEQ ID NO: 2058287 - RNA, 19 nt, Artificial Sequence
  Description of Artificial Sequence: Synthetic oligonucleotide
  Antisense strand to SEQ ID NO: 2058286
uggaucacagauuaccaua

SEQ ID NO: 2058288 - RNA, 19 nt, Artificial Sequence
  Description of Artificial Sequence: Synthetic oligonucleotide
  Sense strand starting at position 643 of SEQ ID NO: 1881616
ugauuaaguuuaucaugca

SEQ ID NO: 2058289 - RNA, 19 nt, Artificial Sequence
  Description of Artificial Sequence: Synthetic oligonucleotide
  Antisense strand to SEQ ID NO: 2058288
ugcaugauaaacuuaauca

SEQ ID NO: 2058290 - RNA, 19 nt, Artificial Sequence
  Description of Artificial Sequence: Synthetic oligonucleotide
  Sense strand starting at position 655 of SEQ ID NO: 1881616
ucaugcaaggcauaucaaa

SEQ ID NO: 2058291 - RNA, 19 nt, Artificial Sequence
  Description of Artificial Sequence: Synthetic oligonucleotide
  Antisense strand to SEQ ID NO: 2058290
uuugauaugccuugcauga

SEQ ID NO: 2058292 - RNA, 19 nt, Artificial Sequence
  Description of Artificial Sequence: Synthetic oligonucleotide
  Sense strand starting at position 800 of SEQ ID NO: 1881616
gccuaaugccaauauaaga

SEQ ID NO: 2058293 - RNA, 19 nt, Artificial Sequence
  Description of Artificial Sequence: Synthetic oligonucleotide
  Antisense strand to SEQ ID NO: 2058292
ucuuauauuggcauuaggc

SEQ ID NO: 2058294 - RNA, 19 nt, Artificial Sequence
  Description of Artificial Sequence: Synthetic oligonucleotide
  Sense strand starting at position 1054 of SEQ ID NO: 1881616
gcaaguuauccaggagacc

SEQ ID NO: 2058295 - RNA, 19 nt, Artificial Sequence
  Description of Artificial Sequence: Synthetic oligonucleotide
  Antisense strand to SEQ ID NO: 2058294
ggucuccuggauaacuugc

SEQ ID NO: 2058296 - RNA, 19 nt, Artificial Sequence
  Description of Artificial Sequence: Synthetic oligonucleotide
  Sense strand starting at position 1065 of SEQ ID NO: 1881616
aggagaccuugcuuaagau

SEQ ID NO: 2058297 - RNA, 19 nt, Artificial Sequence
  Description of Artificial Sequence: Synthetic oligonucleotide
  Antisense strand to SEQ ID NO: 2058296
aucuuaagcaaggucuccu

SEQ ID NO: 2058298 - RNA, 19 nt, Artificial Sequence
  Description of Artificial Sequence: Synthetic oligonucleotide
  Sense strand starting at position 1074 of SEQ ID NO: 1881616
ugcuuaagaucauuaauga

SEQ ID NO: 2058299 - RNA, 19 nt, Artificial Sequence
  Description of Artificial Sequence: Synthetic oligonucleotide
  Antisense strand to SEQ ID NO: 2058298
ucauuaaugaucuuaagca

SEQ ID NO: 2058300 - RNA, 19 nt, Artificial Sequence
  Description of Artificial Sequence: Synthetic oligonucleotide
  Sense strand starting at position 1267 of SEQ ID NO: 1881616
ggcccaugcucauuuacca

SEQ ID NO: 2058301 - RNA, 19 nt, Artificial Sequence
  Description of Artificial Sequence: Synthetic oligonucleotide
  Antisense strand to SEQ ID NO: 2058300
ugguaaaugagcaugggcc

SEQ ID NO: 2058302 - RNA, 19 nt, Artificial Sequence
  Description of Artificial Sequence: Synthetic oligonucleotide
  Sense strand starting at position 1418 of SEQ ID NO: 1881616
cuuggcugagauugagauu

SEQ ID NO: 2058303 - RNA, 19 nt, Artificial Sequence
  Description of Artificial Sequence: Synthetic oligonucleotide
  Antisense strand to SEQ ID NO: 2058302
aaucucaaucucagccaag

SEQ ID NO: 2058304 - RNA, 19 nt, Artificial Sequence
  Description of Artificial Sequence: Synthetic oligonucleotide
  Sense strand starting at position 1421 of SEQ ID NO: 1881616
ggcugagauugagauuuac

SEQ ID NO: 2058305 - RNA, 19 nt, Artificial Sequence
  Description of Artificial Sequence: Synthetic oligonucleotide
  Antisense strand to SEQ ID NO: 2058304
guaaaucucaaucucagcc

SEQ ID NO: 2058306 - RNA, 19 nt, Artificial Sequence
  Description of Artificial Sequence: Synthetic oligonucleotide
  Sense strand starting at position 1501 of SEQ ID NO: 1881616
auccaagagcucugaucuu

SEQ ID NO: 2058307 - RNA, 19 nt, Artificial Sequence
  Description of Artificial Sequence: Synthetic oligonucleotide
  Antisense strand to SEQ ID NO: 2058306
aagaucagagcucuuggau

SEQ ID NO: 2058308 - RNA, 19 nt, Artificial Sequence
  Description of Artificial Sequence: Synthetic oligonucleotide
  Sense strand starting at position 1600 of SEQ ID NO: 1881616
auaagacugucacugccau

SEQ ID NO: 2058309 - RNA, 19 nt, Artificial Sequence
  Description of Artificial Sequence: Synthetic oligonucleotide
  Antisense strand to SEQ ID NO: 2058308
auggcagugacagucuuau

SEQ ID NO: 2058310 - RNA, 19 nt, Artificial Sequence
  Description of Artificial Sequence: Synthetic oligonucleotide
  Sense strand starting at position 1801 of SEQ ID NO: 1881616
gcauaugugguagaaauau

SEQ ID NO: 2058311 - RNA, 19 nt, Artificial Sequence
  Description of Artificial Sequence: Synthetic oligonucleotide
  Antisense strand to SEQ ID NO: 2058310
auauuucuaccacauaugc

SEQ ID NO: 2058312 - RNA, 19 nt, Artificial Sequence
  Description of Artificial Sequence: Synthetic oligonucleotide
  Sense strand starting at position 1855 of SEQ ID NO: 1881616
aggacugacuuggugcaau

SEQ ID NO: 2058313 - RNA, 19 nt, Artificial Sequence
  Description of Artificial Sequence: Synthetic oligonucleotide
  Antisense strand to SEQ ID NO: 2058312
auugcaccaagucaguccu

SEQ ID NO: 2058314 - RNA, 19 nt, Artificial Sequence
  Description of Artificial Sequence: Synthetic oligonucleotide
  Sense strand starting at position 1866 of SEQ ID NO: 1881616
ggugcaaucccaugauaaa

SEQ ID NO: 2058315 - RNA, 19 nt, Artificial Sequence
  Description of Artificial Sequence: Synthetic oligonucleotide
  Antisense strand to SEQ ID NO: 2058314
uuuaucaugggauugcacc

SEQ ID NO: 2058316 - RNA, 19 nt, Artificial Sequence
  Description of Artificial Sequence: Synthetic oligonucleotide
  Sense strand starting at position 1924 of SEQ ID NO: 1881616
agaagauaguuucuuuaga

SEQ ID NO: 2058317 - RNA, 19 nt, Artificial Sequence
  Description of Artificial Sequence: Synthetic oligonucleotide
  Antisense strand to SEQ ID NO: 2058316
ucuaaagaaacuaucuucu

SEQ ID NO: 2058318 - RNA, 19 nt, Artificial Sequence
  Description of Artificial Sequence: Synthetic oligonucleotide
  Sense strand starting at position 1925 of SEQ ID NO: 1881616
gaagauaguuucuuuagaa

SEQ ID NO: 2058319 - RNA, 19 nt, Artificial Sequence
  Description of Artificial Sequence: Synthetic oligonucleotide
  Antisense strand to SEQ ID NO: 2058318
uucuaaagaaacuaucuuc

SEQ ID NO: 2058320 - RNA, 19 nt, Artificial Sequence
  Description of Artificial Sequence: Synthetic oligonucleotide
  Sense strand starting at position 2086 of SEQ ID NO: 1881616
uuaagugaaguauguacau

SEQ ID NO: 2058321 - RNA, 19 nt, Artificial Sequence
  Description of Artificial Sequence: Synthetic oligonucleotide
  Antisense strand to SEQ ID NO: 2058320
auguacauacuucacuuaa

SEQ ID NO: 2058322 - RNA, 19 nt, Artificial Sequence
  Description of Artificial Sequence: Synthetic oligonucleotide
  Sense strand starting at position 2166 of SEQ ID NO: 1881616
uuuaacaugcauugugaaa

SEQ ID NO: 2058323 - RNA, 19 nt, Artificial Sequence
  Description of Artificial Sequence: Synthetic oligonucleotide
  Antisense strand to SEQ ID NO: 2058322
uuucacaaugcauguuaaa

SEQ ID NO: 2058324 - RNA, 19 nt, Artificial Sequence
  Description of Artificial Sequence: Synthetic oligonucleotide
  Sense strand starting at position 2338 of SEQ ID NO: 1881616
aggcuaacaguguacaaua

SEQ ID NO: 2058325 - RNA, 19 nt, Artificial Sequence
  Description of Artificial Sequence: Synthetic oligonucleotide
  Antisense strand to SEQ ID NO: 2058324
uauuguacacuguuagccu

SEQ ID NO: 2058326 - RNA, 19 nt, Artificial Sequence
  Description of Artificial Sequence: Synthetic oligonucleotide
  Sense strand starting at position 2432 of SEQ ID NO: 1881616
ggaucucauaguugguacu

SEQ ID NO: 2058327 - RNA, 19 nt, Artificial Sequence
  Description of Artificial Sequence: Synthetic oligonucleotide
  Antisense strand to SEQ ID NO: 2058326
aguaccaacuaugagaucc

SEQ ID NO: 2058328 - RNA, 19 nt, Artificial Sequence
  Description of Artificial Sequence: Synthetic oligonucleotide
  Sense strand starting at position 2740 of SEQ ID NO: 1881616
ucaucuugcccugaaguua

SEQ ID NO: 2058329 - RNA, 19 nt, Artificial Sequence
  Description of Artificial Sequence: Synthetic oligonucleotide
  Antisense strand to SEQ ID NO: 2058328
uaacuucagggcaagauga

SEQ ID NO: 2058330 - RNA, 19 nt, Artificial Sequence
  Description of Artificial Sequence: Synthetic oligonucleotide
  Sense strand starting at position 2831 of SEQ ID NO: 1881616
cuaggaaacuuugcauaag

SEQ ID NO: 2058331 - RNA, 19 nt, Artificial Sequence
  Description of Artificial Sequence: Synthetic oligonucleotide
  Antisense strand to SEQ ID NO: 2058330
cuuaugcaaaguuuccuag

SEQ ID NO: 2058332 - RNA, 19 nt, Artificial Sequence
  Description of Artificial Sequence: Synthetic oligonucleotide
  Sense strand starting at position 2872 of SEQ ID NO: 1881616
caugcaaggcauggauauu

SEQ ID NO: 2058333 - RNA, 19 nt, Artificial Sequence
  Description of Artificial Sequence: Synthetic oligonucleotide
  Antisense strand to SEQ ID NO: 2058332
aauauccaugccuugcaug

SEQ ID NO: 2058334 - RNA, 19 nt, Artificial Sequence
  Description of Artificial Sequence: Synthetic oligonucleotide
  Sense strand starting at position 2873 of SEQ ID NO: 1881616
augcaaggcauggauauua

SEQ ID NO: 2058335 - RNA, 19 nt, Artificial Sequence
  Description of Artificial Sequence: Synthetic oligonucleotide
  Antisense strand to SEQ ID NO: 2058334
uaauauccaugccuugcau

SEQ ID NO: 2058336 - RNA, 19 nt, Artificial Sequence
  Description of Artificial Sequence: Synthetic oligonucleotide
  Sense strand starting at position 3114 of SEQ ID NO: 1881616
uugugauccaucgugcgua

SEQ ID NO: 2058337 - RNA, 19 nt, Artificial Sequence
  Description of Artificial Sequence: Synthetic oligonucleotide
  Antisense strand to SEQ ID NO: 2058336
uacgcacgauggaucacaa

SEQ ID NO: 2058338 - RNA, 19 nt, Artificial Sequence
  Description of Artificial Sequence: Synthetic oligonucleotide
  Sense strand starting at position 3208 of SEQ ID NO: 1881616
guuccaugcagagguaaag

SEQ ID NO: 2058339 - RNA, 19 nt, Artificial Sequence
  Description of Artificial Sequence: Synthetic oligonucleotide
  Antisense strand to SEQ ID NO: 2058338
cuuuaccucugcauggaac

SEQ ID NO: 2058340 - RNA, 19 nt, Artificial Sequence
  Description of Artificial Sequence: Synthetic oligonucleotide
  Sense strand starting at position 3448 of SEQ ID NO: 1881616
ggucaaauuccguaauaua

SEQ ID NO: 2058341 - RNA, 19 nt, Artificial Sequence
  Description of Artificial Sequence: Synthetic oligonucleotide
  Antisense strand to SEQ ID NO: 2058340
uauauuacggaauuugacc

SEQ ID NO: 2058342 - RNA, 19 nt, Artificial Sequence
  Description of Artificial Sequence: Synthetic oligonucleotide
  Sense strand starting at position 3510 of SEQ ID NO: 1881616
uagguaucggcauaaucaa

SEQ ID NO: 2058343 - RNA, 19 nt, Artificial Sequence
  Description of Artificial Sequence: Synthetic oligonucleotide
  Antisense strand to SEQ ID NO: 2058342
uugauuaugccgauaccua

SEQ ID NO: 2058344 - RNA, 19 nt, Artificial Sequence
  Description of Artificial Sequence: Synthetic oligonucleotide
  Sense strand starting at position 3570 of SEQ ID NO: 1881616
aacauauguguaugcaaga

SEQ ID NO: 2058345 - RNA, 19 nt, Artificial Sequence
  Description of Artificial Sequence: Synthetic oligonucleotide
  Antisense strand to SEQ ID NO: 2058344
ucuugcauacacauauguu

SEQ ID NO: 2058346 - RNA, 19 nt, Artificial Sequence
  Description of Artificial Sequence: Synthetic oligonucleotide
  Sense strand starting at position 3662 of SEQ ID NO: 1881616
ugaacugagagguauguuu

SEQ ID NO: 2058347 - RNA, 19 nt, Artificial Sequence
  Description of Artificial Sequence: Synthetic oligonucleotide
  Antisense strand to SEQ ID NO: 2058346
aaacauaccucucaguuca

SEQ ID NO: 2058348 - RNA, 19 nt, Artificial Sequence
  Description of Artificial Sequence: Synthetic oligonucleotide
  Sense strand starting at position 3664 of SEQ ID NO: 1881616
aacugagagguauguuuaa

SEQ ID NO: 2058349 - RNA, 19 nt, Artificial Sequence
  Description of Artificial Sequence: Synthetic oligonucleotide
  Antisense strand to SEQ ID NO: 2058348
uuaaacauaccucucaguu

SEQ ID NO: 2058350 - RNA, 19 nt, Artificial Sequence
  Description of Artificial Sequence: Synthetic oligonucleotide
  Sense strand starting at position 3675 of SEQ ID NO: 1881616
auguuuaauugacugggau

SEQ ID NO: 2058351 - RNA, 19 nt, Artificial Sequence
  Description of Artificial Sequence: Synthetic oligonucleotide
  Antisense strand to SEQ ID NO: 2058350
aucccagucaauuaaacau

SEQ ID NO: 2058352 - RNA, 19 nt, Artificial Sequence
  Description of Artificial Sequence: Synthetic oligonucleotide
  Sense strand starting at position 3676 of SEQ ID NO: 1881616
uguuuaauugacugggaug

SEQ ID NO: 2058353 - RNA, 19 nt, Artificial Sequence
  Description of Artificial Sequence: Synthetic oligonucleotide
  Antisense strand to SEQ ID NO: 2058352
caucccagucaauuaaaca

SEQ ID NO: 2058354 - RNA, 19 nt, Artificial Sequence
  Description of Artificial Sequence: Synthetic oligonucleotide
  Sense strand starting at position 3700 of SEQ ID NO: 1881616
uggugacaucaccaagcau

SEQ ID NO: 2058355 - RNA, 19 nt, Artificial Sequence
  Description of Artificial Sequence: Synthetic oligonucleotide
  Antisense strand to SEQ ID NO: 2058354
augcuuggugaugucacca

SEQ ID NO: 2058356 - RNA, 19 nt, Artificial Sequence
  Description of Artificial Sequence: Synthetic oligonucleotide
  Sense strand starting at position 3781 of SEQ ID NO: 1881616
guauauaggguuugagaga

SEQ ID NO: 2058357 - RNA, 19 nt, Artificial Sequence
  Description of Artificial Sequence: Synthetic oligonucleotide
  Antisense strand to SEQ ID NO: 2058356
ucucucaaacccuauauac

SEQ ID NO: 2058358 - RNA, 19 nt, Artificial Sequence
  Description of Artificial Sequence: Synthetic oligonucleotide
  Sense strand starting at position 3849 of SEQ ID NO: 1881616
gccuacaggcauuaaucaa

SEQ ID NO: 2058359 - RNA, 19 nt, Artificial Sequence
  Description of Artificial Sequence: Synthetic oligonucleotide
  Antisense strand to SEQ ID NO: 2058358
uugauuaaugccuguaggc

SEQ ID NO: 2058360 - RNA, 19 nt, Artificial Sequence
  Description of Artificial Sequence: Synthetic oligonucleotide
  Sense strand starting at position 3875 of SEQ ID NO: 1881616
aguguaaggacaugagacu

SEQ ID NO: 2058361 - RNA, 19 nt, Artificial Sequence
  Description of Artificial Sequence: Synthetic oligonucleotide
  Antisense strand to SEQ ID NO: 2058360
agucucauguccuuacacu

SEQ ID NO: 2058362 - RNA, 19 nt, Artificial Sequence
  Description of Artificial Sequence: Synthetic oligonucleotide
  Sense strand starting at position 3884 of SEQ ID NO: 1881616
acaugagacugccuagaga

SEQ ID NO: 2058363 - RNA, 19 nt, Artificial Sequence
  Description of Artificial Sequence: Synthetic oligonucleotide
  Antisense strand to SEQ ID NO: 2058362
ucucuaggcagucucaugu

SEQ ID NO: 2058364 - RNA, 19 nt, Artificial Sequence
  Description of Artificial Sequence: Synthetic oligonucleotide
  Sense strand starting at position 3893 of SEQ ID NO: 1881616
ugccuagagaaagguauaa

SEQ ID NO: 2058365 - RNA, 19 nt, Artificial Sequence
  Description of Artificial Sequence: Synthetic oligonucleotide
  Antisense strand to SEQ ID NO: 2058364
uuauaccuuucucuaggca

SEQ ID NO: 2058366 - RNA, 19 nt, Artificial Sequence
  Description of Artificial Sequence: Synthetic oligonucleotide
  Sense strand starting at position 75 of SEQ ID NO: 1881617
agaaacaauugcuuaguca

SEQ ID NO: 2058367 - RNA, 19 nt, Artificial Sequence
  Description of Artificial Sequence: Synthetic oligonucleotide
  Antisense strand to SEQ ID NO: 2058366
ugacuaagcaauuguuucu

SEQ ID NO: 2058368 - RNA, 19 nt, Artificial Sequence
  Description of Artificial Sequence: Synthetic oligonucleotide
  Sense strand starting at position 148 of SEQ ID NO: 1881617
uuaacucaauugguguauu

SEQ ID NO: 2058369 - RNA, 19 nt, Artificial Sequence
  Description of Artificial Sequence: Synthetic oligonucleotide
  Antisense strand to SEQ ID NO: 2058368
aauacaccaauugaguuaa

SEQ ID NO: 2058370 - RNA, 19 nt, Artificial Sequence
  Description of Artificial Sequence: Synthetic oligonucleotide
  Sense strand starting at position 151 of SEQ ID NO: 1881617
acucaauugguguauuguu

SEQ ID NO: 2058371 - RNA, 19 nt, Artificial Sequence
  Description of Artificial Sequence: Synthetic oligonucleotide
  Antisense strand to SEQ ID NO: 2058370
aacaauacaccaauugagu

SEQ ID NO: 2058372 - RNA, 19 nt, Artificial Sequence
  Description of Artificial Sequence: Synthetic oligonucleotide
  Sense strand starting at position 215 of SEQ ID NO: 1881617
aacugaaugugguuuauuc

SEQ ID NO: 2058373 - RNA, 19 nt, Artificial Sequence
  Description of Artificial Sequence: Synthetic oligonucleotide
  Antisense strand to SEQ ID NO: 2058372
gaauaaaccacauucaguu

SEQ ID NO: 2058374 - RNA, 19 nt, Artificial Sequence
  Description of Artificial Sequence: Synthetic oligonucleotide
  Sense strand starting at position 327 of SEQ ID NO: 1881617
gaaucuguucuagaaugca

SEQ ID NO: 2058375 - RNA, 19 nt, Artificial Sequence
  Description of Artificial Sequence: Synthetic oligonucleotide
  Antisense strand to SEQ ID NO: 2058374
ugcauucuagaacagauuc

SEQ ID NO: 2058376 - RNA, 19 nt, Artificial Sequence
  Description of Artificial Sequence: Synthetic oligonucleotide
  Sense strand starting at position 337 of SEQ ID NO: 1881617
uagaaugcaugccuggaua

SEQ ID NO: 2058377 - RNA, 19 nt, Artificial Sequence
  Description of Artificial Sequence: Synthetic oligonucleotide
  Antisense strand to SEQ ID NO: 2058376
uauccaggcaugcauucua

SEQ ID NO: 2058378 - RNA, 19 nt, Artificial Sequence
  Description of Artificial Sequence: Synthetic oligonucleotide
  Sense strand starting at position 339 of SEQ ID NO: 1881617
gaaugcaugccuggauaug

SEQ ID NO: 2058379 - RNA, 19 nt, Artificial Sequence
  Description of Artificial Sequence: Synthetic oligonucleotide
  Antisense strand to SEQ ID NO: 2058378
cauauccaggcaugcauuc

SEQ ID NO: 2058380 - RNA, 19 nt, Artificial Sequence
  Description of Artificial Sequence: Synthetic oligonucleotide
  Sense strand starting at position 362 of SEQ ID NO: 1881617
uccacuguuguagaugaua

SEQ ID NO: 2058381 - RNA, 19 nt, Artificial Sequence
  Description of Artificial Sequence: Synthetic oligonucleotide
  Antisense strand to SEQ ID NO: 2058380
uaucaucuacaacagugga

SEQ ID NO: 2058382 - RNA, 19 nt, Artificial Sequence
  Description of Artificial Sequence: Synthetic oligonucleotide
  Sense strand starting at position 497 of SEQ ID NO: 1881617
uuaagacagucauccagua

SEQ ID NO: 2058383 - RNA, 19 nt, Artificial Sequence
  Description of Artificial Sequence: Synthetic oligonucleotide
  Antisense strand to SEQ ID NO: 2058382
uacuggaugacugucuuaa

SEQ ID NO: 2058384 - RNA, 19 nt, Artificial Sequence
  Description of Artificial Sequence: Synthetic oligonucleotide
  Sense strand starting at position 502 of SEQ ID NO: 1881617
acagucauccaguagagug

SEQ ID NO: 2058385 - RNA, 19 nt, Artificial Sequence
  Description of Artificial Sequence: Synthetic oligonucleotide
  Antisense strand to SEQ ID NO: 2058384
cacucuacuggaugacugu

SEQ ID NO: 2058386 - RNA, 19 nt, Artificial Sequence
  Description of Artificial Sequence: Synthetic oligonucleotide
  Sense strand starting at position 507 of SEQ ID NO: 1881617
cauccaguagagugaagaa

SEQ ID NO: 2058387 - RNA, 19 nt, Artificial Sequence
  Description of Artificial Sequence: Synthetic oligonucleotide
  Antisense strand to SEQ ID NO: 2058386
uucuucacucuacuggaug

SEQ ID NO: 2058388 - RNA, 19 nt, Artificial Sequence
  Description of Artificial Sequence: Synthetic oligonucleotide
  Sense strand starting at position 576 of SEQ ID NO: 1881617
cuaguaauaguaggaccua

SEQ ID NO: 2058389 - RNA, 19 nt, Artificial Sequence
  Description of Artificial Sequence: Synthetic oligonucleotide
  Antisense strand to SEQ ID NO: 2058388
uagguccuacuauuacuag

SEQ ID NO: 2058390 - RNA, 19 nt, Artificial Sequence
  Description of Artificial Sequence: Synthetic oligonucleotide
  Sense strand starting at position 768 of SEQ ID NO: 1881617
aaagaauuguguucuuaug

SEQ ID NO: 2058391 - RNA, 19 nt, Artificial Sequence
  Description of Artificial Sequence: Synthetic oligonucleotide
  Antisense strand to SEQ ID NO: 2058390
cauaagaacacaauucuuu

SEQ ID NO: 2058392 - RNA, 19 nt, Artificial Sequence
  Description of Artificial Sequence: Synthetic oligonucleotide
  Sense strand starting at position 775 of SEQ ID NO: 1881617
uguguucuuaugcuuuguu

SEQ ID NO: 2058393 - RNA, 19 nt, Artificial Sequence
  Description of Artificial Sequence: Synthetic oligonucleotide
  Antisense strand to SEQ ID NO: 2058392
aacaaagcauaagaacaca

SEQ ID NO: 2058394 - RNA, 19 nt, Artificial Sequence
  Description of Artificial Sequence: Synthetic oligonucleotide
  Sense strand starting at position 854 of SEQ ID NO: 1881617
acgauaaucuugccauauu

SEQ ID NO: 2058395 - RNA, 19 nt, Artificial Sequence
  Description of Artificial Sequence: Synthetic oligonucleotide
  Antisense strand to SEQ ID NO: 2058394
aauauggcaagauuaucgu

SEQ ID NO: 2058396 - RNA, 19 nt, Artificial Sequence
  Description of Artificial Sequence: Synthetic oligonucleotide
  Sense strand starting at position 1061 of SEQ ID NO: 1881617
uugccaugucagugaaaga

SEQ ID NO: 2058397 - RNA, 19 nt, Artificial Sequence
  Description of Artificial Sequence: Synthetic oligonucleotide
  Antisense strand to SEQ ID NO: 2058396
ucuuucacugacauggcaa

SEQ ID NO: 2058398 - RNA, 19 nt, Artificial Sequence
  Description of Artificial Sequence: Synthetic oligonucleotide
  Sense strand starting at position 1062 of SEQ ID NO: 1881617
ugccaugucagugaaagaa

SEQ ID NO: 2058399 - RNA, 19 nt, Artificial Sequence
  Description of Artificial Sequence: Synthetic oligonucleotide
  Antisense strand to SEQ ID NO: 2058398
uucuuucacugacauggca

SEQ ID NO: 2058400 - RNA, 19 nt, Artificial Sequence
  Description of Artificial Sequence: Synthetic oligonucleotide
  Sense strand starting at position 1171 of SEQ ID NO: 1881617
uuuguuuccuaggugacaa

SEQ ID NO: 2058401 - RNA, 19 nt, Artificial Sequence
  Description of Artificial Sequence: Synthetic oligonucleotide
  Antisense strand to SEQ ID NO: 2058400
uugucaccuaggaaacaaa

SEQ ID NO: 2058402 - RNA, 19 nt, Artificial Sequence
  Description of Artificial Sequence: Synthetic oligonucleotide
  Sense strand starting at position 1173 of SEQ ID NO: 1881617
uguuuccuaggugacaauu

SEQ ID NO: 2058403 - RNA, 19 nt, Artificial Sequence
  Description of Artificial Sequence: Synthetic oligonucleotide
  Antisense strand to SEQ ID NO: 2058402
aauugucaccuaggaaaca

SEQ ID NO: 2058404 - RNA, 19 nt, Artificial Sequence
  Description of Artificial Sequence: Synthetic oligonucleotide
  Sense strand starting at position 1210 of SEQ ID NO: 1881617
guugaaaccuuauuauaga

SEQ ID NO: 2058405 - RNA, 19 nt, Artificial Sequence
  Description of Artificial Sequence: Synthetic oligonucleotide
  Antisense strand to SEQ ID NO: 2058404
ucuauaauaagguuucaac

SEQ ID NO: 2058406 - RNA, 19 nt, Artificial Sequence
  Description of Artificial Sequence: Synthetic oligonucleotide
  Sense strand starting at position 1249 of SEQ ID NO: 1881617
uuuauuacugcaggagaaa

SEQ ID NO: 2058407 - RNA, 19 nt, Artificial Sequence
  Description of Artificial Sequence: Synthetic oligonucleotide
  Antisense strand to SEQ ID NO: 2058406
uuucuccugcaguaauaaa

SEQ ID NO: 2058408 - RNA, 19 nt, Artificial Sequence
  Description of Artificial Sequence: Synthetic oligonucleotide
  Sense strand starting at position 1322 of SEQ ID NO: 1881617
gcacuugggcuuuaauaug

SEQ ID NO: 2058409 - RNA, 19 nt, Artificial Sequence
  Description of Artificial Sequence: Synthetic oligonucleotide
  Antisense strand to SEQ ID NO: 2058408
cauauuaaagcccaagugc

SEQ ID NO: 2058410 - RNA, 19 nt, Artificial Sequence
  Description of Artificial Sequence: Synthetic oligonucleotide
  Sense strand starting at position 1374 of SEQ ID NO: 1881617
cagauagguaggugacuuu

SEQ ID NO: 2058411 - RNA, 19 nt, Artificial Sequence
  Description of Artificial Sequence: Synthetic oligonucleotide
  Antisense strand to SEQ ID NO: 2058410
aaagucaccuaccuaucug

SEQ ID NO: 2058412 - RNA, 19 nt, Artificial Sequence
  Description of Artificial Sequence: Synthetic oligonucleotide
  Sense strand starting at position 1377 of SEQ ID NO: 1881617
auagguaggugacuuugau

SEQ ID NO: 2058413 - RNA, 19 nt, Artificial Sequence
  Description of Artificial Sequence: Synthetic oligonucleotide
  Antisense strand to SEQ ID NO: 2058412
aucaaagucaccuaccuau

SEQ ID NO: 2058414 - RNA, 19 nt, Artificial Sequence
  Description of Artificial Sequence: Synthetic oligonucleotide
  Sense strand starting at position 1503 of SEQ ID NO: 1881617
gcauauacagguuaguuua

SEQ ID NO: 2058415 - RNA, 19 nt, Artificial Sequence
  Description of Artificial Sequence: Synthetic oligonucleotide
  Antisense strand to SEQ ID NO: 2058414
uaaacuaaccuguauaugc

SEQ ID NO: 2058416 - RNA, 19 nt, Artificial Sequence
  Description of Artificial Sequence: Synthetic oligonucleotide
  Sense strand starting at position 1533 of SEQ ID NO: 1881617
cuuauuaauugugcaauag

SEQ ID NO: 2058417 - RNA, 19 nt, Artificial Sequence
  Description of Artificial Sequence: Synthetic oligonucleotide
  Antisense strand to SEQ ID NO: 2058416
cuauugcacaauuaauaag

SEQ ID NO: 2058418 - RNA, 19 nt, Artificial Sequence
  Description of Artificial Sequence: Synthetic oligonucleotide
  Sense strand starting at position 1566 of SEQ ID NO: 1881617
augcacauagcuuaguuaa

SEQ ID NO: 2058419 - RNA, 19 nt, Artificial Sequence
  Description of Artificial Sequence: Synthetic oligonucleotide
  Antisense strand to SEQ ID NO: 2058418
uuaacuaagcuaugugcau

SEQ ID NO: 2058420 - RNA, 19 nt, Artificial Sequence
  Description of Artificial Sequence: Synthetic oligonucleotide
  Sense strand starting at position 2140 of SEQ ID NO: 1881617
caaaguuaucuaugagugu

SEQ ID NO: 2058421 - RNA, 19 nt, Artificial Sequence
  Description of Artificial Sequence: Synthetic oligonucleotide
  Antisense strand to SEQ ID NO: 2058420
acacucauagauaacuuug

SEQ ID NO: 2058422 - RNA, 19 nt, Artificial Sequence
  Description of Artificial Sequence: Synthetic oligonucleotide
  Sense strand starting at position 2281 of SEQ ID NO: 1881617
ugcccagauccaugagaga

SEQ ID NO: 2058423 - RNA, 19 nt, Artificial Sequence
  Description of Artificial Sequence: Synthetic oligonucleotide
  Antisense strand to SEQ ID NO: 2058422
ucucucauggaucugggca

SEQ ID NO: 2058424 - RNA, 19 nt, Artificial Sequence
  Description of Artificial Sequence: Synthetic oligonucleotide
  Sense strand starting at position 2427 of SEQ ID NO: 1881617
aaugaauauccugagcagu

SEQ ID NO: 2058425 - RNA, 19 nt, Artificial Sequence
  Description of Artificial Sequence: Synthetic oligonucleotide
  Antisense strand to SEQ ID NO: 2058424
acugcucaggauauucauu

SEQ ID NO: 2058426 - RNA, 19 nt, Artificial Sequence
  Description of Artificial Sequence: Synthetic oligonucleotide
  Sense strand starting at position 2429 of SEQ ID NO: 1881617
ugaauauccugagcaguuu

SEQ ID NO: 2058427 - RNA, 19 nt, Artificial Sequence
  Description of Artificial Sequence: Synthetic oligonucleotide
  Antisense strand to SEQ ID NO: 2058426
aaacugcucaggauauuca

SEQ ID NO: 2058428 - RNA, 19 nt, Artificial Sequence
  Description of Artificial Sequence: Synthetic oligonucleotide
  Sense strand starting at position 2430 of SEQ ID NO: 1881617
gaauauccugagcaguuua

SEQ ID NO: 2058429 - RNA, 19 nt, Artificial Sequence
  Description of Artificial Sequence: Synthetic oligonucleotide
  Antisense strand to SEQ ID NO: 2058428
uaaacugcucaggauauuc

SEQ ID NO: 2058430 - RNA, 19 nt, Artificial Sequence
  Description of Artificial Sequence: Synthetic oligonucleotide
  Sense strand starting at position 2461 of SEQ ID NO: 1881617
ggauuauaagcacgucaug

SEQ ID NO: 2058431 - RNA, 19 nt, Artificial Sequence
  Description of Artificial Sequence: Synthetic oligonucleotide
  Antisense strand to SEQ ID NO: 2058430
caugacgugcuuauaaucc

SEQ ID NO: 2058432 - RNA, 19 nt, Artificial Sequence
  Description of Artificial Sequence: Synthetic oligonucleotide
  Sense strand starting at position 2897 of SEQ ID NO: 1881617
cccaguagaagucauaguu

SEQ ID NO: 2058433 - RNA, 19 nt, Artificial Sequence
  Description of Artificial Sequence: Synthetic oligonucleotide
  Antisense strand to SEQ ID NO: 2058432
aacuaugacuucuacuggg

SEQ ID NO: 2058434 - RNA, 19 nt, Artificial Sequence
  Description of Artificial Sequence: Synthetic oligonucleotide
  Sense strand starting at position 3112 of SEQ ID NO: 1881617
gggcacagccuccagauau

SEQ ID NO: 2058435 - RNA, 19 nt, Artificial Sequence
  Description of Artificial Sequence: Synthetic oligonucleotide
  Antisense strand to SEQ ID NO: 2058434
auaucuggaggcugugccc

SEQ ID NO: 2058436 - RNA, 19 nt, Artificial Sequence
  Description of Artificial Sequence: Synthetic oligonucleotide
  Sense strand starting at position 3192 of SEQ ID NO: 1881617
gaggacaaugcuugcuaga

SEQ ID NO: 2058437 - RNA, 19 nt, Artificial Sequence
  Description of Artificial Sequence: Synthetic oligonucleotide
  Antisense strand to SEQ ID NO: 2058436
ucuagcaagcauuguccuc

SEQ ID NO: 2058438 - RNA, 19 nt, Artificial Sequence
  Description of Artificial Sequence: Synthetic oligonucleotide
  Sense strand starting at position 3475 of SEQ ID NO: 1881617
gugggcaaugucuacuaga

SEQ ID NO: 2058439 - RNA, 19 nt, Artificial Sequence
  Description of Artificial Sequence: Synthetic oligonucleotide
  Antisense strand to SEQ ID NO: 2058438
ucuaguagacauugcccac

SEQ ID NO: 2058440 - RNA, 19 nt, Artificial Sequence
  Description of Artificial Sequence: Synthetic oligonucleotide
  Sense strand starting at position 3688 of SEQ ID NO: 1881617
acuuguugucuugggaaac

SEQ ID NO: 2058441 - RNA, 19 nt, Artificial Sequence
  Description of Artificial Sequence: Synthetic oligonucleotide
  Antisense strand to SEQ ID NO: 2058440
guuucccaagacaacaagu

SEQ ID NO: 2058442 - RNA, 19 nt, Artificial Sequence
  Description of Artificial Sequence: Synthetic oligonucleotide
  Sense strand starting at position 3759 of SEQ ID NO: 1881617
ugaacaauggccuguuaag

SEQ ID NO: 2058443 - RNA, 19 nt, Artificial Sequence
  Description of Artificial Sequence: Synthetic oligonucleotide
  Antisense strand to SEQ ID NO: 2058442
cuuaacaggccauuguuca

SEQ ID NO: 2058444 - RNA, 19 nt, Artificial Sequence
  Description of Artificial Sequence: Synthetic oligonucleotide
  Sense strand starting at position 3792 of SEQ ID NO: 1881617
gguccacuucuauguaaac

SEQ ID NO: 2058445 - RNA, 19 nt, Artificial Sequence
  Description of Artificial Sequence: Synthetic oligonucleotide
  Antisense strand to SEQ ID NO: 2058444
guuuacauagaaguggacc

SEQ ID NO: 2058446 - RNA, 19 nt, Artificial Sequence
  Description of Artificial Sequence: Synthetic oligonucleotide
  Sense strand starting at position 191 of SEQ ID NO: 1881618
ccgugacaauuccucaaag

SEQ ID NO: 2058447 - RNA, 19 nt, Artificial Sequence
  Description of Artificial Sequence: Synthetic oligonucleotide
  Antisense strand to SEQ ID NO: 2058446
cuuugaggaauugucacgg

SEQ ID NO: 2058448 - RNA, 19 nt, Artificial Sequence
  Description of Artificial Sequence: Synthetic oligonucleotide
  Sense strand starting at position 192 of SEQ ID NO: 1881618
cgugacaauuccucaaaga

SEQ ID NO: 2058449 - RNA, 19 nt, Artificial Sequence
  Description of Artificial Sequence: Synthetic oligonucleotide
  Antisense strand to SEQ ID NO: 2058448
ucuuugaggaauugucacg

SEQ ID NO: 2058450 - RNA, 19 nt, Artificial Sequence
  Description of Artificial Sequence: Synthetic oligonucleotide
  Sense strand starting at position 369 of SEQ ID NO: 1881618
ucaguaauaggcuguauaa

SEQ ID NO: 2058451 - RNA, 19 nt, Artificial Sequence
  Description of Artificial Sequence: Synthetic oligonucleotide
  Antisense strand to SEQ ID NO: 2058450
uuauacagccuauuacuga

SEQ ID NO: 2058452 - RNA, 19 nt, Artificial Sequence
  Description of Artificial Sequence: Synthetic oligonucleotide
  Sense strand starting at position 382 of SEQ ID NO: 1881618
guauaaggaaauuguggua

SEQ ID NO: 2058453 - RNA, 19 nt, Artificial Sequence
  Description of Artificial Sequence: Synthetic oligonucleotide
  Antisense strand to SEQ ID NO: 2058452
uaccacaauuuccuuauac

SEQ ID NO: 2058454 - RNA, 19 nt, Artificial Sequence
  Description of Artificial Sequence: Synthetic oligonucleotide
  Sense strand starting at position 689 of SEQ ID NO: 1881618
gaagaaauagucuguacaa

SEQ ID NO: 2058455 - RNA, 19 nt, Artificial Sequence
  Description of Artificial Sequence: Synthetic oligonucleotide
  Antisense strand to SEQ ID NO: 2058454
uuguacagacuauuucuuc

SEQ ID NO: 2058456 - RNA, 19 nt, Artificial Sequence
  Description of Artificial Sequence: Synthetic oligonucleotide
  Sense strand starting at position 871 of SEQ ID NO: 1881618
uauuauguggguuaguaag

SEQ ID NO: 2058457 - RNA, 19 nt, Artificial Sequence
  Description of Artificial Sequence: Synthetic oligonucleotide
  Antisense strand to SEQ ID NO: 2058456
cuuacuaacccacauaaua

SEQ ID NO: 2058458 - RNA, 19 nt, Artificial Sequence
  Description of Artificial Sequence: Synthetic oligonucleotide
  Sense strand starting at position 953 of SEQ ID NO: 1881618
ucaucaacugcugggaauu

SEQ ID NO: 2058459 - RNA, 19 nt, Artificial Sequence
  Description of Artificial Sequence: Synthetic oligonucleotide
  Antisense strand to SEQ ID NO: 2058458
aauucccagcaguugauga

SEQ ID NO: 2058460 - RNA, 19 nt, Artificial Sequence
  Description of Artificial Sequence: Synthetic oligonucleotide
  Sense strand starting at position 1202 of SEQ ID NO: 1881618
ugaagacuacuuugcucuu

SEQ ID NO: 2058461 - RNA, 19 nt, Artificial Sequence
  Description of Artificial Sequence: Synthetic oligonucleotide
  Antisense strand to SEQ ID NO: 2058460
aagagcaaaguagucuuca

SEQ ID NO: 2058462 - RNA, 19 nt, Artificial Sequence
  Description of Artificial Sequence: Synthetic oligonucleotide
  Sense strand starting at position 1243 of SEQ ID NO: 1881618
cugagacuucucuauguaa

SEQ ID NO: 2058463 - RNA, 19 nt, Artificial Sequence
  Description of Artificial Sequence: Synthetic oligonucleotide
  Antisense strand to SEQ ID NO: 2058462
uuacauagagaagucucag

SEQ ID NO: 2058464 - RNA, 19 nt, Artificial Sequence
  Description of Artificial Sequence: Synthetic oligonucleotide
  Sense strand starting at position 1277 of SEQ ID NO: 1881618
guccuaggaugcucauaua

SEQ ID NO: 2058465 - RNA, 19 nt, Artificial Sequence
  Description of Artificial Sequence: Synthetic oligonucleotide
  Antisense strand to SEQ ID NO: 2058464
uauaugagcauccuaggac

SEQ ID NO: 2058466 - RNA, 19 nt, Artificial Sequence
  Description of Artificial Sequence: Synthetic oligonucleotide
  Sense strand starting at position 1334 of SEQ ID NO: 1881618
gagagcuauguguacauua

SEQ ID NO: 2058467 - RNA, 19 nt, Artificial Sequence
  Description of Artificial Sequence: Synthetic oligonucleotide
  Antisense strand to SEQ ID NO: 2058466
uaauguacacauagcucuc

SEQ ID NO: 2058468 - RNA, 19 nt, Artificial Sequence
  Description of Artificial Sequence: Synthetic oligonucleotide
  Sense strand starting at position 1460 of SEQ ID NO: 1881618
aggaaguguccgggaguau

SEQ ID NO: 2058469 - RNA, 19 nt, Artificial Sequence
  Description of Artificial Sequence: Synthetic oligonucleotide
  Antisense strand to SEQ ID NO: 2058468
auacucccggacacuuccu

SEQ ID NO: 2058470 - RNA, 19 nt, Artificial Sequence
  Description of Artificial Sequence: Synthetic oligonucleotide
  Sense strand starting at position 1461 of SEQ ID NO: 1881618
ggaaguguccgggaguaua

SEQ ID NO: 2058471 - RNA, 19 nt, Artificial Sequence
  Description of Artificial Sequence: Synthetic oligonucleotide
  Antisense strand to SEQ ID NO: 2058470
uauacucccggacacuucc

SEQ ID NO: 2058472 - RNA, 19 nt, Artificial Sequence
  Description of Artificial Sequence: Synthetic oligonucleotide
  Sense strand starting at position 1464 of SEQ ID NO: 1881618
aguguccgggaguauaauu

SEQ ID NO: 2058473 - RNA, 19 nt, Artificial Sequence
  Description of Artificial Sequence: Synthetic oligonucleotide
  Antisense strand to SEQ ID NO: 2058472
aauuauacucccggacacu

SEQ ID NO: 2058474 - RNA, 19 nt, Artificial Sequence
  Description of Artificial Sequence: Synthetic oligonucleotide
  Sense strand starting at position 1500 of SEQ ID NO: 1881618
gcugcaaguguguuucaug

SEQ ID NO: 2058475 - RNA, 19 nt, Artificial Sequence
  Description of Artificial Sequence: Synthetic oligonucleotide
  Antisense strand to SEQ ID NO: 2058474
caugaaacacacuugcagc

SEQ ID NO: 2058476 - RNA, 19 nt, Artificial Sequence
  Description of Artificial Sequence: Synthetic oligonucleotide
  Sense strand starting at position 1514 of SEQ ID NO: 1881618
ucauguuauccucauuguu

SEQ ID NO: 2058477 - RNA, 19 nt, Artificial Sequence
  Description of Artificial Sequence: Synthetic oligonucleotide
  Antisense strand to SEQ ID NO: 2058476
aacaaugaggauaacauga

SEQ ID NO: 2058478 - RNA, 19 nt, Artificial Sequence
  Description of Artificial Sequence: Synthetic oligonucleotide
  Sense strand starting at position 1640 of SEQ ID NO: 1881618
auuucuaagugguacuaua

SEQ ID NO: 2058479 - RNA, 19 nt, Artificial Sequence
  Description of Artificial Sequence: Synthetic oligonucleotide
  Antisense strand to SEQ ID NO: 2058478
uauaguaccacuuagaaau

SEQ ID NO: 2058480 - RNA, 19 nt, Artificial Sequence
  Description of Artificial Sequence: Synthetic oligonucleotide
  Sense strand starting at position 1692 of SEQ ID NO: 1881618
uuuagaaagucuucuuaag

SEQ ID NO: 2058481 - RNA, 19 nt, Artificial Sequence
  Description of Artificial Sequence: Synthetic oligonucleotide
  Antisense strand to SEQ ID NO: 2058480
cuuaagaagacuuucuaaa

SEQ ID NO: 2058482 - RNA, 19 nt, Artificial Sequence
  Description of Artificial Sequence: Synthetic oligonucleotide
  Sense strand starting at position 1756 of SEQ ID NO: 1881618
aagguuaaugacuguuagu

SEQ ID NO: 2058483 - RNA, 19 nt, Artificial Sequence
  Description of Artificial Sequence: Synthetic oligonucleotide
  Antisense strand to SEQ ID NO: 2058482
acuaacagucauuaaccuu

SEQ ID NO: 2058484 - RNA, 19 nt, Artificial Sequence
  Description of Artificial Sequence: Synthetic oligonucleotide
  Sense strand starting at position 1991 of SEQ ID NO: 1881618
uaggcaauccagugguaug

SEQ ID NO: 2058485 - RNA, 19 nt, Artificial Sequence
  Description of Artificial Sequence: Synthetic oligonucleotide
  Antisense strand to SEQ ID NO: 2058484
cauaccacuggauugccua

SEQ ID NO: 2058486 - RNA, 19 nt, Artificial Sequence
  Description of Artificial Sequence: Synthetic oligonucleotide
  Sense strand starting at position 1992 of SEQ ID NO: 1881618
aggcaauccagugguauga

SEQ ID NO: 2058487 - RNA, 19 nt, Artificial Sequence
  Description of Artificial Sequence: Synthetic oligonucleotide
  Antisense strand to SEQ ID NO: 2058486
ucauaccacuggauugccu

SEQ ID NO: 2058488 - RNA, 19 nt, Artificial Sequence
  Description of Artificial Sequence: Synthetic oligonucleotide
  Sense strand starting at position 1996 of SEQ ID NO: 1881618
aauccagugguaugaauuc

SEQ ID NO: 2058489 - RNA, 19 nt, Artificial Sequence
  Description of Artificial Sequence: Synthetic oligonucleotide
  Antisense strand to SEQ ID NO: 2058488
gaauucauaccacuggauu

SEQ ID NO: 2058490 - RNA, 19 nt, Artificial Sequence
  Description of Artificial Sequence: Synthetic oligonucleotide
  Sense strand starting at position 2193 of SEQ ID NO: 1881618
auaggaugguuccuuucua

SEQ ID NO: 2058491 - RNA, 19 nt, Artificial Sequence
  Description of Artificial Sequence: Synthetic oligonucleotide
  Antisense strand to SEQ ID NO: 2058490
uagaaaggaaccauccuau

SEQ ID NO: 2058492 - RNA, 19 nt, Artificial Sequence
  Description of Artificial Sequence: Synthetic oligonucleotide
  Sense strand starting at position 2218 of SEQ ID NO: 1881618
gggagaaucuuccucacuc

SEQ ID NO: 2058493 - RNA, 19 nt, Artificial Sequence
  Description of Artificial Sequence: Synthetic oligonucleotide
  Antisense strand to SEQ ID NO: 2058492
gagugaggaagauucuccc

SEQ ID NO: 2058494 - RNA, 19 nt, Artificial Sequence
  Description of Artificial Sequence: Synthetic oligonucleotide
  Sense strand starting at position 2219 of SEQ ID NO: 1881618
ggagaaucuuccucacuca

SEQ ID NO: 2058495 - RNA, 19 nt, Artificial Sequence
  Description of Artificial Sequence: Synthetic oligonucleotide
  Antisense strand to SEQ ID NO: 2058494
ugagugaggaagauucucc

SEQ ID NO: 2058496 - RNA, 19 nt, Artificial Sequence
  Description of Artificial Sequence: Synthetic oligonucleotide
  Sense strand starting at position 2464 of SEQ ID NO: 1881618
gauacaauuuaggauugua

SEQ ID NO: 2058497 - RNA, 19 nt, Artificial Sequence
  Description of Artificial Sequence: Synthetic oligonucleotide
  Antisense strand to SEQ ID NO: 2058496
uacaauccuaaauuguauc

SEQ ID NO: 2058498 - RNA, 19 nt, Artificial Sequence
  Description of Artificial Sequence: Synthetic oligonucleotide
  Sense strand starting at position 2497 of SEQ ID NO: 1881618
gucuuagugaagcauaguu

SEQ ID NO: 2058499 - RNA, 19 nt, Artificial Sequence
  Description of Artificial Sequence: Synthetic oligonucleotide
  Antisense strand to SEQ ID NO: 2058498
aacuaugcuucacuaagac

SEQ ID NO: 2058500 - RNA, 19 nt, Artificial Sequence
  Description of Artificial Sequence: Synthetic oligonucleotide
  Sense strand starting at position 2703 of SEQ ID NO: 1881618
ggcaauuucugggaacuuu

SEQ ID NO: 2058501 - RNA, 19 nt, Artificial Sequence
  Description of Artificial Sequence: Synthetic oligonucleotide
  Antisense strand to SEQ ID NO: 2058500
aaaguucccagaaauugcc

SEQ ID NO: 2058502 - RNA, 19 nt, Artificial Sequence
  Description of Artificial Sequence: Synthetic oligonucleotide
  Sense strand starting at position 3199 of SEQ ID NO: 1881618
acauguuugcaauaauagc

SEQ ID NO: 2058503 - RNA, 19 nt, Artificial Sequence
  Description of Artificial Sequence: Synthetic oligonucleotide
  Antisense strand to SEQ ID NO: 2058502
gcuauuauugcaaacaugu

SEQ ID NO: 2058504 - RNA, 19 nt, Artificial Sequence
  Description of Artificial Sequence: Synthetic oligonucleotide
  Sense strand starting at position 3289 of SEQ ID NO: 1881618
acguguuugguugcuugau

SEQ ID NO: 2058505 - RNA, 19 nt, Artificial Sequence
  Description of Artificial Sequence: Synthetic oligonucleotide
  Antisense strand to SEQ ID NO: 2058504
aucaagcaaccaaacacgu

SEQ ID NO: 2058506 - RNA, 19 nt, Artificial Sequence
  Description of Artificial Sequence: Synthetic oligonucleotide
  Sense strand starting at position 3347 of SEQ ID NO: 1881618
caggaauucugguuugcaa

SEQ ID NO: 2058507 - RNA, 19 nt, Artificial Sequence
  Description of Artificial Sequence: Synthetic oligonucleotide
  Antisense strand to SEQ ID NO: 2058506
uugcaaaccagaauuccug

SEQ ID NO: 2058508 - RNA, 19 nt, Artificial Sequence
  Description of Artificial Sequence: Synthetic oligonucleotide
  Sense strand starting at position 3407 of SEQ ID NO: 1881618
aucugucugguguacagaa

SEQ ID NO: 2058509 - RNA, 19 nt, Artificial Sequence
  Description of Artificial Sequence: Synthetic oligonucleotide
  Antisense strand to SEQ ID NO: 2058508
uucuguacaccagacagau

SEQ ID NO: 2058510 - RNA, 19 nt, Artificial Sequence
  Description of Artificial Sequence: Synthetic oligonucleotide
  Sense strand starting at position 3534 of SEQ ID NO: 1881618
uggauaggagcuugugauu

SEQ ID NO: 2058511 - RNA, 19 nt, Artificial Sequence
  Description of Artificial Sequence: Synthetic oligonucleotide
  Antisense strand to SEQ ID NO: 2058510
aaucacaagcuccuaucca

SEQ ID NO: 2058512 - RNA, 19 nt, Artificial Sequence
  Description of Artificial Sequence: Synthetic oligonucleotide
  Sense strand starting at position 3619 of SEQ ID NO: 1881618
ugagaaagauaucaaucaa

SEQ ID NO: 2058513 - RNA, 19 nt, Artificial Sequence
  Description of Artificial Sequence: Synthetic oligonucleotide
  Antisense strand to SEQ ID NO: 2058512
uugauugauaucuuucuca

SEQ ID NO: 2058514 - RNA, 19 nt, Artificial Sequence
  Description of Artificial Sequence: Synthetic oligonucleotide
  Sense strand starting at position 3700 of SEQ ID NO: 1881618
uugguuuagcgcuaauuuc

SEQ ID NO: 2058515 - RNA, 19 nt, Artificial Sequence
  Description of Artificial Sequence: Synthetic oligonucleotide
  Antisense strand to SEQ ID NO: 2058514
gaaauuagcgcuaaaccaa

SEQ ID NO: 2058516 - RNA, 19 nt, Artificial Sequence
  Description of Artificial Sequence: Synthetic oligonucleotide
  Sense strand starting at position 3721 of SEQ ID NO: 1881618
cggaacauccuguggugaa

SEQ ID NO: 2058517 - RNA, 19 nt, Artificial Sequence
  Description of Artificial Sequence: Synthetic oligonucleotide
  Antisense strand to SEQ ID NO: 2058516
uucaccacaggauguuccg

SEQ ID NO: 2058518 - RNA, 19 nt, Artificial Sequence
  Description of Artificial Sequence: Synthetic oligonucleotide
  Sense strand starting at position 3733 of SEQ ID NO: 1881618
uggugaagagucuaugauu

SEQ ID NO: 2058519 - RNA, 19 nt, Artificial Sequence
  Description of Artificial Sequence: Synthetic oligonucleotide
  Antisense strand to SEQ ID NO: 2058518
aaucauagacucuucacca

SEQ ID NO: 2058520 - RNA, 19 nt, Artificial Sequence
  Description of Artificial Sequence: Synthetic oligonucleotide
  Sense strand starting at position 3738 of SEQ ID NO: 1881618
aagagucuaugauuauugu

SEQ ID NO: 2058521 - RNA, 19 nt, Artificial Sequence
  Description of Artificial Sequence: Synthetic oligonucleotide
  Antisense strand to SEQ ID NO: 2058520
acaauaaucauagacucuu

SEQ ID NO: 2058522 - RNA, 19 nt, Artificial Sequence
  Description of Artificial Sequence: Synthetic oligonucleotide
  Sense strand starting at position 3828 of SEQ ID NO: 1881618
ugggucuauuuggauauaa

SEQ ID NO: 2058523 - RNA, 19 nt, Artificial Sequence
  Description of Artificial Sequence: Synthetic oligonucleotide
  Antisense strand to SEQ ID NO: 2058522
uuauauccaaauagaccca

SEQ ID NO: 2058524 - RNA, 19 nt, Artificial Sequence
  Description of Artificial Sequence: Synthetic oligonucleotide
  Sense strand starting at position 3972 of SEQ ID NO: 1881618
ugagcaauccauuguaaca

SEQ ID NO: 2058525 - RNA, 19 nt, Artificial Sequence
  Description of Artificial Sequence: Synthetic oligonucleotide
  Antisense strand to SEQ ID NO: 2058524
uguuacaauggauugcuca

SEQ ID NO: 2058526 - RNA, 19 nt, Artificial Sequence
  Description of Artificial Sequence: Synthetic oligonucleotide
  Sense strand starting at position 94 of SEQ ID NO: 1881619
acauuuacuuacgugguau

SEQ ID NO: 2058527 - RNA, 19 nt, Artificial Sequence
  Description of Artificial Sequence: Synthetic oligonucleotide
  Antisense strand to SEQ ID NO: 2058526
auaccacguaaguaaaugu

SEQ ID NO: 2058528 - RNA, 19 nt, Artificial Sequence
  Description of Artificial Sequence: Synthetic oligonucleotide
  Sense strand starting at position 96 of SEQ ID NO: 1881619
auuuacuuacgugguauua

SEQ ID NO: 2058529 - RNA, 19 nt, Artificial Sequence
  Description of Artificial Sequence: Synthetic oligonucleotide
  Antisense strand to SEQ ID NO: 2058528
uaauaccacguaaguaaau

SEQ ID NO: 2058530 - RNA, 19 nt, Artificial Sequence
  Description of Artificial Sequence: Synthetic oligonucleotide
  Sense strand starting at position 173 of SEQ ID NO: 1881619
aggcaauacuuccuguaaa

SEQ ID NO: 2058531 - RNA, 19 nt, Artificial Sequence
  Description of Artificial Sequence: Synthetic oligonucleotide
  Antisense strand to SEQ ID NO: 2058530
uuuacaggaaguauugccu

SEQ ID NO: 2058532 - RNA, 19 nt, Artificial Sequence
  Description of Artificial Sequence: Synthetic oligonucleotide
  Sense strand starting at position 202 of SEQ ID NO: 1881619
gucagaacucagugaauua

SEQ ID NO: 2058533 - RNA, 19 nt, Artificial Sequence
  Description of Artificial Sequence: Synthetic oligonucleotide
  Antisense strand to SEQ ID NO: 2058532
uaauucacugaguucugac

SEQ ID NO: 2058534 - RNA, 19 nt, Artificial Sequence
  Description of Artificial Sequence: Synthetic oligonucleotide
  Sense strand starting at position 268 of SEQ ID NO: 1881619
auguauugacccugaugau

SEQ ID NO: 2058535 - RNA, 19 nt, Artificial Sequence
  Description of Artificial Sequence: Synthetic oligonucleotide
  Antisense strand to SEQ ID NO: 2058534
aucaucagggucaauacau

SEQ ID NO: 2058536 - RNA, 19 nt, Artificial Sequence
  Description of Artificial Sequence: Synthetic oligonucleotide
  Sense strand starting at position 269 of SEQ ID NO: 1881619
uguauugacccugaugauc

SEQ ID NO: 2058537 - RNA, 19 nt, Artificial Sequence
  Description of Artificial Sequence: Synthetic oligonucleotide
  Antisense strand to SEQ ID NO: 2058536
gaucaucagggucaauaca

SEQ ID NO: 2058538 - RNA, 19 nt, Artificial Sequence
  Description of Artificial Sequence: Synthetic oligonucleotide
  Sense strand starting at position 296 of SEQ ID NO: 1881619
auagcuguuaugggaauaa

SEQ ID NO: 2058539 - RNA, 19 nt, Artificial Sequence
  Description of Artificial Sequence: Synthetic oligonucleotide
  Antisense strand to SEQ ID NO: 2058538
uuauucccauaacagcuau

SEQ ID NO: 2058540 - RNA, 19 nt, Artificial Sequence
  Description of Artificial Sequence: Synthetic oligonucleotide
  Sense strand starting at position 450 of SEQ ID NO: 1881619
acauguacaucaucacuga

SEQ ID NO: 2058541 - RNA, 19 nt, Artificial Sequence
  Description of Artificial Sequence: Synthetic oligonucleotide
  Antisense strand to SEQ ID NO: 2058540
ucagugaugauguacaugu

SEQ ID NO: 2058542 - RNA, 19 nt, Artificial Sequence
  Description of Artificial Sequence: Synthetic oligonucleotide
  Sense strand starting at position 761 of SEQ ID NO: 1881619
gucuaucagcguguauauu

SEQ ID NO: 2058543 - RNA, 19 nt, Artificial Sequence
  Description of Artificial Sequence: Synthetic oligonucleotide
  Antisense strand to SEQ ID NO: 2058542
aauauacacgcugauagac

SEQ ID NO: 2058544 - RNA, 19 nt, Artificial Sequence
  Description of Artificial Sequence: Synthetic oligonucleotide
  Sense strand starting at position 762 of SEQ ID NO: 1881619
ucuaucagcguguauauuu

SEQ ID NO: 2058545 - RNA, 19 nt, Artificial Sequence
  Description of Artificial Sequence: Synthetic oligonucleotide
  Antisense strand to SEQ ID NO: 2058544
aaauauacacgcugauaga

SEQ ID NO: 2058546 - RNA, 19 nt, Artificial Sequence
  Description of Artificial Sequence: Synthetic oligonucleotide
  Sense strand starting at position 1161 of SEQ ID NO: 1881619
acagaauccuuagcugaca

SEQ ID NO: 2058547 - RNA, 19 nt, Artificial Sequence
  Description of Artificial Sequence: Synthetic oligonucleotide
  Antisense strand to SEQ ID NO: 2058546
ugucagcuaaggauucugu

SEQ ID NO: 2058548 - RNA, 19 nt, Artificial Sequence
  Description of Artificial Sequence: Synthetic oligonucleotide
  Sense strand starting at position 1185 of SEQ ID NO: 1881619
gugccaauuuguuuacugu

SEQ ID NO: 2058549 - RNA, 19 nt, Artificial Sequence
  Description of Artificial Sequence: Synthetic oligonucleotide
  Antisense strand to SEQ ID NO: 2058548
acaguaaacaaauuggcac

SEQ ID NO: 2058550 - RNA, 19 nt, Artificial Sequence
  Description of Artificial Sequence: Synthetic oligonucleotide
  Sense strand starting at position 1186 of SEQ ID NO: 1881619
ugccaauuuguuuacuguu

SEQ ID NO: 2058551 - RNA, 19 nt, Artificial Sequence
  Description of Artificial Sequence: Synthetic oligonucleotide
  Antisense strand to SEQ ID NO: 2058550
aacaguaaacaaauuggca

SEQ ID NO: 2058552 - RNA, 19 nt, Artificial Sequence
  Description of Artificial Sequence: Synthetic oligonucleotide
  Sense strand starting at position 1423 of SEQ ID NO: 1881619
caaguugaauccucagaug

SEQ ID NO: 2058553 - RNA, 19 nt, Artificial Sequence
  Description of Artificial Sequence: Synthetic oligonucleotide
  Antisense strand to SEQ ID NO: 2058552
caucugaggauucaacuug

SEQ ID NO: 2058554 - RNA, 19 nt, Artificial Sequence
  Description of Artificial Sequence: Synthetic oligonucleotide
  Sense strand starting at position 1486 of SEQ ID NO: 1881619
guuacugauguuuagaaac

SEQ ID NO: 2058555 - RNA, 19 nt, Artificial Sequence
  Description of Artificial Sequence: Synthetic oligonucleotide
  Antisense strand to SEQ ID NO: 2058554
guuucuaaacaucaguaac

SEQ ID NO: 2058556 - RNA, 19 nt, Artificial Sequence
  Description of Artificial Sequence: Synthetic oligonucleotide
  Sense strand starting at position 1513 of SEQ ID NO: 1881619
cugacauagcuacauguua

SEQ ID NO: 2058557 - RNA, 19 nt, Artificial Sequence
  Description of Artificial Sequence: Synthetic oligonucleotide
  Antisense strand to SEQ ID NO: 2058556
uaacauguagcuaugucag

SEQ ID NO: 2058558 - RNA, 19 nt, Artificial Sequence
  Description of Artificial Sequence: Synthetic oligonucleotide
  Sense strand starting at position 1533 of SEQ ID NO: 1881619
auaugucagcuuuaaagga

SEQ ID NO: 2058559 - RNA, 19 nt, Artificial Sequence
  Description of Artificial Sequence: Synthetic oligonucleotide
  Antisense strand to SEQ ID NO: 2058558
uccuuuaaagcugacauau

SEQ ID NO: 2058560 - RNA, 19 nt, Artificial Sequence
  Description of Artificial Sequence: Synthetic oligonucleotide
  Sense strand starting at position 1605 of SEQ ID NO: 1881619
uguaaauuacaccggaagu

SEQ ID NO: 2058561 - RNA, 19 nt, Artificial Sequence
  Description of Artificial Sequence: Synthetic oligonucleotide
  Antisense strand to SEQ ID NO: 2058560
acuuccgguguaauuuaca

SEQ ID NO: 2058562 - RNA, 19 nt, Artificial Sequence
  Description of Artificial Sequence: Synthetic oligonucleotide
  Sense strand starting at position 1620 of SEQ ID NO: 1881619
aaguuauuacuguaguaga

SEQ ID NO: 2058563 - RNA, 19 nt, Artificial Sequence
  Description of Artificial Sequence: Synthetic oligonucleotide
  Antisense strand to SEQ ID NO: 2058562
ucuacuacaguaauaacuu

SEQ ID NO: 2058564 - RNA, 19 nt, Artificial Sequence
  Description of Artificial Sequence: Synthetic oligonucleotide
  Sense strand starting at position 1684 of SEQ ID NO: 1881619
acacguuucucauuauuac

SEQ ID NO: 2058565 - RNA, 19 nt, Artificial Sequence
  Description of Artificial Sequence: Synthetic oligonucleotide
  Antisense strand to SEQ ID NO: 2058564
guaauaaugagaaacgugu

SEQ ID NO: 2058566 - RNA, 19 nt, Artificial Sequence
  Description of Artificial Sequence: Synthetic oligonucleotide
  Sense strand starting at position 1701 of SEQ ID NO: 1881619
acuggaaauucuguuugac

SEQ ID NO: 2058567 - RNA, 19 nt, Artificial Sequence
  Description of Artificial Sequence: Synthetic oligonucleotide
  Antisense strand to SEQ ID NO: 2058566
gucaaacagaauuuccagu

SEQ ID NO: 2058568 - RNA, 19 nt, Artificial Sequence
  Description of Artificial Sequence: Synthetic oligonucleotide
  Sense strand starting at position 1703 of SEQ ID NO: 1881619
uggaaauucuguuugacuu

SEQ ID NO: 2058569 - RNA, 19 nt, Artificial Sequence
  Description of Artificial Sequence: Synthetic oligonucleotide
  Antisense strand to SEQ ID NO: 2058568
aagucaaacagaauuucca

SEQ ID NO: 2058570 - RNA, 19 nt, Artificial Sequence
  Description of Artificial Sequence: Synthetic oligonucleotide
  Sense strand starting at position 1704 of SEQ ID NO: 1881619
ggaaauucuguuugacuug

SEQ ID NO: 2058571 - RNA, 19 nt, Artificial Sequence
  Description of Artificial Sequence: Synthetic oligonucleotide
  Antisense strand to SEQ ID NO: 2058570
caagucaaacagaauuucc

SEQ ID NO: 2058572 - RNA, 19 nt, Artificial Sequence
  Description of Artificial Sequence: Synthetic oligonucleotide
  Sense strand starting at position 1709 of SEQ ID NO: 1881619
uucuguuugacuugggcaa

SEQ ID NO: 2058573 - RNA, 19 nt, Artificial Sequence
  Description of Artificial Sequence: Synthetic oligonucleotide
  Antisense strand to SEQ ID NO: 2058572
uugcccaagucaaacagaa

SEQ ID NO: 2058574 - RNA, 19 nt, Artificial Sequence
  Description of Artificial Sequence: Synthetic oligonucleotide
  Sense strand starting at position 1710 of SEQ ID NO: 1881619
ucuguuugacuugggcaaa

SEQ ID NO: 2058575 - RNA, 19 nt, Artificial Sequence
  Description of Artificial Sequence: Synthetic oligonucleotide
  Antisense strand to SEQ ID NO: 2058574
uuugcccaagucaaacaga

SEQ ID NO: 2058576 - RNA, 19 nt, Artificial Sequence
  Description of Artificial Sequence: Synthetic oligonucleotide
  Sense strand starting at position 1989 of SEQ ID NO: 1881619
acagcaggaucuucugaaa

SEQ ID NO: 2058577 - RNA, 19 nt, Artificial Sequence
  Description of Artificial Sequence: Synthetic oligonucleotide
  Antisense strand to SEQ ID NO: 2058576
uuucagaagauccugcugu

SEQ ID NO: 2058578 - RNA, 19 nt, Artificial Sequence
  Description of Artificial Sequence: Synthetic oligonucleotide
  Sense strand starting at position 2135 of SEQ ID NO: 1881619
gauuaauaguggucaaaug

SEQ ID NO: 2058579 - RNA, 19 nt, Artificial Sequence
  Description of Artificial Sequence: Synthetic oligonucleotide
  Antisense strand to SEQ ID NO: 2058578
cauuugaccacuauuaauc

SEQ ID NO: 2058580 - RNA, 19 nt, Artificial Sequence
  Description of Artificial Sequence: Synthetic oligonucleotide
  Sense strand starting at position 2136 of SEQ ID NO: 1881619
auuaauaguggucaaaugu

SEQ ID NO: 2058581 - RNA, 19 nt, Artificial Sequence
  Description of Artificial Sequence: Synthetic oligonucleotide
  Antisense strand to SEQ ID NO: 2058580
acauuugaccacuauuaau

SEQ ID NO: 2058582 - RNA, 19 nt, Artificial Sequence
  Description of Artificial Sequence: Synthetic oligonucleotide
  Sense strand starting at position 2142 of SEQ ID NO: 1881619
aguggucaaauguacagau

SEQ ID NO: 2058583 - RNA, 19 nt, Artificial Sequence
  Description of Artificial Sequence: Synthetic oligonucleotide
  Antisense strand to SEQ ID NO: 2058582
aucuguacauuugaccacu

SEQ ID NO: 2058584 - RNA, 19 nt, Artificial Sequence
  Description of Artificial Sequence: Synthetic oligonucleotide
  Sense strand starting at position 2234 of SEQ ID NO: 1881619
ugacauauaucuguccaua

SEQ ID NO: 2058585 - RNA, 19 nt, Artificial Sequence
  Description of Artificial Sequence: Synthetic oligonucleotide
  Antisense strand to SEQ ID NO: 2058584
uauggacagauauauguca

SEQ ID NO: 2058586 - RNA, 19 nt, Artificial Sequence
  Description of Artificial Sequence: Synthetic oligonucleotide
  Sense strand starting at position 2293 of SEQ ID NO: 1881619
cacuuuggaccaugugaau

SEQ ID NO: 2058587 - RNA, 19 nt, Artificial Sequence
  Description of Artificial Sequence: Synthetic oligonucleotide
  Antisense strand to SEQ ID NO: 2058586
auucacaugguccaaagug

SEQ ID NO: 2058588 - RNA, 19 nt, Artificial Sequence
  Description of Artificial Sequence: Synthetic oligonucleotide
  Sense strand starting at position 2379 of SEQ ID NO: 1881619
uguauacaguguguuauuu

SEQ ID NO: 2058589 - RNA, 19 nt, Artificial Sequence
  Description of Artificial Sequence: Synthetic oligonucleotide
  Antisense strand to SEQ ID NO: 2058588
aaauaacacacuguauaca

SEQ ID NO: 2058590 - RNA, 19 nt, Artificial Sequence
  Description of Artificial Sequence: Synthetic oligonucleotide
  Sense strand starting at position 2739 of SEQ ID NO: 1881619
guaucagcagcgguuucau

SEQ ID NO: 2058591 - RNA, 19 nt, Artificial Sequence
  Description of Artificial Sequence: Synthetic oligonucleotide
  Antisense strand to SEQ ID NO: 2058590
augaaaccgcugcugauac

SEQ ID NO: 2058592 - RNA, 19 nt, Artificial Sequence
  Description of Artificial Sequence: Synthetic oligonucleotide
  Sense strand starting at position 2775 of SEQ ID NO: 1881619
acacaaagccugggugaaa

SEQ ID NO: 2058593 - RNA, 19 nt, Artificial Sequence
  Description of Artificial Sequence: Synthetic oligonucleotide
  Antisense strand to SEQ ID NO: 2058592
uuucacccaggcuuugugu

SEQ ID NO: 2058594 - RNA, 19 nt, Artificial Sequence
  Description of Artificial Sequence: Synthetic oligonucleotide
  Sense strand starting at position 2823 of SEQ ID NO: 1881619
aaggcuaguuucccagaga

SEQ ID NO: 2058595 - RNA, 19 nt, Artificial Sequence
  Description of Artificial Sequence: Synthetic oligonucleotide
  Antisense strand to SEQ ID NO: 2058594
ucucugggaaacuagccuu

SEQ ID NO: 2058596 - RNA, 19 nt, Artificial Sequence
  Description of Artificial Sequence: Synthetic oligonucleotide
  Sense strand starting at position 3216 of SEQ ID NO: 1881619
gucccuuuaguuuauaacu

SEQ ID NO: 2058597 - RNA, 19 nt, Artificial Sequence
  Description of Artificial Sequence: Synthetic oligonucleotide
  Antisense strand to SEQ ID NO: 2058596
aguuauaaacuaaagggac

SEQ ID NO: 2058598 - RNA, 19 nt, Artificial Sequence
  Description of Artificial Sequence: Synthetic oligonucleotide
  Sense strand starting at position 3250 of SEQ ID NO: 1881619
agcucuaaucgagaggugu

SEQ ID NO: 2058599 - RNA, 19 nt, Artificial Sequence
  Description of Artificial Sequence: Synthetic oligonucleotide
  Antisense strand to SEQ ID NO: 2058598
acaccucucgauuagagcu

SEQ ID NO: 2058600 - RNA, 19 nt, Artificial Sequence
  Description of Artificial Sequence: Synthetic oligonucleotide
  Sense strand starting at position 3252 of SEQ ID NO: 1881619
cucuaaucgagagguguga

SEQ ID NO: 2058601 - RNA, 19 nt, Artificial Sequence
  Description of Artificial Sequence: Synthetic oligonucleotide
  Antisense strand to SEQ ID NO: 2058600
ucacaccucucgauuagag

SEQ ID NO: 2058602 - RNA, 19 nt, Artificial Sequence
  Description of Artificial Sequence: Synthetic oligonucleotide
  Sense strand starting at position 3261 of SEQ ID NO: 1881619
agaggugugacgggaugaa

SEQ ID NO: 2058603 - RNA, 19 nt, Artificial Sequence
  Description of Artificial Sequence: Synthetic oligonucleotide
  Antisense strand to SEQ ID NO: 2058602
uucaucccgucacaccucu

SEQ ID NO: 2058604 - RNA, 19 nt, Artificial Sequence
  Description of Artificial Sequence: Synthetic oligonucleotide
  Sense strand starting at position 3371 of SEQ ID NO: 1881619
auaguucuacaagggaauu

SEQ ID NO: 2058605 - RNA, 19 nt, Artificial Sequence
  Description of Artificial Sequence: Synthetic oligonucleotide
  Antisense strand to SEQ ID NO: 2058604
aauucccuuguagaacuau

SEQ ID NO: 2058606 - RNA, 19 nt, Artificial Sequence
  Description of Artificial Sequence: Synthetic oligonucleotide
  Sense strand starting at position 41 of SEQ ID NO: 1881620
uuguaugaugaguguaaag

SEQ ID NO: 2058607 - RNA, 19 nt, Artificial Sequence
  Description of Artificial Sequence: Synthetic oligonucleotide
  Antisense strand to SEQ ID NO: 2058606
cuuuacacucaucauacaa

SEQ ID NO: 2058608 - RNA, 19 nt, Artificial Sequence
  Description of Artificial Sequence: Synthetic oligonucleotide
  Sense strand starting at position 43 of SEQ ID NO: 1881620
guaugaugaguguaaaggu

SEQ ID NO: 2058609 - RNA, 19 nt, Artificial Sequence
  Description of Artificial Sequence: Synthetic oligonucleotide
  Antisense strand to SEQ ID NO: 2058608
accuuuacacucaucauac

SEQ ID NO: 2058610 - RNA, 19 nt, Artificial Sequence
  Description of Artificial Sequence: Synthetic oligonucleotide
  Sense strand starting at position 135 of SEQ ID NO: 1881620
cuggacucccuguaacauu

SEQ ID NO: 2058611 - RNA, 19 nt, Artificial Sequence
  Description of Artificial Sequence: Synthetic oligonucleotide
  Antisense strand to SEQ ID NO: 2058610
aauguuacagggaguccag

SEQ ID NO: 2058612 - RNA, 19 nt, Artificial Sequence
  Description of Artificial Sequence: Synthetic oligonucleotide
  Sense strand starting at position 186 of SEQ ID NO: 1881620
aggaaauuauuggcccagu

SEQ ID NO: 2058613 - RNA, 19 nt, Artificial Sequence
  Description of Artificial Sequence: Synthetic oligonucleotide
  Antisense strand to SEQ ID NO: 2058612
acugggccaauaauuuccu

SEQ ID NO: 2058614 - RNA, 19 nt, Artificial Sequence
  Description of Artificial Sequence: Synthetic oligonucleotide
  Sense strand starting at position 249 of SEQ ID NO: 1881620
gaaucaugugaauguucug

SEQ ID NO: 2058615 - RNA, 19 nt, Artificial Sequence
  Description of Artificial Sequence: Synthetic oligonucleotide
  Antisense strand to SEQ ID NO: 2058614
cagaacauucacaugauuc

SEQ ID NO: 2058616 - RNA, 19 nt, Artificial Sequence
  Description of Artificial Sequence: Synthetic oligonucleotide
  Sense strand starting at position 261 of SEQ ID NO: 1881620
uguucugaacugggaaacu

SEQ ID NO: 2058617 - RNA, 19 nt, Artificial Sequence
  Description of Artificial Sequence: Synthetic oligonucleotide
  Antisense strand to SEQ ID NO: 2058616
aguuucccaguucagaaca

SEQ ID NO: 2058618 - RNA, 19 nt, Artificial Sequence
  Description of Artificial Sequence: Synthetic oligonucleotide
  Sense strand starting at position 348 of SEQ ID NO: 1881620
uugucaggucuauauuaga

SEQ ID NO: 2058619 - RNA, 19 nt, Artificial Sequence
  Description of Artificial Sequence: Synthetic oligonucleotide
  Antisense strand to SEQ ID NO: 2058618
ucuaauauagaccugacaa

SEQ ID NO: 2058620 - RNA, 19 nt, Artificial Sequence
  Description of Artificial Sequence: Synthetic oligonucleotide
  Sense strand starting at position 359 of SEQ ID NO: 1881620
auauuagaauucucuagug

SEQ ID NO: 2058621 - RNA, 19 nt, Artificial Sequence
  Description of Artificial Sequence: Synthetic oligonucleotide
  Antisense strand to SEQ ID NO: 2058620
cacuagagaauucuaauau

SEQ ID NO: 2058622 - RNA, 19 nt, Artificial Sequence
  Description of Artificial Sequence: Synthetic oligonucleotide
  Sense strand starting at position 361 of SEQ ID NO: 1881620
auuagaauucucuaguguu

SEQ ID NO: 2058623 - RNA, 19 nt, Artificial Sequence
  Description of Artificial Sequence: Synthetic oligonucleotide
  Antisense strand to SEQ ID NO: 2058622
aacacuagagaauucuaau

SEQ ID NO: 2058624 - RNA, 19 nt, Artificial Sequence
  Description of Artificial Sequence: Synthetic oligonucleotide
  Sense strand starting at position 485 of SEQ ID NO: 1881620
aaguuaaaugcuuagcaug

SEQ ID NO: 2058625 - RNA, 19 nt, Artificial Sequence
  Description of Artificial Sequence: Synthetic oligonucleotide
  Antisense strand to SEQ ID NO: 2058624
caugcuaagcauuuaacuu

SEQ ID NO: 2058626 - RNA, 19 nt, Artificial Sequence
  Description of Artificial Sequence: Synthetic oligonucleotide
  Sense strand starting at position 490 of SEQ ID NO: 1881620
aaaugcuuagcaugggaaa

SEQ ID NO: 2058627 - RNA, 19 nt, Artificial Sequence
  Description of Artificial Sequence: Synthetic oligonucleotide
  Antisense strand to SEQ ID NO: 2058626
uuucccaugcuaagcauuu

SEQ ID NO: 2058628 - RNA, 19 nt, Artificial Sequence
  Description of Artificial Sequence: Synthetic oligonucleotide
  Sense strand starting at position 491 of SEQ ID NO: 1881620
aaugcuuagcaugggaaau

SEQ ID NO: 2058629 - RNA, 19 nt, Artificial Sequence
  Description of Artificial Sequence: Synthetic oligonucleotide
  Antisense strand to SEQ ID NO: 2058628
auuucccaugcuaagcauu

SEQ ID NO: 2058630 - RNA, 19 nt, Artificial Sequence
  Description of Artificial Sequence: Synthetic oligonucleotide
  Sense strand starting at position 560 of SEQ ID NO: 1881620
gucagaaagcaguaacuuu

SEQ ID NO: 2058631 - RNA, 19 nt, Artificial Sequence
  Description of Artificial Sequence: Synthetic oligonucleotide
  Antisense strand to SEQ ID NO: 2058630
aaaguuacugcuuucugac

SEQ ID NO: 2058632 - RNA, 19 nt, Artificial Sequence
  Description of Artificial Sequence: Synthetic oligonucleotide
  Sense strand starting at position 817 of SEQ ID NO: 1881620
cuaaauggugcugauacaa

SEQ ID NO: 2058633 - RNA, 19 nt, Artificial Sequence
  Description of Artificial Sequence: Synthetic oligonucleotide
  Antisense strand to SEQ ID NO: 2058632
uuguaucagcaccauuuag

SEQ ID NO: 2058634 - RNA, 19 nt, Artificial Sequence
  Description of Artificial Sequence: Synthetic oligonucleotide
  Sense strand starting at position 835 of SEQ ID NO: 1881620
auugaucgaauaugagagu

SEQ ID NO: 2058635 - RNA, 19 nt, Artificial Sequence
  Description of Artificial Sequence: Synthetic oligonucleotide
  Antisense strand to SEQ ID NO: 2058634
acucucauauucgaucaau

SEQ ID NO: 2058636 - RNA, 19 nt, Artificial Sequence
  Description of Artificial Sequence: Synthetic oligonucleotide
  Sense strand starting at position 853 of SEQ ID NO: 1881620
ucucaauagcaaggguaau

SEQ ID NO: 2058637 - RNA, 19 nt, Artificial Sequence
  Description of Artificial Sequence: Synthetic oligonucleotide
  Antisense strand to SEQ ID NO: 2058636
auuacccuugcuauugaga

SEQ ID NO: 2058638 - RNA, 19 nt, Artificial Sequence
  Description of Artificial Sequence: Synthetic oligonucleotide
  Sense strand starting at position 993 of SEQ ID NO: 1881620
uguaccauucuagacaugu

SEQ ID NO: 2058639 - RNA, 19 nt, Artificial Sequence
  Description of Artificial Sequence: Synthetic oligonucleotide
  Antisense strand to SEQ ID NO: 2058638
acaugucuagaaugguaca

SEQ ID NO: 2058640 - RNA, 19 nt, Artificial Sequence
  Description of Artificial Sequence: Synthetic oligonucleotide
  Sense strand starting at position 1068 of SEQ ID NO: 1881620
guacuacuuccaugaugac

SEQ ID NO: 2058641 - RNA, 19 nt, Artificial Sequence
  Description of Artificial Sequence: Synthetic oligonucleotide
  Antisense strand to SEQ ID NO: 2058640
gucaucauggaaguaguac

SEQ ID NO: 2058642 - RNA, 19 nt, Artificial Sequence
  Description of Artificial Sequence: Synthetic oligonucleotide
  Sense strand starting at position 1091 of SEQ ID NO: 1881620
caagcuucuggucauugaa

SEQ ID NO: 2058643 - RNA, 19 nt, Artificial Sequence
  Description of Artificial Sequence: Synthetic oligonucleotide
  Antisense strand to SEQ ID NO: 2058642
uucaaugaccagaagcuug

SEQ ID NO: 2058644 - RNA, 19 nt, Artificial Sequence
  Description of Artificial Sequence: Synthetic oligonucleotide
  Sense strand starting at position 1122 of SEQ ID NO: 1881620
uggcaugaccagcauuaau

SEQ ID NO: 2058645 - RNA, 19 nt, Artificial Sequence
  Description of Artificial Sequence: Synthetic oligonucleotide
  Antisense strand to SEQ ID NO: 2058644
auuaaugcuggucaugcca

SEQ ID NO: 2058646 - RNA, 19 nt, Artificial Sequence
  Description of Artificial Sequence: Synthetic oligonucleotide
  Sense strand starting at position 1211 of SEQ ID NO: 1881620
uguaaacuaccuuacaugu

SEQ ID NO: 2058647 - RNA, 19 nt, Artificial Sequence
  Description of Artificial Sequence: Synthetic oligonucleotide
  Antisense strand to SEQ ID NO: 2058646
acauguaagguaguuuaca

SEQ ID NO: 2058648 - RNA, 19 nt, Artificial Sequence
  Description of Artificial Sequence: Synthetic oligonucleotide
  Sense strand starting at position 1316 of SEQ ID NO: 1881620
ucugauacauaugucuaca

SEQ ID NO: 2058649 - RNA, 19 nt, Artificial Sequence
  Description of Artificial Sequence: Synthetic oligonucleotide
  Antisense strand to SEQ ID NO: 2058648
uguagacauauguaucaga

SEQ ID NO: 2058650 - RNA, 19 nt, Artificial Sequence
  Description of Artificial Sequence: Synthetic oligonucleotide
  Sense strand starting at position 1318 of SEQ ID NO: 1881620
ugauacauaugucuacauu

SEQ ID NO: 2058651 - RNA, 19 nt, Artificial Sequence
  Description of Artificial Sequence: Synthetic oligonucleotide
  Antisense strand to SEQ ID NO: 2058650
aauguagacauauguauca

SEQ ID NO: 2058652 - RNA, 19 nt, Artificial Sequence
  Description of Artificial Sequence: Synthetic oligonucleotide
  Sense strand starting at position 1521 of SEQ ID NO: 1881620
auagaacuuuaaccguuaa

SEQ ID NO: 2058653 - RNA, 19 nt, Artificial Sequence
  Description of Artificial Sequence: Synthetic oligonucleotide
  Antisense strand to SEQ ID NO: 2058652
uuaacgguuaaaguucuau

SEQ ID NO: 2058654 - RNA, 19 nt, Artificial Sequence
  Description of Artificial Sequence: Synthetic oligonucleotide
  Sense strand starting at position 1632 of SEQ ID NO: 1881620
guaauuuauuccguugauu

SEQ ID NO: 2058655 - RNA, 19 nt, Artificial Sequence
  Description of Artificial Sequence: Synthetic oligonucleotide
  Antisense strand to SEQ ID NO: 2058654
aaucaacggaauaaauuac

SEQ ID NO: 2058656 - RNA, 19 nt, Artificial Sequence
  Description of Artificial Sequence: Synthetic oligonucleotide
  Sense strand starting at position 1654 of SEQ ID NO: 1881620
uuauuuggucaauguguac

SEQ ID NO: 2058657 - RNA, 19 nt, Artificial Sequence
  Description of Artificial Sequence: Synthetic oligonucleotide
  Antisense strand to SEQ ID NO: 2058656
guacacauugaccaaauaa

SEQ ID NO: 2058658 - RNA, 19 nt, Artificial Sequence
  Description of Artificial Sequence: Synthetic oligonucleotide
  Sense strand starting at position 1834 of SEQ ID NO: 1881620
uuucuagucucauuuguuu

SEQ ID NO: 2058659 - RNA, 19 nt, Artificial Sequence
  Description of Artificial Sequence: Synthetic oligonucleotide
  Antisense strand to SEQ ID NO: 2058658
aaacaaaugagacuagaaa

SEQ ID NO: 2058660 - RNA, 19 nt, Artificial Sequence
  Description of Artificial Sequence: Synthetic oligonucleotide
  Sense strand starting at position 2217 of SEQ ID NO: 1881620
aaacguaugcaauggagaa

SEQ ID NO: 2058661 - RNA, 19 nt, Artificial Sequence
  Description of Artificial Sequence: Synthetic oligonucleotide
  Antisense strand to SEQ ID NO: 2058660
uucuccauugcauacguuu

SEQ ID NO: 2058662 - RNA, 19 nt, Artificial Sequence
  Description of Artificial Sequence: Synthetic oligonucleotide
  Sense strand starting at position 2224 of SEQ ID NO: 1881620
ugcaauggagaauguuuau

SEQ ID NO: 2058663 - RNA, 19 nt, Artificial Sequence
  Description of Artificial Sequence: Synthetic oligonucleotide
  Antisense strand to SEQ ID NO: 2058662
auaaacauucuccauugca

SEQ ID NO: 2058664 - RNA, 19 nt, Artificial Sequence
  Description of Artificial Sequence: Synthetic oligonucleotide
  Sense strand starting at position 2268 of SEQ ID NO: 1881620
aauugauuaguccaguaug

SEQ ID NO: 2058665 - RNA, 19 nt, Artificial Sequence
  Description of Artificial Sequence: Synthetic oligonucleotide
  Antisense strand to SEQ ID NO: 2058664
cauacuggacuaaucaauu

SEQ ID NO: 2058666 - RNA, 19 nt, Artificial Sequence
  Description of Artificial Sequence: Synthetic oligonucleotide
  Sense strand starting at position 2271 of SEQ ID NO: 1881620
ugauuaguccaguaugaug

SEQ ID NO: 2058667 - RNA, 19 nt, Artificial Sequence
  Description of Artificial Sequence: Synthetic oligonucleotide
  Antisense strand to SEQ ID NO: 2058666
caucauacuggacuaauca

SEQ ID NO: 2058668 - RNA, 19 nt, Artificial Sequence
  Description of Artificial Sequence: Synthetic oligonucleotide
  Sense strand starting at position 2509 of SEQ ID NO: 1881620
aagauuccacguuggacaa

SEQ ID NO: 2058669 - RNA, 19 nt, Artificial Sequence
  Description of Artificial Sequence: Synthetic oligonucleotide
  Antisense strand to SEQ ID NO: 2058668
uuguccaacguggaaucuu

SEQ ID NO: 2058670 - RNA, 19 nt, Artificial Sequence
  Description of Artificial Sequence: Synthetic oligonucleotide
  Sense strand starting at position 2643 of SEQ ID NO: 1881620
gggacuuggcuauaauccu

SEQ ID NO: 2058671 - RNA, 19 nt, Artificial Sequence
  Description of Artificial Sequence: Synthetic oligonucleotide
  Antisense strand to SEQ ID NO: 2058670
aggauuauagccaaguccc

SEQ ID NO: 2058672 - RNA, 19 nt, Artificial Sequence
  Description of Artificial Sequence: Synthetic oligonucleotide
  Sense strand starting at position 2685 of SEQ ID NO: 1881620
auacauuaugcggaaggua

SEQ ID NO: 2058673 - RNA, 19 nt, Artificial Sequence
  Description of Artificial Sequence: Synthetic oligonucleotide
  Antisense strand to SEQ ID NO: 2058672
uaccuuccgcauaauguau

SEQ ID NO: 2058674 - RNA, 19 nt, Artificial Sequence
  Description of Artificial Sequence: Synthetic oligonucleotide
  Sense strand starting at position 2867 of SEQ ID NO: 1881620
gcuagcguuggcucaaagu

SEQ ID NO: 2058675 - RNA, 19 nt, Artificial Sequence
  Description of Artificial Sequence: Synthetic oligonucleotide
  Antisense strand to SEQ ID NO: 2058674
acuuugagccaacgcuagc

SEQ ID NO: 2058676 - RNA, 19 nt, Artificial Sequence
  Description of Artificial Sequence: Synthetic oligonucleotide
  Sense strand starting at position 3159 of SEQ ID NO: 1881620
uguugugagauuugccgga

SEQ ID NO: 2058677 - RNA, 19 nt, Artificial Sequence
  Description of Artificial Sequence: Synthetic oligonucleotide
  Antisense strand to SEQ ID NO: 2058676
uccggcaaaucucacaaca

SEQ ID NO: 2058678 - RNA, 19 nt, Artificial Sequence
  Description of Artificial Sequence: Synthetic oligonucleotide
  Sense strand starting at position 3622 of SEQ ID NO: 1881620
cgcugaguucugucagcuc

SEQ ID NO: 2058679 - RNA, 19 nt, Artificial Sequence
  Description of Artificial Sequence: Synthetic oligonucleotide
  Antisense strand to SEQ ID NO: 2058678
gagcugacagaacucagcg

SEQ ID NO: 2058680 - RNA, 19 nt, Artificial Sequence
  Description of Artificial Sequence: Synthetic oligonucleotide
  Sense strand starting at position 3728 of SEQ ID NO: 1881620
aagauuuaucacugccguu

SEQ ID NO: 2058681 - RNA, 19 nt, Artificial Sequence
  Description of Artificial Sequence: Synthetic oligonucleotide
  Antisense strand to SEQ ID NO: 2058680
aacggcagugauaaaucuu

SEQ ID NO: 2058682 - RNA, 19 nt, Artificial Sequence
  Description of Artificial Sequence: Synthetic oligonucleotide
  Sense strand starting at position 3759 of SEQ ID NO: 1881620
gugguugagcaaaguuguu

SEQ ID NO: 2058683 - RNA, 19 nt, Artificial Sequence
  Description of Artificial Sequence: Synthetic oligonucleotide
  Antisense strand to SEQ ID NO: 2058682
aacaacuuugcucaaccac

SEQ ID NO: 2058684 - RNA, 19 nt, Artificial Sequence
  Description of Artificial Sequence: Synthetic oligonucleotide
  Sense strand starting at position 3927 of SEQ ID NO: 1881620
ugcggauccaucuagacau

SEQ ID NO: 2058685 - RNA, 19 nt, Artificial Sequence
  Description of Artificial Sequence: Synthetic oligonucleotide
  Antisense strand to SEQ ID NO: 2058684
augucuagauggauccgca

SEQ ID NO: 2058686 - RNA, 19 nt, Artificial Sequence
  Description of Artificial Sequence: Synthetic oligonucleotide
  Sense strand starting at position 29 of SEQ ID NO: 1881621
guacuaucagaagguaaug

SEQ ID NO: 2058687 - RNA, 19 nt, Artificial Sequence
  Description of Artificial Sequence: Synthetic oligonucleotide
  Antisense strand to SEQ ID NO: 2058686
cauuaccuucugauaguac

SEQ ID NO: 2058688 - RNA, 19 nt, Artificial Sequence
  Description of Artificial Sequence: Synthetic oligonucleotide
  Sense strand starting at position 34 of SEQ ID NO: 1881621
aucagaagguaaugaauuu

SEQ ID NO: 2058689 - RNA, 19 nt, Artificial Sequence
  Description of Artificial Sequence: Synthetic oligonucleotide
  Antisense strand to SEQ ID NO: 2058688
aaauucauuaccuucugau

SEQ ID NO: 2058690 - RNA, 19 nt, Artificial Sequence
  Description of Artificial Sequence: Synthetic oligonucleotide
  Sense strand starting at position 263 of SEQ ID NO: 1881621
gugggcuauauuugcucaa

SEQ ID NO: 2058691 - RNA, 19 nt, Artificial Sequence
  Description of Artificial Sequence: Synthetic oligonucleotide
  Antisense strand to SEQ ID NO: 2058690
uugagcaaauauagcccac

SEQ ID NO: 2058692 - RNA, 19 nt, Artificial Sequence
  Description of Artificial Sequence: Synthetic oligonucleotide
  Sense strand starting at position 344 of SEQ ID NO: 1881621
uuuguuuaaugagugauac

SEQ ID NO: 2058693 - RNA, 19 nt, Artificial Sequence
  Description of Artificial Sequence: Synthetic oligonucleotide
  Antisense strand to SEQ ID NO: 2058692
guaucacucauuaaacaaa

SEQ ID NO: 2058694 - RNA, 19 nt, Artificial Sequence
  Description of Artificial Sequence: Synthetic oligonucleotide
  Sense strand starting at position 345 of SEQ ID NO: 1881621
uuguuuaaugagugauaca

SEQ ID NO: 2058695 - RNA, 19 nt, Artificial Sequence
  Description of Artificial Sequence: Synthetic oligonucleotide
  Antisense strand to SEQ ID NO: 2058694
uguaucacucauuaaacaa

SEQ ID NO: 2058696 - RNA, 19 nt, Artificial Sequence
  Description of Artificial Sequence: Synthetic oligonucleotide
  Sense strand starting at position 359 of SEQ ID NO: 1881621
auacauaugcuugguuuaa

SEQ ID NO: 2058697 - RNA, 19 nt, Artificial Sequence
  Description of Artificial Sequence: Synthetic oligonucleotide
  Antisense strand to SEQ ID NO: 2058696
uuaaaccaagcauauguau

SEQ ID NO: 2058698 - RNA, 19 nt, Artificial Sequence
  Description of Artificial Sequence: Synthetic oligonucleotide
  Sense strand starting at position 361 of SEQ ID NO: 1881621
acauaugcuugguuuaaau

SEQ ID NO: 2058699 - RNA, 19 nt, Artificial Sequence
  Description of Artificial Sequence: Synthetic oligonucleotide
  Antisense strand to SEQ ID NO: 2058698
auuuaaaccaagcauaugu

SEQ ID NO: 2058700 - RNA, 19 nt, Artificial Sequence
  Description of Artificial Sequence: Synthetic oligonucleotide
  Sense strand starting at position 363 of SEQ ID NO: 1881621
auaugcuugguuuaaaugu

SEQ ID NO: 2058701 - RNA, 19 nt, Artificial Sequence
  Description of Artificial Sequence: Synthetic oligonucleotide
  Antisense strand to SEQ ID NO: 2058700
acauuuaaaccaagcauau

SEQ ID NO: 2058702 - RNA, 19 nt, Artificial Sequence
  Description of Artificial Sequence: Synthetic oligonucleotide
  Sense strand starting at position 370 of SEQ ID NO: 1881621
ugguuuaaauguguaggaa

SEQ ID NO: 2058703 - RNA, 19 nt, Artificial Sequence
  Description of Artificial Sequence: Synthetic oligonucleotide
  Antisense strand to SEQ ID NO: 2058702
uuccuacacauuuaaacca

SEQ ID NO: 2058704 - RNA, 19 nt, Artificial Sequence
  Description of Artificial Sequence: Synthetic oligonucleotide
  Sense strand starting at position 371 of SEQ ID NO: 1881621
gguuuaaauguguaggaau

SEQ ID NO: 2058705 - RNA, 19 nt, Artificial Sequence
  Description of Artificial Sequence: Synthetic oligonucleotide
  Antisense strand to SEQ ID NO: 2058704
auuccuacacauuuaaacc

SEQ ID NO: 2058706 - RNA, 19 nt, Artificial Sequence
  Description of Artificial Sequence: Synthetic oligonucleotide
  Sense strand starting at position 672 of SEQ ID NO: 1881621
augcuaugucuuuagauau

SEQ ID NO: 2058707 - RNA, 19 nt, Artificial Sequence
  Description of Artificial Sequence: Synthetic oligonucleotide
  Antisense strand to SEQ ID NO: 2058706
auaucuaaagacauagcau

SEQ ID NO: 2058708 - RNA, 19 nt, Artificial Sequence
  Description of Artificial Sequence: Synthetic oligonucleotide
  Sense strand starting at position 1152 of SEQ ID NO: 1881621
aguccagauuaguugaaga

SEQ ID NO: 2058709 - RNA, 19 nt, Artificial Sequence
  Description of Artificial Sequence: Synthetic oligonucleotide
  Antisense strand to SEQ ID NO: 2058708
ucuucaacuaaucuggacu

SEQ ID NO: 2058710 - RNA, 19 nt, Artificial Sequence
  Description of Artificial Sequence: Synthetic oligonucleotide
  Sense strand starting at position 1198 of SEQ ID NO: 1881621
auaccaaauguauacguau

SEQ ID NO: 2058711 - RNA, 19 nt, Artificial Sequence
  Description of Artificial Sequence: Synthetic oligonucleotide
  Antisense strand to SEQ ID NO: 2058710
auacguauacauuugguau

SEQ ID NO: 2058712 - RNA, 19 nt, Artificial Sequence
  Description of Artificial Sequence: Synthetic oligonucleotide
  Sense strand starting at position 1204 of SEQ ID NO: 1881621
aauguauacguaugcauuu

SEQ ID NO: 2058713 - RNA, 19 nt, Artificial Sequence
  Description of Artificial Sequence: Synthetic oligonucleotide
  Antisense strand to SEQ ID NO: 2058712
aaaugcauacguauacauu

SEQ ID NO: 2058714 - RNA, 19 nt, Artificial Sequence
  Description of Artificial Sequence: Synthetic oligonucleotide
  Sense strand starting at position 1299 of SEQ ID NO: 1881621
ggugauuaauuagccauua

SEQ ID NO: 2058715 - RNA, 19 nt, Artificial Sequence
  Description of Artificial Sequence: Synthetic oligonucleotide
  Antisense strand to SEQ ID NO: 2058714
uaauggcuaauuaaucacc

SEQ ID NO: 2058716 - RNA, 19 nt, Artificial Sequence
  Description of Artificial Sequence: Synthetic oligonucleotide
  Sense strand starting at position 1300 of SEQ ID NO: 1881621
gugauuaauuagccauuaa

SEQ ID NO: 2058717 - RNA, 19 nt, Artificial Sequence
  Description of Artificial Sequence: Synthetic oligonucleotide
  Antisense strand to SEQ ID NO: 2058716
uuaauggcuaauuaaucac

SEQ ID NO: 2058718 - RNA, 19 nt, Artificial Sequence
  Description of Artificial Sequence: Synthetic oligonucleotide
  Sense strand starting at position 1311 of SEQ ID NO: 1881621
gccauuaaaguaggagaau

SEQ ID NO: 2058719 - RNA, 19 nt, Artificial Sequence
  Description of Artificial Sequence: Synthetic oligonucleotide
  Antisense strand to SEQ ID NO: 2058718
auucuccuacuuuaauggc

SEQ ID NO: 2058720 - RNA, 19 nt, Artificial Sequence
  Description of Artificial Sequence: Synthetic oligonucleotide
  Sense strand starting at position 1395 of SEQ ID NO: 1881621
cugguuagagaccgauuaa

SEQ ID NO: 2058721 - RNA, 19 nt, Artificial Sequence
  Description of Artificial Sequence: Synthetic oligonucleotide
  Antisense strand to SEQ ID NO: 2058720
uuaaucggucucuaaccag

SEQ ID NO: 2058722 - RNA, 19 nt, Artificial Sequence
  Description of Artificial Sequence: Synthetic oligonucleotide
  Sense strand starting at position 2174 of SEQ ID NO: 1881621
guagaauuauuaguuucca

SEQ ID NO: 2058723 - RNA, 19 nt, Artificial Sequence
  Description of Artificial Sequence: Synthetic oligonucleotide
  Antisense strand to SEQ ID NO: 2058722
uggaaacuaauaauucuac

SEQ ID NO: 2058724 - RNA, 19 nt, Artificial Sequence
  Description of Artificial Sequence: Synthetic oligonucleotide
  Sense strand starting at position 2428 of SEQ ID NO: 1881621
ccaagaucucaauggcuua

SEQ ID NO: 2058725 - RNA, 19 nt, Artificial Sequence
  Description of Artificial Sequence: Synthetic oligonucleotide
  Antisense strand to SEQ ID NO: 2058724
uaagccauugagaucuugg

SEQ ID NO: 2058726 - RNA, 19 nt, Artificial Sequence
  Description of Artificial Sequence: Synthetic oligonucleotide
  Sense strand starting at position 2450 of SEQ ID NO: 1881621
aaggaagguuucuuuguca

SEQ ID NO: 2058727 - RNA, 19 nt, Artificial Sequence
  Description of Artificial Sequence: Synthetic oligonucleotide
  Antisense strand to SEQ ID NO: 2058726
ugacaaagaaaccuuccuu

SEQ ID NO: 2058728 - RNA, 19 nt, Artificial Sequence
  Description of Artificial Sequence: Synthetic oligonucleotide
  Sense strand starting at position 2542 of SEQ ID NO: 1881621
cuacuaaagugguucugau

SEQ ID NO: 2058729 - RNA, 19 nt, Artificial Sequence
  Description of Artificial Sequence: Synthetic oligonucleotide
  Antisense strand to SEQ ID NO: 2058728
aucagaaccacuuuaguag

SEQ ID NO: 2058730 - RNA, 19 nt, Artificial Sequence
  Description of Artificial Sequence: Synthetic oligonucleotide
  Sense strand starting at position 2572 of SEQ ID NO: 1881621
aguaaugacggaggaucua

SEQ ID NO: 2058731 - RNA, 19 nt, Artificial Sequence
  Description of Artificial Sequence: Synthetic oligonucleotide
  Antisense strand to SEQ ID NO: 2058730
uagauccuccgucauuacu

SEQ ID NO: 2058732 - RNA, 19 nt, Artificial Sequence
  Description of Artificial Sequence: Synthetic oligonucleotide
  Sense strand starting at position 2587 of SEQ ID NO: 1881621
ucuagaggaugcucugaaa

SEQ ID NO: 2058733 - RNA, 19 nt, Artificial Sequence
  Description of Artificial Sequence: Synthetic oligonucleotide
  Antisense strand to SEQ ID NO: 2058732
uuucagagcauccucuaga

SEQ ID NO: 2058734 - RNA, 19 nt, Artificial Sequence
  Description of Artificial Sequence: Synthetic oligonucleotide
  Sense strand starting at position 2712 of SEQ ID NO: 1881621
acaggaauaguuugugcaa

SEQ ID NO: 2058735 - RNA, 19 nt, Artificial Sequence
  Description of Artificial Sequence: Synthetic oligonucleotide
  Antisense strand to SEQ ID NO: 2058734
uugcacaaacuauuccugu

SEQ ID NO: 2058736 - RNA, 19 nt, Artificial Sequence
  Description of Artificial Sequence: Synthetic oligonucleotide
  Sense strand starting at position 2715 of SEQ ID NO: 1881621
ggaauaguuugugcaagaa

SEQ ID NO: 2058737 - RNA, 19 nt, Artificial Sequence
  Description of Artificial Sequence: Synthetic oligonucleotide
  Antisense strand to SEQ ID NO: 2058736
uucuugcacaaacuauucc

SEQ ID NO: 2058738 - RNA, 19 nt, Artificial Sequence
  Description of Artificial Sequence: Synthetic oligonucleotide
  Sense strand starting at position 2719 of SEQ ID NO: 1881621
uaguuugugcaagaacaua

SEQ ID NO: 2058739 - RNA, 19 nt, Artificial Sequence
  Description of Artificial Sequence: Synthetic oligonucleotide
  Antisense strand to SEQ ID NO: 2058738
uauguucuugcacaaacua

SEQ ID NO: 2058740 - RNA, 19 nt, Artificial Sequence
  Description of Artificial Sequence: Synthetic oligonucleotide
  Sense strand starting at position 2752 of SEQ ID NO: 1881621
auuauaauguggucaauuc

SEQ ID NO: 2058741 - RNA, 19 nt, Artificial Sequence
  Description of Artificial Sequence: Synthetic oligonucleotide
  Antisense strand to SEQ ID NO: 2058740
gaauugaccacauuauaau

SEQ ID NO: 2058742 - RNA, 19 nt, Artificial Sequence
  Description of Artificial Sequence: Synthetic oligonucleotide
  Sense strand starting at position 2753 of SEQ ID NO: 1881621
uuauaauguggucaauucu

SEQ ID NO: 2058743 - RNA, 19 nt, Artificial Sequence
  Description of Artificial Sequence: Synthetic oligonucleotide
  Antisense strand to SEQ ID NO: 2058742
agaauugaccacauuauaa

SEQ ID NO: 2058744 - RNA, 19 nt, Artificial Sequence
  Description of Artificial Sequence: Synthetic oligonucleotide
  Sense strand starting at position 2761 of SEQ ID NO: 1881621
uggucaauucuuuaagcau

SEQ ID NO: 2058745 - RNA, 19 nt, Artificial Sequence
  Description of Artificial Sequence: Synthetic oligonucleotide
  Antisense strand to SEQ ID NO: 2058744
augcuuaaagaauugacca

SEQ ID NO: 2058746 - RNA, 19 nt, Artificial Sequence
  Description of Artificial Sequence: Synthetic oligonucleotide
  Sense strand starting at position 2922 of SEQ ID NO: 1881621
cccuuaaucuggcuuaaag

SEQ ID NO: 2058747 - RNA, 19 nt, Artificial Sequence
  Description of Artificial Sequence: Synthetic oligonucleotide
  Antisense strand to SEQ ID NO: 2058746
cuuuaagccagauuaaggg

SEQ ID NO: 2058748 - RNA, 19 nt, Artificial Sequence
  Description of Artificial Sequence: Synthetic oligonucleotide
  Sense strand starting at position 2972 of SEQ ID NO: 1881621
ucuccauaagauugaggua

SEQ ID NO: 2058749 - RNA, 19 nt, Artificial Sequence
  Description of Artificial Sequence: Synthetic oligonucleotide
  Antisense strand to SEQ ID NO: 2058748
uaccucaaucuuauggaga

SEQ ID NO: 2058750 - RNA, 19 nt, Artificial Sequence
  Description of Artificial Sequence: Synthetic oligonucleotide
  Sense strand starting at position 3026 of SEQ ID NO: 1881621
acagcucuggucuaauacu

SEQ ID NO: 2058751 - RNA, 19 nt, Artificial Sequence
  Description of Artificial Sequence: Synthetic oligonucleotide
  Antisense strand to SEQ ID NO: 2058750
aguauuagaccagagcugu

SEQ ID NO: 2058752 - RNA, 19 nt, Artificial Sequence
  Description of Artificial Sequence: Synthetic oligonucleotide
  Sense strand starting at position 3049 of SEQ ID NO: 1881621
ugacuacauuuagaagagu

SEQ ID NO: 2058753 - RNA, 19 nt, Artificial Sequence
  Description of Artificial Sequence: Synthetic oligonucleotide
  Antisense strand to SEQ ID NO: 2058752
acucuucuaaauguaguca

SEQ ID NO: 2058754 - RNA, 19 nt, Artificial Sequence
  Description of Artificial Sequence: Synthetic oligonucleotide
  Sense strand starting at position 3286 of SEQ ID NO: 1881621
ccuuuagaaucauuggcaa

SEQ ID NO: 2058755 - RNA, 19 nt, Artificial Sequence
  Description of Artificial Sequence: Synthetic oligonucleotide
  Antisense strand to SEQ ID NO: 2058754
uugccaaugauucuaaagg

SEQ ID NO: 2058756 - RNA, 19 nt, Artificial Sequence
  Description of Artificial Sequence: Synthetic oligonucleotide
  Sense strand starting at position 3289 of SEQ ID NO: 1881621
uuagaaucauuggcaauau

SEQ ID NO: 2058757 - RNA, 19 nt, Artificial Sequence
  Description of Artificial Sequence: Synthetic oligonucleotide
  Antisense strand to SEQ ID NO: 2058756
auauugccaaugauucuaa

SEQ ID NO: 2058758 - RNA, 19 nt, Artificial Sequence
  Description of Artificial Sequence: Synthetic oligonucleotide
  Sense strand starting at position 3875 of SEQ ID NO: 1881621
ucagacagauuuggaagaa

SEQ ID NO: 2058759 - RNA, 19 nt, Artificial Sequence
  Description of Artificial Sequence: Synthetic oligonucleotide
  Antisense strand to SEQ ID NO: 2058758
uucuuccaaaucugucuga

SEQ ID NO: 2058760 - RNA, 19 nt, Artificial Sequence
  Description of Artificial Sequence: Synthetic oligonucleotide
  Sense strand starting at position 3907 of SEQ ID NO: 1881621
gcaagaauugagugcugaa

SEQ ID NO: 2058761 - RNA, 19 nt, Artificial Sequence
  Description of Artificial Sequence: Synthetic oligonucleotide
  Antisense strand to SEQ ID NO: 2058760
uucagcacucaauucuugc

SEQ ID NO: 2058762 - RNA, 19 nt, Artificial Sequence
  Description of Artificial Sequence: Synthetic oligonucleotide
  Sense strand starting at position 3930 of SEQ ID NO: 1881621
aggcaccugugacuuaauu

SEQ ID NO: 2058763 - RNA, 19 nt, Artificial Sequence
  Description of Artificial Sequence: Synthetic oligonucleotide
  Antisense strand to SEQ ID NO: 2058762
aauuaagucacaggugccu

SEQ ID NO: 2058764 - RNA, 19 nt, Artificial Sequence
  Description of Artificial Sequence: Synthetic oligonucleotide
  Sense strand starting at position 3980 of SEQ ID NO: 1881621
acguaugugcuuucaugua

SEQ ID NO: 2058765 - RNA, 19 nt, Artificial Sequence
  Description of Artificial Sequence: Synthetic oligonucleotide
  Antisense strand to SEQ ID NO: 2058764
uacaugaaagcacauacgu

SEQ ID NO: 2058766 - RNA, 19 nt, Artificial Sequence
  Description of Artificial Sequence: Synthetic oligonucleotide
  Sense strand starting at position 4 of SEQ ID NO: 1881622
acuauugugcuggaaggua

SEQ ID NO: 2058767 - RNA, 19 nt, Artificial Sequence
  Description of Artificial Sequence: Synthetic oligonucleotide
  Antisense strand to SEQ ID NO: 2058766
uaccuuccagcacaauagu

SEQ ID NO: 2058768 - RNA, 19 nt, Artificial Sequence
  Description of Artificial Sequence: Synthetic oligonucleotide
  Sense strand starting at position 204 of SEQ ID NO: 1881622
ucugucaacucuuugaaag

SEQ ID NO: 2058769 - RNA, 19 nt, Artificial Sequence
  Description of Artificial Sequence: Synthetic oligonucleotide
  Antisense strand to SEQ ID NO: 2058768
cuuucaaagaguugacaga

SEQ ID NO: 2058770 - RNA, 19 nt, Artificial Sequence
  Description of Artificial Sequence: Synthetic oligonucleotide
  Sense strand starting at position 205 of SEQ ID NO: 1881622
cugucaacucuuugaaagg

SEQ ID NO: 2058771 - RNA, 19 nt, Artificial Sequence
  Description of Artificial Sequence: Synthetic oligonucleotide
  Antisense strand to SEQ ID NO: 2058770
ccuuucaaagaguugacag

SEQ ID NO: 2058772 - RNA, 19 nt, Artificial Sequence
  Description of Artificial Sequence: Synthetic oligonucleotide
  Sense strand starting at position 215 of SEQ ID NO: 1881622
uuugaaaggcauuacuuua

SEQ ID NO: 2058773 - RNA, 19 nt, Artificial Sequence
  Description of Artificial Sequence: Synthetic oligonucleotide
  Antisense strand to SEQ ID NO: 2058772
uaaaguaaugccuuucaaa

SEQ ID NO: 2058774 - RNA, 19 nt, Artificial Sequence
  Description of Artificial Sequence: Synthetic oligonucleotide
  Sense strand starting at position 265 of SEQ ID NO: 1881622
uaaguacaggcaugaguau

SEQ ID NO: 2058775 - RNA, 19 nt, Artificial Sequence
  Description of Artificial Sequence: Synthetic oligonucleotide
  Antisense strand to SEQ ID NO: 2058774
auacucaugccuguacuua

SEQ ID NO: 2058776 - RNA, 19 nt, Artificial Sequence
  Description of Artificial Sequence: Synthetic oligonucleotide
  Sense strand starting at position 266 of SEQ ID NO: 1881622
aaguacaggcaugaguaua

SEQ ID NO: 2058777 - RNA, 19 nt, Artificial Sequence
  Description of Artificial Sequence: Synthetic oligonucleotide
  Antisense strand to SEQ ID NO: 2058776
uauacucaugccuguacuu

SEQ ID NO: 2058778 - RNA, 19 nt, Artificial Sequence
  Description of Artificial Sequence: Synthetic oligonucleotide
  Sense strand starting at position 332 of SEQ ID NO: 1881622
gcuauaaucuaguuaaaga

SEQ ID NO: 2058779 - RNA, 19 nt, Artificial Sequence
  Description of Artificial Sequence: Synthetic oligonucleotide
  Antisense strand to SEQ ID NO: 2058778
ucuuuaacuagauuauagc

SEQ ID NO: 2058780 - RNA, 19 nt, Artificial Sequence
  Description of Artificial Sequence: Synthetic oligonucleotide
  Sense strand starting at position 434 of SEQ ID NO: 1881622
uggcuaagauguuuagaga

SEQ ID NO: 2058781 - RNA, 19 nt, Artificial Sequence
  Description of Artificial Sequence: Synthetic oligonucleotide
  Antisense strand to SEQ ID NO: 2058780
ucucuaaacaucuuagcca

SEQ ID NO: 2058782 - RNA, 19 nt, Artificial Sequence
  Description of Artificial Sequence: Synthetic oligonucleotide
  Sense strand starting at position 475 of SEQ ID NO: 1881622
uucccugaauuguuagaac

SEQ ID NO: 2058783 - RNA, 19 nt, Artificial Sequence
  Description of Artificial Sequence: Synthetic oligonucleotide
  Antisense strand to SEQ ID NO: 2058782
guucuaacaauucagggaa

SEQ ID NO: 2058784 - RNA, 19 nt, Artificial Sequence
  Description of Artificial Sequence: Synthetic oligonucleotide
  Sense strand starting at position 550 of SEQ ID NO: 1881622
gggcauagaaucuguaagu

SEQ ID NO: 2058785 - RNA, 19 nt, Artificial Sequence
  Description of Artificial Sequence: Synthetic oligonucleotide
  Antisense strand to SEQ ID NO: 2058784
acuuacagauucuaugccc

SEQ ID NO: 2058786 - RNA, 19 nt, Artificial Sequence
  Description of Artificial Sequence: Synthetic oligonucleotide
  Sense strand starting at position 551 of SEQ ID NO: 1881622
ggcauagaaucuguaagug

SEQ ID NO: 2058787 - RNA, 19 nt, Artificial Sequence
  Description of Artificial Sequence: Synthetic oligonucleotide
  Antisense strand to SEQ ID NO: 2058786
cacuuacagauucuaugcc

SEQ ID NO: 2058788 - RNA, 19 nt, Artificial Sequence
  Description of Artificial Sequence: Synthetic oligonucleotide
  Sense strand starting at position 561 of SEQ ID NO: 1881622
cuguaagugcuccaacaaa

SEQ ID NO: 2058789 - RNA, 19 nt, Artificial Sequence
  Description of Artificial Sequence: Synthetic oligonucleotide
  Antisense strand to SEQ ID NO: 2058788
uuuguuggagcacuuacag

SEQ ID NO: 2058790 - RNA, 19 nt, Artificial Sequence
  Description of Artificial Sequence: Synthetic oligonucleotide
  Sense strand starting at position 617 of SEQ ID NO: 1881622
ggcuguuaaguguaaauac

SEQ ID NO: 2058791 - RNA, 19 nt, Artificial Sequence
  Description of Artificial Sequence: Synthetic oligonucleotide
  Antisense strand to SEQ ID NO: 2058790
guauuuacacuuaacagcc

SEQ ID NO: 2058792 - RNA, 19 nt, Artificial Sequence
  Description of Artificial Sequence: Synthetic oligonucleotide
  Sense strand starting at position 878 of SEQ ID NO: 1881622
gggaauaaauaauacccaa

SEQ ID NO: 2058793 - RNA, 19 nt, Artificial Sequence
  Description of Artificial Sequence: Synthetic oligonucleotide
  Antisense strand to SEQ ID NO: 2058792
uuggguauuauuuauuccc

SEQ ID NO: 2058794 - RNA, 19 nt, Artificial Sequence
  Description of Artificial Sequence: Synthetic oligonucleotide
  Sense strand starting at position 930 of SEQ ID NO: 1881622
guaugaagugcuuacugaa

SEQ ID NO: 2058795 - RNA, 19 nt, Artificial Sequence
  Description of Artificial Sequence: Synthetic oligonucleotide
  Antisense strand to SEQ ID NO: 2058794
uucaguaagcacuucauac

SEQ ID NO: 2058796 - RNA, 19 nt, Artificial Sequence
  Description of Artificial Sequence: Synthetic oligonucleotide
  Sense strand starting at position 955 of SEQ ID NO: 1881622
gagauaaauuaguuucugu

SEQ ID NO: 2058797 - RNA, 19 nt, Artificial Sequence
  Description of Artificial Sequence: Synthetic oligonucleotide
  Antisense strand to SEQ ID NO: 2058796
acagaaacuaauuuaucuc

SEQ ID NO: 2058798 - RNA, 19 nt, Artificial Sequence
  Description of Artificial Sequence: Synthetic oligonucleotide
  Sense strand starting at position 1002 of SEQ ID NO: 1881622
gaaugaagguagccucuaa

SEQ ID NO: 2058799 - RNA, 19 nt, Artificial Sequence
  Description of Artificial Sequence: Synthetic oligonucleotide
  Antisense strand to SEQ ID NO: 2058798
uuagaggcuaccuucauuc

SEQ ID NO: 2058800 - RNA, 19 nt, Artificial Sequence
  Description of Artificial Sequence: Synthetic oligonucleotide
  Sense strand starting at position 1006 of SEQ ID NO: 1881622
gaagguagccucuaauaua

SEQ ID NO: 2058801 - RNA, 19 nt, Artificial Sequence
  Description of Artificial Sequence: Synthetic oligonucleotide
  Antisense strand to SEQ ID NO: 2058800
uauauuagaggcuaccuuc

SEQ ID NO: 2058802 - RNA, 19 nt, Artificial Sequence
  Description of Artificial Sequence: Synthetic oligonucleotide
  Sense strand starting at position 1565 of SEQ ID NO: 1881622
guacuuucugcugauccaa

SEQ ID NO: 2058803 - RNA, 19 nt, Artificial Sequence
  Description of Artificial Sequence: Synthetic oligonucleotide
  Antisense strand to SEQ ID NO: 2058802
uuggaucagcagaaaguac

SEQ ID NO: 2058804 - RNA, 19 nt, Artificial Sequence
  Description of Artificial Sequence: Synthetic oligonucleotide
  Sense strand starting at position 1612 of SEQ ID NO: 1881622
cuagucacacaauggauau

SEQ ID NO: 2058805 - RNA, 19 nt, Artificial Sequence
  Description of Artificial Sequence: Synthetic oligonucleotide
  Antisense strand to SEQ ID NO: 2058804
auauccauugugugacuag

SEQ ID NO: 2058806 - RNA, 19 nt, Artificial Sequence
  Description of Artificial Sequence: Synthetic oligonucleotide
  Sense strand starting at position 1791 of SEQ ID NO: 1881622
ucacauaaucucggagaug

SEQ ID NO: 2058807 - RNA, 19 nt, Artificial Sequence
  Description of Artificial Sequence: Synthetic oligonucleotide
  Antisense strand to SEQ ID NO: 2058806
caucuccgagauuauguga

SEQ ID NO: 2058808 - RNA, 19 nt, Artificial Sequence
  Description of Artificial Sequence: Synthetic oligonucleotide
  Sense strand starting at position 1882 of SEQ ID NO: 1881622
cuugucaugcuguagaaag

SEQ ID NO: 2058809 - RNA, 19 nt, Artificial Sequence
  Description of Artificial Sequence: Synthetic oligonucleotide
  Antisense strand to SEQ ID NO: 2058808
cuuucuacagcaugacaag

SEQ ID NO: 2058810 - RNA, 19 nt, Artificial Sequence
  Description of Artificial Sequence: Synthetic oligonucleotide
  Sense strand starting at position 2081 of SEQ ID NO: 1881622
cguaauacuguuuacauga

SEQ ID NO: 2058811 - RNA, 19 nt, Artificial Sequence
  Description of Artificial Sequence: Synthetic oligonucleotide
  Antisense strand to SEQ ID NO: 2058810
ucauguaaacaguauuacg

SEQ ID NO: 2058812 - RNA, 19 nt, Artificial Sequence
  Description of Artificial Sequence: Synthetic oligonucleotide
  Sense strand starting at position 2117 of SEQ ID NO: 1881622
gaauguuuaugaccacagu

SEQ ID NO: 2058813 - RNA, 19 nt, Artificial Sequence
  Description of Artificial Sequence: Synthetic oligonucleotide
  Antisense strand to SEQ ID NO: 2058812
acuguggucauaaacauuc

SEQ ID NO: 2058814 - RNA, 19 nt, Artificial Sequence
  Description of Artificial Sequence: Synthetic oligonucleotide
  Sense strand starting at position 2120 of SEQ ID NO: 1881622
uguuuaugaccacaguaag

SEQ ID NO: 2058815 - RNA, 19 nt, Artificial Sequence
  Description of Artificial Sequence: Synthetic oligonucleotide
  Antisense strand to SEQ ID NO: 2058814
cuuacuguggucauaaaca

SEQ ID NO: 2058816 - RNA, 19 nt, Artificial Sequence
  Description of Artificial Sequence: Synthetic oligonucleotide
  Sense strand starting at position 2134 of SEQ ID NO: 1881622
guaagaguauuacuaccga

SEQ ID NO: 2058817 - RNA, 19 nt, Artificial Sequence
  Description of Artificial Sequence: Synthetic oligonucleotide
  Antisense strand to SEQ ID NO: 2058816
ucgguaguaauacucuuac

SEQ ID NO: 2058818 - RNA, 19 nt, Artificial Sequence
  Description of Artificial Sequence: Synthetic oligonucleotide
  Sense strand starting at position 2549 of SEQ ID NO: 1881622
gcaugaugugaugggaauu

SEQ ID NO: 2058819 - RNA, 19 nt, Artificial Sequence
  Description of Artificial Sequence: Synthetic oligonucleotide
  Antisense strand to SEQ ID NO: 2058818
aauucccaucacaucaugc

SEQ ID NO: 2058820 - RNA, 19 nt, Artificial Sequence
  Description of Artificial Sequence: Synthetic oligonucleotide
  Sense strand starting at position 2640 of SEQ ID NO: 1881622
agaugcauagugcaaauua

SEQ ID NO: 2058821 - RNA, 19 nt, Artificial Sequence
  Description of Artificial Sequence: Synthetic oligonucleotide
  Antisense strand to SEQ ID NO: 2058820
uaauuugcacuaugcaucu

SEQ ID NO: 2058822 - RNA, 19 nt, Artificial Sequence
  Description of Artificial Sequence: Synthetic oligonucleotide
  Sense strand starting at position 2982 of SEQ ID NO: 1881622
agaugaacucucugcaaga

SEQ ID NO: 2058823 - RNA, 19 nt, Artificial Sequence
  Description of Artificial Sequence: Synthetic oligonucleotide
  Antisense strand to SEQ ID NO: 2058822
ucuugcagagaguucaucu

SEQ ID NO: 2058824 - RNA, 19 nt, Artificial Sequence
  Description of Artificial Sequence: Synthetic oligonucleotide
  Sense strand starting at position 3122 of SEQ ID NO: 1881622
uuggauuaauccuuauguu

SEQ ID NO: 2058825 - RNA, 19 nt, Artificial Sequence
  Description of Artificial Sequence: Synthetic oligonucleotide
  Antisense strand to SEQ ID NO: 2058824
aacauaaggauuaauccaa

SEQ ID NO: 2058826 - RNA, 19 nt, Artificial Sequence
  Description of Artificial Sequence: Synthetic oligonucleotide
  Sense strand starting at position 3123 of SEQ ID NO: 1881622
uggauuaauccuuauguug

SEQ ID NO: 2058827 - RNA, 19 nt, Artificial Sequence
  Description of Artificial Sequence: Synthetic oligonucleotide
  Antisense strand to SEQ ID NO: 2058826
caacauaaggauuaaucca

SEQ ID NO: 2058828 - RNA, 19 nt, Artificial Sequence
  Description of Artificial Sequence: Synthetic oligonucleotide
  Sense strand starting at position 3179 of SEQ ID NO: 1881622
uaaugugucuuaguggaaa

SEQ ID NO: 2058829 - RNA, 19 nt, Artificial Sequence
  Description of Artificial Sequence: Synthetic oligonucleotide
  Antisense strand to SEQ ID NO: 2058828
uuuccacuaagacacauua

SEQ ID NO: 2058830 - RNA, 19 nt, Artificial Sequence
  Description of Artificial Sequence: Synthetic oligonucleotide
  Sense strand starting at position 3181 of SEQ ID NO: 1881622
augugucuuaguggaaaug

SEQ ID NO: 2058831 - RNA, 19 nt, Artificial Sequence
  Description of Artificial Sequence: Synthetic oligonucleotide
  Antisense strand to SEQ ID NO: 2058830
cauuuccacuaagacacau

SEQ ID NO: 2058832 - RNA, 19 nt, Artificial Sequence
  Description of Artificial Sequence: Synthetic oligonucleotide
  Sense strand starting at position 3268 of SEQ ID NO: 1881622
caugauauuuacugaggau

SEQ ID NO: 2058833 - RNA, 19 nt, Artificial Sequence
  Description of Artificial Sequence: Synthetic oligonucleotide
  Antisense strand to SEQ ID NO: 2058832
auccucaguaaauaucaug

SEQ ID NO: 2058834 - RNA, 19 nt, Artificial Sequence
  Description of Artificial Sequence: Synthetic oligonucleotide
  Sense strand starting at position 3282 of SEQ ID NO: 1881622
aggaucuggugucuuauga

SEQ ID NO: 2058835 - RNA, 19 nt, Artificial Sequence
  Description of Artificial Sequence: Synthetic oligonucleotide
  Antisense strand to SEQ ID NO: 2058834
ucauaagacaccagauccu

SEQ ID NO: 2058836 - RNA, 19 nt, Artificial Sequence
  Description of Artificial Sequence: Synthetic oligonucleotide
  Sense strand starting at position 3319 of SEQ ID NO: 1881622
augaaauaagagugcacaa

SEQ ID NO: 2058837 - RNA, 19 nt, Artificial Sequence
  Description of Artificial Sequence: Synthetic oligonucleotide
  Antisense strand to SEQ ID NO: 2058836
uugugcacucuuauuucau

SEQ ID NO: 2058838 - RNA, 19 nt, Artificial Sequence
  Description of Artificial Sequence: Synthetic oligonucleotide
  Sense strand starting at position 3422 of SEQ ID NO: 1881622
gcuuguuagguggacucaa

SEQ ID NO: 2058839 - RNA, 19 nt, Artificial Sequence
  Description of Artificial Sequence: Synthetic oligonucleotide
  Antisense strand to SEQ ID NO: 2058838
uugaguccaccuaacaagc

SEQ ID NO: 2058840 - RNA, 19 nt, Artificial Sequence
  Description of Artificial Sequence: Synthetic oligonucleotide
  Sense strand starting at position 3807 of SEQ ID NO: 1881622
uagucugguguuuagaaua

SEQ ID NO: 2058841 - RNA, 19 nt, Artificial Sequence
  Description of Artificial Sequence: Synthetic oligonucleotide
  Antisense strand to SEQ ID NO: 2058840
uauucuaaacaccagacua

SEQ ID NO: 2058842 - RNA, 19 nt, Artificial Sequence
  Description of Artificial Sequence: Synthetic oligonucleotide
  Sense strand starting at position 3865 of SEQ ID NO: 1881622
ccacuuaauuggguaaagu

SEQ ID NO: 2058843 - RNA, 19 nt, Artificial Sequence
  Description of Artificial Sequence: Synthetic oligonucleotide
  Antisense strand to SEQ ID NO: 2058842
acuuuacccaauuaagugg

SEQ ID NO: 2058844 - RNA, 19 nt, Artificial Sequence
  Description of Artificial Sequence: Synthetic oligonucleotide
  Sense strand starting at position 3944 of SEQ ID NO: 1881622
uuaugcagccaguauaaua

SEQ ID NO: 2058845 - RNA, 19 nt, Artificial Sequence
  Description of Artificial Sequence: Synthetic oligonucleotide
  Antisense strand to SEQ ID NO: 2058844
uauuauacuggcugcauaa

SEQ ID NO: 2058846 - RNA, 19 nt, Artificial Sequence
  Description of Artificial Sequence: Synthetic oligonucleotide
  Sense strand starting at position 63 of SEQ ID NO: 1881623
acucuugacuccuugaaug

SEQ ID NO: 2058847 - RNA, 19 nt, Artificial Sequence
  Description of Artificial Sequence: Synthetic oligonucleotide
  Antisense strand to SEQ ID NO: 2058846
cauucaaggagucaagagu

SEQ ID NO: 2058848 - RNA, 19 nt, Artificial Sequence
  Description of Artificial Sequence: Synthetic oligonucleotide
  Sense strand starting at position 65 of SEQ ID NO: 1881623
ucuugacuccuugaaugcu

SEQ ID NO: 2058849 - RNA, 19 nt, Artificial Sequence
  Description of Artificial Sequence: Synthetic oligonucleotide
  Antisense strand to SEQ ID NO: 2058848
agcauucaaggagucaaga

SEQ ID NO: 2058850 - RNA, 19 nt, Artificial Sequence
  Description of Artificial Sequence: Synthetic oligonucleotide
  Sense strand starting at position 87 of SEQ ID NO: 1881623
ugugcauauagguagauaa

SEQ ID NO: 2058851 - RNA, 19 nt, Artificial Sequence
  Description of Artificial Sequence: Synthetic oligonucleotide
  Antisense strand to SEQ ID NO: 2058850
uuaucuaccuauaugcaca

SEQ ID NO: 2058852 - RNA, 19 nt, Artificial Sequence
  Description of Artificial Sequence: Synthetic oligonucleotide
  Sense strand starting at position 89 of SEQ ID NO: 1881623
ugcauauagguagauaauu

SEQ ID NO: 2058853 - RNA, 19 nt, Artificial Sequence
  Description of Artificial Sequence: Synthetic oligonucleotide
  Antisense strand to SEQ ID NO: 2058852
aauuaucuaccuauaugca

SEQ ID NO: 2058854 - RNA, 19 nt, Artificial Sequence
  Description of Artificial Sequence: Synthetic oligonucleotide
  Sense strand starting at position 161 of SEQ ID NO: 1881623
acugacuucccauguggga

SEQ ID NO: 2058855 - RNA, 19 nt, Artificial Sequence
  Description of Artificial Sequence: Synthetic oligonucleotide
  Antisense strand to SEQ ID NO: 2058854
ucccacaugggaagucagu

SEQ ID NO: 2058856 - RNA, 19 nt, Artificial Sequence
  Description of Artificial Sequence: Synthetic oligonucleotide
  Sense strand starting at position 163 of SEQ ID NO: 1881623
ugacuucccaugugggaga

SEQ ID NO: 2058857 - RNA, 19 nt, Artificial Sequence
  Description of Artificial Sequence: Synthetic oligonucleotide
  Antisense strand to SEQ ID NO: 2058856
ucucccacaugggaaguca

SEQ ID NO: 2058858 - RNA, 19 nt, Artificial Sequence
  Description of Artificial Sequence: Synthetic oligonucleotide
  Sense strand starting at position 170 of SEQ ID NO: 1881623
ccaugugggagaugagauu

SEQ ID NO: 2058859 - RNA, 19 nt, Artificial Sequence
  Description of Artificial Sequence: Synthetic oligonucleotide
  Antisense strand to SEQ ID NO: 2058858
aaucucaucucccacaugg

SEQ ID NO: 2058860 - RNA, 19 nt, Artificial Sequence
  Description of Artificial Sequence: Synthetic oligonucleotide
  Sense strand starting at position 212 of SEQ ID NO: 1881623
agcccauaggcagauguua

SEQ ID NO: 2058861 - RNA, 19 nt, Artificial Sequence
  Description of Artificial Sequence: Synthetic oligonucleotide
  Antisense strand to SEQ ID NO: 2058860
uaacaucugccuaugggcu

SEQ ID NO: 2058862 - RNA, 19 nt, Artificial Sequence
  Description of Artificial Sequence: Synthetic oligonucleotide
  Sense strand starting at position 232 of SEQ ID NO: 1881623
ggcucuauuugccucccaa

SEQ ID NO: 2058863 - RNA, 19 nt, Artificial Sequence
  Description of Artificial Sequence: Synthetic oligonucleotide
  Antisense strand to SEQ ID NO: 2058862
uugggaggcaaauagagcc

SEQ ID NO: 2058864 - RNA, 19 nt, Artificial Sequence
  Description of Artificial Sequence: Synthetic oligonucleotide
  Sense strand starting at position 340 of SEQ ID NO: 1881623
ugaaauaucugcuuugaaa

SEQ ID NO: 2058865 - RNA, 19 nt, Artificial Sequence
  Description of Artificial Sequence: Synthetic oligonucleotide
  Antisense strand to SEQ ID NO: 2058864
uuucaaagcagauauuuca

SEQ ID NO: 2058866 - RNA, 19 nt, Artificial Sequence
  Description of Artificial Sequence: Synthetic oligonucleotide
  Sense strand starting at position 453 of SEQ ID NO: 1881623
gucauaaaguuguuauaag

SEQ ID NO: 2058867 - RNA, 19 nt, Artificial Sequence
  Description of Artificial Sequence: Synthetic oligonucleotide
  Antisense strand to SEQ ID NO: 2058866
cuuauaacaacuuuaugac

SEQ ID NO: 2058868 - RNA, 19 nt, Artificial Sequence
  Description of Artificial Sequence: Synthetic oligonucleotide
  Sense strand starting at position 502 of SEQ ID NO: 1881623
agaauaguuccuggcagag

SEQ ID NO: 2058869 - RNA, 19 nt, Artificial Sequence
  Description of Artificial Sequence: Synthetic oligonucleotide
  Antisense strand to SEQ ID NO: 2058868
cucugccaggaacuauucu

SEQ ID NO: 2058870 - RNA, 19 nt, Artificial Sequence
  Description of Artificial Sequence: Synthetic oligonucleotide
  Sense strand starting at position 778 of SEQ ID NO: 1881623
gcagcacuccaacagaaau

SEQ ID NO: 2058871 - RNA, 19 nt, Artificial Sequence
  Description of Artificial Sequence: Synthetic oligonucleotide
  Antisense strand to SEQ ID NO: 2058870
auuucuguuggagugcugc

SEQ ID NO: 2058872 - RNA, 19 nt, Artificial Sequence
  Description of Artificial Sequence: Synthetic oligonucleotide
  Sense strand starting at position 865 of SEQ ID NO: 1881623
auggcaagcauuuguguau

SEQ ID NO: 2058873 - RNA, 19 nt, Artificial Sequence
  Description of Artificial Sequence: Synthetic oligonucleotide
  Antisense strand to SEQ ID NO: 2058872
auacacaaaugcuugccau

SEQ ID NO: 2058874 - RNA, 19 nt, Artificial Sequence
  Description of Artificial Sequence: Synthetic oligonucleotide
  Sense strand starting at position 868 of SEQ ID NO: 1881623
gcaagcauuuguguaucua

SEQ ID NO: 2058875 - RNA, 19 nt, Artificial Sequence
  Description of Artificial Sequence: Synthetic oligonucleotide
  Antisense strand to SEQ ID NO: 2058874
uagauacacaaaugcuugc

SEQ ID NO: 2058876 - RNA, 19 nt, Artificial Sequence
  Description of Artificial Sequence: Synthetic oligonucleotide
  Sense strand starting at position 1652 of SEQ ID NO: 1881623
auguauuguggauaauugu

SEQ ID NO: 2058877 - RNA, 19 nt, Artificial Sequence
  Description of Artificial Sequence: Synthetic oligonucleotide
  Antisense strand to SEQ ID NO: 2058876
acaauuauccacaauacau

SEQ ID NO: 2058878 - RNA, 19 nt, Artificial Sequence
  Description of Artificial Sequence: Synthetic oligonucleotide
  Sense strand starting at position 1740 of SEQ ID NO: 1881623
aguaaugcauuugcuauua

SEQ ID NO: 2058879 - RNA, 19 nt, Artificial Sequence
  Description of Artificial Sequence: Synthetic oligonucleotide
  Antisense strand to SEQ ID NO: 2058878
uaauagcaaaugcauuacu

SEQ ID NO: 2058880 - RNA, 19 nt, Artificial Sequence
  Description of Artificial Sequence: Synthetic oligonucleotide
  Sense strand starting at position 1775 of SEQ ID NO: 1881623
acgccauuaggugauagga

SEQ ID NO: 2058881 - RNA, 19 nt, Artificial Sequence
  Description of Artificial Sequence: Synthetic oligonucleotide
  Antisense strand to SEQ ID NO: 2058880
uccuaucaccuaauggcgu

SEQ ID NO: 2058882 - RNA, 19 nt, Artificial Sequence
  Description of Artificial Sequence: Synthetic oligonucleotide
  Sense strand starting at position 1879 of SEQ ID NO: 1881623
cuauaugaucaaugcagaa

SEQ ID NO: 2058883 - RNA, 19 nt, Artificial Sequence
  Description of Artificial Sequence: Synthetic oligonucleotide
  Antisense strand to SEQ ID NO: 2058882
uucugcauugaucauauag

SEQ ID NO: 2058884 - RNA, 19 nt, Artificial Sequence
  Description of Artificial Sequence: Synthetic oligonucleotide
  Sense strand starting at position 1933 of SEQ ID NO: 1881623
cuugauauaugaguacaua

SEQ ID NO: 2058885 - RNA, 19 nt, Artificial Sequence
  Description of Artificial Sequence: Synthetic oligonucleotide
  Antisense strand to SEQ ID NO: 2058884
uauguacucauauaucaag

SEQ ID NO: 2058886 - RNA, 19 nt, Artificial Sequence
  Description of Artificial Sequence: Synthetic oligonucleotide
  Sense strand starting at position 2035 of SEQ ID NO: 1881623
uuggaaauaagccaucguu

SEQ ID NO: 2058887 - RNA, 19 nt, Artificial Sequence
  Description of Artificial Sequence: Synthetic oligonucleotide
  Antisense strand to SEQ ID NO: 2058886
aacgauggcuuauuuccaa

SEQ ID NO: 2058888 - RNA, 19 nt, Artificial Sequence
  Description of Artificial Sequence: Synthetic oligonucleotide
  Sense strand starting at position 2145 of SEQ ID NO: 1881623
uuuaauugugauggguaua

SEQ ID NO: 2058889 - RNA, 19 nt, Artificial Sequence
  Description of Artificial Sequence: Synthetic oligonucleotide
  Antisense strand to SEQ ID NO: 2058888
uauacccaucacaauuaaa

SEQ ID NO: 2058890 - RNA, 19 nt, Artificial Sequence
  Description of Artificial Sequence: Synthetic oligonucleotide
  Sense strand starting at position 2296 of SEQ ID NO: 1881623
gccuuuccugcaguuguau

SEQ ID NO: 2058891 - RNA, 19 nt, Artificial Sequence
  Description of Artificial Sequence: Synthetic oligonucleotide
  Antisense strand to SEQ ID NO: 2058890
auacaacugcaggaaaggc

SEQ ID NO: 2058892 - RNA, 19 nt, Artificial Sequence
  Description of Artificial Sequence: Synthetic oligonucleotide
  Sense strand starting at position 2326 of SEQ ID NO: 1881623
cccaaauaccugugagaac

SEQ ID NO: 2058893 - RNA, 19 nt, Artificial Sequence
  Description of Artificial Sequence: Synthetic oligonucleotide
  Antisense strand to SEQ ID NO: 2058892
guucucacagguauuuggg

SEQ ID NO: 2058894 - RNA, 19 nt, Artificial Sequence
  Description of Artificial Sequence: Synthetic oligonucleotide
  Sense strand starting at position 2424 of SEQ ID NO: 1881623
gugugaaguacuuaggaag

SEQ ID NO: 2058895 - RNA, 19 nt, Artificial Sequence
  Description of Artificial Sequence: Synthetic oligonucleotide
  Antisense strand to SEQ ID NO: 2058894
cuuccuaaguacuucacac

SEQ ID NO: 2058896 - RNA, 19 nt, Artificial Sequence
  Description of Artificial Sequence: Synthetic oligonucleotide
  Sense strand starting at position 2489 of SEQ ID NO: 1881623
gccacuguuggccuguuau

SEQ ID NO: 2058897 - RNA, 19 nt, Artificial Sequence
  Description of Artificial Sequence: Synthetic oligonucleotide
  Antisense strand to SEQ ID NO: 2058896
auaacaggccaacaguggc

SEQ ID NO: 2058898 - RNA, 19 nt, Artificial Sequence
  Description of Artificial Sequence: Synthetic oligonucleotide
  Sense strand starting at position 2515 of SEQ ID NO: 1881623
uggugaauuucugacacaa

SEQ ID NO: 2058899 - RNA, 19 nt, Artificial Sequence
  Description of Artificial Sequence: Synthetic oligonucleotide
  Antisense strand to SEQ ID NO: 2058898
uugugucagaaauucacca

SEQ ID NO: 2058900 - RNA, 19 nt, Artificial Sequence
  Description of Artificial Sequence: Synthetic oligonucleotide
  Sense strand starting at position 2535 of SEQ ID NO: 1881623
augaguuguggagauuacu

SEQ ID NO: 2058901 - RNA, 19 nt, Artificial Sequence
  Description of Artificial Sequence: Synthetic oligonucleotide
  Antisense strand to SEQ ID NO: 2058900
aguaaucuccacaacucau

SEQ ID NO: 2058902 - RNA, 19 nt, Artificial Sequence
  Description of Artificial Sequence: Synthetic oligonucleotide
  Sense strand starting at position 2592 of SEQ ID NO: 1881623
gggccugaucuuuagaccu

SEQ ID NO: 2058903 - RNA, 19 nt, Artificial Sequence
  Description of Artificial Sequence: Synthetic oligonucleotide
  Antisense strand to SEQ ID NO: 2058902
aggucuaaagaucaggccc

SEQ ID NO: 2058904 - RNA, 19 nt, Artificial Sequence
  Description of Artificial Sequence: Synthetic oligonucleotide
  Sense strand starting at position 2665 of SEQ ID NO: 1881623
cacgaaguacuccauugua

SEQ ID NO: 2058905 - RNA, 19 nt, Artificial Sequence
  Description of Artificial Sequence: Synthetic oligonucleotide
  Antisense strand to SEQ ID NO: 2058904
uacaauggaguacuucgug

SEQ ID NO: 2058906 - RNA, 19 nt, Artificial Sequence
  Description of Artificial Sequence: Synthetic oligonucleotide
  Sense strand starting at position 3214 of SEQ ID NO: 1881623
gauaauguuggucaugcau

SEQ ID NO: 2058907 - RNA, 19 nt, Artificial Sequence
  Description of Artificial Sequence: Synthetic oligonucleotide
  Antisense strand to SEQ ID NO: 2058906
augcaugaccaacauuauc

SEQ ID NO: 2058908 - RNA, 19 nt, Artificial Sequence
  Description of Artificial Sequence: Synthetic oligonucleotide
  Sense strand starting at position 3350 of SEQ ID NO: 1881623
cuuaauuaaugguugaaug

SEQ ID NO: 2058909 - RNA, 19 nt, Artificial Sequence
  Description of Artificial Sequence: Synthetic oligonucleotide
  Antisense strand to SEQ ID NO: 2058908
cauucaaccauuaauuaag

SEQ ID NO: 2058910 - RNA, 19 nt, Artificial Sequence
  Description of Artificial Sequence: Synthetic oligonucleotide
  Sense strand starting at position 3358 of SEQ ID NO: 1881623
augguugaaugaguagaau

SEQ ID NO: 2058911 - RNA, 19 nt, Artificial Sequence
  Description of Artificial Sequence: Synthetic oligonucleotide
  Antisense strand to SEQ ID NO: 2058910
auucuacucauucaaccau

SEQ ID NO: 2058912 - RNA, 19 nt, Artificial Sequence
  Description of Artificial Sequence: Synthetic oligonucleotide
  Sense strand starting at position 3404 of SEQ ID NO: 1881623
guagacuugaaguguagaa

SEQ ID NO: 2058913 - RNA, 19 nt, Artificial Sequence
  Description of Artificial Sequence: Synthetic oligonucleotide
  Antisense strand to SEQ ID NO: 2058912
uucuacacuucaagucuac

SEQ ID NO: 2058914 - RNA, 19 nt, Artificial Sequence
  Description of Artificial Sequence: Synthetic oligonucleotide
  Sense strand starting at position 3536 of SEQ ID NO: 1881623
gaauguugccaccacaaag

SEQ ID NO: 2058915 - RNA, 19 nt, Artificial Sequence
  Description of Artificial Sequence: Synthetic oligonucleotide
  Antisense strand to SEQ ID NO: 2058914
cuuugugguggcaacauuc

SEQ ID NO: 2058916 - RNA, 19 nt, Artificial Sequence
  Description of Artificial Sequence: Synthetic oligonucleotide
  Sense strand starting at position 3552 of SEQ ID NO: 1881623
aagaaaugcuaaguaguua

SEQ ID NO: 2058917 - RNA, 19 nt, Artificial Sequence
  Description of Artificial Sequence: Synthetic oligonucleotide
  Antisense strand to SEQ ID NO: 2058916
uaacuacuuagcauuucuu

SEQ ID NO: 2058918 - RNA, 19 nt, Artificial Sequence
  Description of Artificial Sequence: Synthetic oligonucleotide
  Sense strand starting at position 3563 of SEQ ID NO: 1881623
aguaguuaaagugauagcu

SEQ ID NO: 2058919 - RNA, 19 nt, Artificial Sequence
  Description of Artificial Sequence: Synthetic oligonucleotide
  Antisense strand to SEQ ID NO: 2058918
agcuaucacuuuaacuacu

SEQ ID NO: 2058920 - RNA, 19 nt, Artificial Sequence
  Description of Artificial Sequence: Synthetic oligonucleotide
  Sense strand starting at position 3734 of SEQ ID NO: 1881623
gaucgaguugaucauuauu

SEQ ID NO: 2058921 - RNA, 19 nt, Artificial Sequence
  Description of Artificial Sequence: Synthetic oligonucleotide
  Antisense strand to SEQ ID NO: 2058920
aauaaugaucaacucgauc

SEQ ID NO: 2058922 - RNA, 19 nt, Artificial Sequence
  Description of Artificial Sequence: Synthetic oligonucleotide
  Sense strand starting at position 3832 of SEQ ID NO: 1881623
ucucucugugcccagaaau

SEQ ID NO: 2058923 - RNA, 19 nt, Artificial Sequence
  Description of Artificial Sequence: Synthetic oligonucleotide
  Antisense strand to SEQ ID NO: 2058922
auuucugggcacagagaga

SEQ ID NO: 2058924 - RNA, 19 nt, Artificial Sequence
  Description of Artificial Sequence: Synthetic oligonucleotide
  Sense strand starting at position 3978 of SEQ ID NO: 1881623
gguaaaggguucucucaag

SEQ ID NO: 2058925 - RNA, 19 nt, Artificial Sequence
  Description of Artificial Sequence: Synthetic oligonucleotide
  Antisense strand to SEQ ID NO: 2058924
cuugagagaacccuuuacc

SEQ ID NO: 2058926 - RNA, 19 nt, Artificial Sequence
  Description of Artificial Sequence: Synthetic oligonucleotide
  Sense strand starting at position 186 of SEQ ID NO: 1881624
ucagcuguuguagagguaa

SEQ ID NO: 2058927 - RNA, 19 nt, Artificial Sequence
  Description of Artificial Sequence: Synthetic oligonucleotide
  Antisense strand to SEQ ID NO: 2058926
uuaccucuacaacagcuga

SEQ ID NO: 2058928 - RNA, 19 nt, Artificial Sequence
  Description of Artificial Sequence: Synthetic oligonucleotide
  Sense strand starting at position 866 of SEQ ID NO: 1881624
aagaguugugggugaguau

SEQ ID NO: 2058929 - RNA, 19 nt, Artificial Sequence
  Description of Artificial Sequence: Synthetic oligonucleotide
  Antisense strand to SEQ ID NO: 2058928
auacucacccacaacucuu

SEQ ID NO: 2058930 - RNA, 19 nt, Artificial Sequence
  Description of Artificial Sequence: Synthetic oligonucleotide
  Sense strand starting at position 867 of SEQ ID NO: 1881624
agaguugugggugaguauu

SEQ ID NO: 2058931 - RNA, 19 nt, Artificial Sequence
  Description of Artificial Sequence: Synthetic oligonucleotide
  Antisense strand to SEQ ID NO: 2058930
aauacucacccacaacucu

SEQ ID NO: 2058932 - RNA, 19 nt, Artificial Sequence
  Description of Artificial Sequence: Synthetic oligonucleotide
  Sense strand starting at position 894 of SEQ ID NO: 1881624
uuuaaauagguguaguuga

SEQ ID NO: 2058933 - RNA, 19 nt, Artificial Sequence
  Description of Artificial Sequence: Synthetic oligonucleotide
  Antisense strand to SEQ ID NO: 2058932
ucaacuacaccuauuuaaa

SEQ ID NO: 2058934 - RNA, 19 nt, Artificial Sequence
  Description of Artificial Sequence: Synthetic oligonucleotide
  Sense strand starting at position 899 of SEQ ID NO: 1881624
auagguguaguugaaguaa

SEQ ID NO: 2058935 - RNA, 19 nt, Artificial Sequence
  Description of Artificial Sequence: Synthetic oligonucleotide
  Antisense strand to SEQ ID NO: 2058934
uuacuucaacuacaccuau

SEQ ID NO: 2058936 - RNA, 19 nt, Artificial Sequence
  Description of Artificial Sequence: Synthetic oligonucleotide
  Sense strand starting at position 908 of SEQ ID NO: 1881624
guugaaguaagaugaacua

SEQ ID NO: 2058937 - RNA, 19 nt, Artificial Sequence
  Description of Artificial Sequence: Synthetic oligonucleotide
  Antisense strand to SEQ ID NO: 2058936
uaguucaucuuacuucaac

SEQ ID NO: 2058938 - RNA, 19 nt, Artificial Sequence
  Description of Artificial Sequence: Synthetic oligonucleotide
  Sense strand starting at position 1405 of SEQ ID NO: 1881624
ugucuuaacggagagcuuu

SEQ ID NO: 2058939 - RNA, 19 nt, Artificial Sequence
  Description of Artificial Sequence: Synthetic oligonucleotide
  Antisense strand to SEQ ID NO: 2058938
aaagcucuccguuaagaca

SEQ ID NO: 2058940 - RNA, 19 nt, Artificial Sequence
  Description of Artificial Sequence: Synthetic oligonucleotide
  Sense strand starting at position 1594 of SEQ ID NO: 1881624
gguuuaaauucugucauug

SEQ ID NO: 2058941 - RNA, 19 nt, Artificial Sequence
  Description of Artificial Sequence: Synthetic oligonucleotide
  Antisense strand to SEQ ID NO: 2058940
caaugacagaauuuaaacc

SEQ ID NO: 2058942 - RNA, 19 nt, Artificial Sequence
  Description of Artificial Sequence: Synthetic oligonucleotide
  Sense strand starting at position 1604 of SEQ ID NO: 1881624
cugucauuggcuuaacaau

SEQ ID NO: 2058943 - RNA, 19 nt, Artificial Sequence
  Description of Artificial Sequence: Synthetic oligonucleotide
  Antisense strand to SEQ ID NO: 2058942
auuguuaagccaaugacag

SEQ ID NO: 2058944 - RNA, 19 nt, Artificial Sequence
  Description of Artificial Sequence: Synthetic oligonucleotide
  Sense strand starting at position 1670 of SEQ ID NO: 1881624
gcauauuagcaacaguaau

SEQ ID NO: 2058945 - RNA, 19 nt, Artificial Sequence
  Description of Artificial Sequence: Synthetic oligonucleotide
  Antisense strand to SEQ ID NO: 2058944
auuacuguugcuaauaugc

SEQ ID NO: 2058946 - RNA, 19 nt, Artificial Sequence
  Description of Artificial Sequence: Synthetic oligonucleotide
  Sense strand starting at position 1683 of SEQ ID NO: 1881624
aguaauggccuguagccaa

SEQ ID NO: 2058947 - RNA, 19 nt, Artificial Sequence
  Description of Artificial Sequence: Synthetic oligonucleotide
  Antisense strand to SEQ ID NO: 2058946
uuggcuacaggccauuacu

SEQ ID NO: 2058948 - RNA, 19 nt, Artificial Sequence
  Description of Artificial Sequence: Synthetic oligonucleotide
  Sense strand starting at position 1720 of SEQ ID NO: 1881624
gcguuaacgcaauugcuga

SEQ ID NO: 2058949 - RNA, 19 nt, Artificial Sequence
  Description of Artificial Sequence: Synthetic oligonucleotide
  Antisense strand to SEQ ID NO: 2058948
ucagcaauugcguuaacgc

SEQ ID NO: 2058950 - RNA, 19 nt, Artificial Sequence
  Description of Artificial Sequence: Synthetic oligonucleotide
  Sense strand starting at position 1868 of SEQ ID NO: 1881624
agcugcggucaauacaaua

SEQ ID NO: 2058951 - RNA, 19 nt, Artificial Sequence
  Description of Artificial Sequence: Synthetic oligonucleotide
  Antisense strand to SEQ ID NO: 2058950
uauuguauugaccgcagcu

SEQ ID NO: 2058952 - RNA, 19 nt, Artificial Sequence
  Description of Artificial Sequence: Synthetic oligonucleotide
  Sense strand starting at position 1873 of SEQ ID NO: 1881624
cggucaauacaauaaaguu

SEQ ID NO: 2058953 - RNA, 19 nt, Artificial Sequence
  Description of Artificial Sequence: Synthetic oligonucleotide
  Antisense strand to SEQ ID NO: 2058952
aacuuuauuguauugaccg

SEQ ID NO: 2058954 - RNA, 19 nt, Artificial Sequence
  Description of Artificial Sequence: Synthetic oligonucleotide
  Sense strand starting at position 1947 of SEQ ID NO: 1881624
ggaagcacuuacuucuuua

SEQ ID NO: 2058955 - RNA, 19 nt, Artificial Sequence
  Description of Artificial Sequence: Synthetic oligonucleotide
  Antisense strand to SEQ ID NO: 2058954
uaaagaaguaagugcuucc

SEQ ID NO: 2058956 - RNA, 19 nt, Artificial Sequence
  Description of Artificial Sequence: Synthetic oligonucleotide
  Sense strand starting at position 2021 of SEQ ID NO: 1881624
guuagaauccuuuaaccug

SEQ ID NO: 2058957 - RNA, 19 nt, Artificial Sequence
  Description of Artificial Sequence: Synthetic oligonucleotide
  Antisense strand to SEQ ID NO: 2058956
cagguuaaaggauucuaac

SEQ ID NO: 2058958 - RNA, 19 nt, Artificial Sequence
  Description of Artificial Sequence: Synthetic oligonucleotide
  Sense strand starting at position 2195 of SEQ ID NO: 1881624
agguuagcguguucuauuu

SEQ ID NO: 2058959 - RNA, 19 nt, Artificial Sequence
  Description of Artificial Sequence: Synthetic oligonucleotide
  Antisense strand to SEQ ID NO: 2058958
aaauagaacacgcuaaccu

SEQ ID NO: 2058960 - RNA, 19 nt, Artificial Sequence
  Description of Artificial Sequence: Synthetic oligonucleotide
  Sense strand starting at position 2407 of SEQ ID NO: 1881624
cugaacuaguucccaaaga

SEQ ID NO: 2058961 - RNA, 19 nt, Artificial Sequence
  Description of Artificial Sequence: Synthetic oligonucleotide
  Antisense strand to SEQ ID NO: 2058960
ucuuugggaacuaguucag

SEQ ID NO: 2058962 - RNA, 19 nt, Artificial Sequence
  Description of Artificial Sequence: Synthetic oligonucleotide
  Sense strand starting at position 2559 of SEQ ID NO: 1881624
ucagcucucagggaaugua

SEQ ID NO: 2058963 - RNA, 19 nt, Artificial Sequence
  Description of Artificial Sequence: Synthetic oligonucleotide
  Antisense strand to SEQ ID NO: 2058962
uacauucccugagagcuga

SEQ ID NO: 2058964 - RNA, 19 nt, Artificial Sequence
  Description of Artificial Sequence: Synthetic oligonucleotide
  Sense strand starting at position 2562 of SEQ ID NO: 1881624
gcucucagggaauguauga

SEQ ID NO: 2058965 - RNA, 19 nt, Artificial Sequence
  Description of Artificial Sequence: Synthetic oligonucleotide
  Antisense strand to SEQ ID NO: 2058964
ucauacauucccugagagc

SEQ ID NO: 2058966 - RNA, 19 nt, Artificial Sequence
  Description of Artificial Sequence: Synthetic oligonucleotide
  Sense strand starting at position 2774 of SEQ ID NO: 1881624
uguguuucuaucuggagga

SEQ ID NO: 2058967 - RNA, 19 nt, Artificial Sequence
  Description of Artificial Sequence: Synthetic oligonucleotide
  Antisense strand to SEQ ID NO: 2058966
uccuccagauagaaacaca

SEQ ID NO: 2058968 - RNA, 19 nt, Artificial Sequence
  Description of Artificial Sequence: Synthetic oligonucleotide
  Sense strand starting at position 2981 of SEQ ID NO: 1881624
aaauguuacuaguuaagga

SEQ ID NO: 2058969 - RNA, 19 nt, Artificial Sequence
  Description of Artificial Sequence: Synthetic oligonucleotide
  Antisense strand to SEQ ID NO: 2058968
uccuuaacuaguaacauuu

SEQ ID NO: 2058970 - RNA, 19 nt, Artificial Sequence
  Description of Artificial Sequence: Synthetic oligonucleotide
  Sense strand starting at position 3099 of SEQ ID NO: 1881624
ggaacucccuuagcuuauu

SEQ ID NO: 2058971 - RNA, 19 nt, Artificial Sequence
  Description of Artificial Sequence: Synthetic oligonucleotide
  Antisense strand to SEQ ID NO: 2058970
aauaagcuaagggaguucc

SEQ ID NO: 2058972 - RNA, 19 nt, Artificial Sequence
  Description of Artificial Sequence: Synthetic oligonucleotide
  Sense strand starting at position 3117 of SEQ ID NO: 1881624
uuugcuaaaugucuuuaga

SEQ ID NO: 2058973 - RNA, 19 nt, Artificial Sequence
  Description of Artificial Sequence: Synthetic oligonucleotide
  Antisense strand to SEQ ID NO: 2058972
ucuaaagacauuuagcaaa

SEQ ID NO: 2058974 - RNA, 19 nt, Artificial Sequence
  Description of Artificial Sequence: Synthetic oligonucleotide
  Sense strand starting at position 3119 of SEQ ID NO: 1881624
ugcuaaaugucuuuagaac

SEQ ID NO: 2058975 - RNA, 19 nt, Artificial Sequence
  Description of Artificial Sequence: Synthetic oligonucleotide
  Antisense strand to SEQ ID NO: 2058974
guucuaaagacauuuagca

SEQ ID NO: 2058976 - RNA, 19 nt, Artificial Sequence
  Description of Artificial Sequence: Synthetic oligonucleotide
  Sense strand starting at position 3120 of SEQ ID NO: 1881624
gcuaaaugucuuuagaacc

SEQ ID NO: 2058977 - RNA, 19 nt, Artificial Sequence
  Description of Artificial Sequence: Synthetic oligonucleotide
  Antisense strand to SEQ ID NO: 2058976
gguucuaaagacauuuagc

SEQ ID NO: 2058978 - RNA, 19 nt, Artificial Sequence
  Description of Artificial Sequence: Synthetic oligonucleotide
  Sense strand starting at position 3251 of SEQ ID NO: 1881624
agucaucuguuaucaccau

SEQ ID NO: 2058979 - RNA, 19 nt, Artificial Sequence
  Description of Artificial Sequence: Synthetic oligonucleotide
  Antisense strand to SEQ ID NO: 2058978
auggugauaacagaugacu

SEQ ID NO: 2058980 - RNA, 19 nt, Artificial Sequence
  Description of Artificial Sequence: Synthetic oligonucleotide
  Sense strand starting at position 3435 of SEQ ID NO: 1881624
aguaaagaucacugauagu

SEQ ID NO: 2058981 - RNA, 19 nt, Artificial Sequence
  Description of Artificial Sequence: Synthetic oligonucleotide
  Antisense strand to SEQ ID NO: 2058980
acuaucagugaucuuuacu

SEQ ID NO: 2058982 - RNA, 19 nt, Artificial Sequence
  Description of Artificial Sequence: Synthetic oligonucleotide
  Sense strand starting at position 3482 of SEQ ID NO: 1881624
uguaaaugcuaucucugag

SEQ ID NO: 2058983 - RNA, 19 nt, Artificial Sequence
  Description of Artificial Sequence: Synthetic oligonucleotide
  Antisense strand to SEQ ID NO: 2058982
cucagagauagcauuuaca

SEQ ID NO: 2058984 - RNA, 19 nt, Artificial Sequence
  Description of Artificial Sequence: Synthetic oligonucleotide
  Sense strand starting at position 3485 of SEQ ID NO: 1881624
aaaugcuaucucugaguug

SEQ ID NO: 2058985 - RNA, 19 nt, Artificial Sequence
  Description of Artificial Sequence: Synthetic oligonucleotide
  Antisense strand to SEQ ID NO: 2058984
caacucagagauagcauuu

SEQ ID NO: 2058986 - RNA, 19 nt, Artificial Sequence
  Description of Artificial Sequence: Synthetic oligonucleotide
  Sense strand starting at position 3492 of SEQ ID NO: 1881624
aucucugaguuguuauaag

SEQ ID NO: 2058987 - RNA, 19 nt, Artificial Sequence
  Description of Artificial Sequence: Synthetic oligonucleotide
  Antisense strand to SEQ ID NO: 2058986
cuuauaacaacucagagau

SEQ ID NO: 2058988 - RNA, 19 nt, Artificial Sequence
  Description of Artificial Sequence: Synthetic oligonucleotide
  Sense strand starting at position 3569 of SEQ ID NO: 1881624
uuuguuaaguuauccagau

SEQ ID NO: 2058989 - RNA, 19 nt, Artificial Sequence
  Description of Artificial Sequence: Synthetic oligonucleotide
  Antisense strand to SEQ ID NO: 2058988
aucuggauaacuuaacaaa

SEQ ID NO: 2058990 - RNA, 19 nt, Artificial Sequence
  Description of Artificial Sequence: Synthetic oligonucleotide
  Sense strand starting at position 3570 of SEQ ID NO: 1881624
uuguuaaguuauccagaug

SEQ ID NO: 2058991 - RNA, 19 nt, Artificial Sequence
  Description of Artificial Sequence: Synthetic oligonucleotide
  Antisense strand to SEQ ID NO: 2058990
caucuggauaacuuaacaa

SEQ ID NO: 2058992 - RNA, 19 nt, Artificial Sequence
  Description of Artificial Sequence: Synthetic oligonucleotide
  Sense strand starting at position 3571 of SEQ ID NO: 1881624
uguuaaguuauccagaugu

SEQ ID NO: 2058993 - RNA, 19 nt, Artificial Sequence
  Description of Artificial Sequence: Synthetic oligonucleotide
  Antisense strand to SEQ ID NO: 2058992
acaucuggauaacuuaaca

SEQ ID NO: 2058994 - RNA, 19 nt, Artificial Sequence
  Description of Artificial Sequence: Synthetic oligonucleotide
  Sense strand starting at position 3573 of SEQ ID NO: 1881624
uuaaguuauccagaugugu

SEQ ID NO: 2058995 - RNA, 19 nt, Artificial Sequence
  Description of Artificial Sequence: Synthetic oligonucleotide
  Antisense strand to SEQ ID NO: 2058994
acacaucuggauaacuuaa

SEQ ID NO: 2058996 - RNA, 19 nt, Artificial Sequence
  Description of Artificial Sequence: Synthetic oligonucleotide
  Sense strand starting at position 3691 of SEQ ID NO: 1881624
gaguuugcagacugagcaa

SEQ ID NO: 2058997 - RNA, 19 nt, Artificial Sequence
  Description of Artificial Sequence: Synthetic oligonucleotide
  Antisense strand to SEQ ID NO: 2058996
uugcucagucugcaaacuc

SEQ ID NO: 2058998 - RNA, 19 nt, Artificial Sequence
  Description of Artificial Sequence: Synthetic oligonucleotide
  Sense strand starting at position 3716 of SEQ ID NO: 1881624
aggaaugaagauuguaguu

SEQ ID NO: 2058999 - RNA, 19 nt, Artificial Sequence
  Description of Artificial Sequence: Synthetic oligonucleotide
  Antisense strand to SEQ ID NO: 2058998
aacuacaaucuucauuccu

SEQ ID NO: 2059000 - RNA, 19 nt, Artificial Sequence
  Description of Artificial Sequence: Synthetic oligonucleotide
  Sense strand starting at position 3721 of SEQ ID NO: 1881624
ugaagauuguaguuucuca

SEQ ID NO: 2059001 - RNA, 19 nt, Artificial Sequence
  Description of Artificial Sequence: Synthetic oligonucleotide
  Antisense strand to SEQ ID NO: 2059000
ugagaaacuacaaucuuca

SEQ ID NO: 2059002 - RNA, 19 nt, Artificial Sequence
  Description of Artificial Sequence: Synthetic oligonucleotide
  Sense strand starting at position 3789 of SEQ ID NO: 1881624
gcagaauuccuaugaauuc

SEQ ID NO: 2059003 - RNA, 19 nt, Artificial Sequence
  Description of Artificial Sequence: Synthetic oligonucleotide
  Antisense strand to SEQ ID NO: 2059002
gaauucauaggaauucugc

SEQ ID NO: 2059004 - RNA, 19 nt, Artificial Sequence
  Description of Artificial Sequence: Synthetic oligonucleotide
  Sense strand starting at position 3933 of SEQ ID NO: 1881624
uccuuuguucagggagaag

SEQ ID NO: 2059005 - RNA, 19 nt, Artificial Sequence
  Description of Artificial Sequence: Synthetic oligonucleotide
  Antisense strand to SEQ ID NO: 2059004
cuucucccugaacaaagga

SEQ ID NO: 2059006 - RNA, 19 nt, Artificial Sequence
  Description of Artificial Sequence: Synthetic oligonucleotide
  Sense strand starting at position 560 of SEQ ID NO: 1881625
aagaguugugggugaguau

SEQ ID NO: 2059007 - RNA, 19 nt, Artificial Sequence
  Description of Artificial Sequence: Synthetic oligonucleotide
  Antisense strand to SEQ ID NO: 2059006
auacucacccacaacucuu

SEQ ID NO: 2059008 - RNA, 19 nt, Artificial Sequence
  Description of Artificial Sequence: Synthetic oligonucleotide
  Sense strand starting at position 561 of SEQ ID NO: 1881625
agaguugugggugaguauu

SEQ ID NO: 2059009 - RNA, 19 nt, Artificial Sequence
  Description of Artificial Sequence: Synthetic oligonucleotide
  Antisense strand to SEQ ID NO: 2059008
aauacucacccacaacucu

SEQ ID NO: 2059010 - RNA, 19 nt, Artificial Sequence
  Description of Artificial Sequence: Synthetic oligonucleotide
  Sense strand starting at position 588 of SEQ ID NO: 1881625
uuuaaauagguguaguuga

SEQ ID NO: 2059011 - RNA, 19 nt, Artificial Sequence
  Description of Artificial Sequence: Synthetic oligonucleotide
  Antisense strand to SEQ ID NO: 2059010
ucaacuacaccuauuuaaa

SEQ ID NO: 2059012 - RNA, 19 nt, Artificial Sequence
  Description of Artificial Sequence: Synthetic oligonucleotide
  Sense strand starting at position 593 of SEQ ID NO: 1881625
auagguguaguugaaguaa

SEQ ID NO: 2059013 - RNA, 19 nt, Artificial Sequence
  Description of Artificial Sequence: Synthetic oligonucleotide
  Antisense strand to SEQ ID NO: 2059012
uuacuucaacuacaccuau

SEQ ID NO: 2059014 - RNA, 19 nt, Artificial Sequence
  Description of Artificial Sequence: Synthetic oligonucleotide
  Sense strand starting at position 602 of SEQ ID NO: 1881625
guugaaguaagaugaacua

SEQ ID NO: 2059015 - RNA, 19 nt, Artificial Sequence
  Description of Artificial Sequence: Synthetic oligonucleotide
  Antisense strand to SEQ ID NO: 2059014
uaguucaucuuacuucaac

SEQ ID NO: 2059016 - RNA, 19 nt, Artificial Sequence
  Description of Artificial Sequence: Synthetic oligonucleotide
  Sense strand starting at position 1099 of SEQ ID NO: 1881625
ugucuuaacggagagcuuu

SEQ ID NO: 2059017 - RNA, 19 nt, Artificial Sequence
  Description of Artificial Sequence: Synthetic oligonucleotide
  Antisense strand to SEQ ID NO: 2059016
aaagcucuccguuaagaca

SEQ ID NO: 2059018 - RNA, 19 nt, Artificial Sequence
  Description of Artificial Sequence: Synthetic oligonucleotide
  Sense strand starting at position 1288 of SEQ ID NO: 1881625
gguuuaaauucugucauug

SEQ ID NO: 2059019 - RNA, 19 nt, Artificial Sequence
  Description of Artificial Sequence: Synthetic oligonucleotide
  Antisense strand to SEQ ID NO: 2059018
caaugacagaauuuaaacc

SEQ ID NO: 2059020 - RNA, 19 nt, Artificial Sequence
  Description of Artificial Sequence: Synthetic oligonucleotide
  Sense strand starting at position 1298 of SEQ ID NO: 1881625
cugucauuggcuuaacaau

SEQ ID NO: 2059021 - RNA, 19 nt, Artificial Sequence
  Description of Artificial Sequence: Synthetic oligonucleotide
  Antisense strand to SEQ ID NO: 2059020
auuguuaagccaaugacag

SEQ ID NO: 2059022 - RNA, 19 nt, Artificial Sequence
  Description of Artificial Sequence: Synthetic oligonucleotide
  Sense strand starting at position 1364 of SEQ ID NO: 1881625
gcauauuagcaacaguaau

SEQ ID NO: 2059023 - RNA, 19 nt, Artificial Sequence
  Description of Artificial Sequence: Synthetic oligonucleotide
  Antisense strand to SEQ ID NO: 2059022
auuacuguugcuaauaugc

SEQ ID NO: 2059024 - RNA, 19 nt, Artificial Sequence
  Description of Artificial Sequence: Synthetic oligonucleotide
  Sense strand starting at position 1377 of SEQ ID NO: 1881625
aguaauggccuguagccaa

SEQ ID NO: 2059025 - RNA, 19 nt, Artificial Sequence
  Description of Artificial Sequence: Synthetic oligonucleotide
  Antisense strand to SEQ ID NO: 2059024
uuggcuacaggccauuacu

SEQ ID NO: 2059026 - RNA, 19 nt, Artificial Sequence
  Description of Artificial Sequence: Synthetic oligonucleotide
  Sense strand starting at position 1414 of SEQ ID NO: 1881625
gcguuaacgcaauugcuga

SEQ ID NO: 2059027 - RNA, 19 nt, Artificial Sequence
  Description of Artificial Sequence: Synthetic oligonucleotide
  Antisense strand to SEQ ID NO: 2059026
ucagcaauugcguuaacgc

SEQ ID NO: 2059028 - RNA, 19 nt, Artificial Sequence
  Description of Artificial Sequence: Synthetic oligonucleotide
  Sense strand starting at position 1562 of SEQ ID NO: 1881625
agcugcggucaauacaaua

SEQ ID NO: 2059029 - RNA, 19 nt, Artificial Sequence
  Description of Artificial Sequence: Synthetic oligonucleotide
  Antisense strand to SEQ ID NO: 2059028
uauuguauugaccgcagcu

SEQ ID NO: 2059030 - RNA, 19 nt, Artificial Sequence
  Description of Artificial Sequence: Synthetic oligonucleotide
  Sense strand starting at position 1567 of SEQ ID NO: 1881625
cggucaauacaauaaaguu

SEQ ID NO: 2059031 - RNA, 19 nt, Artificial Sequence
  Description of Artificial Sequence: Synthetic oligonucleotide
  Antisense strand to SEQ ID NO: 2059030
aacuuuauuguauugaccg

SEQ ID NO: 2059032 - RNA, 19 nt, Artificial Sequence
  Description of Artificial Sequence: Synthetic oligonucleotide
  Sense strand starting at position 1641 of SEQ ID NO: 1881625
ggaagcacuuacuucuuua

SEQ ID NO: 2059033 - RNA, 19 nt, Artificial Sequence
  Description of Artificial Sequence: Synthetic oligonucleotide
  Antisense strand to SEQ ID NO: 2059032
uaaagaaguaagugcuucc

SEQ ID NO: 2059034 - RNA, 19 nt, Artificial Sequence
  Description of Artificial Sequence: Synthetic oligonucleotide
  Sense strand starting at position 1715 of SEQ ID NO: 1881625
guuagaauccuuuaaccug

SEQ ID NO: 2059035 - RNA, 19 nt, Artificial Sequence
  Description of Artificial Sequence: Synthetic oligonucleotide
  Antisense strand to SEQ ID NO: 2059034
cagguuaaaggauucuaac

SEQ ID NO: 2059036 - RNA, 19 nt, Artificial Sequence
  Description of Artificial Sequence: Synthetic oligonucleotide
  Sense strand starting at position 1889 of SEQ ID NO: 1881625
agguuagcguguucuauuu

SEQ ID NO: 2059037 - RNA, 19 nt, Artificial Sequence
  Description of Artificial Sequence: Synthetic oligonucleotide
  Antisense strand to SEQ ID NO: 2059036
aaauagaacacgcuaaccu

SEQ ID NO: 2059038 - RNA, 19 nt, Artificial Sequence
  Description of Artificial Sequence: Synthetic oligonucleotide
  Sense strand starting at position 2101 of SEQ ID NO: 1881625
cugaacuaguucccaaaga

SEQ ID NO: 2059039 - RNA, 19 nt, Artificial Sequence
  Description of Artificial Sequence: Synthetic oligonucleotide
  Antisense strand to SEQ ID NO: 2059038
ucuuugggaacuaguucag

SEQ ID NO: 2059040 - RNA, 19 nt, Artificial Sequence
  Description of Artificial Sequence: Synthetic oligonucleotide
  Sense strand starting at position 2253 of SEQ ID NO: 1881625
ucagcucucagggaaugua

SEQ ID NO: 2059041 - RNA, 19 nt, Artificial Sequence
  Description of Artificial Sequence: Synthetic oligonucleotide
  Antisense strand to SEQ ID NO: 2059040
uacauucccugagagcuga

SEQ ID NO: 2059042 - RNA, 19 nt, Artificial Sequence
  Description of Artificial Sequence: Synthetic oligonucleotide
  Sense strand starting at position 2256 of SEQ ID NO: 1881625
gcucucagggaauguauga

SEQ ID NO: 2059043 - RNA, 19 nt, Artificial Sequence
  Description of Artificial Sequence: Synthetic oligonucleotide
  Antisense strand to SEQ ID NO: 2059042
ucauacauucccugagagc

SEQ ID NO: 2059044 - RNA, 19 nt, Artificial Sequence
  Description of Artificial Sequence: Synthetic oligonucleotide
  Sense strand starting at position 2468 of SEQ ID NO: 1881625
uguguuucuaucuggagga

SEQ ID NO: 2059045 - RNA, 19 nt, Artificial Sequence
  Description of Artificial Sequence: Synthetic oligonucleotide
  Antisense strand to SEQ ID NO: 2059044
uccuccagauagaaacaca

SEQ ID NO: 2059046 - RNA, 19 nt, Artificial Sequence
  Description of Artificial Sequence: Synthetic oligonucleotide
  Sense strand starting at position 2675 of SEQ ID NO: 1881625
aaauguuacuaguuaagga

SEQ ID NO: 2059047 - RNA, 19 nt, Artificial Sequence
  Description of Artificial Sequence: Synthetic oligonucleotide
  Antisense strand to SEQ ID NO: 2059046
uccuuaacuaguaacauuu

SEQ ID NO: 2059048 - RNA, 19 nt, Artificial Sequence
  Description of Artificial Sequence: Synthetic oligonucleotide
  Sense strand starting at position 2793 of SEQ ID NO: 1881625
ggaacucccuuagcuuauu

SEQ ID NO: 2059049 - RNA, 19 nt, Artificial Sequence
  Description of Artificial Sequence: Synthetic oligonucleotide
  Antisense strand to SEQ ID NO: 2059048
aauaagcuaagggaguucc

SEQ ID NO: 2059050 - RNA, 19 nt, Artificial Sequence
  Description of Artificial Sequence: Synthetic oligonucleotide
  Sense strand starting at position 2813 of SEQ ID NO: 1881625
ugcuaaaugucuuuagaac

SEQ ID NO: 2059051 - RNA, 19 nt, Artificial Sequence
  Description of Artificial Sequence: Synthetic oligonucleotide
  Antisense strand to SEQ ID NO: 2059050
guucuaaagacauuuagca

SEQ ID NO: 2059052 - RNA, 19 nt, Artificial Sequence
  Description of Artificial Sequence: Synthetic oligonucleotide
  Sense strand starting at position 2814 of SEQ ID NO: 1881625
gcuaaaugucuuuagaacc

SEQ ID NO: 2059053 - RNA, 19 nt, Artificial Sequence
  Description of Artificial Sequence: Synthetic oligonucleotide
  Antisense strand to SEQ ID NO: 2059052
gguucuaaagacauuuagc

SEQ ID NO: 2059054 - RNA, 19 nt, Artificial Sequence
  Description of Artificial Sequence: Synthetic oligonucleotide
  Sense strand starting at position 2945 of SEQ ID NO: 1881625
agucaucuguuaucaccau

SEQ ID NO: 2059055 - RNA, 19 nt, Artificial Sequence
  Description of Artificial Sequence: Synthetic oligonucleotide
  Antisense strand to SEQ ID NO: 2059054
auggugauaacagaugacu

SEQ ID NO: 2059056 - RNA, 19 nt, Artificial Sequence
  Description of Artificial Sequence: Synthetic oligonucleotide
  Sense strand starting at position 3129 of SEQ ID NO: 1881625
aguaaagaucacugauagu

SEQ ID NO: 2059057 - RNA, 19 nt, Artificial Sequence
  Description of Artificial Sequence: Synthetic oligonucleotide
  Antisense strand to SEQ ID NO: 2059056
acuaucagugaucuuuacu

SEQ ID NO: 2059058 - RNA, 19 nt, Artificial Sequence
  Description of Artificial Sequence: Synthetic oligonucleotide
  Sense strand starting at position 3176 of SEQ ID NO: 1881625
uguaaaugcuaucucugag

SEQ ID NO: 2059059 - RNA, 19 nt, Artificial Sequence
  Description of Artificial Sequence: Synthetic oligonucleotide
  Antisense strand to SEQ ID NO: 2059058
cucagagauagcauuuaca

SEQ ID NO: 2059060 - RNA, 19 nt, Artificial Sequence
  Description of Artificial Sequence: Synthetic oligonucleotide
  Sense strand starting at position 3179 of SEQ ID NO: 1881625
aaaugcuaucucugaguug

SEQ ID NO: 2059061 - RNA, 19 nt, Artificial Sequence
  Description of Artificial Sequence: Synthetic oligonucleotide
  Antisense strand to SEQ ID NO: 2059060
caacucagagauagcauuu

SEQ ID NO: 2059062 - RNA, 19 nt, Artificial Sequence
  Description of Artificial Sequence: Synthetic oligonucleotide
  Sense strand starting at position 3186 of SEQ ID NO: 1881625
aucucugaguuguuauaag

SEQ ID NO: 2059063 - RNA, 19 nt, Artificial Sequence
  Description of Artificial Sequence: Synthetic oligonucleotide
  Antisense strand to SEQ ID NO: 2059062
cuuauaacaacucagagau

SEQ ID NO: 2059064 - RNA, 19 nt, Artificial Sequence
  Description of Artificial Sequence: Synthetic oligonucleotide
  Sense strand starting at position 3263 of SEQ ID NO: 1881625
uuuguuaaguuauccagau

SEQ ID NO: 2059065 - RNA, 19 nt, Artificial Sequence
  Description of Artificial Sequence: Synthetic oligonucleotide
  Antisense strand to SEQ ID NO: 2059064
aucuggauaacuuaacaaa

SEQ ID NO: 2059066 - RNA, 19 nt, Artificial Sequence
  Description of Artificial Sequence: Synthetic oligonucleotide
  Sense strand starting at position 3264 of SEQ ID NO: 1881625
uuguuaaguuauccagaug

SEQ ID NO: 2059067 - RNA, 19 nt, Artificial Sequence
  Description of Artificial Sequence: Synthetic oligonucleotide
  Antisense strand to SEQ ID NO: 2059066
caucuggauaacuuaacaa

SEQ ID NO: 2059068 - RNA, 19 nt, Artificial Sequence
  Description of Artificial Sequence: Synthetic oligonucleotide
  Sense strand starting at position 3265 of SEQ ID NO: 1881625
uguuaaguuauccagaugu

SEQ ID NO: 2059069 - RNA, 19 nt, Artificial Sequence
  Description of Artificial Sequence: Synthetic oligonucleotide
  Antisense strand to SEQ ID NO: 2059068
acaucuggauaacuuaaca

SEQ ID NO: 2059070 - RNA, 19 nt, Artificial Sequence
  Description of Artificial Sequence: Synthetic oligonucleotide
  Sense strand starting at position 3267 of SEQ ID NO: 1881625
uuaaguuauccagaugugu

SEQ ID NO: 2059071 - RNA, 19 nt, Artificial Sequence
  Description of Artificial Sequence: Synthetic oligonucleotide
  Antisense strand to SEQ ID NO: 2059070
acacaucuggauaacuuaa

SEQ ID NO: 2059072 - RNA, 19 nt, Artificial Sequence
  Description of Artificial Sequence: Synthetic oligonucleotide
  Sense strand starting at position 3385 of SEQ ID NO: 1881625
gaguuugcagacugagcaa

SEQ ID NO: 2059073 - RNA, 19 nt, Artificial Sequence
  Description of Artificial Sequence: Synthetic oligonucleotide
  Antisense strand to SEQ ID NO: 2059072
uugcucagucugcaaacuc

SEQ ID NO: 2059074 - RNA, 19 nt, Artificial Sequence
  Description of Artificial Sequence: Synthetic oligonucleotide
  Sense strand starting at position 3410 of SEQ ID NO: 1881625
aggaaugaagauuguaguu

SEQ ID NO: 2059075 - RNA, 19 nt, Artificial Sequence
  Description of Artificial Sequence: Synthetic oligonucleotide
  Antisense strand to SEQ ID NO: 2059074
aacuacaaucuucauuccu

SEQ ID NO: 2059076 - RNA, 19 nt, Artificial Sequence
  Description of Artificial Sequence: Synthetic oligonucleotide
  Sense strand starting at position 3415 of SEQ ID NO: 1881625
ugaagauuguaguuucuca

SEQ ID NO: 2059077 - RNA, 19 nt, Artificial Sequence
  Description of Artificial Sequence: Synthetic oligonucleotide
  Antisense strand to SEQ ID NO: 2059076
ugagaaacuacaaucuuca

SEQ ID NO: 2059078 - RNA, 19 nt, Artificial Sequence
  Description of Artificial Sequence: Synthetic oligonucleotide
  Sense strand starting at position 3483 of SEQ ID NO: 1881625
gcagaauuccuaugaauuc

SEQ ID NO: 2059079 - RNA, 19 nt, Artificial Sequence
  Description of Artificial Sequence: Synthetic oligonucleotide
  Antisense strand to SEQ ID NO: 2059078
gaauucauaggaauucugc

SEQ ID NO: 2059080 - RNA, 19 nt, Artificial Sequence
  Description of Artificial Sequence: Synthetic oligonucleotide
  Sense strand starting at position 3627 of SEQ ID NO: 1881625
uccuuuguucagggagaag

SEQ ID NO: 2059081 - RNA, 19 nt, Artificial Sequence
  Description of Artificial Sequence: Synthetic oligonucleotide
  Antisense strand to SEQ ID NO: 2059080
cuucucccugaacaaagga

SEQ ID NO: 2059082 - RNA, 19 nt, Artificial Sequence
  Description of Artificial Sequence: Synthetic oligonucleotide
  Sense strand starting at position 3803 of SEQ ID NO: 1881625
uuaaaucugccucaggaau

SEQ ID NO: 2059083 - RNA, 19 nt, Artificial Sequence
  Description of Artificial Sequence: Synthetic oligonucleotide
  Antisense strand to SEQ ID NO: 2059082
auuccugaggcagauuuaa

SEQ ID NO: 2059084 - RNA, 19 nt, Artificial Sequence
  Description of Artificial Sequence: Synthetic oligonucleotide
  Sense strand starting at position 3853 of SEQ ID NO: 1881625
uguuguuaaguguaagaga

SEQ ID NO: 2059085 - RNA, 19 nt, Artificial Sequence
  Description of Artificial Sequence: Synthetic oligonucleotide
  Antisense strand to SEQ ID NO: 2059084
ucucuuacacuuaacaaca

SEQ ID NO: 2059086 - RNA, 19 nt, Artificial Sequence
  Description of Artificial Sequence: Synthetic oligonucleotide
  Sense strand starting at position 7 of SEQ ID NO: 1881626
ucagcuguuguagagguaa

SEQ ID NO: 2059087 - RNA, 19 nt, Artificial Sequence
  Description of Artificial Sequence: Synthetic oligonucleotide
  Antisense strand to SEQ ID NO: 2059086
uuaccucuacaacagcuga

SEQ ID NO: 2059088 - RNA, 19 nt, Artificial Sequence
  Description of Artificial Sequence: Synthetic oligonucleotide
  Sense strand starting at position 687 of SEQ ID NO: 1881626
aagaguugugggugaguau

SEQ ID NO: 2059089 - RNA, 19 nt, Artificial Sequence
  Description of Artificial Sequence: Synthetic oligonucleotide
  Antisense strand to SEQ ID NO: 2059088
auacucacccacaacucuu

SEQ ID NO: 2059090 - RNA, 19 nt, Artificial Sequence
  Description of Artificial Sequence: Synthetic oligonucleotide
  Sense strand starting at position 688 of SEQ ID NO: 1881626
agaguugugggugaguauu

SEQ ID NO: 2059091 - RNA, 19 nt, Artificial Sequence
  Description of Artificial Sequence: Synthetic oligonucleotide
  Antisense strand to SEQ ID NO: 2059090
aauacucacccacaacucu

SEQ ID NO: 2059092 - RNA, 19 nt, Artificial Sequence
  Description of Artificial Sequence: Synthetic oligonucleotide
  Sense strand starting at position 715 of SEQ ID NO: 1881626
uuuaaauagguguaguuga

SEQ ID NO: 2059093 - RNA, 19 nt, Artificial Sequence
  Description of Artificial Sequence: Synthetic oligonucleotide
  Antisense strand to SEQ ID NO: 2059092
ucaacuacaccuauuuaaa

SEQ ID NO: 2059094 - RNA, 19 nt, Artificial Sequence
  Description of Artificial Sequence: Synthetic oligonucleotide
  Sense strand starting at position 720 of SEQ ID NO: 1881626
auagguguaguugaaguaa

SEQ ID NO: 2059095 - RNA, 19 nt, Artificial Sequence
  Description of Artificial Sequence: Synthetic oligonucleotide
  Antisense strand to SEQ ID NO: 2059094
uuacuucaacuacaccuau

SEQ ID NO: 2059096 - RNA, 19 nt, Artificial Sequence
  Description of Artificial Sequence: Synthetic oligonucleotide
  Sense strand starting at position 729 of SEQ ID NO: 1881626
guugaaguaagaugaacua

SEQ ID NO: 2059097 - RNA, 19 nt, Artificial Sequence
  Description of Artificial Sequence: Synthetic oligonucleotide
  Antisense strand to SEQ ID NO: 2059096
uaguucaucuuacuucaac

SEQ ID NO: 2059098 - RNA, 19 nt, Artificial Sequence
  Description of Artificial Sequence: Synthetic oligonucleotide
  Sense strand starting at position 1226 of SEQ ID NO: 1881626
ugucuuaacggagagcuuu

SEQ ID NO: 2059099 - RNA, 19 nt, Artificial Sequence
  Description of Artificial Sequence: Synthetic oligonucleotide
  Antisense strand to SEQ ID NO: 2059098
aaagcucuccguuaagaca

SEQ ID NO: 2059100 - RNA, 19 nt, Artificial Sequence
  Description of Artificial Sequence: Synthetic oligonucleotide
  Sense strand starting at position 1415 of SEQ ID NO: 1881626
gguuuaaauucugucauug

SEQ ID NO: 2059101 - RNA, 19 nt, Artificial Sequence
  Description of Artificial Sequence: Synthetic oligonucleotide
  Antisense strand to SEQ ID NO: 2059100
caaugacagaauuuaaacc

SEQ ID NO: 2059102 - RNA, 19 nt, Artificial Sequence
  Description of Artificial Sequence: Synthetic oligonucleotide
  Sense strand starting at position 1425 of SEQ ID NO: 1881626
cugucauuggcuuaacaau

SEQ ID NO: 2059103 - RNA, 19 nt, Artificial Sequence
  Description of Artificial Sequence: Synthetic oligonucleotide
  Antisense strand to SEQ ID NO: 2059102
auuguuaagccaaugacag

SEQ ID NO: 2059104 - RNA, 19 nt, Artificial Sequence
  Description of Artificial Sequence: Synthetic oligonucleotide
  Sense strand starting at position 1491 of SEQ ID NO: 1881626
gcauauuagcaacaguaau

SEQ ID NO: 2059105 - RNA, 19 nt, Artificial Sequence
  Description of Artificial Sequence: Synthetic oligonucleotide
  Antisense strand to SEQ ID NO: 2059104
auuacuguugcuaauaugc

SEQ ID NO: 2059106 - RNA, 19 nt, Artificial Sequence
  Description of Artificial Sequence: Synthetic oligonucleotide
  Sense strand starting at position 1504 of SEQ ID NO: 1881626
aguaauggccuguagccaa

SEQ ID NO: 2059107 - RNA, 19 nt, Artificial Sequence
  Description of Artificial Sequence: Synthetic oligonucleotide
  Antisense strand to SEQ ID NO: 2059106
uuggcuacaggccauuacu

SEQ ID NO: 2059108 - RNA, 19 nt, Artificial Sequence
  Description of Artificial Sequence: Synthetic oligonucleotide
  Sense strand starting at position 1541 of SEQ ID NO: 1881626
gcguuaacgcaauugcuga

SEQ ID NO: 2059109 - RNA, 19 nt, Artificial Sequence
  Description of Artificial Sequence: Synthetic oligonucleotide
  Antisense strand to SEQ ID NO: 2059108
ucagcaauugcguuaacgc

SEQ ID NO: 2059110 - RNA, 19 nt, Artificial Sequence
  Description of Artificial Sequence: Synthetic oligonucleotide
  Sense strand starting at position 1689 of SEQ ID NO: 1881626
agcugcggucaauacaaua

SEQ ID NO: 2059111 - RNA, 19 nt, Artificial Sequence
  Description of Artificial Sequence: Synthetic oligonucleotide
  Antisense strand to SEQ ID NO: 2059110
uauuguauugaccgcagcu

SEQ ID NO: 2059112 - RNA, 19 nt, Artificial Sequence
  Description of Artificial Sequence: Synthetic oligonucleotide
  Sense strand starting at position 1694 of SEQ ID NO: 1881626
cggucaauacaauaaaguu

SEQ ID NO: 2059113 - RNA, 19 nt, Artificial Sequence
  Description of Artificial Sequence: Synthetic oligonucleotide
  Antisense strand to SEQ ID NO: 2059112
aacuuuauuguauugaccg

SEQ ID NO: 2059114 - RNA, 19 nt, Artificial Sequence
  Description of Artificial Sequence: Synthetic oligonucleotide
  Sense strand starting at position 1768 of SEQ ID NO: 1881626
ggaagcacuuacuucuuua

SEQ ID NO: 2059115 - RNA, 19 nt, Artificial Sequence
  Description of Artificial Sequence: Synthetic oligonucleotide
  Antisense strand to SEQ ID NO: 2059114
uaaagaaguaagugcuucc

SEQ ID NO: 2059116 - RNA, 19 nt, Artificial Sequence
  Description of Artificial Sequence: Synthetic oligonucleotide
  Sense strand starting at position 1842 of SEQ ID NO: 1881626
guuagaauccuuuaaccug

SEQ ID NO: 2059117 - RNA, 19 nt, Artificial Sequence
  Description of Artificial Sequence: Synthetic oligonucleotide
  Antisense strand to SEQ ID NO: 2059116
cagguuaaaggauucuaac

SEQ ID NO: 2059118 - RNA, 19 nt, Artificial Sequence
  Description of Artificial Sequence: Synthetic oligonucleotide
  Sense strand starting at position 2228 of SEQ ID NO: 1881626
cugaacuaguucccaaaga

SEQ ID NO: 2059119 - RNA, 19 nt, Artificial Sequence
  Description of Artificial Sequence: Synthetic oligonucleotide
  Antisense strand to SEQ ID NO: 2059118
ucuuugggaacuaguucag

SEQ ID NO: 2059120 - RNA, 19 nt, Artificial Sequence
  Description of Artificial Sequence: Synthetic oligonucleotide
  Sense strand starting at position 2380 of SEQ ID NO: 1881626
ucagcucucagggaaugua

SEQ ID NO: 2059121 - RNA, 19 nt, Artificial Sequence
  Description of Artificial Sequence: Synthetic oligonucleotide
  Antisense strand to SEQ ID NO: 2059120
uacauucccugagagcuga

SEQ ID NO: 2059122 - RNA, 19 nt, Artificial Sequence
  Description of Artificial Sequence: Synthetic oligonucleotide
  Sense strand starting at position 2383 of SEQ ID NO: 1881626
gcucucagggaauguauga

SEQ ID NO: 2059123 - RNA, 19 nt, Artificial Sequence
  Description of Artificial Sequence: Synthetic oligonucleotide
  Antisense strand to SEQ ID NO: 2059122
ucauacauucccugagagc

SEQ ID NO: 2059124 - RNA, 19 nt, Artificial Sequence
  Description of Artificial Sequence: Synthetic oligonucleotide
  Sense strand starting at position 2595 of SEQ ID NO: 1881626
uguguuucuaucuggagga

SEQ ID NO: 2059125 - RNA, 19 nt, Artificial Sequence
  Description of Artificial Sequence: Synthetic oligonucleotide
  Antisense strand to SEQ ID NO: 2059124
uccuccagauagaaacaca

SEQ ID NO: 2059126 - RNA, 19 nt, Artificial Sequence
  Description of Artificial Sequence: Synthetic oligonucleotide
  Sense strand starting at position 2802 of SEQ ID NO: 1881626
aaauguuacuaguuaagga

SEQ ID NO: 2059127 - RNA, 19 nt, Artificial Sequence
  Description of Artificial Sequence: Synthetic oligonucleotide
  Antisense strand to SEQ ID NO: 2059126
uccuuaacuaguaacauuu

SEQ ID NO: 2059128 - RNA, 19 nt, Artificial Sequence
  Description of Artificial Sequence: Synthetic oligonucleotide
  Sense strand starting at position 2920 of SEQ ID NO: 1881626
ggaacucccuuagcuuauu

SEQ ID NO: 2059129 - RNA, 19 nt, Artificial Sequence
  Description of Artificial Sequence: Synthetic oligonucleotide
  Antisense strand to SEQ ID NO: 2059128
aauaagcuaagggaguucc

SEQ ID NO: 2059130 - RNA, 19 nt, Artificial Sequence
  Description of Artificial Sequence: Synthetic oligonucleotide
  Sense strand starting at position 2940 of SEQ ID NO: 1881626
ugcuaaaugucuuuagaac

SEQ ID NO: 2059131 - RNA, 19 nt, Artificial Sequence
  Description of Artificial Sequence: Synthetic oligonucleotide
  Antisense strand to SEQ ID NO: 2059130
guucuaaagacauuuagca

SEQ ID NO: 2059132 - RNA, 19 nt, Artificial Sequence
  Description of Artificial Sequence: Synthetic oligonucleotide
  Sense strand starting at position 2941 of SEQ ID NO: 1881626
gcuaaaugucuuuagaacc

SEQ ID NO: 2059133 - RNA, 19 nt, Artificial Sequence
  Description of Artificial Sequence: Synthetic oligonucleotide
  Antisense strand to SEQ ID NO: 2059132
gguucuaaagacauuuagc

SEQ ID NO: 2059134 - RNA, 19 nt, Artificial Sequence
  Description of Artificial Sequence: Synthetic oligonucleotide
  Sense strand starting at position 3072 of SEQ ID NO: 1881626
agucaucuguuaucaccau

SEQ ID NO: 2059135 - RNA, 19 nt, Artificial Sequence
  Description of Artificial Sequence: Synthetic oligonucleotide
  Antisense strand to SEQ ID NO: 2059134
auggugauaacagaugacu

SEQ ID NO: 2059136 - RNA, 19 nt, Artificial Sequence
  Description of Artificial Sequence: Synthetic oligonucleotide
  Sense strand starting at position 3256 of SEQ ID NO: 1881626
aguaaagaucacugauagu

SEQ ID NO: 2059137 - RNA, 19 nt, Artificial Sequence
  Description of Artificial Sequence: Synthetic oligonucleotide
  Antisense strand to SEQ ID NO: 2059136
acuaucagugaucuuuacu

SEQ ID NO: 2059138 - RNA, 19 nt, Artificial Sequence
  Description of Artificial Sequence: Synthetic oligonucleotide
  Sense strand starting at position 3303 of SEQ ID NO: 1881626
uguaaaugcuaucucugag

SEQ ID NO: 2059139 - RNA, 19 nt, Artificial Sequence
  Description of Artificial Sequence: Synthetic oligonucleotide
  Antisense strand to SEQ ID NO: 2059138
cucagagauagcauuuaca

SEQ ID NO: 2059140 - RNA, 19 nt, Artificial Sequence
  Description of Artificial Sequence: Synthetic oligonucleotide
  Sense strand starting at position 3306 of SEQ ID NO: 1881626
aaaugcuaucucugaguug

SEQ ID NO: 2059141 - RNA, 19 nt, Artificial Sequence
  Description of Artificial Sequence: Synthetic oligonucleotide
  Antisense strand to SEQ ID NO: 2059140
caacucagagauagcauuu

SEQ ID NO: 2059142 - RNA, 19 nt, Artificial Sequence
  Description of Artificial Sequence: Synthetic oligonucleotide
  Sense strand starting at position 3313 of SEQ ID NO: 1881626
aucucugaguuguuauaag

SEQ ID NO: 2059143 - RNA, 19 nt, Artificial Sequence
  Description of Artificial Sequence: Synthetic oligonucleotide
  Antisense strand to SEQ ID NO: 2059142
cuuauaacaacucagagau

SEQ ID NO: 2059144 - RNA, 19 nt, Artificial Sequence
  Description of Artificial Sequence: Synthetic oligonucleotide
  Sense strand starting at position 3390 of SEQ ID NO: 1881626
uuuguuaaguuauccagau

SEQ ID NO: 2059145 - RNA, 19 nt, Artificial Sequence
  Description of Artificial Sequence: Synthetic oligonucleotide
  Antisense strand to SEQ ID NO: 2059144
aucuggauaacuuaacaaa

SEQ ID NO: 2059146 - RNA, 19 nt, Artificial Sequence
  Description of Artificial Sequence: Synthetic oligonucleotide
  Sense strand starting at position 3391 of SEQ ID NO: 1881626
uuguuaaguuauccagaug

SEQ ID NO: 2059147 - RNA, 19 nt, Artificial Sequence
  Description of Artificial Sequence: Synthetic oligonucleotide
  Antisense strand to SEQ ID NO: 2059146
caucuggauaacuuaacaa

SEQ ID NO: 2059148 - RNA, 19 nt, Artificial Sequence
  Description of Artificial Sequence: Synthetic oligonucleotide
  Sense strand starting at position 3392 of SEQ ID NO: 1881626
uguuaaguuauccagaugu

SEQ ID NO: 2059149 - RNA, 19 nt, Artificial Sequence
  Description of Artificial Sequence: Synthetic oligonucleotide
  Antisense strand to SEQ ID NO: 2059148
acaucuggauaacuuaaca

SEQ ID NO: 2059150 - RNA, 19 nt, Artificial Sequence
  Description of Artificial Sequence: Synthetic oligonucleotide
  Sense strand starting at position 3394 of SEQ ID NO: 1881626
uuaaguuauccagaugugu

SEQ ID NO: 2059151 - RNA, 19 nt, Artificial Sequence
  Description of Artificial Sequence: Synthetic oligonucleotide
  Antisense strand to SEQ ID NO: 2059150
acacaucuggauaacuuaa

SEQ ID NO: 2059152 - RNA, 19 nt, Artificial Sequence
  Description of Artificial Sequence: Synthetic oligonucleotide
  Sense strand starting at position 3512 of SEQ ID NO: 1881626
gaguuugcagacugagcaa

SEQ ID NO: 2059153 - RNA, 19 nt, Artificial Sequence
  Description of Artificial Sequence: Synthetic oligonucleotide
  Antisense strand to SEQ ID NO: 2059152
uugcucagucugcaaacuc

SEQ ID NO: 2059154 - RNA, 19 nt, Artificial Sequence
  Description of Artificial Sequence: Synthetic oligonucleotide
  Sense strand starting at position 3537 of SEQ ID NO: 1881626
aggaaugaagauuguaguu

SEQ ID NO: 2059155 - RNA, 19 nt, Artificial Sequence
  Description of Artificial Sequence: Synthetic oligonucleotide
  Antisense strand to SEQ ID NO: 2059154
aacuacaaucuucauuccu

SEQ ID NO: 2059156 - RNA, 19 nt, Artificial Sequence
  Description of Artificial Sequence: Synthetic oligonucleotide
  Sense strand starting at position 3542 of SEQ ID NO: 1881626
ugaagauuguaguuucuca

SEQ ID NO: 2059157 - RNA, 19 nt, Artificial Sequence
  Description of Artificial Sequence: Synthetic oligonucleotide
  Antisense strand to SEQ ID NO: 2059156
ugagaaacuacaaucuuca

SEQ ID NO: 2059158 - RNA, 19 nt, Artificial Sequence
  Description of Artificial Sequence: Synthetic oligonucleotide
  Sense strand starting at position 3610 of SEQ ID NO: 1881626
gcagaauuccuaugaauuc

SEQ ID NO: 2059159 - RNA, 19 nt, Artificial Sequence
  Description of Artificial Sequence: Synthetic oligonucleotide
  Antisense strand to SEQ ID NO: 2059158
gaauucauaggaauucugc

SEQ ID NO: 2059160 - RNA, 19 nt, Artificial Sequence
  Description of Artificial Sequence: Synthetic oligonucleotide
  Sense strand starting at position 3754 of SEQ ID NO: 1881626
uccuuuguucagggagaag

SEQ ID NO: 2059161 - RNA, 19 nt, Artificial Sequence
  Description of Artificial Sequence: Synthetic oligonucleotide
  Antisense strand to SEQ ID NO: 2059160
cuucucccugaacaaagga

SEQ ID NO: 2059162 - RNA, 19 nt, Artificial Sequence
  Description of Artificial Sequence: Synthetic oligonucleotide
  Sense strand starting at position 3930 of SEQ ID NO: 1881626
uuaaaucugccucaggaau

SEQ ID NO: 2059163 - RNA, 19 nt, Artificial Sequence
  Description of Artificial Sequence: Synthetic oligonucleotide
  Antisense strand to SEQ ID NO: 2059162
auuccugaggcagauuuaa

SEQ ID NO: 2059164 - RNA, 19 nt, Artificial Sequence
  Description of Artificial Sequence: Synthetic oligonucleotide
  Sense strand starting at position 3980 of SEQ ID NO: 1881626
uguuguuaaguguaagaga

SEQ ID NO: 2059165 - RNA, 19 nt, Artificial Sequence
  Description of Artificial Sequence: Synthetic oligonucleotide
  Antisense strand to SEQ ID NO: 2059164
ucucuuacacuuaacaaca

SEQ ID NO: 2059166 - RNA, 19 nt, Artificial Sequence
  Description of Artificial Sequence: Synthetic oligonucleotide
  Sense strand starting at position 366 of SEQ ID NO: 1881627
ucagcuguuguagagguaa

SEQ ID NO: 2059167 - RNA, 19 nt, Artificial Sequence
  Description of Artificial Sequence: Synthetic oligonucleotide
  Antisense strand to SEQ ID NO: 2059166
uuaccucuacaacagcuga

SEQ ID NO: 2059168 - RNA, 19 nt, Artificial Sequence
  Description of Artificial Sequence: Synthetic oligonucleotide
  Sense strand starting at position 1046 of SEQ ID NO: 1881627
aagaguugugggugaguau

SEQ ID NO: 2059169 - RNA, 19 nt, Artificial Sequence
  Description of Artificial Sequence: Synthetic oligonucleotide
  Antisense strand to SEQ ID NO: 2059168
auacucacccacaacucuu

SEQ ID NO: 2059170 - RNA, 19 nt, Artificial Sequence
  Description of Artificial Sequence: Synthetic oligonucleotide
  Sense strand starting at position 1047 of SEQ ID NO: 1881627
agaguugugggugaguauu

SEQ ID NO: 2059171 - RNA, 19 nt, Artificial Sequence
  Description of Artificial Sequence: Synthetic oligonucleotide
  Antisense strand to SEQ ID NO: 2059170
aauacucacccacaacucu

SEQ ID NO: 2059172 - RNA, 19 nt, Artificial Sequence
  Description of Artificial Sequence: Synthetic oligonucleotide
  Sense strand starting at position 1074 of SEQ ID NO: 1881627
uuuaaauagguguaguuga

SEQ ID NO: 2059173 - RNA, 19 nt, Artificial Sequence
  Description of Artificial Sequence: Synthetic oligonucleotide
  Antisense strand to SEQ ID NO: 2059172
ucaacuacaccuauuuaaa

SEQ ID NO: 2059174 - RNA, 19 nt, Artificial Sequence
  Description of Artificial Sequence: Synthetic oligonucleotide
  Sense strand starting at position 1079 of SEQ ID NO: 1881627
auagguguaguugaaguaa

SEQ ID NO: 2059175 - RNA, 19 nt, Artificial Sequence
  Description of Artificial Sequence: Synthetic oligonucleotide
  Antisense strand to SEQ ID NO: 2059174
uuacuucaacuacaccuau

SEQ ID NO: 2059176 - RNA, 19 nt, Artificial Sequence
  Description of Artificial Sequence: Synthetic oligonucleotide
  Sense strand starting at position 1088 of SEQ ID NO: 1881627
guugaaguaagaugaacua

SEQ ID NO: 2059177 - RNA, 19 nt, Artificial Sequence
  Description of Artificial Sequence: Synthetic oligonucleotide
  Antisense strand to SEQ ID NO: 2059176
uaguucaucuuacuucaac

SEQ ID NO: 2059178 - RNA, 19 nt, Artificial Sequence
  Description of Artificial Sequence: Synthetic oligonucleotide
  Sense strand starting at position 1585 of SEQ ID NO: 1881627
ugucuuaacggagagcuuu

SEQ ID NO: 2059179 - RNA, 19 nt, Artificial Sequence
  Description of Artificial Sequence: Synthetic oligonucleotide
  Antisense strand to SEQ ID NO: 2059178
aaagcucuccguuaagaca

SEQ ID NO: 2059180 - RNA, 19 nt, Artificial Sequence
  Description of Artificial Sequence: Synthetic oligonucleotide
  Sense strand starting at position 1774 of SEQ ID NO: 1881627
gguuuaaauucugucauug

SEQ ID NO: 2059181 - RNA, 19 nt, Artificial Sequence
  Description of Artificial Sequence: Synthetic oligonucleotide
  Antisense strand to SEQ ID NO: 2059180
caaugacagaauuuaaacc

SEQ ID NO: 2059182 - RNA, 19 nt, Artificial Sequence
  Description of Artificial Sequence: Synthetic oligonucleotide
  Sense strand starting at position 1784 of SEQ ID NO: 1881627
cugucauuggcuuaacaau

SEQ ID NO: 2059183 - RNA, 19 nt, Artificial Sequence
  Description of Artificial Sequence: Synthetic oligonucleotide
  Antisense strand to SEQ ID NO: 2059182
auuguuaagccaaugacag

SEQ ID NO: 2059184 - RNA, 19 nt, Artificial Sequence
  Description of Artificial Sequence: Synthetic oligonucleotide
  Sense strand starting at position 1850 of SEQ ID NO: 1881627
gcauauuagcaacaguaau

SEQ ID NO: 2059185 - RNA, 19 nt, Artificial Sequence
  Description of Artificial Sequence: Synthetic oligonucleotide
  Antisense strand to SEQ ID NO: 2059184
auuacuguugcuaauaugc

SEQ ID NO: 2059186 - RNA, 19 nt, Artificial Sequence
  Description of Artificial Sequence: Synthetic oligonucleotide
  Sense strand starting at position 1863 of SEQ ID NO: 1881627
aguaauggccuguagccaa

SEQ ID NO: 2059187 - RNA, 19 nt, Artificial Sequence
  Description of Artificial Sequence: Synthetic oligonucleotide
  Antisense strand to SEQ ID NO: 2059186
uuggcuacaggccauuacu

SEQ ID NO: 2059188 - RNA, 19 nt, Artificial Sequence
  Description of Artificial Sequence: Synthetic oligonucleotide
  Sense strand starting at position 1900 of SEQ ID NO: 1881627
gcguuaacgcaauugcuga

SEQ ID NO: 2059189 - RNA, 19 nt, Artificial Sequence
  Description of Artificial Sequence: Synthetic oligonucleotide
  Antisense strand to SEQ ID NO: 2059188
ucagcaauugcguuaacgc

SEQ ID NO: 2059190 - RNA, 19 nt, Artificial Sequence
  Description of Artificial Sequence: Synthetic oligonucleotide
  Sense strand starting at position 2048 of SEQ ID NO: 1881627
agcugcggucaauacaaua

SEQ ID NO: 2059191 - RNA, 19 nt, Artificial Sequence
  Description of Artificial Sequence: Synthetic oligonucleotide
  Antisense strand to SEQ ID NO: 2059190
uauuguauugaccgcagcu

SEQ ID NO: 2059192 - RNA, 19 nt, Artificial Sequence
  Description of Artificial Sequence: Synthetic oligonucleotide
  Sense strand starting at position 2053 of SEQ ID NO: 1881627
cggucaauacaauaaaguu

SEQ ID NO: 2059193 - RNA, 19 nt, Artificial Sequence
  Description of Artificial Sequence: Synthetic oligonucleotide
  Antisense strand to SEQ ID NO: 2059192
aacuuuauuguauugaccg

SEQ ID NO: 2059194 - RNA, 19 nt, Artificial Sequence
  Description of Artificial Sequence: Synthetic oligonucleotide
  Sense strand starting at position 2127 of SEQ ID NO: 1881627
ggaagcacuuacuucuuua

SEQ ID NO: 2059195 - RNA, 19 nt, Artificial Sequence
  Description of Artificial Sequence: Synthetic oligonucleotide
  Antisense strand to SEQ ID NO: 2059194
uaaagaaguaagugcuucc

SEQ ID NO: 2059196 - RNA, 19 nt, Artificial Sequence
  Description of Artificial Sequence: Synthetic oligonucleotide
  Sense strand starting at position 2201 of SEQ ID NO: 1881627
guuagaauccuuuaaccug

SEQ ID NO: 2059197 - RNA, 19 nt, Artificial Sequence
  Description of Artificial Sequence: Synthetic oligonucleotide
  Antisense strand to SEQ ID NO: 2059196
cagguuaaaggauucuaac

SEQ ID NO: 2059198 - RNA, 19 nt, Artificial Sequence
  Description of Artificial Sequence: Synthetic oligonucleotide
  Sense strand starting at position 2375 of SEQ ID NO: 1881627
agguuagcguguucuauuu

SEQ ID NO: 2059199 - RNA, 19 nt, Artificial Sequence
  Description of Artificial Sequence: Synthetic oligonucleotide
  Antisense strand to SEQ ID NO: 2059198
aaauagaacacgcuaaccu

SEQ ID NO: 2059200 - RNA, 19 nt, Artificial Sequence
  Description of Artificial Sequence: Synthetic oligonucleotide
  Sense strand starting at position 2587 of SEQ ID NO: 1881627
cugaacuaguucccaaaga

SEQ ID NO: 2059201 - RNA, 19 nt, Artificial Sequence
  Description of Artificial Sequence: Synthetic oligonucleotide
  Antisense strand to SEQ ID NO: 2059200
ucuuugggaacuaguucag

SEQ ID NO: 2059202 - RNA, 19 nt, Artificial Sequence
  Description of Artificial Sequence: Synthetic oligonucleotide
  Sense strand starting at position 2739 of SEQ ID NO: 1881627
ucagcucucagggaaugua

SEQ ID NO: 2059203 - RNA, 19 nt, Artificial Sequence
  Description of Artificial Sequence: Synthetic oligonucleotide
  Antisense strand to SEQ ID NO: 2059202
uacauucccugagagcuga

SEQ ID NO: 2059204 - RNA, 19 nt, Artificial Sequence
  Description of Artificial Sequence: Synthetic oligonucleotide
  Sense strand starting at position 2742 of SEQ ID NO: 1881627
gcucucagggaauguauga

SEQ ID NO: 2059205 - RNA, 19 nt, Artificial Sequence
  Description of Artificial Sequence: Synthetic oligonucleotide
  Antisense strand to SEQ ID NO: 2059204
ucauacauucccugagagc

SEQ ID NO: 2059206 - RNA, 19 nt, Artificial Sequence
  Description of Artificial Sequence: Synthetic oligonucleotide
  Sense strand starting at position 2954 of SEQ ID NO: 1881627
uguguuucuaucuggagga

SEQ ID NO: 2059207 - RNA, 19 nt, Artificial Sequence
  Description of Artificial Sequence: Synthetic oligonucleotide
  Antisense strand to SEQ ID NO: 2059206
uccuccagauagaaacaca

SEQ ID NO: 2059208 - RNA, 19 nt, Artificial Sequence
  Description of Artificial Sequence: Synthetic oligonucleotide
  Sense strand starting at position 3161 of SEQ ID NO: 1881627
aaauguuacuaguuaagga

SEQ ID NO: 2059209 - RNA, 19 nt, Artificial Sequence
  Description of Artificial Sequence: Synthetic oligonucleotide
  Antisense strand to SEQ ID NO: 2059208
uccuuaacuaguaacauuu

SEQ ID NO: 2059210 - RNA, 19 nt, Artificial Sequence
  Description of Artificial Sequence: Synthetic oligonucleotide
  Sense strand starting at position 3279 of SEQ ID NO: 1881627
ggaacucccuuagcuuauu

SEQ ID NO: 2059211 - RNA, 19 nt, Artificial Sequence
  Description of Artificial Sequence: Synthetic oligonucleotide
  Antisense strand to SEQ ID NO: 2059210
aauaagcuaagggaguucc

SEQ ID NO: 2059212 - RNA, 19 nt, Artificial Sequence
  Description of Artificial Sequence: Synthetic oligonucleotide
  Sense strand starting at position 3297 of SEQ ID NO: 1881627
uuugcuaaaugucuuuaga

SEQ ID NO: 2059213 - RNA, 19 nt, Artificial Sequence
  Description of Artificial Sequence: Synthetic oligonucleotide
  Antisense strand to SEQ ID NO: 2059212
ucuaaagacauuuagcaaa

SEQ ID NO: 2059214 - RNA, 19 nt, Artificial Sequence
  Description of Artificial Sequence: Synthetic oligonucleotide
  Sense strand starting at position 3299 of SEQ ID NO: 1881627
ugcuaaaugucuuuagaac

SEQ ID NO: 2059215 - RNA, 19 nt, Artificial Sequence
  Description of Artificial Sequence: Synthetic oligonucleotide
  Antisense strand to SEQ ID NO: 2059214
guucuaaagacauuuagca

SEQ ID NO: 2059216 - RNA, 19 nt, Artificial Sequence
  Description of Artificial Sequence: Synthetic oligonucleotide
  Sense strand starting at position 3300 of SEQ ID NO: 1881627
gcuaaaugucuuuagaacc

SEQ ID NO: 2059217 - RNA, 19 nt, Artificial Sequence
  Description of Artificial Sequence: Synthetic oligonucleotide
  Antisense strand to SEQ ID NO: 2059216
gguucuaaagacauuuagc

SEQ ID NO: 2059218 - RNA, 19 nt, Artificial Sequence
  Description of Artificial Sequence: Synthetic oligonucleotide
  Sense strand starting at position 3431 of SEQ ID NO: 1881627
agucaucuguuaucaccau

SEQ ID NO: 2059219 - RNA, 19 nt, Artificial Sequence
  Description of Artificial Sequence: Synthetic oligonucleotide
  Antisense strand to SEQ ID NO: 2059218
auggugauaacagaugacu

SEQ ID NO: 2059220 - RNA, 19 nt, Artificial Sequence
  Description of Artificial Sequence: Synthetic oligonucleotide
  Sense strand starting at position 3615 of SEQ ID NO: 1881627
aguaaagaucacugauagu

SEQ ID NO: 2059221 - RNA, 19 nt, Artificial Sequence
  Description of Artificial Sequence: Synthetic oligonucleotide
  Antisense strand to SEQ ID NO: 2059220
acuaucagugaucuuuacu

SEQ ID NO: 2059222 - RNA, 19 nt, Artificial Sequence
  Description of Artificial Sequence: Synthetic oligonucleotide
  Sense strand starting at position 3662 of SEQ ID NO: 1881627
uguaaaugcuaucucugag

SEQ ID NO: 2059223 - RNA, 19 nt, Artificial Sequence
  Description of Artificial Sequence: Synthetic oligonucleotide
  Antisense strand to SEQ ID NO: 2059222
cucagagauagcauuuaca

SEQ ID NO: 2059224 - RNA, 19 nt, Artificial Sequence
  Description of Artificial Sequence: Synthetic oligonucleotide
  Sense strand starting at position 3665 of SEQ ID NO: 1881627
aaaugcuaucucugaguug

SEQ ID NO: 2059225 - RNA, 19 nt, Artificial Sequence
  Description of Artificial Sequence: Synthetic oligonucleotide
  Antisense strand to SEQ ID NO: 2059224
caacucagagauagcauuu

SEQ ID NO: 2059226 - RNA, 19 nt, Artificial Sequence
  Description of Artificial Sequence: Synthetic oligonucleotide
  Sense strand starting at position 3672 of SEQ ID NO: 1881627
aucucugaguuguuauaag

SEQ ID NO: 2059227 - RNA, 19 nt, Artificial Sequence
  Description of Artificial Sequence: Synthetic oligonucleotide
  Antisense strand to SEQ ID NO: 2059226
cuuauaacaacucagagau

SEQ ID NO: 2059228 - RNA, 19 nt, Artificial Sequence
  Description of Artificial Sequence: Synthetic oligonucleotide
  Sense strand starting at position 3749 of SEQ ID NO: 1881627
uuuguuaaguuauccagau

SEQ ID NO: 2059229 - RNA, 19 nt, Artificial Sequence
  Description of Artificial Sequence: Synthetic oligonucleotide
  Antisense strand to SEQ ID NO: 2059228
aucuggauaacuuaacaaa

SEQ ID NO: 2059230 - RNA, 19 nt, Artificial Sequence
  Description of Artificial Sequence: Synthetic oligonucleotide
  Sense strand starting at position 3750 of SEQ ID NO: 1881627
uuguuaaguuauccagaug

SEQ ID NO: 2059231 - RNA, 19 nt, Artificial Sequence
  Description of Artificial Sequence: Synthetic oligonucleotide
  Antisense strand to SEQ ID NO: 2059230
caucuggauaacuuaacaa

SEQ ID NO: 2059232 - RNA, 19 nt, Artificial Sequence
  Description of Artificial Sequence: Synthetic oligonucleotide
  Sense strand starting at position 3751 of SEQ ID NO: 1881627
uguuaaguuauccagaugu

SEQ ID NO: 2059233 - RNA, 19 nt, Artificial Sequence
  Description of Artificial Sequence: Synthetic oligonucleotide
  Antisense strand to SEQ ID NO: 2059232
acaucuggauaacuuaaca

SEQ ID NO: 2059234 - RNA, 19 nt, Artificial Sequence
  Description of Artificial Sequence: Synthetic oligonucleotide
  Sense strand starting at position 3753 of SEQ ID NO: 1881627
uuaaguuauccagaugugu

SEQ ID NO: 2059235 - RNA, 19 nt, Artificial Sequence
  Description of Artificial Sequence: Synthetic oligonucleotide
  Antisense strand to SEQ ID NO: 2059234
acacaucuggauaacuuaa

SEQ ID NO: 2059236 - RNA, 19 nt, Artificial Sequence
  Description of Artificial Sequence: Synthetic oligonucleotide
  Sense strand starting at position 3766 of SEQ ID NO: 1881627
auguguuacuuacucuuga

SEQ ID NO: 2059237 - RNA, 19 nt, Artificial Sequence
  Description of Artificial Sequence: Synthetic oligonucleotide
  Antisense strand to SEQ ID NO: 2059236
ucaagaguaaguaacacau

SEQ ID NO: 2059238 - RNA, 19 nt, Artificial Sequence
  Description of Artificial Sequence: Synthetic oligonucleotide
  Sense strand starting at position 3871 of SEQ ID NO: 1881627
gaguuugcagacugagcaa

SEQ ID NO: 2059239 - RNA, 19 nt, Artificial Sequence
  Description of Artificial Sequence: Synthetic oligonucleotide
  Antisense strand to SEQ ID NO: 2059238
uugcucagucugcaaacuc

SEQ ID NO: 2059240 - RNA, 19 nt, Artificial Sequence
  Description of Artificial Sequence: Synthetic oligonucleotide
  Sense strand starting at position 3896 of SEQ ID NO: 1881627
aggaaugaagauuguaguu

SEQ ID NO: 2059241 - RNA, 19 nt, Artificial Sequence
  Description of Artificial Sequence: Synthetic oligonucleotide
  Antisense strand to SEQ ID NO: 2059240
aacuacaaucuucauuccu

SEQ ID NO: 2059242 - RNA, 19 nt, Artificial Sequence
  Description of Artificial Sequence: Synthetic oligonucleotide
  Sense strand starting at position 3901 of SEQ ID NO: 1881627
ugaagauuguaguuucuca

SEQ ID NO: 2059243 - RNA, 19 nt, Artificial Sequence
  Description of Artificial Sequence: Synthetic oligonucleotide
  Antisense strand to SEQ ID NO: 2059242
ugagaaacuacaaucuuca

SEQ ID NO: 2059244 - RNA, 19 nt, Artificial Sequence
  Description of Artificial Sequence: Synthetic oligonucleotide
  Sense strand starting at position 3969 of SEQ ID NO: 1881627
gcagaauuccuaugaauuc

SEQ ID NO: 2059245 - RNA, 19 nt, Artificial Sequence
  Description of Artificial Sequence: Synthetic oligonucleotide
  Antisense strand to SEQ ID NO: 2059244
gaauucauaggaauucugc

SEQ ID NO: 2059246 - RNA, 19 nt, Artificial Sequence
  Description of Artificial Sequence: Synthetic oligonucleotide
  Sense strand starting at position 235 of SEQ ID NO: 1881628
aaauguggcuaccaggaaa

SEQ ID NO: 2059247 - RNA, 19 nt, Artificial Sequence
  Description of Artificial Sequence: Synthetic oligonucleotide
  Antisense strand to SEQ ID NO: 2059246
uuuccugguagccacauuu

SEQ ID NO: 2059248 - RNA, 19 nt, Artificial Sequence
  Description of Artificial Sequence: Synthetic oligonucleotide
  Sense strand starting at position 262 of SEQ ID NO: 1881628
ccacaugaggcucacauua

SEQ ID NO: 2059249 - RNA, 19 nt, Artificial Sequence
  Description of Artificial Sequence: Synthetic oligonucleotide
  Antisense strand to SEQ ID NO: 2059248
uaaugugagccucaugugg

SEQ ID NO: 2059250 - RNA, 19 nt, Artificial Sequence
  Description of Artificial Sequence: Synthetic oligonucleotide
  Sense strand starting at position 264 of SEQ ID NO: 1881628
acaugaggcucacauuaua

SEQ ID NO: 2059251 - RNA, 19 nt, Artificial Sequence
  Description of Artificial Sequence: Synthetic oligonucleotide
  Antisense strand to SEQ ID NO: 2059250
uauaaugugagccucaugu

SEQ ID NO: 2059252 - RNA, 19 nt, Artificial Sequence
  Description of Artificial Sequence: Synthetic oligonucleotide
  Sense strand starting at position 319 of SEQ ID NO: 1881628
ggucccaggugggauuuaa

SEQ ID NO: 2059253 - RNA, 19 nt, Artificial Sequence
  Description of Artificial Sequence: Synthetic oligonucleotide
  Antisense strand to SEQ ID NO: 2059252
uuaaaucccaccugggacc

SEQ ID NO: 2059254 - RNA, 19 nt, Artificial Sequence
  Description of Artificial Sequence: Synthetic oligonucleotide
  Sense strand starting at position 446 of SEQ ID NO: 1881628
ugguguuugcuggauggaa

SEQ ID NO: 2059255 - RNA, 19 nt, Artificial Sequence
  Description of Artificial Sequence: Synthetic oligonucleotide
  Antisense strand to SEQ ID NO: 2059254
uuccauccagcaaacacca

SEQ ID NO: 2059256 - RNA, 19 nt, Artificial Sequence
  Description of Artificial Sequence: Synthetic oligonucleotide
  Sense strand starting at position 603 of SEQ ID NO: 1881628
ggaagucaccuuggaucuu

SEQ ID NO: 2059257 - RNA, 19 nt, Artificial Sequence
  Description of Artificial Sequence: Synthetic oligonucleotide
  Antisense strand to SEQ ID NO: 2059256
aagauccaaggugacuucc

SEQ ID NO: 2059258 - RNA, 19 nt, Artificial Sequence
  Description of Artificial Sequence: Synthetic oligonucleotide
  Sense strand starting at position 828 of SEQ ID NO: 1881628
aucccucauggcgacaaua

SEQ ID NO: 2059259 - RNA, 19 nt, Artificial Sequence
  Description of Artificial Sequence: Synthetic oligonucleotide
  Antisense strand to SEQ ID NO: 2059258
uauugucgccaugagggau

SEQ ID NO: 2059260 - RNA, 19 nt, Artificial Sequence
  Description of Artificial Sequence: Synthetic oligonucleotide
  Sense strand starting at position 853 of SEQ ID NO: 1881628
gagguuucucacgcgcuaa

SEQ ID NO: 2059261 - RNA, 19 nt, Artificial Sequence
  Description of Artificial Sequence: Synthetic oligonucleotide
  Antisense strand to SEQ ID NO: 2059260
uuagcgcgugagaaaccuc

SEQ ID NO: 2059262 - RNA, 19 nt, Artificial Sequence
  Description of Artificial Sequence: Synthetic oligonucleotide
  Sense strand starting at position 899 of SEQ ID NO: 1881628
acugacuccucagaagcau

SEQ ID NO: 2059263 - RNA, 19 nt, Artificial Sequence
  Description of Artificial Sequence: Synthetic oligonucleotide
  Antisense strand to SEQ ID NO: 2059262
augcuucugaggagucagu

SEQ ID NO: 2059264 - RNA, 19 nt, Artificial Sequence
  Description of Artificial Sequence: Synthetic oligonucleotide
  Sense strand starting at position 932 of SEQ ID NO: 1881628
gcuacuuguagaggcaaga

SEQ ID NO: 2059265 - RNA, 19 nt, Artificial Sequence
  Description of Artificial Sequence: Synthetic oligonucleotide
  Antisense strand to SEQ ID NO: 2059264
ucuugccucuacaaguagc

SEQ ID NO: 2059266 - RNA, 19 nt, Artificial Sequence
  Description of Artificial Sequence: Synthetic oligonucleotide
  Sense strand starting at position 981 of SEQ ID NO: 1881628
gucaccaagucacagauaa

SEQ ID NO: 2059267 - RNA, 19 nt, Artificial Sequence
  Description of Artificial Sequence: Synthetic oligonucleotide
  Antisense strand to SEQ ID NO: 2059266
uuaucugugacuuggugac

SEQ ID NO: 2059268 - RNA, 19 nt, Artificial Sequence
  Description of Artificial Sequence: Synthetic oligonucleotide
  Sense strand starting at position 1583 of SEQ ID NO: 1881628
gcaggacuggguuaucaga

SEQ ID NO: 2059269 - RNA, 19 nt, Artificial Sequence
  Description of Artificial Sequence: Synthetic oligonucleotide
  Antisense strand to SEQ ID NO: 2059268
ucugauaacccaguccugc

SEQ ID NO: 2059270 - RNA, 19 nt, Artificial Sequence
  Description of Artificial Sequence: Synthetic oligonucleotide
  Sense strand starting at position 1706 of SEQ ID NO: 1881628
ugagaauuaugccgaggca

SEQ ID NO: 2059271 - RNA, 19 nt, Artificial Sequence
  Description of Artificial Sequence: Synthetic oligonucleotide
  Antisense strand to SEQ ID NO: 2059270
ugccucggcauaauucuca

SEQ ID NO: 2059272 - RNA, 19 nt, Artificial Sequence
  Description of Artificial Sequence: Synthetic oligonucleotide
  Sense strand starting at position 1707 of SEQ ID NO: 1881628
gagaauuaugccgaggcag

SEQ ID NO: 2059273 - RNA, 19 nt, Artificial Sequence
  Description of Artificial Sequence: Synthetic oligonucleotide
  Antisense strand to SEQ ID NO: 2059272
cugccucggcauaauucuc

SEQ ID NO: 2059274 - RNA, 19 nt, Artificial Sequence
  Description of Artificial Sequence: Synthetic oligonucleotide
  Sense strand starting at position 1709 of SEQ ID NO: 1881628
gaauuaugccgaggcagaa

SEQ ID NO: 2059275 - RNA, 19 nt, Artificial Sequence
  Description of Artificial Sequence: Synthetic oligonucleotide
  Antisense strand to SEQ ID NO: 2059274
uucugccucggcauaauuc

SEQ ID NO: 2059276 - RNA, 19 nt, Artificial Sequence
  Description of Artificial Sequence: Synthetic oligonucleotide
  Sense strand starting at position 1765 of SEQ ID NO: 1881628
ccuugaagaugcugggaaa

SEQ ID NO: 2059277 - RNA, 19 nt, Artificial Sequence
  Description of Artificial Sequence: Synthetic oligonucleotide
  Antisense strand to SEQ ID NO: 2059276
uuucccagcaucuucaagg

SEQ ID NO: 2059278 - RNA, 19 nt, Artificial Sequence
  Description of Artificial Sequence: Synthetic oligonucleotide
  Sense strand starting at position 1768 of SEQ ID NO: 1881628
ugaagaugcugggaaacuu

SEQ ID NO: 2059279 - RNA, 19 nt, Artificial Sequence
  Description of Artificial Sequence: Synthetic oligonucleotide
  Antisense strand to SEQ ID NO: 2059278
aaguuucccagcaucuuca

SEQ ID NO: 2059280 - RNA, 19 nt, Artificial Sequence
  Description of Artificial Sequence: Synthetic oligonucleotide
  Sense strand starting at position 1776 of SEQ ID NO: 1881628
cugggaaacuucugucacu

SEQ ID NO: 2059281 - RNA, 19 nt, Artificial Sequence
  Description of Artificial Sequence: Synthetic oligonucleotide
  Antisense strand to SEQ ID NO: 2059280
agugacagaaguuucccag

SEQ ID NO: 2059282 - RNA, 19 nt, Artificial Sequence
  Description of Artificial Sequence: Synthetic oligonucleotide
  Sense strand starting at position 1779 of SEQ ID NO: 1881628
ggaaacuucugucacucuu

SEQ ID NO: 2059283 - RNA, 19 nt, Artificial Sequence
  Description of Artificial Sequence: Synthetic oligonucleotide
  Antisense strand to SEQ ID NO: 2059282
aagagugacagaaguuucc

SEQ ID NO: 2059284 - RNA, 19 nt, Artificial Sequence
  Description of Artificial Sequence: Synthetic oligonucleotide
  Sense strand starting at position 2095 of SEQ ID NO: 1881628
ccucgccuucccugagaca

SEQ ID NO: 2059285 - RNA, 19 nt, Artificial Sequence
  Description of Artificial Sequence: Synthetic oligonucleotide
  Antisense strand to SEQ ID NO: 2059284
ugucucagggaaggcgagg

SEQ ID NO: 2059286 - RNA, 19 nt, Artificial Sequence
  Description of Artificial Sequence: Synthetic oligonucleotide
  Sense strand starting at position 2473 of SEQ ID NO: 1881628
ucaugucccguuugacagu

SEQ ID NO: 2059287 - RNA, 19 nt, Artificial Sequence
  Description of Artificial Sequence: Synthetic oligonucleotide
  Antisense strand to SEQ ID NO: 2059286
acugucaaacgggacauga

SEQ ID NO: 2059288 - RNA, 19 nt, Artificial Sequence
  Description of Artificial Sequence: Synthetic oligonucleotide
  Sense strand starting at position 2480 of SEQ ID NO: 1881628
ccguuugacaguugcucua

SEQ ID NO: 2059289 - RNA, 19 nt, Artificial Sequence
  Description of Artificial Sequence: Synthetic oligonucleotide
  Antisense strand to SEQ ID NO: 2059288
uagagcaacugucaaacgg

SEQ ID NO: 2059290 - RNA, 19 nt, Artificial Sequence
  Description of Artificial Sequence: Synthetic oligonucleotide
  Sense strand starting at position 2579 of SEQ ID NO: 1881628
gcaccaccucuuggaaagu

SEQ ID NO: 2059291 - RNA, 19 nt, Artificial Sequence
  Description of Artificial Sequence: Synthetic oligonucleotide
  Antisense strand to SEQ ID NO: 2059290
acuuuccaagagguggugc

SEQ ID NO: 2059292 - RNA, 19 nt, Artificial Sequence
  Description of Artificial Sequence: Synthetic oligonucleotide
  Sense strand starting at position 2613 of SEQ ID NO: 1881628
ggaaucaacguucagggua

SEQ ID NO: 2059293 - RNA, 19 nt, Artificial Sequence
  Description of Artificial Sequence: Synthetic oligonucleotide
  Antisense strand to SEQ ID NO: 2059292
uacccugaacguugauucc

SEQ ID NO: 2059294 - RNA, 19 nt, Artificial Sequence
  Description of Artificial Sequence: Synthetic oligonucleotide
  Sense strand starting at position 2846 of SEQ ID NO: 1881628
ggccuuugccucugguaca

SEQ ID NO: 2059295 - RNA, 19 nt, Artificial Sequence
  Description of Artificial Sequence: Synthetic oligonucleotide
  Antisense strand to SEQ ID NO: 2059294
uguaccagaggcaaaggcc

SEQ ID NO: 2059296 - RNA, 19 nt, Artificial Sequence
  Description of Artificial Sequence: Synthetic oligonucleotide
  Sense strand starting at position 3054 of SEQ ID NO: 1881628
uucuguuucugcguggauu

SEQ ID NO: 2059297 - RNA, 19 nt, Artificial Sequence
  Description of Artificial Sequence: Synthetic oligonucleotide
  Antisense strand to SEQ ID NO: 2059296
aauccacgcagaaacagaa

SEQ ID NO: 2059298 - RNA, 19 nt, Artificial Sequence
  Description of Artificial Sequence: Synthetic oligonucleotide
  Sense strand starting at position 3074 of SEQ ID NO: 1881628
uggguggaucgcgaugaau

SEQ ID NO: 2059299 - RNA, 19 nt, Artificial Sequence
  Description of Artificial Sequence: Synthetic oligonucleotide
  Antisense strand to SEQ ID NO: 2059298
auucaucgcgauccaccca

SEQ ID NO: 2059300 - RNA, 19 nt, Artificial Sequence
  Description of Artificial Sequence: Synthetic oligonucleotide
  Sense strand starting at position 3191 of SEQ ID NO: 1881628
ggccuaagcauuugccuga

SEQ ID NO: 2059301 - RNA, 19 nt, Artificial Sequence
  Description of Artificial Sequence: Synthetic oligonucleotide
  Antisense strand to SEQ ID NO: 2059300
ucaggcaaaugcuuaggcc

SEQ ID NO: 2059302 - RNA, 19 nt, Artificial Sequence
  Description of Artificial Sequence: Synthetic oligonucleotide
  Sense strand starting at position 3192 of SEQ ID NO: 1881628
gccuaagcauuugccugaa

SEQ ID NO: 2059303 - RNA, 19 nt, Artificial Sequence
  Description of Artificial Sequence: Synthetic oligonucleotide
  Antisense strand to SEQ ID NO: 2059302
uucaggcaaaugcuuaggc

SEQ ID NO: 2059304 - RNA, 19 nt, Artificial Sequence
  Description of Artificial Sequence: Synthetic oligonucleotide
  Sense strand starting at position 3205 of SEQ ID NO: 1881628
ccugaagcuucguccgaca

SEQ ID NO: 2059305 - RNA, 19 nt, Artificial Sequence
  Description of Artificial Sequence: Synthetic oligonucleotide
  Antisense strand to SEQ ID NO: 2059304
ugucggacgaagcuucagg

SEQ ID NO: 2059306 - RNA, 19 nt, Artificial Sequence
  Description of Artificial Sequence: Synthetic oligonucleotide
  Sense strand starting at position 3210 of SEQ ID NO: 1881628
agcuucguccgacaugaga

SEQ ID NO: 2059307 - RNA, 19 nt, Artificial Sequence
  Description of Artificial Sequence: Synthetic oligonucleotide
  Antisense strand to SEQ ID NO: 2059306
ucucaugucggacgaagcu

SEQ ID NO: 2059308 - RNA, 19 nt, Artificial Sequence
  Description of Artificial Sequence: Synthetic oligonucleotide
  Sense strand starting at position 3219 of SEQ ID NO: 1881628
cgacaugagacuugaaccu

SEQ ID NO: 2059309 - RNA, 19 nt, Artificial Sequence
  Description of Artificial Sequence: Synthetic oligonucleotide
  Antisense strand to SEQ ID NO: 2059308
agguucaagucucaugucg

SEQ ID NO: 2059310 - RNA, 19 nt, Artificial Sequence
  Description of Artificial Sequence: Synthetic oligonucleotide
  Sense strand starting at position 3668 of SEQ ID NO: 1881628
cugccagccuucuagaacu

SEQ ID NO: 2059311 - RNA, 19 nt, Artificial Sequence
  Description of Artificial Sequence: Synthetic oligonucleotide
  Antisense strand to SEQ ID NO: 2059310
aguucuagaaggcuggcag

SEQ ID NO: 2059312 - RNA, 19 nt, Artificial Sequence
  Description of Artificial Sequence: Synthetic oligonucleotide
  Sense strand starting at position 3764 of SEQ ID NO: 1881628
uguccaggcuguuugcaau

SEQ ID NO: 2059313 - RNA, 19 nt, Artificial Sequence
  Description of Artificial Sequence: Synthetic oligonucleotide
  Antisense strand to SEQ ID NO: 2059312
auugcaaacagccuggaca

SEQ ID NO: 2059314 - RNA, 19 nt, Artificial Sequence
  Description of Artificial Sequence: Synthetic oligonucleotide
  Sense strand starting at position 3767 of SEQ ID NO: 1881628
ccaggcuguuugcaauaau

SEQ ID NO: 2059315 - RNA, 19 nt, Artificial Sequence
  Description of Artificial Sequence: Synthetic oligonucleotide
  Antisense strand to SEQ ID NO: 2059314
auuauugcaaacagccugg

SEQ ID NO: 2059316 - RNA, 19 nt, Artificial Sequence
  Description of Artificial Sequence: Synthetic oligonucleotide
  Sense strand starting at position 3770 of SEQ ID NO: 1881628
ggcuguuugcaauaauuac

SEQ ID NO: 2059317 - RNA, 19 nt, Artificial Sequence
  Description of Artificial Sequence: Synthetic oligonucleotide
  Antisense strand to SEQ ID NO: 2059316
guaauuauugcaaacagcc

SEQ ID NO: 2059318 - RNA, 19 nt, Artificial Sequence
  Description of Artificial Sequence: Synthetic oligonucleotide
  Sense strand starting at position 3781 of SEQ ID NO: 1881628
auaauuacuuggcagggau

SEQ ID NO: 2059319 - RNA, 19 nt, Artificial Sequence
  Description of Artificial Sequence: Synthetic oligonucleotide
  Antisense strand to SEQ ID NO: 2059318
aucccugccaaguaauuau

SEQ ID NO: 2059320 - RNA, 19 nt, Artificial Sequence
  Description of Artificial Sequence: Synthetic oligonucleotide
  Sense strand starting at position 3795 of SEQ ID NO: 1881628
gggauuucuuauuaucuag

SEQ ID NO: 2059321 - RNA, 19 nt, Artificial Sequence
  Description of Artificial Sequence: Synthetic oligonucleotide
  Antisense strand to SEQ ID NO: 2059320
cuagauaauaagaaauccc

SEQ ID NO: 2059322 - RNA, 19 nt, Artificial Sequence
  Description of Artificial Sequence: Synthetic oligonucleotide
  Sense strand starting at position 3819 of SEQ ID NO: 1881628
agagaaauccacugucccu

SEQ ID NO: 2059323 - RNA, 19 nt, Artificial Sequence
  Description of Artificial Sequence: Synthetic oligonucleotide
  Antisense strand to SEQ ID NO: 2059322
agggacaguggauuucucu

SEQ ID NO: 2059324 - RNA, 19 nt, Artificial Sequence
  Description of Artificial Sequence: Synthetic oligonucleotide
  Sense strand starting at position 3980 of SEQ ID NO: 1881628
auaucuucugcagggcaga

SEQ ID NO: 2059325 - RNA, 19 nt, Artificial Sequence
  Description of Artificial Sequence: Synthetic oligonucleotide
  Antisense strand to SEQ ID NO: 2059324
ucugcccugcagaagauau

SEQ ID NO: 2059326 - RNA, 19 nt, Artificial Sequence
  Description of Artificial Sequence: Synthetic oligonucleotide
  Sense strand starting at position 17 of SEQ ID NO: 1881629
cauugaaauguuuggacuc

SEQ ID NO: 2059327 - RNA, 19 nt, Artificial Sequence
  Description of Artificial Sequence: Synthetic oligonucleotide
  Antisense strand to SEQ ID NO: 2059326
gaguccaaacauuucaaug

SEQ ID NO: 2059328 - RNA, 19 nt, Artificial Sequence
  Description of Artificial Sequence: Synthetic oligonucleotide
  Sense strand starting at position 579 of SEQ ID NO: 1881629
uagguuauaguguacuuua

SEQ ID NO: 2059329 - RNA, 19 nt, Artificial Sequence
  Description of Artificial Sequence: Synthetic oligonucleotide
  Antisense strand to SEQ ID NO: 2059328
uaaaguacacuauaaccua

SEQ ID NO: 2059330 - RNA, 19 nt, Artificial Sequence
  Description of Artificial Sequence: Synthetic oligonucleotide
  Sense strand starting at position 623 of SEQ ID NO: 1881629
gggagaacuucgcuccuau

SEQ ID NO: 2059331 - RNA, 19 nt, Artificial Sequence
  Description of Artificial Sequence: Synthetic oligonucleotide
  Antisense strand to SEQ ID NO: 2059330
auaggagcgaaguucuccc

SEQ ID NO: 2059332 - RNA, 19 nt, Artificial Sequence
  Description of Artificial Sequence: Synthetic oligonucleotide
  Sense strand starting at position 633 of SEQ ID NO: 1881629
cgcuccuaugaauaaguga

SEQ ID NO: 2059333 - RNA, 19 nt, Artificial Sequence
  Description of Artificial Sequence: Synthetic oligonucleotide
  Antisense strand to SEQ ID NO: 2059332
ucacuuauucauaggagcg

SEQ ID NO: 2059334 - RNA, 19 nt, Artificial Sequence
  Description of Artificial Sequence: Synthetic oligonucleotide
  Sense strand starting at position 636 of SEQ ID NO: 1881629
uccuaugaauaagugaauu

SEQ ID NO: 2059335 - RNA, 19 nt, Artificial Sequence
  Description of Artificial Sequence: Synthetic oligonucleotide
  Antisense strand to SEQ ID NO: 2059334
aauucacuuauucauagga

SEQ ID NO: 2059336 - RNA, 19 nt, Artificial Sequence
  Description of Artificial Sequence: Synthetic oligonucleotide
  Sense strand starting at position 783 of SEQ ID NO: 1881629
aggccuaaauugucaucua

SEQ ID NO: 2059337 - RNA, 19 nt, Artificial Sequence
  Description of Artificial Sequence: Synthetic oligonucleotide
  Antisense strand to SEQ ID NO: 2059336
uagaugacaauuuaggccu

SEQ ID NO: 2059338 - RNA, 19 nt, Artificial Sequence
  Description of Artificial Sequence: Synthetic oligonucleotide
  Sense strand starting at position 837 of SEQ ID NO: 1881629
aacggaagagccuaguuau

SEQ ID NO: 2059339 - RNA, 19 nt, Artificial Sequence
  Description of Artificial Sequence: Synthetic oligonucleotide
  Antisense strand to SEQ ID NO: 2059338
auaacuaggcucuuccguu

SEQ ID NO: 2059340 - RNA, 19 nt, Artificial Sequence
  Description of Artificial Sequence: Synthetic oligonucleotide
  Sense strand starting at position 1072 of SEQ ID NO: 1881629
gagcucuaacuugguggaa

SEQ ID NO: 2059341 - RNA, 19 nt, Artificial Sequence
  Description of Artificial Sequence: Synthetic oligonucleotide
  Antisense strand to SEQ ID NO: 2059340
uuccaccaaguuagagcuc

SEQ ID NO: 2059342 - RNA, 19 nt, Artificial Sequence
  Description of Artificial Sequence: Synthetic oligonucleotide
  Sense strand starting at position 1073 of SEQ ID NO: 1881629
agcucuaacuugguggaaa

SEQ ID NO: 2059343 - RNA, 19 nt, Artificial Sequence
  Description of Artificial Sequence: Synthetic oligonucleotide
  Antisense strand to SEQ ID NO: 2059342
uuuccaccaaguuagagcu

SEQ ID NO: 2059344 - RNA, 19 nt, Artificial Sequence
  Description of Artificial Sequence: Synthetic oligonucleotide
  Sense strand starting at position 1105 of SEQ ID NO: 1881629
ugaugcgaggaaugugaaa

SEQ ID NO: 2059345 - RNA, 19 nt, Artificial Sequence
  Description of Artificial Sequence: Synthetic oligonucleotide
  Antisense strand to SEQ ID NO: 2059344
uuucacauuccucgcauca

SEQ ID NO: 2059346 - RNA, 19 nt, Artificial Sequence
  Description of Artificial Sequence: Synthetic oligonucleotide
  Sense strand starting at position 1107 of SEQ ID NO: 1881629
augcgaggaaugugaaaug

SEQ ID NO: 2059347 - RNA, 19 nt, Artificial Sequence
  Description of Artificial Sequence: Synthetic oligonucleotide
  Antisense strand to SEQ ID NO: 2059346
cauuucacauuccucgcau

SEQ ID NO: 2059348 - RNA, 19 nt, Artificial Sequence
  Description of Artificial Sequence: Synthetic oligonucleotide
  Sense strand starting at position 1160 of SEQ ID NO: 1881629
ucaugugauccguuggugu

SEQ ID NO: 2059349 - RNA, 19 nt, Artificial Sequence
  Description of Artificial Sequence: Synthetic oligonucleotide
  Antisense strand to SEQ ID NO: 2059348
acaccaacggaucacauga

SEQ ID NO: 2059350 - RNA, 19 nt, Artificial Sequence
  Description of Artificial Sequence: Synthetic oligonucleotide
  Sense strand starting at position 1219 of SEQ ID NO: 1881629
gggcuaagauggcuuccaa

SEQ ID NO: 2059351 - RNA, 19 nt, Artificial Sequence
  Description of Artificial Sequence: Synthetic oligonucleotide
  Antisense strand to SEQ ID NO: 2059350
uuggaagccaucuuagccc

SEQ ID NO: 2059352 - RNA, 19 nt, Artificial Sequence
  Description of Artificial Sequence: Synthetic oligonucleotide
  Sense strand starting at position 1230 of SEQ ID NO: 1881629
gcuuccaaaguccgaaaua

SEQ ID NO: 2059353 - RNA, 19 nt, Artificial Sequence
  Description of Artificial Sequence: Synthetic oligonucleotide
  Antisense strand to SEQ ID NO: 2059352
uauuucggacuuuggaagc

SEQ ID NO: 2059354 - RNA, 19 nt, Artificial Sequence
  Description of Artificial Sequence: Synthetic oligonucleotide
  Sense strand starting at position 1358 of SEQ ID NO: 1881629
acuaacugcuugccagaau

SEQ ID NO: 2059355 - RNA, 19 nt, Artificial Sequence
  Description of Artificial Sequence: Synthetic oligonucleotide
  Antisense strand to SEQ ID NO: 2059354
auucuggcaagcaguuagu

SEQ ID NO: 2059356 - RNA, 19 nt, Artificial Sequence
  Description of Artificial Sequence: Synthetic oligonucleotide
  Sense strand starting at position 1418 of SEQ ID NO: 1881629
acucaugucccuuggaauu

SEQ ID NO: 2059357 - RNA, 19 nt, Artificial Sequence
  Description of Artificial Sequence: Synthetic oligonucleotide
  Antisense strand to SEQ ID NO: 2059356
aauuccaagggacaugagu

SEQ ID NO: 2059358 - RNA, 19 nt, Artificial Sequence
  Description of Artificial Sequence: Synthetic oligonucleotide
  Sense strand starting at position 1472 of SEQ ID NO: 1881629
ucauuucuaguuugaugca

SEQ ID NO: 2059359 - RNA, 19 nt, Artificial Sequence
  Description of Artificial Sequence: Synthetic oligonucleotide
  Antisense strand to SEQ ID NO: 2059358
ugcaucaaacuagaaauga

SEQ ID NO: 2059360 - RNA, 19 nt, Artificial Sequence
  Description of Artificial Sequence: Synthetic oligonucleotide
  Sense strand starting at position 2190 of SEQ ID NO: 1881629
uauguugcagcuuauugaa

SEQ ID NO: 2059361 - RNA, 19 nt, Artificial Sequence
  Description of Artificial Sequence: Synthetic oligonucleotide
  Antisense strand to SEQ ID NO: 2059360
uucaauaagcugcaacaua

SEQ ID NO: 2059362 - RNA, 19 nt, Artificial Sequence
  Description of Artificial Sequence: Synthetic oligonucleotide
  Sense strand starting at position 2272 of SEQ ID NO: 1881629
agggcuucugcugaagauc

SEQ ID NO: 2059363 - RNA, 19 nt, Artificial Sequence
  Description of Artificial Sequence: Synthetic oligonucleotide
  Antisense strand to SEQ ID NO: 2059362
gaucuucagcagaagcccu

SEQ ID NO: 2059364 - RNA, 19 nt, Artificial Sequence
  Description of Artificial Sequence: Synthetic oligonucleotide
  Sense strand starting at position 2395 of SEQ ID NO: 1881629
ugacacucagucugaguuu

SEQ ID NO: 2059365 - RNA, 19 nt, Artificial Sequence
  Description of Artificial Sequence: Synthetic oligonucleotide
  Antisense strand to SEQ ID NO: 2059364
aaacucagacugaguguca

SEQ ID NO: 2059366 - RNA, 19 nt, Artificial Sequence
  Description of Artificial Sequence: Synthetic oligonucleotide
  Sense strand starting at position 2410 of SEQ ID NO: 1881629
guuuccuuccacuauagca

SEQ ID NO: 2059367 - RNA, 19 nt, Artificial Sequence
  Description of Artificial Sequence: Synthetic oligonucleotide
  Antisense strand to SEQ ID NO: 2059366
ugcuauaguggaaggaaac

SEQ ID NO: 2059368 - RNA, 19 nt, Artificial Sequence
  Description of Artificial Sequence: Synthetic oligonucleotide
  Sense strand starting at position 2532 of SEQ ID NO: 1881629
cugucagucucuguaagaa

SEQ ID NO: 2059369 - RNA, 19 nt, Artificial Sequence
  Description of Artificial Sequence: Synthetic oligonucleotide
  Antisense strand to SEQ ID NO: 2059368
uucuuacagagacugacag

SEQ ID NO: 2059370 - RNA, 19 nt, Artificial Sequence
  Description of Artificial Sequence: Synthetic oligonucleotide
  Sense strand starting at position 2798 of SEQ ID NO: 1881629
aucaguuaaauccgggaga

SEQ ID NO: 2059371 - RNA, 19 nt, Artificial Sequence
  Description of Artificial Sequence: Synthetic oligonucleotide
  Antisense strand to SEQ ID NO: 2059370
ucucccggauuuaacugau

SEQ ID NO: 2059372 - RNA, 19 nt, Artificial Sequence
  Description of Artificial Sequence: Synthetic oligonucleotide
  Sense strand starting at position 2800 of SEQ ID NO: 1881629
caguuaaauccgggagaug

SEQ ID NO: 2059373 - RNA, 19 nt, Artificial Sequence
  Description of Artificial Sequence: Synthetic oligonucleotide
  Antisense strand to SEQ ID NO: 2059372
caucucccggauuuaacug

SEQ ID NO: 2059374 - RNA, 19 nt, Artificial Sequence
  Description of Artificial Sequence: Synthetic oligonucleotide
  Sense strand starting at position 2949 of SEQ ID NO: 1881629
gcaaauugucaauagcuua

SEQ ID NO: 2059375 - RNA, 19 nt, Artificial Sequence
  Description of Artificial Sequence: Synthetic oligonucleotide
  Antisense strand to SEQ ID NO: 2059374
uaagcuauugacaauuugc

SEQ ID NO: 2059376 - RNA, 19 nt, Artificial Sequence
  Description of Artificial Sequence: Synthetic oligonucleotide
  Sense strand starting at position 3081 of SEQ ID NO: 1881629
accagucacuugucaaaca

SEQ ID NO: 2059377 - RNA, 19 nt, Artificial Sequence
  Description of Artificial Sequence: Synthetic oligonucleotide
  Antisense strand to SEQ ID NO: 2059376
uguuugacaagugacuggu

SEQ ID NO: 2059378 - RNA, 19 nt, Artificial Sequence
  Description of Artificial Sequence: Synthetic oligonucleotide
  Sense strand starting at position 3332 of SEQ ID NO: 1881629
aucauaaaggcuuaaugua

SEQ ID NO: 2059379 - RNA, 19 nt, Artificial Sequence
  Description of Artificial Sequence: Synthetic oligonucleotide
  Antisense strand to SEQ ID NO: 2059378
uacauuaagccuuuaugau

SEQ ID NO: 2059380 - RNA, 19 nt, Artificial Sequence
  Description of Artificial Sequence: Synthetic oligonucleotide
  Sense strand starting at position 3340 of SEQ ID NO: 1881629
ggcuuaauguaauugcaag

SEQ ID NO: 2059381 - RNA, 19 nt, Artificial Sequence
  Description of Artificial Sequence: Synthetic oligonucleotide
  Antisense strand to SEQ ID NO: 2059380
cuugcaauuacauuaagcc

SEQ ID NO: 2059382 - RNA, 19 nt, Artificial Sequence
  Description of Artificial Sequence: Synthetic oligonucleotide
  Sense strand starting at position 3348 of SEQ ID NO: 1881629
guaauugcaaguugaugau

SEQ ID NO: 2059383 - RNA, 19 nt, Artificial Sequence
  Description of Artificial Sequence: Synthetic oligonucleotide
  Antisense strand to SEQ ID NO: 2059382
aucaucaacuugcaauuac

SEQ ID NO: 2059384 - RNA, 19 nt, Artificial Sequence
  Description of Artificial Sequence: Synthetic oligonucleotide
  Sense strand starting at position 3357 of SEQ ID NO: 1881629
aguugaugaucucuguuaa

SEQ ID NO: 2059385 - RNA, 19 nt, Artificial Sequence
  Description of Artificial Sequence: Synthetic oligonucleotide
  Antisense strand to SEQ ID NO: 2059384
uuaacagagaucaucaacu

SEQ ID NO: 2059386 - RNA, 19 nt, Artificial Sequence
  Description of Artificial Sequence: Synthetic oligonucleotide
  Sense strand starting at position 3358 of SEQ ID NO: 1881629
guugaugaucucuguuaac

SEQ ID NO: 2059387 - RNA, 19 nt, Artificial Sequence
  Description of Artificial Sequence: Synthetic oligonucleotide
  Antisense strand to SEQ ID NO: 2059386
guuaacagagaucaucaac

SEQ ID NO: 2059388 - RNA, 19 nt, Artificial Sequence
  Description of Artificial Sequence: Synthetic oligonucleotide
  Sense strand starting at position 3418 of SEQ ID NO: 1881629
gggagucugaauuauguuu

SEQ ID NO: 2059389 - RNA, 19 nt, Artificial Sequence
  Description of Artificial Sequence: Synthetic oligonucleotide
  Antisense strand to SEQ ID NO: 2059388
aaacauaauucagacuccc

SEQ ID NO: 2059390 - RNA, 19 nt, Artificial Sequence
  Description of Artificial Sequence: Synthetic oligonucleotide
  Sense strand starting at position 3516 of SEQ ID NO: 1881629
gaauccauugauugcuagu

SEQ ID NO: 2059391 - RNA, 19 nt, Artificial Sequence
  Description of Artificial Sequence: Synthetic oligonucleotide
  Antisense strand to SEQ ID NO: 2059390
acuagcaaucaauggauuc

SEQ ID NO: 2059392 - RNA, 19 nt, Artificial Sequence
  Description of Artificial Sequence: Synthetic oligonucleotide
  Sense strand starting at position 3570 of SEQ ID NO: 1881629
acaugacaguccucuuugu

SEQ ID NO: 2059393 - RNA, 19 nt, Artificial Sequence
  Description of Artificial Sequence: Synthetic oligonucleotide
  Antisense strand to SEQ ID NO: 2059392
acaaagaggacugucaugu

SEQ ID NO: 2059394 - RNA, 19 nt, Artificial Sequence
  Description of Artificial Sequence: Synthetic oligonucleotide
  Sense strand starting at position 3583 of SEQ ID NO: 1881629
cuuuguuguagugacacua

SEQ ID NO: 2059395 - RNA, 19 nt, Artificial Sequence
  Description of Artificial Sequence: Synthetic oligonucleotide
  Antisense strand to SEQ ID NO: 2059394
uagugucacuacaacaaag

SEQ ID NO: 2059396 - RNA, 19 nt, Artificial Sequence
  Description of Artificial Sequence: Synthetic oligonucleotide
  Sense strand starting at position 3634 of SEQ ID NO: 1881629
uggguuguccuugaaccaa

SEQ ID NO: 2059397 - RNA, 19 nt, Artificial Sequence
  Description of Artificial Sequence: Synthetic oligonucleotide
  Antisense strand to SEQ ID NO: 2059396
uugguucaaggacaaccca

SEQ ID NO: 2059398 - RNA, 19 nt, Artificial Sequence
  Description of Artificial Sequence: Synthetic oligonucleotide
  Sense strand starting at position 3682 of SEQ ID NO: 1881629
cccucuccuccaugucaga

SEQ ID NO: 2059399 - RNA, 19 nt, Artificial Sequence
  Description of Artificial Sequence: Synthetic oligonucleotide
  Antisense strand to SEQ ID NO: 2059398
ucugacauggaggagaggg

SEQ ID NO: 2059400 - RNA, 19 nt, Artificial Sequence
  Description of Artificial Sequence: Synthetic oligonucleotide
  Sense strand starting at position 3724 of SEQ ID NO: 1881629
gaggcuauuucuguuucua

SEQ ID NO: 2059401 - RNA, 19 nt, Artificial Sequence
  Description of Artificial Sequence: Synthetic oligonucleotide
  Antisense strand to SEQ ID NO: 2059400
uagaaacagaaauagccuc

SEQ ID NO: 2059402 - RNA, 19 nt, Artificial Sequence
  Description of Artificial Sequence: Synthetic oligonucleotide
  Sense strand starting at position 3781 of SEQ ID NO: 1881629
agacaagaguuguccuguu

SEQ ID NO: 2059403 - RNA, 19 nt, Artificial Sequence
  Description of Artificial Sequence: Synthetic oligonucleotide
  Antisense strand to SEQ ID NO: 2059402
aacaggacaacucuugucu

SEQ ID NO: 2059404 - RNA, 19 nt, Artificial Sequence
  Description of Artificial Sequence: Synthetic oligonucleotide
  Sense strand starting at position 3837 of SEQ ID NO: 1881629
gguacagauuaccuaccua

SEQ ID NO: 2059405 - RNA, 19 nt, Artificial Sequence
  Description of Artificial Sequence: Synthetic oligonucleotide
  Antisense strand to SEQ ID NO: 2059404
uagguagguaaucuguacc

SEQ ID NO: 2059406 - RNA, 19 nt, Artificial Sequence
  Description of Artificial Sequence: Synthetic oligonucleotide
  Sense strand starting at position 26 of SEQ ID NO: 1881630
guaaauaaacacugaguga

SEQ ID NO: 2059407 - RNA, 19 nt, Artificial Sequence
  Description of Artificial Sequence: Synthetic oligonucleotide
  Antisense strand to SEQ ID NO: 2059406
ucacucaguguuuauuuac

SEQ ID NO: 2059408 - RNA, 19 nt, Artificial Sequence
  Description of Artificial Sequence: Synthetic oligonucleotide
  Sense strand starting at position 175 of SEQ ID NO: 1881630
aguaauuaccucugagaag

SEQ ID NO: 2059409 - RNA, 19 nt, Artificial Sequence
  Description of Artificial Sequence: Synthetic oligonucleotide
  Antisense strand to SEQ ID NO: 2059408
cuucucagagguaauuacu

SEQ ID NO: 2059410 - RNA, 19 nt, Artificial Sequence
  Description of Artificial Sequence: Synthetic oligonucleotide
  Sense strand starting at position 420 of SEQ ID NO: 1881630
auacuuaguucuguaauuc

SEQ ID NO: 2059411 - RNA, 19 nt, Artificial Sequence
  Description of Artificial Sequence: Synthetic oligonucleotide
  Antisense strand to SEQ ID NO: 2059410
gaauuacagaacuaaguau

SEQ ID NO: 2059412 - RNA, 19 nt, Artificial Sequence
  Description of Artificial Sequence: Synthetic oligonucleotide
  Sense strand starting at position 618 of SEQ ID NO: 1881630
gcauuacaucuccaguuua

SEQ ID NO: 2059413 - RNA, 19 nt, Artificial Sequence
  Description of Artificial Sequence: Synthetic oligonucleotide
  Antisense strand to SEQ ID NO: 2059412
uaaacuggagauguaaugc

SEQ ID NO: 2059414 - RNA, 19 nt, Artificial Sequence
  Description of Artificial Sequence: Synthetic oligonucleotide
  Sense strand starting at position 998 of SEQ ID NO: 1881630
agcucuuuggaacgacaau

SEQ ID NO: 2059415 - RNA, 19 nt, Artificial Sequence
  Description of Artificial Sequence: Synthetic oligonucleotide
  Antisense strand to SEQ ID NO: 2059414
auugucguuccaaagagcu

SEQ ID NO: 2059416 - RNA, 19 nt, Artificial Sequence
  Description of Artificial Sequence: Synthetic oligonucleotide
  Sense strand starting at position 1024 of SEQ ID NO: 1881630
guaugccuaggccaauaaa

SEQ ID NO: 2059417 - RNA, 19 nt, Artificial Sequence
  Description of Artificial Sequence: Synthetic oligonucleotide
  Antisense strand to SEQ ID NO: 2059416
uuuauuggccuaggcauac

SEQ ID NO: 2059418 - RNA, 19 nt, Artificial Sequence
  Description of Artificial Sequence: Synthetic oligonucleotide
  Sense strand starting at position 1079 of SEQ ID NO: 1881630
uuuguuagucuaugaaaca

SEQ ID NO: 2059419 - RNA, 19 nt, Artificial Sequence
  Description of Artificial Sequence: Synthetic oligonucleotide
  Antisense strand to SEQ ID NO: 2059418
uguuucauagacuaacaaa

SEQ ID NO: 2059420 - RNA, 19 nt, Artificial Sequence
  Description of Artificial Sequence: Synthetic oligonucleotide
  Sense strand starting at position 1499 of SEQ ID NO: 1881630
caacucaauuuagggagua

SEQ ID NO: 2059421 - RNA, 19 nt, Artificial Sequence
  Description of Artificial Sequence: Synthetic oligonucleotide
  Antisense strand to SEQ ID NO: 2059420
uacucccuaaauugaguug

SEQ ID NO: 2059422 - RNA, 19 nt, Artificial Sequence
  Description of Artificial Sequence: Synthetic oligonucleotide
  Sense strand starting at position 1511 of SEQ ID NO: 1881630
gggaguaagccagguaucu

SEQ ID NO: 2059423 - RNA, 19 nt, Artificial Sequence
  Description of Artificial Sequence: Synthetic oligonucleotide
  Antisense strand to SEQ ID NO: 2059422
agauaccuggcuuacuccc

SEQ ID NO: 2059424 - RNA, 19 nt, Artificial Sequence
  Description of Artificial Sequence: Synthetic oligonucleotide
  Sense strand starting at position 1513 of SEQ ID NO: 1881630
gaguaagccagguaucugu

SEQ ID NO: 2059425 - RNA, 19 nt, Artificial Sequence
  Description of Artificial Sequence: Synthetic oligonucleotide
  Antisense strand to SEQ ID NO: 2059424
acagauaccuggcuuacuc

SEQ ID NO: 2059426 - RNA, 19 nt, Artificial Sequence
  Description of Artificial Sequence: Synthetic oligonucleotide
  Sense strand starting at position 1516 of SEQ ID NO: 1881630
uaagccagguaucuguaaa

SEQ ID NO: 2059427 - RNA, 19 nt, Artificial Sequence
  Description of Artificial Sequence: Synthetic oligonucleotide
  Antisense strand to SEQ ID NO: 2059426
uuuacagauaccuggcuua

SEQ ID NO: 2059428 - RNA, 19 nt, Artificial Sequence
  Description of Artificial Sequence: Synthetic oligonucleotide
  Sense strand starting at position 1536 of SEQ ID NO: 1881630
auuacuguaagguaguuua

SEQ ID NO: 2059429 - RNA, 19 nt, Artificial Sequence
  Description of Artificial Sequence: Synthetic oligonucleotide
  Antisense strand to SEQ ID NO: 2059428
uaaacuaccuuacaguaau

SEQ ID NO: 2059430 - RNA, 19 nt, Artificial Sequence
  Description of Artificial Sequence: Synthetic oligonucleotide
  Sense strand starting at position 1539 of SEQ ID NO: 1881630
acuguaagguaguuuauaa

SEQ ID NO: 2059431 - RNA, 19 nt, Artificial Sequence
  Description of Artificial Sequence: Synthetic oligonucleotide
  Antisense strand to SEQ ID NO: 2059430
uuauaaacuaccuuacagu

SEQ ID NO: 2059432 - RNA, 19 nt, Artificial Sequence
  Description of Artificial Sequence: Synthetic oligonucleotide
  Sense strand starting at position 1729 of SEQ ID NO: 1881630
uucuuaauucuguaaggcu

SEQ ID NO: 2059433 - RNA, 19 nt, Artificial Sequence
  Description of Artificial Sequence: Synthetic oligonucleotide
  Antisense strand to SEQ ID NO: 2059432
agccuuacagaauuaagaa

SEQ ID NO: 2059434 - RNA, 19 nt, Artificial Sequence
  Description of Artificial Sequence: Synthetic oligonucleotide
  Sense strand starting at position 1752 of SEQ ID NO: 1881630
gguaucauguauguaagga

SEQ ID NO: 2059435 - RNA, 19 nt, Artificial Sequence
  Description of Artificial Sequence: Synthetic oligonucleotide
  Antisense strand to SEQ ID NO: 2059434
uccuuacauacaugauacc

SEQ ID NO: 2059436 - RNA, 19 nt, Artificial Sequence
  Description of Artificial Sequence: Synthetic oligonucleotide
  Sense strand starting at position 1753 of SEQ ID NO: 1881630
guaucauguauguaaggaa

SEQ ID NO: 2059437 - RNA, 19 nt, Artificial Sequence
  Description of Artificial Sequence: Synthetic oligonucleotide
  Antisense strand to SEQ ID NO: 2059436
uuccuuacauacaugauac

SEQ ID NO: 2059438 - RNA, 19 nt, Artificial Sequence
  Description of Artificial Sequence: Synthetic oligonucleotide
  Sense strand starting at position 1776 of SEQ ID NO: 1881630
uaggaaaugucugucaguu

SEQ ID NO: 2059439 - RNA, 19 nt, Artificial Sequence
  Description of Artificial Sequence: Synthetic oligonucleotide
  Antisense strand to SEQ ID NO: 2059438
aacugacagacauuuccua

SEQ ID NO: 2059440 - RNA, 19 nt, Artificial Sequence
  Description of Artificial Sequence: Synthetic oligonucleotide
  Sense strand starting at position 1808 of SEQ ID NO: 1881630
guuuguguugcccucgaau

SEQ ID NO: 2059441 - RNA, 19 nt, Artificial Sequence
  Description of Artificial Sequence: Synthetic oligonucleotide
  Antisense strand to SEQ ID NO: 2059440
auucgagggcaacacaaac

SEQ ID NO: 2059442 - RNA, 19 nt, Artificial Sequence
  Description of Artificial Sequence: Synthetic oligonucleotide
  Sense strand starting at position 1810 of SEQ ID NO: 1881630
uuguguugcccucgaauuu

SEQ ID NO: 2059443 - RNA, 19 nt, Artificial Sequence
  Description of Artificial Sequence: Synthetic oligonucleotide
  Antisense strand to SEQ ID NO: 2059442
aaauucgagggcaacacaa

SEQ ID NO: 2059444 - RNA, 19 nt, Artificial Sequence
  Description of Artificial Sequence: Synthetic oligonucleotide
  Sense strand starting at position 1831 of SEQ ID NO: 1881630
acuuuauucuaggcaauug

SEQ ID NO: 2059445 - RNA, 19 nt, Artificial Sequence
  Description of Artificial Sequence: Synthetic oligonucleotide
  Antisense strand to SEQ ID NO: 2059444
caauugccuagaauaaagu

SEQ ID NO: 2059446 - RNA, 19 nt, Artificial Sequence
  Description of Artificial Sequence: Synthetic oligonucleotide
  Sense strand starting at position 1842 of SEQ ID NO: 1881630
ggcaauuggcaguaauuaa

SEQ ID NO: 2059447 - RNA, 19 nt, Artificial Sequence
  Description of Artificial Sequence: Synthetic oligonucleotide
  Antisense strand to SEQ ID NO: 2059446
uuaauuacugccaauugcc

SEQ ID NO: 2059448 - RNA, 19 nt, Artificial Sequence
  Description of Artificial Sequence: Synthetic oligonucleotide
  Sense strand starting at position 1863 of SEQ ID NO: 1881630
ggcuauaagaaguagugua

SEQ ID NO: 2059449 - RNA, 19 nt, Artificial Sequence
  Description of Artificial Sequence: Synthetic oligonucleotide
  Antisense strand to SEQ ID NO: 2059448
uacacuacuucuuauagcc

SEQ ID NO: 2059450 - RNA, 19 nt, Artificial Sequence
  Description of Artificial Sequence: Synthetic oligonucleotide
  Sense strand starting at position 2248 of SEQ ID NO: 1881630
aagucaacaggauguguuu

SEQ ID NO: 2059451 - RNA, 19 nt, Artificial Sequence
  Description of Artificial Sequence: Synthetic oligonucleotide
  Antisense strand to SEQ ID NO: 2059450
aaacacauccuguugacuu

SEQ ID NO: 2059452 - RNA, 19 nt, Artificial Sequence
  Description of Artificial Sequence: Synthetic oligonucleotide
  Sense strand starting at position 2251 of SEQ ID NO: 1881630
ucaacaggauguguuuaga

SEQ ID NO: 2059453 - RNA, 19 nt, Artificial Sequence
  Description of Artificial Sequence: Synthetic oligonucleotide
  Antisense strand to SEQ ID NO: 2059452
ucuaaacacauccuguuga

SEQ ID NO: 2059454 - RNA, 19 nt, Artificial Sequence
  Description of Artificial Sequence: Synthetic oligonucleotide
  Sense strand starting at position 2301 of SEQ ID NO: 1881630
cuguaauccuuacugugaa

SEQ ID NO: 2059455 - RNA, 19 nt, Artificial Sequence
  Description of Artificial Sequence: Synthetic oligonucleotide
  Antisense strand to SEQ ID NO: 2059454
uucacaguaaggauuacag

SEQ ID NO: 2059456 - RNA, 19 nt, Artificial Sequence
  Description of Artificial Sequence: Synthetic oligonucleotide
  Sense strand starting at position 2314 of SEQ ID NO: 1881630
ugugaacaucccuggaacu

SEQ ID NO: 2059457 - RNA, 19 nt, Artificial Sequence
  Description of Artificial Sequence: Synthetic oligonucleotide
  Antisense strand to SEQ ID NO: 2059456
aguuccagggauguucaca

SEQ ID NO: 2059458 - RNA, 19 nt, Artificial Sequence
  Description of Artificial Sequence: Synthetic oligonucleotide
  Sense strand starting at position 2450 of SEQ ID NO: 1881630
agugaauuaguccaacuug

SEQ ID NO: 2059459 - RNA, 19 nt, Artificial Sequence
  Description of Artificial Sequence: Synthetic oligonucleotide
  Antisense strand to SEQ ID NO: 2059458
caaguuggacuaauucacu

SEQ ID NO: 2059460 - RNA, 19 nt, Artificial Sequence
  Description of Artificial Sequence: Synthetic oligonucleotide
  Sense strand starting at position 2598 of SEQ ID NO: 1881630
acuagaagucgcuacaaca

SEQ ID NO: 2059461 - RNA, 19 nt, Artificial Sequence
  Description of Artificial Sequence: Synthetic oligonucleotide
  Antisense strand to SEQ ID NO: 2059460
uguuguagcgacuucuagu

SEQ ID NO: 2059462 - RNA, 19 nt, Artificial Sequence
  Description of Artificial Sequence: Synthetic oligonucleotide
  Sense strand starting at position 2606 of SEQ ID NO: 1881630
ucgcuacaacaugaauuaa

SEQ ID NO: 2059463 - RNA, 19 nt, Artificial Sequence
  Description of Artificial Sequence: Synthetic oligonucleotide
  Antisense strand to SEQ ID NO: 2059462
uuaauucauguuguagcga

SEQ ID NO: 2059464 - RNA, 19 nt, Artificial Sequence
  Description of Artificial Sequence: Synthetic oligonucleotide
  Sense strand starting at position 2830 of SEQ ID NO: 1881630
agagauggaugguugcaaa

SEQ ID NO: 2059465 - RNA, 19 nt, Artificial Sequence
  Description of Artificial Sequence: Synthetic oligonucleotide
  Antisense strand to SEQ ID NO: 2059464
uuugcaaccauccaucucu

SEQ ID NO: 2059466 - RNA, 19 nt, Artificial Sequence
  Description of Artificial Sequence: Synthetic oligonucleotide
  Sense strand starting at position 3135 of SEQ ID NO: 1881630
gucacagagcuaggaaaua

SEQ ID NO: 2059467 - RNA, 19 nt, Artificial Sequence
  Description of Artificial Sequence: Synthetic oligonucleotide
  Antisense strand to SEQ ID NO: 2059466
uauuuccuagcucugugac

SEQ ID NO: 2059468 - RNA, 19 nt, Artificial Sequence
  Description of Artificial Sequence: Synthetic oligonucleotide
  Sense strand starting at position 3144 of SEQ ID NO: 1881630
cuaggaaauauugggcaua

SEQ ID NO: 2059469 - RNA, 19 nt, Artificial Sequence
  Description of Artificial Sequence: Synthetic oligonucleotide
  Antisense strand to SEQ ID NO: 2059468
uaugcccaauauuuccuag

SEQ ID NO: 2059470 - RNA, 19 nt, Artificial Sequence
  Description of Artificial Sequence: Synthetic oligonucleotide
  Sense strand starting at position 3229 of SEQ ID NO: 1881630
acagaaaucuauguuguua

SEQ ID NO: 2059471 - RNA, 19 nt, Artificial Sequence
  Description of Artificial Sequence: Synthetic oligonucleotide
  Antisense strand to SEQ ID NO: 2059470
uaacaacauagauuucugu

SEQ ID NO: 2059472 - RNA, 19 nt, Artificial Sequence
  Description of Artificial Sequence: Synthetic oligonucleotide
  Sense strand starting at position 3324 of SEQ ID NO: 1881630
guguaucugcauuaaggac

SEQ ID NO: 2059473 - RNA, 19 nt, Artificial Sequence
  Description of Artificial Sequence: Synthetic oligonucleotide
  Antisense strand to SEQ ID NO: 2059472
guccuuaaugcagauacac

SEQ ID NO: 2059474 - RNA, 19 nt, Artificial Sequence
  Description of Artificial Sequence: Synthetic oligonucleotide
  Sense strand starting at position 3493 of SEQ ID NO: 1881630
aucgcugucccugauaaau

SEQ ID NO: 2059475 - RNA, 19 nt, Artificial Sequence
  Description of Artificial Sequence: Synthetic oligonucleotide
  Antisense strand to SEQ ID NO: 2059474
auuuaucagggacagcgau

SEQ ID NO: 2059476 - RNA, 19 nt, Artificial Sequence
  Description of Artificial Sequence: Synthetic oligonucleotide
  Sense strand starting at position 3561 of SEQ ID NO: 1881630
agaggugauuuagaauauu

SEQ ID NO: 2059477 - RNA, 19 nt, Artificial Sequence
  Description of Artificial Sequence: Synthetic oligonucleotide
  Antisense strand to SEQ ID NO: 2059476
aauauucuaaaucaccucu

SEQ ID NO: 2059478 - RNA, 19 nt, Artificial Sequence
  Description of Artificial Sequence: Synthetic oligonucleotide
  Sense strand starting at position 3678 of SEQ ID NO: 1881630
ggacuuuccggauauaguu

SEQ ID NO: 2059479 - RNA, 19 nt, Artificial Sequence
  Description of Artificial Sequence: Synthetic oligonucleotide
  Antisense strand to SEQ ID NO: 2059478
aacuauauccggaaagucc

SEQ ID NO: 2059480 - RNA, 19 nt, Artificial Sequence
  Description of Artificial Sequence: Synthetic oligonucleotide
  Sense strand starting at position 3830 of SEQ ID NO: 1881630
gcaguaauagaauagcucu

SEQ ID NO: 2059481 - RNA, 19 nt, Artificial Sequence
  Description of Artificial Sequence: Synthetic oligonucleotide
  Antisense strand to SEQ ID NO: 2059480
agagcuauucuauuacugc

SEQ ID NO: 2059482 - RNA, 19 nt, Artificial Sequence
  Description of Artificial Sequence: Synthetic oligonucleotide
  Sense strand starting at position 3979 of SEQ ID NO: 1881630
uaguguagagguugauaau

SEQ ID NO: 2059483 - RNA, 19 nt, Artificial Sequence
  Description of Artificial Sequence: Synthetic oligonucleotide
  Antisense strand to SEQ ID NO: 2059482
auuaucaaccucuacacua

SEQ ID NO: 2059484 - RNA, 19 nt, Artificial Sequence
  Description of Artificial Sequence: Synthetic oligonucleotide
  Sense strand starting at position 3980 of SEQ ID NO: 1881630
aguguagagguugauaaua

SEQ ID NO: 2059485 - RNA, 19 nt, Artificial Sequence
  Description of Artificial Sequence: Synthetic oligonucleotide
  Antisense strand to SEQ ID NO: 2059484
uauuaucaaccucuacacu

SEQ ID NO: 2059486 - RNA, 19 nt, Artificial Sequence
  Description of Artificial Sequence: Synthetic oligonucleotide
  Sense strand starting at position 496 of SEQ ID NO: 1881631
ucagcuguuguagagguaa

SEQ ID NO: 2059487 - RNA, 19 nt, Artificial Sequence
  Description of Artificial Sequence: Synthetic oligonucleotide
  Antisense strand to SEQ ID NO: 2059486
uuaccucuacaacagcuga

SEQ ID NO: 2059488 - RNA, 19 nt, Artificial Sequence
  Description of Artificial Sequence: Synthetic oligonucleotide
  Sense strand starting at position 498 of SEQ ID NO: 1881631
agcuguuguagagguaaga

SEQ ID NO: 2059489 - RNA, 19 nt, Artificial Sequence
  Description of Artificial Sequence: Synthetic oligonucleotide
  Antisense strand to SEQ ID NO: 2059488
ucuuaccucuacaacagcu

SEQ ID NO: 2059490 - RNA, 19 nt, Artificial Sequence
  Description of Artificial Sequence: Synthetic oligonucleotide
  Sense strand starting at position 1174 of SEQ ID NO: 1881631
uuaagaguugugggugagu

SEQ ID NO: 2059491 - RNA, 19 nt, Artificial Sequence
  Description of Artificial Sequence: Synthetic oligonucleotide
  Antisense strand to SEQ ID NO: 2059490
acucacccacaacucuuaa

SEQ ID NO: 2059492 - RNA, 19 nt, Artificial Sequence
  Description of Artificial Sequence: Synthetic oligonucleotide
  Sense strand starting at position 1176 of SEQ ID NO: 1881631
aagaguugugggugaguau

SEQ ID NO: 2059493 - RNA, 19 nt, Artificial Sequence
  Description of Artificial Sequence: Synthetic oligonucleotide
  Antisense strand to SEQ ID NO: 2059492
auacucacccacaacucuu

SEQ ID NO: 2059494 - RNA, 19 nt, Artificial Sequence
  Description of Artificial Sequence: Synthetic oligonucleotide
  Sense strand starting at position 1177 of SEQ ID NO: 1881631
agaguugugggugaguauu

SEQ ID NO: 2059495 - RNA, 19 nt, Artificial Sequence
  Description of Artificial Sequence: Synthetic oligonucleotide
  Antisense strand to SEQ ID NO: 2059494
aauacucacccacaacucu

SEQ ID NO: 2059496 - RNA, 19 nt, Artificial Sequence
  Description of Artificial Sequence: Synthetic oligonucleotide
  Sense strand starting at position 1204 of SEQ ID NO: 1881631
uuuaaauagguguaguuga

SEQ ID NO: 2059497 - RNA, 19 nt, Artificial Sequence
  Description of Artificial Sequence: Synthetic oligonucleotide
  Antisense strand to SEQ ID NO: 2059496
ucaacuacaccuauuuaaa

SEQ ID NO: 2059498 - RNA, 19 nt, Artificial Sequence
  Description of Artificial Sequence: Synthetic oligonucleotide
  Sense strand starting at position 1209 of SEQ ID NO: 1881631
auagguguaguugaaguaa

SEQ ID NO: 2059499 - RNA, 19 nt, Artificial Sequence
  Description of Artificial Sequence: Synthetic oligonucleotide
  Antisense strand to SEQ ID NO: 2059498
uuacuucaacuacaccuau

SEQ ID NO: 2059500 - RNA, 19 nt, Artificial Sequence
  Description of Artificial Sequence: Synthetic oligonucleotide
  Sense strand starting at position 1218 of SEQ ID NO: 1881631
guugaaguaagaugaacua

SEQ ID NO: 2059501 - RNA, 19 nt, Artificial Sequence
  Description of Artificial Sequence: Synthetic oligonucleotide
  Antisense strand to SEQ ID NO: 2059500
uaguucaucuuacuucaac

SEQ ID NO: 2059502 - RNA, 19 nt, Artificial Sequence
  Description of Artificial Sequence: Synthetic oligonucleotide
  Sense strand starting at position 1715 of SEQ ID NO: 1881631
ugucuuaacggagagcuuu

SEQ ID NO: 2059503 - RNA, 19 nt, Artificial Sequence
  Description of Artificial Sequence: Synthetic oligonucleotide
  Antisense strand to SEQ ID NO: 2059502
aaagcucuccguuaagaca

SEQ ID NO: 2059504 - RNA, 19 nt, Artificial Sequence
  Description of Artificial Sequence: Synthetic oligonucleotide
  Sense strand starting at position 1891 of SEQ ID NO: 1881631
aaaguaagucugugguuua

SEQ ID NO: 2059505 - RNA, 19 nt, Artificial Sequence
  Description of Artificial Sequence: Synthetic oligonucleotide
  Antisense strand to SEQ ID NO: 2059504
uaaaccacagacuuacuuu

SEQ ID NO: 2059506 - RNA, 19 nt, Artificial Sequence
  Description of Artificial Sequence: Synthetic oligonucleotide
  Sense strand starting at position 1904 of SEQ ID NO: 1881631
gguuuaaauucugucauug

SEQ ID NO: 2059507 - RNA, 19 nt, Artificial Sequence
  Description of Artificial Sequence: Synthetic oligonucleotide
  Antisense strand to SEQ ID NO: 2059506
caaugacagaauuuaaacc

SEQ ID NO: 2059508 - RNA, 19 nt, Artificial Sequence
  Description of Artificial Sequence: Synthetic oligonucleotide
  Sense strand starting at position 1914 of SEQ ID NO: 1881631
cugucauuggcuuaacaau

SEQ ID NO: 2059509 - RNA, 19 nt, Artificial Sequence
  Description of Artificial Sequence: Synthetic oligonucleotide
  Antisense strand to SEQ ID NO: 2059508
auuguuaagccaaugacag

SEQ ID NO: 2059510 - RNA, 19 nt, Artificial Sequence
  Description of Artificial Sequence: Synthetic oligonucleotide
  Sense strand starting at position 1980 of SEQ ID NO: 1881631
gcauauuagcaacaguaau

SEQ ID NO: 2059511 - RNA, 19 nt, Artificial Sequence
  Description of Artificial Sequence: Synthetic oligonucleotide
  Antisense strand to SEQ ID NO: 2059510
auuacuguugcuaauaugc

SEQ ID NO: 2059512 - RNA, 19 nt, Artificial Sequence
  Description of Artificial Sequence: Synthetic oligonucleotide
  Sense strand starting at position 1993 of SEQ ID NO: 1881631
aguaauggccuguagccaa

SEQ ID NO: 2059513 - RNA, 19 nt, Artificial Sequence
  Description of Artificial Sequence: Synthetic oligonucleotide
  Antisense strand to SEQ ID NO: 2059512
uuggcuacaggccauuacu

SEQ ID NO: 2059514 - RNA, 19 nt, Artificial Sequence
  Description of Artificial Sequence: Synthetic oligonucleotide
  Sense strand starting at position 2030 of SEQ ID NO: 1881631
gcguuaacgcaauugcuga

SEQ ID NO: 2059515 - RNA, 19 nt, Artificial Sequence
  Description of Artificial Sequence: Synthetic oligonucleotide
  Antisense strand to SEQ ID NO: 2059514
ucagcaauugcguuaacgc

SEQ ID NO: 2059516 - RNA, 19 nt, Artificial Sequence
  Description of Artificial Sequence: Synthetic oligonucleotide
  Sense strand starting at position 2178 of SEQ ID NO: 1881631
agcugcggucaauacaaua

SEQ ID NO: 2059517 - RNA, 19 nt, Artificial Sequence
  Description of Artificial Sequence: Synthetic oligonucleotide
  Antisense strand to SEQ ID NO: 2059516
uauuguauugaccgcagcu

SEQ ID NO: 2059518 - RNA, 19 nt, Artificial Sequence
  Description of Artificial Sequence: Synthetic oligonucleotide
  Sense strand starting at position 2183 of SEQ ID NO: 1881631
cggucaauacaauaaaguu

SEQ ID NO: 2059519 - RNA, 19 nt, Artificial Sequence
  Description of Artificial Sequence: Synthetic oligonucleotide
  Antisense strand to SEQ ID NO: 2059518
aacuuuauuguauugaccg

SEQ ID NO: 2059520 - RNA, 19 nt, Artificial Sequence
  Description of Artificial Sequence: Synthetic oligonucleotide
  Sense strand starting at position 2257 of SEQ ID NO: 1881631
ggaagcacuuacuucuuua

SEQ ID NO: 2059521 - RNA, 19 nt, Artificial Sequence
  Description of Artificial Sequence: Synthetic oligonucleotide
  Antisense strand to SEQ ID NO: 2059520
uaaagaaguaagugcuucc

SEQ ID NO: 2059522 - RNA, 19 nt, Artificial Sequence
  Description of Artificial Sequence: Synthetic oligonucleotide
  Sense strand starting at position 2331 of SEQ ID NO: 1881631
guuagaauccuuuaaccug

SEQ ID NO: 2059523 - RNA, 19 nt, Artificial Sequence
  Description of Artificial Sequence: Synthetic oligonucleotide
  Antisense strand to SEQ ID NO: 2059522
cagguuaaaggauucuaac

SEQ ID NO: 2059524 - RNA, 19 nt, Artificial Sequence
  Description of Artificial Sequence: Synthetic oligonucleotide
  Sense strand starting at position 2505 of SEQ ID NO: 1881631
agguuagcguguucuauuu

SEQ ID NO: 2059525 - RNA, 19 nt, Artificial Sequence
  Description of Artificial Sequence: Synthetic oligonucleotide
  Antisense strand to SEQ ID NO: 2059524
aaauagaacacgcuaaccu

SEQ ID NO: 2059526 - RNA, 19 nt, Artificial Sequence
  Description of Artificial Sequence: Synthetic oligonucleotide
  Sense strand starting at position 2717 of SEQ ID NO: 1881631
cugaacuaguucccaaaga

SEQ ID NO: 2059527 - RNA, 19 nt, Artificial Sequence
  Description of Artificial Sequence: Synthetic oligonucleotide
  Antisense strand to SEQ ID NO: 2059526
ucuuugggaacuaguucag

SEQ ID NO: 2059528 - RNA, 19 nt, Artificial Sequence
  Description of Artificial Sequence: Synthetic oligonucleotide
  Sense strand starting at position 2869 of SEQ ID NO: 1881631
ucagcucucagggaaugua

SEQ ID NO: 2059529 - RNA, 19 nt, Artificial Sequence
  Description of Artificial Sequence: Synthetic oligonucleotide
  Antisense strand to SEQ ID NO: 2059528
uacauucccugagagcuga

SEQ ID NO: 2059530 - RNA, 19 nt, Artificial Sequence
  Description of Artificial Sequence: Synthetic oligonucleotide
  Sense strand starting at position 2872 of SEQ ID NO: 1881631
gcucucagggaauguauga

SEQ ID NO: 2059531 - RNA, 19 nt, Artificial Sequence
  Description of Artificial Sequence: Synthetic oligonucleotide
  Antisense strand to SEQ ID NO: 2059530
ucauacauucccugagagc

SEQ ID NO: 2059532 - RNA, 19 nt, Artificial Sequence
  Description of Artificial Sequence: Synthetic oligonucleotide
  Sense strand starting at position 3084 of SEQ ID NO: 1881631
uguguuucuaucuggagga

SEQ ID NO: 2059533 - RNA, 19 nt, Artificial Sequence
  Description of Artificial Sequence: Synthetic oligonucleotide
  Antisense strand to SEQ ID NO: 2059532
uccuccagauagaaacaca

SEQ ID NO: 2059534 - RNA, 19 nt, Artificial Sequence
  Description of Artificial Sequence: Synthetic oligonucleotide
  Sense strand starting at position 3291 of SEQ ID NO: 1881631
aaauguuacuaguuaagga

SEQ ID NO: 2059535 - RNA, 19 nt, Artificial Sequence
  Description of Artificial Sequence: Synthetic oligonucleotide
  Antisense strand to SEQ ID NO: 2059534
uccuuaacuaguaacauuu

SEQ ID NO: 2059536 - RNA, 19 nt, Artificial Sequence
  Description of Artificial Sequence: Synthetic oligonucleotide
  Sense strand starting at position 3409 of SEQ ID NO: 1881631
ggaacucccuuagcuuauu

SEQ ID NO: 2059537 - RNA, 19 nt, Artificial Sequence
  Description of Artificial Sequence: Synthetic oligonucleotide
  Antisense strand to SEQ ID NO: 2059536
aauaagcuaagggaguucc

SEQ ID NO: 2059538 - RNA, 19 nt, Artificial Sequence
  Description of Artificial Sequence: Synthetic oligonucleotide
  Sense strand starting at position 3427 of SEQ ID NO: 1881631
uuugcuaaaugucuuuaga

SEQ ID NO: 2059539 - RNA, 19 nt, Artificial Sequence
  Description of Artificial Sequence: Synthetic oligonucleotide
  Antisense strand to SEQ ID NO: 2059538
ucuaaagacauuuagcaaa

SEQ ID NO: 2059540 - RNA, 19 nt, Artificial Sequence
  Description of Artificial Sequence: Synthetic oligonucleotide
  Sense strand starting at position 3429 of SEQ ID NO: 1881631
ugcuaaaugucuuuagaac

SEQ ID NO: 2059541 - RNA, 19 nt, Artificial Sequence
  Description of Artificial Sequence: Synthetic oligonucleotide
  Antisense strand to SEQ ID NO: 2059540
guucuaaagacauuuagca

SEQ ID NO: 2059542 - RNA, 19 nt, Artificial Sequence
  Description of Artificial Sequence: Synthetic oligonucleotide
  Sense strand starting at position 3430 of SEQ ID NO: 1881631
gcuaaaugucuuuagaacc

SEQ ID NO: 2059543 - RNA, 19 nt, Artificial Sequence
  Description of Artificial Sequence: Synthetic oligonucleotide
  Antisense strand to SEQ ID NO: 2059542
gguucuaaagacauuuagc

SEQ ID NO: 2059544 - RNA, 19 nt, Artificial Sequence
  Description of Artificial Sequence: Synthetic oligonucleotide
  Sense strand starting at position 3484 of SEQ ID NO: 1881631
gaaaguugguggaggaguu

SEQ ID NO: 2059545 - RNA, 19 nt, Artificial Sequence
  Description of Artificial Sequence: Synthetic oligonucleotide
  Antisense strand to SEQ ID NO: 2059544
aacuccuccaccaacuuuc

SEQ ID NO: 2059546 - RNA, 19 nt, Artificial Sequence
  Description of Artificial Sequence: Synthetic oligonucleotide
  Sense strand starting at position 3561 of SEQ ID NO: 1881631
agucaucuguuaucaccau

SEQ ID NO: 2059547 - RNA, 19 nt, Artificial Sequence
  Description of Artificial Sequence: Synthetic oligonucleotide
  Antisense strand to SEQ ID NO: 2059546
auggugauaacagaugacu

SEQ ID NO: 2059548 - RNA, 19 nt, Artificial Sequence
  Description of Artificial Sequence: Synthetic oligonucleotide
  Sense strand starting at position 3745 of SEQ ID NO: 1881631
aguaaagaucacugauagu

SEQ ID NO: 2059549 - RNA, 19 nt, Artificial Sequence
  Description of Artificial Sequence: Synthetic oligonucleotide
  Antisense strand to SEQ ID NO: 2059548
acuaucagugaucuuuacu

SEQ ID NO: 2059550 - RNA, 19 nt, Artificial Sequence
  Description of Artificial Sequence: Synthetic oligonucleotide
  Sense strand starting at position 3792 of SEQ ID NO: 1881631
uguaaaugcuaucucugag

SEQ ID NO: 2059551 - RNA, 19 nt, Artificial Sequence
  Description of Artificial Sequence: Synthetic oligonucleotide
  Antisense strand to SEQ ID NO: 2059550
cucagagauagcauuuaca

SEQ ID NO: 2059552 - RNA, 19 nt, Artificial Sequence
  Description of Artificial Sequence: Synthetic oligonucleotide
  Sense strand starting at position 3795 of SEQ ID NO: 1881631
aaaugcuaucucugaguug

SEQ ID NO: 2059553 - RNA, 19 nt, Artificial Sequence
  Description of Artificial Sequence: Synthetic oligonucleotide
  Antisense strand to SEQ ID NO: 2059552
caacucagagauagcauuu

SEQ ID NO: 2059554 - RNA, 19 nt, Artificial Sequence
  Description of Artificial Sequence: Synthetic oligonucleotide
  Sense strand starting at position 3802 of SEQ ID NO: 1881631
aucucugaguuguuauaag

SEQ ID NO: 2059555 - RNA, 19 nt, Artificial Sequence
  Description of Artificial Sequence: Synthetic oligonucleotide
  Antisense strand to SEQ ID NO: 2059554
cuuauaacaacucagagau

SEQ ID NO: 2059556 - RNA, 19 nt, Artificial Sequence
  Description of Artificial Sequence: Synthetic oligonucleotide
  Sense strand starting at position 3879 of SEQ ID NO: 1881631
uuuguuaaguuauccagau

SEQ ID NO: 2059557 - RNA, 19 nt, Artificial Sequence
  Description of Artificial Sequence: Synthetic oligonucleotide
  Antisense strand to SEQ ID NO: 2059556
aucuggauaacuuaacaaa

SEQ ID NO: 2059558 - RNA, 19 nt, Artificial Sequence
  Description of Artificial Sequence: Synthetic oligonucleotide
  Sense strand starting at position 3880 of SEQ ID NO: 1881631
uuguuaaguuauccagaug

SEQ ID NO: 2059559 - RNA, 19 nt, Artificial Sequence
  Description of Artificial Sequence: Synthetic oligonucleotide
  Antisense strand to SEQ ID NO: 2059558
caucuggauaacuuaacaa

SEQ ID NO: 2059560 - RNA, 19 nt, Artificial Sequence
  Description of Artificial Sequence: Synthetic oligonucleotide
  Sense strand starting at position 3881 of SEQ ID NO: 1881631
uguuaaguuauccagaugu

SEQ ID NO: 2059561 - RNA, 19 nt, Artificial Sequence
  Description of Artificial Sequence: Synthetic oligonucleotide
  Antisense strand to SEQ ID NO: 2059560
acaucuggauaacuuaaca

SEQ ID NO: 2059562 - RNA, 19 nt, Artificial Sequence
  Description of Artificial Sequence: Synthetic oligonucleotide
  Sense strand starting at position 3883 of SEQ ID NO: 1881631
uuaaguuauccagaugugu

SEQ ID NO: 2059563 - RNA, 19 nt, Artificial Sequence
  Description of Artificial Sequence: Synthetic oligonucleotide
  Antisense strand to SEQ ID NO: 2059562
acacaucuggauaacuuaa

SEQ ID NO: 2059564 - RNA, 19 nt, Artificial Sequence
  Description of Artificial Sequence: Synthetic oligonucleotide
  Sense strand starting at position 3896 of SEQ ID NO: 1881631
auguguuacuuacucuuga

SEQ ID NO: 2059565 - RNA, 19 nt, Artificial Sequence
  Description of Artificial Sequence: Synthetic oligonucleotide
  Antisense strand to SEQ ID NO: 2059564
ucaagaguaaguaacacau

SEQ ID NO: 2059566 - RNA, 19 nt, Artificial Sequence
  Description of Artificial Sequence: Synthetic oligonucleotide
  Sense strand starting at position 66 of SEQ ID NO: 1881632
gagguuauuugcccaaguc

SEQ ID NO: 2059567 - RNA, 19 nt, Artificial Sequence
  Description of Artificial Sequence: Synthetic oligonucleotide
  Antisense strand to SEQ ID NO: 2059566
gacuugggcaaauaaccuc

SEQ ID NO: 2059568 - RNA, 19 nt, Artificial Sequence
  Description of Artificial Sequence: Synthetic oligonucleotide
  Sense strand starting at position 195 of SEQ ID NO: 1881632
gcaucauacugggaaauga

SEQ ID NO: 2059569 - RNA, 19 nt, Artificial Sequence
  Description of Artificial Sequence: Synthetic oligonucleotide
  Antisense strand to SEQ ID NO: 2059568
ucauuucccaguaugaugc

SEQ ID NO: 2059570 - RNA, 19 nt, Artificial Sequence
  Description of Artificial Sequence: Synthetic oligonucleotide
  Sense strand starting at position 225 of SEQ ID NO: 1881632
ugaacaagauaggaucauu

SEQ ID NO: 2059571 - RNA, 19 nt, Artificial Sequence
  Description of Artificial Sequence: Synthetic oligonucleotide
  Antisense strand to SEQ ID NO: 2059570
aaugauccuaucuuguuca

SEQ ID NO: 2059572 - RNA, 19 nt, Artificial Sequence
  Description of Artificial Sequence: Synthetic oligonucleotide
  Sense strand starting at position 598 of SEQ ID NO: 1881632
guaaucauagauugcacaa

SEQ ID NO: 2059573 - RNA, 19 nt, Artificial Sequence
  Description of Artificial Sequence: Synthetic oligonucleotide
  Antisense strand to SEQ ID NO: 2059572
uugugcaaucuaugauuac

SEQ ID NO: 2059574 - RNA, 19 nt, Artificial Sequence
  Description of Artificial Sequence: Synthetic oligonucleotide
  Sense strand starting at position 639 of SEQ ID NO: 1881632
gguggugugacagaguaac

SEQ ID NO: 2059575 - RNA, 19 nt, Artificial Sequence
  Description of Artificial Sequence: Synthetic oligonucleotide
  Antisense strand to SEQ ID NO: 2059574
guuacucugucacaccacc

SEQ ID NO: 2059576 - RNA, 19 nt, Artificial Sequence
  Description of Artificial Sequence: Synthetic oligonucleotide
  Sense strand starting at position 657 of SEQ ID NO: 1881632
cugggaaugccuuacuucu

SEQ ID NO: 2059577 - RNA, 19 nt, Artificial Sequence
  Description of Artificial Sequence: Synthetic oligonucleotide
  Antisense strand to SEQ ID NO: 2059576
agaaguaaggcauucccag

SEQ ID NO: 2059578 - RNA, 19 nt, Artificial Sequence
  Description of Artificial Sequence: Synthetic oligonucleotide
  Sense strand starting at position 664 of SEQ ID NO: 1881632
ugccuuacuucuguuaaug

SEQ ID NO: 2059579 - RNA, 19 nt, Artificial Sequence
  Description of Artificial Sequence: Synthetic oligonucleotide
  Antisense strand to SEQ ID NO: 2059578
cauuaacagaaguaaggca

SEQ ID NO: 2059580 - RNA, 19 nt, Artificial Sequence
  Description of Artificial Sequence: Synthetic oligonucleotide
  Sense strand starting at position 674 of SEQ ID NO: 1881632
cuguuaauggugugauaga

SEQ ID NO: 2059581 - RNA, 19 nt, Artificial Sequence
  Description of Artificial Sequence: Synthetic oligonucleotide
  Antisense strand to SEQ ID NO: 2059580
ucuaucacaccauuaacag

SEQ ID NO: 2059582 - RNA, 19 nt, Artificial Sequence
  Description of Artificial Sequence: Synthetic oligonucleotide
  Sense strand starting at position 710 of SEQ ID NO: 1881632
uguucuguuuguucccaaa

SEQ ID NO: 2059583 - RNA, 19 nt, Artificial Sequence
  Description of Artificial Sequence: Synthetic oligonucleotide
  Antisense strand to SEQ ID NO: 2059582
uuugggaacaaacagaaca

SEQ ID NO: 2059584 - RNA, 19 nt, Artificial Sequence
  Description of Artificial Sequence: Synthetic oligonucleotide
  Sense strand starting at position 712 of SEQ ID NO: 1881632
uucuguuuguucccaaaga

SEQ ID NO: 2059585 - RNA, 19 nt, Artificial Sequence
  Description of Artificial Sequence: Synthetic oligonucleotide
  Antisense strand to SEQ ID NO: 2059584
ucuuugggaacaaacagaa

SEQ ID NO: 2059586 - RNA, 19 nt, Artificial Sequence
  Description of Artificial Sequence: Synthetic oligonucleotide
  Sense strand starting at position 779 of SEQ ID NO: 1881632
accuccuagugaucacaga

SEQ ID NO: 2059587 - RNA, 19 nt, Artificial Sequence
  Description of Artificial Sequence: Synthetic oligonucleotide
  Antisense strand to SEQ ID NO: 2059586
ucugugaucacuaggaggu

SEQ ID NO: 2059588 - RNA, 19 nt, Artificial Sequence
  Description of Artificial Sequence: Synthetic oligonucleotide
  Sense strand starting at position 788 of SEQ ID NO: 1881632
ugaucacagaaguguuaag

SEQ ID NO: 2059589 - RNA, 19 nt, Artificial Sequence
  Description of Artificial Sequence: Synthetic oligonucleotide
  Antisense strand to SEQ ID NO: 2059588
cuuaacacuucugugauca

SEQ ID NO: 2059590 - RNA, 19 nt, Artificial Sequence
  Description of Artificial Sequence: Synthetic oligonucleotide
  Sense strand starting at position 1170 of SEQ ID NO: 1881632
guauaaagcgcuuagaaua

SEQ ID NO: 2059591 - RNA, 19 nt, Artificial Sequence
  Description of Artificial Sequence: Synthetic oligonucleotide
  Antisense strand to SEQ ID NO: 2059590
uauucuaagcgcuuuauac

SEQ ID NO: 2059592 - RNA, 19 nt, Artificial Sequence
  Description of Artificial Sequence: Synthetic oligonucleotide
  Sense strand starting at position 1175 of SEQ ID NO: 1881632
aagcgcuuagaauaaguua

SEQ ID NO: 2059593 - RNA, 19 nt, Artificial Sequence
  Description of Artificial Sequence: Synthetic oligonucleotide
  Antisense strand to SEQ ID NO: 2059592
uaacuuauucuaagcgcuu

SEQ ID NO: 2059594 - RNA, 19 nt, Artificial Sequence
  Description of Artificial Sequence: Synthetic oligonucleotide
  Sense strand starting at position 1228 of SEQ ID NO: 1881632
gggaacagcugugauuuca

SEQ ID NO: 2059595 - RNA, 19 nt, Artificial Sequence
  Description of Artificial Sequence: Synthetic oligonucleotide
  Antisense strand to SEQ ID NO: 2059594
ugaaaucacagcuguuccc

SEQ ID NO: 2059596 - RNA, 19 nt, Artificial Sequence
  Description of Artificial Sequence: Synthetic oligonucleotide
  Sense strand starting at position 1254 of SEQ ID NO: 1881632
ggugacacuucggaaagga

SEQ ID NO: 2059597 - RNA, 19 nt, Artificial Sequence
  Description of Artificial Sequence: Synthetic oligonucleotide
  Antisense strand to SEQ ID NO: 2059596
uccuuuccgaagugucacc

SEQ ID NO: 2059598 - RNA, 19 nt, Artificial Sequence
  Description of Artificial Sequence: Synthetic oligonucleotide
  Sense strand starting at position 1364 of SEQ ID NO: 1881632
gcauaaucagacugcggga

SEQ ID NO: 2059599 - RNA, 19 nt, Artificial Sequence
  Description of Artificial Sequence: Synthetic oligonucleotide
  Antisense strand to SEQ ID NO: 2059598
ucccgcagucugauuaugc

SEQ ID NO: 2059600 - RNA, 19 nt, Artificial Sequence
  Description of Artificial Sequence: Synthetic oligonucleotide
  Sense strand starting at position 1366 of SEQ ID NO: 1881632
auaaucagacugcgggaaa

SEQ ID NO: 2059601 - RNA, 19 nt, Artificial Sequence
  Description of Artificial Sequence: Synthetic oligonucleotide
  Antisense strand to SEQ ID NO: 2059600
uuucccgcagucugauuau

SEQ ID NO: 2059602 - RNA, 19 nt, Artificial Sequence
  Description of Artificial Sequence: Synthetic oligonucleotide
  Sense strand starting at position 1570 of SEQ ID NO: 1881632
cugggaauauuugagugca

SEQ ID NO: 2059603 - RNA, 19 nt, Artificial Sequence
  Description of Artificial Sequence: Synthetic oligonucleotide
  Antisense strand to SEQ ID NO: 2059602
ugcacucaaauauucccag

SEQ ID NO: 2059604 - RNA, 19 nt, Artificial Sequence
  Description of Artificial Sequence: Synthetic oligonucleotide
  Sense strand starting at position 1604 of SEQ ID NO: 1881632
ccagaaauauaccugcaga

SEQ ID NO: 2059605 - RNA, 19 nt, Artificial Sequence
  Description of Artificial Sequence: Synthetic oligonucleotide
  Antisense strand to SEQ ID NO: 2059604
ucugcagguauauuucugg

SEQ ID NO: 2059606 - RNA, 19 nt, Artificial Sequence
  Description of Artificial Sequence: Synthetic oligonucleotide
  Sense strand starting at position 1617 of SEQ ID NO: 1881632
ugcagaauccaacauguaa

SEQ ID NO: 2059607 - RNA, 19 nt, Artificial Sequence
  Description of Artificial Sequence: Synthetic oligonucleotide
  Antisense strand to SEQ ID NO: 2059606
uuacauguuggauucugca

SEQ ID NO: 2059608 - RNA, 19 nt, Artificial Sequence
  Description of Artificial Sequence: Synthetic oligonucleotide
  Sense strand starting at position 1903 of SEQ ID NO: 1881632
aagauagaauuugggaauu

SEQ ID NO: 2059609 - RNA, 19 nt, Artificial Sequence
  Description of Artificial Sequence: Synthetic oligonucleotide
  Antisense strand to SEQ ID NO: 2059608
aauucccaaauucuaucuu

SEQ ID NO: 2059610 - RNA, 19 nt, Artificial Sequence
  Description of Artificial Sequence: Synthetic oligonucleotide
  Sense strand starting at position 1991 of SEQ ID NO: 1881632
uccuuuagauuguucggua

SEQ ID NO: 2059611 - RNA, 19 nt, Artificial Sequence
  Description of Artificial Sequence: Synthetic oligonucleotide
  Antisense strand to SEQ ID NO: 2059610
uaccgaacaaucuaaagga

SEQ ID NO: 2059612 - RNA, 19 nt, Artificial Sequence
  Description of Artificial Sequence: Synthetic oligonucleotide
  Sense strand starting at position 1992 of SEQ ID NO: 1881632
ccuuuagauuguucgguaa

SEQ ID NO: 2059613 - RNA, 19 nt, Artificial Sequence
  Description of Artificial Sequence: Synthetic oligonucleotide
  Antisense strand to SEQ ID NO: 2059612
uuaccgaacaaucuaaagg

SEQ ID NO: 2059614 - RNA, 19 nt, Artificial Sequence
  Description of Artificial Sequence: Synthetic oligonucleotide
  Sense strand starting at position 1996 of SEQ ID NO: 1881632
uagauuguucgguaaugcu

SEQ ID NO: 2059615 - RNA, 19 nt, Artificial Sequence
  Description of Artificial Sequence: Synthetic oligonucleotide
  Antisense strand to SEQ ID NO: 2059614
agcauuaccgaacaaucua

SEQ ID NO: 2059616 - RNA, 19 nt, Artificial Sequence
  Description of Artificial Sequence: Synthetic oligonucleotide
  Sense strand starting at position 2072 of SEQ ID NO: 1881632
ggucaaggaucauauccua

SEQ ID NO: 2059617 - RNA, 19 nt, Artificial Sequence
  Description of Artificial Sequence: Synthetic oligonucleotide
  Antisense strand to SEQ ID NO: 2059616
uaggauaugauccuugacc

SEQ ID NO: 2059618 - RNA, 19 nt, Artificial Sequence
  Description of Artificial Sequence: Synthetic oligonucleotide
  Sense strand starting at position 2126 of SEQ ID NO: 1881632
uuugcaaucgcuuaucuac

SEQ ID NO: 2059619 - RNA, 19 nt, Artificial Sequence
  Description of Artificial Sequence: Synthetic oligonucleotide
  Antisense strand to SEQ ID NO: 2059618
guagauaagcgauugcaaa

SEQ ID NO: 2059620 - RNA, 19 nt, Artificial Sequence
  Description of Artificial Sequence: Synthetic oligonucleotide
  Sense strand starting at position 2128 of SEQ ID NO: 1881632
ugcaaucgcuuaucuacaa

SEQ ID NO: 2059621 - RNA, 19 nt, Artificial Sequence
  Description of Artificial Sequence: Synthetic oligonucleotide
  Antisense strand to SEQ ID NO: 2059620
uuguagauaagcgauugca

SEQ ID NO: 2059622 - RNA, 19 nt, Artificial Sequence
  Description of Artificial Sequence: Synthetic oligonucleotide
  Sense strand starting at position 2129 of SEQ ID NO: 1881632
gcaaucgcuuaucuacaaa

SEQ ID NO: 2059623 - RNA, 19 nt, Artificial Sequence
  Description of Artificial Sequence: Synthetic oligonucleotide
  Antisense strand to SEQ ID NO: 2059622
uuuguagauaagcgauugc

SEQ ID NO: 2059624 - RNA, 19 nt, Artificial Sequence
  Description of Artificial Sequence: Synthetic oligonucleotide
  Sense strand starting at position 2150 of SEQ ID NO: 1881632
uugugacguaaagauugua

SEQ ID NO: 2059625 - RNA, 19 nt, Artificial Sequence
  Description of Artificial Sequence: Synthetic oligonucleotide
  Antisense strand to SEQ ID NO: 2059624
uacaaucuuuacgucacaa

SEQ ID NO: 2059626 - RNA, 19 nt, Artificial Sequence
  Description of Artificial Sequence: Synthetic oligonucleotide
  Sense strand starting at position 2344 of SEQ ID NO: 1881632
uuggauaaucugggucuca

SEQ ID NO: 2059627 - RNA, 19 nt, Artificial Sequence
  Description of Artificial Sequence: Synthetic oligonucleotide
  Antisense strand to SEQ ID NO: 2059626
ugagacccagauuauccaa

SEQ ID NO: 2059628 - RNA, 19 nt, Artificial Sequence
  Description of Artificial Sequence: Synthetic oligonucleotide
  Sense strand starting at position 2349 of SEQ ID NO: 1881632
uaaucugggucucagaaga

SEQ ID NO: 2059629 - RNA, 19 nt, Artificial Sequence
  Description of Artificial Sequence: Synthetic oligonucleotide
  Antisense strand to SEQ ID NO: 2059628
ucuucugagacccagauua

SEQ ID NO: 2059630 - RNA, 19 nt, Artificial Sequence
  Description of Artificial Sequence: Synthetic oligonucleotide
  Sense strand starting at position 2360 of SEQ ID NO: 1881632
ucagaagaagcuugugaaa

SEQ ID NO: 2059631 - RNA, 19 nt, Artificial Sequence
  Description of Artificial Sequence: Synthetic oligonucleotide
  Antisense strand to SEQ ID NO: 2059630
uuucacaagcuucuucuga

SEQ ID NO: 2059632 - RNA, 19 nt, Artificial Sequence
  Description of Artificial Sequence: Synthetic oligonucleotide
  Sense strand starting at position 2371 of SEQ ID NO: 1881632
uugugaaacuuacaaagaa

SEQ ID NO: 2059633 - RNA, 19 nt, Artificial Sequence
  Description of Artificial Sequence: Synthetic oligonucleotide
  Antisense strand to SEQ ID NO: 2059632
uucuuuguaaguuucacaa

SEQ ID NO: 2059634 - RNA, 19 nt, Artificial Sequence
  Description of Artificial Sequence: Synthetic oligonucleotide
  Sense strand starting at position 2712 of SEQ ID NO: 1881632
cuggguuugcucuacugca

SEQ ID NO: 2059635 - RNA, 19 nt, Artificial Sequence
  Description of Artificial Sequence: Synthetic oligonucleotide
  Antisense strand to SEQ ID NO: 2059634
ugcaguagagcaaacccag

SEQ ID NO: 2059636 - RNA, 19 nt, Artificial Sequence
  Description of Artificial Sequence: Synthetic oligonucleotide
  Sense strand starting at position 2813 of SEQ ID NO: 1881632
gacucaucccguuagcuua

SEQ ID NO: 2059637 - RNA, 19 nt, Artificial Sequence
  Description of Artificial Sequence: Synthetic oligonucleotide
  Antisense strand to SEQ ID NO: 2059636
uaagcuaacgggaugaguc

SEQ ID NO: 2059638 - RNA, 19 nt, Artificial Sequence
  Description of Artificial Sequence: Synthetic oligonucleotide
  Sense strand starting at position 2904 of SEQ ID NO: 1881632
cccaaaguugcuuaagugu

SEQ ID NO: 2059639 - RNA, 19 nt, Artificial Sequence
  Description of Artificial Sequence: Synthetic oligonucleotide
  Antisense strand to SEQ ID NO: 2059638
acacuuaagcaacuuuggg

SEQ ID NO: 2059640 - RNA, 19 nt, Artificial Sequence
  Description of Artificial Sequence: Synthetic oligonucleotide
  Sense strand starting at position 2907 of SEQ ID NO: 1881632
aaaguugcuuaagugucaa

SEQ ID NO: 2059641 - RNA, 19 nt, Artificial Sequence
  Description of Artificial Sequence: Synthetic oligonucleotide
  Antisense strand to SEQ ID NO: 2059640
uugacacuuaagcaacuuu

SEQ ID NO: 2059642 - RNA, 19 nt, Artificial Sequence
  Description of Artificial Sequence: Synthetic oligonucleotide
  Sense strand starting at position 2919 of SEQ ID NO: 1881632
gugucaaagcacgguagua

SEQ ID NO: 2059643 - RNA, 19 nt, Artificial Sequence
  Description of Artificial Sequence: Synthetic oligonucleotide
  Antisense strand to SEQ ID NO: 2059642
uacuaccgugcuuugacac

SEQ ID NO: 2059644 - RNA, 19 nt, Artificial Sequence
  Description of Artificial Sequence: Synthetic oligonucleotide
  Sense strand starting at position 2921 of SEQ ID NO: 1881632
gucaaagcacgguaguaaa

SEQ ID NO: 2059645 - RNA, 19 nt, Artificial Sequence
  Description of Artificial Sequence: Synthetic oligonucleotide
  Antisense strand to SEQ ID NO: 2059644
uuuacuaccgugcuuugac

SEQ ID NO: 2059646 - RNA, 19 nt, Artificial Sequence
  Description of Artificial Sequence: Synthetic oligonucleotide
  Sense strand starting at position 33 of SEQ ID NO: 1881633
acuaucuucuggguaaacu

SEQ ID NO: 2059647 - RNA, 19 nt, Artificial Sequence
  Description of Artificial Sequence: Synthetic oligonucleotide
  Antisense strand to SEQ ID NO: 2059646
aguuuacccagaagauagu

SEQ ID NO: 2059648 - RNA, 19 nt, Artificial Sequence
  Description of Artificial Sequence: Synthetic oligonucleotide
  Sense strand starting at position 34 of SEQ ID NO: 1881633
cuaucuucuggguaaacug

SEQ ID NO: 2059649 - RNA, 19 nt, Artificial Sequence
  Description of Artificial Sequence: Synthetic oligonucleotide
  Antisense strand to SEQ ID NO: 2059648
caguuuacccagaagauag

SEQ ID NO: 2059650 - RNA, 19 nt, Artificial Sequence
  Description of Artificial Sequence: Synthetic oligonucleotide
  Sense strand starting at position 72 of SEQ ID NO: 1881633
uuuguaaagagguaacugu

SEQ ID NO: 2059651 - RNA, 19 nt, Artificial Sequence
  Description of Artificial Sequence: Synthetic oligonucleotide
  Antisense strand to SEQ ID NO: 2059650
acaguuaccucuuuacaaa

SEQ ID NO: 2059652 - RNA, 19 nt, Artificial Sequence
  Description of Artificial Sequence: Synthetic oligonucleotide
  Sense strand starting at position 76 of SEQ ID NO: 1881633
uaaagagguaacugugguu

SEQ ID NO: 2059653 - RNA, 19 nt, Artificial Sequence
  Description of Artificial Sequence: Synthetic oligonucleotide
  Antisense strand to SEQ ID NO: 2059652
aaccacaguuaccucuuua

SEQ ID NO: 2059654 - RNA, 19 nt, Artificial Sequence
  Description of Artificial Sequence: Synthetic oligonucleotide
  Sense strand starting at position 479 of SEQ ID NO: 1881633
uucucagggcuuuaucagu

SEQ ID NO: 2059655 - RNA, 19 nt, Artificial Sequence
  Description of Artificial Sequence: Synthetic oligonucleotide
  Antisense strand to SEQ ID NO: 2059654
acugauaaagcccugagaa

SEQ ID NO: 2059656 - RNA, 19 nt, Artificial Sequence
  Description of Artificial Sequence: Synthetic oligonucleotide
  Sense strand starting at position 718 of SEQ ID NO: 1881633
ugcagaauuccucaaaggu

SEQ ID NO: 2059657 - RNA, 19 nt, Artificial Sequence
  Description of Artificial Sequence: Synthetic oligonucleotide
  Antisense strand to SEQ ID NO: 2059656
accuuugaggaauucugca

SEQ ID NO: 2059658 - RNA, 19 nt, Artificial Sequence
  Description of Artificial Sequence: Synthetic oligonucleotide
  Sense strand starting at position 1019 of SEQ ID NO: 1881633
uuuacuuagucaccaugau

SEQ ID NO: 2059659 - RNA, 19 nt, Artificial Sequence
  Description of Artificial Sequence: Synthetic oligonucleotide
  Antisense strand to SEQ ID NO: 2059658
aucauggugacuaaguaaa

SEQ ID NO: 2059660 - RNA, 19 nt, Artificial Sequence
  Description of Artificial Sequence: Synthetic oligonucleotide
  Sense strand starting at position 1020 of SEQ ID NO: 1881633
uuacuuagucaccaugauu

SEQ ID NO: 2059661 - RNA, 19 nt, Artificial Sequence
  Description of Artificial Sequence: Synthetic oligonucleotide
  Antisense strand to SEQ ID NO: 2059660
aaucauggugacuaaguaa

SEQ ID NO: 2059662 - RNA, 19 nt, Artificial Sequence
  Description of Artificial Sequence: Synthetic oligonucleotide
  Sense strand starting at position 1040 of SEQ ID NO: 1881633
guguaaguuacagaagcaa

SEQ ID NO: 2059663 - RNA, 19 nt, Artificial Sequence
  Description of Artificial Sequence: Synthetic oligonucleotide
  Antisense strand to SEQ ID NO: 2059662
uugcuucuguaacuuacac

SEQ ID NO: 2059664 - RNA, 19 nt, Artificial Sequence
  Description of Artificial Sequence: Synthetic oligonucleotide
  Sense strand starting at position 1402 of SEQ ID NO: 1881633
ccacgugacccuggaaauu

SEQ ID NO: 2059665 - RNA, 19 nt, Artificial Sequence
  Description of Artificial Sequence: Synthetic oligonucleotide
  Antisense strand to SEQ ID NO: 2059664
aauuuccagggucacgugg

SEQ ID NO: 2059666 - RNA, 19 nt, Artificial Sequence
  Description of Artificial Sequence: Synthetic oligonucleotide
  Sense strand starting at position 1504 of SEQ ID NO: 1881633
augagaaaguacuucgcaa

SEQ ID NO: 2059667 - RNA, 19 nt, Artificial Sequence
  Description of Artificial Sequence: Synthetic oligonucleotide
  Antisense strand to SEQ ID NO: 2059666
uugcgaaguacuuucucau

SEQ ID NO: 2059668 - RNA, 19 nt, Artificial Sequence
  Description of Artificial Sequence: Synthetic oligonucleotide
  Sense strand starting at position 1506 of SEQ ID NO: 1881633
gagaaaguacuucgcaaug

SEQ ID NO: 2059669 - RNA, 19 nt, Artificial Sequence
  Description of Artificial Sequence: Synthetic oligonucleotide
  Antisense strand to SEQ ID NO: 2059668
cauugcgaaguacuuucuc

SEQ ID NO: 2059670 - RNA, 19 nt, Artificial Sequence
  Description of Artificial Sequence: Synthetic oligonucleotide
  Sense strand starting at position 1529 of SEQ ID NO: 1881633
agucuacaugaauguaaag

SEQ ID NO: 2059671 - RNA, 19 nt, Artificial Sequence
  Description of Artificial Sequence: Synthetic oligonucleotide
  Antisense strand to SEQ ID NO: 2059670
cuuuacauucauguagacu

SEQ ID NO: 2059672 - RNA, 19 nt, Artificial Sequence
  Description of Artificial Sequence: Synthetic oligonucleotide
  Sense strand starting at position 1573 of SEQ ID NO: 1881633
auauuagugucaguagaaa

SEQ ID NO: 2059673 - RNA, 19 nt, Artificial Sequence
  Description of Artificial Sequence: Synthetic oligonucleotide
  Antisense strand to SEQ ID NO: 2059672
uuucuacugacacuaauau

SEQ ID NO: 2059674 - RNA, 19 nt, Artificial Sequence
  Description of Artificial Sequence: Synthetic oligonucleotide
  Sense strand starting at position 1594 of SEQ ID NO: 1881633
gugagucauuuauaaagau

SEQ ID NO: 2059675 - RNA, 19 nt, Artificial Sequence
  Description of Artificial Sequence: Synthetic oligonucleotide
  Antisense strand to SEQ ID NO: 2059674
aucuuuauaaaugacucac

SEQ ID NO: 2059676 - RNA, 19 nt, Artificial Sequence
  Description of Artificial Sequence: Synthetic oligonucleotide
  Sense strand starting at position 1616 of SEQ ID NO: 1881633
aggcuaagaucuucuuaau

SEQ ID NO: 2059677 - RNA, 19 nt, Artificial Sequence
  Description of Artificial Sequence: Synthetic oligonucleotide
  Antisense strand to SEQ ID NO: 2059676
auuaagaagaucuuagccu

SEQ ID NO: 2059678 - RNA, 19 nt, Artificial Sequence
  Description of Artificial Sequence: Synthetic oligonucleotide
  Sense strand starting at position 1719 of SEQ ID NO: 1881633
gguuaugcagguuaauacu

SEQ ID NO: 2059679 - RNA, 19 nt, Artificial Sequence
  Description of Artificial Sequence: Synthetic oligonucleotide
  Antisense strand to SEQ ID NO: 2059678
aguauuaaccugcauaacc

SEQ ID NO: 2059680 - RNA, 19 nt, Artificial Sequence
  Description of Artificial Sequence: Synthetic oligonucleotide
  Sense strand starting at position 1725 of SEQ ID NO: 1881633
gcagguuaauacuuauaug

SEQ ID NO: 2059681 - RNA, 19 nt, Artificial Sequence
  Description of Artificial Sequence: Synthetic oligonucleotide
  Antisense strand to SEQ ID NO: 2059680
cauauaaguauuaaccugc

SEQ ID NO: 2059682 - RNA, 19 nt, Artificial Sequence
  Description of Artificial Sequence: Synthetic oligonucleotide
  Sense strand starting at position 2205 of SEQ ID NO: 1881633
gaucuuagacauggaggca

SEQ ID NO: 2059683 - RNA, 19 nt, Artificial Sequence
  Description of Artificial Sequence: Synthetic oligonucleotide
  Antisense strand to SEQ ID NO: 2059682
ugccuccaugucuaagauc

SEQ ID NO: 2059684 - RNA, 19 nt, Artificial Sequence
  Description of Artificial Sequence: Synthetic oligonucleotide
  Sense strand starting at position 2337 of SEQ ID NO: 1881633
cauugaaaggugcaauauu

SEQ ID NO: 2059685 - RNA, 19 nt, Artificial Sequence
  Description of Artificial Sequence: Synthetic oligonucleotide
  Antisense strand to SEQ ID NO: 2059684
aauauugcaccuuucaaug

SEQ ID NO: 2059686 - RNA, 19 nt, Artificial Sequence
  Description of Artificial Sequence: Synthetic oligonucleotide
  Sense strand starting at position 2367 of SEQ ID NO: 1881633
auauuaugccucuaguuau

SEQ ID NO: 2059687 - RNA, 19 nt, Artificial Sequence
  Description of Artificial Sequence: Synthetic oligonucleotide
  Antisense strand to SEQ ID NO: 2059686
auaacuagaggcauaauau

SEQ ID NO: 2059688 - RNA, 19 nt, Artificial Sequence
  Description of Artificial Sequence: Synthetic oligonucleotide
  Sense strand starting at position 2387 of SEQ ID NO: 1881633
ucuuaagaguuacuuugau

SEQ ID NO: 2059689 - RNA, 19 nt, Artificial Sequence
  Description of Artificial Sequence: Synthetic oligonucleotide
  Antisense strand to SEQ ID NO: 2059688
aucaaaguaacucuuaaga

SEQ ID NO: 2059690 - RNA, 19 nt, Artificial Sequence
  Description of Artificial Sequence: Synthetic oligonucleotide
  Sense strand starting at position 2418 of SEQ ID NO: 1881633
uugaaagugccacacugau

SEQ ID NO: 2059691 - RNA, 19 nt, Artificial Sequence
  Description of Artificial Sequence: Synthetic oligonucleotide
  Antisense strand to SEQ ID NO: 2059690
aucaguguggcacuuucaa

SEQ ID NO: 2059692 - RNA, 19 nt, Artificial Sequence
  Description of Artificial Sequence: Synthetic oligonucleotide
  Sense strand starting at position 2484 of SEQ ID NO: 1881633
uggugucaguucuuuauuu

SEQ ID NO: 2059693 - RNA, 19 nt, Artificial Sequence
  Description of Artificial Sequence: Synthetic oligonucleotide
  Antisense strand to SEQ ID NO: 2059692
aaauaaagaacugacacca

SEQ ID NO: 2059694 - RNA, 19 nt, Artificial Sequence
  Description of Artificial Sequence: Synthetic oligonucleotide
  Sense strand starting at position 2504 of SEQ ID NO: 1881633
auguuuagggagcacauau

SEQ ID NO: 2059695 - RNA, 19 nt, Artificial Sequence
  Description of Artificial Sequence: Synthetic oligonucleotide
  Antisense strand to SEQ ID NO: 2059694
auaugugcucccuaaacau

SEQ ID NO: 2059696 - RNA, 19 nt, Artificial Sequence
  Description of Artificial Sequence: Synthetic oligonucleotide
  Sense strand starting at position 2584 of SEQ ID NO: 1881633
gccagaaagucaccuagau

SEQ ID NO: 2059697 - RNA, 19 nt, Artificial Sequence
  Description of Artificial Sequence: Synthetic oligonucleotide
  Antisense strand to SEQ ID NO: 2059696
aucuaggugacuuucuggc

SEQ ID NO: 2059698 - RNA, 19 nt, Artificial Sequence
  Description of Artificial Sequence: Synthetic oligonucleotide
  Sense strand starting at position 2588 of SEQ ID NO: 1881633
gaaagucaccuagauguuu

SEQ ID NO: 2059699 - RNA, 19 nt, Artificial Sequence
  Description of Artificial Sequence: Synthetic oligonucleotide
  Antisense strand to SEQ ID NO: 2059698
aaacaucuaggugacuuuc

SEQ ID NO: 2059700 - RNA, 19 nt, Artificial Sequence
  Description of Artificial Sequence: Synthetic oligonucleotide
  Sense strand starting at position 2636 of SEQ ID NO: 1881633
ccuuauaaagcaugaggua

SEQ ID NO: 2059701 - RNA, 19 nt, Artificial Sequence
  Description of Artificial Sequence: Synthetic oligonucleotide
  Antisense strand to SEQ ID NO: 2059700
uaccucaugcuuuauaagg

SEQ ID NO: 2059702 - RNA, 19 nt, Artificial Sequence
  Description of Artificial Sequence: Synthetic oligonucleotide
  Sense strand starting at position 2762 of SEQ ID NO: 1881633
auaauaagagcagguguaa

SEQ ID NO: 2059703 - RNA, 19 nt, Artificial Sequence
  Description of Artificial Sequence: Synthetic oligonucleotide
  Antisense strand to SEQ ID NO: 2059702
uuacaccugcucuuauuau

SEQ ID NO: 2059704 - RNA, 19 nt, Artificial Sequence
  Description of Artificial Sequence: Synthetic oligonucleotide
  Sense strand starting at position 2855 of SEQ ID NO: 1881633
gagacaguguuacuggaaa

SEQ ID NO: 2059705 - RNA, 19 nt, Artificial Sequence
  Description of Artificial Sequence: Synthetic oligonucleotide
  Antisense strand to SEQ ID NO: 2059704
uuuccaguaacacugucuc

SEQ ID NO: 2059706 - RNA, 19 nt, Artificial Sequence
  Description of Artificial Sequence: Synthetic oligonucleotide
  Sense strand starting at position 2970 of SEQ ID NO: 1881633
aagaaaguaugggaauaaa

SEQ ID NO: 2059707 - RNA, 19 nt, Artificial Sequence
  Description of Artificial Sequence: Synthetic oligonucleotide
  Antisense strand to SEQ ID NO: 2059706
uuuauucccauacuuucuu

SEQ ID NO: 2059708 - RNA, 19 nt, Artificial Sequence
  Description of Artificial Sequence: Synthetic oligonucleotide
  Sense strand starting at position 3503 of SEQ ID NO: 1881633
ccugucaccuagguggaau

SEQ ID NO: 2059709 - RNA, 19 nt, Artificial Sequence
  Description of Artificial Sequence: Synthetic oligonucleotide
  Antisense strand to SEQ ID NO: 2059708
auuccaccuaggugacagg

SEQ ID NO: 2059710 - RNA, 19 nt, Artificial Sequence
  Description of Artificial Sequence: Synthetic oligonucleotide
  Sense strand starting at position 3551 of SEQ ID NO: 1881633
uguuaaauucuugagcuca

SEQ ID NO: 2059711 - RNA, 19 nt, Artificial Sequence
  Description of Artificial Sequence: Synthetic oligonucleotide
  Antisense strand to SEQ ID NO: 2059710
ugagcucaagaauuuaaca

SEQ ID NO: 2059712 - RNA, 19 nt, Artificial Sequence
  Description of Artificial Sequence: Synthetic oligonucleotide
  Sense strand starting at position 3633 of SEQ ID NO: 1881633
ucaaauuucucugcuaggu

SEQ ID NO: 2059713 - RNA, 19 nt, Artificial Sequence
  Description of Artificial Sequence: Synthetic oligonucleotide
  Antisense strand to SEQ ID NO: 2059712
accuagcagagaaauuuga

SEQ ID NO: 2059714 - RNA, 19 nt, Artificial Sequence
  Description of Artificial Sequence: Synthetic oligonucleotide
  Sense strand starting at position 3637 of SEQ ID NO: 1881633
auuucucugcuaggucauu

SEQ ID NO: 2059715 - RNA, 19 nt, Artificial Sequence
  Description of Artificial Sequence: Synthetic oligonucleotide
  Antisense strand to SEQ ID NO: 2059714
aaugaccuagcagagaaau

SEQ ID NO: 2059716 - RNA, 19 nt, Artificial Sequence
  Description of Artificial Sequence: Synthetic oligonucleotide
  Sense strand starting at position 3666 of SEQ ID NO: 1881633
agaugaauuucggaucuaa

SEQ ID NO: 2059717 - RNA, 19 nt, Artificial Sequence
  Description of Artificial Sequence: Synthetic oligonucleotide
  Antisense strand to SEQ ID NO: 2059716
uuagauccgaaauucaucu

SEQ ID NO: 2059718 - RNA, 19 nt, Artificial Sequence
  Description of Artificial Sequence: Synthetic oligonucleotide
  Sense strand starting at position 3718 of SEQ ID NO: 1881633
caauuagaguuaguagagu

SEQ ID NO: 2059719 - RNA, 19 nt, Artificial Sequence
  Description of Artificial Sequence: Synthetic oligonucleotide
  Antisense strand to SEQ ID NO: 2059718
acucuacuaacucuaauug

SEQ ID NO: 2059720 - RNA, 19 nt, Artificial Sequence
  Description of Artificial Sequence: Synthetic oligonucleotide
  Sense strand starting at position 3724 of SEQ ID NO: 1881633
gaguuaguagaguaggacu

SEQ ID NO: 2059721 - RNA, 19 nt, Artificial Sequence
  Description of Artificial Sequence: Synthetic oligonucleotide
  Antisense strand to SEQ ID NO: 2059720
aguccuacucuacuaacuc

SEQ ID NO: 2059722 - RNA, 19 nt, Artificial Sequence
  Description of Artificial Sequence: Synthetic oligonucleotide
  Sense strand starting at position 3769 of SEQ ID NO: 1881633
aggcuuagcgaauaaauua

SEQ ID NO: 2059723 - RNA, 19 nt, Artificial Sequence
  Description of Artificial Sequence: Synthetic oligonucleotide
  Antisense strand to SEQ ID NO: 2059722
uaauuuauucgcuaagccu

SEQ ID NO: 2059724 - RNA, 19 nt, Artificial Sequence
  Description of Artificial Sequence: Synthetic oligonucleotide
  Sense strand starting at position 3776 of SEQ ID NO: 1881633
gcgaauaaauuacucuaaa

SEQ ID NO: 2059725 - RNA, 19 nt, Artificial Sequence
  Description of Artificial Sequence: Synthetic oligonucleotide
  Antisense strand to SEQ ID NO: 2059724
uuuagaguaauuuauucgc

SEQ ID NO: 2059726 - RNA, 19 nt, Artificial Sequence
  Description of Artificial Sequence: Synthetic oligonucleotide
  Sense strand starting at position 137 of SEQ ID NO: 1881634
uaagccugggucuaaauua

SEQ ID NO: 2059727 - RNA, 19 nt, Artificial Sequence
  Description of Artificial Sequence: Synthetic oligonucleotide
  Antisense strand to SEQ ID NO: 2059726
uaauuuagacccaggcuua

SEQ ID NO: 2059728 - RNA, 19 nt, Artificial Sequence
  Description of Artificial Sequence: Synthetic oligonucleotide
  Sense strand starting at position 513 of SEQ ID NO: 1881634
uuagacauucuuggucaca

SEQ ID NO: 2059729 - RNA, 19 nt, Artificial Sequence
  Description of Artificial Sequence: Synthetic oligonucleotide
  Antisense strand to SEQ ID NO: 2059728
ugugaccaagaaugucuaa

SEQ ID NO: 2059730 - RNA, 19 nt, Artificial Sequence
  Description of Artificial Sequence: Synthetic oligonucleotide
  Sense strand starting at position 736 of SEQ ID NO: 1881634
uggcaaugucuggaaguuu

SEQ ID NO: 2059731 - RNA, 19 nt, Artificial Sequence
  Description of Artificial Sequence: Synthetic oligonucleotide
  Antisense strand to SEQ ID NO: 2059730
aaacuuccagacauugcca

SEQ ID NO: 2059732 - RNA, 19 nt, Artificial Sequence
  Description of Artificial Sequence: Synthetic oligonucleotide
  Sense strand starting at position 744 of SEQ ID NO: 1881634
ucuggaaguuucccuguau

SEQ ID NO: 2059733 - RNA, 19 nt, Artificial Sequence
  Description of Artificial Sequence: Synthetic oligonucleotide
  Antisense strand to SEQ ID NO: 2059732
auacagggaaacuuccaga

SEQ ID NO: 2059734 - RNA, 19 nt, Artificial Sequence
  Description of Artificial Sequence: Synthetic oligonucleotide
  Sense strand starting at position 748 of SEQ ID NO: 1881634
gaaguuucccuguaugguc

SEQ ID NO: 2059735 - RNA, 19 nt, Artificial Sequence
  Description of Artificial Sequence: Synthetic oligonucleotide
  Antisense strand to SEQ ID NO: 2059734
gaccauacagggaaacuuc

SEQ ID NO: 2059736 - RNA, 19 nt, Artificial Sequence
  Description of Artificial Sequence: Synthetic oligonucleotide
  Sense strand starting at position 1043 of SEQ ID NO: 1881634
caguaacacugucucgaaa

SEQ ID NO: 2059737 - RNA, 19 nt, Artificial Sequence
  Description of Artificial Sequence: Synthetic oligonucleotide
  Antisense strand to SEQ ID NO: 2059736
uuucgagacaguguuacug

SEQ ID NO: 2059738 - RNA, 19 nt, Artificial Sequence
  Description of Artificial Sequence: Synthetic oligonucleotide
  Sense strand starting at position 1189 of SEQ ID NO: 1881634
aguuauuuguucuuaagca

SEQ ID NO: 2059739 - RNA, 19 nt, Artificial Sequence
  Description of Artificial Sequence: Synthetic oligonucleotide
  Antisense strand to SEQ ID NO: 2059738
ugcuuaagaacaaauaacu

SEQ ID NO: 2059740 - RNA, 19 nt, Artificial Sequence
  Description of Artificial Sequence: Synthetic oligonucleotide
  Sense strand starting at position 1267 of SEQ ID NO: 1881634
cuuuauaagguugauguua

SEQ ID NO: 2059741 - RNA, 19 nt, Artificial Sequence
  Description of Artificial Sequence: Synthetic oligonucleotide
  Antisense strand to SEQ ID NO: 2059740
uaacaucaaccuuauaaag

SEQ ID NO: 2059742 - RNA, 19 nt, Artificial Sequence
  Description of Artificial Sequence: Synthetic oligonucleotide
  Sense strand starting at position 1386 of SEQ ID NO: 1881634
ugagauaugugcucccuaa

SEQ ID NO: 2059743 - RNA, 19 nt, Artificial Sequence
  Description of Artificial Sequence: Synthetic oligonucleotide
  Antisense strand to SEQ ID NO: 2059742
uuagggagcacauaucuca

SEQ ID NO: 2059744 - RNA, 19 nt, Artificial Sequence
  Description of Artificial Sequence: Synthetic oligonucleotide
  Sense strand starting at position 1445 of SEQ ID NO: 1881634
guauuauuacacugacagg

SEQ ID NO: 2059745 - RNA, 19 nt, Artificial Sequence
  Description of Artificial Sequence: Synthetic oligonucleotide
  Antisense strand to SEQ ID NO: 2059744
ccugucaguguaauaauac

SEQ ID NO: 2059746 - RNA, 19 nt, Artificial Sequence
  Description of Artificial Sequence: Synthetic oligonucleotide
  Sense strand starting at position 1496 of SEQ ID NO: 1881634
aggucuauauuaucaaagu

SEQ ID NO: 2059747 - RNA, 19 nt, Artificial Sequence
  Description of Artificial Sequence: Synthetic oligonucleotide
  Antisense strand to SEQ ID NO: 2059746
acuuugauaauauagaccu

SEQ ID NO: 2059748 - RNA, 19 nt, Artificial Sequence
  Description of Artificial Sequence: Synthetic oligonucleotide
  Sense strand starting at position 2051 of SEQ ID NO: 1881634
uaagauacauugguguaaa

SEQ ID NO: 2059749 - RNA, 19 nt, Artificial Sequence
  Description of Artificial Sequence: Synthetic oligonucleotide
  Antisense strand to SEQ ID NO: 2059748
uuuacaccaauguaucuua

SEQ ID NO: 2059750 - RNA, 19 nt, Artificial Sequence
  Description of Artificial Sequence: Synthetic oligonucleotide
  Sense strand starting at position 2079 of SEQ ID NO: 1881634
acacaaugguucuuugaag

SEQ ID NO: 2059751 - RNA, 19 nt, Artificial Sequence
  Description of Artificial Sequence: Synthetic oligonucleotide
  Antisense strand to SEQ ID NO: 2059750
cuucaaagaaccauugugu

SEQ ID NO: 2059752 - RNA, 19 nt, Artificial Sequence
  Description of Artificial Sequence: Synthetic oligonucleotide
  Sense strand starting at position 2080 of SEQ ID NO: 1881634
cacaaugguucuuugaagu

SEQ ID NO: 2059753 - RNA, 19 nt, Artificial Sequence
  Description of Artificial Sequence: Synthetic oligonucleotide
  Antisense strand to SEQ ID NO: 2059752
acuucaaagaaccauugug

SEQ ID NO: 2059754 - RNA, 19 nt, Artificial Sequence
  Description of Artificial Sequence: Synthetic oligonucleotide
  Sense strand starting at position 2141 of SEQ ID NO: 1881634
acaugaagccuguacuucu

SEQ ID NO: 2059755 - RNA, 19 nt, Artificial Sequence
  Description of Artificial Sequence: Synthetic oligonucleotide
  Antisense strand to SEQ ID NO: 2059754
agaaguacaggcuucaugu

SEQ ID NO: 2059756 - RNA, 19 nt, Artificial Sequence
  Description of Artificial Sequence: Synthetic oligonucleotide
  Sense strand starting at position 2144 of SEQ ID NO: 1881634
ugaagccuguacuucuaaa

SEQ ID NO: 2059757 - RNA, 19 nt, Artificial Sequence
  Description of Artificial Sequence: Synthetic oligonucleotide
  Antisense strand to SEQ ID NO: 2059756
uuuagaaguacaggcuuca

SEQ ID NO: 2059758 - RNA, 19 nt, Artificial Sequence
  Description of Artificial Sequence: Synthetic oligonucleotide
  Sense strand starting at position 2282 of SEQ ID NO: 1881634
agaagaucuuagccuauua

SEQ ID NO: 2059759 - RNA, 19 nt, Artificial Sequence
  Description of Artificial Sequence: Synthetic oligonucleotide
  Antisense strand to SEQ ID NO: 2059758
uaauaggcuaagaucuucu

SEQ ID NO: 2059760 - RNA, 19 nt, Artificial Sequence
  Description of Artificial Sequence: Synthetic oligonucleotide
  Sense strand starting at position 2341 of SEQ ID NO: 1881634
uuuauuaugucagcaauag

SEQ ID NO: 2059761 - RNA, 19 nt, Artificial Sequence
  Description of Artificial Sequence: Synthetic oligonucleotide
  Antisense strand to SEQ ID NO: 2059760
cuauugcugacauaauaaa

SEQ ID NO: 2059762 - RNA, 19 nt, Artificial Sequence
  Description of Artificial Sequence: Synthetic oligonucleotide
  Sense strand starting at position 2342 of SEQ ID NO: 1881634
uuauuaugucagcaauagu

SEQ ID NO: 2059763 - RNA, 19 nt, Artificial Sequence
  Description of Artificial Sequence: Synthetic oligonucleotide
  Antisense strand to SEQ ID NO: 2059762
acuauugcugacauaauaa

SEQ ID NO: 2059764 - RNA, 19 nt, Artificial Sequence
  Description of Artificial Sequence: Synthetic oligonucleotide
  Sense strand starting at position 2345 of SEQ ID NO: 1881634
uuaugucagcaauaguaau

SEQ ID NO: 2059765 - RNA, 19 nt, Artificial Sequence
  Description of Artificial Sequence: Synthetic oligonucleotide
  Antisense strand to SEQ ID NO: 2059764
auuacuauugcugacauaa

SEQ ID NO: 2059766 - RNA, 19 nt, Artificial Sequence
  Description of Artificial Sequence: Synthetic oligonucleotide
  Sense strand starting at position 2393 of SEQ ID NO: 1881634
cgaaguacuuucucauaua

SEQ ID NO: 2059767 - RNA, 19 nt, Artificial Sequence
  Description of Artificial Sequence: Synthetic oligonucleotide
  Antisense strand to SEQ ID NO: 2059766
uauaugagaaaguacuucg

SEQ ID NO: 2059768 - RNA, 19 nt, Artificial Sequence
  Description of Artificial Sequence: Synthetic oligonucleotide
  Sense strand starting at position 2506 of SEQ ID NO: 1881634
cguggagaguaacuggaua

SEQ ID NO: 2059769 - RNA, 19 nt, Artificial Sequence
  Description of Artificial Sequence: Synthetic oligonucleotide
  Antisense strand to SEQ ID NO: 2059768
uauccaguuacucuccacg

SEQ ID NO: 2059770 - RNA, 19 nt, Artificial Sequence
  Description of Artificial Sequence: Synthetic oligonucleotide
  Sense strand starting at position 2547 of SEQ ID NO: 1881634
gcuagucuuccucaguaga

SEQ ID NO: 2059771 - RNA, 19 nt, Artificial Sequence
  Description of Artificial Sequence: Synthetic oligonucleotide
  Antisense strand to SEQ ID NO: 2059770
ucuacugaggaagacuagc

SEQ ID NO: 2059772 - RNA, 19 nt, Artificial Sequence
  Description of Artificial Sequence: Synthetic oligonucleotide
  Sense strand starting at position 2550 of SEQ ID NO: 1881634
agucuuccucaguagaauu

SEQ ID NO: 2059773 - RNA, 19 nt, Artificial Sequence
  Description of Artificial Sequence: Synthetic oligonucleotide
  Antisense strand to SEQ ID NO: 2059772
aauucuacugaggaagacu

SEQ ID NO: 2059774 - RNA, 19 nt, Artificial Sequence
  Description of Artificial Sequence: Synthetic oligonucleotide
  Sense strand starting at position 2581 of SEQ ID NO: 1881634
guacuauuagauugacagu

SEQ ID NO: 2059775 - RNA, 19 nt, Artificial Sequence
  Description of Artificial Sequence: Synthetic oligonucleotide
  Antisense strand to SEQ ID NO: 2059774
acugucaaucuaauaguac

SEQ ID NO: 2059776 - RNA, 19 nt, Artificial Sequence
  Description of Artificial Sequence: Synthetic oligonucleotide
  Sense strand starting at position 2613 of SEQ ID NO: 1881634
agacauuauuagucucagu

SEQ ID NO: 2059777 - RNA, 19 nt, Artificial Sequence
  Description of Artificial Sequence: Synthetic oligonucleotide
  Antisense strand to SEQ ID NO: 2059776
acugagacuaauaaugucu

SEQ ID NO: 2059778 - RNA, 19 nt, Artificial Sequence
  Description of Artificial Sequence: Synthetic oligonucleotide
  Sense strand starting at position 2873 of SEQ ID NO: 1881634
aaaucauggugacuaagua

SEQ ID NO: 2059779 - RNA, 19 nt, Artificial Sequence
  Description of Artificial Sequence: Synthetic oligonucleotide
  Antisense strand to SEQ ID NO: 2059778
uacuuagucaccaugauuu

SEQ ID NO: 2059780 - RNA, 19 nt, Artificial Sequence
  Description of Artificial Sequence: Synthetic oligonucleotide
  Sense strand starting at position 2963 of SEQ ID NO: 1881634
aagccugaacaauguugua

SEQ ID NO: 2059781 - RNA, 19 nt, Artificial Sequence
  Description of Artificial Sequence: Synthetic oligonucleotide
  Antisense strand to SEQ ID NO: 2059780
uacaacauuguucaggcuu

SEQ ID NO: 2059782 - RNA, 19 nt, Artificial Sequence
  Description of Artificial Sequence: Synthetic oligonucleotide
  Sense strand starting at position 3027 of SEQ ID NO: 1881634
gcaccaaacugagcuauau

SEQ ID NO: 2059783 - RNA, 19 nt, Artificial Sequence
  Description of Artificial Sequence: Synthetic oligonucleotide
  Antisense strand to SEQ ID NO: 2059782
auauagcucaguuuggugc

SEQ ID NO: 2059784 - RNA, 19 nt, Artificial Sequence
  Description of Artificial Sequence: Synthetic oligonucleotide
  Sense strand starting at position 3157 of SEQ ID NO: 1881634
aggucauaaagguaguuua

SEQ ID NO: 2059785 - RNA, 19 nt, Artificial Sequence
  Description of Artificial Sequence: Synthetic oligonucleotide
  Antisense strand to SEQ ID NO: 2059784
uaaacuaccuuuaugaccu

SEQ ID NO: 2059786 - RNA, 19 nt, Artificial Sequence
  Description of Artificial Sequence: Synthetic oligonucleotide
  Sense strand starting at position 3169 of SEQ ID NO: 1881634
uaguuuaaccuuugaggaa

SEQ ID NO: 2059787 - RNA, 19 nt, Artificial Sequence
  Description of Artificial Sequence: Synthetic oligonucleotide
  Antisense strand to SEQ ID NO: 2059786
uuccucaaagguuaaacua

SEQ ID NO: 2059788 - RNA, 19 nt, Artificial Sequence
  Description of Artificial Sequence: Synthetic oligonucleotide
  Sense strand starting at position 3181 of SEQ ID NO: 1881634
ugaggaauucugcaguuua

SEQ ID NO: 2059789 - RNA, 19 nt, Artificial Sequence
  Description of Artificial Sequence: Synthetic oligonucleotide
  Antisense strand to SEQ ID NO: 2059788
uaaacugcagaauuccuca

SEQ ID NO: 2059790 - RNA, 19 nt, Artificial Sequence
  Description of Artificial Sequence: Synthetic oligonucleotide
  Sense strand starting at position 3349 of SEQ ID NO: 1881634
ggcauuaaaugaguuacua

SEQ ID NO: 2059791 - RNA, 19 nt, Artificial Sequence
  Description of Artificial Sequence: Synthetic oligonucleotide
  Antisense strand to SEQ ID NO: 2059790
uaguaacucauuuaaugcc

SEQ ID NO: 2059792 - RNA, 19 nt, Artificial Sequence
  Description of Artificial Sequence: Synthetic oligonucleotide
  Sense strand starting at position 3416 of SEQ ID NO: 1881634
cugauaaagcccugagaau

SEQ ID NO: 2059793 - RNA, 19 nt, Artificial Sequence
  Description of Artificial Sequence: Synthetic oligonucleotide
  Antisense strand to SEQ ID NO: 2059792
auucucagggcuuuaucag

SEQ ID NO: 2059794 - RNA, 19 nt, Artificial Sequence
  Description of Artificial Sequence: Synthetic oligonucleotide
  Sense strand starting at position 3856 of SEQ ID NO: 1881634
ggagcaguuuacccagaag

SEQ ID NO: 2059795 - RNA, 19 nt, Artificial Sequence
  Description of Artificial Sequence: Synthetic oligonucleotide
  Antisense strand to SEQ ID NO: 2059794
cuucuggguaaacugcucc

SEQ ID NO: 2059796 - RNA, 19 nt, Artificial Sequence
  Description of Artificial Sequence: Synthetic oligonucleotide
  Sense strand starting at position 3859 of SEQ ID NO: 1881634
gcaguuuacccagaagaua

SEQ ID NO: 2059797 - RNA, 19 nt, Artificial Sequence
  Description of Artificial Sequence: Synthetic oligonucleotide
  Antisense strand to SEQ ID NO: 2059796
uaucuucuggguaaacugc

SEQ ID NO: 2059798 - RNA, 19 nt, Artificial Sequence
  Description of Artificial Sequence: Synthetic oligonucleotide
  Sense strand starting at position 3880 of SEQ ID NO: 1881634
gugagauuauuguucuuug

SEQ ID NO: 2059799 - RNA, 19 nt, Artificial Sequence
  Description of Artificial Sequence: Synthetic oligonucleotide
  Antisense strand to SEQ ID NO: 2059798
caaagaacaauaaucucac

SEQ ID NO: 2059800 - RNA, 19 nt, Artificial Sequence
  Description of Artificial Sequence: Synthetic oligonucleotide
  Sense strand starting at position 3881 of SEQ ID NO: 1881634
ugagauuauuguucuuugu

SEQ ID NO: 2059801 - RNA, 19 nt, Artificial Sequence
  Description of Artificial Sequence: Synthetic oligonucleotide
  Antisense strand to SEQ ID NO: 2059800
acaaagaacaauaaucuca

SEQ ID NO: 2059802 - RNA, 19 nt, Artificial Sequence
  Description of Artificial Sequence: Synthetic oligonucleotide
  Sense strand starting at position 3891 of SEQ ID NO: 1881634
guucuuugugguuacaaau

SEQ ID NO: 2059803 - RNA, 19 nt, Artificial Sequence
  Description of Artificial Sequence: Synthetic oligonucleotide
  Antisense strand to SEQ ID NO: 2059802
auuuguaaccacaaagaac

SEQ ID NO: 2059804 - RNA, 19 nt, Artificial Sequence
  Description of Artificial Sequence: Synthetic oligonucleotide
  Sense strand starting at position 3949 of SEQ ID NO: 1881634
acuugacaaugagaaauga

SEQ ID NO: 2059805 - RNA, 19 nt, Artificial Sequence
  Description of Artificial Sequence: Synthetic oligonucleotide
  Antisense strand to SEQ ID NO: 2059804
ucauuucucauugucaagu

SEQ ID NO: 2059806 - RNA, 19 nt, Artificial Sequence
  Description of Artificial Sequence: Synthetic oligonucleotide
  Sense strand starting at position 109 of SEQ ID NO: 1881635
acauguuaugugcacauau

SEQ ID NO: 2059807 - RNA, 19 nt, Artificial Sequence
  Description of Artificial Sequence: Synthetic oligonucleotide
  Antisense strand to SEQ ID NO: 2059806
auaugugcacauaacaugu

SEQ ID NO: 2059808 - RNA, 19 nt, Artificial Sequence
  Description of Artificial Sequence: Synthetic oligonucleotide
  Sense strand starting at position 111 of SEQ ID NO: 1881635
auguuaugugcacauauag

SEQ ID NO: 2059809 - RNA, 19 nt, Artificial Sequence
  Description of Artificial Sequence: Synthetic oligonucleotide
  Antisense strand to SEQ ID NO: 2059808
cuauaugugcacauaacau

SEQ ID NO: 2059810 - RNA, 19 nt, Artificial Sequence
  Description of Artificial Sequence: Synthetic oligonucleotide
  Sense strand starting at position 136 of SEQ ID NO: 1881635
ggaugaaugccgugagaca

SEQ ID NO: 2059811 - RNA, 19 nt, Artificial Sequence
  Description of Artificial Sequence: Synthetic oligonucleotide
  Antisense strand to SEQ ID NO: 2059810
ugucucacggcauucaucc

SEQ ID NO: 2059812 - RNA, 19 nt, Artificial Sequence
  Description of Artificial Sequence: Synthetic oligonucleotide
  Sense strand starting at position 137 of SEQ ID NO: 1881635
gaugaaugccgugagacag

SEQ ID NO: 2059813 - RNA, 19 nt, Artificial Sequence
  Description of Artificial Sequence: Synthetic oligonucleotide
  Antisense strand to SEQ ID NO: 2059812
cugucucacggcauucauc

SEQ ID NO: 2059814 - RNA, 19 nt, Artificial Sequence
  Description of Artificial Sequence: Synthetic oligonucleotide
  Sense strand starting at position 188 of SEQ ID NO: 1881635
uuggcuuccagcugacaga

SEQ ID NO: 2059815 - RNA, 19 nt, Artificial Sequence
  Description of Artificial Sequence: Synthetic oligonucleotide
  Antisense strand to SEQ ID NO: 2059814
ucugucagcuggaagccaa

SEQ ID NO: 2059816 - RNA, 19 nt, Artificial Sequence
  Description of Artificial Sequence: Synthetic oligonucleotide
  Sense strand starting at position 273 of SEQ ID NO: 1881635
gggagaugcugaguguguu

SEQ ID NO: 2059817 - RNA, 19 nt, Artificial Sequence
  Description of Artificial Sequence: Synthetic oligonucleotide
  Antisense strand to SEQ ID NO: 2059816
aacacacucagcaucuccc

SEQ ID NO: 2059818 - RNA, 19 nt, Artificial Sequence
  Description of Artificial Sequence: Synthetic oligonucleotide
  Sense strand starting at position 410 of SEQ ID NO: 1881635
cagauaagaguggguggau

SEQ ID NO: 2059819 - RNA, 19 nt, Artificial Sequence
  Description of Artificial Sequence: Synthetic oligonucleotide
  Antisense strand to SEQ ID NO: 2059818
auccacccacucuuaucug

SEQ ID NO: 2059820 - RNA, 19 nt, Artificial Sequence
  Description of Artificial Sequence: Synthetic oligonucleotide
  Sense strand starting at position 413 of SEQ ID NO: 1881635
auaagaguggguggauaua

SEQ ID NO: 2059821 - RNA, 19 nt, Artificial Sequence
  Description of Artificial Sequence: Synthetic oligonucleotide
  Antisense strand to SEQ ID NO: 2059820
uauauccacccacucuuau

SEQ ID NO: 2059822 - RNA, 19 nt, Artificial Sequence
  Description of Artificial Sequence: Synthetic oligonucleotide
  Sense strand starting at position 443 of SEQ ID NO: 1881635
ugcacacaggagugauaua

SEQ ID NO: 2059823 - RNA, 19 nt, Artificial Sequence
  Description of Artificial Sequence: Synthetic oligonucleotide
  Antisense strand to SEQ ID NO: 2059822
uauaucacuccugugugca

SEQ ID NO: 2059824 - RNA, 19 nt, Artificial Sequence
  Description of Artificial Sequence: Synthetic oligonucleotide
  Sense strand starting at position 465 of SEQ ID NO: 1881635
agugcugccuuucuaaaga

SEQ ID NO: 2059825 - RNA, 19 nt, Artificial Sequence
  Description of Artificial Sequence: Synthetic oligonucleotide
  Antisense strand to SEQ ID NO: 2059824
ucuuuagaaaggcagcacu

SEQ ID NO: 2059826 - RNA, 19 nt, Artificial Sequence
  Description of Artificial Sequence: Synthetic oligonucleotide
  Sense strand starting at position 528 of SEQ ID NO: 1881635
cagggaaagcugugauaag

SEQ ID NO: 2059827 - RNA, 19 nt, Artificial Sequence
  Description of Artificial Sequence: Synthetic oligonucleotide
  Antisense strand to SEQ ID NO: 2059826
cuuaucacagcuuucccug

SEQ ID NO: 2059828 - RNA, 19 nt, Artificial Sequence
  Description of Artificial Sequence: Synthetic oligonucleotide
  Sense strand starting at position 611 of SEQ ID NO: 1881635
agcagagugucucucugau

SEQ ID NO: 2059829 - RNA, 19 nt, Artificial Sequence
  Description of Artificial Sequence: Synthetic oligonucleotide
  Antisense strand to SEQ ID NO: 2059828
aucagagagacacucugcu

SEQ ID NO: 2059830 - RNA, 19 nt, Artificial Sequence
  Description of Artificial Sequence: Synthetic oligonucleotide
  Sense strand starting at position 860 of SEQ ID NO: 1881635
aagcuaaucccagaguggu

SEQ ID NO: 2059831 - RNA, 19 nt, Artificial Sequence
  Description of Artificial Sequence: Synthetic oligonucleotide
  Antisense strand to SEQ ID NO: 2059830
accacucugggauuagcuu

SEQ ID NO: 2059832 - RNA, 19 nt, Artificial Sequence
  Description of Artificial Sequence: Synthetic oligonucleotide
  Sense strand starting at position 1007 of SEQ ID NO: 1881635
ccguguuuccuacacaaug

SEQ ID NO: 2059833 - RNA, 19 nt, Artificial Sequence
  Description of Artificial Sequence: Synthetic oligonucleotide
  Antisense strand to SEQ ID NO: 2059832
cauuguguaggaaacacgg

SEQ ID NO: 2059834 - RNA, 19 nt, Artificial Sequence
  Description of Artificial Sequence: Synthetic oligonucleotide
  Sense strand starting at position 1111 of SEQ ID NO: 1881635
gucacuuacuuaucgaaca

SEQ ID NO: 2059835 - RNA, 19 nt, Artificial Sequence
  Description of Artificial Sequence: Synthetic oligonucleotide
  Antisense strand to SEQ ID NO: 2059834
uguucgauaaguaagugac

SEQ ID NO: 2059836 - RNA, 19 nt, Artificial Sequence
  Description of Artificial Sequence: Synthetic oligonucleotide
  Sense strand starting at position 1403 of SEQ ID NO: 1881635
guggcaugcucaucaaaug

SEQ ID NO: 2059837 - RNA, 19 nt, Artificial Sequence
  Description of Artificial Sequence: Synthetic oligonucleotide
  Antisense strand to SEQ ID NO: 2059836
cauuugaugagcaugccac

SEQ ID NO: 2059838 - RNA, 19 nt, Artificial Sequence
  Description of Artificial Sequence: Synthetic oligonucleotide
  Sense strand starting at position 1461 of SEQ ID NO: 1881635
gggaguuugcuggacucca

SEQ ID NO: 2059839 - RNA, 19 nt, Artificial Sequence
  Description of Artificial Sequence: Synthetic oligonucleotide
  Antisense strand to SEQ ID NO: 2059838
uggaguccagcaaacuccc

SEQ ID NO: 2059840 - RNA, 19 nt, Artificial Sequence
  Description of Artificial Sequence: Synthetic oligonucleotide
  Sense strand starting at position 1545 of SEQ ID NO: 1881635
gucccauggcucugagaga

SEQ ID NO: 2059841 - RNA, 19 nt, Artificial Sequence
  Description of Artificial Sequence: Synthetic oligonucleotide
  Antisense strand to SEQ ID NO: 2059840
ucucucagagccaugggac

SEQ ID NO: 2059842 - RNA, 19 nt, Artificial Sequence
  Description of Artificial Sequence: Synthetic oligonucleotide
  Sense strand starting at position 1620 of SEQ ID NO: 1881635
ccuaaacugucauuaguaa

SEQ ID NO: 2059843 - RNA, 19 nt, Artificial Sequence
  Description of Artificial Sequence: Synthetic oligonucleotide
  Antisense strand to SEQ ID NO: 2059842
uuacuaaugacaguuuagg

SEQ ID NO: 2059844 - RNA, 19 nt, Artificial Sequence
  Description of Artificial Sequence: Synthetic oligonucleotide
  Sense strand starting at position 1621 of SEQ ID NO: 1881635
cuaaacugucauuaguaau

SEQ ID NO: 2059845 - RNA, 19 nt, Artificial Sequence
  Description of Artificial Sequence: Synthetic oligonucleotide
  Antisense strand to SEQ ID NO: 2059844
auuacuaaugacaguuuag

SEQ ID NO: 2059846 - RNA, 19 nt, Artificial Sequence
  Description of Artificial Sequence: Synthetic oligonucleotide
  Sense strand starting at position 1627 of SEQ ID NO: 1881635
ugucauuaguaaucaucau

SEQ ID NO: 2059847 - RNA, 19 nt, Artificial Sequence
  Description of Artificial Sequence: Synthetic oligonucleotide
  Antisense strand to SEQ ID NO: 2059846
augaugauuacuaaugaca

SEQ ID NO: 2059848 - RNA, 19 nt, Artificial Sequence
  Description of Artificial Sequence: Synthetic oligonucleotide
  Sense strand starting at position 1737 of SEQ ID NO: 1881635
gagugaacuuuccuggagu

SEQ ID NO: 2059849 - RNA, 19 nt, Artificial Sequence
  Description of Artificial Sequence: Synthetic oligonucleotide
  Antisense strand to SEQ ID NO: 2059848
acuccaggaaaguucacuc

SEQ ID NO: 2059850 - RNA, 19 nt, Artificial Sequence
  Description of Artificial Sequence: Synthetic oligonucleotide
  Sense strand starting at position 1739 of SEQ ID NO: 1881635
gugaacuuuccuggaguag

SEQ ID NO: 2059851 - RNA, 19 nt, Artificial Sequence
  Description of Artificial Sequence: Synthetic oligonucleotide
  Antisense strand to SEQ ID NO: 2059850
cuacuccaggaaaguucac

SEQ ID NO: 2059852 - RNA, 19 nt, Artificial Sequence
  Description of Artificial Sequence: Synthetic oligonucleotide
  Sense strand starting at position 1834 of SEQ ID NO: 1881635
aaugcaagggagcgauuau

SEQ ID NO: 2059853 - RNA, 19 nt, Artificial Sequence
  Description of Artificial Sequence: Synthetic oligonucleotide
  Antisense strand to SEQ ID NO: 2059852
auaaucgcucccuugcauu

SEQ ID NO: 2059854 - RNA, 19 nt, Artificial Sequence
  Description of Artificial Sequence: Synthetic oligonucleotide
  Sense strand starting at position 1835 of SEQ ID NO: 1881635
augcaagggagcgauuaua

SEQ ID NO: 2059855 - RNA, 19 nt, Artificial Sequence
  Description of Artificial Sequence: Synthetic oligonucleotide
  Antisense strand to SEQ ID NO: 2059854
uauaaucgcucccuugcau

SEQ ID NO: 2059856 - RNA, 19 nt, Artificial Sequence
  Description of Artificial Sequence: Synthetic oligonucleotide
  Sense strand starting at position 1843 of SEQ ID NO: 1881635
gagcgauuauaaucccugu

SEQ ID NO: 2059857 - RNA, 19 nt, Artificial Sequence
  Description of Artificial Sequence: Synthetic oligonucleotide
  Antisense strand to SEQ ID NO: 2059856
acagggauuauaaucgcuc

SEQ ID NO: 2059858 - RNA, 19 nt, Artificial Sequence
  Description of Artificial Sequence: Synthetic oligonucleotide
  Sense strand starting at position 1895 of SEQ ID NO: 1881635
acaaauguggccgaaggau

SEQ ID NO: 2059859 - RNA, 19 nt, Artificial Sequence
  Description of Artificial Sequence: Synthetic oligonucleotide
  Antisense strand to SEQ ID NO: 2059858
auccuucggccacauuugu

SEQ ID NO: 2059860 - RNA, 19 nt, Artificial Sequence
  Description of Artificial Sequence: Synthetic oligonucleotide
  Sense strand starting at position 1937 of SEQ ID NO: 1881635
gggauucgaaccuguuucu

SEQ ID NO: 2059861 - RNA, 19 nt, Artificial Sequence
  Description of Artificial Sequence: Synthetic oligonucleotide
  Antisense strand to SEQ ID NO: 2059860
agaaacagguucgaauccc

SEQ ID NO: 2059862 - RNA, 19 nt, Artificial Sequence
  Description of Artificial Sequence: Synthetic oligonucleotide
  Sense strand starting at position 2017 of SEQ ID NO: 1881635
gagugugaacucuggacca

SEQ ID NO: 2059863 - RNA, 19 nt, Artificial Sequence
  Description of Artificial Sequence: Synthetic oligonucleotide
  Antisense strand to SEQ ID NO: 2059862
ugguccagaguucacacuc

SEQ ID NO: 2059864 - RNA, 19 nt, Artificial Sequence
  Description of Artificial Sequence: Synthetic oligonucleotide
  Sense strand starting at position 2019 of SEQ ID NO: 1881635
gugugaacucuggaccaag

SEQ ID NO: 2059865 - RNA, 19 nt, Artificial Sequence
  Description of Artificial Sequence: Synthetic oligonucleotide
  Antisense strand to SEQ ID NO: 2059864
cuugguccagaguucacac

SEQ ID NO: 2059866 - RNA, 19 nt, Artificial Sequence
  Description of Artificial Sequence: Synthetic oligonucleotide
  Sense strand starting at position 2142 of SEQ ID NO: 1881635
gggacaggugugcauuagu

SEQ ID NO: 2059867 - RNA, 19 nt, Artificial Sequence
  Description of Artificial Sequence: Synthetic oligonucleotide
  Antisense strand to SEQ ID NO: 2059866
acuaaugcacaccuguccc

SEQ ID NO: 2059868 - RNA, 19 nt, Artificial Sequence
  Description of Artificial Sequence: Synthetic oligonucleotide
  Sense strand starting at position 2400 of SEQ ID NO: 1881635
cauugagaguugucauggu

SEQ ID NO: 2059869 - RNA, 19 nt, Artificial Sequence
  Description of Artificial Sequence: Synthetic oligonucleotide
  Antisense strand to SEQ ID NO: 2059868
accaugacaacucucaaug

SEQ ID NO: 2059870 - RNA, 19 nt, Artificial Sequence
  Description of Artificial Sequence: Synthetic oligonucleotide
  Sense strand starting at position 2404 of SEQ ID NO: 1881635
gagaguugucaugguuaau

SEQ ID NO: 2059871 - RNA, 19 nt, Artificial Sequence
  Description of Artificial Sequence: Synthetic oligonucleotide
  Antisense strand to SEQ ID NO: 2059870
auuaaccaugacaacucuc

SEQ ID NO: 2059872 - RNA, 19 nt, Artificial Sequence
  Description of Artificial Sequence: Synthetic oligonucleotide
  Sense strand starting at position 2407 of SEQ ID NO: 1881635
aguugucaugguuaauacu

SEQ ID NO: 2059873 - RNA, 19 nt, Artificial Sequence
  Description of Artificial Sequence: Synthetic oligonucleotide
  Antisense strand to SEQ ID NO: 2059872
aguauuaaccaugacaacu

SEQ ID NO: 2059874 - RNA, 19 nt, Artificial Sequence
  Description of Artificial Sequence: Synthetic oligonucleotide
  Sense strand starting at position 3077 of SEQ ID NO: 1881635
aggccuaucuuagcgagaa

SEQ ID NO: 2059875 - RNA, 19 nt, Artificial Sequence
  Description of Artificial Sequence: Synthetic oligonucleotide
  Antisense strand to SEQ ID NO: 2059874
uucucgcuaagauaggccu

SEQ ID NO: 2059876 - RNA, 19 nt, Artificial Sequence
  Description of Artificial Sequence: Synthetic oligonucleotide
  Sense strand starting at position 3079 of SEQ ID NO: 1881635
gccuaucuuagcgagaacu

SEQ ID NO: 2059877 - RNA, 19 nt, Artificial Sequence
  Description of Artificial Sequence: Synthetic oligonucleotide
  Antisense strand to SEQ ID NO: 2059876
aguucucgcuaagauaggc

SEQ ID NO: 2059878 - RNA, 19 nt, Artificial Sequence
  Description of Artificial Sequence: Synthetic oligonucleotide
  Sense strand starting at position 3380 of SEQ ID NO: 1881635
gaucaaguuccacguggau

SEQ ID NO: 2059879 - RNA, 19 nt, Artificial Sequence
  Description of Artificial Sequence: Synthetic oligonucleotide
  Antisense strand to SEQ ID NO: 2059878
auccacguggaacuugauc

SEQ ID NO: 2059880 - RNA, 19 nt, Artificial Sequence
  Description of Artificial Sequence: Synthetic oligonucleotide
  Sense strand starting at position 3434 of SEQ ID NO: 1881635
cggcuuuauagaggaagau

SEQ ID NO: 2059881 - RNA, 19 nt, Artificial Sequence
  Description of Artificial Sequence: Synthetic oligonucleotide
  Antisense strand to SEQ ID NO: 2059880
aucuuccucuauaaagccg

SEQ ID NO: 2059882 - RNA, 19 nt, Artificial Sequence
  Description of Artificial Sequence: Synthetic oligonucleotide
  Sense strand starting at position 3508 of SEQ ID NO: 1881635
gaaggugcauuauuacaga

SEQ ID NO: 2059883 - RNA, 19 nt, Artificial Sequence
  Description of Artificial Sequence: Synthetic oligonucleotide
  Antisense strand to SEQ ID NO: 2059882
ucuguaauaaugcaccuuc

SEQ ID NO: 2059884 - RNA, 19 nt, Artificial Sequence
  Description of Artificial Sequence: Synthetic oligonucleotide
  Sense strand starting at position 3650 of SEQ ID NO: 1881635
ggaauucccuggccaggaa

SEQ ID NO: 2059885 - RNA, 19 nt, Artificial Sequence
  Description of Artificial Sequence: Synthetic oligonucleotide
  Antisense strand to SEQ ID NO: 2059884
uuccuggccagggaauucc

SEQ ID NO: 2059886 - RNA, 19 nt, Artificial Sequence
  Description of Artificial Sequence: Synthetic oligonucleotide
  Sense strand starting at position 102 of SEQ ID NO: 1881636
gagguaaaguaucuuuacu

SEQ ID NO: 2059887 - RNA, 19 nt, Artificial Sequence
  Description of Artificial Sequence: Synthetic oligonucleotide
  Antisense strand to SEQ ID NO: 2059886
aguaaagauacuuuaccuc

SEQ ID NO: 2059888 - RNA, 19 nt, Artificial Sequence
  Description of Artificial Sequence: Synthetic oligonucleotide
  Sense strand starting at position 104 of SEQ ID NO: 1881636
gguaaaguaucuuuacuac

SEQ ID NO: 2059889 - RNA, 19 nt, Artificial Sequence
  Description of Artificial Sequence: Synthetic oligonucleotide
  Antisense strand to SEQ ID NO: 2059888
guaguaaagauacuuuacc

SEQ ID NO: 2059890 - RNA, 19 nt, Artificial Sequence
  Description of Artificial Sequence: Synthetic oligonucleotide
  Sense strand starting at position 248 of SEQ ID NO: 1881636
gguggaguagguuauaaug

SEQ ID NO: 2059891 - RNA, 19 nt, Artificial Sequence
  Description of Artificial Sequence: Synthetic oligonucleotide
  Antisense strand to SEQ ID NO: 2059890
cauuauaaccuacuccacc

SEQ ID NO: 2059892 - RNA, 19 nt, Artificial Sequence
  Description of Artificial Sequence: Synthetic oligonucleotide
  Sense strand starting at position 285 of SEQ ID NO: 1881636
ucaacacaugguuaaguua

SEQ ID NO: 2059893 - RNA, 19 nt, Artificial Sequence
  Description of Artificial Sequence: Synthetic oligonucleotide
  Antisense strand to SEQ ID NO: 2059892
uaacuuaaccauguguuga

SEQ ID NO: 2059894 - RNA, 19 nt, Artificial Sequence
  Description of Artificial Sequence: Synthetic oligonucleotide
  Sense strand starting at position 288 of SEQ ID NO: 1881636
acacaugguuaaguuauua

SEQ ID NO: 2059895 - RNA, 19 nt, Artificial Sequence
  Description of Artificial Sequence: Synthetic oligonucleotide
  Antisense strand to SEQ ID NO: 2059894
uaauaacuuaaccaugugu

SEQ ID NO: 2059896 - RNA, 19 nt, Artificial Sequence
  Description of Artificial Sequence: Synthetic oligonucleotide
  Sense strand starting at position 337 of SEQ ID NO: 1881636
ggaauacuccuauggcuua

SEQ ID NO: 2059897 - RNA, 19 nt, Artificial Sequence
  Description of Artificial Sequence: Synthetic oligonucleotide
  Antisense strand to SEQ ID NO: 2059896
uaagccauaggaguauucc

SEQ ID NO: 2059898 - RNA, 19 nt, Artificial Sequence
  Description of Artificial Sequence: Synthetic oligonucleotide
  Sense strand starting at position 508 of SEQ ID NO: 1881636
uguggagaauucuuccaau

SEQ ID NO: 2059899 - RNA, 19 nt, Artificial Sequence
  Description of Artificial Sequence: Synthetic oligonucleotide
  Antisense strand to SEQ ID NO: 2059898
auuggaagaauucuccaca

SEQ ID NO: 2059900 - RNA, 19 nt, Artificial Sequence
  Description of Artificial Sequence: Synthetic oligonucleotide
  Sense strand starting at position 544 of SEQ ID NO: 1881636
ggacaauaccuuuguguau

SEQ ID NO: 2059901 - RNA, 19 nt, Artificial Sequence
  Description of Artificial Sequence: Synthetic oligonucleotide
  Antisense strand to SEQ ID NO: 2059900
auacacaaagguauugucc

SEQ ID NO: 2059902 - RNA, 19 nt, Artificial Sequence
  Description of Artificial Sequence: Synthetic oligonucleotide
  Sense strand starting at position 798 of SEQ ID NO: 1881636
acuacaaagcuuuguugaa

SEQ ID NO: 2059903 - RNA, 19 nt, Artificial Sequence
  Description of Artificial Sequence: Synthetic oligonucleotide
  Antisense strand to SEQ ID NO: 2059902
uucaacaaagcuuuguagu

SEQ ID NO: 2059904 - RNA, 19 nt, Artificial Sequence
  Description of Artificial Sequence: Synthetic oligonucleotide
  Sense strand starting at position 799 of SEQ ID NO: 1881636
cuacaaagcuuuguugaaa

SEQ ID NO: 2059905 - RNA, 19 nt, Artificial Sequence
  Description of Artificial Sequence: Synthetic oligonucleotide
  Antisense strand to SEQ ID NO: 2059904
uuucaacaaagcuuuguag

SEQ ID NO: 2059906 - RNA, 19 nt, Artificial Sequence
  Description of Artificial Sequence: Synthetic oligonucleotide
  Sense strand starting at position 905 of SEQ ID NO: 1881636
auaacaagauguguguuau

SEQ ID NO: 2059907 - RNA, 19 nt, Artificial Sequence
  Description of Artificial Sequence: Synthetic oligonucleotide
  Antisense strand to SEQ ID NO: 2059906
auaacacacaucuuguuau

SEQ ID NO: 2059908 - RNA, 19 nt, Artificial Sequence
  Description of Artificial Sequence: Synthetic oligonucleotide
  Sense strand starting at position 906 of SEQ ID NO: 1881636
uaacaagauguguguuaua

SEQ ID NO: 2059909 - RNA, 19 nt, Artificial Sequence
  Description of Artificial Sequence: Synthetic oligonucleotide
  Antisense strand to SEQ ID NO: 2059908
uauaacacacaucuuguua

SEQ ID NO: 2059910 - RNA, 19 nt, Artificial Sequence
  Description of Artificial Sequence: Synthetic oligonucleotide
  Sense strand starting at position 1190 of SEQ ID NO: 1881636
ucagauaugauacgaguaa

SEQ ID NO: 2059911 - RNA, 19 nt, Artificial Sequence
  Description of Artificial Sequence: Synthetic oligonucleotide
  Antisense strand to SEQ ID NO: 2059910
uuacucguaucauaucuga

SEQ ID NO: 2059912 - RNA, 19 nt, Artificial Sequence
  Description of Artificial Sequence: Synthetic oligonucleotide
  Sense strand starting at position 1552 of SEQ ID NO: 1881636
cuugcuauuugacuguuaa

SEQ ID NO: 2059913 - RNA, 19 nt, Artificial Sequence
  Description of Artificial Sequence: Synthetic oligonucleotide
  Antisense strand to SEQ ID NO: 2059912
uuaacagucaaauagcaag

SEQ ID NO: 2059914 - RNA, 19 nt, Artificial Sequence
  Description of Artificial Sequence: Synthetic oligonucleotide
  Sense strand starting at position 1610 of SEQ ID NO: 1881636
acugaaacaugcuuuaaag

SEQ ID NO: 2059915 - RNA, 19 nt, Artificial Sequence
  Description of Artificial Sequence: Synthetic oligonucleotide
  Antisense strand to SEQ ID NO: 2059914
cuuuaaagcauguuucagu

SEQ ID NO: 2059916 - RNA, 19 nt, Artificial Sequence
  Description of Artificial Sequence: Synthetic oligonucleotide
  Sense strand starting at position 1612 of SEQ ID NO: 1881636
ugaaacaugcuuuaaagua

SEQ ID NO: 2059917 - RNA, 19 nt, Artificial Sequence
  Description of Artificial Sequence: Synthetic oligonucleotide
  Antisense strand to SEQ ID NO: 2059916
uacuuuaaagcauguuuca

SEQ ID NO: 2059918 - RNA, 19 nt, Artificial Sequence
  Description of Artificial Sequence: Synthetic oligonucleotide
  Sense strand starting at position 1703 of SEQ ID NO: 1881636
ugaccaguggccgacuaaa

SEQ ID NO: 2059919 - RNA, 19 nt, Artificial Sequence
  Description of Artificial Sequence: Synthetic oligonucleotide
  Antisense strand to SEQ ID NO: 2059918
uuuagucggccacugguca

SEQ ID NO: 2059920 - RNA, 19 nt, Artificial Sequence
  Description of Artificial Sequence: Synthetic oligonucleotide
  Sense strand starting at position 1877 of SEQ ID NO: 1881636
gauauauggcuguggacca

SEQ ID NO: 2059921 - RNA, 19 nt, Artificial Sequence
  Description of Artificial Sequence: Synthetic oligonucleotide
  Antisense strand to SEQ ID NO: 2059920
ugguccacagccauauauc

SEQ ID NO: 2059922 - RNA, 19 nt, Artificial Sequence
  Description of Artificial Sequence: Synthetic oligonucleotide
  Sense strand starting at position 2167 of SEQ ID NO: 1881636
guggaugggcuuuaugcaa

SEQ ID NO: 2059923 - RNA, 19 nt, Artificial Sequence
  Description of Artificial Sequence: Synthetic oligonucleotide
  Antisense strand to SEQ ID NO: 2059922
uugcauaaagcccauccac

SEQ ID NO: 2059924 - RNA, 19 nt, Artificial Sequence
  Description of Artificial Sequence: Synthetic oligonucleotide
  Sense strand starting at position 2202 of SEQ ID NO: 1881636
agaaucucccagugagaug

SEQ ID NO: 2059925 - RNA, 19 nt, Artificial Sequence
  Description of Artificial Sequence: Synthetic oligonucleotide
  Antisense strand to SEQ ID NO: 2059924
caucucacugggagauucu

SEQ ID NO: 2059926 - RNA, 19 nt, Artificial Sequence
  Description of Artificial Sequence: Synthetic oligonucleotide
  Sense strand starting at position 2227 of SEQ ID NO: 1881636
ggugcuuugcagucagugu

SEQ ID NO: 2059927 - RNA, 19 nt, Artificial Sequence
  Description of Artificial Sequence: Synthetic oligonucleotide
  Antisense strand to SEQ ID NO: 2059926
acacugacugcaaagcacc

SEQ ID NO: 2059928 - RNA, 19 nt, Artificial Sequence
  Description of Artificial Sequence: Synthetic oligonucleotide
  Sense strand starting at position 2588 of SEQ ID NO: 1881636
ccaguuuagacaggcugaa

SEQ ID NO: 2059929 - RNA, 19 nt, Artificial Sequence
  Description of Artificial Sequence: Synthetic oligonucleotide
  Antisense strand to SEQ ID NO: 2059928
uucagccugucuaaacugg

SEQ ID NO: 2059930 - RNA, 19 nt, Artificial Sequence
  Description of Artificial Sequence: Synthetic oligonucleotide
  Sense strand starting at position 2721 of SEQ ID NO: 1881636
gguaacuaucuacauuguu

SEQ ID NO: 2059931 - RNA, 19 nt, Artificial Sequence
  Description of Artificial Sequence: Synthetic oligonucleotide
  Antisense strand to SEQ ID NO: 2059930
aacaauguagauaguuacc

SEQ ID NO: 2059932 - RNA, 19 nt, Artificial Sequence
  Description of Artificial Sequence: Synthetic oligonucleotide
  Sense strand starting at position 2752 of SEQ ID NO: 1881636
auguuuguaacuggagaug

SEQ ID NO: 2059933 - RNA, 19 nt, Artificial Sequence
  Description of Artificial Sequence: Synthetic oligonucleotide
  Antisense strand to SEQ ID NO: 2059932
caucuccaguuacaaacau

SEQ ID NO: 2059934 - RNA, 19 nt, Artificial Sequence
  Description of Artificial Sequence: Synthetic oligonucleotide
  Sense strand starting at position 2776 of SEQ ID NO: 1881636
cauuaagcauguuugggaa

SEQ ID NO: 2059935 - RNA, 19 nt, Artificial Sequence
  Description of Artificial Sequence: Synthetic oligonucleotide
  Antisense strand to SEQ ID NO: 2059934
uucccaaacaugcuuaaug

SEQ ID NO: 2059936 - RNA, 19 nt, Artificial Sequence
  Description of Artificial Sequence: Synthetic oligonucleotide
  Sense strand starting at position 2806 of SEQ ID NO: 1881636
ggauguaaccauggaaguc

SEQ ID NO: 2059937 - RNA, 19 nt, Artificial Sequence
  Description of Artificial Sequence: Synthetic oligonucleotide
  Antisense strand to SEQ ID NO: 2059936
gacuuccaugguuacaucc

SEQ ID NO: 2059938 - RNA, 19 nt, Artificial Sequence
  Description of Artificial Sequence: Synthetic oligonucleotide
  Sense strand starting at position 2816 of SEQ ID NO: 1881636
auggaaguccuaugcuuaa

SEQ ID NO: 2059939 - RNA, 19 nt, Artificial Sequence
  Description of Artificial Sequence: Synthetic oligonucleotide
  Antisense strand to SEQ ID NO: 2059938
uuaagcauaggacuuccau

SEQ ID NO: 2059940 - RNA, 19 nt, Artificial Sequence
  Description of Artificial Sequence: Synthetic oligonucleotide
  Sense strand starting at position 2902 of SEQ ID NO: 1881636
gucuaagaauuacuugcaa

SEQ ID NO: 2059941 - RNA, 19 nt, Artificial Sequence
  Description of Artificial Sequence: Synthetic oligonucleotide
  Antisense strand to SEQ ID NO: 2059940
uugcaaguaauucuuagac

SEQ ID NO: 2059942 - RNA, 19 nt, Artificial Sequence
  Description of Artificial Sequence: Synthetic oligonucleotide
  Sense strand starting at position 2953 of SEQ ID NO: 1881636
gcuccaagauauguuggau

SEQ ID NO: 2059943 - RNA, 19 nt, Artificial Sequence
  Description of Artificial Sequence: Synthetic oligonucleotide
  Antisense strand to SEQ ID NO: 2059942
auccaacauaucuuggagc

SEQ ID NO: 2059944 - RNA, 19 nt, Artificial Sequence
  Description of Artificial Sequence: Synthetic oligonucleotide
  Sense strand starting at position 2956 of SEQ ID NO: 1881636
ccaagauauguuggauaac

SEQ ID NO: 2059945 - RNA, 19 nt, Artificial Sequence
  Description of Artificial Sequence: Synthetic oligonucleotide
  Antisense strand to SEQ ID NO: 2059944
guuauccaacauaucuugg

SEQ ID NO: 2059946 - RNA, 19 nt, Artificial Sequence
  Description of Artificial Sequence: Synthetic oligonucleotide
  Sense strand starting at position 3021 of SEQ ID NO: 1881636
uggauaguuggguaacagu

SEQ ID NO: 2059947 - RNA, 19 nt, Artificial Sequence
  Description of Artificial Sequence: Synthetic oligonucleotide
  Antisense strand to SEQ ID NO: 2059946
acuguuacccaacuaucca

SEQ ID NO: 2059948 - RNA, 19 nt, Artificial Sequence
  Description of Artificial Sequence: Synthetic oligonucleotide
  Sense strand starting at position 3037 of SEQ ID NO: 1881636
aguugagcaucaccaugau

SEQ ID NO: 2059949 - RNA, 19 nt, Artificial Sequence
  Description of Artificial Sequence: Synthetic oligonucleotide
  Antisense strand to SEQ ID NO: 2059948
aucauggugaugcucaacu

SEQ ID NO: 2059950 - RNA, 19 nt, Artificial Sequence
  Description of Artificial Sequence: Synthetic oligonucleotide
  Sense strand starting at position 3040 of SEQ ID NO: 1881636
ugagcaucaccaugaugga

SEQ ID NO: 2059951 - RNA, 19 nt, Artificial Sequence
  Description of Artificial Sequence: Synthetic oligonucleotide
  Antisense strand to SEQ ID NO: 2059950
uccaucauggugaugcuca

SEQ ID NO: 2059952 - RNA, 19 nt, Artificial Sequence
  Description of Artificial Sequence: Synthetic oligonucleotide
  Sense strand starting at position 3080 of SEQ ID NO: 1881636
auguguuugagaggaguga

SEQ ID NO: 2059953 - RNA, 19 nt, Artificial Sequence
  Description of Artificial Sequence: Synthetic oligonucleotide
  Antisense strand to SEQ ID NO: 2059952
ucacuccucucaaacacau

SEQ ID NO: 2059954 - RNA, 19 nt, Artificial Sequence
  Description of Artificial Sequence: Synthetic oligonucleotide
  Sense strand starting at position 3081 of SEQ ID NO: 1881636
uguguuugagaggagugaa

SEQ ID NO: 2059955 - RNA, 19 nt, Artificial Sequence
  Description of Artificial Sequence: Synthetic oligonucleotide
  Antisense strand to SEQ ID NO: 2059954
uucacuccucucaaacaca

SEQ ID NO: 2059956 - RNA, 19 nt, Artificial Sequence
  Description of Artificial Sequence: Synthetic oligonucleotide
  Sense strand starting at position 3084 of SEQ ID NO: 1881636
guuugagaggagugaaaug

SEQ ID NO: 2059957 - RNA, 19 nt, Artificial Sequence
  Description of Artificial Sequence: Synthetic oligonucleotide
  Antisense strand to SEQ ID NO: 2059956
cauuucacuccucucaaac

SEQ ID NO: 2059958 - RNA, 19 nt, Artificial Sequence
  Description of Artificial Sequence: Synthetic oligonucleotide
  Sense strand starting at position 3422 of SEQ ID NO: 1881636
ggaguugcaccauaguaag

SEQ ID NO: 2059959 - RNA, 19 nt, Artificial Sequence
  Description of Artificial Sequence: Synthetic oligonucleotide
  Antisense strand to SEQ ID NO: 2059958
cuuacuauggugcaacucc

SEQ ID NO: 2059960 - RNA, 19 nt, Artificial Sequence
  Description of Artificial Sequence: Synthetic oligonucleotide
  Sense strand starting at position 3484 of SEQ ID NO: 1881636
uggccucuccaagaacuaa

SEQ ID NO: 2059961 - RNA, 19 nt, Artificial Sequence
  Description of Artificial Sequence: Synthetic oligonucleotide
  Antisense strand to SEQ ID NO: 2059960
uuaguucuuggagaggcca

SEQ ID NO: 2059962 - RNA, 19 nt, Artificial Sequence
  Description of Artificial Sequence: Synthetic oligonucleotide
  Sense strand starting at position 3513 of SEQ ID NO: 1881636
cuucuuugucuugcuguua

SEQ ID NO: 2059963 - RNA, 19 nt, Artificial Sequence
  Description of Artificial Sequence: Synthetic oligonucleotide
  Antisense strand to SEQ ID NO: 2059962
uaacagcaagacaaagaag

SEQ ID NO: 2059964 - RNA, 19 nt, Artificial Sequence
  Description of Artificial Sequence: Synthetic oligonucleotide
  Sense strand starting at position 3741 of SEQ ID NO: 1881636
ugaggaaccucuucuguua

SEQ ID NO: 2059965 - RNA, 19 nt, Artificial Sequence
  Description of Artificial Sequence: Synthetic oligonucleotide
  Antisense strand to SEQ ID NO: 2059964
uaacagaagagguuccuca

SEQ ID NO: 2059966 - RNA, 19 nt, Artificial Sequence
  Description of Artificial Sequence: Synthetic oligonucleotide
  Sense strand starting at position 166 of SEQ ID NO: 1881637
uguuaauaugcagaugaca

SEQ ID NO: 2059967 - RNA, 19 nt, Artificial Sequence
  Description of Artificial Sequence: Synthetic oligonucleotide
  Antisense strand to SEQ ID NO: 2059966
ugucaucugcauauuaaca

SEQ ID NO: 2059968 - RNA, 19 nt, Artificial Sequence
  Description of Artificial Sequence: Synthetic oligonucleotide
  Sense strand starting at position 306 of SEQ ID NO: 1881637
ugggcuauauccugaggau

SEQ ID NO: 2059969 - RNA, 19 nt, Artificial Sequence
  Description of Artificial Sequence: Synthetic oligonucleotide
  Antisense strand to SEQ ID NO: 2059968
auccucaggauauagccca

SEQ ID NO: 2059970 - RNA, 19 nt, Artificial Sequence
  Description of Artificial Sequence: Synthetic oligonucleotide
  Sense strand starting at position 447 of SEQ ID NO: 1881637
cucauuauguccuuggaaa

SEQ ID NO: 2059971 - RNA, 19 nt, Artificial Sequence
  Description of Artificial Sequence: Synthetic oligonucleotide
  Antisense strand to SEQ ID NO: 2059970
uuuccaaggacauaaugag

SEQ ID NO: 2059972 - RNA, 19 nt, Artificial Sequence
  Description of Artificial Sequence: Synthetic oligonucleotide
  Sense strand starting at position 448 of SEQ ID NO: 1881637
ucauuauguccuuggaaau

SEQ ID NO: 2059973 - RNA, 19 nt, Artificial Sequence
  Description of Artificial Sequence: Synthetic oligonucleotide
  Antisense strand to SEQ ID NO: 2059972
auuuccaaggacauaauga

SEQ ID NO: 2059974 - RNA, 19 nt, Artificial Sequence
  Description of Artificial Sequence: Synthetic oligonucleotide
  Sense strand starting at position 468 of SEQ ID NO: 1881637
uucugugugggaugugauu

SEQ ID NO: 2059975 - RNA, 19 nt, Artificial Sequence
  Description of Artificial Sequence: Synthetic oligonucleotide
  Antisense strand to SEQ ID NO: 2059974
aaucacaucccacacagaa

SEQ ID NO: 2059976 - RNA, 19 nt, Artificial Sequence
  Description of Artificial Sequence: Synthetic oligonucleotide
  Sense strand starting at position 518 of SEQ ID NO: 1881637
cggcgugaguccauguaca

SEQ ID NO: 2059977 - RNA, 19 nt, Artificial Sequence
  Description of Artificial Sequence: Synthetic oligonucleotide
  Antisense strand to SEQ ID NO: 2059976
uguacauggacucacgccg

SEQ ID NO: 2059978 - RNA, 19 nt, Artificial Sequence
  Description of Artificial Sequence: Synthetic oligonucleotide
  Sense strand starting at position 809 of SEQ ID NO: 1881637
gagcgaaggcaguaauuau

SEQ ID NO: 2059979 - RNA, 19 nt, Artificial Sequence
  Description of Artificial Sequence: Synthetic oligonucleotide
  Antisense strand to SEQ ID NO: 2059978
auaauuacugccuucgcuc

SEQ ID NO: 2059980 - RNA, 19 nt, Artificial Sequence
  Description of Artificial Sequence: Synthetic oligonucleotide
  Sense strand starting at position 871 of SEQ ID NO: 1881637
agagcucaucacugaucga

SEQ ID NO: 2059981 - RNA, 19 nt, Artificial Sequence
  Description of Artificial Sequence: Synthetic oligonucleotide
  Antisense strand to SEQ ID NO: 2059980
ucgaucagugaugagcucu

SEQ ID NO: 2059982 - RNA, 19 nt, Artificial Sequence
  Description of Artificial Sequence: Synthetic oligonucleotide
  Sense strand starting at position 874 of SEQ ID NO: 1881637
gcucaucacugaucgaauc

SEQ ID NO: 2059983 - RNA, 19 nt, Artificial Sequence
  Description of Artificial Sequence: Synthetic oligonucleotide
  Antisense strand to SEQ ID NO: 2059982
gauucgaucagugaugagc

SEQ ID NO: 2059984 - RNA, 19 nt, Artificial Sequence
  Description of Artificial Sequence: Synthetic oligonucleotide
  Sense strand starting at position 875 of SEQ ID NO: 1881637
cucaucacugaucgaauca

SEQ ID NO: 2059985 - RNA, 19 nt, Artificial Sequence
  Description of Artificial Sequence: Synthetic oligonucleotide
  Antisense strand to SEQ ID NO: 2059984
ugauucgaucagugaugag

SEQ ID NO: 2059986 - RNA, 19 nt, Artificial Sequence
  Description of Artificial Sequence: Synthetic oligonucleotide
  Sense strand starting at position 922 of SEQ ID NO: 1881637
ucucuaauguccucugaug

SEQ ID NO: 2059987 - RNA, 19 nt, Artificial Sequence
  Description of Artificial Sequence: Synthetic oligonucleotide
  Antisense strand to SEQ ID NO: 2059986
caucagaggacauuagaga

SEQ ID NO: 2059988 - RNA, 19 nt, Artificial Sequence
  Description of Artificial Sequence: Synthetic oligonucleotide
  Sense strand starting at position 924 of SEQ ID NO: 1881637
ucuaauguccucugauguu

SEQ ID NO: 2059989 - RNA, 19 nt, Artificial Sequence
  Description of Artificial Sequence: Synthetic oligonucleotide
  Antisense strand to SEQ ID NO: 2059988
aacaucagaggacauuaga

SEQ ID NO: 2059990 - RNA, 19 nt, Artificial Sequence
  Description of Artificial Sequence: Synthetic oligonucleotide
  Sense strand starting at position 950 of SEQ ID NO: 1881637
gggcaucuugaagaagcuu

SEQ ID NO: 2059991 - RNA, 19 nt, Artificial Sequence
  Description of Artificial Sequence: Synthetic oligonucleotide
  Antisense strand to SEQ ID NO: 2059990
aagcuucuucaagaugccc

SEQ ID NO: 2059992 - RNA, 19 nt, Artificial Sequence
  Description of Artificial Sequence: Synthetic oligonucleotide
  Sense strand starting at position 961 of SEQ ID NO: 1881637
agaagcuuccagcaagcuu

SEQ ID NO: 2059993 - RNA, 19 nt, Artificial Sequence
  Description of Artificial Sequence: Synthetic oligonucleotide
  Antisense strand to SEQ ID NO: 2059992
aagcuugcuggaagcuucu

SEQ ID NO: 2059994 - RNA, 19 nt, Artificial Sequence
  Description of Artificial Sequence: Synthetic oligonucleotide
  Sense strand starting at position 1072 of SEQ ID NO: 1881637
ugaaauccucgauggaaac

SEQ ID NO: 2059995 - RNA, 19 nt, Artificial Sequence
  Description of Artificial Sequence: Synthetic oligonucleotide
  Antisense strand to SEQ ID NO: 2059994
guuuccaucgaggauuuca

SEQ ID NO: 2059996 - RNA, 19 nt, Artificial Sequence
  Description of Artificial Sequence: Synthetic oligonucleotide
  Sense strand starting at position 1133 of SEQ ID NO: 1881637
gcgagcuuggccgugugua

SEQ ID NO: 2059997 - RNA, 19 nt, Artificial Sequence
  Description of Artificial Sequence: Synthetic oligonucleotide
  Antisense strand to SEQ ID NO: 2059996
uacacacggccaagcucgc

SEQ ID NO: 2059998 - RNA, 19 nt, Artificial Sequence
  Description of Artificial Sequence: Synthetic oligonucleotide
  Sense strand starting at position 1287 of SEQ ID NO: 1881637
cguguugaguuacucccaa

SEQ ID NO: 2059999 - RNA, 19 nt, Artificial Sequence
  Description of Artificial Sequence: Synthetic oligonucleotide
  Antisense strand to SEQ ID NO: 2059998
uugggaguaacucaacacg

SEQ ID NO: 2060000 - RNA, 19 nt, Artificial Sequence
  Description of Artificial Sequence: Synthetic oligonucleotide
  Sense strand starting at position 1390 of SEQ ID NO: 1881637
cagcucucggcaugcaauu

SEQ ID NO: 2060001 - RNA, 19 nt, Artificial Sequence
  Description of Artificial Sequence: Synthetic oligonucleotide
  Antisense strand to SEQ ID NO: 2060000
aauugcaugccgagagcug

SEQ ID NO: 2060002 - RNA, 19 nt, Artificial Sequence
  Description of Artificial Sequence: Synthetic oligonucleotide
  Sense strand starting at position 1551 of SEQ ID NO: 1881637
guuggaauucacugaggcu

SEQ ID NO: 2060003 - RNA, 19 nt, Artificial Sequence
  Description of Artificial Sequence: Synthetic oligonucleotide
  Antisense strand to SEQ ID NO: 2060002
agccucagugaauuccaac

SEQ ID NO: 2060004 - RNA, 19 nt, Artificial Sequence
  Description of Artificial Sequence: Synthetic oligonucleotide
  Sense strand starting at position 1628 of SEQ ID NO: 1881637
cccgaaugucuggaccuua

SEQ ID NO: 2060005 - RNA, 19 nt, Artificial Sequence
  Description of Artificial Sequence: Synthetic oligonucleotide
  Antisense strand to SEQ ID NO: 2060004
uaagguccagacauucggg

SEQ ID NO: 2060006 - RNA, 19 nt, Artificial Sequence
  Description of Artificial Sequence: Synthetic oligonucleotide
  Sense strand starting at position 1633 of SEQ ID NO: 1881637
augucuggaccuuagaagu

SEQ ID NO: 2060007 - RNA, 19 nt, Artificial Sequence
  Description of Artificial Sequence: Synthetic oligonucleotide
  Antisense strand to SEQ ID NO: 2060006
acuucuaagguccagacau

SEQ ID NO: 2060008 - RNA, 19 nt, Artificial Sequence
  Description of Artificial Sequence: Synthetic oligonucleotide
  Sense strand starting at position 2178 of SEQ ID NO: 1881637
guggauggcccuggcuaau

SEQ ID NO: 2060009 - RNA, 19 nt, Artificial Sequence
  Description of Artificial Sequence: Synthetic oligonucleotide
  Antisense strand to SEQ ID NO: 2060008
auuagccagggccauccac

SEQ ID NO: 2060010 - RNA, 19 nt, Artificial Sequence
  Description of Artificial Sequence: Synthetic oligonucleotide
  Sense strand starting at position 2190 of SEQ ID NO: 1881637
ggcuaaugcccucaaugug

SEQ ID NO: 2060011 - RNA, 19 nt, Artificial Sequence
  Description of Artificial Sequence: Synthetic oligonucleotide
  Antisense strand to SEQ ID NO: 2060010
cacauugagggcauuagcc

SEQ ID NO: 2060012 - RNA, 19 nt, Artificial Sequence
  Description of Artificial Sequence: Synthetic oligonucleotide
  Sense strand starting at position 2295 of SEQ ID NO: 1881637
agaggcuugucuggagaug

SEQ ID NO: 2060013 - RNA, 19 nt, Artificial Sequence
  Description of Artificial Sequence: Synthetic oligonucleotide
  Antisense strand to SEQ ID NO: 2060012
caucuccagacaagccucu

SEQ ID NO: 2060014 - RNA, 19 nt, Artificial Sequence
  Description of Artificial Sequence: Synthetic oligonucleotide
  Sense strand starting at position 2334 of SEQ ID NO: 1881637
ggaaguccuccugagcacu

SEQ ID NO: 2060015 - RNA, 19 nt, Artificial Sequence
  Description of Artificial Sequence: Synthetic oligonucleotide
  Antisense strand to SEQ ID NO: 2060014
agugcucaggaggacuucc

SEQ ID NO: 2060016 - RNA, 19 nt, Artificial Sequence
  Description of Artificial Sequence: Synthetic oligonucleotide
  Sense strand starting at position 2722 of SEQ ID NO: 1881637
agagaugccuucuccauag

SEQ ID NO: 2060017 - RNA, 19 nt, Artificial Sequence
  Description of Artificial Sequence: Synthetic oligonucleotide
  Antisense strand to SEQ ID NO: 2060016
cuauggagaaggcaucucu

SEQ ID NO: 2060018 - RNA, 19 nt, Artificial Sequence
  Description of Artificial Sequence: Synthetic oligonucleotide
  Sense strand starting at position 2765 of SEQ ID NO: 1881637
cucccucuucuauaguuga

SEQ ID NO: 2060019 - RNA, 19 nt, Artificial Sequence
  Description of Artificial Sequence: Synthetic oligonucleotide
  Antisense strand to SEQ ID NO: 2060018
ucaacuauagaagagggag

SEQ ID NO: 2060020 - RNA, 19 nt, Artificial Sequence
  Description of Artificial Sequence: Synthetic oligonucleotide
  Sense strand starting at position 3147 of SEQ ID NO: 1881637
aggccaacuucugcucauu

SEQ ID NO: 2060021 - RNA, 19 nt, Artificial Sequence
  Description of Artificial Sequence: Synthetic oligonucleotide
  Antisense strand to SEQ ID NO: 2060020
aaugagcagaaguuggccu

SEQ ID NO: 2060022 - RNA, 19 nt, Artificial Sequence
  Description of Artificial Sequence: Synthetic oligonucleotide
  Sense strand starting at position 3367 of SEQ ID NO: 1881637
ggacacucaggucaaguuu

SEQ ID NO: 2060023 - RNA, 19 nt, Artificial Sequence
  Description of Artificial Sequence: Synthetic oligonucleotide
  Antisense strand to SEQ ID NO: 2060022
aaacuugaccugagugucc

SEQ ID NO: 2060024 - RNA, 19 nt, Artificial Sequence
  Description of Artificial Sequence: Synthetic oligonucleotide
  Sense strand starting at position 3379 of SEQ ID NO: 1881637
caaguuugaugagcaaaua

SEQ ID NO: 2060025 - RNA, 19 nt, Artificial Sequence
  Description of Artificial Sequence: Synthetic oligonucleotide
  Antisense strand to SEQ ID NO: 2060024
uauuugcucaucaaacuug

SEQ ID NO: 2060026 - RNA, 19 nt, Artificial Sequence
  Description of Artificial Sequence: Synthetic oligonucleotide
  Sense strand starting at position 3405 of SEQ ID NO: 1881637
gcgagaucaucccacauca

SEQ ID NO: 2060027 - RNA, 19 nt, Artificial Sequence
  Description of Artificial Sequence: Synthetic oligonucleotide
  Antisense strand to SEQ ID NO: 2060026
ugaugugggaugaucucgc

SEQ ID NO: 2060028 - RNA, 19 nt, Artificial Sequence
  Description of Artificial Sequence: Synthetic oligonucleotide
  Sense strand starting at position 3427 of SEQ ID NO: 1881637
ucauuaggcaaagguguuu

SEQ ID NO: 2060029 - RNA, 19 nt, Artificial Sequence
  Description of Artificial Sequence: Synthetic oligonucleotide
  Antisense strand to SEQ ID NO: 2060028
aaacaccuuugccuaauga

SEQ ID NO: 2060030 - RNA, 19 nt, Artificial Sequence
  Description of Artificial Sequence: Synthetic oligonucleotide
  Sense strand starting at position 3432 of SEQ ID NO: 1881637
aggcaaagguguuuaacaa

SEQ ID NO: 2060031 - RNA, 19 nt, Artificial Sequence
  Description of Artificial Sequence: Synthetic oligonucleotide
  Antisense strand to SEQ ID NO: 2060030
uuguuaaacaccuuugccu

SEQ ID NO: 2060032 - RNA, 19 nt, Artificial Sequence
  Description of Artificial Sequence: Synthetic oligonucleotide
  Sense strand starting at position 3433 of SEQ ID NO: 1881637
ggcaaagguguuuaacaag

SEQ ID NO: 2060033 - RNA, 19 nt, Artificial Sequence
  Description of Artificial Sequence: Synthetic oligonucleotide
  Antisense strand to SEQ ID NO: 2060032
cuuguuaaacaccuuugcc

SEQ ID NO: 2060034 - RNA, 19 nt, Artificial Sequence
  Description of Artificial Sequence: Synthetic oligonucleotide
  Sense strand starting at position 3436 of SEQ ID NO: 1881637
aaagguguuuaacaaguuu

SEQ ID NO: 2060035 - RNA, 19 nt, Artificial Sequence
  Description of Artificial Sequence: Synthetic oligonucleotide
  Antisense strand to SEQ ID NO: 2060034
aaacuuguuaaacaccuuu

SEQ ID NO: 2060036 - RNA, 19 nt, Artificial Sequence
  Description of Artificial Sequence: Synthetic oligonucleotide
  Sense strand starting at position 3497 of SEQ ID NO: 1881637
agggcuauguaggagugaa

SEQ ID NO: 2060037 - RNA, 19 nt, Artificial Sequence
  Description of Artificial Sequence: Synthetic oligonucleotide
  Antisense strand to SEQ ID NO: 2060036
uucacuccuacauagcccu

SEQ ID NO: 2060038 - RNA, 19 nt, Artificial Sequence
  Description of Artificial Sequence: Synthetic oligonucleotide
  Sense strand starting at position 3501 of SEQ ID NO: 1881637
cuauguaggagugaagcau

SEQ ID NO: 2060039 - RNA, 19 nt, Artificial Sequence
  Description of Artificial Sequence: Synthetic oligonucleotide
  Antisense strand to SEQ ID NO: 2060038
augcuucacuccuacauag

SEQ ID NO: 2060040 - RNA, 19 nt, Artificial Sequence
  Description of Artificial Sequence: Synthetic oligonucleotide
  Sense strand starting at position 3505 of SEQ ID NO: 1881637
guaggagugaagcaugaau

SEQ ID NO: 2060041 - RNA, 19 nt, Artificial Sequence
  Description of Artificial Sequence: Synthetic oligonucleotide
  Antisense strand to SEQ ID NO: 2060040
auucaugcuucacuccuac

SEQ ID NO: 2060042 - RNA, 19 nt, Artificial Sequence
  Description of Artificial Sequence: Synthetic oligonucleotide
  Sense strand starting at position 3507 of SEQ ID NO: 1881637
aggagugaagcaugaaugu

SEQ ID NO: 2060043 - RNA, 19 nt, Artificial Sequence
  Description of Artificial Sequence: Synthetic oligonucleotide
  Antisense strand to SEQ ID NO: 2060042
acauucaugcuucacuccu

SEQ ID NO: 2060044 - RNA, 19 nt, Artificial Sequence
  Description of Artificial Sequence: Synthetic oligonucleotide
  Sense strand starting at position 3559 of SEQ ID NO: 1881637
gggaauucuccacgguuuc

SEQ ID NO: 2060045 - RNA, 19 nt, Artificial Sequence
  Description of Artificial Sequence: Synthetic oligonucleotide
  Antisense strand to SEQ ID NO: 2060044
gaaaccguggagaauuccc

SEQ ID NO: 2060046 - RNA, 19 nt, Artificial Sequence
  Description of Artificial Sequence: Synthetic oligonucleotide
  Sense strand starting at position 47 of SEQ ID NO: 1881638
cuaugaaugcuugaauguu

SEQ ID NO: 2060047 - RNA, 19 nt, Artificial Sequence
  Description of Artificial Sequence: Synthetic oligonucleotide
  Antisense strand to SEQ ID NO: 2060046
aacauucaagcauucauag

SEQ ID NO: 2060048 - RNA, 19 nt, Artificial Sequence
  Description of Artificial Sequence: Synthetic oligonucleotide
  Sense strand starting at position 57 of SEQ ID NO: 1881638
uugaauguuccugaucuaa

SEQ ID NO: 2060049 - RNA, 19 nt, Artificial Sequence
  Description of Artificial Sequence: Synthetic oligonucleotide
  Antisense strand to SEQ ID NO: 2060048
uuagaucaggaacauucaa

SEQ ID NO: 2060050 - RNA, 19 nt, Artificial Sequence
  Description of Artificial Sequence: Synthetic oligonucleotide
  Sense strand starting at position 59 of SEQ ID NO: 1881638
gaauguuccugaucuaaug

SEQ ID NO: 2060051 - RNA, 19 nt, Artificial Sequence
  Description of Artificial Sequence: Synthetic oligonucleotide
  Antisense strand to SEQ ID NO: 2060050
cauuagaucaggaacauuc

SEQ ID NO: 2060052 - RNA, 19 nt, Artificial Sequence
  Description of Artificial Sequence: Synthetic oligonucleotide
  Sense strand starting at position 89 of SEQ ID NO: 1881638
aguuauagacuugaguuua

SEQ ID NO: 2060053 - RNA, 19 nt, Artificial Sequence
  Description of Artificial Sequence: Synthetic oligonucleotide
  Antisense strand to SEQ ID NO: 2060052
uaaacucaagucuauaacu

SEQ ID NO: 2060054 - RNA, 19 nt, Artificial Sequence
  Description of Artificial Sequence: Synthetic oligonucleotide
  Sense strand starting at position 133 of SEQ ID NO: 1881638
uauagaauguuggucaaau

SEQ ID NO: 2060055 - RNA, 19 nt, Artificial Sequence
  Description of Artificial Sequence: Synthetic oligonucleotide
  Antisense strand to SEQ ID NO: 2060054
auuugaccaacauucuaua

SEQ ID NO: 2060056 - RNA, 19 nt, Artificial Sequence
  Description of Artificial Sequence: Synthetic oligonucleotide
  Sense strand starting at position 134 of SEQ ID NO: 1881638
auagaauguuggucaaauu

SEQ ID NO: 2060057 - RNA, 19 nt, Artificial Sequence
  Description of Artificial Sequence: Synthetic oligonucleotide
  Antisense strand to SEQ ID NO: 2060056
aauuugaccaacauucuau

SEQ ID NO: 2060058 - RNA, 19 nt, Artificial Sequence
  Description of Artificial Sequence: Synthetic oligonucleotide
  Sense strand starting at position 207 of SEQ ID NO: 1881638
guuacugcagaaugaaaug

SEQ ID NO: 2060059 - RNA, 19 nt, Artificial Sequence
  Description of Artificial Sequence: Synthetic oligonucleotide
  Antisense strand to SEQ ID NO: 2060058
cauuucauucugcaguaac

SEQ ID NO: 2060060 - RNA, 19 nt, Artificial Sequence
  Description of Artificial Sequence: Synthetic oligonucleotide
  Sense strand starting at position 212 of SEQ ID NO: 1881638
ugcagaaugaaaugaguua

SEQ ID NO: 2060061 - RNA, 19 nt, Artificial Sequence
  Description of Artificial Sequence: Synthetic oligonucleotide
  Antisense strand to SEQ ID NO: 2060060
uaacucauuucauucugca

SEQ ID NO: 2060062 - RNA, 19 nt, Artificial Sequence
  Description of Artificial Sequence: Synthetic oligonucleotide
  Sense strand starting at position 235 of SEQ ID NO: 1881638
auauaaagaguuuggcaca

SEQ ID NO: 2060063 - RNA, 19 nt, Artificial Sequence
  Description of Artificial Sequence: Synthetic oligonucleotide
  Antisense strand to SEQ ID NO: 2060062
ugugccaaacucuuuauau

SEQ ID NO: 2060064 - RNA, 19 nt, Artificial Sequence
  Description of Artificial Sequence: Synthetic oligonucleotide
  Sense strand starting at position 265 of SEQ ID NO: 1881638
gaauguggaguuuggaaga

SEQ ID NO: 2060065 - RNA, 19 nt, Artificial Sequence
  Description of Artificial Sequence: Synthetic oligonucleotide
  Antisense strand to SEQ ID NO: 2060064
ucuuccaaacuccacauuc

SEQ ID NO: 2060066 - RNA, 19 nt, Artificial Sequence
  Description of Artificial Sequence: Synthetic oligonucleotide
  Sense strand starting at position 290 of SEQ ID NO: 1881638
ggaggugauuuccacauac

SEQ ID NO: 2060067 - RNA, 19 nt, Artificial Sequence
  Description of Artificial Sequence: Synthetic oligonucleotide
  Antisense strand to SEQ ID NO: 2060066
guauguggaaaucaccucc

SEQ ID NO: 2060068 - RNA, 19 nt, Artificial Sequence
  Description of Artificial Sequence: Synthetic oligonucleotide
  Sense strand starting at position 332 of SEQ ID NO: 1881638
auugaauuagauugugaug

SEQ ID NO: 2060069 - RNA, 19 nt, Artificial Sequence
  Description of Artificial Sequence: Synthetic oligonucleotide
  Antisense strand to SEQ ID NO: 2060068
caucacaaucuaauucaau

SEQ ID NO: 2060070 - RNA, 19 nt, Artificial Sequence
  Description of Artificial Sequence: Synthetic oligonucleotide
  Sense strand starting at position 343 of SEQ ID NO: 1881638
uugugaugucucuaaagac

SEQ ID NO: 2060071 - RNA, 19 nt, Artificial Sequence
  Description of Artificial Sequence: Synthetic oligonucleotide
  Antisense strand to SEQ ID NO: 2060070
gucuuuagagacaucacaa

SEQ ID NO: 2060072 - RNA, 19 nt, Artificial Sequence
  Description of Artificial Sequence: Synthetic oligonucleotide
  Sense strand starting at position 814 of SEQ ID NO: 1881638
aguauaagugaucaucucu

SEQ ID NO: 2060073 - RNA, 19 nt, Artificial Sequence
  Description of Artificial Sequence: Synthetic oligonucleotide
  Antisense strand to SEQ ID NO: 2060072
agagaugaucacuuauacu

SEQ ID NO: 2060074 - RNA, 19 nt, Artificial Sequence
  Description of Artificial Sequence: Synthetic oligonucleotide
  Sense strand starting at position 819 of SEQ ID NO: 1881638
aagugaucaucucugguca

SEQ ID NO: 2060075 - RNA, 19 nt, Artificial Sequence
  Description of Artificial Sequence: Synthetic oligonucleotide
  Antisense strand to SEQ ID NO: 2060074
ugaccagagaugaucacuu

SEQ ID NO: 2060076 - RNA, 19 nt, Artificial Sequence
  Description of Artificial Sequence: Synthetic oligonucleotide
  Sense strand starting at position 905 of SEQ ID NO: 1881638
ugacaaugaaguugugauc

SEQ ID NO: 2060077 - RNA, 19 nt, Artificial Sequence
  Description of Artificial Sequence: Synthetic oligonucleotide
  Antisense strand to SEQ ID NO: 2060076
gaucacaacuucauuguca

SEQ ID NO: 2060078 - RNA, 19 nt, Artificial Sequence
  Description of Artificial Sequence: Synthetic oligonucleotide
  Sense strand starting at position 919 of SEQ ID NO: 1881638
ugaucuagugcagaagcau

SEQ ID NO: 2060079 - RNA, 19 nt, Artificial Sequence
  Description of Artificial Sequence: Synthetic oligonucleotide
  Antisense strand to SEQ ID NO: 2060078
augcuucugcacuagauca

SEQ ID NO: 2060080 - RNA, 19 nt, Artificial Sequence
  Description of Artificial Sequence: Synthetic oligonucleotide
  Sense strand starting at position 1096 of SEQ ID NO: 1881638
guuauuccagucuaggagu

SEQ ID NO: 2060081 - RNA, 19 nt, Artificial Sequence
  Description of Artificial Sequence: Synthetic oligonucleotide
  Antisense strand to SEQ ID NO: 2060080
acuccuagacuggaauaac

SEQ ID NO: 2060082 - RNA, 19 nt, Artificial Sequence
  Description of Artificial Sequence: Synthetic oligonucleotide
  Sense strand starting at position 1098 of SEQ ID NO: 1881638
uauuccagucuaggaguua

SEQ ID NO: 2060083 - RNA, 19 nt, Artificial Sequence
  Description of Artificial Sequence: Synthetic oligonucleotide
  Antisense strand to SEQ ID NO: 2060082
uaacuccuagacuggaaua

SEQ ID NO: 2060084 - RNA, 19 nt, Artificial Sequence
  Description of Artificial Sequence: Synthetic oligonucleotide
  Sense strand starting at position 1153 of SEQ ID NO: 1881638
cauuguugccuggaauuac

SEQ ID NO: 2060085 - RNA, 19 nt, Artificial Sequence
  Description of Artificial Sequence: Synthetic oligonucleotide
  Antisense strand to SEQ ID NO: 2060084
guaauuccaggcaacaaug

SEQ ID NO: 2060086 - RNA, 19 nt, Artificial Sequence
  Description of Artificial Sequence: Synthetic oligonucleotide
  Sense strand starting at position 1391 of SEQ ID NO: 1881638
uccugagcugcugcgauua

SEQ ID NO: 2060087 - RNA, 19 nt, Artificial Sequence
  Description of Artificial Sequence: Synthetic oligonucleotide
  Antisense strand to SEQ ID NO: 2060086
uaaucgcagcagcucagga

SEQ ID NO: 2060088 - RNA, 19 nt, Artificial Sequence
  Description of Artificial Sequence: Synthetic oligonucleotide
  Sense strand starting at position 1658 of SEQ ID NO: 1881638
ugagacaggccaugcauaa

SEQ ID NO: 2060089 - RNA, 19 nt, Artificial Sequence
  Description of Artificial Sequence: Synthetic oligonucleotide
  Antisense strand to SEQ ID NO: 2060088
uuaugcauggccugucuca

SEQ ID NO: 2060090 - RNA, 19 nt, Artificial Sequence
  Description of Artificial Sequence: Synthetic oligonucleotide
  Sense strand starting at position 1763 of SEQ ID NO: 1881638
uuauauuugucacugcuuu

SEQ ID NO: 2060091 - RNA, 19 nt, Artificial Sequence
  Description of Artificial Sequence: Synthetic oligonucleotide
  Antisense strand to SEQ ID NO: 2060090
aaagcagugacaaauauaa

SEQ ID NO: 2060092 - RNA, 19 nt, Artificial Sequence
  Description of Artificial Sequence: Synthetic oligonucleotide
  Sense strand starting at position 1786 of SEQ ID NO: 1881638
ucugcuauggcugauauca

SEQ ID NO: 2060093 - RNA, 19 nt, Artificial Sequence
  Description of Artificial Sequence: Synthetic oligonucleotide
  Antisense strand to SEQ ID NO: 2060092
ugauaucagccauagcaga

SEQ ID NO: 2060094 - RNA, 19 nt, Artificial Sequence
  Description of Artificial Sequence: Synthetic oligonucleotide
  Sense strand starting at position 1824 of SEQ ID NO: 1881638
ucagguguuagagggaaau

SEQ ID NO: 2060095 - RNA, 19 nt, Artificial Sequence
  Description of Artificial Sequence: Synthetic oligonucleotide
  Antisense strand to SEQ ID NO: 2060094
auuucccucuaacaccuga

SEQ ID NO: 2060096 - RNA, 19 nt, Artificial Sequence
  Description of Artificial Sequence: Synthetic oligonucleotide
  Sense strand starting at position 1999 of SEQ ID NO: 1881638
uguucuaacccucauggua

SEQ ID NO: 2060097 - RNA, 19 nt, Artificial Sequence
  Description of Artificial Sequence: Synthetic oligonucleotide
  Antisense strand to SEQ ID NO: 2060096
uaccaugaggguuagaaca

SEQ ID NO: 2060098 - RNA, 19 nt, Artificial Sequence
  Description of Artificial Sequence: Synthetic oligonucleotide
  Sense strand starting at position 2147 of SEQ ID NO: 1881638
ccacucauuggucaucuga

SEQ ID NO: 2060099 - RNA, 19 nt, Artificial Sequence
  Description of Artificial Sequence: Synthetic oligonucleotide
  Antisense strand to SEQ ID NO: 2060098
ucagaugaccaaugagugg

SEQ ID NO: 2060100 - RNA, 19 nt, Artificial Sequence
  Description of Artificial Sequence: Synthetic oligonucleotide
  Sense strand starting at position 2149 of SEQ ID NO: 1881638
acucauuggucaucugacu

SEQ ID NO: 2060101 - RNA, 19 nt, Artificial Sequence
  Description of Artificial Sequence: Synthetic oligonucleotide
  Antisense strand to SEQ ID NO: 2060100
agucagaugaccaaugagu

SEQ ID NO: 2060102 - RNA, 19 nt, Artificial Sequence
  Description of Artificial Sequence: Synthetic oligonucleotide
  Sense strand starting at position 2154 of SEQ ID NO: 1881638
uuggucaucugacuuggaa

SEQ ID NO: 2060103 - RNA, 19 nt, Artificial Sequence
  Description of Artificial Sequence: Synthetic oligonucleotide
  Antisense strand to SEQ ID NO: 2060102
uuccaagucagaugaccaa

SEQ ID NO: 2060104 - RNA, 19 nt, Artificial Sequence
  Description of Artificial Sequence: Synthetic oligonucleotide
  Sense strand starting at position 2156 of SEQ ID NO: 1881638
ggucaucugacuuggaaua

SEQ ID NO: 2060105 - RNA, 19 nt, Artificial Sequence
  Description of Artificial Sequence: Synthetic oligonucleotide
  Antisense strand to SEQ ID NO: 2060104
uauuccaagucagaugacc

SEQ ID NO: 2060106 - RNA, 19 nt, Artificial Sequence
  Description of Artificial Sequence: Synthetic oligonucleotide
  Sense strand starting at position 2157 of SEQ ID NO: 1881638
gucaucugacuuggaauaa

SEQ ID NO: 2060107 - RNA, 19 nt, Artificial Sequence
  Description of Artificial Sequence: Synthetic oligonucleotide
  Antisense strand to SEQ ID NO: 2060106
uuauuccaagucagaugac

SEQ ID NO: 2060108 - RNA, 19 nt, Artificial Sequence
  Description of Artificial Sequence: Synthetic oligonucleotide
  Sense strand starting at position 2235 of SEQ ID NO: 1881638
gcacuucuagucuggauuu

SEQ ID NO: 2060109 - RNA, 19 nt, Artificial Sequence
  Description of Artificial Sequence: Synthetic oligonucleotide
  Antisense strand to SEQ ID NO: 2060108
aaauccagacuagaagugc

SEQ ID NO: 2060110 - RNA, 19 nt, Artificial Sequence
  Description of Artificial Sequence: Synthetic oligonucleotide
  Sense strand starting at position 2597 of SEQ ID NO: 1881638
gcaggaguaccugggaaga

SEQ ID NO: 2060111 - RNA, 19 nt, Artificial Sequence
  Description of Artificial Sequence: Synthetic oligonucleotide
  Antisense strand to SEQ ID NO: 2060110
ucuucccagguacuccugc

SEQ ID NO: 2060112 - RNA, 19 nt, Artificial Sequence
  Description of Artificial Sequence: Synthetic oligonucleotide
  Sense strand starting at position 2794 of SEQ ID NO: 1881638
auaugcuuuguguaaugau

SEQ ID NO: 2060113 - RNA, 19 nt, Artificial Sequence
  Description of Artificial Sequence: Synthetic oligonucleotide
  Antisense strand to SEQ ID NO: 2060112
aucauuacacaaagcauau

SEQ ID NO: 2060114 - RNA, 19 nt, Artificial Sequence
  Description of Artificial Sequence: Synthetic oligonucleotide
  Sense strand starting at position 2851 of SEQ ID NO: 1881638
uucucauuuguuugcaaug

SEQ ID NO: 2060115 - RNA, 19 nt, Artificial Sequence
  Description of Artificial Sequence: Synthetic oligonucleotide
  Antisense strand to SEQ ID NO: 2060114
cauugcaaacaaaugagaa

SEQ ID NO: 2060116 - RNA, 19 nt, Artificial Sequence
  Description of Artificial Sequence: Synthetic oligonucleotide
  Sense strand starting at position 2852 of SEQ ID NO: 1881638
ucucauuuguuugcaauga

SEQ ID NO: 2060117 - RNA, 19 nt, Artificial Sequence
  Description of Artificial Sequence: Synthetic oligonucleotide
  Antisense strand to SEQ ID NO: 2060116
ucauugcaaacaaaugaga

SEQ ID NO: 2060118 - RNA, 19 nt, Artificial Sequence
  Description of Artificial Sequence: Synthetic oligonucleotide
  Sense strand starting at position 3092 of SEQ ID NO: 1881638
uccacauaugagugugaua

SEQ ID NO: 2060119 - RNA, 19 nt, Artificial Sequence
  Description of Artificial Sequence: Synthetic oligonucleotide
  Antisense strand to SEQ ID NO: 2060118
uaucacacucauaugugga

SEQ ID NO: 2060120 - RNA, 19 nt, Artificial Sequence
  Description of Artificial Sequence: Synthetic oligonucleotide
  Sense strand starting at position 3122 of SEQ ID NO: 1881638
gucuucugugccguacuua

SEQ ID NO: 2060121 - RNA, 19 nt, Artificial Sequence
  Description of Artificial Sequence: Synthetic oligonucleotide
  Antisense strand to SEQ ID NO: 2060120
uaaguacggcacagaagac

SEQ ID NO: 2060122 - RNA, 19 nt, Artificial Sequence
  Description of Artificial Sequence: Synthetic oligonucleotide
  Sense strand starting at position 3395 of SEQ ID NO: 1881638
gucauuugguacuucuauu

SEQ ID NO: 2060123 - RNA, 19 nt, Artificial Sequence
  Description of Artificial Sequence: Synthetic oligonucleotide
  Antisense strand to SEQ ID NO: 2060122
aauagaaguaccaaaugac

SEQ ID NO: 2060124 - RNA, 19 nt, Artificial Sequence
  Description of Artificial Sequence: Synthetic oligonucleotide
  Sense strand starting at position 3825 of SEQ ID NO: 1881638
gaugauuuccuuugcuguu

SEQ ID NO: 2060125 - RNA, 19 nt, Artificial Sequence
  Description of Artificial Sequence: Synthetic oligonucleotide
  Antisense strand to SEQ ID NO: 2060124
aacagcaaaggaaaucauc

SEQ ID NO: 2060126 - RNA, 19 nt, Artificial Sequence
  Description of Artificial Sequence: Synthetic oligonucleotide
  Sense strand starting at position 74 of SEQ ID NO: 1881639
uuugaauauuggcucugga

SEQ ID NO: 2060127 - RNA, 19 nt, Artificial Sequence
  Description of Artificial Sequence: Synthetic oligonucleotide
  Antisense strand to SEQ ID NO: 2060126
uccagagccaauauucaaa

SEQ ID NO: 2060128 - RNA, 19 nt, Artificial Sequence
  Description of Artificial Sequence: Synthetic oligonucleotide
  Sense strand starting at position 77 of SEQ ID NO: 1881639
gaauauuggcucuggaaga

SEQ ID NO: 2060129 - RNA, 19 nt, Artificial Sequence
  Description of Artificial Sequence: Synthetic oligonucleotide
  Antisense strand to SEQ ID NO: 2060128
ucuuccagagccaauauuc

SEQ ID NO: 2060130 - RNA, 19 nt, Artificial Sequence
  Description of Artificial Sequence: Synthetic oligonucleotide
  Sense strand starting at position 261 of SEQ ID NO: 1881639
uugugaaucuagguaaaga

SEQ ID NO: 2060131 - RNA, 19 nt, Artificial Sequence
  Description of Artificial Sequence: Synthetic oligonucleotide
  Antisense strand to SEQ ID NO: 2060130
ucuuuaccuagauucacaa

SEQ ID NO: 2060132 - RNA, 19 nt, Artificial Sequence
  Description of Artificial Sequence: Synthetic oligonucleotide
  Sense strand starting at position 298 of SEQ ID NO: 1881639
guucuauucggauaaucuc

SEQ ID NO: 2060133 - RNA, 19 nt, Artificial Sequence
  Description of Artificial Sequence: Synthetic oligonucleotide
  Antisense strand to SEQ ID NO: 2060132
gagauuauccgaauagaac

SEQ ID NO: 2060134 - RNA, 19 nt, Artificial Sequence
  Description of Artificial Sequence: Synthetic oligonucleotide
  Sense strand starting at position 306 of SEQ ID NO: 1881639
cggauaaucucucuguaaa

SEQ ID NO: 2060135 - RNA, 19 nt, Artificial Sequence
  Description of Artificial Sequence: Synthetic oligonucleotide
  Antisense strand to SEQ ID NO: 2060134
uuuacagagagauuauccg

SEQ ID NO: 2060136 - RNA, 19 nt, Artificial Sequence
  Description of Artificial Sequence: Synthetic oligonucleotide
  Sense strand starting at position 1029 of SEQ ID NO: 1881639
cuagguaugguguaaggaa

SEQ ID NO: 2060137 - RNA, 19 nt, Artificial Sequence
  Description of Artificial Sequence: Synthetic oligonucleotide
  Antisense strand to SEQ ID NO: 2060136
uuccuuacaccauaccuag

SEQ ID NO: 2060138 - RNA, 19 nt, Artificial Sequence
  Description of Artificial Sequence: Synthetic oligonucleotide
  Sense strand starting at position 1086 of SEQ ID NO: 1881639
auccuauagguaugauuag

SEQ ID NO: 2060139 - RNA, 19 nt, Artificial Sequence
  Description of Artificial Sequence: Synthetic oligonucleotide
  Antisense strand to SEQ ID NO: 2060138
cuaaucauaccuauaggau

SEQ ID NO: 2060140 - RNA, 19 nt, Artificial Sequence
  Description of Artificial Sequence: Synthetic oligonucleotide
  Sense strand starting at position 1092 of SEQ ID NO: 1881639
uagguaugauuaguacuuu

SEQ ID NO: 2060141 - RNA, 19 nt, Artificial Sequence
  Description of Artificial Sequence: Synthetic oligonucleotide
  Antisense strand to SEQ ID NO: 2060140
aaaguacuaaucauaccua

SEQ ID NO: 2060142 - RNA, 19 nt, Artificial Sequence
  Description of Artificial Sequence: Synthetic oligonucleotide
  Sense strand starting at position 1387 of SEQ ID NO: 1881639
ucaagaugauagucugcuu

SEQ ID NO: 2060143 - RNA, 19 nt, Artificial Sequence
  Description of Artificial Sequence: Synthetic oligonucleotide
  Antisense strand to SEQ ID NO: 2060142
aagcagacuaucaucuuga

SEQ ID NO: 2060144 - RNA, 19 nt, Artificial Sequence
  Description of Artificial Sequence: Synthetic oligonucleotide
  Sense strand starting at position 1390 of SEQ ID NO: 1881639
agaugauagucugcuuaac

SEQ ID NO: 2060145 - RNA, 19 nt, Artificial Sequence
  Description of Artificial Sequence: Synthetic oligonucleotide
  Antisense strand to SEQ ID NO: 2060144
guuaagcagacuaucaucu

SEQ ID NO: 2060146 - RNA, 19 nt, Artificial Sequence
  Description of Artificial Sequence: Synthetic oligonucleotide
  Sense strand starting at position 1392 of SEQ ID NO: 1881639
augauagucugcuuaacau

SEQ ID NO: 2060147 - RNA, 19 nt, Artificial Sequence
  Description of Artificial Sequence: Synthetic oligonucleotide
  Antisense strand to SEQ ID NO: 2060146
auguuaagcagacuaucau

SEQ ID NO: 2060148 - RNA, 19 nt, Artificial Sequence
  Description of Artificial Sequence: Synthetic oligonucleotide
  Sense strand starting at position 1999 of SEQ ID NO: 1881639
gugacaugcccacagcaua

SEQ ID NO: 2060149 - RNA, 19 nt, Artificial Sequence
  Description of Artificial Sequence: Synthetic oligonucleotide
  Antisense strand to SEQ ID NO: 2060148
uaugcugugggcaugucac

SEQ ID NO: 2060150 - RNA, 19 nt, Artificial Sequence
  Description of Artificial Sequence: Synthetic oligonucleotide
  Sense strand starting at position 2104 of SEQ ID NO: 1881639
cacauauuccaggauacgu

SEQ ID NO: 2060151 - RNA, 19 nt, Artificial Sequence
  Description of Artificial Sequence: Synthetic oligonucleotide
  Antisense strand to SEQ ID NO: 2060150
acguauccuggaauaugug

SEQ ID NO: 2060152 - RNA, 19 nt, Artificial Sequence
  Description of Artificial Sequence: Synthetic oligonucleotide
  Sense strand starting at position 2112 of SEQ ID NO: 1881639
ccaggauacgugcaugauu

SEQ ID NO: 2060153 - RNA, 19 nt, Artificial Sequence
  Description of Artificial Sequence: Synthetic oligonucleotide
  Antisense strand to SEQ ID NO: 2060152
aaucaugcacguauccugg

SEQ ID NO: 2060154 - RNA, 19 nt, Artificial Sequence
  Description of Artificial Sequence: Synthetic oligonucleotide
  Sense strand starting at position 2114 of SEQ ID NO: 1881639
aggauacgugcaugauuaa

SEQ ID NO: 2060155 - RNA, 19 nt, Artificial Sequence
  Description of Artificial Sequence: Synthetic oligonucleotide
  Antisense strand to SEQ ID NO: 2060154
uuaaucaugcacguauccu

SEQ ID NO: 2060156 - RNA, 19 nt, Artificial Sequence
  Description of Artificial Sequence: Synthetic oligonucleotide
  Sense strand starting at position 2115 of SEQ ID NO: 1881639
ggauacgugcaugauuaag

SEQ ID NO: 2060157 - RNA, 19 nt, Artificial Sequence
  Description of Artificial Sequence: Synthetic oligonucleotide
  Antisense strand to SEQ ID NO: 2060156
cuuaaucaugcacguaucc

SEQ ID NO: 2060158 - RNA, 19 nt, Artificial Sequence
  Description of Artificial Sequence: Synthetic oligonucleotide
  Sense strand starting at position 2136 of SEQ ID NO: 1881639
agcuauauuuaugucagca

SEQ ID NO: 2060159 - RNA, 19 nt, Artificial Sequence
  Description of Artificial Sequence: Synthetic oligonucleotide
  Antisense strand to SEQ ID NO: 2060158
ugcugacauaaauauagcu

SEQ ID NO: 2060160 - RNA, 19 nt, Artificial Sequence
  Description of Artificial Sequence: Synthetic oligonucleotide
  Sense strand starting at position 2181 of SEQ ID NO: 1881639
agagucaucuuaucuaagg

SEQ ID NO: 2060161 - RNA, 19 nt, Artificial Sequence
  Description of Artificial Sequence: Synthetic oligonucleotide
  Antisense strand to SEQ ID NO: 2060160
ccuuagauaagaugacucu

SEQ ID NO: 2060162 - RNA, 19 nt, Artificial Sequence
  Description of Artificial Sequence: Synthetic oligonucleotide
  Sense strand starting at position 2182 of SEQ ID NO: 1881639
gagucaucuuaucuaagga

SEQ ID NO: 2060163 - RNA, 19 nt, Artificial Sequence
  Description of Artificial Sequence: Synthetic oligonucleotide
  Antisense strand to SEQ ID NO: 2060162
uccuuagauaagaugacuc

SEQ ID NO: 2060164 - RNA, 19 nt, Artificial Sequence
  Description of Artificial Sequence: Synthetic oligonucleotide
  Sense strand starting at position 2357 of SEQ ID NO: 1881639
gguuguauuucuccgguag

SEQ ID NO: 2060165 - RNA, 19 nt, Artificial Sequence
  Description of Artificial Sequence: Synthetic oligonucleotide
  Antisense strand to SEQ ID NO: 2060164
cuaccggagaaauacaacc

SEQ ID NO: 2060166 - RNA, 19 nt, Artificial Sequence
  Description of Artificial Sequence: Synthetic oligonucleotide
  Sense strand starting at position 2361 of SEQ ID NO: 1881639
guauuucuccgguagucag

SEQ ID NO: 2060167 - RNA, 19 nt, Artificial Sequence
  Description of Artificial Sequence: Synthetic oligonucleotide
  Antisense strand to SEQ ID NO: 2060166
cugacuaccggagaaauac

SEQ ID NO: 2060168 - RNA, 19 nt, Artificial Sequence
  Description of Artificial Sequence: Synthetic oligonucleotide
  Sense strand starting at position 2365 of SEQ ID NO: 1881639
uucuccgguagucagaaua

SEQ ID NO: 2060169 - RNA, 19 nt, Artificial Sequence
  Description of Artificial Sequence: Synthetic oligonucleotide
  Antisense strand to SEQ ID NO: 2060168
uauucugacuaccggagaa

SEQ ID NO: 2060170 - RNA, 19 nt, Artificial Sequence
  Description of Artificial Sequence: Synthetic oligonucleotide
  Sense strand starting at position 2376 of SEQ ID NO: 1881639
ucagaauagcaauagcgaa

SEQ ID NO: 2060171 - RNA, 19 nt, Artificial Sequence
  Description of Artificial Sequence: Synthetic oligonucleotide
  Antisense strand to SEQ ID NO: 2060170
uucgcuauugcuauucuga

SEQ ID NO: 2060172 - RNA, 19 nt, Artificial Sequence
  Description of Artificial Sequence: Synthetic oligonucleotide
  Sense strand starting at position 2409 of SEQ ID NO: 1881639
gaaugucuggaucauguuu

SEQ ID NO: 2060173 - RNA, 19 nt, Artificial Sequence
  Description of Artificial Sequence: Synthetic oligonucleotide
  Antisense strand to SEQ ID NO: 2060172
aaacaugauccagacauuc

SEQ ID NO: 2060174 - RNA, 19 nt, Artificial Sequence
  Description of Artificial Sequence: Synthetic oligonucleotide
  Sense strand starting at position 2436 of SEQ ID NO: 1881639
aguaacacuucugcagaaa

SEQ ID NO: 2060175 - RNA, 19 nt, Artificial Sequence
  Description of Artificial Sequence: Synthetic oligonucleotide
  Antisense strand to SEQ ID NO: 2060174
uuucugcagaaguguuacu

SEQ ID NO: 2060176 - RNA, 19 nt, Artificial Sequence
  Description of Artificial Sequence: Synthetic oligonucleotide
  Sense strand starting at position 2437 of SEQ ID NO: 1881639
guaacacuucugcagaaau

SEQ ID NO: 2060177 - RNA, 19 nt, Artificial Sequence
  Description of Artificial Sequence: Synthetic oligonucleotide
  Antisense strand to SEQ ID NO: 2060176
auuucugcagaaguguuac

SEQ ID NO: 2060178 - RNA, 19 nt, Artificial Sequence
  Description of Artificial Sequence: Synthetic oligonucleotide
  Sense strand starting at position 2503 of SEQ ID NO: 1881639
aucggaaauucugcaaacu

SEQ ID NO: 2060179 - RNA, 19 nt, Artificial Sequence
  Description of Artificial Sequence: Synthetic oligonucleotide
  Antisense strand to SEQ ID NO: 2060178
aguuugcagaauuuccgau

SEQ ID NO: 2060180 - RNA, 19 nt, Artificial Sequence
  Description of Artificial Sequence: Synthetic oligonucleotide
  Sense strand starting at position 2525 of SEQ ID NO: 1881639
agugcaaauuguguuauuu

SEQ ID NO: 2060181 - RNA, 19 nt, Artificial Sequence
  Description of Artificial Sequence: Synthetic oligonucleotide
  Antisense strand to SEQ ID NO: 2060180
aaauaacacaauuugcacu

SEQ ID NO: 2060182 - RNA, 19 nt, Artificial Sequence
  Description of Artificial Sequence: Synthetic oligonucleotide
  Sense strand starting at position 2745 of SEQ ID NO: 1881639
uuaucugagguuugagagu

SEQ ID NO: 2060183 - RNA, 19 nt, Artificial Sequence
  Description of Artificial Sequence: Synthetic oligonucleotide
  Antisense strand to SEQ ID NO: 2060182
acucucaaaccucagauaa

SEQ ID NO: 2060184 - RNA, 19 nt, Artificial Sequence
  Description of Artificial Sequence: Synthetic oligonucleotide
  Sense strand starting at position 2809 of SEQ ID NO: 1881639
auugcaaugcaauauuaga

SEQ ID NO: 2060185 - RNA, 19 nt, Artificial Sequence
  Description of Artificial Sequence: Synthetic oligonucleotide
  Antisense strand to SEQ ID NO: 2060184
ucuaauauugcauugcaau

SEQ ID NO: 2060186 - RNA, 19 nt, Artificial Sequence
  Description of Artificial Sequence: Synthetic oligonucleotide
  Sense strand starting at position 2835 of SEQ ID NO: 1881639
ccaaauaagugugauuuau

SEQ ID NO: 2060187 - RNA, 19 nt, Artificial Sequence
  Description of Artificial Sequence: Synthetic oligonucleotide
  Antisense strand to SEQ ID NO: 2060186
auaaaucacacuuauuugg

SEQ ID NO: 2060188 - RNA, 19 nt, Artificial Sequence
  Description of Artificial Sequence: Synthetic oligonucleotide
  Sense strand starting at position 2844 of SEQ ID NO: 1881639
ugugauuuauggguauugu

SEQ ID NO: 2060189 - RNA, 19 nt, Artificial Sequence
  Description of Artificial Sequence: Synthetic oligonucleotide
  Antisense strand to SEQ ID NO: 2060188
acaauacccauaaaucaca

SEQ ID NO: 2060190 - RNA, 19 nt, Artificial Sequence
  Description of Artificial Sequence: Synthetic oligonucleotide
  Sense strand starting at position 2906 of SEQ ID NO: 1881639
gggcucaccacaugagaaa

SEQ ID NO: 2060191 - RNA, 19 nt, Artificial Sequence
  Description of Artificial Sequence: Synthetic oligonucleotide
  Antisense strand to SEQ ID NO: 2060190
uuucucauguggugagccc

SEQ ID NO: 2060192 - RNA, 19 nt, Artificial Sequence
  Description of Artificial Sequence: Synthetic oligonucleotide
  Sense strand starting at position 2934 of SEQ ID NO: 1881639
ccuucuagcuugucaaaga

SEQ ID NO: 2060193 - RNA, 19 nt, Artificial Sequence
  Description of Artificial Sequence: Synthetic oligonucleotide
  Antisense strand to SEQ ID NO: 2060192
ucuuugacaagcuagaagg

SEQ ID NO: 2060194 - RNA, 19 nt, Artificial Sequence
  Description of Artificial Sequence: Synthetic oligonucleotide
  Sense strand starting at position 2964 of SEQ ID NO: 1881639
auugaaagaguuuguagua

SEQ ID NO: 2060195 - RNA, 19 nt, Artificial Sequence
  Description of Artificial Sequence: Synthetic oligonucleotide
  Antisense strand to SEQ ID NO: 2060194
uacuacaaacucuuucaau

SEQ ID NO: 2060196 - RNA, 19 nt, Artificial Sequence
  Description of Artificial Sequence: Synthetic oligonucleotide
  Sense strand starting at position 2965 of SEQ ID NO: 1881639
uugaaagaguuuguaguaa

SEQ ID NO: 2060197 - RNA, 19 nt, Artificial Sequence
  Description of Artificial Sequence: Synthetic oligonucleotide
  Antisense strand to SEQ ID NO: 2060196
uuacuacaaacucuuucaa

SEQ ID NO: 2060198 - RNA, 19 nt, Artificial Sequence
  Description of Artificial Sequence: Synthetic oligonucleotide
  Sense strand starting at position 3401 of SEQ ID NO: 1881639
uuucuugagucucuauaag

SEQ ID NO: 2060199 - RNA, 19 nt, Artificial Sequence
  Description of Artificial Sequence: Synthetic oligonucleotide
  Antisense strand to SEQ ID NO: 2060198
cuuauagagacucaagaaa

SEQ ID NO: 2060200 - RNA, 19 nt, Artificial Sequence
  Description of Artificial Sequence: Synthetic oligonucleotide
  Sense strand starting at position 3525 of SEQ ID NO: 1881639
agucaucacuuugugaauu

SEQ ID NO: 2060201 - RNA, 19 nt, Artificial Sequence
  Description of Artificial Sequence: Synthetic oligonucleotide
  Antisense strand to SEQ ID NO: 2060200
aauucacaaagugaugacu

SEQ ID NO: 2060202 - RNA, 19 nt, Artificial Sequence
  Description of Artificial Sequence: Synthetic oligonucleotide
  Sense strand starting at position 3943 of SEQ ID NO: 1881639
caguaaauggaaugugaau

SEQ ID NO: 2060203 - RNA, 19 nt, Artificial Sequence
  Description of Artificial Sequence: Synthetic oligonucleotide
  Antisense strand to SEQ ID NO: 2060202
auucacauuccauuuacug

SEQ ID NO: 2060204 - RNA, 19 nt, Artificial Sequence
  Description of Artificial Sequence: Synthetic oligonucleotide
  Sense strand starting at position 3945 of SEQ ID NO: 1881639
guaaauggaaugugaauau

SEQ ID NO: 2060205 - RNA, 19 nt, Artificial Sequence
  Description of Artificial Sequence: Synthetic oligonucleotide
  Antisense strand to SEQ ID NO: 2060204
auauucacauuccauuuac

SEQ ID NO: 2060206 - RNA, 19 nt, Artificial Sequence
  Description of Artificial Sequence: Synthetic oligonucleotide
  Sense strand starting at position 19 of SEQ ID NO: 1881640
cuccucuaacaucgggauu

SEQ ID NO: 2060207 - RNA, 19 nt, Artificial Sequence
  Description of Artificial Sequence: Synthetic oligonucleotide
  Antisense strand to SEQ ID NO: 2060206
aaucccgauguuagaggag

SEQ ID NO: 2060208 - RNA, 19 nt, Artificial Sequence
  Description of Artificial Sequence: Synthetic oligonucleotide
  Sense strand starting at position 53 of SEQ ID NO: 1881640
ccaaacuugugagcaauua

SEQ ID NO: 2060209 - RNA, 19 nt, Artificial Sequence
  Description of Artificial Sequence: Synthetic oligonucleotide
  Antisense strand to SEQ ID NO: 2060208
uaauugcucacaaguuugg

SEQ ID NO: 2060210 - RNA, 19 nt, Artificial Sequence
  Description of Artificial Sequence: Synthetic oligonucleotide
  Sense strand starting at position 61 of SEQ ID NO: 1881640
gugagcaauuaccuaaauu

SEQ ID NO: 2060211 - RNA, 19 nt, Artificial Sequence
  Description of Artificial Sequence: Synthetic oligonucleotide
  Antisense strand to SEQ ID NO: 2060210
aauuuagguaauugcucac

SEQ ID NO: 2060212 - RNA, 19 nt, Artificial Sequence
  Description of Artificial Sequence: Synthetic oligonucleotide
  Sense strand starting at position 71 of SEQ ID NO: 1881640
accuaaauuuaugaggcua

SEQ ID NO: 2060213 - RNA, 19 nt, Artificial Sequence
  Description of Artificial Sequence: Synthetic oligonucleotide
  Antisense strand to SEQ ID NO: 2060212
uagccucauaaauuuaggu

SEQ ID NO: 2060214 - RNA, 19 nt, Artificial Sequence
  Description of Artificial Sequence: Synthetic oligonucleotide
  Sense strand starting at position 73 of SEQ ID NO: 1881640
cuaaauuuaugaggcuaga

SEQ ID NO: 2060215 - RNA, 19 nt, Artificial Sequence
  Description of Artificial Sequence: Synthetic oligonucleotide
  Antisense strand to SEQ ID NO: 2060214
ucuagccucauaaauuuag

SEQ ID NO: 2060216 - RNA, 19 nt, Artificial Sequence
  Description of Artificial Sequence: Synthetic oligonucleotide
  Sense strand starting at position 126 of SEQ ID NO: 1881640
agguaagaacaaugcuaug

SEQ ID NO: 2060217 - RNA, 19 nt, Artificial Sequence
  Description of Artificial Sequence: Synthetic oligonucleotide
  Antisense strand to SEQ ID NO: 2060216
cauagcauuguucuuaccu

SEQ ID NO: 2060218 - RNA, 19 nt, Artificial Sequence
  Description of Artificial Sequence: Synthetic oligonucleotide
  Sense strand starting at position 215 of SEQ ID NO: 1881640
gacagauacuccuucugug

SEQ ID NO: 2060219 - RNA, 19 nt, Artificial Sequence
  Description of Artificial Sequence: Synthetic oligonucleotide
  Antisense strand to SEQ ID NO: 2060218
cacagaaggaguaucuguc

SEQ ID NO: 2060220 - RNA, 19 nt, Artificial Sequence
  Description of Artificial Sequence: Synthetic oligonucleotide
  Sense strand starting at position 241 of SEQ ID NO: 1881640
uugugaaccuucuuaggcu

SEQ ID NO: 2060221 - RNA, 19 nt, Artificial Sequence
  Description of Artificial Sequence: Synthetic oligonucleotide
  Antisense strand to SEQ ID NO: 2060220
agccuaagaagguucacaa

SEQ ID NO: 2060222 - RNA, 19 nt, Artificial Sequence
  Description of Artificial Sequence: Synthetic oligonucleotide
  Sense strand starting at position 256 of SEQ ID NO: 1881640
ggcucaaugcaaugaaaua

SEQ ID NO: 2060223 - RNA, 19 nt, Artificial Sequence
  Description of Artificial Sequence: Synthetic oligonucleotide
  Antisense strand to SEQ ID NO: 2060222
uauuucauugcauugagcc

SEQ ID NO: 2060224 - RNA, 19 nt, Artificial Sequence
  Description of Artificial Sequence: Synthetic oligonucleotide
  Sense strand starting at position 315 of SEQ ID NO: 1881640
uuuccuaguuugguugaaa

SEQ ID NO: 2060225 - RNA, 19 nt, Artificial Sequence
  Description of Artificial Sequence: Synthetic oligonucleotide
  Antisense strand to SEQ ID NO: 2060224
uuucaaccaaacuaggaaa

SEQ ID NO: 2060226 - RNA, 19 nt, Artificial Sequence
  Description of Artificial Sequence: Synthetic oligonucleotide
  Sense strand starting at position 316 of SEQ ID NO: 1881640
uuccuaguuugguugaaau

SEQ ID NO: 2060227 - RNA, 19 nt, Artificial Sequence
  Description of Artificial Sequence: Synthetic oligonucleotide
  Antisense strand to SEQ ID NO: 2060226
auuucaaccaaacuaggaa

SEQ ID NO: 2060228 - RNA, 19 nt, Artificial Sequence
  Description of Artificial Sequence: Synthetic oligonucleotide
  Sense strand starting at position 318 of SEQ ID NO: 1881640
ccuaguuugguugaaauaa

SEQ ID NO: 2060229 - RNA, 19 nt, Artificial Sequence
  Description of Artificial Sequence: Synthetic oligonucleotide
  Antisense strand to SEQ ID NO: 2060228
uuauuucaaccaaacuagg

SEQ ID NO: 2060230 - RNA, 19 nt, Artificial Sequence
  Description of Artificial Sequence: Synthetic oligonucleotide
  Sense strand starting at position 374 of SEQ ID NO: 1881640
acaagugacuuuccagaag

SEQ ID NO: 2060231 - RNA, 19 nt, Artificial Sequence
  Description of Artificial Sequence: Synthetic oligonucleotide
  Antisense strand to SEQ ID NO: 2060230
cuucuggaaagucacuugu

SEQ ID NO: 2060232 - RNA, 19 nt, Artificial Sequence
  Description of Artificial Sequence: Synthetic oligonucleotide
  Sense strand starting at position 446 of SEQ ID NO: 1881640
ggugaugaaacuugaguua

SEQ ID NO: 2060233 - RNA, 19 nt, Artificial Sequence
  Description of Artificial Sequence: Synthetic oligonucleotide
  Antisense strand to SEQ ID NO: 2060232
uaacucaaguuucaucacc

SEQ ID NO: 2060234 - RNA, 19 nt, Artificial Sequence
  Description of Artificial Sequence: Synthetic oligonucleotide
  Sense strand starting at position 449 of SEQ ID NO: 1881640
gaugaaacuugaguuauca

SEQ ID NO: 2060235 - RNA, 19 nt, Artificial Sequence
  Description of Artificial Sequence: Synthetic oligonucleotide
  Antisense strand to SEQ ID NO: 2060234
ugauaacucaaguuucauc

SEQ ID NO: 2060236 - RNA, 19 nt, Artificial Sequence
  Description of Artificial Sequence: Synthetic oligonucleotide
  Sense strand starting at position 497 of SEQ ID NO: 1881640
agaauagaaucuguaaggu

SEQ ID NO: 2060237 - RNA, 19 nt, Artificial Sequence
  Description of Artificial Sequence: Synthetic oligonucleotide
  Antisense strand to SEQ ID NO: 2060236
accuuacagauucuauucu

SEQ ID NO: 2060238 - RNA, 19 nt, Artificial Sequence
  Description of Artificial Sequence: Synthetic oligonucleotide
  Sense strand starting at position 1244 of SEQ ID NO: 1881640
uugcuuguucuauaaacug

SEQ ID NO: 2060239 - RNA, 19 nt, Artificial Sequence
  Description of Artificial Sequence: Synthetic oligonucleotide
  Antisense strand to SEQ ID NO: 2060238
caguuuauagaacaagcaa

SEQ ID NO: 2060240 - RNA, 19 nt, Artificial Sequence
  Description of Artificial Sequence: Synthetic oligonucleotide
  Sense strand starting at position 1435 of SEQ ID NO: 1881640
aggaaagggugcuuuguga

SEQ ID NO: 2060241 - RNA, 19 nt, Artificial Sequence
  Description of Artificial Sequence: Synthetic oligonucleotide
  Antisense strand to SEQ ID NO: 2060240
ucacaaagcacccuuuccu

SEQ ID NO: 2060242 - RNA, 19 nt, Artificial Sequence
  Description of Artificial Sequence: Synthetic oligonucleotide
  Sense strand starting at position 1491 of SEQ ID NO: 1881640
uuccgcguugcucucaaua

SEQ ID NO: 2060243 - RNA, 19 nt, Artificial Sequence
  Description of Artificial Sequence: Synthetic oligonucleotide
  Antisense strand to SEQ ID NO: 2060242
uauugagagcaacgcggaa

SEQ ID NO: 2060244 - RNA, 19 nt, Artificial Sequence
  Description of Artificial Sequence: Synthetic oligonucleotide
  Sense strand starting at position 1501 of SEQ ID NO: 1881640
cucucaauaccucguggau

SEQ ID NO: 2060245 - RNA, 19 nt, Artificial Sequence
  Description of Artificial Sequence: Synthetic oligonucleotide
  Antisense strand to SEQ ID NO: 2060244
auccacgagguauugagag

SEQ ID NO: 2060246 - RNA, 19 nt, Artificial Sequence
  Description of Artificial Sequence: Synthetic oligonucleotide
  Sense strand starting at position 1514 of SEQ ID NO: 1881640
guggaucucugcuucucua

SEQ ID NO: 2060247 - RNA, 19 nt, Artificial Sequence
  Description of Artificial Sequence: Synthetic oligonucleotide
  Antisense strand to SEQ ID NO: 2060246
uagagaagcagagauccac

SEQ ID NO: 2060248 - RNA, 19 nt, Artificial Sequence
  Description of Artificial Sequence: Synthetic oligonucleotide
  Sense strand starting at position 1522 of SEQ ID NO: 1881640
cugcuucucuaagucugaa

SEQ ID NO: 2060249 - RNA, 19 nt, Artificial Sequence
  Description of Artificial Sequence: Synthetic oligonucleotide
  Antisense strand to SEQ ID NO: 2060248
uucagacuuagagaagcag

SEQ ID NO: 2060250 - RNA, 19 nt, Artificial Sequence
  Description of Artificial Sequence: Synthetic oligonucleotide
  Sense strand starting at position 1583 of SEQ ID NO: 1881640
auggauguuuccuuccagu

SEQ ID NO: 2060251 - RNA, 19 nt, Artificial Sequence
  Description of Artificial Sequence: Synthetic oligonucleotide
  Antisense strand to SEQ ID NO: 2060250
acuggaaggaaacauccau

SEQ ID NO: 2060252 - RNA, 19 nt, Artificial Sequence
  Description of Artificial Sequence: Synthetic oligonucleotide
  Sense strand starting at position 1716 of SEQ ID NO: 1881640
gaacauaccugcgcuaaga

SEQ ID NO: 2060253 - RNA, 19 nt, Artificial Sequence
  Description of Artificial Sequence: Synthetic oligonucleotide
  Antisense strand to SEQ ID NO: 2060252
ucuuagcgcagguauguuc

SEQ ID NO: 2060254 - RNA, 19 nt, Artificial Sequence
  Description of Artificial Sequence: Synthetic oligonucleotide
  Sense strand starting at position 2259 of SEQ ID NO: 1881640
agccaaucccgggaagacu

SEQ ID NO: 2060255 - RNA, 19 nt, Artificial Sequence
  Description of Artificial Sequence: Synthetic oligonucleotide
  Antisense strand to SEQ ID NO: 2060254
agucuucccgggauuggcu

SEQ ID NO: 2060256 - RNA, 19 nt, Artificial Sequence
  Description of Artificial Sequence: Synthetic oligonucleotide
  Sense strand starting at position 2267 of SEQ ID NO: 1881640
ccgggaagacucugggcaa

SEQ ID NO: 2060257 - RNA, 19 nt, Artificial Sequence
  Description of Artificial Sequence: Synthetic oligonucleotide
  Antisense strand to SEQ ID NO: 2060256
uugcccagagucuucccgg

SEQ ID NO: 2060258 - RNA, 19 nt, Artificial Sequence
  Description of Artificial Sequence: Synthetic oligonucleotide
  Sense strand starting at position 2491 of SEQ ID NO: 1881640
ggagcauccuucucugaau

SEQ ID NO: 2060259 - RNA, 19 nt, Artificial Sequence
  Description of Artificial Sequence: Synthetic oligonucleotide
  Antisense strand to SEQ ID NO: 2060258
auucagagaaggaugcucc

SEQ ID NO: 2060260 - RNA, 19 nt, Artificial Sequence
  Description of Artificial Sequence: Synthetic oligonucleotide
  Sense strand starting at position 2623 of SEQ ID NO: 1881640
ggccuaaggcccugggauu

SEQ ID NO: 2060261 - RNA, 19 nt, Artificial Sequence
  Description of Artificial Sequence: Synthetic oligonucleotide
  Antisense strand to SEQ ID NO: 2060260
aaucccagggccuuaggcc

SEQ ID NO: 2060262 - RNA, 19 nt, Artificial Sequence
  Description of Artificial Sequence: Synthetic oligonucleotide
  Sense strand starting at position 2636 of SEQ ID NO: 1881640
gggauucccuuucuuaaag

SEQ ID NO: 2060263 - RNA, 19 nt, Artificial Sequence
  Description of Artificial Sequence: Synthetic oligonucleotide
  Antisense strand to SEQ ID NO: 2060262
cuuuaagaaagggaauccc

SEQ ID NO: 2060264 - RNA, 19 nt, Artificial Sequence
  Description of Artificial Sequence: Synthetic oligonucleotide
  Sense strand starting at position 2890 of SEQ ID NO: 1881640
agguaacaggcucaaacuu

SEQ ID NO: 2060265 - RNA, 19 nt, Artificial Sequence
  Description of Artificial Sequence: Synthetic oligonucleotide
  Antisense strand to SEQ ID NO: 2060264
aaguuugagccuguuaccu

SEQ ID NO: 2060266 - RNA, 19 nt, Artificial Sequence
  Description of Artificial Sequence: Synthetic oligonucleotide
  Sense strand starting at position 2898 of SEQ ID NO: 1881640
ggcucaaacuuggcaaaca

SEQ ID NO: 2060267 - RNA, 19 nt, Artificial Sequence
  Description of Artificial Sequence: Synthetic oligonucleotide
  Antisense strand to SEQ ID NO: 2060266
uguuugccaaguuugagcc

SEQ ID NO: 2060268 - RNA, 19 nt, Artificial Sequence
  Description of Artificial Sequence: Synthetic oligonucleotide
  Sense strand starting at position 3205 of SEQ ID NO: 1881640
agccuacacuugguuaaca

SEQ ID NO: 2060269 - RNA, 19 nt, Artificial Sequence
  Description of Artificial Sequence: Synthetic oligonucleotide
  Antisense strand to SEQ ID NO: 2060268
uguuaaccaaguguaggcu

SEQ ID NO: 2060270 - RNA, 19 nt, Artificial Sequence
  Description of Artificial Sequence: Synthetic oligonucleotide
  Sense strand starting at position 3247 of SEQ ID NO: 1881640
ggguguggcuuuguaaaca

SEQ ID NO: 2060271 - RNA, 19 nt, Artificial Sequence
  Description of Artificial Sequence: Synthetic oligonucleotide
  Antisense strand to SEQ ID NO: 2060270
uguuuacaaagccacaccc

SEQ ID NO: 2060272 - RNA, 19 nt, Artificial Sequence
  Description of Artificial Sequence: Synthetic oligonucleotide
  Sense strand starting at position 3308 of SEQ ID NO: 1881640
ggcuuuaccuguuuaagga

SEQ ID NO: 2060273 - RNA, 19 nt, Artificial Sequence
  Description of Artificial Sequence: Synthetic oligonucleotide
  Antisense strand to SEQ ID NO: 2060272
uccuuaaacagguaaagcc

SEQ ID NO: 2060274 - RNA, 19 nt, Artificial Sequence
  Description of Artificial Sequence: Synthetic oligonucleotide
  Sense strand starting at position 3597 of SEQ ID NO: 1881640
gaguuuauacuuugugcua

SEQ ID NO: 2060275 - RNA, 19 nt, Artificial Sequence
  Description of Artificial Sequence: Synthetic oligonucleotide
  Antisense strand to SEQ ID NO: 2060274
uagcacaaaguauaaacuc

SEQ ID NO: 2060276 - RNA, 19 nt, Artificial Sequence
  Description of Artificial Sequence: Synthetic oligonucleotide
  Sense strand starting at position 3600 of SEQ ID NO: 1881640
uuuauacuuugugcuaaga

SEQ ID NO: 2060277 - RNA, 19 nt, Artificial Sequence
  Description of Artificial Sequence: Synthetic oligonucleotide
  Antisense strand to SEQ ID NO: 2060276
ucuuagcacaaaguauaaa

SEQ ID NO: 2060278 - RNA, 19 nt, Artificial Sequence
  Description of Artificial Sequence: Synthetic oligonucleotide
  Sense strand starting at position 3622 of SEQ ID NO: 1881640
auggaaagcuguucaagug

SEQ ID NO: 2060279 - RNA, 19 nt, Artificial Sequence
  Description of Artificial Sequence: Synthetic oligonucleotide
  Antisense strand to SEQ ID NO: 2060278
cacuugaacagcuuuccau

SEQ ID NO: 2060280 - RNA, 19 nt, Artificial Sequence
  Description of Artificial Sequence: Synthetic oligonucleotide
  Sense strand starting at position 3623 of SEQ ID NO: 1881640
uggaaagcuguucaagugu

SEQ ID NO: 2060281 - RNA, 19 nt, Artificial Sequence
  Description of Artificial Sequence: Synthetic oligonucleotide
  Antisense strand to SEQ ID NO: 2060280
acacuugaacagcuuucca

SEQ ID NO: 2060282 - RNA, 19 nt, Artificial Sequence
  Description of Artificial Sequence: Synthetic oligonucleotide
  Sense strand starting at position 3706 of SEQ ID NO: 1881640
gugugguuucgggugugau

SEQ ID NO: 2060283 - RNA, 19 nt, Artificial Sequence
  Description of Artificial Sequence: Synthetic oligonucleotide
  Antisense strand to SEQ ID NO: 2060282
aucacacccgaaaccacac

SEQ ID NO: 2060284 - RNA, 19 nt, Artificial Sequence
  Description of Artificial Sequence: Synthetic oligonucleotide
  Sense strand starting at position 3878 of SEQ ID NO: 1881640
acauaucucuaguuggaau

SEQ ID NO: 2060285 - RNA, 19 nt, Artificial Sequence
  Description of Artificial Sequence: Synthetic oligonucleotide
  Antisense strand to SEQ ID NO: 2060284
auuccaacuagagauaugu

SEQ ID NO: 2060286 - RNA, 19 nt, Artificial Sequence
  Description of Artificial Sequence: Synthetic oligonucleotide
  Sense strand starting at position 237 of SEQ ID NO: 1881641
guugaauaccaguagugaa

SEQ ID NO: 2060287 - RNA, 19 nt, Artificial Sequence
  Description of Artificial Sequence: Synthetic oligonucleotide
  Antisense strand to SEQ ID NO: 2060286
uucacuacugguauucaac

SEQ ID NO: 2060288 - RNA, 19 nt, Artificial Sequence
  Description of Artificial Sequence: Synthetic oligonucleotide
  Sense strand starting at position 456 of SEQ ID NO: 1881641
uugaaaugaucaucugguu

SEQ ID NO: 2060289 - RNA, 19 nt, Artificial Sequence
  Description of Artificial Sequence: Synthetic oligonucleotide
  Antisense strand to SEQ ID NO: 2060288
aaccagaugaucauuucaa

SEQ ID NO: 2060290 - RNA, 19 nt, Artificial Sequence
  Description of Artificial Sequence: Synthetic oligonucleotide
  Sense strand starting at position 566 of SEQ ID NO: 1881641
ugugaugaaugaucuuguu

SEQ ID NO: 2060291 - RNA, 19 nt, Artificial Sequence
  Description of Artificial Sequence: Synthetic oligonucleotide
  Antisense strand to SEQ ID NO: 2060290
aacaagaucauucaucaca

SEQ ID NO: 2060292 - RNA, 19 nt, Artificial Sequence
  Description of Artificial Sequence: Synthetic oligonucleotide
  Sense strand starting at position 820 of SEQ ID NO: 1881641
uggaaucauuuacaguauu

SEQ ID NO: 2060293 - RNA, 19 nt, Artificial Sequence
  Description of Artificial Sequence: Synthetic oligonucleotide
  Antisense strand to SEQ ID NO: 2060292
aauacuguaaaugauucca

SEQ ID NO: 2060294 - RNA, 19 nt, Artificial Sequence
  Description of Artificial Sequence: Synthetic oligonucleotide
  Sense strand starting at position 962 of SEQ ID NO: 1881641
auuugaguuuauguagcua

SEQ ID NO: 2060295 - RNA, 19 nt, Artificial Sequence
  Description of Artificial Sequence: Synthetic oligonucleotide
  Antisense strand to SEQ ID NO: 2060294
uagcuacauaaacucaaau

SEQ ID NO: 2060296 - RNA, 19 nt, Artificial Sequence
  Description of Artificial Sequence: Synthetic oligonucleotide
  Sense strand starting at position 1018 of SEQ ID NO: 1881641
cuaauaagaguuuaggcau

SEQ ID NO: 2060297 - RNA, 19 nt, Artificial Sequence
  Description of Artificial Sequence: Synthetic oligonucleotide
  Antisense strand to SEQ ID NO: 2060296
augccuaaacucuuauuag

SEQ ID NO: 2060298 - RNA, 19 nt, Artificial Sequence
  Description of Artificial Sequence: Synthetic oligonucleotide
  Sense strand starting at position 1021 of SEQ ID NO: 1881641
auaagaguuuaggcaugaa

SEQ ID NO: 2060299 - RNA, 19 nt, Artificial Sequence
  Description of Artificial Sequence: Synthetic oligonucleotide
  Antisense strand to SEQ ID NO: 2060298
uucaugccuaaacucuuau

SEQ ID NO: 2060300 - RNA, 19 nt, Artificial Sequence
  Description of Artificial Sequence: Synthetic oligonucleotide
  Sense strand starting at position 1046 of SEQ ID NO: 1881641
uaagaaaggcguugguaga

SEQ ID NO: 2060301 - RNA, 19 nt, Artificial Sequence
  Description of Artificial Sequence: Synthetic oligonucleotide
  Antisense strand to SEQ ID NO: 2060300
ucuaccaacgccuuucuua

SEQ ID NO: 2060302 - RNA, 19 nt, Artificial Sequence
  Description of Artificial Sequence: Synthetic oligonucleotide
  Sense strand starting at position 1073 of SEQ ID NO: 1881641
gagagaauuugcugaaaua

SEQ ID NO: 2060303 - RNA, 19 nt, Artificial Sequence
  Description of Artificial Sequence: Synthetic oligonucleotide
  Antisense strand to SEQ ID NO: 2060302
uauuucagcaaauucucuc

SEQ ID NO: 2060304 - RNA, 19 nt, Artificial Sequence
  Description of Artificial Sequence: Synthetic oligonucleotide
  Sense strand starting at position 1091 of SEQ ID NO: 1881641
auuuaaugccaugguucuu

SEQ ID NO: 2060305 - RNA, 19 nt, Artificial Sequence
  Description of Artificial Sequence: Synthetic oligonucleotide
  Antisense strand to SEQ ID NO: 2060304
aagaaccauggcauuaaau

SEQ ID NO: 2060306 - RNA, 19 nt, Artificial Sequence
  Description of Artificial Sequence: Synthetic oligonucleotide
  Sense strand starting at position 1105 of SEQ ID NO: 1881641
uucuuuagggugcaucaga

SEQ ID NO: 2060307 - RNA, 19 nt, Artificial Sequence
  Description of Artificial Sequence: Synthetic oligonucleotide
  Antisense strand to SEQ ID NO: 2060306
ucugaugcacccuaaagaa

SEQ ID NO: 2060308 - RNA, 19 nt, Artificial Sequence
  Description of Artificial Sequence: Synthetic oligonucleotide
  Sense strand starting at position 1145 of SEQ ID NO: 1881641
aucagauugcuaggcucaa

SEQ ID NO: 2060309 - RNA, 19 nt, Artificial Sequence
  Description of Artificial Sequence: Synthetic oligonucleotide
  Antisense strand to SEQ ID NO: 2060308
uugagccuagcaaucugau

SEQ ID NO: 2060310 - RNA, 19 nt, Artificial Sequence
  Description of Artificial Sequence: Synthetic oligonucleotide
  Sense strand starting at position 1146 of SEQ ID NO: 1881641
ucagauugcuaggcucaaa

SEQ ID NO: 2060311 - RNA, 19 nt, Artificial Sequence
  Description of Artificial Sequence: Synthetic oligonucleotide
  Antisense strand to SEQ ID NO: 2060310
uuugagccuagcaaucuga

SEQ ID NO: 2060312 - RNA, 19 nt, Artificial Sequence
  Description of Artificial Sequence: Synthetic oligonucleotide
  Sense strand starting at position 1219 of SEQ ID NO: 1881641
ccagaaguuccugggcaug

SEQ ID NO: 2060313 - RNA, 19 nt, Artificial Sequence
  Description of Artificial Sequence: Synthetic oligonucleotide
  Antisense strand to SEQ ID NO: 2060312
caugcccaggaacuucugg

SEQ ID NO: 2060314 - RNA, 19 nt, Artificial Sequence
  Description of Artificial Sequence: Synthetic oligonucleotide
  Sense strand starting at position 1221 of SEQ ID NO: 1881641
agaaguuccugggcaugau

SEQ ID NO: 2060315 - RNA, 19 nt, Artificial Sequence
  Description of Artificial Sequence: Synthetic oligonucleotide
  Antisense strand to SEQ ID NO: 2060314
aucaugcccaggaacuucu

SEQ ID NO: 2060316 - RNA, 19 nt, Artificial Sequence
  Description of Artificial Sequence: Synthetic oligonucleotide
  Sense strand starting at position 1282 of SEQ ID NO: 1881641
agaggauucuaauugccaa

SEQ ID NO: 2060317 - RNA, 19 nt, Artificial Sequence
  Description of Artificial Sequence: Synthetic oligonucleotide
  Antisense strand to SEQ ID NO: 2060316
uuggcaauuagaauccucu

SEQ ID NO: 2060318 - RNA, 19 nt, Artificial Sequence
  Description of Artificial Sequence: Synthetic oligonucleotide
  Sense strand starting at position 1304 of SEQ ID NO: 1881641
uuucccaucgugcaaagaa

SEQ ID NO: 2060319 - RNA, 19 nt, Artificial Sequence
  Description of Artificial Sequence: Synthetic oligonucleotide
  Antisense strand to SEQ ID NO: 2060318
uucuuugcacgaugggaaa

SEQ ID NO: 2060320 - RNA, 19 nt, Artificial Sequence
  Description of Artificial Sequence: Synthetic oligonucleotide
  Sense strand starting at position 1340 of SEQ ID NO: 1881641
agacaagaagcuugaaguu

SEQ ID NO: 2060321 - RNA, 19 nt, Artificial Sequence
  Description of Artificial Sequence: Synthetic oligonucleotide
  Antisense strand to SEQ ID NO: 2060320
aacuucaagcuucuugucu

SEQ ID NO: 2060322 - RNA, 19 nt, Artificial Sequence
  Description of Artificial Sequence: Synthetic oligonucleotide
  Sense strand starting at position 1514 of SEQ ID NO: 1881641
aagugugugagcuaaguga

SEQ ID NO: 2060323 - RNA, 19 nt, Artificial Sequence
  Description of Artificial Sequence: Synthetic oligonucleotide
  Antisense strand to SEQ ID NO: 2060322
ucacuuagcucacacacuu

SEQ ID NO: 2060324 - RNA, 19 nt, Artificial Sequence
  Description of Artificial Sequence: Synthetic oligonucleotide
  Sense strand starting at position 1589 of SEQ ID NO: 1881641
ggagaaggucacuggagua

SEQ ID NO: 2060325 - RNA, 19 nt, Artificial Sequence
  Description of Artificial Sequence: Synthetic oligonucleotide
  Antisense strand to SEQ ID NO: 2060324
uacuccagugaccuucucc

SEQ ID NO: 2060326 - RNA, 19 nt, Artificial Sequence
  Description of Artificial Sequence: Synthetic oligonucleotide
  Sense strand starting at position 1619 of SEQ ID NO: 1881641
gcucaauuucgaggucucu

SEQ ID NO: 2060327 - RNA, 19 nt, Artificial Sequence
  Description of Artificial Sequence: Synthetic oligonucleotide
  Antisense strand to SEQ ID NO: 2060326
agagaccucgaaauugagc

SEQ ID NO: 2060328 - RNA, 19 nt, Artificial Sequence
  Description of Artificial Sequence: Synthetic oligonucleotide
  Sense strand starting at position 1625 of SEQ ID NO: 1881641
uuucgaggucucuagaggu

SEQ ID NO: 2060329 - RNA, 19 nt, Artificial Sequence
  Description of Artificial Sequence: Synthetic oligonucleotide
  Antisense strand to SEQ ID NO: 2060328
accucuagagaccucgaaa

SEQ ID NO: 2060330 - RNA, 19 nt, Artificial Sequence
  Description of Artificial Sequence: Synthetic oligonucleotide
  Sense strand starting at position 1742 of SEQ ID NO: 1881641
ucaggaguugcugggauga

SEQ ID NO: 2060331 - RNA, 19 nt, Artificial Sequence
  Description of Artificial Sequence: Synthetic oligonucleotide
  Antisense strand to SEQ ID NO: 2060330
ucaucccagcaacuccuga

SEQ ID NO: 2060332 - RNA, 19 nt, Artificial Sequence
  Description of Artificial Sequence: Synthetic oligonucleotide
  Sense strand starting at position 1759 of SEQ ID NO: 1881641
gagaguuuggcagaugcua

SEQ ID NO: 2060333 - RNA, 19 nt, Artificial Sequence
  Description of Artificial Sequence: Synthetic oligonucleotide
  Antisense strand to SEQ ID NO: 2060332
uagcaucugccaaacucuc

SEQ ID NO: 2060334 - RNA, 19 nt, Artificial Sequence
  Description of Artificial Sequence: Synthetic oligonucleotide
  Sense strand starting at position 1806 of SEQ ID NO: 1881641
agagacugaaucuguaagu

SEQ ID NO: 2060335 - RNA, 19 nt, Artificial Sequence
  Description of Artificial Sequence: Synthetic oligonucleotide
  Antisense strand to SEQ ID NO: 2060334
acuuacagauucagucucu

SEQ ID NO: 2060336 - RNA, 19 nt, Artificial Sequence
  Description of Artificial Sequence: Synthetic oligonucleotide
  Sense strand starting at position 1994 of SEQ ID NO: 1881641
cccagacacuguuuagcaa

SEQ ID NO: 2060337 - RNA, 19 nt, Artificial Sequence
  Description of Artificial Sequence: Synthetic oligonucleotide
  Antisense strand to SEQ ID NO: 2060336
uugcuaaacagugucuggg

SEQ ID NO: 2060338 - RNA, 19 nt, Artificial Sequence
  Description of Artificial Sequence: Synthetic oligonucleotide
  Sense strand starting at position 2119 of SEQ ID NO: 1881641
uuaacuuggccaggaauaa

SEQ ID NO: 2060339 - RNA, 19 nt, Artificial Sequence
  Description of Artificial Sequence: Synthetic oligonucleotide
  Antisense strand to SEQ ID NO: 2060338
uuauuccuggccaaguuaa

SEQ ID NO: 2060340 - RNA, 19 nt, Artificial Sequence
  Description of Artificial Sequence: Synthetic oligonucleotide
  Sense strand starting at position 2198 of SEQ ID NO: 1881641
agaaguggguuuguaagga

SEQ ID NO: 2060341 - RNA, 19 nt, Artificial Sequence
  Description of Artificial Sequence: Synthetic oligonucleotide
  Antisense strand to SEQ ID NO: 2060340
uccuuacaaacccacuucu

SEQ ID NO: 2060342 - RNA, 19 nt, Artificial Sequence
  Description of Artificial Sequence: Synthetic oligonucleotide
  Sense strand starting at position 2253 of SEQ ID NO: 1881641
uugucaugugacuagguuu

SEQ ID NO: 2060343 - RNA, 19 nt, Artificial Sequence
  Description of Artificial Sequence: Synthetic oligonucleotide
  Antisense strand to SEQ ID NO: 2060342
aaaccuagucacaugacaa

SEQ ID NO: 2060344 - RNA, 19 nt, Artificial Sequence
  Description of Artificial Sequence: Synthetic oligonucleotide
  Sense strand starting at position 2261 of SEQ ID NO: 1881641
ugacuagguuugguagaua

SEQ ID NO: 2060345 - RNA, 19 nt, Artificial Sequence
  Description of Artificial Sequence: Synthetic oligonucleotide
  Antisense strand to SEQ ID NO: 2060344
uaucuaccaaaccuaguca

SEQ ID NO: 2060346 - RNA, 19 nt, Artificial Sequence
  Description of Artificial Sequence: Synthetic oligonucleotide
  Sense strand starting at position 2285 of SEQ ID NO: 1881641
ggguaccuacuuugacuaa

SEQ ID NO: 2060347 - RNA, 19 nt, Artificial Sequence
  Description of Artificial Sequence: Synthetic oligonucleotide
  Antisense strand to SEQ ID NO: 2060346
uuagucaaaguagguaccc

SEQ ID NO: 2060348 - RNA, 19 nt, Artificial Sequence
  Description of Artificial Sequence: Synthetic oligonucleotide
  Sense strand starting at position 2361 of SEQ ID NO: 1881641
guuaaaucuggccaccuua

SEQ ID NO: 2060349 - RNA, 19 nt, Artificial Sequence
  Description of Artificial Sequence: Synthetic oligonucleotide
  Antisense strand to SEQ ID NO: 2060348
uaagguggccagauuuaac

SEQ ID NO: 2060350 - RNA, 19 nt, Artificial Sequence
  Description of Artificial Sequence: Synthetic oligonucleotide
  Sense strand starting at position 2985 of SEQ ID NO: 1881641
ugaaaugagucuuuaaacu

SEQ ID NO: 2060351 - RNA, 19 nt, Artificial Sequence
  Description of Artificial Sequence: Synthetic oligonucleotide
  Antisense strand to SEQ ID NO: 2060350
aguuuaaagacucauuuca

SEQ ID NO: 2060352 - RNA, 19 nt, Artificial Sequence
  Description of Artificial Sequence: Synthetic oligonucleotide
  Sense strand starting at position 2993 of SEQ ID NO: 1881641
gucuuuaaacuguauauac

SEQ ID NO: 2060353 - RNA, 19 nt, Artificial Sequence
  Description of Artificial Sequence: Synthetic oligonucleotide
  Antisense strand to SEQ ID NO: 2060352
guauauacaguuuaaagac

SEQ ID NO: 2060354 - RNA, 19 nt, Artificial Sequence
  Description of Artificial Sequence: Synthetic oligonucleotide
  Sense strand starting at position 3082 of SEQ ID NO: 1881641
uacugacugcacugggaau

SEQ ID NO: 2060355 - RNA, 19 nt, Artificial Sequence
  Description of Artificial Sequence: Synthetic oligonucleotide
  Antisense strand to SEQ ID NO: 2060354
auucccagugcagucagua

SEQ ID NO: 2060356 - RNA, 19 nt, Artificial Sequence
  Description of Artificial Sequence: Synthetic oligonucleotide
  Sense strand starting at position 3083 of SEQ ID NO: 1881641
acugacugcacugggaaua

SEQ ID NO: 2060357 - RNA, 19 nt, Artificial Sequence
  Description of Artificial Sequence: Synthetic oligonucleotide
  Antisense strand to SEQ ID NO: 2060356
uauucccagugcagucagu

SEQ ID NO: 2060358 - RNA, 19 nt, Artificial Sequence
  Description of Artificial Sequence: Synthetic oligonucleotide
  Sense strand starting at position 3172 of SEQ ID NO: 1881641
aaggucagccuuuauuaag

SEQ ID NO: 2060359 - RNA, 19 nt, Artificial Sequence
  Description of Artificial Sequence: Synthetic oligonucleotide
  Antisense strand to SEQ ID NO: 2060358
cuuaauaaaggcugaccuu

SEQ ID NO: 2060360 - RNA, 19 nt, Artificial Sequence
  Description of Artificial Sequence: Synthetic oligonucleotide
  Sense strand starting at position 3238 of SEQ ID NO: 1881641
acaguuugucacugagauu

SEQ ID NO: 2060361 - RNA, 19 nt, Artificial Sequence
  Description of Artificial Sequence: Synthetic oligonucleotide
  Antisense strand to SEQ ID NO: 2060360
aaucucagugacaaacugu

SEQ ID NO: 2060362 - RNA, 19 nt, Artificial Sequence
  Description of Artificial Sequence: Synthetic oligonucleotide
  Sense strand starting at position 3351 of SEQ ID NO: 1881641
auguuagugcaagauugua

SEQ ID NO: 2060363 - RNA, 19 nt, Artificial Sequence
  Description of Artificial Sequence: Synthetic oligonucleotide
  Antisense strand to SEQ ID NO: 2060362
uacaaucuugcacuaacau

SEQ ID NO: 2060364 - RNA, 19 nt, Artificial Sequence
  Description of Artificial Sequence: Synthetic oligonucleotide
  Sense strand starting at position 3759 of SEQ ID NO: 1881641
uuccacuauuuggaagaga

SEQ ID NO: 2060365 - RNA, 19 nt, Artificial Sequence
  Description of Artificial Sequence: Synthetic oligonucleotide
  Antisense strand to SEQ ID NO: 2060364
ucucuuccaaauaguggaa

SEQ ID NO: 2060366 - RNA, 19 nt, Artificial Sequence
  Description of Artificial Sequence: Synthetic oligonucleotide
  Sense strand starting at position 18 of SEQ ID NO: 1881642
gauaaacuguauucguaac

SEQ ID NO: 2060367 - RNA, 19 nt, Artificial Sequence
  Description of Artificial Sequence: Synthetic oligonucleotide
  Antisense strand to SEQ ID NO: 2060366
guuacgaauacaguuuauc

SEQ ID NO: 2060368 - RNA, 19 nt, Artificial Sequence
  Description of Artificial Sequence: Synthetic oligonucleotide
  Sense strand starting at position 119 of SEQ ID NO: 1881642
aaaucauuaugggcagaug

SEQ ID NO: 2060369 - RNA, 19 nt, Artificial Sequence
  Description of Artificial Sequence: Synthetic oligonucleotide
  Antisense strand to SEQ ID NO: 2060368
caucugcccauaaugauuu

SEQ ID NO: 2060370 - RNA, 19 nt, Artificial Sequence
  Description of Artificial Sequence: Synthetic oligonucleotide
  Sense strand starting at position 181 of SEQ ID NO: 1881642
gagaguuaggcuugaguua

SEQ ID NO: 2060371 - RNA, 19 nt, Artificial Sequence
  Description of Artificial Sequence: Synthetic oligonucleotide
  Antisense strand to SEQ ID NO: 2060370
uaacucaagccuaacucuc

SEQ ID NO: 2060372 - RNA, 19 nt, Artificial Sequence
  Description of Artificial Sequence: Synthetic oligonucleotide
  Sense strand starting at position 196 of SEQ ID NO: 1881642
guuagcuauccguaaagau

SEQ ID NO: 2060373 - RNA, 19 nt, Artificial Sequence
  Description of Artificial Sequence: Synthetic oligonucleotide
  Antisense strand to SEQ ID NO: 2060372
aucuuuacggauagcuaac

SEQ ID NO: 2060374 - RNA, 19 nt, Artificial Sequence
  Description of Artificial Sequence: Synthetic oligonucleotide
  Sense strand starting at position 212 of SEQ ID NO: 1881642
gauagacacuuguuggguu

SEQ ID NO: 2060375 - RNA, 19 nt, Artificial Sequence
  Description of Artificial Sequence: Synthetic oligonucleotide
  Antisense strand to SEQ ID NO: 2060374
aacccaacaagugucuauc

SEQ ID NO: 2060376 - RNA, 19 nt, Artificial Sequence
  Description of Artificial Sequence: Synthetic oligonucleotide
  Sense strand starting at position 635 of SEQ ID NO: 1881642
uccugaugucaagggcaca

SEQ ID NO: 2060377 - RNA, 19 nt, Artificial Sequence
  Description of Artificial Sequence: Synthetic oligonucleotide
  Antisense strand to SEQ ID NO: 2060376
ugugcccuugacaucagga

SEQ ID NO: 2060378 - RNA, 19 nt, Artificial Sequence
  Description of Artificial Sequence: Synthetic oligonucleotide
  Sense strand starting at position 693 of SEQ ID NO: 1881642
cuggauucucaauguagug

SEQ ID NO: 2060379 - RNA, 19 nt, Artificial Sequence
  Description of Artificial Sequence: Synthetic oligonucleotide
  Antisense strand to SEQ ID NO: 2060378
cacuacauugagaauccag

SEQ ID NO: 2060380 - RNA, 19 nt, Artificial Sequence
  Description of Artificial Sequence: Synthetic oligonucleotide
  Sense strand starting at position 1019 of SEQ ID NO: 1881642
gauuuagaauagcaauguu

SEQ ID NO: 2060381 - RNA, 19 nt, Artificial Sequence
  Description of Artificial Sequence: Synthetic oligonucleotide
  Antisense strand to SEQ ID NO: 2060380
aacauugcuauucuaaauc

SEQ ID NO: 2060382 - RNA, 19 nt, Artificial Sequence
  Description of Artificial Sequence: Synthetic oligonucleotide
  Sense strand starting at position 1022 of SEQ ID NO: 1881642
uuagaauagcaauguugga

SEQ ID NO: 2060383 - RNA, 19 nt, Artificial Sequence
  Description of Artificial Sequence: Synthetic oligonucleotide
  Antisense strand to SEQ ID NO: 2060382
uccaacauugcuauucuaa

SEQ ID NO: 2060384 - RNA, 19 nt, Artificial Sequence
  Description of Artificial Sequence: Synthetic oligonucleotide
  Sense strand starting at position 1060 of SEQ ID NO: 1881642
cuuccuggucuugaagaca

SEQ ID NO: 2060385 - RNA, 19 nt, Artificial Sequence
  Description of Artificial Sequence: Synthetic oligonucleotide
  Antisense strand to SEQ ID NO: 2060384
ugucuucaagaccaggaag

SEQ ID NO: 2060386 - RNA, 19 nt, Artificial Sequence
  Description of Artificial Sequence: Synthetic oligonucleotide
  Sense strand starting at position 1109 of SEQ ID NO: 1881642
ccgucuauauuacuugaga

SEQ ID NO: 2060387 - RNA, 19 nt, Artificial Sequence
  Description of Artificial Sequence: Synthetic oligonucleotide
  Antisense strand to SEQ ID NO: 2060386
ucucaaguaauauagacgg

SEQ ID NO: 2060388 - RNA, 19 nt, Artificial Sequence
  Description of Artificial Sequence: Synthetic oligonucleotide
  Sense strand starting at position 1110 of SEQ ID NO: 1881642
cgucuauauuacuugagaa

SEQ ID NO: 2060389 - RNA, 19 nt, Artificial Sequence
  Description of Artificial Sequence: Synthetic oligonucleotide
  Antisense strand to SEQ ID NO: 2060388
uucucaaguaauauagacg

SEQ ID NO: 2060390 - RNA, 19 nt, Artificial Sequence
  Description of Artificial Sequence: Synthetic oligonucleotide
  Sense strand starting at position 1184 of SEQ ID NO: 1881642
gaccucuagcauuauugga

SEQ ID NO: 2060391 - RNA, 19 nt, Artificial Sequence
  Description of Artificial Sequence: Synthetic oligonucleotide
  Antisense strand to SEQ ID NO: 2060390
uccaauaaugcuagagguc

SEQ ID NO: 2060392 - RNA, 19 nt, Artificial Sequence
  Description of Artificial Sequence: Synthetic oligonucleotide
  Sense strand starting at position 1186 of SEQ ID NO: 1881642
ccucuagcauuauuggaga

SEQ ID NO: 2060393 - RNA, 19 nt, Artificial Sequence
  Description of Artificial Sequence: Synthetic oligonucleotide
  Antisense strand to SEQ ID NO: 2060392
ucuccaauaaugcuagagg

SEQ ID NO: 2060394 - RNA, 19 nt, Artificial Sequence
  Description of Artificial Sequence: Synthetic oligonucleotide
  Sense strand starting at position 1321 of SEQ ID NO: 1881642
ucuggaaucugguucuaua

SEQ ID NO: 2060395 - RNA, 19 nt, Artificial Sequence
  Description of Artificial Sequence: Synthetic oligonucleotide
  Antisense strand to SEQ ID NO: 2060394
uauagaaccagauuccaga

SEQ ID NO: 2060396 - RNA, 19 nt, Artificial Sequence
  Description of Artificial Sequence: Synthetic oligonucleotide
  Sense strand starting at position 1330 of SEQ ID NO: 1881642
ugguucuauacaggguauu

SEQ ID NO: 2060397 - RNA, 19 nt, Artificial Sequence
  Description of Artificial Sequence: Synthetic oligonucleotide
  Antisense strand to SEQ ID NO: 2060396
aauacccuguauagaacca

SEQ ID NO: 2060398 - RNA, 19 nt, Artificial Sequence
  Description of Artificial Sequence: Synthetic oligonucleotide
  Sense strand starting at position 1410 of SEQ ID NO: 1881642
uauguucucccuggaggga

SEQ ID NO: 2060399 - RNA, 19 nt, Artificial Sequence
  Description of Artificial Sequence: Synthetic oligonucleotide
  Antisense strand to SEQ ID NO: 2060398
ucccuccagggagaacaua

SEQ ID NO: 2060400 - RNA, 19 nt, Artificial Sequence
  Description of Artificial Sequence: Synthetic oligonucleotide
  Sense strand starting at position 1613 of SEQ ID NO: 1881642
uugacugcauuauugauaa

SEQ ID NO: 2060401 - RNA, 19 nt, Artificial Sequence
  Description of Artificial Sequence: Synthetic oligonucleotide
  Antisense strand to SEQ ID NO: 2060400
uuaucaauaaugcagucaa

SEQ ID NO: 2060402 - RNA, 19 nt, Artificial Sequence
  Description of Artificial Sequence: Synthetic oligonucleotide
  Sense strand starting at position 1670 of SEQ ID NO: 1881642
ccuagacugugaucaaauc

SEQ ID NO: 2060403 - RNA, 19 nt, Artificial Sequence
  Description of Artificial Sequence: Synthetic oligonucleotide
  Antisense strand to SEQ ID NO: 2060402
gauuugaucacagucuagg

SEQ ID NO: 2060404 - RNA, 19 nt, Artificial Sequence
  Description of Artificial Sequence: Synthetic oligonucleotide
  Sense strand starting at position 2005 of SEQ ID NO: 1881642
guaauacuuggucaguauu

SEQ ID NO: 2060405 - RNA, 19 nt, Artificial Sequence
  Description of Artificial Sequence: Synthetic oligonucleotide
  Antisense strand to SEQ ID NO: 2060404
aauacugaccaaguauuac

SEQ ID NO: 2060406 - RNA, 19 nt, Artificial Sequence
  Description of Artificial Sequence: Synthetic oligonucleotide
  Sense strand starting at position 2008 of SEQ ID NO: 1881642
auacuuggucaguauuaca

SEQ ID NO: 2060407 - RNA, 19 nt, Artificial Sequence
  Description of Artificial Sequence: Synthetic oligonucleotide
  Antisense strand to SEQ ID NO: 2060406
uguaauacugaccaaguau

SEQ ID NO: 2060408 - RNA, 19 nt, Artificial Sequence
  Description of Artificial Sequence: Synthetic oligonucleotide
  Sense strand starting at position 2122 of SEQ ID NO: 1881642
ggaaauaugucagugauuc

SEQ ID NO: 2060409 - RNA, 19 nt, Artificial Sequence
  Description of Artificial Sequence: Synthetic oligonucleotide
  Antisense strand to SEQ ID NO: 2060408
gaaucacugacauauuucc

SEQ ID NO: 2060410 - RNA, 19 nt, Artificial Sequence
  Description of Artificial Sequence: Synthetic oligonucleotide
  Sense strand starting at position 2123 of SEQ ID NO: 1881642
gaaauaugucagugauucc

SEQ ID NO: 2060411 - RNA, 19 nt, Artificial Sequence
  Description of Artificial Sequence: Synthetic oligonucleotide
  Antisense strand to SEQ ID NO: 2060410
ggaaucacugacauauuuc

SEQ ID NO: 2060412 - RNA, 19 nt, Artificial Sequence
  Description of Artificial Sequence: Synthetic oligonucleotide
  Sense strand starting at position 2126 of SEQ ID NO: 1881642
auaugucagugauuccacu

SEQ ID NO: 2060413 - RNA, 19 nt, Artificial Sequence
  Description of Artificial Sequence: Synthetic oligonucleotide
  Antisense strand to SEQ ID NO: 2060412
aguggaaucacugacauau

SEQ ID NO: 2060414 - RNA, 19 nt, Artificial Sequence
  Description of Artificial Sequence: Synthetic oligonucleotide
  Sense strand starting at position 2132 of SEQ ID NO: 1881642
cagugauuccacugggcaa

SEQ ID NO: 2060415 - RNA, 19 nt, Artificial Sequence
  Description of Artificial Sequence: Synthetic oligonucleotide
  Antisense strand to SEQ ID NO: 2060414
uugcccaguggaaucacug

SEQ ID NO: 2060416 - RNA, 19 nt, Artificial Sequence
  Description of Artificial Sequence: Synthetic oligonucleotide
  Sense strand starting at position 2133 of SEQ ID NO: 1881642
agugauuccacugggcaaa

SEQ ID NO: 2060417 - RNA, 19 nt, Artificial Sequence
  Description of Artificial Sequence: Synthetic oligonucleotide
  Antisense strand to SEQ ID NO: 2060416
uuugcccaguggaaucacu

SEQ ID NO: 2060418 - RNA, 19 nt, Artificial Sequence
  Description of Artificial Sequence: Synthetic oligonucleotide
  Sense strand starting at position 2243 of SEQ ID NO: 1881642
caugacuuguggucaacua

SEQ ID NO: 2060419 - RNA, 19 nt, Artificial Sequence
  Description of Artificial Sequence: Synthetic oligonucleotide
  Antisense strand to SEQ ID NO: 2060418
uaguugaccacaagucaug

SEQ ID NO: 2060420 - RNA, 19 nt, Artificial Sequence
  Description of Artificial Sequence: Synthetic oligonucleotide
  Sense strand starting at position 2244 of SEQ ID NO: 1881642
augacuuguggucaacuau

SEQ ID NO: 2060421 - RNA, 19 nt, Artificial Sequence
  Description of Artificial Sequence: Synthetic oligonucleotide
  Antisense strand to SEQ ID NO: 2060420
auaguugaccacaagucau

SEQ ID NO: 2060422 - RNA, 19 nt, Artificial Sequence
  Description of Artificial Sequence: Synthetic oligonucleotide
  Sense strand starting at position 2291 of SEQ ID NO: 1881642
uaguuauguggucagagua

SEQ ID NO: 2060423 - RNA, 19 nt, Artificial Sequence
  Description of Artificial Sequence: Synthetic oligonucleotide
  Antisense strand to SEQ ID NO: 2060422
uacucugaccacauaacua

SEQ ID NO: 2060424 - RNA, 19 nt, Artificial Sequence
  Description of Artificial Sequence: Synthetic oligonucleotide
  Sense strand starting at position 2654 of SEQ ID NO: 1881642
gugaauauccaagguguag

SEQ ID NO: 2060425 - RNA, 19 nt, Artificial Sequence
  Description of Artificial Sequence: Synthetic oligonucleotide
  Antisense strand to SEQ ID NO: 2060424
cuacaccuuggauauucac

SEQ ID NO: 2060426 - RNA, 19 nt, Artificial Sequence
  Description of Artificial Sequence: Synthetic oligonucleotide
  Sense strand starting at position 2672 of SEQ ID NO: 1881642
gcuauaacccaguauacag

SEQ ID NO: 2060427 - RNA, 19 nt, Artificial Sequence
  Description of Artificial Sequence: Synthetic oligonucleotide
  Antisense strand to SEQ ID NO: 2060426
cuguauacuggguuauagc

SEQ ID NO: 2060428 - RNA, 19 nt, Artificial Sequence
  Description of Artificial Sequence: Synthetic oligonucleotide
  Sense strand starting at position 2764 of SEQ ID NO: 1881642
aacgaauacuuguugagca

SEQ ID NO: 2060429 - RNA, 19 nt, Artificial Sequence
  Description of Artificial Sequence: Synthetic oligonucleotide
  Antisense strand to SEQ ID NO: 2060428
ugcucaacaaguauucguu

SEQ ID NO: 2060430 - RNA, 19 nt, Artificial Sequence
  Description of Artificial Sequence: Synthetic oligonucleotide
  Sense strand starting at position 2985 of SEQ ID NO: 1881642
ugauaagccuucucuugau

SEQ ID NO: 2060431 - RNA, 19 nt, Artificial Sequence
  Description of Artificial Sequence: Synthetic oligonucleotide
  Antisense strand to SEQ ID NO: 2060430
aucaagagaaggcuuauca

SEQ ID NO: 2060432 - RNA, 19 nt, Artificial Sequence
  Description of Artificial Sequence: Synthetic oligonucleotide
  Sense strand starting at position 3107 of SEQ ID NO: 1881642
auuguaauggcaugaucuu

SEQ ID NO: 2060433 - RNA, 19 nt, Artificial Sequence
  Description of Artificial Sequence: Synthetic oligonucleotide
  Antisense strand to SEQ ID NO: 2060432
aagaucaugccauuacaau

SEQ ID NO: 2060434 - RNA, 19 nt, Artificial Sequence
  Description of Artificial Sequence: Synthetic oligonucleotide
  Sense strand starting at position 3379 of SEQ ID NO: 1881642
cucucuuuaguggaucauu

SEQ ID NO: 2060435 - RNA, 19 nt, Artificial Sequence
  Description of Artificial Sequence: Synthetic oligonucleotide
  Antisense strand to SEQ ID NO: 2060434
aaugauccacuaaagagag

SEQ ID NO: 2060436 - RNA, 19 nt, Artificial Sequence
  Description of Artificial Sequence: Synthetic oligonucleotide
  Sense strand starting at position 3596 of SEQ ID NO: 1881642
ugacuugacuuucuagaag

SEQ ID NO: 2060437 - RNA, 19 nt, Artificial Sequence
  Description of Artificial Sequence: Synthetic oligonucleotide
  Antisense strand to SEQ ID NO: 2060436
cuucuagaaagucaaguca

SEQ ID NO: 2060438 - RNA, 19 nt, Artificial Sequence
  Description of Artificial Sequence: Synthetic oligonucleotide
  Sense strand starting at position 3599 of SEQ ID NO: 1881642
cuugacuuucuagaagugu

SEQ ID NO: 2060439 - RNA, 19 nt, Artificial Sequence
  Description of Artificial Sequence: Synthetic oligonucleotide
  Antisense strand to SEQ ID NO: 2060438
acacuucuagaaagucaag

SEQ ID NO: 2060440 - RNA, 19 nt, Artificial Sequence
  Description of Artificial Sequence: Synthetic oligonucleotide
  Sense strand starting at position 3687 of SEQ ID NO: 1881642
ucccuaauuucucuguugu

SEQ ID NO: 2060441 - RNA, 19 nt, Artificial Sequence
  Description of Artificial Sequence: Synthetic oligonucleotide
  Antisense strand to SEQ ID NO: 2060440
acaacagagaaauuaggga

SEQ ID NO: 2060442 - RNA, 19 nt, Artificial Sequence
  Description of Artificial Sequence: Synthetic oligonucleotide
  Sense strand starting at position 3693 of SEQ ID NO: 1881642
auuucucuguugucugaau

SEQ ID NO: 2060443 - RNA, 19 nt, Artificial Sequence
  Description of Artificial Sequence: Synthetic oligonucleotide
  Antisense strand to SEQ ID NO: 2060442
auucagacaacagagaaau

SEQ ID NO: 2060444 - RNA, 19 nt, Artificial Sequence
  Description of Artificial Sequence: Synthetic oligonucleotide
  Sense strand starting at position 3845 of SEQ ID NO: 1881642
acuguaagccaaugaauau

SEQ ID NO: 2060445 - RNA, 19 nt, Artificial Sequence
  Description of Artificial Sequence: Synthetic oligonucleotide
  Antisense strand to SEQ ID NO: 2060444
auauucauuggcuuacagu

SEQ ID NO: 2060446 - RNA, 19 nt, Artificial Sequence
  Description of Artificial Sequence: Synthetic oligonucleotide
  Sense strand starting at position 99 of SEQ ID NO: 1881643
auauauucuugccugauag

SEQ ID NO: 2060447 - RNA, 19 nt, Artificial Sequence
  Description of Artificial Sequence: Synthetic oligonucleotide
  Antisense strand to SEQ ID NO: 2060446
cuaucaggcaagaauauau

SEQ ID NO: 2060448 - RNA, 19 nt, Artificial Sequence
  Description of Artificial Sequence: Synthetic oligonucleotide
  Sense strand starting at position 101 of SEQ ID NO: 1881643
auauucuugccugauagca

SEQ ID NO: 2060449 - RNA, 19 nt, Artificial Sequence
  Description of Artificial Sequence: Synthetic oligonucleotide
  Antisense strand to SEQ ID NO: 2060448
ugcuaucaggcaagaauau

SEQ ID NO: 2060450 - RNA, 19 nt, Artificial Sequence
  Description of Artificial Sequence: Synthetic oligonucleotide
  Sense strand starting at position 230 of SEQ ID NO: 1881643
ccaaauagguuucuugaca

SEQ ID NO: 2060451 - RNA, 19 nt, Artificial Sequence
  Description of Artificial Sequence: Synthetic oligonucleotide
  Antisense strand to SEQ ID NO: 2060450
ugucaagaaaccuauuugg

SEQ ID NO: 2060452 - RNA, 19 nt, Artificial Sequence
  Description of Artificial Sequence: Synthetic oligonucleotide
  Sense strand starting at position 237 of SEQ ID NO: 1881643
gguuucuugacaugagaaa

SEQ ID NO: 2060453 - RNA, 19 nt, Artificial Sequence
  Description of Artificial Sequence: Synthetic oligonucleotide
  Antisense strand to SEQ ID NO: 2060452
uuucucaugucaagaaacc

SEQ ID NO: 2060454 - RNA, 19 nt, Artificial Sequence
  Description of Artificial Sequence: Synthetic oligonucleotide
  Sense strand starting at position 370 of SEQ ID NO: 1881643
gcaagacccuaucuugaac

SEQ ID NO: 2060455 - RNA, 19 nt, Artificial Sequence
  Description of Artificial Sequence: Synthetic oligonucleotide
  Antisense strand to SEQ ID NO: 2060454
guucaagauagggucuugc

SEQ ID NO: 2060456 - RNA, 19 nt, Artificial Sequence
  Description of Artificial Sequence: Synthetic oligonucleotide
  Sense strand starting at position 474 of SEQ ID NO: 1881643
ggcugcaaagaguaugaau

SEQ ID NO: 2060457 - RNA, 19 nt, Artificial Sequence
  Description of Artificial Sequence: Synthetic oligonucleotide
  Antisense strand to SEQ ID NO: 2060456
auucauacucuuugcagcc

SEQ ID NO: 2060458 - RNA, 19 nt, Artificial Sequence
  Description of Artificial Sequence: Synthetic oligonucleotide
  Sense strand starting at position 733 of SEQ ID NO: 1881643
aaccaaacuccugggagua

SEQ ID NO: 2060459 - RNA, 19 nt, Artificial Sequence
  Description of Artificial Sequence: Synthetic oligonucleotide
  Antisense strand to SEQ ID NO: 2060458
uacucccaggaguuugguu

SEQ ID NO: 2060460 - RNA, 19 nt, Artificial Sequence
  Description of Artificial Sequence: Synthetic oligonucleotide
  Sense strand starting at position 734 of SEQ ID NO: 1881643
accaaacuccugggaguaa

SEQ ID NO: 2060461 - RNA, 19 nt, Artificial Sequence
  Description of Artificial Sequence: Synthetic oligonucleotide
  Antisense strand to SEQ ID NO: 2060460
uuacucccaggaguuuggu

SEQ ID NO: 2060462 - RNA, 19 nt, Artificial Sequence
  Description of Artificial Sequence: Synthetic oligonucleotide
  Sense strand starting at position 996 of SEQ ID NO: 1881643
augugauaauaaccucgaa

SEQ ID NO: 2060463 - RNA, 19 nt, Artificial Sequence
  Description of Artificial Sequence: Synthetic oligonucleotide
  Antisense strand to SEQ ID NO: 2060462
uucgagguuauuaucacau

SEQ ID NO: 2060464 - RNA, 19 nt, Artificial Sequence
  Description of Artificial Sequence: Synthetic oligonucleotide
  Sense strand starting at position 1092 of SEQ ID NO: 1881643
ccaagauaugauugugaau

SEQ ID NO: 2060465 - RNA, 19 nt, Artificial Sequence
  Description of Artificial Sequence: Synthetic oligonucleotide
  Antisense strand to SEQ ID NO: 2060464
auucacaaucauaucuugg

SEQ ID NO: 2060466 - RNA, 19 nt, Artificial Sequence
  Description of Artificial Sequence: Synthetic oligonucleotide
  Sense strand starting at position 1095 of SEQ ID NO: 1881643
agauaugauugugaauuuc

SEQ ID NO: 2060467 - RNA, 19 nt, Artificial Sequence
  Description of Artificial Sequence: Synthetic oligonucleotide
  Antisense strand to SEQ ID NO: 2060466
gaaauucacaaucauaucu

SEQ ID NO: 2060468 - RNA, 19 nt, Artificial Sequence
  Description of Artificial Sequence: Synthetic oligonucleotide
  Sense strand starting at position 1119 of SEQ ID NO: 1881643
ugggacaucuaucuacagu

SEQ ID NO: 2060469 - RNA, 19 nt, Artificial Sequence
  Description of Artificial Sequence: Synthetic oligonucleotide
  Antisense strand to SEQ ID NO: 2060468
acuguagauagauguccca

SEQ ID NO: 2060470 - RNA, 19 nt, Artificial Sequence
  Description of Artificial Sequence: Synthetic oligonucleotide
  Sense strand starting at position 1145 of SEQ ID NO: 1881643
uggucuacccaguaauuau

SEQ ID NO: 2060471 - RNA, 19 nt, Artificial Sequence
  Description of Artificial Sequence: Synthetic oligonucleotide
  Antisense strand to SEQ ID NO: 2060470
auaauuacuggguagacca

SEQ ID NO: 2060472 - RNA, 19 nt, Artificial Sequence
  Description of Artificial Sequence: Synthetic oligonucleotide
  Sense strand starting at position 1214 of SEQ ID NO: 1881643
gaaccuuccuggguccuaa

SEQ ID NO: 2060473 - RNA, 19 nt, Artificial Sequence
  Description of Artificial Sequence: Synthetic oligonucleotide
  Antisense strand to SEQ ID NO: 2060472
uuaggacccaggaagguuc

SEQ ID NO: 2060474 - RNA, 19 nt, Artificial Sequence
  Description of Artificial Sequence: Synthetic oligonucleotide
  Sense strand starting at position 1370 of SEQ ID NO: 1881643
uuuguaaaugcacaugaau

SEQ ID NO: 2060475 - RNA, 19 nt, Artificial Sequence
  Description of Artificial Sequence: Synthetic oligonucleotide
  Antisense strand to SEQ ID NO: 2060474
auucaugugcauuuacaaa

SEQ ID NO: 2060476 - RNA, 19 nt, Artificial Sequence
  Description of Artificial Sequence: Synthetic oligonucleotide
  Sense strand starting at position 1471 of SEQ ID NO: 1881643
uagugauccuaucuggaua

SEQ ID NO: 2060477 - RNA, 19 nt, Artificial Sequence
  Description of Artificial Sequence: Synthetic oligonucleotide
  Antisense strand to SEQ ID NO: 2060476
uauccagauaggaucacua

SEQ ID NO: 2060478 - RNA, 19 nt, Artificial Sequence
  Description of Artificial Sequence: Synthetic oligonucleotide
  Sense strand starting at position 1479 of SEQ ID NO: 1881643
cuaucuggauaaucaaguu

SEQ ID NO: 2060479 - RNA, 19 nt, Artificial Sequence
  Description of Artificial Sequence: Synthetic oligonucleotide
  Antisense strand to SEQ ID NO: 2060478
aacuugauuauccagauag

SEQ ID NO: 2060480 - RNA, 19 nt, Artificial Sequence
  Description of Artificial Sequence: Synthetic oligonucleotide
  Sense strand starting at position 1538 of SEQ ID NO: 1881643
cuccauaaugaguaugcau

SEQ ID NO: 2060481 - RNA, 19 nt, Artificial Sequence
  Description of Artificial Sequence: Synthetic oligonucleotide
  Antisense strand to SEQ ID NO: 2060480
augcauacucauuauggag

SEQ ID NO: 2060482 - RNA, 19 nt, Artificial Sequence
  Description of Artificial Sequence: Synthetic oligonucleotide
  Sense strand starting at position 1540 of SEQ ID NO: 1881643
ccauaaugaguaugcauua

SEQ ID NO: 2060483 - RNA, 19 nt, Artificial Sequence
  Description of Artificial Sequence: Synthetic oligonucleotide
  Antisense strand to SEQ ID NO: 2060482
uaaugcauacucauuaugg

SEQ ID NO: 2060484 - RNA, 19 nt, Artificial Sequence
  Description of Artificial Sequence: Synthetic oligonucleotide
  Sense strand starting at position 1797 of SEQ ID NO: 1881643
uugugugauguuuaauaag

SEQ ID NO: 2060485 - RNA, 19 nt, Artificial Sequence
  Description of Artificial Sequence: Synthetic oligonucleotide
  Antisense strand to SEQ ID NO: 2060484
cuuauuaaacaucacacaa

SEQ ID NO: 2060486 - RNA, 19 nt, Artificial Sequence
  Description of Artificial Sequence: Synthetic oligonucleotide
  Sense strand starting at position 1985 of SEQ ID NO: 1881643
ggccucaagugauccauga

SEQ ID NO: 2060487 - RNA, 19 nt, Artificial Sequence
  Description of Artificial Sequence: Synthetic oligonucleotide
  Antisense strand to SEQ ID NO: 2060486
ucauggaucacuugaggcc

SEQ ID NO: 2060488 - RNA, 19 nt, Artificial Sequence
  Description of Artificial Sequence: Synthetic oligonucleotide
  Sense strand starting at position 2329 of SEQ ID NO: 1881643
gccugucaccagcaugaaa

SEQ ID NO: 2060489 - RNA, 19 nt, Artificial Sequence
  Description of Artificial Sequence: Synthetic oligonucleotide
  Antisense strand to SEQ ID NO: 2060488
uuucaugcuggugacaggc

SEQ ID NO: 2060490 - RNA, 19 nt, Artificial Sequence
  Description of Artificial Sequence: Synthetic oligonucleotide
  Sense strand starting at position 2563 of SEQ ID NO: 1881643
agggauguggugcaauauu

SEQ ID NO: 2060491 - RNA, 19 nt, Artificial Sequence
  Description of Artificial Sequence: Synthetic oligonucleotide
  Antisense strand to SEQ ID NO: 2060490
aauauugcaccacaucccu

SEQ ID NO: 2060492 - RNA, 19 nt, Artificial Sequence
  Description of Artificial Sequence: Synthetic oligonucleotide
  Sense strand starting at position 2850 of SEQ ID NO: 1881643
gcuuguugggaacaaacuu

SEQ ID NO: 2060493 - RNA, 19 nt, Artificial Sequence
  Description of Artificial Sequence: Synthetic oligonucleotide
  Antisense strand to SEQ ID NO: 2060492
aaguuuguucccaacaagc

SEQ ID NO: 2060494 - RNA, 19 nt, Artificial Sequence
  Description of Artificial Sequence: Synthetic oligonucleotide
  Sense strand starting at position 2881 of SEQ ID NO: 1881643
agugacauaugcccugaga

SEQ ID NO: 2060495 - RNA, 19 nt, Artificial Sequence
  Description of Artificial Sequence: Synthetic oligonucleotide
  Antisense strand to SEQ ID NO: 2060494
ucucagggcauaugucacu

SEQ ID NO: 2060496 - RNA, 19 nt, Artificial Sequence
  Description of Artificial Sequence: Synthetic oligonucleotide
  Sense strand starting at position 2883 of SEQ ID NO: 1881643
ugacauaugcccugagacu

SEQ ID NO: 2060497 - RNA, 19 nt, Artificial Sequence
  Description of Artificial Sequence: Synthetic oligonucleotide
  Antisense strand to SEQ ID NO: 2060496
agucucagggcauauguca

SEQ ID NO: 2060498 - RNA, 19 nt, Artificial Sequence
  Description of Artificial Sequence: Synthetic oligonucleotide
  Sense strand starting at position 2884 of SEQ ID NO: 1881643
gacauaugcccugagacuc

SEQ ID NO: 2060499 - RNA, 19 nt, Artificial Sequence
  Description of Artificial Sequence: Synthetic oligonucleotide
  Antisense strand to SEQ ID NO: 2060498
gagucucagggcauauguc

SEQ ID NO: 2060500 - RNA, 19 nt, Artificial Sequence
  Description of Artificial Sequence: Synthetic oligonucleotide
  Sense strand starting at position 3050 of SEQ ID NO: 1881643
uggguaaucuauucuaaga

SEQ ID NO: 2060501 - RNA, 19 nt, Artificial Sequence
  Description of Artificial Sequence: Synthetic oligonucleotide
  Antisense strand to SEQ ID NO: 2060500
ucuuagaauagauuaccca

SEQ ID NO: 2060502 - RNA, 19 nt, Artificial Sequence
  Description of Artificial Sequence: Synthetic oligonucleotide
  Sense strand starting at position 3166 of SEQ ID NO: 1881643
agaggaguguaaagggaau

SEQ ID NO: 2060503 - RNA, 19 nt, Artificial Sequence
  Description of Artificial Sequence: Synthetic oligonucleotide
  Antisense strand to SEQ ID NO: 2060502
auucccuuuacacuccucu

SEQ ID NO: 2060504 - RNA, 19 nt, Artificial Sequence
  Description of Artificial Sequence: Synthetic oligonucleotide
  Sense strand starting at position 3197 of SEQ ID NO: 1881643
gagucaagcuggguccaaa

SEQ ID NO: 2060505 - RNA, 19 nt, Artificial Sequence
  Description of Artificial Sequence: Synthetic oligonucleotide
  Antisense strand to SEQ ID NO: 2060504
uuuggacccagcuugacuc

SEQ ID NO: 2060506 - RNA, 19 nt, Artificial Sequence
  Description of Artificial Sequence: Synthetic oligonucleotide
  Sense strand starting at position 3262 of SEQ ID NO: 1881643
augaguuacuaagugaaga

SEQ ID NO: 2060507 - RNA, 19 nt, Artificial Sequence
  Description of Artificial Sequence: Synthetic oligonucleotide
  Antisense strand to SEQ ID NO: 2060506
ucuucacuuaguaacucau

SEQ ID NO: 2060508 - RNA, 19 nt, Artificial Sequence
  Description of Artificial Sequence: Synthetic oligonucleotide
  Sense strand starting at position 3263 of SEQ ID NO: 1881643
ugaguuacuaagugaagaa

SEQ ID NO: 2060509 - RNA, 19 nt, Artificial Sequence
  Description of Artificial Sequence: Synthetic oligonucleotide
  Antisense strand to SEQ ID NO: 2060508
uucuucacuuaguaacuca

SEQ ID NO: 2060510 - RNA, 19 nt, Artificial Sequence
  Description of Artificial Sequence: Synthetic oligonucleotide
  Sense strand starting at position 3379 of SEQ ID NO: 1881643
gaaguuuaaugacucugca

SEQ ID NO: 2060511 - RNA, 19 nt, Artificial Sequence
  Description of Artificial Sequence: Synthetic oligonucleotide
  Antisense strand to SEQ ID NO: 2060510
ugcagagucauuaaacuuc

SEQ ID NO: 2060512 - RNA, 19 nt, Artificial Sequence
  Description of Artificial Sequence: Synthetic oligonucleotide
  Sense strand starting at position 3402 of SEQ ID NO: 1881643
ggguauauucuggaucccu

SEQ ID NO: 2060513 - RNA, 19 nt, Artificial Sequence
  Description of Artificial Sequence: Synthetic oligonucleotide
  Antisense strand to SEQ ID NO: 2060512
agggauccagaauauaccc

SEQ ID NO: 2060514 - RNA, 19 nt, Artificial Sequence
  Description of Artificial Sequence: Synthetic oligonucleotide
  Sense strand starting at position 3465 of SEQ ID NO: 1881643
aggagaaacagugguuugu

SEQ ID NO: 2060515 - RNA, 19 nt, Artificial Sequence
  Description of Artificial Sequence: Synthetic oligonucleotide
  Antisense strand to SEQ ID NO: 2060514
acaaaccacuguuucuccu

SEQ ID NO: 2060516 - RNA, 19 nt, Artificial Sequence
  Description of Artificial Sequence: Synthetic oligonucleotide
  Sense strand starting at position 3467 of SEQ ID NO: 1881643
gagaaacagugguuugucu

SEQ ID NO: 2060517 - RNA, 19 nt, Artificial Sequence
  Description of Artificial Sequence: Synthetic oligonucleotide
  Antisense strand to SEQ ID NO: 2060516
agacaaaccacuguuucuc

SEQ ID NO: 2060518 - RNA, 19 nt, Artificial Sequence
  Description of Artificial Sequence: Synthetic oligonucleotide
  Sense strand starting at position 3481 of SEQ ID NO: 1881643
ugucucuuuguccaauaua

SEQ ID NO: 2060519 - RNA, 19 nt, Artificial Sequence
  Description of Artificial Sequence: Synthetic oligonucleotide
  Antisense strand to SEQ ID NO: 2060518
uauauuggacaaagagaca

SEQ ID NO: 2060520 - RNA, 19 nt, Artificial Sequence
  Description of Artificial Sequence: Synthetic oligonucleotide
  Sense strand starting at position 3484 of SEQ ID NO: 1881643
cucuuuguccaauauagug

SEQ ID NO: 2060521 - RNA, 19 nt, Artificial Sequence
  Description of Artificial Sequence: Synthetic oligonucleotide
  Antisense strand to SEQ ID NO: 2060520
cacuauauuggacaaagag

SEQ ID NO: 2060522 - RNA, 19 nt, Artificial Sequence
  Description of Artificial Sequence: Synthetic oligonucleotide
  Sense strand starting at position 3534 of SEQ ID NO: 1881643
ugggaaggguugaggaauu

SEQ ID NO: 2060523 - RNA, 19 nt, Artificial Sequence
  Description of Artificial Sequence: Synthetic oligonucleotide
  Antisense strand to SEQ ID NO: 2060522
aauuccucaacccuuccca

SEQ ID NO: 2060524 - RNA, 19 nt, Artificial Sequence
  Description of Artificial Sequence: Synthetic oligonucleotide
  Sense strand starting at position 3767 of SEQ ID NO: 1881643
ucgacaugauuugugguuu

SEQ ID NO: 2060525 - RNA, 19 nt, Artificial Sequence
  Description of Artificial Sequence: Synthetic oligonucleotide
  Antisense strand to SEQ ID NO: 2060524
aaaccacaaaucaugucga

SEQ ID NO: 2060526 - RNA, 19 nt, Artificial Sequence
  Description of Artificial Sequence: Synthetic oligonucleotide
  Sense strand starting at position 2444 of SEQ ID NO: 1881644
gaaggagcauccgagagau

SEQ ID NO: 2060527 - RNA, 19 nt, Artificial Sequence
  Description of Artificial Sequence: Synthetic oligonucleotide
  Antisense strand to SEQ ID NO: 2060526
aucucucggaugcuccuuc

SEQ ID NO: 2060528 - RNA, 19 nt, Artificial Sequence
  Description of Artificial Sequence: Synthetic oligonucleotide
  Sense strand starting at position 3225 of SEQ ID NO: 1881644
ccugacugucccgggagaa

SEQ ID NO: 2060529 - RNA, 19 nt, Artificial Sequence
  Description of Artificial Sequence: Synthetic oligonucleotide
  Antisense strand to SEQ ID NO: 2060528
uucucccgggacagucagg

SEQ ID NO: 2060530 - RNA, 19 nt, Artificial Sequence
  Description of Artificial Sequence: Synthetic oligonucleotide
  Sense strand starting at position 3539 of SEQ ID NO: 1881644
ggcgcuuccuccuggaguu

SEQ ID NO: 2060531 - RNA, 19 nt, Artificial Sequence
  Description of Artificial Sequence: Synthetic oligonucleotide
  Antisense strand to SEQ ID NO: 2060530
aacuccaggaggaagcgcc

SEQ ID NO: 2060532 - RNA, 19 nt, Artificial Sequence
  Description of Artificial Sequence: Synthetic oligonucleotide
  Sense strand starting at position 3540 of SEQ ID NO: 1881644
gcgcuuccuccuggaguuu

SEQ ID NO: 2060533 - RNA, 19 nt, Artificial Sequence
  Description of Artificial Sequence: Synthetic oligonucleotide
  Antisense strand to SEQ ID NO: 2060532
aaacuccaggaggaagcgc

SEQ ID NO: 2060534 - RNA, 19 nt, Artificial Sequence
  Description of Artificial Sequence: Synthetic oligonucleotide
  Sense strand starting at position 3560 of SEQ ID NO: 1881644
gcugauguucuccaguagu

SEQ ID NO: 2060535 - RNA, 19 nt, Artificial Sequence
  Description of Artificial Sequence: Synthetic oligonucleotide
  Antisense strand to SEQ ID NO: 2060534
acuacuggagaacaucagc

SEQ ID NO: 2060536 - RNA, 19 nt, Artificial Sequence
  Description of Artificial Sequence: Synthetic oligonucleotide
  Sense strand starting at position 3563 of SEQ ID NO: 1881644
gauguucuccaguaguguu

SEQ ID NO: 2060537 - RNA, 19 nt, Artificial Sequence
  Description of Artificial Sequence: Synthetic oligonucleotide
  Antisense strand to SEQ ID NO: 2060536
aacacuacuggagaacauc

SEQ ID NO: 2060538 - RNA, 19 nt, Artificial Sequence
  Description of Artificial Sequence: Synthetic oligonucleotide
  Sense strand starting at position 3580 of SEQ ID NO: 1881644
uugggagucuaucaaugag

SEQ ID NO: 2060539 - RNA, 19 nt, Artificial Sequence
  Description of Artificial Sequence: Synthetic oligonucleotide
  Antisense strand to SEQ ID NO: 2060538
cucauugauagacucccaa

SEQ ID NO: 2060540 - RNA, 19 nt, Artificial Sequence
  Description of Artificial Sequence: Synthetic oligonucleotide
  Sense strand starting at position 3596 of SEQ ID NO: 1881644
gagggagucuagcuuuauu

SEQ ID NO: 2060541 - RNA, 19 nt, Artificial Sequence
  Description of Artificial Sequence: Synthetic oligonucleotide
  Antisense strand to SEQ ID NO: 2060540
aauaaagcuagacucccuc

SEQ ID NO: 2060542 - RNA, 19 nt, Artificial Sequence
  Description of Artificial Sequence: Synthetic oligonucleotide
  Sense strand starting at position 3661 of SEQ ID NO: 1881644
uagcucuuuguacgaguaa

SEQ ID NO: 2060543 - RNA, 19 nt, Artificial Sequence
  Description of Artificial Sequence: Synthetic oligonucleotide
  Antisense strand to SEQ ID NO: 2060542
uuacucguacaaagagcua

SEQ ID NO: 2060544 - RNA, 19 nt, Artificial Sequence
  Description of Artificial Sequence: Synthetic oligonucleotide
  Sense strand starting at position 3662 of SEQ ID NO: 1881644
agcucuuuguacgaguaau

SEQ ID NO: 2060545 - RNA, 19 nt, Artificial Sequence
  Description of Artificial Sequence: Synthetic oligonucleotide
  Antisense strand to SEQ ID NO: 2060544
auuacucguacaaagagcu

SEQ ID NO: 2060546 - RNA, 19 nt, Artificial Sequence
  Description of Artificial Sequence: Synthetic oligonucleotide
  Sense strand starting at position 3670 of SEQ ID NO: 1881644
guacgaguaaugcaaguau

SEQ ID NO: 2060547 - RNA, 19 nt, Artificial Sequence
  Description of Artificial Sequence: Synthetic oligonucleotide
  Antisense strand to SEQ ID NO: 2060546
auacuugcauuacucguac

SEQ ID NO: 2060548 - RNA, 19 nt, Artificial Sequence
  Description of Artificial Sequence: Synthetic oligonucleotide
  Sense strand starting at position 3689 of SEQ ID NO: 1881644
gcagguuucugucggagga

SEQ ID NO: 2060549 - RNA, 19 nt, Artificial Sequence
  Description of Artificial Sequence: Synthetic oligonucleotide
  Antisense strand to SEQ ID NO: 2060548
uccuccgacagaaaccugc

SEQ ID NO: 2060550 - RNA, 19 nt, Artificial Sequence
  Description of Artificial Sequence: Synthetic oligonucleotide
  Sense strand starting at position 3691 of SEQ ID NO: 1881644
agguuucugucggaggagu

SEQ ID NO: 2060551 - RNA, 19 nt, Artificial Sequence
  Description of Artificial Sequence: Synthetic oligonucleotide
  Antisense strand to SEQ ID NO: 2060550
acuccuccgacagaaaccu

SEQ ID NO: 2060552 - RNA, 19 nt, Artificial Sequence
  Description of Artificial Sequence: Synthetic oligonucleotide
  Sense strand starting at position 3692 of SEQ ID NO: 1881644
gguuucugucggaggaguc

SEQ ID NO: 2060553 - RNA, 19 nt, Artificial Sequence
  Description of Artificial Sequence: Synthetic oligonucleotide
  Antisense strand to SEQ ID NO: 2060552
gacuccuccgacagaaacc

SEQ ID NO: 2060554 - RNA, 19 nt, Artificial Sequence
  Description of Artificial Sequence: Synthetic oligonucleotide
  Sense strand starting at position 3721 of SEQ ID NO: 1881644
agugaauacucgcaccuuu

SEQ ID NO: 2060555 - RNA, 19 nt, Artificial Sequence
  Description of Artificial Sequence: Synthetic oligonucleotide
  Antisense strand to SEQ ID NO: 2060554
aaaggugcgaguauucacu

SEQ ID NO: 2060556 - RNA, 19 nt, Artificial Sequence
  Description of Artificial Sequence: Synthetic oligonucleotide
  Sense strand starting at position 3747 of SEQ ID NO: 1881644
gcaguuggcaaagggaaau

SEQ ID NO: 2060557 - RNA, 19 nt, Artificial Sequence
  Description of Artificial Sequence: Synthetic oligonucleotide
  Antisense strand to SEQ ID NO: 2060556
auuucccuuugccaacugc

SEQ ID NO: 2060558 - RNA, 19 nt, Artificial Sequence
  Description of Artificial Sequence: Synthetic oligonucleotide
  Sense strand starting at position 3777 of SEQ ID NO: 1881644
gagcauaugugcgcacaga

SEQ ID NO: 2060559 - RNA, 19 nt, Artificial Sequence
  Description of Artificial Sequence: Synthetic oligonucleotide
  Antisense strand to SEQ ID NO: 2060558
ucugugcgcacauaugcuc

SEQ ID NO: 2060560 - RNA, 19 nt, Artificial Sequence
  Description of Artificial Sequence: Synthetic oligonucleotide
  Sense strand starting at position 3831 of SEQ ID NO: 1881644
gggugugugcgguguacuu

SEQ ID NO: 2060561 - RNA, 19 nt, Artificial Sequence
  Description of Artificial Sequence: Synthetic oligonucleotide
  Antisense strand to SEQ ID NO: 2060560
aaguacaccgcacacaccc

SEQ ID NO: 2060562 - RNA, 19 nt, Artificial Sequence
  Description of Artificial Sequence: Synthetic oligonucleotide
  Sense strand starting at position 3869 of SEQ ID NO: 1881644
cauauagguucccgaauga

SEQ ID NO: 2060563 - RNA, 19 nt, Artificial Sequence
  Description of Artificial Sequence: Synthetic oligonucleotide
  Antisense strand to SEQ ID NO: 2060562
ucauucgggaaccuauaug

SEQ ID NO: 2060564 - RNA, 19 nt, Artificial Sequence
  Description of Artificial Sequence: Synthetic oligonucleotide
  Sense strand starting at position 3873 of SEQ ID NO: 1881644
uagguucccgaaugagaac

SEQ ID NO: 2060565 - RNA, 19 nt, Artificial Sequence
  Description of Artificial Sequence: Synthetic oligonucleotide
  Antisense strand to SEQ ID NO: 2060564
guucucauucgggaaccua

SEQ ID NO: 2060566 - RNA, 19 nt, Artificial Sequence
  Description of Artificial Sequence: Synthetic oligonucleotide
  Sense strand starting at position 3974 of SEQ ID NO: 1881644
uaccuauugguacaggagu

SEQ ID NO: 2060567 - RNA, 19 nt, Artificial Sequence
  Description of Artificial Sequence: Synthetic oligonucleotide
  Antisense strand to SEQ ID NO: 2060566
acuccuguaccaauaggua

SEQ ID NO: 2060568 - RNA, 19 nt, Artificial Sequence
  Description of Artificial Sequence: Synthetic oligonucleotide
  Sense strand starting at position 3976 of SEQ ID NO: 1881644
ccuauugguacaggaguua

SEQ ID NO: 2060569 - RNA, 19 nt, Artificial Sequence
  Description of Artificial Sequence: Synthetic oligonucleotide
  Antisense strand to SEQ ID NO: 2060568
uaacuccuguaccaauagg

SEQ ID NO: 2060570 - RNA, 19 nt, Artificial Sequence
  Description of Artificial Sequence: Synthetic oligonucleotide
  Sense strand starting at position 7 of SEQ ID NO: 1881645
cagcaaguugacugaguuu

SEQ ID NO: 2060571 - RNA, 19 nt, Artificial Sequence
  Description of Artificial Sequence: Synthetic oligonucleotide
  Antisense strand to SEQ ID NO: 2060570
aaacucagucaacuugcug

SEQ ID NO: 2060572 - RNA, 19 nt, Artificial Sequence
  Description of Artificial Sequence: Synthetic oligonucleotide
  Sense strand starting at position 10 of SEQ ID NO: 1881645
caaguugacugaguuuguu

SEQ ID NO: 2060573 - RNA, 19 nt, Artificial Sequence
  Description of Artificial Sequence: Synthetic oligonucleotide
  Antisense strand to SEQ ID NO: 2060572
aacaaacucagucaacuug

SEQ ID NO: 2060574 - RNA, 19 nt, Artificial Sequence
  Description of Artificial Sequence: Synthetic oligonucleotide
  Sense strand starting at position 14 of SEQ ID NO: 1881645
uugacugaguuuguuggua

SEQ ID NO: 2060575 - RNA, 19 nt, Artificial Sequence
  Description of Artificial Sequence: Synthetic oligonucleotide
  Antisense strand to SEQ ID NO: 2060574
uaccaacaaacucagucaa

SEQ ID NO: 2060576 - RNA, 19 nt, Artificial Sequence
  Description of Artificial Sequence: Synthetic oligonucleotide
  Sense strand starting at position 18 of SEQ ID NO: 1881645
cugaguuuguugguaaauu

SEQ ID NO: 2060577 - RNA, 19 nt, Artificial Sequence
  Description of Artificial Sequence: Synthetic oligonucleotide
  Antisense strand to SEQ ID NO: 2060576
aauuuaccaacaaacucag

SEQ ID NO: 2060578 - RNA, 19 nt, Artificial Sequence
  Description of Artificial Sequence: Synthetic oligonucleotide
  Sense strand starting at position 26 of SEQ ID NO: 1881645
guugguaaauucucuagaa

SEQ ID NO: 2060579 - RNA, 19 nt, Artificial Sequence
  Description of Artificial Sequence: Synthetic oligonucleotide
  Antisense strand to SEQ ID NO: 2060578
uucuagagaauuuaccaac

SEQ ID NO: 2060580 - RNA, 19 nt, Artificial Sequence
  Description of Artificial Sequence: Synthetic oligonucleotide
  Sense strand starting at position 27 of SEQ ID NO: 1881645
uugguaaauucucuagaau

SEQ ID NO: 2060581 - RNA, 19 nt, Artificial Sequence
  Description of Artificial Sequence: Synthetic oligonucleotide
  Antisense strand to SEQ ID NO: 2060580
auucuagagaauuuaccaa

SEQ ID NO: 2060582 - RNA, 19 nt, Artificial Sequence
  Description of Artificial Sequence: Synthetic oligonucleotide
  Sense strand starting at position 142 of SEQ ID NO: 1881645
aaguaagccucagugucuu

SEQ ID NO: 2060583 - RNA, 19 nt, Artificial Sequence
  Description of Artificial Sequence: Synthetic oligonucleotide
  Antisense strand to SEQ ID NO: 2060582
aagacacugaggcuuacuu

SEQ ID NO: 2060584 - RNA, 19 nt, Artificial Sequence
  Description of Artificial Sequence: Synthetic oligonucleotide
  Sense strand starting at position 155 of SEQ ID NO: 1881645
ugucuuggaggcugauaga

SEQ ID NO: 2060585 - RNA, 19 nt, Artificial Sequence
  Description of Artificial Sequence: Synthetic oligonucleotide
  Antisense strand to SEQ ID NO: 2060584
ucuaucagccuccaagaca

SEQ ID NO: 2060586 - RNA, 19 nt, Artificial Sequence
  Description of Artificial Sequence: Synthetic oligonucleotide
  Sense strand starting at position 236 of SEQ ID NO: 1881645
gcagaaaugucuuccuccu

SEQ ID NO: 2060587 - RNA, 19 nt, Artificial Sequence
  Description of Artificial Sequence: Synthetic oligonucleotide
  Antisense strand to SEQ ID NO: 2060586
aggaggaagacauuucugc

SEQ ID NO: 2060588 - RNA, 19 nt, Artificial Sequence
  Description of Artificial Sequence: Synthetic oligonucleotide
  Sense strand starting at position 284 of SEQ ID NO: 1881645
gccacacuagcuuagacua

SEQ ID NO: 2060589 - RNA, 19 nt, Artificial Sequence
  Description of Artificial Sequence: Synthetic oligonucleotide
  Antisense strand to SEQ ID NO: 2060588
uagucuaagcuaguguggc

SEQ ID NO: 2060590 - RNA, 19 nt, Artificial Sequence
  Description of Artificial Sequence: Synthetic oligonucleotide
  Sense strand starting at position 303 of SEQ ID NO: 1881645
gaauacaggucccugaaau

SEQ ID NO: 2060591 - RNA, 19 nt, Artificial Sequence
  Description of Artificial Sequence: Synthetic oligonucleotide
  Antisense strand to SEQ ID NO: 2060590
auuucagggaccuguauuc

SEQ ID NO: 2060592 - RNA, 19 nt, Artificial Sequence
  Description of Artificial Sequence: Synthetic oligonucleotide
  Sense strand starting at position 304 of SEQ ID NO: 1881645
aauacaggucccugaaaug

SEQ ID NO: 2060593 - RNA, 19 nt, Artificial Sequence
  Description of Artificial Sequence: Synthetic oligonucleotide
  Antisense strand to SEQ ID NO: 2060592
cauuucagggaccuguauu

SEQ ID NO: 2060594 - RNA, 19 nt, Artificial Sequence
  Description of Artificial Sequence: Synthetic oligonucleotide
  Sense strand starting at position 315 of SEQ ID NO: 1881645
cugaaauggucuccuuucu

SEQ ID NO: 2060595 - RNA, 19 nt, Artificial Sequence
  Description of Artificial Sequence: Synthetic oligonucleotide
  Antisense strand to SEQ ID NO: 2060594
agaaaggagaccauuucag

SEQ ID NO: 2060596 - RNA, 19 nt, Artificial Sequence
  Description of Artificial Sequence: Synthetic oligonucleotide
  Sense strand starting at position 628 of SEQ ID NO: 1881645
cccagucucuuucuugaca

SEQ ID NO: 2060597 - RNA, 19 nt, Artificial Sequence
  Description of Artificial Sequence: Synthetic oligonucleotide
  Antisense strand to SEQ ID NO: 2060596
ugucaagaaagagacuggg

SEQ ID NO: 2060598 - RNA, 19 nt, Artificial Sequence
  Description of Artificial Sequence: Synthetic oligonucleotide
  Sense strand starting at position 631 of SEQ ID NO: 1881645
agucucuuucuugacagau

SEQ ID NO: 2060599 - RNA, 19 nt, Artificial Sequence
  Description of Artificial Sequence: Synthetic oligonucleotide
  Antisense strand to SEQ ID NO: 2060598
aucugucaagaaagagacu

SEQ ID NO: 2060600 - RNA, 19 nt, Artificial Sequence
  Description of Artificial Sequence: Synthetic oligonucleotide
  Sense strand starting at position 646 of SEQ ID NO: 1881645
agaucaaagugggugucau

SEQ ID NO: 2060601 - RNA, 19 nt, Artificial Sequence
  Description of Artificial Sequence: Synthetic oligonucleotide
  Antisense strand to SEQ ID NO: 2060600
augacacccacuuugaucu

SEQ ID NO: 2060602 - RNA, 19 nt, Artificial Sequence
  Description of Artificial Sequence: Synthetic oligonucleotide
  Sense strand starting at position 647 of SEQ ID NO: 1881645
gaucaaagugggugucauu

SEQ ID NO: 2060603 - RNA, 19 nt, Artificial Sequence
  Description of Artificial Sequence: Synthetic oligonucleotide
  Antisense strand to SEQ ID NO: 2060602
aaugacacccacuuugauc

SEQ ID NO: 2060604 - RNA, 19 nt, Artificial Sequence
  Description of Artificial Sequence: Synthetic oligonucleotide
  Sense strand starting at position 799 of SEQ ID NO: 1881645
uugugaauuuaaggaugaa

SEQ ID NO: 2060605 - RNA, 19 nt, Artificial Sequence
  Description of Artificial Sequence: Synthetic oligonucleotide
  Antisense strand to SEQ ID NO: 2060604
uucauccuuaaauucacaa

SEQ ID NO: 2060606 - RNA, 19 nt, Artificial Sequence
  Description of Artificial Sequence: Synthetic oligonucleotide
  Sense strand starting at position 829 of SEQ ID NO: 1881645
aaguauaaggcccauguau

SEQ ID NO: 2060607 - RNA, 19 nt, Artificial Sequence
  Description of Artificial Sequence: Synthetic oligonucleotide
  Antisense strand to SEQ ID NO: 2060606
auacaugggccuuauacuu

SEQ ID NO: 2060608 - RNA, 19 nt, Artificial Sequence
  Description of Artificial Sequence: Synthetic oligonucleotide
  Sense strand starting at position 831 of SEQ ID NO: 1881645
guauaaggcccauguauaa

SEQ ID NO: 2060609 - RNA, 19 nt, Artificial Sequence
  Description of Artificial Sequence: Synthetic oligonucleotide
  Antisense strand to SEQ ID NO: 2060608
uuauacaugggccuuauac

SEQ ID NO: 2060610 - RNA, 19 nt, Artificial Sequence
  Description of Artificial Sequence: Synthetic oligonucleotide
  Sense strand starting at position 910 of SEQ ID NO: 1881645
agauguaacgauugugagu

SEQ ID NO: 2060611 - RNA, 19 nt, Artificial Sequence
  Description of Artificial Sequence: Synthetic oligonucleotide
  Antisense strand to SEQ ID NO: 2060610
acucacaaucguuacaucu

SEQ ID NO: 2060612 - RNA, 19 nt, Artificial Sequence
  Description of Artificial Sequence: Synthetic oligonucleotide
  Sense strand starting at position 1013 of SEQ ID NO: 1881645
acuguagccuauucugagu

SEQ ID NO: 2060613 - RNA, 19 nt, Artificial Sequence
  Description of Artificial Sequence: Synthetic oligonucleotide
  Antisense strand to SEQ ID NO: 2060612
acucagaauaggcuacagu

SEQ ID NO: 2060614 - RNA, 19 nt, Artificial Sequence
  Description of Artificial Sequence: Synthetic oligonucleotide
  Sense strand starting at position 1018 of SEQ ID NO: 1881645
agccuauucugagugcuau

SEQ ID NO: 2060615 - RNA, 19 nt, Artificial Sequence
  Description of Artificial Sequence: Synthetic oligonucleotide
  Antisense strand to SEQ ID NO: 2060614
auagcacucagaauaggcu

SEQ ID NO: 2060616 - RNA, 19 nt, Artificial Sequence
  Description of Artificial Sequence: Synthetic oligonucleotide
  Sense strand starting at position 1046 of SEQ ID NO: 1881645
uuugucagccuggaagauu

SEQ ID NO: 2060617 - RNA, 19 nt, Artificial Sequence
  Description of Artificial Sequence: Synthetic oligonucleotide
  Antisense strand to SEQ ID NO: 2060616
aaucuuccaggcugacaaa

SEQ ID NO: 2060618 - RNA, 19 nt, Artificial Sequence
  Description of Artificial Sequence: Synthetic oligonucleotide
  Sense strand starting at position 1055 of SEQ ID NO: 1881645
cuggaagauuccuacuuag

SEQ ID NO: 2060619 - RNA, 19 nt, Artificial Sequence
  Description of Artificial Sequence: Synthetic oligonucleotide
  Antisense strand to SEQ ID NO: 2060618
cuaaguaggaaucuuccag

SEQ ID NO: 2060620 - RNA, 19 nt, Artificial Sequence
  Description of Artificial Sequence: Synthetic oligonucleotide
  Sense strand starting at position 1073 of SEQ ID NO: 1881645
gucuuuaagcuacagcaua

SEQ ID NO: 2060621 - RNA, 19 nt, Artificial Sequence
  Description of Artificial Sequence: Synthetic oligonucleotide
  Antisense strand to SEQ ID NO: 2060620
uaugcuguagcuuaaagac

SEQ ID NO: 2060622 - RNA, 19 nt, Artificial Sequence
  Description of Artificial Sequence: Synthetic oligonucleotide
  Sense strand starting at position 1093 of SEQ ID NO: 1881645
gugucacuuccucuguguu

SEQ ID NO: 2060623 - RNA, 19 nt, Artificial Sequence
  Description of Artificial Sequence: Synthetic oligonucleotide
  Antisense strand to SEQ ID NO: 2060622
aacacagaggaagugacac

SEQ ID NO: 2060624 - RNA, 19 nt, Artificial Sequence
  Description of Artificial Sequence: Synthetic oligonucleotide
  Sense strand starting at position 1120 of SEQ ID NO: 1881645
ccuguucucuccuuuagua

SEQ ID NO: 2060625 - RNA, 19 nt, Artificial Sequence
  Description of Artificial Sequence: Synthetic oligonucleotide
  Antisense strand to SEQ ID NO: 2060624
uacuaaaggagagaacagg

SEQ ID NO: 2060626 - RNA, 19 nt, Artificial Sequence
  Description of Artificial Sequence: Synthetic oligonucleotide
  Sense strand starting at position 1229 of SEQ ID NO: 1881645
ucagauccuuaagaguaua

SEQ ID NO: 2060627 - RNA, 19 nt, Artificial Sequence
  Description of Artificial Sequence: Synthetic oligonucleotide
  Antisense strand to SEQ ID NO: 2060626
uauacucuuaaggaucuga

SEQ ID NO: 2060628 - RNA, 19 nt, Artificial Sequence
  Description of Artificial Sequence: Synthetic oligonucleotide
  Sense strand starting at position 1232 of SEQ ID NO: 1881645
gauccuuaagaguauaguu

SEQ ID NO: 2060629 - RNA, 19 nt, Artificial Sequence
  Description of Artificial Sequence: Synthetic oligonucleotide
  Antisense strand to SEQ ID NO: 2060628
aacuauacucuuaaggauc

SEQ ID NO: 2060630 - RNA, 19 nt, Artificial Sequence
  Description of Artificial Sequence: Synthetic oligonucleotide
  Sense strand starting at position 1246 of SEQ ID NO: 1881645
uaguucugaguuuagucau

SEQ ID NO: 2060631 - RNA, 19 nt, Artificial Sequence
  Description of Artificial Sequence: Synthetic oligonucleotide
  Antisense strand to SEQ ID NO: 2060630
augacuaaacucagaacua

SEQ ID NO: 2060632 - RNA, 19 nt, Artificial Sequence
  Description of Artificial Sequence: Synthetic oligonucleotide
  Sense strand starting at position 1252 of SEQ ID NO: 1881645
ugaguuuagucauucguau

SEQ ID NO: 2060633 - RNA, 19 nt, Artificial Sequence
  Description of Artificial Sequence: Synthetic oligonucleotide
  Antisense strand to SEQ ID NO: 2060632
auacgaaugacuaaacuca

SEQ ID NO: 2060634 - RNA, 19 nt, Artificial Sequence
  Description of Artificial Sequence: Synthetic oligonucleotide
  Sense strand starting at position 1261 of SEQ ID NO: 1881645
ucauucguaugucuccaaa

SEQ ID NO: 2060635 - RNA, 19 nt, Artificial Sequence
  Description of Artificial Sequence: Synthetic oligonucleotide
  Antisense strand to SEQ ID NO: 2060634
uuuggagacauacgaauga

SEQ ID NO: 2060636 - RNA, 19 nt, Artificial Sequence
  Description of Artificial Sequence: Synthetic oligonucleotide
  Sense strand starting at position 1294 of SEQ ID NO: 1881645
ccugaucaugggugcucaa

SEQ ID NO: 2060637 - RNA, 19 nt, Artificial Sequence
  Description of Artificial Sequence: Synthetic oligonucleotide
  Antisense strand to SEQ ID NO: 2060636
uugagcacccaugaucagg

SEQ ID NO: 2060638 - RNA, 19 nt, Artificial Sequence
  Description of Artificial Sequence: Synthetic oligonucleotide
  Sense strand starting at position 1297 of SEQ ID NO: 1881645
gaucaugggugcucaauaa

SEQ ID NO: 2060639 - RNA, 19 nt, Artificial Sequence
  Description of Artificial Sequence: Synthetic oligonucleotide
  Antisense strand to SEQ ID NO: 2060638
uuauugagcacccaugauc

SEQ ID NO: 2060640 - RNA, 19 nt, Artificial Sequence
  Description of Artificial Sequence: Synthetic oligonucleotide
  Sense strand starting at position 1395 of SEQ ID NO: 1881645
ggcaguuaaagggagcuua

SEQ ID NO: 2060641 - RNA, 19 nt, Artificial Sequence
  Description of Artificial Sequence: Synthetic oligonucleotide
  Antisense strand to SEQ ID NO: 2060640
uaagcucccuuuaacugcc

SEQ ID NO: 2060642 - RNA, 19 nt, Artificial Sequence
  Description of Artificial Sequence: Synthetic oligonucleotide
  Sense strand starting at position 1409 of SEQ ID NO: 1881645
gcuuaucguaagggauauc

SEQ ID NO: 2060643 - RNA, 19 nt, Artificial Sequence
  Description of Artificial Sequence: Synthetic oligonucleotide
  Antisense strand to SEQ ID NO: 2060642
gauaucccuuacgauaagc

SEQ ID NO: 2060644 - RNA, 19 nt, Artificial Sequence
  Description of Artificial Sequence: Synthetic oligonucleotide
  Sense strand starting at position 1412 of SEQ ID NO: 1881645
uaucguaagggauaucauc

SEQ ID NO: 2060645 - RNA, 19 nt, Artificial Sequence
  Description of Artificial Sequence: Synthetic oligonucleotide
  Antisense strand to SEQ ID NO: 2060644
gaugauaucccuuacgaua

SEQ ID NO: 2060646 - RNA, 19 nt, Artificial Sequence
  Description of Artificial Sequence: Synthetic oligonucleotide
  Sense strand starting at position 1529 of SEQ ID NO: 1881645
caggaauacugauugucag

SEQ ID NO: 2060647 - RNA, 19 nt, Artificial Sequence
  Description of Artificial Sequence: Synthetic oligonucleotide
  Antisense strand to SEQ ID NO: 2060646
cugacaaucaguauuccug

SEQ ID NO: 2060648 - RNA, 19 nt, Artificial Sequence
  Description of Artificial Sequence: Synthetic oligonucleotide
  Sense strand starting at position 3577 of SEQ ID NO: 1881645
gccuacaagguguacaaua

SEQ ID NO: 2060649 - RNA, 19 nt, Artificial Sequence
  Description of Artificial Sequence: Synthetic oligonucleotide
  Antisense strand to SEQ ID NO: 2060648
uauuguacaccuuguaggc

SEQ ID NO: 2060650 - RNA, 19 nt, Artificial Sequence
  Description of Artificial Sequence: Synthetic oligonucleotide
  Sense strand starting at position 126 of SEQ ID NO: 1881646
agguguguccgugucguuu

SEQ ID NO: 2060651 - RNA, 19 nt, Artificial Sequence
  Description of Artificial Sequence: Synthetic oligonucleotide
  Antisense strand to SEQ ID NO: 2060650
aaacgacacggacacaccu

SEQ ID NO: 2060652 - RNA, 19 nt, Artificial Sequence
  Description of Artificial Sequence: Synthetic oligonucleotide
  Sense strand starting at position 211 of SEQ ID NO: 1881646
acgauaauaugggugaauc

SEQ ID NO: 2060653 - RNA, 19 nt, Artificial Sequence
  Description of Artificial Sequence: Synthetic oligonucleotide
  Antisense strand to SEQ ID NO: 2060652
gauucacccauauuaucgu

SEQ ID NO: 2060654 - RNA, 19 nt, Artificial Sequence
  Description of Artificial Sequence: Synthetic oligonucleotide
  Sense strand starting at position 212 of SEQ ID NO: 1881646
cgauaauaugggugaaucu

SEQ ID NO: 2060655 - RNA, 19 nt, Artificial Sequence
  Description of Artificial Sequence: Synthetic oligonucleotide
  Antisense strand to SEQ ID NO: 2060654
agauucacccauauuaucg

SEQ ID NO: 2060656 - RNA, 19 nt, Artificial Sequence
  Description of Artificial Sequence: Synthetic oligonucleotide
  Sense strand starting at position 375 of SEQ ID NO: 1881646
ggguguauaggaugauaga

SEQ ID NO: 2060657 - RNA, 19 nt, Artificial Sequence
  Description of Artificial Sequence: Synthetic oligonucleotide
  Antisense strand to SEQ ID NO: 2060656
ucuaucauccuauacaccc

SEQ ID NO: 2060658 - RNA, 19 nt, Artificial Sequence
  Description of Artificial Sequence: Synthetic oligonucleotide
  Sense strand starting at position 384 of SEQ ID NO: 1881646
ggaugauagagcuguccug

SEQ ID NO: 2060659 - RNA, 19 nt, Artificial Sequence
  Description of Artificial Sequence: Synthetic oligonucleotide
  Antisense strand to SEQ ID NO: 2060658
caggacagcucuaucaucc

SEQ ID NO: 2060660 - RNA, 19 nt, Artificial Sequence
  Description of Artificial Sequence: Synthetic oligonucleotide
  Sense strand starting at position 415 of SEQ ID NO: 1881646
ggugguaauuacuugaauc

SEQ ID NO: 2060661 - RNA, 19 nt, Artificial Sequence
  Description of Artificial Sequence: Synthetic oligonucleotide
  Antisense strand to SEQ ID NO: 2060660
gauucaaguaauuaccacc

SEQ ID NO: 2060662 - RNA, 19 nt, Artificial Sequence
  Description of Artificial Sequence: Synthetic oligonucleotide
  Sense strand starting at position 426 of SEQ ID NO: 1881646
cuugaaucuauguaugugu

SEQ ID NO: 2060663 - RNA, 19 nt, Artificial Sequence
  Description of Artificial Sequence: Synthetic oligonucleotide
  Antisense strand to SEQ ID NO: 2060662
acacauacauagauucaag

SEQ ID NO: 2060664 - RNA, 19 nt, Artificial Sequence
  Description of Artificial Sequence: Synthetic oligonucleotide
  Sense strand starting at position 650 of SEQ ID NO: 1881646
cccugagauugugugauca

SEQ ID NO: 2060665 - RNA, 19 nt, Artificial Sequence
  Description of Artificial Sequence: Synthetic oligonucleotide
  Antisense strand to SEQ ID NO: 2060664
ugaucacacaaucucaggg

SEQ ID NO: 2060666 - RNA, 19 nt, Artificial Sequence
  Description of Artificial Sequence: Synthetic oligonucleotide
  Sense strand starting at position 654 of SEQ ID NO: 1881646
gagauugugugaucaguaa

SEQ ID NO: 2060667 - RNA, 19 nt, Artificial Sequence
  Description of Artificial Sequence: Synthetic oligonucleotide
  Antisense strand to SEQ ID NO: 2060666
uuacugaucacacaaucuc

SEQ ID NO: 2060668 - RNA, 19 nt, Artificial Sequence
  Description of Artificial Sequence: Synthetic oligonucleotide
  Sense strand starting at position 729 of SEQ ID NO: 1881646
agaaucuuugaugguguuu

SEQ ID NO: 2060669 - RNA, 19 nt, Artificial Sequence
  Description of Artificial Sequence: Synthetic oligonucleotide
  Antisense strand to SEQ ID NO: 2060668
aaacaccaucaaagauucu

SEQ ID NO: 2060670 - RNA, 19 nt, Artificial Sequence
  Description of Artificial Sequence: Synthetic oligonucleotide
  Sense strand starting at position 800 of SEQ ID NO: 1881646
cagauuacaguauggaauu

SEQ ID NO: 2060671 - RNA, 19 nt, Artificial Sequence
  Description of Artificial Sequence: Synthetic oligonucleotide
  Antisense strand to SEQ ID NO: 2060670
aauuccauacuguaaucug

SEQ ID NO: 2060672 - RNA, 19 nt, Artificial Sequence
  Description of Artificial Sequence: Synthetic oligonucleotide
  Sense strand starting at position 836 of SEQ ID NO: 1881646
ugggaaugcuagcuugaaa

SEQ ID NO: 2060673 - RNA, 19 nt, Artificial Sequence
  Description of Artificial Sequence: Synthetic oligonucleotide
  Antisense strand to SEQ ID NO: 2060672
uuucaagcuagcauuccca

SEQ ID NO: 2060674 - RNA, 19 nt, Artificial Sequence
  Description of Artificial Sequence: Synthetic oligonucleotide
  Sense strand starting at position 979 of SEQ ID NO: 1881646
uccuuugagccauaggaau

SEQ ID NO: 2060675 - RNA, 19 nt, Artificial Sequence
  Description of Artificial Sequence: Synthetic oligonucleotide
  Antisense strand to SEQ ID NO: 2060674
auuccuauggcucaaagga

SEQ ID NO: 2060676 - RNA, 19 nt, Artificial Sequence
  Description of Artificial Sequence: Synthetic oligonucleotide
  Sense strand starting at position 1080 of SEQ ID NO: 1881646
ucuauugcaccugaguaua

SEQ ID NO: 2060677 - RNA, 19 nt, Artificial Sequence
  Description of Artificial Sequence: Synthetic oligonucleotide
  Antisense strand to SEQ ID NO: 2060676
uauacucaggugcaauaga

SEQ ID NO: 2060678 - RNA, 19 nt, Artificial Sequence
  Description of Artificial Sequence: Synthetic oligonucleotide
  Sense strand starting at position 1420 of SEQ ID NO: 1881646
gcugaaacuccagguuaca

SEQ ID NO: 2060679 - RNA, 19 nt, Artificial Sequence
  Description of Artificial Sequence: Synthetic oligonucleotide
  Antisense strand to SEQ ID NO: 2060678
uguaaccuggaguuucagc

SEQ ID NO: 2060680 - RNA, 19 nt, Artificial Sequence
  Description of Artificial Sequence: Synthetic oligonucleotide
  Sense strand starting at position 1436 of SEQ ID NO: 1881646
acaucuggcgucuaaugau

SEQ ID NO: 2060681 - RNA, 19 nt, Artificial Sequence
  Description of Artificial Sequence: Synthetic oligonucleotide
  Antisense strand to SEQ ID NO: 2060680
aucauuagacgccagaugu

SEQ ID NO: 2060682 - RNA, 19 nt, Artificial Sequence
  Description of Artificial Sequence: Synthetic oligonucleotide
  Sense strand starting at position 1562 of SEQ ID NO: 1881646
gggauagaugcugagcuga

SEQ ID NO: 2060683 - RNA, 19 nt, Artificial Sequence
  Description of Artificial Sequence: Synthetic oligonucleotide
  Antisense strand to SEQ ID NO: 2060682
ucagcucagcaucuauccc

SEQ ID NO: 2060684 - RNA, 19 nt, Artificial Sequence
  Description of Artificial Sequence: Synthetic oligonucleotide
  Sense strand starting at position 1564 of SEQ ID NO: 1881646
gauagaugcugagcugacu

SEQ ID NO: 2060685 - RNA, 19 nt, Artificial Sequence
  Description of Artificial Sequence: Synthetic oligonucleotide
  Antisense strand to SEQ ID NO: 2060684
agucagcucagcaucuauc

SEQ ID NO: 2060686 - RNA, 19 nt, Artificial Sequence
  Description of Artificial Sequence: Synthetic oligonucleotide
  Sense strand starting at position 1848 of SEQ ID NO: 1881646
gucaguaaccucuacaucu

SEQ ID NO: 2060687 - RNA, 19 nt, Artificial Sequence
  Description of Artificial Sequence: Synthetic oligonucleotide
  Antisense strand to SEQ ID NO: 2060686
agauguagagguuacugac

SEQ ID NO: 2060688 - RNA, 19 nt, Artificial Sequence
  Description of Artificial Sequence: Synthetic oligonucleotide
  Sense strand starting at position 2045 of SEQ ID NO: 1881646
gcucuuuguugagcauuua

SEQ ID NO: 2060689 - RNA, 19 nt, Artificial Sequence
  Description of Artificial Sequence: Synthetic oligonucleotide
  Antisense strand to SEQ ID NO: 2060688
uaaaugcucaacaaagagc

SEQ ID NO: 2060690 - RNA, 19 nt, Artificial Sequence
  Description of Artificial Sequence: Synthetic oligonucleotide
  Sense strand starting at position 2137 of SEQ ID NO: 1881646
cuuugcuucccuggauuaa

SEQ ID NO: 2060691 - RNA, 19 nt, Artificial Sequence
  Description of Artificial Sequence: Synthetic oligonucleotide
  Antisense strand to SEQ ID NO: 2060690
uuaauccagggaagcaaag

SEQ ID NO: 2060692 - RNA, 19 nt, Artificial Sequence
  Description of Artificial Sequence: Synthetic oligonucleotide
  Sense strand starting at position 2138 of SEQ ID NO: 1881646
uuugcuucccuggauuaaa

SEQ ID NO: 2060693 - RNA, 19 nt, Artificial Sequence
  Description of Artificial Sequence: Synthetic oligonucleotide
  Antisense strand to SEQ ID NO: 2060692
uuuaauccagggaagcaaa

SEQ ID NO: 2060694 - RNA, 19 nt, Artificial Sequence
  Description of Artificial Sequence: Synthetic oligonucleotide
  Sense strand starting at position 2406 of SEQ ID NO: 1881646
acccuagaucaucaggcau

SEQ ID NO: 2060695 - RNA, 19 nt, Artificial Sequence
  Description of Artificial Sequence: Synthetic oligonucleotide
  Antisense strand to SEQ ID NO: 2060694
augccugaugaucuagggu

SEQ ID NO: 2060696 - RNA, 19 nt, Artificial Sequence
  Description of Artificial Sequence: Synthetic oligonucleotide
  Sense strand starting at position 2644 of SEQ ID NO: 1881646
ucuagaccguucucaacaa

SEQ ID NO: 2060697 - RNA, 19 nt, Artificial Sequence
  Description of Artificial Sequence: Synthetic oligonucleotide
  Antisense strand to SEQ ID NO: 2060696
uuguugagaacggucuaga

SEQ ID NO: 2060698 - RNA, 19 nt, Artificial Sequence
  Description of Artificial Sequence: Synthetic oligonucleotide
  Sense strand starting at position 2691 of SEQ ID NO: 1881646
cuccaucuuccugggaauu

SEQ ID NO: 2060699 - RNA, 19 nt, Artificial Sequence
  Description of Artificial Sequence: Synthetic oligonucleotide
  Antisense strand to SEQ ID NO: 2060698
aauucccaggaagauggag

SEQ ID NO: 2060700 - RNA, 19 nt, Artificial Sequence
  Description of Artificial Sequence: Synthetic oligonucleotide
  Sense strand starting at position 2748 of SEQ ID NO: 1881646
acgucuucuuuccugauuu

SEQ ID NO: 2060701 - RNA, 19 nt, Artificial Sequence
  Description of Artificial Sequence: Synthetic oligonucleotide
  Antisense strand to SEQ ID NO: 2060700
aaaucaggaaagaagacgu

SEQ ID NO: 2060702 - RNA, 19 nt, Artificial Sequence
  Description of Artificial Sequence: Synthetic oligonucleotide
  Sense strand starting at position 2768 of SEQ ID NO: 1881646
cuccuuuaucuuggugaag

SEQ ID NO: 2060703 - RNA, 19 nt, Artificial Sequence
  Description of Artificial Sequence: Synthetic oligonucleotide
  Antisense strand to SEQ ID NO: 2060702
cuucaccaagauaaaggag

SEQ ID NO: 2060704 - RNA, 19 nt, Artificial Sequence
  Description of Artificial Sequence: Synthetic oligonucleotide
  Sense strand starting at position 2771 of SEQ ID NO: 1881646
cuuuaucuuggugaagcau

SEQ ID NO: 2060705 - RNA, 19 nt, Artificial Sequence
  Description of Artificial Sequence: Synthetic oligonucleotide
  Antisense strand to SEQ ID NO: 2060704
augcuucaccaagauaaag

SEQ ID NO: 2060706 - RNA, 19 nt, Artificial Sequence
  Description of Artificial Sequence: Synthetic oligonucleotide
  Sense strand starting at position 2777 of SEQ ID NO: 1881646
cuuggugaagcauaucuuu

SEQ ID NO: 2060707 - RNA, 19 nt, Artificial Sequence
  Description of Artificial Sequence: Synthetic oligonucleotide
  Antisense strand to SEQ ID NO: 2060706
aaagauaugcuucaccaag

SEQ ID NO: 2060708 - RNA, 19 nt, Artificial Sequence
  Description of Artificial Sequence: Synthetic oligonucleotide
  Sense strand starting at position 2845 of SEQ ID NO: 1881646
cuggaacauugccuuucua

SEQ ID NO: 2060709 - RNA, 19 nt, Artificial Sequence
  Description of Artificial Sequence: Synthetic oligonucleotide
  Antisense strand to SEQ ID NO: 2060708
uagaaaggcaauguuccag

SEQ ID NO: 2060710 - RNA, 19 nt, Artificial Sequence
  Description of Artificial Sequence: Synthetic oligonucleotide
  Sense strand starting at position 3617 of SEQ ID NO: 1881646
uguugagaagccugaugac

SEQ ID NO: 2060711 - RNA, 19 nt, Artificial Sequence
  Description of Artificial Sequence: Synthetic oligonucleotide
  Antisense strand to SEQ ID NO: 2060710
gucaucaggcuucucaaca

SEQ ID NO: 2060712 - RNA, 19 nt, Artificial Sequence
  Description of Artificial Sequence: Synthetic oligonucleotide
  Sense strand starting at position 3629 of SEQ ID NO: 1881646
ugaugacauucugauuuga

SEQ ID NO: 2060713 - RNA, 19 nt, Artificial Sequence
  Description of Artificial Sequence: Synthetic oligonucleotide
  Antisense strand to SEQ ID NO: 2060712
ucaaaucagaaugucauca

SEQ ID NO: 2060714 - RNA, 19 nt, Artificial Sequence
  Description of Artificial Sequence: Synthetic oligonucleotide
  Sense strand starting at position 3680 of SEQ ID NO: 1881646
ucuuuaucccagcaguucu

SEQ ID NO: 2060715 - RNA, 19 nt, Artificial Sequence
  Description of Artificial Sequence: Synthetic oligonucleotide
  Antisense strand to SEQ ID NO: 2060714
agaacugcugggauaaaga

SEQ ID NO: 2060716 - RNA, 19 nt, Artificial Sequence
  Description of Artificial Sequence: Synthetic oligonucleotide
  Sense strand starting at position 3695 of SEQ ID NO: 1881646
uucuaaaguuucccaguga

SEQ ID NO: 2060717 - RNA, 19 nt, Artificial Sequence
  Description of Artificial Sequence: Synthetic oligonucleotide
  Antisense strand to SEQ ID NO: 2060716
ucacugggaaacuuuagaa

SEQ ID NO: 2060718 - RNA, 19 nt, Artificial Sequence
  Description of Artificial Sequence: Synthetic oligonucleotide
  Sense strand starting at position 3699 of SEQ ID NO: 1881646
aaaguuucccagugacaug

SEQ ID NO: 2060719 - RNA, 19 nt, Artificial Sequence
  Description of Artificial Sequence: Synthetic oligonucleotide
  Antisense strand to SEQ ID NO: 2060718
caugucacugggaaacuuu

SEQ ID NO: 2060720 - RNA, 19 nt, Artificial Sequence
  Description of Artificial Sequence: Synthetic oligonucleotide
  Sense strand starting at position 3766 of SEQ ID NO: 1881646
acaucauucuugucuggga

SEQ ID NO: 2060721 - RNA, 19 nt, Artificial Sequence
  Description of Artificial Sequence: Synthetic oligonucleotide
  Antisense strand to SEQ ID NO: 2060720
ucccagacaagaaugaugu

SEQ ID NO: 2060722 - RNA, 19 nt, Artificial Sequence
  Description of Artificial Sequence: Synthetic oligonucleotide
  Sense strand starting at position 3767 of SEQ ID NO: 1881646
caucauucuugucugggaa

SEQ ID NO: 2060723 - RNA, 19 nt, Artificial Sequence
  Description of Artificial Sequence: Synthetic oligonucleotide
  Antisense strand to SEQ ID NO: 2060722
uucccagacaagaaugaug

SEQ ID NO: 2060724 - RNA, 19 nt, Artificial Sequence
  Description of Artificial Sequence: Synthetic oligonucleotide
  Sense strand starting at position 3768 of SEQ ID NO: 1881646
aucauucuugucugggaaa

SEQ ID NO: 2060725 - RNA, 19 nt, Artificial Sequence
  Description of Artificial Sequence: Synthetic oligonucleotide
  Antisense strand to SEQ ID NO: 2060724
uuucccagacaagaaugau

SEQ ID NO: 2060726 - RNA, 19 nt, Artificial Sequence
  Description of Artificial Sequence: Synthetic oligonucleotide
  Sense strand starting at position 3770 of SEQ ID NO: 1881646
cauucuugucugggaaacu

SEQ ID NO: 2060727 - RNA, 19 nt, Artificial Sequence
  Description of Artificial Sequence: Synthetic oligonucleotide
  Antisense strand to SEQ ID NO: 2060726
aguuucccagacaagaaug

SEQ ID NO: 2060728 - RNA, 19 nt, Artificial Sequence
  Description of Artificial Sequence: Synthetic oligonucleotide
  Sense strand starting at position 3888 of SEQ ID NO: 1881646
cuggacuagucuucuaauu

SEQ ID NO: 2060729 - RNA, 19 nt, Artificial Sequence
  Description of Artificial Sequence: Synthetic oligonucleotide
  Antisense strand to SEQ ID NO: 2060728
aauuagaagacuaguccag

SEQ ID NO: 2060730 - RNA, 19 nt, Artificial Sequence
  Description of Artificial Sequence: Synthetic oligonucleotide
  Sense strand starting at position 141 of SEQ ID NO: 1881647
ggugcuugagugugagaag

SEQ ID NO: 2060731 - RNA, 19 nt, Artificial Sequence
  Description of Artificial Sequence: Synthetic oligonucleotide
  Antisense strand to SEQ ID NO: 2060730
cuucucacacucaagcacc

SEQ ID NO: 2060732 - RNA, 19 nt, Artificial Sequence
  Description of Artificial Sequence: Synthetic oligonucleotide
  Sense strand starting at position 153 of SEQ ID NO: 1881647
ugagaagcuuucuuagcua

SEQ ID NO: 2060733 - RNA, 19 nt, Artificial Sequence
  Description of Artificial Sequence: Synthetic oligonucleotide
  Antisense strand to SEQ ID NO: 2060732
uagcuaagaaagcuucuca

SEQ ID NO: 2060734 - RNA, 19 nt, Artificial Sequence
  Description of Artificial Sequence: Synthetic oligonucleotide
  Sense strand starting at position 639 of SEQ ID NO: 1881647
ucacauacaugauaaagga

SEQ ID NO: 2060735 - RNA, 19 nt, Artificial Sequence
  Description of Artificial Sequence: Synthetic oligonucleotide
  Antisense strand to SEQ ID NO: 2060734
uccuuuaucauguauguga

SEQ ID NO: 2060736 - RNA, 19 nt, Artificial Sequence
  Description of Artificial Sequence: Synthetic oligonucleotide
  Sense strand starting at position 762 of SEQ ID NO: 1881647
auacauggaugggaaauaa

SEQ ID NO: 2060737 - RNA, 19 nt, Artificial Sequence
  Description of Artificial Sequence: Synthetic oligonucleotide
  Antisense strand to SEQ ID NO: 2060736
uuauuucccauccauguau

SEQ ID NO: 2060738 - RNA, 19 nt, Artificial Sequence
  Description of Artificial Sequence: Synthetic oligonucleotide
  Sense strand starting at position 928 of SEQ ID NO: 1881647
uucauugcugguggagaua

SEQ ID NO: 2060739 - RNA, 19 nt, Artificial Sequence
  Description of Artificial Sequence: Synthetic oligonucleotide
  Antisense strand to SEQ ID NO: 2060738
uaucuccaccagcaaugaa

SEQ ID NO: 2060740 - RNA, 19 nt, Artificial Sequence
  Description of Artificial Sequence: Synthetic oligonucleotide
  Sense strand starting at position 980 of SEQ ID NO: 1881647
uaaacauaucccggagaug

SEQ ID NO: 2060741 - RNA, 19 nt, Artificial Sequence
  Description of Artificial Sequence: Synthetic oligonucleotide
  Antisense strand to SEQ ID NO: 2060740
caucuccgggauauguuua

SEQ ID NO: 2060742 - RNA, 19 nt, Artificial Sequence
  Description of Artificial Sequence: Synthetic oligonucleotide
  Sense strand starting at position 1045 of SEQ ID NO: 1881647
aggugucuccacgaaagcu

SEQ ID NO: 2060743 - RNA, 19 nt, Artificial Sequence
  Description of Artificial Sequence: Synthetic oligonucleotide
  Antisense strand to SEQ ID NO: 2060742
agcuuucguggagacaccu

SEQ ID NO: 2060744 - RNA, 19 nt, Artificial Sequence
  Description of Artificial Sequence: Synthetic oligonucleotide
  Sense strand starting at position 1148 of SEQ ID NO: 1881647
agcaaauuguggucuguag

SEQ ID NO: 2060745 - RNA, 19 nt, Artificial Sequence
  Description of Artificial Sequence: Synthetic oligonucleotide
  Antisense strand to SEQ ID NO: 2060744
cuacagaccacaauuugcu

SEQ ID NO: 2060746 - RNA, 19 nt, Artificial Sequence
  Description of Artificial Sequence: Synthetic oligonucleotide
  Sense strand starting at position 1150 of SEQ ID NO: 1881647
caaauuguggucuguagaa

SEQ ID NO: 2060747 - RNA, 19 nt, Artificial Sequence
  Description of Artificial Sequence: Synthetic oligonucleotide
  Antisense strand to SEQ ID NO: 2060746
uucuacagaccacaauuug

SEQ ID NO: 2060748 - RNA, 19 nt, Artificial Sequence
  Description of Artificial Sequence: Synthetic oligonucleotide
  Sense strand starting at position 1152 of SEQ ID NO: 1881647
aauuguggucuguagaaag

SEQ ID NO: 2060749 - RNA, 19 nt, Artificial Sequence
  Description of Artificial Sequence: Synthetic oligonucleotide
  Antisense strand to SEQ ID NO: 2060748
cuuucuacagaccacaauu

SEQ ID NO: 2060750 - RNA, 19 nt, Artificial Sequence
  Description of Artificial Sequence: Synthetic oligonucleotide
  Sense strand starting at position 1188 of SEQ ID NO: 1881647
cgaacaauugauugacuga

SEQ ID NO: 2060751 - RNA, 19 nt, Artificial Sequence
  Description of Artificial Sequence: Synthetic oligonucleotide
  Antisense strand to SEQ ID NO: 2060750
ucagucaaucaauuguucg

SEQ ID NO: 2060752 - RNA, 19 nt, Artificial Sequence
  Description of Artificial Sequence: Synthetic oligonucleotide
  Sense strand starting at position 1208 of SEQ ID NO: 1881647
gugacaacaugucugaauc

SEQ ID NO: 2060753 - RNA, 19 nt, Artificial Sequence
  Description of Artificial Sequence: Synthetic oligonucleotide
  Antisense strand to SEQ ID NO: 2060752
gauucagacauguugucac

SEQ ID NO: 2060754 - RNA, 19 nt, Artificial Sequence
  Description of Artificial Sequence: Synthetic oligonucleotide
  Sense strand starting at position 1209 of SEQ ID NO: 1881647
ugacaacaugucugaaucu

SEQ ID NO: 2060755 - RNA, 19 nt, Artificial Sequence
  Description of Artificial Sequence: Synthetic oligonucleotide
  Antisense strand to SEQ ID NO: 2060754
agauucagacauguuguca

SEQ ID NO: 2060756 - RNA, 19 nt, Artificial Sequence
  Description of Artificial Sequence: Synthetic oligonucleotide
  Sense strand starting at position 1298 of SEQ ID NO: 1881647
ggccaacugaucuauagug

SEQ ID NO: 2060757 - RNA, 19 nt, Artificial Sequence
  Description of Artificial Sequence: Synthetic oligonucleotide
  Antisense strand to SEQ ID NO: 2060756
cacuauagaucaguuggcc

SEQ ID NO: 2060758 - RNA, 19 nt, Artificial Sequence
  Description of Artificial Sequence: Synthetic oligonucleotide
  Sense strand starting at position 1421 of SEQ ID NO: 1881647
uaccuauuguggcuaaagu

SEQ ID NO: 2060759 - RNA, 19 nt, Artificial Sequence
  Description of Artificial Sequence: Synthetic oligonucleotide
  Antisense strand to SEQ ID NO: 2060758
acuuuagccacaauaggua

SEQ ID NO: 2060760 - RNA, 19 nt, Artificial Sequence
  Description of Artificial Sequence: Synthetic oligonucleotide
  Sense strand starting at position 1422 of SEQ ID NO: 1881647
accuauuguggcuaaaguu

SEQ ID NO: 2060761 - RNA, 19 nt, Artificial Sequence
  Description of Artificial Sequence: Synthetic oligonucleotide
  Antisense strand to SEQ ID NO: 2060760
aacuuuagccacaauaggu

SEQ ID NO: 2060762 - RNA, 19 nt, Artificial Sequence
  Description of Artificial Sequence: Synthetic oligonucleotide
  Sense strand starting at position 1483 of SEQ ID NO: 1881647
cuuugaaucugcgugauuu

SEQ ID NO: 2060763 - RNA, 19 nt, Artificial Sequence
  Description of Artificial Sequence: Synthetic oligonucleotide
  Antisense strand to SEQ ID NO: 2060762
aaaucacgcagauucaaag

SEQ ID NO: 2060764 - RNA, 19 nt, Artificial Sequence
  Description of Artificial Sequence: Synthetic oligonucleotide
  Sense strand starting at position 1484 of SEQ ID NO: 1881647
uuugaaucugcgugauuua

SEQ ID NO: 2060765 - RNA, 19 nt, Artificial Sequence
  Description of Artificial Sequence: Synthetic oligonucleotide
  Antisense strand to SEQ ID NO: 2060764
uaaaucacgcagauucaaa

SEQ ID NO: 2060766 - RNA, 19 nt, Artificial Sequence
  Description of Artificial Sequence: Synthetic oligonucleotide
  Sense strand starting at position 1487 of SEQ ID NO: 1881647
gaaucugcgugauuuauua

SEQ ID NO: 2060767 - RNA, 19 nt, Artificial Sequence
  Description of Artificial Sequence: Synthetic oligonucleotide
  Antisense strand to SEQ ID NO: 2060766
uaauaaaucacgcagauuc

SEQ ID NO: 2060768 - RNA, 19 nt, Artificial Sequence
  Description of Artificial Sequence: Synthetic oligonucleotide
  Sense strand starting at position 1491 of SEQ ID NO: 1881647
cugcgugauuuauuauauc

SEQ ID NO: 2060769 - RNA, 19 nt, Artificial Sequence
  Description of Artificial Sequence: Synthetic oligonucleotide
  Antisense strand to SEQ ID NO: 2060768
gauauaauaaaucacgcag

SEQ ID NO: 2060770 - RNA, 19 nt, Artificial Sequence
  Description of Artificial Sequence: Synthetic oligonucleotide
  Sense strand starting at position 1728 of SEQ ID NO: 1881647
aggucagaaccguggaaga

SEQ ID NO: 2060771 - RNA, 19 nt, Artificial Sequence
  Description of Artificial Sequence: Synthetic oligonucleotide
  Antisense strand to SEQ ID NO: 2060770
ucuuccacgguucugaccu

SEQ ID NO: 2060772 - RNA, 19 nt, Artificial Sequence
  Description of Artificial Sequence: Synthetic oligonucleotide
  Sense strand starting at position 1730 of SEQ ID NO: 1881647
gucagaaccguggaagacu

SEQ ID NO: 2060773 - RNA, 19 nt, Artificial Sequence
  Description of Artificial Sequence: Synthetic oligonucleotide
  Antisense strand to SEQ ID NO: 2060772
agucuuccacgguucugac

SEQ ID NO: 2060774 - RNA, 19 nt, Artificial Sequence
  Description of Artificial Sequence: Synthetic oligonucleotide
  Sense strand starting at position 1739 of SEQ ID NO: 1881647
guggaagacucugcagacu

SEQ ID NO: 2060775 - RNA, 19 nt, Artificial Sequence
  Description of Artificial Sequence: Synthetic oligonucleotide
  Antisense strand to SEQ ID NO: 2060774
agucugcagagucuuccac

SEQ ID NO: 2060776 - RNA, 19 nt, Artificial Sequence
  Description of Artificial Sequence: Synthetic oligonucleotide
  Sense strand starting at position 1926 of SEQ ID NO: 1881647
caaguaugacuucgguaua

SEQ ID NO: 2060777 - RNA, 19 nt, Artificial Sequence
  Description of Artificial Sequence: Synthetic oligonucleotide
  Antisense strand to SEQ ID NO: 2060776
uauaccgaagucauacuug

SEQ ID NO: 2060778 - RNA, 19 nt, Artificial Sequence
  Description of Artificial Sequence: Synthetic oligonucleotide
  Sense strand starting at position 2131 of SEQ ID NO: 1881647
uuggacaacugucuuaacu

SEQ ID NO: 2060779 - RNA, 19 nt, Artificial Sequence
  Description of Artificial Sequence: Synthetic oligonucleotide
  Antisense strand to SEQ ID NO: 2060778
aguuaagacaguuguccaa

SEQ ID NO: 2060780 - RNA, 19 nt, Artificial Sequence
  Description of Artificial Sequence: Synthetic oligonucleotide
  Sense strand starting at position 2141 of SEQ ID NO: 1881647
gucuuaacuucucugugac

SEQ ID NO: 2060781 - RNA, 19 nt, Artificial Sequence
  Description of Artificial Sequence: Synthetic oligonucleotide
  Antisense strand to SEQ ID NO: 2060780
gucacagagaaguuaagac

SEQ ID NO: 2060782 - RNA, 19 nt, Artificial Sequence
  Description of Artificial Sequence: Synthetic oligonucleotide
  Sense strand starting at position 2144 of SEQ ID NO: 1881647
uuaacuucucugugacuga

SEQ ID NO: 2060783 - RNA, 19 nt, Artificial Sequence
  Description of Artificial Sequence: Synthetic oligonucleotide
  Antisense strand to SEQ ID NO: 2060782
ucagucacagagaaguuaa

SEQ ID NO: 2060784 - RNA, 19 nt, Artificial Sequence
  Description of Artificial Sequence: Synthetic oligonucleotide
  Sense strand starting at position 2147 of SEQ ID NO: 1881647
acuucucugugacugaguu

SEQ ID NO: 2060785 - RNA, 19 nt, Artificial Sequence
  Description of Artificial Sequence: Synthetic oligonucleotide
  Antisense strand to SEQ ID NO: 2060784
aacucagucacagagaagu

SEQ ID NO: 2060786 - RNA, 19 nt, Artificial Sequence
  Description of Artificial Sequence: Synthetic oligonucleotide
  Sense strand starting at position 2148 of SEQ ID NO: 1881647
cuucucugugacugaguuu

SEQ ID NO: 2060787 - RNA, 19 nt, Artificial Sequence
  Description of Artificial Sequence: Synthetic oligonucleotide
  Antisense strand to SEQ ID NO: 2060786
aaacucagucacagagaag

SEQ ID NO: 2060788 - RNA, 19 nt, Artificial Sequence
  Description of Artificial Sequence: Synthetic oligonucleotide
  Sense strand starting at position 2155 of SEQ ID NO: 1881647
gugacugaguuuccucauu

SEQ ID NO: 2060789 - RNA, 19 nt, Artificial Sequence
  Description of Artificial Sequence: Synthetic oligonucleotide
  Antisense strand to SEQ ID NO: 2060788
aaugaggaaacucagucac

SEQ ID NO: 2060790 - RNA, 19 nt, Artificial Sequence
  Description of Artificial Sequence: Synthetic oligonucleotide
  Sense strand starting at position 2194 of SEQ ID NO: 1881647
agugucuaccuccaugagu

SEQ ID NO: 2060791 - RNA, 19 nt, Artificial Sequence
  Description of Artificial Sequence: Synthetic oligonucleotide
  Antisense strand to SEQ ID NO: 2060790
acucauggagguagacacu

SEQ ID NO: 2060792 - RNA, 19 nt, Artificial Sequence
  Description of Artificial Sequence: Synthetic oligonucleotide
  Sense strand starting at position 2196 of SEQ ID NO: 1881647
ugucuaccuccaugaguug

SEQ ID NO: 2060793 - RNA, 19 nt, Artificial Sequence
  Description of Artificial Sequence: Synthetic oligonucleotide
  Antisense strand to SEQ ID NO: 2060792
caacucauggagguagaca

SEQ ID NO: 2060794 - RNA, 19 nt, Artificial Sequence
  Description of Artificial Sequence: Synthetic oligonucleotide
  Sense strand starting at position 2207 of SEQ ID NO: 1881647
augaguuguggaggagauu

SEQ ID NO: 2060795 - RNA, 19 nt, Artificial Sequence
  Description of Artificial Sequence: Synthetic oligonucleotide
  Antisense strand to SEQ ID NO: 2060794
aaucuccuccacaacucau

SEQ ID NO: 2060796 - RNA, 19 nt, Artificial Sequence
  Description of Artificial Sequence: Synthetic oligonucleotide
  Sense strand starting at position 2440 of SEQ ID NO: 1881647
acucauagccuuugaguuu

SEQ ID NO: 2060797 - RNA, 19 nt, Artificial Sequence
  Description of Artificial Sequence: Synthetic oligonucleotide
  Antisense strand to SEQ ID NO: 2060796
aaacucaaaggcuaugagu

SEQ ID NO: 2060798 - RNA, 19 nt, Artificial Sequence
  Description of Artificial Sequence: Synthetic oligonucleotide
  Sense strand starting at position 2443 of SEQ ID NO: 1881647
cauagccuuugaguuugaa

SEQ ID NO: 2060799 - RNA, 19 nt, Artificial Sequence
  Description of Artificial Sequence: Synthetic oligonucleotide
  Antisense strand to SEQ ID NO: 2060798
uucaaacucaaaggcuaug

SEQ ID NO: 2060800 - RNA, 19 nt, Artificial Sequence
  Description of Artificial Sequence: Synthetic oligonucleotide
  Sense strand starting at position 3084 of SEQ ID NO: 1881647
gugguuuacagguacauaa

SEQ ID NO: 2060801 - RNA, 19 nt, Artificial Sequence
  Description of Artificial Sequence: Synthetic oligonucleotide
  Antisense strand to SEQ ID NO: 2060800
uuauguaccuguaaaccac

SEQ ID NO: 2060802 - RNA, 19 nt, Artificial Sequence
  Description of Artificial Sequence: Synthetic oligonucleotide
  Sense strand starting at position 3480 of SEQ ID NO: 1881647
ccagaacucuucucaguag

SEQ ID NO: 2060803 - RNA, 19 nt, Artificial Sequence
  Description of Artificial Sequence: Synthetic oligonucleotide
  Antisense strand to SEQ ID NO: 2060802
cuacugagaagaguucugg

SEQ ID NO: 2060804 - RNA, 19 nt, Artificial Sequence
  Description of Artificial Sequence: Synthetic oligonucleotide
  Sense strand starting at position 3821 of SEQ ID NO: 1881647
uaggaacugcccugagguu

SEQ ID NO: 2060805 - RNA, 19 nt, Artificial Sequence
  Description of Artificial Sequence: Synthetic oligonucleotide
  Antisense strand to SEQ ID NO: 2060804
aaccucagggcaguuccua

SEQ ID NO: 2060806 - RNA, 19 nt, Artificial Sequence
  Description of Artificial Sequence: Synthetic oligonucleotide
  Sense strand starting at position 3841 of SEQ ID NO: 1881647
cuggcaugucugcaauauc

SEQ ID NO: 2060807 - RNA, 19 nt, Artificial Sequence
  Description of Artificial Sequence: Synthetic oligonucleotide
  Antisense strand to SEQ ID NO: 2060806
gauauugcagacaugccag

SEQ ID NO: 2060808 - RNA, 19 nt, Artificial Sequence
  Description of Artificial Sequence: Synthetic oligonucleotide
  Sense strand starting at position 3844 of SEQ ID NO: 1881647
gcaugucugcaauaucaac

SEQ ID NO: 2060809 - RNA, 19 nt, Artificial Sequence
  Description of Artificial Sequence: Synthetic oligonucleotide
  Antisense strand to SEQ ID NO: 2060808
guugauauugcagacaugc

SEQ ID NO: 2060810 - RNA, 19 nt, Artificial Sequence
  Description of Artificial Sequence: Synthetic oligonucleotide
  Sense strand starting at position 1777 of SEQ ID NO: 1881648
cuagcugagcugugaauaa

SEQ ID NO: 2060811 - RNA, 19 nt, Artificial Sequence
  Description of Artificial Sequence: Synthetic oligonucleotide
  Antisense strand to SEQ ID NO: 2060810
uuauucacagcucagcuag

SEQ ID NO: 2060812 - RNA, 19 nt, Artificial Sequence
  Description of Artificial Sequence: Synthetic oligonucleotide
  Sense strand starting at position 1781 of SEQ ID NO: 1881648
cugagcugugaauaacuca

SEQ ID NO: 2060813 - RNA, 19 nt, Artificial Sequence
  Description of Artificial Sequence: Synthetic oligonucleotide
  Antisense strand to SEQ ID NO: 2060812
ugaguuauucacagcucag

SEQ ID NO: 2060814 - RNA, 19 nt, Artificial Sequence
  Description of Artificial Sequence: Synthetic oligonucleotide
  Sense strand starting at position 1918 of SEQ ID NO: 1881648
ggcaucucagacugcuaau

SEQ ID NO: 2060815 - RNA, 19 nt, Artificial Sequence
  Description of Artificial Sequence: Synthetic oligonucleotide
  Antisense strand to SEQ ID NO: 2060814
auuagcagucugagaugcc

SEQ ID NO: 2060816 - RNA, 19 nt, Artificial Sequence
  Description of Artificial Sequence: Synthetic oligonucleotide
  Sense strand starting at position 1989 of SEQ ID NO: 1881648
agauauuagcagugacuga

SEQ ID NO: 2060817 - RNA, 19 nt, Artificial Sequence
  Description of Artificial Sequence: Synthetic oligonucleotide
  Antisense strand to SEQ ID NO: 2060816
ucagucacugcuaauaucu

SEQ ID NO: 2060818 - RNA, 19 nt, Artificial Sequence
  Description of Artificial Sequence: Synthetic oligonucleotide
  Sense strand starting at position 2062 of SEQ ID NO: 1881648
uguacacaguucucacaaa

SEQ ID NO: 2060819 - RNA, 19 nt, Artificial Sequence
  Description of Artificial Sequence: Synthetic oligonucleotide
  Antisense strand to SEQ ID NO: 2060818
uuugugagaacuguguaca

SEQ ID NO: 2060820 - RNA, 19 nt, Artificial Sequence
  Description of Artificial Sequence: Synthetic oligonucleotide
  Sense strand starting at position 2081 of SEQ ID NO: 1881648
gcagauuucucagcuuuag

SEQ ID NO: 2060821 - RNA, 19 nt, Artificial Sequence
  Description of Artificial Sequence: Synthetic oligonucleotide
  Antisense strand to SEQ ID NO: 2060820
cuaaagcugagaaaucugc

SEQ ID NO: 2060822 - RNA, 19 nt, Artificial Sequence
  Description of Artificial Sequence: Synthetic oligonucleotide
  Sense strand starting at position 2096 of SEQ ID NO: 1881648
uuaguucuugcugauguua

SEQ ID NO: 2060823 - RNA, 19 nt, Artificial Sequence
  Description of Artificial Sequence: Synthetic oligonucleotide
  Antisense strand to SEQ ID NO: 2060822
uaacaucagcaagaacuaa

SEQ ID NO: 2060824 - RNA, 19 nt, Artificial Sequence
  Description of Artificial Sequence: Synthetic oligonucleotide
  Sense strand starting at position 2117 of SEQ ID NO: 1881648
acgacucuuucugcugaca

SEQ ID NO: 2060825 - RNA, 19 nt, Artificial Sequence
  Description of Artificial Sequence: Synthetic oligonucleotide
  Antisense strand to SEQ ID NO: 2060824
ugucagcagaaagagucgu

SEQ ID NO: 2060826 - RNA, 19 nt, Artificial Sequence
  Description of Artificial Sequence: Synthetic oligonucleotide
  Sense strand starting at position 2129 of SEQ ID NO: 1881648
gcugacaacuguuuccaca

SEQ ID NO: 2060827 - RNA, 19 nt, Artificial Sequence
  Description of Artificial Sequence: Synthetic oligonucleotide
  Antisense strand to SEQ ID NO: 2060826
uguggaaacaguugucagc

SEQ ID NO: 2060828 - RNA, 19 nt, Artificial Sequence
  Description of Artificial Sequence: Synthetic oligonucleotide
  Sense strand starting at position 2149 of SEQ ID NO: 1881648
aguauucucuaacuaguaa

SEQ ID NO: 2060829 - RNA, 19 nt, Artificial Sequence
  Description of Artificial Sequence: Synthetic oligonucleotide
  Antisense strand to SEQ ID NO: 2060828
uuacuaguuagagaauacu

SEQ ID NO: 2060830 - RNA, 19 nt, Artificial Sequence
  Description of Artificial Sequence: Synthetic oligonucleotide
  Sense strand starting at position 2227 of SEQ ID NO: 1881648
acgcauaugccauguggaa

SEQ ID NO: 2060831 - RNA, 19 nt, Artificial Sequence
  Description of Artificial Sequence: Synthetic oligonucleotide
  Antisense strand to SEQ ID NO: 2060830
uuccacauggcauaugcgu

SEQ ID NO: 2060832 - RNA, 19 nt, Artificial Sequence
  Description of Artificial Sequence: Synthetic oligonucleotide
  Sense strand starting at position 2290 of SEQ ID NO: 1881648
gagucuugcuccucaugaa

SEQ ID NO: 2060833 - RNA, 19 nt, Artificial Sequence
  Description of Artificial Sequence: Synthetic oligonucleotide
  Antisense strand to SEQ ID NO: 2060832
uucaugaggagcaagacuc

SEQ ID NO: 2060834 - RNA, 19 nt, Artificial Sequence
  Description of Artificial Sequence: Synthetic oligonucleotide
  Sense strand starting at position 2291 of SEQ ID NO: 1881648
agucuugcuccucaugaaa

SEQ ID NO: 2060835 - RNA, 19 nt, Artificial Sequence
  Description of Artificial Sequence: Synthetic oligonucleotide
  Antisense strand to SEQ ID NO: 2060834
uuucaugaggagcaagacu

SEQ ID NO: 2060836 - RNA, 19 nt, Artificial Sequence
  Description of Artificial Sequence: Synthetic oligonucleotide
  Sense strand starting at position 2328 of SEQ ID NO: 1881648
cgcccaauacaugaucuuu

SEQ ID NO: 2060837 - RNA, 19 nt, Artificial Sequence
  Description of Artificial Sequence: Synthetic oligonucleotide
  Antisense strand to SEQ ID NO: 2060836
aaagaucauguauugggcg

SEQ ID NO: 2060838 - RNA, 19 nt, Artificial Sequence
  Description of Artificial Sequence: Synthetic oligonucleotide
  Sense strand starting at position 2512 of SEQ ID NO: 1881648
ucaaguuguuacuuugcua

SEQ ID NO: 2060839 - RNA, 19 nt, Artificial Sequence
  Description of Artificial Sequence: Synthetic oligonucleotide
  Antisense strand to SEQ ID NO: 2060838
uagcaaaguaacaacuuga

SEQ ID NO: 2060840 - RNA, 19 nt, Artificial Sequence
  Description of Artificial Sequence: Synthetic oligonucleotide
  Sense strand starting at position 2515 of SEQ ID NO: 1881648
aguuguuacuuugcuauau

SEQ ID NO: 2060841 - RNA, 19 nt, Artificial Sequence
  Description of Artificial Sequence: Synthetic oligonucleotide
  Antisense strand to SEQ ID NO: 2060840
auauagcaaaguaacaacu

SEQ ID NO: 2060842 - RNA, 19 nt, Artificial Sequence
  Description of Artificial Sequence: Synthetic oligonucleotide
  Sense strand starting at position 2560 of SEQ ID NO: 1881648
gagacauacuaagcgguaa

SEQ ID NO: 2060843 - RNA, 19 nt, Artificial Sequence
  Description of Artificial Sequence: Synthetic oligonucleotide
  Antisense strand to SEQ ID NO: 2060842
uuaccgcuuaguaugucuc

SEQ ID NO: 2060844 - RNA, 19 nt, Artificial Sequence
  Description of Artificial Sequence: Synthetic oligonucleotide
  Sense strand starting at position 2561 of SEQ ID NO: 1881648
agacauacuaagcgguaaa

SEQ ID NO: 2060845 - RNA, 19 nt, Artificial Sequence
  Description of Artificial Sequence: Synthetic oligonucleotide
  Antisense strand to SEQ ID NO: 2060844
uuuaccgcuuaguaugucu

SEQ ID NO: 2060846 - RNA, 19 nt, Artificial Sequence
  Description of Artificial Sequence: Synthetic oligonucleotide
  Sense strand starting at position 2658 of SEQ ID NO: 1881648
uguggaaacucagauuuaa

SEQ ID NO: 2060847 - RNA, 19 nt, Artificial Sequence
  Description of Artificial Sequence: Synthetic oligonucleotide
  Antisense strand to SEQ ID NO: 2060846
uuaaaucugaguuuccaca

SEQ ID NO: 2060848 - RNA, 19 nt, Artificial Sequence
  Description of Artificial Sequence: Synthetic oligonucleotide
  Sense strand starting at position 2682 of SEQ ID NO: 1881648
auaccuagaguuuagcaau

SEQ ID NO: 2060849 - RNA, 19 nt, Artificial Sequence
  Description of Artificial Sequence: Synthetic oligonucleotide
  Antisense strand to SEQ ID NO: 2060848
auugcuaaacucuagguau

SEQ ID NO: 2060850 - RNA, 19 nt, Artificial Sequence
  Description of Artificial Sequence: Synthetic oligonucleotide
  Sense strand starting at position 2744 of SEQ ID NO: 1881648
gaaauacugacgcguaaag

SEQ ID NO: 2060851 - RNA, 19 nt, Artificial Sequence
  Description of Artificial Sequence: Synthetic oligonucleotide
  Antisense strand to SEQ ID NO: 2060850
cuuuacgcgucaguauuuc

SEQ ID NO: 2060852 - RNA, 19 nt, Artificial Sequence
  Description of Artificial Sequence: Synthetic oligonucleotide
  Sense strand starting at position 2746 of SEQ ID NO: 1881648
aauacugacgcguaaagau

SEQ ID NO: 2060853 - RNA, 19 nt, Artificial Sequence
  Description of Artificial Sequence: Synthetic oligonucleotide
  Antisense strand to SEQ ID NO: 2060852
aucuuuacgcgucaguauu

SEQ ID NO: 2060854 - RNA, 19 nt, Artificial Sequence
  Description of Artificial Sequence: Synthetic oligonucleotide
  Sense strand starting at position 2808 of SEQ ID NO: 1881648
cuagauuaguaauuguaug

SEQ ID NO: 2060855 - RNA, 19 nt, Artificial Sequence
  Description of Artificial Sequence: Synthetic oligonucleotide
  Antisense strand to SEQ ID NO: 2060854
cauacaauuacuaaucuag

SEQ ID NO: 2060856 - RNA, 19 nt, Artificial Sequence
  Description of Artificial Sequence: Synthetic oligonucleotide
  Sense strand starting at position 2959 of SEQ ID NO: 1881648
gugaaacacuuagccauua

SEQ ID NO: 2060857 - RNA, 19 nt, Artificial Sequence
  Description of Artificial Sequence: Synthetic oligonucleotide
  Antisense strand to SEQ ID NO: 2060856
uaauggcuaaguguuucac

SEQ ID NO: 2060858 - RNA, 19 nt, Artificial Sequence
  Description of Artificial Sequence: Synthetic oligonucleotide
  Sense strand starting at position 2964 of SEQ ID NO: 1881648
acacuuagccauuaacgau

SEQ ID NO: 2060859 - RNA, 19 nt, Artificial Sequence
  Description of Artificial Sequence: Synthetic oligonucleotide
  Antisense strand to SEQ ID NO: 2060858
aucguuaauggcuaagugu

SEQ ID NO: 2060860 - RNA, 19 nt, Artificial Sequence
  Description of Artificial Sequence: Synthetic oligonucleotide
  Sense strand starting at position 2970 of SEQ ID NO: 1881648
agccauuaacgauauucuu

SEQ ID NO: 2060861 - RNA, 19 nt, Artificial Sequence
  Description of Artificial Sequence: Synthetic oligonucleotide
  Antisense strand to SEQ ID NO: 2060860
aagaauaucguuaauggcu

SEQ ID NO: 2060862 - RNA, 19 nt, Artificial Sequence
  Description of Artificial Sequence: Synthetic oligonucleotide
  Sense strand starting at position 3004 of SEQ ID NO: 1881648
auggcaacauagucauaau

SEQ ID NO: 2060863 - RNA, 19 nt, Artificial Sequence
  Description of Artificial Sequence: Synthetic oligonucleotide
  Antisense strand to SEQ ID NO: 2060862
auuaugacuauguugccau

SEQ ID NO: 2060864 - RNA, 19 nt, Artificial Sequence
  Description of Artificial Sequence: Synthetic oligonucleotide
  Sense strand starting at position 3103 of SEQ ID NO: 1881648
ggcgguauuuaagauguaa

SEQ ID NO: 2060865 - RNA, 19 nt, Artificial Sequence
  Description of Artificial Sequence: Synthetic oligonucleotide
  Antisense strand to SEQ ID NO: 2060864
uuacaucuuaaauaccgcc

SEQ ID NO: 2060866 - RNA, 19 nt, Artificial Sequence
  Description of Artificial Sequence: Synthetic oligonucleotide
  Sense strand starting at position 3146 of SEQ ID NO: 1881648
guguauauaugacuugcau

SEQ ID NO: 2060867 - RNA, 19 nt, Artificial Sequence
  Description of Artificial Sequence: Synthetic oligonucleotide
  Antisense strand to SEQ ID NO: 2060866
augcaagucauauauacac

SEQ ID NO: 2060868 - RNA, 19 nt, Artificial Sequence
  Description of Artificial Sequence: Synthetic oligonucleotide
  Sense strand starting at position 3205 of SEQ ID NO: 1881648
gguccagcccaauguaaau

SEQ ID NO: 2060869 - RNA, 19 nt, Artificial Sequence
  Description of Artificial Sequence: Synthetic oligonucleotide
  Antisense strand to SEQ ID NO: 2060868
auuuacauugggcuggacc

SEQ ID NO: 2060870 - RNA, 19 nt, Artificial Sequence
  Description of Artificial Sequence: Synthetic oligonucleotide
  Sense strand starting at position 3224 of SEQ ID NO: 1881648
augaaaucaugucccaguu

SEQ ID NO: 2060871 - RNA, 19 nt, Artificial Sequence
  Description of Artificial Sequence: Synthetic oligonucleotide
  Antisense strand to SEQ ID NO: 2060870
aacugggacaugauuucau

SEQ ID NO: 2060872 - RNA, 19 nt, Artificial Sequence
  Description of Artificial Sequence: Synthetic oligonucleotide
  Sense strand starting at position 3250 of SEQ ID NO: 1881648
aaauuaaacgguugccaca

SEQ ID NO: 2060873 - RNA, 19 nt, Artificial Sequence
  Description of Artificial Sequence: Synthetic oligonucleotide
  Antisense strand to SEQ ID NO: 2060872
uguggcaaccguuuaauuu

SEQ ID NO: 2060874 - RNA, 19 nt, Artificial Sequence
  Description of Artificial Sequence: Synthetic oligonucleotide
  Sense strand starting at position 3534 of SEQ ID NO: 1881648
agguuaggucacuaacagu

SEQ ID NO: 2060875 - RNA, 19 nt, Artificial Sequence
  Description of Artificial Sequence: Synthetic oligonucleotide
  Antisense strand to SEQ ID NO: 2060874
acuguuagugaccuaaccu

SEQ ID NO: 2060876 - RNA, 19 nt, Artificial Sequence
  Description of Artificial Sequence: Synthetic oligonucleotide
  Sense strand starting at position 3556 of SEQ ID NO: 1881648
ucccuaaaucuauaggguu

SEQ ID NO: 2060877 - RNA, 19 nt, Artificial Sequence
  Description of Artificial Sequence: Synthetic oligonucleotide
  Antisense strand to SEQ ID NO: 2060876
aacccuauagauuuaggga

SEQ ID NO: 2060878 - RNA, 19 nt, Artificial Sequence
  Description of Artificial Sequence: Synthetic oligonucleotide
  Sense strand starting at position 3562 of SEQ ID NO: 1881648
aaucuauaggguuaaguuu

SEQ ID NO: 2060879 - RNA, 19 nt, Artificial Sequence
  Description of Artificial Sequence: Synthetic oligonucleotide
  Antisense strand to SEQ ID NO: 2060878
aaacuuaacccuauagauu

SEQ ID NO: 2060880 - RNA, 19 nt, Artificial Sequence
  Description of Artificial Sequence: Synthetic oligonucleotide
  Sense strand starting at position 3570 of SEQ ID NO: 1881648
ggguuaaguuucccaccau

SEQ ID NO: 2060881 - RNA, 19 nt, Artificial Sequence
  Description of Artificial Sequence: Synthetic oligonucleotide
  Antisense strand to SEQ ID NO: 2060880
auggugggaaacuuaaccc

SEQ ID NO: 2060882 - RNA, 19 nt, Artificial Sequence
  Description of Artificial Sequence: Synthetic oligonucleotide
  Sense strand starting at position 3810 of SEQ ID NO: 1881648
gucucaaguucuguuacua

SEQ ID NO: 2060883 - RNA, 19 nt, Artificial Sequence
  Description of Artificial Sequence: Synthetic oligonucleotide
  Antisense strand to SEQ ID NO: 2060882
uaguaacagaacuugagac

SEQ ID NO: 2060884 - RNA, 19 nt, Artificial Sequence
  Description of Artificial Sequence: Synthetic oligonucleotide
  Sense strand starting at position 3851 of SEQ ID NO: 1881648
ggcugcugcccugcuuaua

SEQ ID NO: 2060885 - RNA, 19 nt, Artificial Sequence
  Description of Artificial Sequence: Synthetic oligonucleotide
  Antisense strand to SEQ ID NO: 2060884
uauaagcagggcagcagcc

SEQ ID NO: 2060886 - RNA, 19 nt, Artificial Sequence
  Description of Artificial Sequence: Synthetic oligonucleotide
  Sense strand starting at position 3891 of SEQ ID NO: 1881648
cuuguuaugaccuggguau

SEQ ID NO: 2060887 - RNA, 19 nt, Artificial Sequence
  Description of Artificial Sequence: Synthetic oligonucleotide
  Antisense strand to SEQ ID NO: 2060886
auacccaggucauaacaag

SEQ ID NO: 2060888 - RNA, 19 nt, Artificial Sequence
  Description of Artificial Sequence: Synthetic oligonucleotide
  Sense strand starting at position 3892 of SEQ ID NO: 1881648
uuguuaugaccuggguauu

SEQ ID NO: 2060889 - RNA, 19 nt, Artificial Sequence
  Description of Artificial Sequence: Synthetic oligonucleotide
  Antisense strand to SEQ ID NO: 2060888
aauacccaggucauaacaa

SEQ ID NO: 2060890 - RNA, 19 nt, Artificial Sequence
  Description of Artificial Sequence: Synthetic oligonucleotide
  Sense strand starting at position 181 of SEQ ID NO: 1881649
guggauucugcuggucaga

SEQ ID NO: 2060891 - RNA, 19 nt, Artificial Sequence
  Description of Artificial Sequence: Synthetic oligonucleotide
  Antisense strand to SEQ ID NO: 2060890
ucugaccagcagaauccac

SEQ ID NO: 2060892 - RNA, 19 nt, Artificial Sequence
  Description of Artificial Sequence: Synthetic oligonucleotide
  Sense strand starting at position 183 of SEQ ID NO: 1881649
ggauucugcuggucagaga

SEQ ID NO: 2060893 - RNA, 19 nt, Artificial Sequence
  Description of Artificial Sequence: Synthetic oligonucleotide
  Antisense strand to SEQ ID NO: 2060892
ucucugaccagcagaaucc

SEQ ID NO: 2060894 - RNA, 19 nt, Artificial Sequence
  Description of Artificial Sequence: Synthetic oligonucleotide
  Sense strand starting at position 184 of SEQ ID NO: 1881649
gauucugcuggucagagau

SEQ ID NO: 2060895 - RNA, 19 nt, Artificial Sequence
  Description of Artificial Sequence: Synthetic oligonucleotide
  Antisense strand to SEQ ID NO: 2060894
aucucugaccagcagaauc

SEQ ID NO: 2060896 - RNA, 19 nt, Artificial Sequence
  Description of Artificial Sequence: Synthetic oligonucleotide
  Sense strand starting at position 248 of SEQ ID NO: 1881649
gggagcuggugcuucaaga

SEQ ID NO: 2060897 - RNA, 19 nt, Artificial Sequence
  Description of Artificial Sequence: Synthetic oligonucleotide
  Antisense strand to SEQ ID NO: 2060896
ucuugaagcaccagcuccc

SEQ ID NO: 2060898 - RNA, 19 nt, Artificial Sequence
  Description of Artificial Sequence: Synthetic oligonucleotide
  Sense strand starting at position 353 of SEQ ID NO: 1881649
gugccacgguguuugaaau

SEQ ID NO: 2060899 - RNA, 19 nt, Artificial Sequence
  Description of Artificial Sequence: Synthetic oligonucleotide
  Antisense strand to SEQ ID NO: 2060898
auuucaaacaccguggcac

SEQ ID NO: 2060900 - RNA, 19 nt, Artificial Sequence
  Description of Artificial Sequence: Synthetic oligonucleotide
  Sense strand starting at position 537 of SEQ ID NO: 1881649
cagguucugugccagaguu

SEQ ID NO: 2060901 - RNA, 19 nt, Artificial Sequence
  Description of Artificial Sequence: Synthetic oligonucleotide
  Antisense strand to SEQ ID NO: 2060900
aacucuggcacagaaccug

SEQ ID NO: 2060902 - RNA, 19 nt, Artificial Sequence
  Description of Artificial Sequence: Synthetic oligonucleotide
  Sense strand starting at position 539 of SEQ ID NO: 1881649
gguucugugccagaguugu

SEQ ID NO: 2060903 - RNA, 19 nt, Artificial Sequence
  Description of Artificial Sequence: Synthetic oligonucleotide
  Antisense strand to SEQ ID NO: 2060902
acaacucuggcacagaacc

SEQ ID NO: 2060904 - RNA, 19 nt, Artificial Sequence
  Description of Artificial Sequence: Synthetic oligonucleotide
  Sense strand starting at position 602 of SEQ ID NO: 1881649
cgucuaugcguacgacuga

SEQ ID NO: 2060905 - RNA, 19 nt, Artificial Sequence
  Description of Artificial Sequence: Synthetic oligonucleotide
  Antisense strand to SEQ ID NO: 2060904
ucagucguacgcauagacg

SEQ ID NO: 2060906 - RNA, 19 nt, Artificial Sequence
  Description of Artificial Sequence: Synthetic oligonucleotide
  Sense strand starting at position 603 of SEQ ID NO: 1881649
gucuaugcguacgacugaa

SEQ ID NO: 2060907 - RNA, 19 nt, Artificial Sequence
  Description of Artificial Sequence: Synthetic oligonucleotide
  Antisense strand to SEQ ID NO: 2060906
uucagucguacgcauagac

SEQ ID NO: 2060908 - RNA, 19 nt, Artificial Sequence
  Description of Artificial Sequence: Synthetic oligonucleotide
  Sense strand starting at position 649 of SEQ ID NO: 1881649
gggaauuggcuacagaugu

SEQ ID NO: 2060909 - RNA, 19 nt, Artificial Sequence
  Description of Artificial Sequence: Synthetic oligonucleotide
  Antisense strand to SEQ ID NO: 2060908
acaucuguagccaauuccc

SEQ ID NO: 2060910 - RNA, 19 nt, Artificial Sequence
  Description of Artificial Sequence: Synthetic oligonucleotide
  Sense strand starting at position 847 of SEQ ID NO: 1881649
ucaggugacaggugagaau

SEQ ID NO: 2060911 - RNA, 19 nt, Artificial Sequence
  Description of Artificial Sequence: Synthetic oligonucleotide
  Antisense strand to SEQ ID NO: 2060910
auucucaccugucaccuga

SEQ ID NO: 2060912 - RNA, 19 nt, Artificial Sequence
  Description of Artificial Sequence: Synthetic oligonucleotide
  Sense strand starting at position 866 of SEQ ID NO: 1881649
ccaucucucuagugagcaa

SEQ ID NO: 2060913 - RNA, 19 nt, Artificial Sequence
  Description of Artificial Sequence: Synthetic oligonucleotide
  Antisense strand to SEQ ID NO: 2060912
uugcucacuagagagaugg

SEQ ID NO: 2060914 - RNA, 19 nt, Artificial Sequence
  Description of Artificial Sequence: Synthetic oligonucleotide
  Sense strand starting at position 1256 of SEQ ID NO: 1881649
ggccgagagucuuuaggcu

SEQ ID NO: 2060915 - RNA, 19 nt, Artificial Sequence
  Description of Artificial Sequence: Synthetic oligonucleotide
  Antisense strand to SEQ ID NO: 2060914
agccuaaagacucucggcc

SEQ ID NO: 2060916 - RNA, 19 nt, Artificial Sequence
  Description of Artificial Sequence: Synthetic oligonucleotide
  Sense strand starting at position 1678 of SEQ ID NO: 1881649
cugcaugugugagcaugua

SEQ ID NO: 2060917 - RNA, 19 nt, Artificial Sequence
  Description of Artificial Sequence: Synthetic oligonucleotide
  Antisense strand to SEQ ID NO: 2060916
uacaugcucacacaugcag

SEQ ID NO: 2060918 - RNA, 19 nt, Artificial Sequence
  Description of Artificial Sequence: Synthetic oligonucleotide
  Sense strand starting at position 1732 of SEQ ID NO: 1881649
gucugacaguccuaccaga

SEQ ID NO: 2060919 - RNA, 19 nt, Artificial Sequence
  Description of Artificial Sequence: Synthetic oligonucleotide
  Antisense strand to SEQ ID NO: 2060918
ucugguaggacugucagac

SEQ ID NO: 2060920 - RNA, 19 nt, Artificial Sequence
  Description of Artificial Sequence: Synthetic oligonucleotide
  Sense strand starting at position 1989 of SEQ ID NO: 1881649
acuccuuucuccugggauc

SEQ ID NO: 2060921 - RNA, 19 nt, Artificial Sequence
  Description of Artificial Sequence: Synthetic oligonucleotide
  Antisense strand to SEQ ID NO: 2060920
gaucccaggagaaaggagu

SEQ ID NO: 2060922 - RNA, 19 nt, Artificial Sequence
  Description of Artificial Sequence: Synthetic oligonucleotide
  Sense strand starting at position 1991 of SEQ ID NO: 1881649
uccuuucuccugggaucca

SEQ ID NO: 2060923 - RNA, 19 nt, Artificial Sequence
  Description of Artificial Sequence: Synthetic oligonucleotide
  Antisense strand to SEQ ID NO: 2060922
uggaucccaggagaaagga

SEQ ID NO: 2060924 - RNA, 19 nt, Artificial Sequence
  Description of Artificial Sequence: Synthetic oligonucleotide
  Sense strand starting at position 2062 of SEQ ID NO: 1881649
ugccgagguuugcagcaau

SEQ ID NO: 2060925 - RNA, 19 nt, Artificial Sequence
  Description of Artificial Sequence: Synthetic oligonucleotide
  Antisense strand to SEQ ID NO: 2060924
auugcugcaaaccucggca

SEQ ID NO: 2060926 - RNA, 19 nt, Artificial Sequence
  Description of Artificial Sequence: Synthetic oligonucleotide
  Sense strand starting at position 2075 of SEQ ID NO: 1881649
agcaaugacguuuaauacu

SEQ ID NO: 2060927 - RNA, 19 nt, Artificial Sequence
  Description of Artificial Sequence: Synthetic oligonucleotide
  Antisense strand to SEQ ID NO: 2060926
aguauuaaacgucauugcu

SEQ ID NO: 2060928 - RNA, 19 nt, Artificial Sequence
  Description of Artificial Sequence: Synthetic oligonucleotide
  Sense strand starting at position 2081 of SEQ ID NO: 1881649
gacguuuaauacuucugga

SEQ ID NO: 2060929 - RNA, 19 nt, Artificial Sequence
  Description of Artificial Sequence: Synthetic oligonucleotide
  Antisense strand to SEQ ID NO: 2060928
uccagaaguauuaaacguc

SEQ ID NO: 2060930 - RNA, 19 nt, Artificial Sequence
  Description of Artificial Sequence: Synthetic oligonucleotide
  Sense strand starting at position 2084 of SEQ ID NO: 1881649
guuuaauacuucuggaaug

SEQ ID NO: 2060931 - RNA, 19 nt, Artificial Sequence
  Description of Artificial Sequence: Synthetic oligonucleotide
  Antisense strand to SEQ ID NO: 2060930
cauuccagaaguauuaaac

SEQ ID NO: 2060932 - RNA, 19 nt, Artificial Sequence
  Description of Artificial Sequence: Synthetic oligonucleotide
  Sense strand starting at position 2085 of SEQ ID NO: 1881649
uuuaauacuucuggaauga

SEQ ID NO: 2060933 - RNA, 19 nt, Artificial Sequence
  Description of Artificial Sequence: Synthetic oligonucleotide
  Antisense strand to SEQ ID NO: 2060932
ucauuccagaaguauuaaa

SEQ ID NO: 2060934 - RNA, 19 nt, Artificial Sequence
  Description of Artificial Sequence: Synthetic oligonucleotide
  Sense strand starting at position 2095 of SEQ ID NO: 1881649
cuggaaugauuaggaaucu

SEQ ID NO: 2060935 - RNA, 19 nt, Artificial Sequence
  Description of Artificial Sequence: Synthetic oligonucleotide
  Antisense strand to SEQ ID NO: 2060934
agauuccuaaucauuccag

SEQ ID NO: 2060936 - RNA, 19 nt, Artificial Sequence
  Description of Artificial Sequence: Synthetic oligonucleotide
  Sense strand starting at position 2104 of SEQ ID NO: 1881649
uuaggaaucugagaacaga

SEQ ID NO: 2060937 - RNA, 19 nt, Artificial Sequence
  Description of Artificial Sequence: Synthetic oligonucleotide
  Antisense strand to SEQ ID NO: 2060936
ucuguucucagauuccuaa

SEQ ID NO: 2060938 - RNA, 19 nt, Artificial Sequence
  Description of Artificial Sequence: Synthetic oligonucleotide
  Sense strand starting at position 2537 of SEQ ID NO: 1881649
uguccacuucuagggagaa

SEQ ID NO: 2060939 - RNA, 19 nt, Artificial Sequence
  Description of Artificial Sequence: Synthetic oligonucleotide
  Antisense strand to SEQ ID NO: 2060938
uucucccuagaaguggaca

SEQ ID NO: 2060940 - RNA, 19 nt, Artificial Sequence
  Description of Artificial Sequence: Synthetic oligonucleotide
  Sense strand starting at position 2538 of SEQ ID NO: 1881649
guccacuucuagggagaau

SEQ ID NO: 2060941 - RNA, 19 nt, Artificial Sequence
  Description of Artificial Sequence: Synthetic oligonucleotide
  Antisense strand to SEQ ID NO: 2060940
auucucccuagaaguggac

SEQ ID NO: 2060942 - RNA, 19 nt, Artificial Sequence
  Description of Artificial Sequence: Synthetic oligonucleotide
  Sense strand starting at position 2770 of SEQ ID NO: 1881649
ucccuucugcgcuuaguga

SEQ ID NO: 2060943 - RNA, 19 nt, Artificial Sequence
  Description of Artificial Sequence: Synthetic oligonucleotide
  Antisense strand to SEQ ID NO: 2060942
ucacuaagcgcagaaggga

SEQ ID NO: 2060944 - RNA, 19 nt, Artificial Sequence
  Description of Artificial Sequence: Synthetic oligonucleotide
  Sense strand starting at position 2774 of SEQ ID NO: 1881649
uucugcgcuuagugacaaa

SEQ ID NO: 2060945 - RNA, 19 nt, Artificial Sequence
  Description of Artificial Sequence: Synthetic oligonucleotide
  Antisense strand to SEQ ID NO: 2060944
uuugucacuaagcgcagaa

SEQ ID NO: 2060946 - RNA, 19 nt, Artificial Sequence
  Description of Artificial Sequence: Synthetic oligonucleotide
  Sense strand starting at position 2933 of SEQ ID NO: 1881649
ucugagucguccguggaga

SEQ ID NO: 2060947 - RNA, 19 nt, Artificial Sequence
  Description of Artificial Sequence: Synthetic oligonucleotide
  Antisense strand to SEQ ID NO: 2060946
ucuccacggacgacucaga

SEQ ID NO: 2060948 - RNA, 19 nt, Artificial Sequence
  Description of Artificial Sequence: Synthetic oligonucleotide
  Sense strand starting at position 2934 of SEQ ID NO: 1881649
cugagucguccguggagac

SEQ ID NO: 2060949 - RNA, 19 nt, Artificial Sequence
  Description of Artificial Sequence: Synthetic oligonucleotide
  Antisense strand to SEQ ID NO: 2060948
gucuccacggacgacucag

SEQ ID NO: 2060950 - RNA, 19 nt, Artificial Sequence
  Description of Artificial Sequence: Synthetic oligonucleotide
  Sense strand starting at position 2935 of SEQ ID NO: 1881649
ugagucguccguggagaca

SEQ ID NO: 2060951 - RNA, 19 nt, Artificial Sequence
  Description of Artificial Sequence: Synthetic oligonucleotide
  Antisense strand to SEQ ID NO: 2060950
ugucuccacggacgacuca

SEQ ID NO: 2060952 - RNA, 19 nt, Artificial Sequence
  Description of Artificial Sequence: Synthetic oligonucleotide
  Sense strand starting at position 3395 of SEQ ID NO: 1881649
gcgggucagugcuacccaa

SEQ ID NO: 2060953 - RNA, 19 nt, Artificial Sequence
  Description of Artificial Sequence: Synthetic oligonucleotide
  Antisense strand to SEQ ID NO: 2060952
uuggguagcacugacccgc

SEQ ID NO: 2060954 - RNA, 19 nt, Artificial Sequence
  Description of Artificial Sequence: Synthetic oligonucleotide
  Sense strand starting at position 3572 of SEQ ID NO: 1881649
gacacugcuugcucuguga

SEQ ID NO: 2060955 - RNA, 19 nt, Artificial Sequence
  Description of Artificial Sequence: Synthetic oligonucleotide
  Antisense strand to SEQ ID NO: 2060954
ucacagagcaagcaguguc

SEQ ID NO: 2060956 - RNA, 19 nt, Artificial Sequence
  Description of Artificial Sequence: Synthetic oligonucleotide
  Sense strand starting at position 3691 of SEQ ID NO: 1881649
gagauuugcccugguuggu

SEQ ID NO: 2060957 - RNA, 19 nt, Artificial Sequence
  Description of Artificial Sequence: Synthetic oligonucleotide
  Antisense strand to SEQ ID NO: 2060956
accaaccagggcaaaucuc

SEQ ID NO: 2060958 - RNA, 19 nt, Artificial Sequence
  Description of Artificial Sequence: Synthetic oligonucleotide
  Sense strand starting at position 3697 of SEQ ID NO: 1881649
ugcccugguugguccaaau

SEQ ID NO: 2060959 - RNA, 19 nt, Artificial Sequence
  Description of Artificial Sequence: Synthetic oligonucleotide
  Antisense strand to SEQ ID NO: 2060958
auuuggaccaaccagggca

SEQ ID NO: 2060960 - RNA, 19 nt, Artificial Sequence
  Description of Artificial Sequence: Synthetic oligonucleotide
  Sense strand starting at position 98 of SEQ ID NO: 1881650
auagcaauguguuuagaag

SEQ ID NO: 2060961 - RNA, 19 nt, Artificial Sequence
  Description of Artificial Sequence: Synthetic oligonucleotide
  Antisense strand to SEQ ID NO: 2060960
cuucuaaacacauugcuau

SEQ ID NO: 2060962 - RNA, 19 nt, Artificial Sequence
  Description of Artificial Sequence: Synthetic oligonucleotide
  Sense strand starting at position 107 of SEQ ID NO: 1881650
uguuuagaagguuguaaga

SEQ ID NO: 2060963 - RNA, 19 nt, Artificial Sequence
  Description of Artificial Sequence: Synthetic oligonucleotide
  Antisense strand to SEQ ID NO: 2060962
ucuuacaaccuucuaaaca

SEQ ID NO: 2060964 - RNA, 19 nt, Artificial Sequence
  Description of Artificial Sequence: Synthetic oligonucleotide
  Sense strand starting at position 171 of SEQ ID NO: 1881650
gagguaaaguuagaauuuc

SEQ ID NO: 2060965 - RNA, 19 nt, Artificial Sequence
  Description of Artificial Sequence: Synthetic oligonucleotide
  Antisense strand to SEQ ID NO: 2060964
gaaauucuaacuuuaccuc

SEQ ID NO: 2060966 - RNA, 19 nt, Artificial Sequence
  Description of Artificial Sequence: Synthetic oligonucleotide
  Sense strand starting at position 215 of SEQ ID NO: 1881650
uucugaaagguguaacuuu

SEQ ID NO: 2060967 - RNA, 19 nt, Artificial Sequence
  Description of Artificial Sequence: Synthetic oligonucleotide
  Antisense strand to SEQ ID NO: 2060966
aaaguuacaccuuucagaa

SEQ ID NO: 2060968 - RNA, 19 nt, Artificial Sequence
  Description of Artificial Sequence: Synthetic oligonucleotide
  Sense strand starting at position 354 of SEQ ID NO: 1881650
acaaauaaguggguuccua

SEQ ID NO: 2060969 - RNA, 19 nt, Artificial Sequence
  Description of Artificial Sequence: Synthetic oligonucleotide
  Antisense strand to SEQ ID NO: 2060968
uaggaacccacuuauuugu

SEQ ID NO: 2060970 - RNA, 19 nt, Artificial Sequence
  Description of Artificial Sequence: Synthetic oligonucleotide
  Sense strand starting at position 358 of SEQ ID NO: 1881650
auaaguggguuccuaauga

SEQ ID NO: 2060971 - RNA, 19 nt, Artificial Sequence
  Description of Artificial Sequence: Synthetic oligonucleotide
  Antisense strand to SEQ ID NO: 2060970
ucauuaggaacccacuuau

SEQ ID NO: 2060972 - RNA, 19 nt, Artificial Sequence
  Description of Artificial Sequence: Synthetic oligonucleotide
  Sense strand starting at position 414 of SEQ ID NO: 1881650
uggcuugagugacccugaa

SEQ ID NO: 2060973 - RNA, 19 nt, Artificial Sequence
  Description of Artificial Sequence: Synthetic oligonucleotide
  Antisense strand to SEQ ID NO: 2060972
uucagggucacucaagcca

SEQ ID NO: 2060974 - RNA, 19 nt, Artificial Sequence
  Description of Artificial Sequence: Synthetic oligonucleotide
  Sense strand starting at position 694 of SEQ ID NO: 1881650
cagguuuccugaccaggau

SEQ ID NO: 2060975 - RNA, 19 nt, Artificial Sequence
  Description of Artificial Sequence: Synthetic oligonucleotide
  Antisense strand to SEQ ID NO: 2060974
auccuggucaggaaaccug

SEQ ID NO: 2060976 - RNA, 19 nt, Artificial Sequence
  Description of Artificial Sequence: Synthetic oligonucleotide
  Sense strand starting at position 697 of SEQ ID NO: 1881650
guuuccugaccaggauauu

SEQ ID NO: 2060977 - RNA, 19 nt, Artificial Sequence
  Description of Artificial Sequence: Synthetic oligonucleotide
  Antisense strand to SEQ ID NO: 2060976
aauauccuggucaggaaac

SEQ ID NO: 2060978 - RNA, 19 nt, Artificial Sequence
  Description of Artificial Sequence: Synthetic oligonucleotide
  Sense strand starting at position 925 of SEQ ID NO: 1881650
gguacaugugcauaccaua

SEQ ID NO: 2060979 - RNA, 19 nt, Artificial Sequence
  Description of Artificial Sequence: Synthetic oligonucleotide
  Antisense strand to SEQ ID NO: 2060978
uaugguaugcacauguacc

SEQ ID NO: 2060980 - RNA, 19 nt, Artificial Sequence
  Description of Artificial Sequence: Synthetic oligonucleotide
  Sense strand starting at position 1033 of SEQ ID NO: 1881650
ggaugucagacuuggagau

SEQ ID NO: 2060981 - RNA, 19 nt, Artificial Sequence
  Description of Artificial Sequence: Synthetic oligonucleotide
  Antisense strand to SEQ ID NO: 2060980
aucuccaagucugacaucc

SEQ ID NO: 2060982 - RNA, 19 nt, Artificial Sequence
  Description of Artificial Sequence: Synthetic oligonucleotide
  Sense strand starting at position 1203 of SEQ ID NO: 1881650
gggcaucaccuacauauua

SEQ ID NO: 2060983 - RNA, 19 nt, Artificial Sequence
  Description of Artificial Sequence: Synthetic oligonucleotide
  Antisense strand to SEQ ID NO: 2060982
uaauauguaggugaugccc

SEQ ID NO: 2060984 - RNA, 19 nt, Artificial Sequence
  Description of Artificial Sequence: Synthetic oligonucleotide
  Sense strand starting at position 1256 of SEQ ID NO: 1881650
cuagcucagugaguagaau

SEQ ID NO: 2060985 - RNA, 19 nt, Artificial Sequence
  Description of Artificial Sequence: Synthetic oligonucleotide
  Antisense strand to SEQ ID NO: 2060984
auucuacucacugagcuag

SEQ ID NO: 2060986 - RNA, 19 nt, Artificial Sequence
  Description of Artificial Sequence: Synthetic oligonucleotide
  Sense strand starting at position 1490 of SEQ ID NO: 1881650
ccaugucugggaugguaca

SEQ ID NO: 2060987 - RNA, 19 nt, Artificial Sequence
  Description of Artificial Sequence: Synthetic oligonucleotide
  Antisense strand to SEQ ID NO: 2060986
uguaccaucccagacaugg

SEQ ID NO: 2060988 - RNA, 19 nt, Artificial Sequence
  Description of Artificial Sequence: Synthetic oligonucleotide
  Sense strand starting at position 1567 of SEQ ID NO: 1881650
aguguuugucaucagauca

SEQ ID NO: 2060989 - RNA, 19 nt, Artificial Sequence
  Description of Artificial Sequence: Synthetic oligonucleotide
  Antisense strand to SEQ ID NO: 2060988
ugaucugaugacaaacacu

SEQ ID NO: 2060990 - RNA, 19 nt, Artificial Sequence
  Description of Artificial Sequence: Synthetic oligonucleotide
  Sense strand starting at position 1600 of SEQ ID NO: 1881650
ggaagagucuaguccugug

SEQ ID NO: 2060991 - RNA, 19 nt, Artificial Sequence
  Description of Artificial Sequence: Synthetic oligonucleotide
  Antisense strand to SEQ ID NO: 2060990
cacaggacuagacucuucc

SEQ ID NO: 2060992 - RNA, 19 nt, Artificial Sequence
  Description of Artificial Sequence: Synthetic oligonucleotide
  Sense strand starting at position 1610 of SEQ ID NO: 1881650
aguccugugugaucaugaa

SEQ ID NO: 2060993 - RNA, 19 nt, Artificial Sequence
  Description of Artificial Sequence: Synthetic oligonucleotide
  Antisense strand to SEQ ID NO: 2060992
uucaugaucacacaggacu

SEQ ID NO: 2060994 - RNA, 19 nt, Artificial Sequence
  Description of Artificial Sequence: Synthetic oligonucleotide
  Sense strand starting at position 1825 of SEQ ID NO: 1881650
gccauuaacucauuaugug

SEQ ID NO: 2060995 - RNA, 19 nt, Artificial Sequence
  Description of Artificial Sequence: Synthetic oligonucleotide
  Antisense strand to SEQ ID NO: 2060994
cacauaaugaguuaauggc

SEQ ID NO: 2060996 - RNA, 19 nt, Artificial Sequence
  Description of Artificial Sequence: Synthetic oligonucleotide
  Sense strand starting at position 1833 of SEQ ID NO: 1881650
cucauuaugugaccuugaa

SEQ ID NO: 2060997 - RNA, 19 nt, Artificial Sequence
  Description of Artificial Sequence: Synthetic oligonucleotide
  Antisense strand to SEQ ID NO: 2060996
uucaaggucacauaaugag

SEQ ID NO: 2060998 - RNA, 19 nt, Artificial Sequence
  Description of Artificial Sequence: Synthetic oligonucleotide
  Sense strand starting at position 1891 of SEQ ID NO: 1881650
uuugacuugguuugaguca

SEQ ID NO: 2060999 - RNA, 19 nt, Artificial Sequence
  Description of Artificial Sequence: Synthetic oligonucleotide
  Antisense strand to SEQ ID NO: 2060998
ugacucaaaccaagucaaa

SEQ ID NO: 2061000 - RNA, 19 nt, Artificial Sequence
  Description of Artificial Sequence: Synthetic oligonucleotide
  Sense strand starting at position 2280 of SEQ ID NO: 1881650
aaguguuaucaccauaggu

SEQ ID NO: 2061001 - RNA, 19 nt, Artificial Sequence
  Description of Artificial Sequence: Synthetic oligonucleotide
  Antisense strand to SEQ ID NO: 2061000
accuauggugauaacacuu

SEQ ID NO: 2061002 - RNA, 19 nt, Artificial Sequence
  Description of Artificial Sequence: Synthetic oligonucleotide
  Sense strand starting at position 2282 of SEQ ID NO: 1881650
guguuaucaccauagguga

SEQ ID NO: 2061003 - RNA, 19 nt, Artificial Sequence
  Description of Artificial Sequence: Synthetic oligonucleotide
  Antisense strand to SEQ ID NO: 2061002
ucaccuauggugauaacac

SEQ ID NO: 2061004 - RNA, 19 nt, Artificial Sequence
  Description of Artificial Sequence: Synthetic oligonucleotide
  Sense strand starting at position 2296 of SEQ ID NO: 1881650
ggugacaccuccuuuauug

SEQ ID NO: 2061005 - RNA, 19 nt, Artificial Sequence
  Description of Artificial Sequence: Synthetic oligonucleotide
  Antisense strand to SEQ ID NO: 2061004
caauaaaggaggugucacc

SEQ ID NO: 2061006 - RNA, 19 nt, Artificial Sequence
  Description of Artificial Sequence: Synthetic oligonucleotide
  Sense strand starting at position 2311 of SEQ ID NO: 1881650
auugguauuugugugcuaa

SEQ ID NO: 2061007 - RNA, 19 nt, Artificial Sequence
  Description of Artificial Sequence: Synthetic oligonucleotide
  Antisense strand to SEQ ID NO: 2061006
uuagcacacaaauaccaau

SEQ ID NO: 2061008 - RNA, 19 nt, Artificial Sequence
  Description of Artificial Sequence: Synthetic oligonucleotide
  Sense strand starting at position 2312 of SEQ ID NO: 1881650
uugguauuugugugcuaag

SEQ ID NO: 2061009 - RNA, 19 nt, Artificial Sequence
  Description of Artificial Sequence: Synthetic oligonucleotide
  Antisense strand to SEQ ID NO: 2061008
cuuagcacacaaauaccaa

SEQ ID NO: 2061010 - RNA, 19 nt, Artificial Sequence
  Description of Artificial Sequence: Synthetic oligonucleotide
  Sense strand starting at position 2313 of SEQ ID NO: 1881650
ugguauuugugugcuaaga

SEQ ID NO: 2061011 - RNA, 19 nt, Artificial Sequence
  Description of Artificial Sequence: Synthetic oligonucleotide
  Antisense strand to SEQ ID NO: 2061010
ucuuagcacacaaauacca

SEQ ID NO: 2061012 - RNA, 19 nt, Artificial Sequence
  Description of Artificial Sequence: Synthetic oligonucleotide
  Sense strand starting at position 2462 of SEQ ID NO: 1881650
ggaggugaguaauugguau

SEQ ID NO: 2061013 - RNA, 19 nt, Artificial Sequence
  Description of Artificial Sequence: Synthetic oligonucleotide
  Antisense strand to SEQ ID NO: 2061012
auaccaauuacucaccucc

SEQ ID NO: 2061014 - RNA, 19 nt, Artificial Sequence
  Description of Artificial Sequence: Synthetic oligonucleotide
  Sense strand starting at position 2469 of SEQ ID NO: 1881650
aguaauugguauccuucuu

SEQ ID NO: 2061015 - RNA, 19 nt, Artificial Sequence
  Description of Artificial Sequence: Synthetic oligonucleotide
  Antisense strand to SEQ ID NO: 2061014
aagaaggauaccaauuacu

SEQ ID NO: 2061016 - RNA, 19 nt, Artificial Sequence
  Description of Artificial Sequence: Synthetic oligonucleotide
  Sense strand starting at position 2481 of SEQ ID NO: 1881650
ccuucuuagguagaauacu

SEQ ID NO: 2061017 - RNA, 19 nt, Artificial Sequence
  Description of Artificial Sequence: Synthetic oligonucleotide
  Antisense strand to SEQ ID NO: 2061016
aguauucuaccuaagaagg

SEQ ID NO: 2061018 - RNA, 19 nt, Artificial Sequence
  Description of Artificial Sequence: Synthetic oligonucleotide
  Sense strand starting at position 2563 of SEQ ID NO: 1881650
gcccacagacaaugugaaa

SEQ ID NO: 2061019 - RNA, 19 nt, Artificial Sequence
  Description of Artificial Sequence: Synthetic oligonucleotide
  Antisense strand to SEQ ID NO: 2061018
uuucacauugucugugggc

SEQ ID NO: 2061020 - RNA, 19 nt, Artificial Sequence
  Description of Artificial Sequence: Synthetic oligonucleotide
  Sense strand starting at position 2637 of SEQ ID NO: 1881650
gccugucuagaacaguuaa

SEQ ID NO: 2061021 - RNA, 19 nt, Artificial Sequence
  Description of Artificial Sequence: Synthetic oligonucleotide
  Antisense strand to SEQ ID NO: 2061020
uuaacuguucuagacaggc

SEQ ID NO: 2061022 - RNA, 19 nt, Artificial Sequence
  Description of Artificial Sequence: Synthetic oligonucleotide
  Sense strand starting at position 2659 of SEQ ID NO: 1881650
gguuauagaggcugccaaa

SEQ ID NO: 2061023 - RNA, 19 nt, Artificial Sequence
  Description of Artificial Sequence: Synthetic oligonucleotide
  Antisense strand to SEQ ID NO: 2061022
uuuggcagccucuauaacc

SEQ ID NO: 2061024 - RNA, 19 nt, Artificial Sequence
  Description of Artificial Sequence: Synthetic oligonucleotide
  Sense strand starting at position 2750 of SEQ ID NO: 1881650
uccuauuucugagaagaga

SEQ ID NO: 2061025 - RNA, 19 nt, Artificial Sequence
  Description of Artificial Sequence: Synthetic oligonucleotide
  Antisense strand to SEQ ID NO: 2061024
ucucuucucagaaauagga

SEQ ID NO: 2061026 - RNA, 19 nt, Artificial Sequence
  Description of Artificial Sequence: Synthetic oligonucleotide
  Sense strand starting at position 2807 of SEQ ID NO: 1881650
aaggcaggucccugacaau

SEQ ID NO: 2061027 - RNA, 19 nt, Artificial Sequence
  Description of Artificial Sequence: Synthetic oligonucleotide
  Antisense strand to SEQ ID NO: 2061026
auugucagggaccugccuu

SEQ ID NO: 2061028 - RNA, 19 nt, Artificial Sequence
  Description of Artificial Sequence: Synthetic oligonucleotide
  Sense strand starting at position 2921 of SEQ ID NO: 1881650
acacgaugauaugcaauaa

SEQ ID NO: 2061029 - RNA, 19 nt, Artificial Sequence
  Description of Artificial Sequence: Synthetic oligonucleotide
  Antisense strand to SEQ ID NO: 2061028
uuauugcauaucaucgugu

SEQ ID NO: 2061030 - RNA, 19 nt, Artificial Sequence
  Description of Artificial Sequence: Synthetic oligonucleotide
  Sense strand starting at position 3040 of SEQ ID NO: 1881650
cgagaaugacucuggagug

SEQ ID NO: 2061031 - RNA, 19 nt, Artificial Sequence
  Description of Artificial Sequence: Synthetic oligonucleotide
  Antisense strand to SEQ ID NO: 2061030
cacuccagagucauucucg

SEQ ID NO: 2061032 - RNA, 19 nt, Artificial Sequence
  Description of Artificial Sequence: Synthetic oligonucleotide
  Sense strand starting at position 3074 of SEQ ID NO: 1881650
uuaaauaacuggguauguu

SEQ ID NO: 2061033 - RNA, 19 nt, Artificial Sequence
  Description of Artificial Sequence: Synthetic oligonucleotide
  Antisense strand to SEQ ID NO: 2061032
aacauacccaguuauuuaa

SEQ ID NO: 2061034 - RNA, 19 nt, Artificial Sequence
  Description of Artificial Sequence: Synthetic oligonucleotide
  Sense strand starting at position 3153 of SEQ ID NO: 1881650
ccugguucucaggagugga

SEQ ID NO: 2061035 - RNA, 19 nt, Artificial Sequence
  Description of Artificial Sequence: Synthetic oligonucleotide
  Antisense strand to SEQ ID NO: 2061034
uccacuccugagaaccagg

SEQ ID NO: 2061036 - RNA, 19 nt, Artificial Sequence
  Description of Artificial Sequence: Synthetic oligonucleotide
  Sense strand starting at position 3361 of SEQ ID NO: 1881650
gagaacacuugcgucugaa

SEQ ID NO: 2061037 - RNA, 19 nt, Artificial Sequence
  Description of Artificial Sequence: Synthetic oligonucleotide
  Antisense strand to SEQ ID NO: 2061036
uucagacgcaaguguucuc

SEQ ID NO: 2061038 - RNA, 19 nt, Artificial Sequence
  Description of Artificial Sequence: Synthetic oligonucleotide
  Sense strand starting at position 3602 of SEQ ID NO: 1881650
caguauuuccaugggugca

SEQ ID NO: 2061039 - RNA, 19 nt, Artificial Sequence
  Description of Artificial Sequence: Synthetic oligonucleotide
  Antisense strand to SEQ ID NO: 2061038
ugcacccauggaaauacug

SEQ ID NO: 2061040 - RNA, 19 nt, Artificial Sequence
  Description of Artificial Sequence: Synthetic oligonucleotide
  Sense strand starting at position 265 of SEQ ID NO: 1881651
ggcgaaaugcuugaaucca

SEQ ID NO: 2061041 - RNA, 19 nt, Artificial Sequence
  Description of Artificial Sequence: Synthetic oligonucleotide
  Antisense strand to SEQ ID NO: 2061040
uggauucaagcauuucgcc

SEQ ID NO: 2061042 - RNA, 19 nt, Artificial Sequence
  Description of Artificial Sequence: Synthetic oligonucleotide
  Sense strand starting at position 626 of SEQ ID NO: 1881651
auuagaagguaguuuaagu

SEQ ID NO: 2061043 - RNA, 19 nt, Artificial Sequence
  Description of Artificial Sequence: Synthetic oligonucleotide
  Antisense strand to SEQ ID NO: 2061042
acuuaaacuaccuucuaau

SEQ ID NO: 2061044 - RNA, 19 nt, Artificial Sequence
  Description of Artificial Sequence: Synthetic oligonucleotide
  Sense strand starting at position 990 of SEQ ID NO: 1881651
guccaaaugcugcauagaa

SEQ ID NO: 2061045 - RNA, 19 nt, Artificial Sequence
  Description of Artificial Sequence: Synthetic oligonucleotide
  Antisense strand to SEQ ID NO: 2061044
uucuaugcagcauuuggac

SEQ ID NO: 2061046 - RNA, 19 nt, Artificial Sequence
  Description of Artificial Sequence: Synthetic oligonucleotide
  Sense strand starting at position 992 of SEQ ID NO: 1881651
ccaaaugcugcauagaaga

SEQ ID NO: 2061047 - RNA, 19 nt, Artificial Sequence
  Description of Artificial Sequence: Synthetic oligonucleotide
  Antisense strand to SEQ ID NO: 2061046
ucuucuaugcagcauuugg

SEQ ID NO: 2061048 - RNA, 19 nt, Artificial Sequence
  Description of Artificial Sequence: Synthetic oligonucleotide
  Sense strand starting at position 1263 of SEQ ID NO: 1881651
cucagaggguggagagaua

SEQ ID NO: 2061049 - RNA, 19 nt, Artificial Sequence
  Description of Artificial Sequence: Synthetic oligonucleotide
  Antisense strand to SEQ ID NO: 2061048
uaucucuccacccucugag

SEQ ID NO: 2061050 - RNA, 19 nt, Artificial Sequence
  Description of Artificial Sequence: Synthetic oligonucleotide
  Sense strand starting at position 1343 of SEQ ID NO: 1881651
cagagcuuucuguaaugau

SEQ ID NO: 2061051 - RNA, 19 nt, Artificial Sequence
  Description of Artificial Sequence: Synthetic oligonucleotide
  Antisense strand to SEQ ID NO: 2061050
aucauuacagaaagcucug

SEQ ID NO: 2061052 - RNA, 19 nt, Artificial Sequence
  Description of Artificial Sequence: Synthetic oligonucleotide
  Sense strand starting at position 1347 of SEQ ID NO: 1881651
gcuuucuguaaugauggaa

SEQ ID NO: 2061053 - RNA, 19 nt, Artificial Sequence
  Description of Artificial Sequence: Synthetic oligonucleotide
  Antisense strand to SEQ ID NO: 2061052
uuccaucauuacagaaagc

SEQ ID NO: 2061054 - RNA, 19 nt, Artificial Sequence
  Description of Artificial Sequence: Synthetic oligonucleotide
  Sense strand starting at position 1372 of SEQ ID NO: 1881651
ugcgucugcaccgucuaau

SEQ ID NO: 2061055 - RNA, 19 nt, Artificial Sequence
  Description of Artificial Sequence: Synthetic oligonucleotide
  Antisense strand to SEQ ID NO: 2061054
auuagacggugcagacgca

SEQ ID NO: 2061056 - RNA, 19 nt, Artificial Sequence
  Description of Artificial Sequence: Synthetic oligonucleotide
  Sense strand starting at position 1373 of SEQ ID NO: 1881651
gcgucugcaccgucuaaua

SEQ ID NO: 2061057 - RNA, 19 nt, Artificial Sequence
  Description of Artificial Sequence: Synthetic oligonucleotide
  Antisense strand to SEQ ID NO: 2061056
uauuagacggugcagacgc

SEQ ID NO: 2061058 - RNA, 19 nt, Artificial Sequence
  Description of Artificial Sequence: Synthetic oligonucleotide
  Sense strand starting at position 1580 of SEQ ID NO: 1881651
agaguuagaucaguaaguc

SEQ ID NO: 2061059 - RNA, 19 nt, Artificial Sequence
  Description of Artificial Sequence: Synthetic oligonucleotide
  Antisense strand to SEQ ID NO: 2061058
gacuuacugaucuaacucu

SEQ ID NO: 2061060 - RNA, 19 nt, Artificial Sequence
  Description of Artificial Sequence: Synthetic oligonucleotide
  Sense strand starting at position 1581 of SEQ ID NO: 1881651
gaguuagaucaguaagucu

SEQ ID NO: 2061061 - RNA, 19 nt, Artificial Sequence
  Description of Artificial Sequence: Synthetic oligonucleotide
  Antisense strand to SEQ ID NO: 2061060
agacuuacugaucuaacuc

SEQ ID NO: 2061062 - RNA, 19 nt, Artificial Sequence
  Description of Artificial Sequence: Synthetic oligonucleotide
  Sense strand starting at position 1623 of SEQ ID NO: 1881651
uggagaagcuaaucuaacu

SEQ ID NO: 2061063 - RNA, 19 nt, Artificial Sequence
  Description of Artificial Sequence: Synthetic oligonucleotide
  Antisense strand to SEQ ID NO: 2061062
aguuagauuagcuucucca

SEQ ID NO: 2061064 - RNA, 19 nt, Artificial Sequence
  Description of Artificial Sequence: Synthetic oligonucleotide
  Sense strand starting at position 1697 of SEQ ID NO: 1881651
auuagaaaugugugaucaa

SEQ ID NO: 2061065 - RNA, 19 nt, Artificial Sequence
  Description of Artificial Sequence: Synthetic oligonucleotide
  Antisense strand to SEQ ID NO: 2061064
uugaucacacauuucuaau

SEQ ID NO: 2061066 - RNA, 19 nt, Artificial Sequence
  Description of Artificial Sequence: Synthetic oligonucleotide
  Sense strand starting at position 1700 of SEQ ID NO: 1881651
agaaaugugugaucaacuu

SEQ ID NO: 2061067 - RNA, 19 nt, Artificial Sequence
  Description of Artificial Sequence: Synthetic oligonucleotide
  Antisense strand to SEQ ID NO: 2061066
aaguugaucacacauuucu

SEQ ID NO: 2061068 - RNA, 19 nt, Artificial Sequence
  Description of Artificial Sequence: Synthetic oligonucleotide
  Sense strand starting at position 1728 of SEQ ID NO: 1881651
gucaacagaugcucagaua

SEQ ID NO: 2061069 - RNA, 19 nt, Artificial Sequence
  Description of Artificial Sequence: Synthetic oligonucleotide
  Antisense strand to SEQ ID NO: 2061068
uaucugagcaucuguugac

SEQ ID NO: 2061070 - RNA, 19 nt, Artificial Sequence
  Description of Artificial Sequence: Synthetic oligonucleotide
  Sense strand starting at position 1830 of SEQ ID NO: 1881651
cuuucugaugcugacauua

SEQ ID NO: 2061071 - RNA, 19 nt, Artificial Sequence
  Description of Artificial Sequence: Synthetic oligonucleotide
  Antisense strand to SEQ ID NO: 2061070
uaaugucagcaucagaaag

SEQ ID NO: 2061072 - RNA, 19 nt, Artificial Sequence
  Description of Artificial Sequence: Synthetic oligonucleotide
  Sense strand starting at position 1994 of SEQ ID NO: 1881651
cagucagcucaauagaaug

SEQ ID NO: 2061073 - RNA, 19 nt, Artificial Sequence
  Description of Artificial Sequence: Synthetic oligonucleotide
  Antisense strand to SEQ ID NO: 2061072
cauucuauugagcugacug

SEQ ID NO: 2061074 - RNA, 19 nt, Artificial Sequence
  Description of Artificial Sequence: Synthetic oligonucleotide
  Sense strand starting at position 2052 of SEQ ID NO: 1881651
cugacauaugucuaaagca

SEQ ID NO: 2061075 - RNA, 19 nt, Artificial Sequence
  Description of Artificial Sequence: Synthetic oligonucleotide
  Antisense strand to SEQ ID NO: 2061074
ugcuuuagacauaugucag

SEQ ID NO: 2061076 - RNA, 19 nt, Artificial Sequence
  Description of Artificial Sequence: Synthetic oligonucleotide
  Sense strand starting at position 2107 of SEQ ID NO: 1881651
guacgucacauuggacaaa

SEQ ID NO: 2061077 - RNA, 19 nt, Artificial Sequence
  Description of Artificial Sequence: Synthetic oligonucleotide
  Antisense strand to SEQ ID NO: 2061076
uuuguccaaugugacguac

SEQ ID NO: 2061078 - RNA, 19 nt, Artificial Sequence
  Description of Artificial Sequence: Synthetic oligonucleotide
  Sense strand starting at position 2110 of SEQ ID NO: 1881651
cgucacauuggacaaauca

SEQ ID NO: 2061079 - RNA, 19 nt, Artificial Sequence
  Description of Artificial Sequence: Synthetic oligonucleotide
  Antisense strand to SEQ ID NO: 2061078
ugauuuguccaaugugacg

SEQ ID NO: 2061080 - RNA, 19 nt, Artificial Sequence
  Description of Artificial Sequence: Synthetic oligonucleotide
  Sense strand starting at position 2117 of SEQ ID NO: 1881651
uuggacaaaucaccuguua

SEQ ID NO: 2061081 - RNA, 19 nt, Artificial Sequence
  Description of Artificial Sequence: Synthetic oligonucleotide
  Antisense strand to SEQ ID NO: 2061080
uaacaggugauuuguccaa

SEQ ID NO: 2061082 - RNA, 19 nt, Artificial Sequence
  Description of Artificial Sequence: Synthetic oligonucleotide
  Sense strand starting at position 2164 of SEQ ID NO: 1881651
cagcaaauuuguuugaugu

SEQ ID NO: 2061083 - RNA, 19 nt, Artificial Sequence
  Description of Artificial Sequence: Synthetic oligonucleotide
  Antisense strand to SEQ ID NO: 2061082
acaucaaacaaauuugcug

SEQ ID NO: 2061084 - RNA, 19 nt, Artificial Sequence
  Description of Artificial Sequence: Synthetic oligonucleotide
  Sense strand starting at position 2231 of SEQ ID NO: 1881651
aauauagccuggucugaau

SEQ ID NO: 2061085 - RNA, 19 nt, Artificial Sequence
  Description of Artificial Sequence: Synthetic oligonucleotide
  Antisense strand to SEQ ID NO: 2061084
auucagaccaggcuauauu

SEQ ID NO: 2061086 - RNA, 19 nt, Artificial Sequence
  Description of Artificial Sequence: Synthetic oligonucleotide
  Sense strand starting at position 2242 of SEQ ID NO: 1881651
gucugaauugaagggaagu

SEQ ID NO: 2061087 - RNA, 19 nt, Artificial Sequence
  Description of Artificial Sequence: Synthetic oligonucleotide
  Antisense strand to SEQ ID NO: 2061086
acuucccuucaauucagac

SEQ ID NO: 2061088 - RNA, 19 nt, Artificial Sequence
  Description of Artificial Sequence: Synthetic oligonucleotide
  Sense strand starting at position 2292 of SEQ ID NO: 1881651
cugaaugcugcugagaaau

SEQ ID NO: 2061089 - RNA, 19 nt, Artificial Sequence
  Description of Artificial Sequence: Synthetic oligonucleotide
  Antisense strand to SEQ ID NO: 2061088
auuucucagcagcauucag

SEQ ID NO: 2061090 - RNA, 19 nt, Artificial Sequence
  Description of Artificial Sequence: Synthetic oligonucleotide
  Sense strand starting at position 2404 of SEQ ID NO: 1881651
guaagacuccaacgacaca

SEQ ID NO: 2061091 - RNA, 19 nt, Artificial Sequence
  Description of Artificial Sequence: Synthetic oligonucleotide
  Antisense strand to SEQ ID NO: 2061090
ugugucguuggagucuuac

SEQ ID NO: 2061092 - RNA, 19 nt, Artificial Sequence
  Description of Artificial Sequence: Synthetic oligonucleotide
  Sense strand starting at position 2436 of SEQ ID NO: 1881651
guugaauuugcugggugca

SEQ ID NO: 2061093 - RNA, 19 nt, Artificial Sequence
  Description of Artificial Sequence: Synthetic oligonucleotide
  Antisense strand to SEQ ID NO: 2061092
ugcacccagcaaauucaac

SEQ ID NO: 2061094 - RNA, 19 nt, Artificial Sequence
  Description of Artificial Sequence: Synthetic oligonucleotide
  Sense strand starting at position 2831 of SEQ ID NO: 1881651
gucaacauaguguaacauu

SEQ ID NO: 2061095 - RNA, 19 nt, Artificial Sequence
  Description of Artificial Sequence: Synthetic oligonucleotide
  Antisense strand to SEQ ID NO: 2061094
aauguuacacuauguugac

SEQ ID NO: 2061096 - RNA, 19 nt, Artificial Sequence
  Description of Artificial Sequence: Synthetic oligonucleotide
  Sense strand starting at position 2927 of SEQ ID NO: 1881651
gacagaggacaguguuaca

SEQ ID NO: 2061097 - RNA, 19 nt, Artificial Sequence
  Description of Artificial Sequence: Synthetic oligonucleotide
  Antisense strand to SEQ ID NO: 2061096
uguaacacuguccucuguc

SEQ ID NO: 2061098 - RNA, 19 nt, Artificial Sequence
  Description of Artificial Sequence: Synthetic oligonucleotide
  Sense strand starting at position 2963 of SEQ ID NO: 1881651
gugacuaaagucugacauu

SEQ ID NO: 2061099 - RNA, 19 nt, Artificial Sequence
  Description of Artificial Sequence: Synthetic oligonucleotide
  Antisense strand to SEQ ID NO: 2061098
aaugucagacuuuagucac

SEQ ID NO: 2061100 - RNA, 19 nt, Artificial Sequence
  Description of Artificial Sequence: Synthetic oligonucleotide
  Sense strand starting at position 2964 of SEQ ID NO: 1881651
ugacuaaagucugacauuu

SEQ ID NO: 2061101 - RNA, 19 nt, Artificial Sequence
  Description of Artificial Sequence: Synthetic oligonucleotide
  Antisense strand to SEQ ID NO: 2061100
aaaugucagacuuuaguca

SEQ ID NO: 2061102 - RNA, 19 nt, Artificial Sequence
  Description of Artificial Sequence: Synthetic oligonucleotide
  Sense strand starting at position 3083 of SEQ ID NO: 1881651
uaugaugagucugcauuag

SEQ ID NO: 2061103 - RNA, 19 nt, Artificial Sequence
  Description of Artificial Sequence: Synthetic oligonucleotide
  Antisense strand to SEQ ID NO: 2061102
cuaaugcagacucaucaua

SEQ ID NO: 2061104 - RNA, 19 nt, Artificial Sequence
  Description of Artificial Sequence: Synthetic oligonucleotide
  Sense strand starting at position 3087 of SEQ ID NO: 1881651
augagucugcauuaggcaa

SEQ ID NO: 2061105 - RNA, 19 nt, Artificial Sequence
  Description of Artificial Sequence: Synthetic oligonucleotide
  Antisense strand to SEQ ID NO: 2061104
uugccuaaugcagacucau

SEQ ID NO: 2061106 - RNA, 19 nt, Artificial Sequence
  Description of Artificial Sequence: Synthetic oligonucleotide
  Sense strand starting at position 3256 of SEQ ID NO: 1881651
cagguuugccucuaaggga

SEQ ID NO: 2061107 - RNA, 19 nt, Artificial Sequence
  Description of Artificial Sequence: Synthetic oligonucleotide
  Antisense strand to SEQ ID NO: 2061106
ucccuuagaggcaaaccug

SEQ ID NO: 2061108 - RNA, 19 nt, Artificial Sequence
  Description of Artificial Sequence: Synthetic oligonucleotide
  Sense strand starting at position 3763 of SEQ ID NO: 1881651
augaaauuaggcugggcau

SEQ ID NO: 2061109 - RNA, 19 nt, Artificial Sequence
  Description of Artificial Sequence: Synthetic oligonucleotide
  Antisense strand to SEQ ID NO: 2061108
augcccagccuaauuucau

SEQ ID NO: 2061110 - RNA, 19 nt, Artificial Sequence
  Description of Artificial Sequence: Synthetic oligonucleotide
  Sense strand starting at position 3934 of SEQ ID NO: 1881651
cucucauuaugggugggaa

SEQ ID NO: 2061111 - RNA, 19 nt, Artificial Sequence
  Description of Artificial Sequence: Synthetic oligonucleotide
  Antisense strand to SEQ ID NO: 2061110
uucccacccauaaugagag

SEQ ID NO: 2061112 - RNA, 19 nt, Artificial Sequence
  Description of Artificial Sequence: Synthetic oligonucleotide
  Sense strand starting at position 3935 of SEQ ID NO: 1881651
ucucauuaugggugggaau

SEQ ID NO: 2061113 - RNA, 19 nt, Artificial Sequence
  Description of Artificial Sequence: Synthetic oligonucleotide
  Antisense strand to SEQ ID NO: 2061112
auucccacccauaaugaga

SEQ ID NO: 2061114 - RNA, 19 nt, Artificial Sequence
  Description of Artificial Sequence: Synthetic oligonucleotide
  Sense strand starting at position 3936 of SEQ ID NO: 1881651
cucauuaugggugggaauu

SEQ ID NO: 2061115 - RNA, 19 nt, Artificial Sequence
  Description of Artificial Sequence: Synthetic oligonucleotide
  Antisense strand to SEQ ID NO: 2061114
aauucccacccauaaugag

SEQ ID NO: 2061116 - RNA, 19 nt, Artificial Sequence
  Description of Artificial Sequence: Synthetic oligonucleotide
  Sense strand starting at position 3937 of SEQ ID NO: 1881651
ucauuaugggugggaauua

SEQ ID NO: 2061117 - RNA, 19 nt, Artificial Sequence
  Description of Artificial Sequence: Synthetic oligonucleotide
  Antisense strand to SEQ ID NO: 2061116
uaauucccacccauaauga

SEQ ID NO: 2061118 - RNA, 19 nt, Artificial Sequence
  Description of Artificial Sequence: Synthetic oligonucleotide
  Sense strand starting at position 3950 of SEQ ID NO: 1881651
gaauuagagugcucagauu

SEQ ID NO: 2061119 - RNA, 19 nt, Artificial Sequence
  Description of Artificial Sequence: Synthetic oligonucleotide
  Antisense strand to SEQ ID NO: 2061118
aaucugagcacucuaauuc

SEQ ID NO: 2061120 - RNA, 19 nt, Artificial Sequence
  Description of Artificial Sequence: Synthetic oligonucleotide
  Sense strand starting at position 207 of SEQ ID NO: 1881652
gaagucaaauuguuucuga

SEQ ID NO: 2061121 - RNA, 19 nt, Artificial Sequence
  Description of Artificial Sequence: Synthetic oligonucleotide
  Antisense strand to SEQ ID NO: 2061120
ucagaaacaauuugacuuc

SEQ ID NO: 2061122 - RNA, 19 nt, Artificial Sequence
  Description of Artificial Sequence: Synthetic oligonucleotide
  Sense strand starting at position 267 of SEQ ID NO: 1881652
ggcucuguuaauuagguua

SEQ ID NO: 2061123 - RNA, 19 nt, Artificial Sequence
  Description of Artificial Sequence: Synthetic oligonucleotide
  Antisense strand to SEQ ID NO: 2061122
uaaccuaauuaacagagcc

SEQ ID NO: 2061124 - RNA, 19 nt, Artificial Sequence
  Description of Artificial Sequence: Synthetic oligonucleotide
  Sense strand starting at position 624 of SEQ ID NO: 1881652
uuugaacuugaaugagcua

SEQ ID NO: 2061125 - RNA, 19 nt, Artificial Sequence
  Description of Artificial Sequence: Synthetic oligonucleotide
  Antisense strand to SEQ ID NO: 2061124
uagcucauucaaguucaaa

SEQ ID NO: 2061126 - RNA, 19 nt, Artificial Sequence
  Description of Artificial Sequence: Synthetic oligonucleotide
  Sense strand starting at position 757 of SEQ ID NO: 1881652
caguauaucaggugaaagg

SEQ ID NO: 2061127 - RNA, 19 nt, Artificial Sequence
  Description of Artificial Sequence: Synthetic oligonucleotide
  Antisense strand to SEQ ID NO: 2061126
ccuuucaccugauauacug

SEQ ID NO: 2061128 - RNA, 19 nt, Artificial Sequence
  Description of Artificial Sequence: Synthetic oligonucleotide
  Sense strand starting at position 758 of SEQ ID NO: 1881652
aguauaucaggugaaaggu

SEQ ID NO: 2061129 - RNA, 19 nt, Artificial Sequence
  Description of Artificial Sequence: Synthetic oligonucleotide
  Antisense strand to SEQ ID NO: 2061128
accuuucaccugauauacu

SEQ ID NO: 2061130 - RNA, 19 nt, Artificial Sequence
  Description of Artificial Sequence: Synthetic oligonucleotide
  Sense strand starting at position 810 of SEQ ID NO: 1881652
gucauuugguaucuuggua

SEQ ID NO: 2061131 - RNA, 19 nt, Artificial Sequence
  Description of Artificial Sequence: Synthetic oligonucleotide
  Antisense strand to SEQ ID NO: 2061130
uaccaagauaccaaaugac

SEQ ID NO: 2061132 - RNA, 19 nt, Artificial Sequence
  Description of Artificial Sequence: Synthetic oligonucleotide
  Sense strand starting at position 838 of SEQ ID NO: 1881652
ugguauauuucccagaauc

SEQ ID NO: 2061133 - RNA, 19 nt, Artificial Sequence
  Description of Artificial Sequence: Synthetic oligonucleotide
  Antisense strand to SEQ ID NO: 2061132
gauucugggaaauauacca

SEQ ID NO: 2061134 - RNA, 19 nt, Artificial Sequence
  Description of Artificial Sequence: Synthetic oligonucleotide
  Sense strand starting at position 883 of SEQ ID NO: 1881652
guaaacaaauccuuuggca

SEQ ID NO: 2061135 - RNA, 19 nt, Artificial Sequence
  Description of Artificial Sequence: Synthetic oligonucleotide
  Antisense strand to SEQ ID NO: 2061134
ugccaaaggauuuguuuac

SEQ ID NO: 2061136 - RNA, 19 nt, Artificial Sequence
  Description of Artificial Sequence: Synthetic oligonucleotide
  Sense strand starting at position 1304 of SEQ ID NO: 1881652
ugauuugcuagcuguguaa

SEQ ID NO: 2061137 - RNA, 19 nt, Artificial Sequence
  Description of Artificial Sequence: Synthetic oligonucleotide
  Antisense strand to SEQ ID NO: 2061136
uuacacagcuagcaaauca

SEQ ID NO: 2061138 - RNA, 19 nt, Artificial Sequence
  Description of Artificial Sequence: Synthetic oligonucleotide
  Sense strand starting at position 1316 of SEQ ID NO: 1881652
uguguaaucuuacucaaca

SEQ ID NO: 2061139 - RNA, 19 nt, Artificial Sequence
  Description of Artificial Sequence: Synthetic oligonucleotide
  Antisense strand to SEQ ID NO: 2061138
uguugaguaagauuacaca

SEQ ID NO: 2061140 - RNA, 19 nt, Artificial Sequence
  Description of Artificial Sequence: Synthetic oligonucleotide
  Sense strand starting at position 1317 of SEQ ID NO: 1881652
guguaaucuuacucaacau

SEQ ID NO: 2061141 - RNA, 19 nt, Artificial Sequence
  Description of Artificial Sequence: Synthetic oligonucleotide
  Antisense strand to SEQ ID NO: 2061140
auguugaguaagauuacac

SEQ ID NO: 2061142 - RNA, 19 nt, Artificial Sequence
  Description of Artificial Sequence: Synthetic oligonucleotide
  Sense strand starting at position 1350 of SEQ ID NO: 1881652
agccuugguucccugauuu

SEQ ID NO: 2061143 - RNA, 19 nt, Artificial Sequence
  Description of Artificial Sequence: Synthetic oligonucleotide
  Antisense strand to SEQ ID NO: 2061142
aaaucagggaaccaaggcu

SEQ ID NO: 2061144 - RNA, 19 nt, Artificial Sequence
  Description of Artificial Sequence: Synthetic oligonucleotide
  Sense strand starting at position 1354 of SEQ ID NO: 1881652
uugguucccugauuugcaa

SEQ ID NO: 2061145 - RNA, 19 nt, Artificial Sequence
  Description of Artificial Sequence: Synthetic oligonucleotide
  Antisense strand to SEQ ID NO: 2061144
uugcaaaucagggaaccaa

SEQ ID NO: 2061146 - RNA, 19 nt, Artificial Sequence
  Description of Artificial Sequence: Synthetic oligonucleotide
  Sense strand starting at position 1416 of SEQ ID NO: 1881652
gauuaaaugcguuaauaca

SEQ ID NO: 2061147 - RNA, 19 nt, Artificial Sequence
  Description of Artificial Sequence: Synthetic oligonucleotide
  Antisense strand to SEQ ID NO: 2061146
uguauuaacgcauuuaauc

SEQ ID NO: 2061148 - RNA, 19 nt, Artificial Sequence
  Description of Artificial Sequence: Synthetic oligonucleotide
  Sense strand starting at position 1452 of SEQ ID NO: 1881652
ccacgcuugguacauaaua

SEQ ID NO: 2061149 - RNA, 19 nt, Artificial Sequence
  Description of Artificial Sequence: Synthetic oligonucleotide
  Antisense strand to SEQ ID NO: 2061148
uauuauguaccaagcgugg

SEQ ID NO: 2061150 - RNA, 19 nt, Artificial Sequence
  Description of Artificial Sequence: Synthetic oligonucleotide
  Sense strand starting at position 1466 of SEQ ID NO: 1881652
uaauaugugcuauagaugu

SEQ ID NO: 2061151 - RNA, 19 nt, Artificial Sequence
  Description of Artificial Sequence: Synthetic oligonucleotide
  Antisense strand to SEQ ID NO: 2061150
acaucuauagcacauauua

SEQ ID NO: 2061152 - RNA, 19 nt, Artificial Sequence
  Description of Artificial Sequence: Synthetic oligonucleotide
  Sense strand starting at position 1719 of SEQ ID NO: 1881652
agaggguugggcgaaguua

SEQ ID NO: 2061153 - RNA, 19 nt, Artificial Sequence
  Description of Artificial Sequence: Synthetic oligonucleotide
  Antisense strand to SEQ ID NO: 2061152
uaacuucgcccaacccucu

SEQ ID NO: 2061154 - RNA, 19 nt, Artificial Sequence
  Description of Artificial Sequence: Synthetic oligonucleotide
  Sense strand starting at position 1755 of SEQ ID NO: 1881652
uaggguucgcauuacaaau

SEQ ID NO: 2061155 - RNA, 19 nt, Artificial Sequence
  Description of Artificial Sequence: Synthetic oligonucleotide
  Antisense strand to SEQ ID NO: 2061154
auuuguaaugcgaacccua

SEQ ID NO: 2061156 - RNA, 19 nt, Artificial Sequence
  Description of Artificial Sequence: Synthetic oligonucleotide
  Sense strand starting at position 2707 of SEQ ID NO: 1881652
gccagucaugguuucggca

SEQ ID NO: 2061157 - RNA, 19 nt, Artificial Sequence
  Description of Artificial Sequence: Synthetic oligonucleotide
  Antisense strand to SEQ ID NO: 2061156
ugccgaaaccaugacuggc

SEQ ID NO: 2061158 - RNA, 19 nt, Artificial Sequence
  Description of Artificial Sequence: Synthetic oligonucleotide
  Sense strand starting at position 2738 of SEQ ID NO: 1881652
cggucugaugagcaagacu

SEQ ID NO: 2061159 - RNA, 19 nt, Artificial Sequence
  Description of Artificial Sequence: Synthetic oligonucleotide
  Antisense strand to SEQ ID NO: 2061158
agucuugcucaucagaccg

SEQ ID NO: 2061160 - RNA, 19 nt, Artificial Sequence
  Description of Artificial Sequence: Synthetic oligonucleotide
  Sense strand starting at position 2749 of SEQ ID NO: 1881652
gcaagacuaaggcauuguu

SEQ ID NO: 2061161 - RNA, 19 nt, Artificial Sequence
  Description of Artificial Sequence: Synthetic oligonucleotide
  Antisense strand to SEQ ID NO: 2061160
aacaaugccuuagucuugc

SEQ ID NO: 2061162 - RNA, 19 nt, Artificial Sequence
  Description of Artificial Sequence: Synthetic oligonucleotide
  Sense strand starting at position 2752 of SEQ ID NO: 1881652
agacuaaggcauuguucuu

SEQ ID NO: 2061163 - RNA, 19 nt, Artificial Sequence
  Description of Artificial Sequence: Synthetic oligonucleotide
  Antisense strand to SEQ ID NO: 2061162
aagaacaaugccuuagucu

SEQ ID NO: 2061164 - RNA, 19 nt, Artificial Sequence
  Description of Artificial Sequence: Synthetic oligonucleotide
  Sense strand starting at position 2865 of SEQ ID NO: 1881652
gccuucuuucuugaagguu

SEQ ID NO: 2061165 - RNA, 19 nt, Artificial Sequence
  Description of Artificial Sequence: Synthetic oligonucleotide
  Antisense strand to SEQ ID NO: 2061164
aaccuucaagaaagaaggc

SEQ ID NO: 2061166 - RNA, 19 nt, Artificial Sequence
  Description of Artificial Sequence: Synthetic oligonucleotide
  Sense strand starting at position 2934 of SEQ ID NO: 1881652
gaaucaaguuauguguaau

SEQ ID NO: 2061167 - RNA, 19 nt, Artificial Sequence
  Description of Artificial Sequence: Synthetic oligonucleotide
  Antisense strand to SEQ ID NO: 2061166
auuacacauaacuugauuc

SEQ ID NO: 2061168 - RNA, 19 nt, Artificial Sequence
  Description of Artificial Sequence: Synthetic oligonucleotide
  Sense strand starting at position 2937 of SEQ ID NO: 1881652
ucaaguuauguguaauaug

SEQ ID NO: 2061169 - RNA, 19 nt, Artificial Sequence
  Description of Artificial Sequence: Synthetic oligonucleotide
  Antisense strand to SEQ ID NO: 2061168
cauauuacacauaacuuga

SEQ ID NO: 2061170 - RNA, 19 nt, Artificial Sequence
  Description of Artificial Sequence: Synthetic oligonucleotide
  Sense strand starting at position 3031 of SEQ ID NO: 1881652
agcagugauugccugauuu

SEQ ID NO: 2061171 - RNA, 19 nt, Artificial Sequence
  Description of Artificial Sequence: Synthetic oligonucleotide
  Antisense strand to SEQ ID NO: 2061170
aaaucaggcaaucacugcu

SEQ ID NO: 2061172 - RNA, 19 nt, Artificial Sequence
  Description of Artificial Sequence: Synthetic oligonucleotide
  Sense strand starting at position 3035 of SEQ ID NO: 1881652
gugauugccugauuuaggu

SEQ ID NO: 2061173 - RNA, 19 nt, Artificial Sequence
  Description of Artificial Sequence: Synthetic oligonucleotide
  Antisense strand to SEQ ID NO: 2061172
accuaaaucaggcaaucac

SEQ ID NO: 2061174 - RNA, 19 nt, Artificial Sequence
  Description of Artificial Sequence: Synthetic oligonucleotide
  Sense strand starting at position 3059 of SEQ ID NO: 1881652
aggccaugucaccauucua

SEQ ID NO: 2061175 - RNA, 19 nt, Artificial Sequence
  Description of Artificial Sequence: Synthetic oligonucleotide
  Antisense strand to SEQ ID NO: 2061174
uagaauggugacauggccu

SEQ ID NO: 2061176 - RNA, 19 nt, Artificial Sequence
  Description of Artificial Sequence: Synthetic oligonucleotide
  Sense strand starting at position 3113 of SEQ ID NO: 1881652
ccgagucauucaguggaga

SEQ ID NO: 2061177 - RNA, 19 nt, Artificial Sequence
  Description of Artificial Sequence: Synthetic oligonucleotide
  Antisense strand to SEQ ID NO: 2061176
ucuccacugaaugacucgg

SEQ ID NO: 2061178 - RNA, 19 nt, Artificial Sequence
  Description of Artificial Sequence: Synthetic oligonucleotide
  Sense strand starting at position 3114 of SEQ ID NO: 1881652
cgagucauucaguggagaa

SEQ ID NO: 2061179 - RNA, 19 nt, Artificial Sequence
  Description of Artificial Sequence: Synthetic oligonucleotide
  Antisense strand to SEQ ID NO: 2061178
uucuccacugaaugacucg

SEQ ID NO: 2061180 - RNA, 19 nt, Artificial Sequence
  Description of Artificial Sequence: Synthetic oligonucleotide
  Sense strand starting at position 3231 of SEQ ID NO: 1881652
aagguucccuguccagaaa

SEQ ID NO: 2061181 - RNA, 19 nt, Artificial Sequence
  Description of Artificial Sequence: Synthetic oligonucleotide
  Antisense strand to SEQ ID NO: 2061180
uuucuggacagggaaccuu

SEQ ID NO: 2061182 - RNA, 19 nt, Artificial Sequence
  Description of Artificial Sequence: Synthetic oligonucleotide
  Sense strand starting at position 3314 of SEQ ID NO: 1881652
caaguaaacuuagcuggau

SEQ ID NO: 2061183 - RNA, 19 nt, Artificial Sequence
  Description of Artificial Sequence: Synthetic oligonucleotide
  Antisense strand to SEQ ID NO: 2061182
auccagcuaaguuuacuug

SEQ ID NO: 2061184 - RNA, 19 nt, Artificial Sequence
  Description of Artificial Sequence: Synthetic oligonucleotide
  Sense strand starting at position 3315 of SEQ ID NO: 1881652
aaguaaacuuagcuggauu

SEQ ID NO: 2061185 - RNA, 19 nt, Artificial Sequence
  Description of Artificial Sequence: Synthetic oligonucleotide
  Antisense strand to SEQ ID NO: 2061184
aauccagcuaaguuuacuu

SEQ ID NO: 2061186 - RNA, 19 nt, Artificial Sequence
  Description of Artificial Sequence: Synthetic oligonucleotide
  Sense strand starting at position 3484 of SEQ ID NO: 1881652
gguccauuggauuggaguu

SEQ ID NO: 2061187 - RNA, 19 nt, Artificial Sequence
  Description of Artificial Sequence: Synthetic oligonucleotide
  Antisense strand to SEQ ID NO: 2061186
aacuccaauccaauggacc

SEQ ID NO: 2061188 - RNA, 19 nt, Artificial Sequence
  Description of Artificial Sequence: Synthetic oligonucleotide
  Sense strand starting at position 3836 of SEQ ID NO: 1881652
agcuuuguaucuuugagaa

SEQ ID NO: 2061189 - RNA, 19 nt, Artificial Sequence
  Description of Artificial Sequence: Synthetic oligonucleotide
  Antisense strand to SEQ ID NO: 2061188
uucucaaagauacaaagcu

SEQ ID NO: 2061190 - RNA, 19 nt, Artificial Sequence
  Description of Artificial Sequence: Synthetic oligonucleotide
  Sense strand starting at position 3848 of SEQ ID NO: 1881652
uugagaaaugcauguuuac

SEQ ID NO: 2061191 - RNA, 19 nt, Artificial Sequence
  Description of Artificial Sequence: Synthetic oligonucleotide
  Antisense strand to SEQ ID NO: 2061190
guaaacaugcauuucucaa

SEQ ID NO: 2061192 - RNA, 19 nt, Artificial Sequence
  Description of Artificial Sequence: Synthetic oligonucleotide
  Sense strand starting at position 3851 of SEQ ID NO: 1881652
agaaaugcauguuuacaac

SEQ ID NO: 2061193 - RNA, 19 nt, Artificial Sequence
  Description of Artificial Sequence: Synthetic oligonucleotide
  Antisense strand to SEQ ID NO: 2061192
guuguaaacaugcauuucu

SEQ ID NO: 2061194 - RNA, 19 nt, Artificial Sequence
  Description of Artificial Sequence: Synthetic oligonucleotide
  Sense strand starting at position 3937 of SEQ ID NO: 1881652
cuugaauauccugguacau

SEQ ID NO: 2061195 - RNA, 19 nt, Artificial Sequence
  Description of Artificial Sequence: Synthetic oligonucleotide
  Antisense strand to SEQ ID NO: 2061194
auguaccaggauauucaag

SEQ ID NO: 2061196 - RNA, 19 nt, Artificial Sequence
  Description of Artificial Sequence: Synthetic oligonucleotide
  Sense strand starting at position 3946 of SEQ ID NO: 1881652
ccugguacaucuuccuuua

SEQ ID NO: 2061197 - RNA, 19 nt, Artificial Sequence
  Description of Artificial Sequence: Synthetic oligonucleotide
  Antisense strand to SEQ ID NO: 2061196
uaaaggaagauguaccagg

SEQ ID NO: 2061198 - RNA, 19 nt, Artificial Sequence
  Description of Artificial Sequence: Synthetic oligonucleotide
  Sense strand starting at position 3948 of SEQ ID NO: 1881652
ugguacaucuuccuuuaua

SEQ ID NO: 2061199 - RNA, 19 nt, Artificial Sequence
  Description of Artificial Sequence: Synthetic oligonucleotide
  Antisense strand to SEQ ID NO: 2061198
uauaaaggaagauguacca

SEQ ID NO: 2061200 - RNA, 19 nt, Artificial Sequence
  Description of Artificial Sequence: Synthetic oligonucleotide
  Sense strand starting at position 187 of SEQ ID NO: 1881653
agauauugaucugaugaaa

SEQ ID NO: 2061201 - RNA, 19 nt, Artificial Sequence
  Description of Artificial Sequence: Synthetic oligonucleotide
  Antisense strand to SEQ ID NO: 2061200
uuucaucagaucaauaucu

SEQ ID NO: 2061202 - RNA, 19 nt, Artificial Sequence
  Description of Artificial Sequence: Synthetic oligonucleotide
  Sense strand starting at position 216 of SEQ ID NO: 1881653
gaaauaaacugggauauug

SEQ ID NO: 2061203 - RNA, 19 nt, Artificial Sequence
  Description of Artificial Sequence: Synthetic oligonucleotide
  Antisense strand to SEQ ID NO: 2061202
caauaucccaguuuauuuc

SEQ ID NO: 2061204 - RNA, 19 nt, Artificial Sequence
  Description of Artificial Sequence: Synthetic oligonucleotide
  Sense strand starting at position 227 of SEQ ID NO: 1881653
ggauauugaucugaugaaa

SEQ ID NO: 2061205 - RNA, 19 nt, Artificial Sequence
  Description of Artificial Sequence: Synthetic oligonucleotide
  Antisense strand to SEQ ID NO: 2061204
uuucaucagaucaauaucc

SEQ ID NO: 2061206 - RNA, 19 nt, Artificial Sequence
  Description of Artificial Sequence: Synthetic oligonucleotide
  Sense strand starting at position 250 of SEQ ID NO: 1881653
augggaaauaaauguguau

SEQ ID NO: 2061207 - RNA, 19 nt, Artificial Sequence
  Description of Artificial Sequence: Synthetic oligonucleotide
  Antisense strand to SEQ ID NO: 2061206
auacacauuuauuucccau

SEQ ID NO: 2061208 - RNA, 19 nt, Artificial Sequence
  Description of Artificial Sequence: Synthetic oligonucleotide
  Sense strand starting at position 356 of SEQ ID NO: 1881653
auaggcauauucuuuaaag

SEQ ID NO: 2061209 - RNA, 19 nt, Artificial Sequence
  Description of Artificial Sequence: Synthetic oligonucleotide
  Antisense strand to SEQ ID NO: 2061208
cuuuaaagaauaugccuau

SEQ ID NO: 2061210 - RNA, 19 nt, Artificial Sequence
  Description of Artificial Sequence: Synthetic oligonucleotide
  Sense strand starting at position 624 of SEQ ID NO: 1881653
auuguuauacacuguagua

SEQ ID NO: 2061211 - RNA, 19 nt, Artificial Sequence
  Description of Artificial Sequence: Synthetic oligonucleotide
  Antisense strand to SEQ ID NO: 2061210
uacuacaguguauaacaau

SEQ ID NO: 2061212 - RNA, 19 nt, Artificial Sequence
  Description of Artificial Sequence: Synthetic oligonucleotide
  Sense strand starting at position 669 of SEQ ID NO: 1881653
aguuuacacucacuuggaa

SEQ ID NO: 2061213 - RNA, 19 nt, Artificial Sequence
  Description of Artificial Sequence: Synthetic oligonucleotide
  Antisense strand to SEQ ID NO: 2061212
uuccaagugaguguaaacu

SEQ ID NO: 2061214 - RNA, 19 nt, Artificial Sequence
  Description of Artificial Sequence: Synthetic oligonucleotide
  Sense strand starting at position 703 of SEQ ID NO: 1881653
augccaagucucuguaaua

SEQ ID NO: 2061215 - RNA, 19 nt, Artificial Sequence
  Description of Artificial Sequence: Synthetic oligonucleotide
  Antisense strand to SEQ ID NO: 2061214
uauuacagagacuuggcau

SEQ ID NO: 2061216 - RNA, 19 nt, Artificial Sequence
  Description of Artificial Sequence: Synthetic oligonucleotide
  Sense strand starting at position 704 of SEQ ID NO: 1881653
ugccaagucucuguaauaa

SEQ ID NO: 2061217 - RNA, 19 nt, Artificial Sequence
  Description of Artificial Sequence: Synthetic oligonucleotide
  Antisense strand to SEQ ID NO: 2061216
uuauuacagagacuuggca

SEQ ID NO: 2061218 - RNA, 19 nt, Artificial Sequence
  Description of Artificial Sequence: Synthetic oligonucleotide
  Sense strand starting at position 807 of SEQ ID NO: 1881653
uuuccaugcuuugucauuu

SEQ ID NO: 2061219 - RNA, 19 nt, Artificial Sequence
  Description of Artificial Sequence: Synthetic oligonucleotide
  Antisense strand to SEQ ID NO: 2061218
aaaugacaaagcauggaaa

SEQ ID NO: 2061220 - RNA, 19 nt, Artificial Sequence
  Description of Artificial Sequence: Synthetic oligonucleotide
  Sense strand starting at position 817 of SEQ ID NO: 1881653
uugucauuuccaugcuuua

SEQ ID NO: 2061221 - RNA, 19 nt, Artificial Sequence
  Description of Artificial Sequence: Synthetic oligonucleotide
  Antisense strand to SEQ ID NO: 2061220
uaaagcauggaaaugacaa

SEQ ID NO: 2061222 - RNA, 19 nt, Artificial Sequence
  Description of Artificial Sequence: Synthetic oligonucleotide
  Sense strand starting at position 923 of SEQ ID NO: 1881653
ugauaaagccaauguaucu

SEQ ID NO: 2061223 - RNA, 19 nt, Artificial Sequence
  Description of Artificial Sequence: Synthetic oligonucleotide
  Antisense strand to SEQ ID NO: 2061222
agauacauuggcuuuauca

SEQ ID NO: 2061224 - RNA, 19 nt, Artificial Sequence
  Description of Artificial Sequence: Synthetic oligonucleotide
  Sense strand starting at position 963 of SEQ ID NO: 1881653
guuccucuggcauaguuau

SEQ ID NO: 2061225 - RNA, 19 nt, Artificial Sequence
  Description of Artificial Sequence: Synthetic oligonucleotide
  Antisense strand to SEQ ID NO: 2061224
auaacuaugccagaggaac

SEQ ID NO: 2061226 - RNA, 19 nt, Artificial Sequence
  Description of Artificial Sequence: Synthetic oligonucleotide
  Sense strand starting at position 1081 of SEQ ID NO: 1881653
gacuuaaagucagucagac

SEQ ID NO: 2061227 - RNA, 19 nt, Artificial Sequence
  Description of Artificial Sequence: Synthetic oligonucleotide
  Antisense strand to SEQ ID NO: 2061226
gucugacugacuuuaaguc

SEQ ID NO: 2061228 - RNA, 19 nt, Artificial Sequence
  Description of Artificial Sequence: Synthetic oligonucleotide
  Sense strand starting at position 1169 of SEQ ID NO: 1881653
gcaguauauaugggacauc

SEQ ID NO: 2061229 - RNA, 19 nt, Artificial Sequence
  Description of Artificial Sequence: Synthetic oligonucleotide
  Antisense strand to SEQ ID NO: 2061228
gaugucccauauauacugc

SEQ ID NO: 2061230 - RNA, 19 nt, Artificial Sequence
  Description of Artificial Sequence: Synthetic oligonucleotide
  Sense strand starting at position 1220 of SEQ ID NO: 1881653
aggugaguguaguccuaaa

SEQ ID NO: 2061231 - RNA, 19 nt, Artificial Sequence
  Description of Artificial Sequence: Synthetic oligonucleotide
  Antisense strand to SEQ ID NO: 2061230
uuuaggacuacacucaccu

SEQ ID NO: 2061232 - RNA, 19 nt, Artificial Sequence
  Description of Artificial Sequence: Synthetic oligonucleotide
  Sense strand starting at position 1250 of SEQ ID NO: 1881653
uuaaguaaaugccuacuga

SEQ ID NO: 2061233 - RNA, 19 nt, Artificial Sequence
  Description of Artificial Sequence: Synthetic oligonucleotide
  Antisense strand to SEQ ID NO: 2061232
ucaguaggcauuuacuuaa

SEQ ID NO: 2061234 - RNA, 19 nt, Artificial Sequence
  Description of Artificial Sequence: Synthetic oligonucleotide
  Sense strand starting at position 1340 of SEQ ID NO: 1881653
gguagucacaaauggaaau

SEQ ID NO: 2061235 - RNA, 19 nt, Artificial Sequence
  Description of Artificial Sequence: Synthetic oligonucleotide
  Antisense strand to SEQ ID NO: 2061234
auuuccauuugugacuacc

SEQ ID NO: 2061236 - RNA, 19 nt, Artificial Sequence
  Description of Artificial Sequence: Synthetic oligonucleotide
  Sense strand starting at position 1402 of SEQ ID NO: 1881653
gauaaugaaaugugggagu

SEQ ID NO: 2061237 - RNA, 19 nt, Artificial Sequence
  Description of Artificial Sequence: Synthetic oligonucleotide
  Antisense strand to SEQ ID NO: 2061236
acucccacauuucauuauc

SEQ ID NO: 2061238 - RNA, 19 nt, Artificial Sequence
  Description of Artificial Sequence: Synthetic oligonucleotide
  Sense strand starting at position 1466 of SEQ ID NO: 1881653
gccucaagucaagaaacuu

SEQ ID NO: 2061239 - RNA, 19 nt, Artificial Sequence
  Description of Artificial Sequence: Synthetic oligonucleotide
  Antisense strand to SEQ ID NO: 2061238
aaguuucuugacuugaggc

SEQ ID NO: 2061240 - RNA, 19 nt, Artificial Sequence
  Description of Artificial Sequence: Synthetic oligonucleotide
  Sense strand starting at position 1629 of SEQ ID NO: 1881653
ggugcugggagcuaaagaa

SEQ ID NO: 2061241 - RNA, 19 nt, Artificial Sequence
  Description of Artificial Sequence: Synthetic oligonucleotide
  Antisense strand to SEQ ID NO: 2061240
uucuuuagcucccagcacc

SEQ ID NO: 2061242 - RNA, 19 nt, Artificial Sequence
  Description of Artificial Sequence: Synthetic oligonucleotide
  Sense strand starting at position 1735 of SEQ ID NO: 1881653
uuuggagaaugagaaauua

SEQ ID NO: 2061243 - RNA, 19 nt, Artificial Sequence
  Description of Artificial Sequence: Synthetic oligonucleotide
  Antisense strand to SEQ ID NO: 2061242
uaauuucucauucuccaaa

SEQ ID NO: 2061244 - RNA, 19 nt, Artificial Sequence
  Description of Artificial Sequence: Synthetic oligonucleotide
  Sense strand starting at position 2291 of SEQ ID NO: 1881653
ugaaguacaucgguuucca

SEQ ID NO: 2061245 - RNA, 19 nt, Artificial Sequence
  Description of Artificial Sequence: Synthetic oligonucleotide
  Antisense strand to SEQ ID NO: 2061244
uggaaaccgauguacuuca

SEQ ID NO: 2061246 - RNA, 19 nt, Artificial Sequence
  Description of Artificial Sequence: Synthetic oligonucleotide
  Sense strand starting at position 2492 of SEQ ID NO: 1881653
cgcacauagcaauagauga

SEQ ID NO: 2061247 - RNA, 19 nt, Artificial Sequence
  Description of Artificial Sequence: Synthetic oligonucleotide
  Antisense strand to SEQ ID NO: 2061246
ucaucuauugcuaugugcg

SEQ ID NO: 2061248 - RNA, 19 nt, Artificial Sequence
  Description of Artificial Sequence: Synthetic oligonucleotide
  Sense strand starting at position 2500 of SEQ ID NO: 1881653
gcaauagaugaauguguaa

SEQ ID NO: 2061249 - RNA, 19 nt, Artificial Sequence
  Description of Artificial Sequence: Synthetic oligonucleotide
  Antisense strand to SEQ ID NO: 2061248
uuacacauucaucuauugc

SEQ ID NO: 2061250 - RNA, 19 nt, Artificial Sequence
  Description of Artificial Sequence: Synthetic oligonucleotide
  Sense strand starting at position 2809 of SEQ ID NO: 1881653
cugagcaagacugaguauu

SEQ ID NO: 2061251 - RNA, 19 nt, Artificial Sequence
  Description of Artificial Sequence: Synthetic oligonucleotide
  Antisense strand to SEQ ID NO: 2061250
aauacucagucuugcucag

SEQ ID NO: 2061252 - RNA, 19 nt, Artificial Sequence
  Description of Artificial Sequence: Synthetic oligonucleotide
  Sense strand starting at position 2931 of SEQ ID NO: 1881653
uaugcauaaugccugguaa

SEQ ID NO: 2061253 - RNA, 19 nt, Artificial Sequence
  Description of Artificial Sequence: Synthetic oligonucleotide
  Antisense strand to SEQ ID NO: 2061252
uuaccaggcauuaugcaua

SEQ ID NO: 2061254 - RNA, 19 nt, Artificial Sequence
  Description of Artificial Sequence: Synthetic oligonucleotide
  Sense strand starting at position 2932 of SEQ ID NO: 1881653
augcauaaugccugguaag

SEQ ID NO: 2061255 - RNA, 19 nt, Artificial Sequence
  Description of Artificial Sequence: Synthetic oligonucleotide
  Antisense strand to SEQ ID NO: 2061254
cuuaccaggcauuaugcau

SEQ ID NO: 2061256 - RNA, 19 nt, Artificial Sequence
  Description of Artificial Sequence: Synthetic oligonucleotide
  Sense strand starting at position 2938 of SEQ ID NO: 1881653
aaugccugguaagugaaua

SEQ ID NO: 2061257 - RNA, 19 nt, Artificial Sequence
  Description of Artificial Sequence: Synthetic oligonucleotide
  Antisense strand to SEQ ID NO: 2061256
uauucacuuaccaggcauu

SEQ ID NO: 2061258 - RNA, 19 nt, Artificial Sequence
  Description of Artificial Sequence: Synthetic oligonucleotide
  Sense strand starting at position 2946 of SEQ ID NO: 1881653
guaagugaauaggcauaca

SEQ ID NO: 2061259 - RNA, 19 nt, Artificial Sequence
  Description of Artificial Sequence: Synthetic oligonucleotide
  Antisense strand to SEQ ID NO: 2061258
uguaugccuauucacuuac

SEQ ID NO: 2061260 - RNA, 19 nt, Artificial Sequence
  Description of Artificial Sequence: Synthetic oligonucleotide
  Sense strand starting at position 3014 of SEQ ID NO: 1881653
cgcuaaauuucuucuugga

SEQ ID NO: 2061261 - RNA, 19 nt, Artificial Sequence
  Description of Artificial Sequence: Synthetic oligonucleotide
  Antisense strand to SEQ ID NO: 2061260
uccaagaagaaauuuagcg

SEQ ID NO: 2061262 - RNA, 19 nt, Artificial Sequence
  Description of Artificial Sequence: Synthetic oligonucleotide
  Sense strand starting at position 3106 of SEQ ID NO: 1881653
uuacuaauugugugaccaa

SEQ ID NO: 2061263 - RNA, 19 nt, Artificial Sequence
  Description of Artificial Sequence: Synthetic oligonucleotide
  Antisense strand to SEQ ID NO: 2061262
uuggucacacaauuaguaa

SEQ ID NO: 2061264 - RNA, 19 nt, Artificial Sequence
  Description of Artificial Sequence: Synthetic oligonucleotide
  Sense strand starting at position 3109 of SEQ ID NO: 1881653
cuaauugugugaccaaaug

SEQ ID NO: 2061265 - RNA, 19 nt, Artificial Sequence
  Description of Artificial Sequence: Synthetic oligonucleotide
  Antisense strand to SEQ ID NO: 2061264
cauuuggucacacaauuag

SEQ ID NO: 2061266 - RNA, 19 nt, Artificial Sequence
  Description of Artificial Sequence: Synthetic oligonucleotide
  Sense strand starting at position 3188 of SEQ ID NO: 1881653
auaggacuauucuaaagaa

SEQ ID NO: 2061267 - RNA, 19 nt, Artificial Sequence
  Description of Artificial Sequence: Synthetic oligonucleotide
  Antisense strand to SEQ ID NO: 2061266
uucuuuagaauaguccuau

SEQ ID NO: 2061268 - RNA, 19 nt, Artificial Sequence
  Description of Artificial Sequence: Synthetic oligonucleotide
  Sense strand starting at position 3450 of SEQ ID NO: 1881653
gaugguggaucgccuaaga

SEQ ID NO: 2061269 - RNA, 19 nt, Artificial Sequence
  Description of Artificial Sequence: Synthetic oligonucleotide
  Antisense strand to SEQ ID NO: 2061268
ucuuaggcgauccaccauc

SEQ ID NO: 2061270 - RNA, 19 nt, Artificial Sequence
  Description of Artificial Sequence: Synthetic oligonucleotide
  Sense strand starting at position 3515 of SEQ ID NO: 1881653
gccugagcucaauauccau

SEQ ID NO: 2061271 - RNA, 19 nt, Artificial Sequence
  Description of Artificial Sequence: Synthetic oligonucleotide
  Antisense strand to SEQ ID NO: 2061270
auggauauugagcucaggc

SEQ ID NO: 2061272 - RNA, 19 nt, Artificial Sequence
  Description of Artificial Sequence: Synthetic oligonucleotide
  Sense strand starting at position 3597 of SEQ ID NO: 1881653
uugauuaugcuagauucca

SEQ ID NO: 2061273 - RNA, 19 nt, Artificial Sequence
  Description of Artificial Sequence: Synthetic oligonucleotide
  Antisense strand to SEQ ID NO: 2061272
uggaaucuagcauaaucaa

SEQ ID NO: 2061274 - RNA, 19 nt, Artificial Sequence
  Description of Artificial Sequence: Synthetic oligonucleotide
  Sense strand starting at position 3617 of SEQ ID NO: 1881653
gaagaaauuuagcggaaca

SEQ ID NO: 2061275 - RNA, 19 nt, Artificial Sequence
  Description of Artificial Sequence: Synthetic oligonucleotide
  Antisense strand to SEQ ID NO: 2061274
uguuccgcuaaauuucuuc

SEQ ID NO: 2061276 - RNA, 19 nt, Artificial Sequence
  Description of Artificial Sequence: Synthetic oligonucleotide
  Sense strand starting at position 3710 of SEQ ID NO: 1881653
cauagaagugcuuauugcu

SEQ ID NO: 2061277 - RNA, 19 nt, Artificial Sequence
  Description of Artificial Sequence: Synthetic oligonucleotide
  Antisense strand to SEQ ID NO: 2061276
agcaauaagcacuucuaug

SEQ ID NO: 2061278 - RNA, 19 nt, Artificial Sequence
  Description of Artificial Sequence: Synthetic oligonucleotide
  Sense strand starting at position 3970 of SEQ ID NO: 1881653
ucaucuuacgaagguuaga

SEQ ID NO: 2061279 - RNA, 19 nt, Artificial Sequence
  Description of Artificial Sequence: Synthetic oligonucleotide
  Antisense strand to SEQ ID NO: 2061278
ucuaaccuucguaagauga

SEQ ID NO: 2061280 - RNA, 19 nt, Artificial Sequence
  Description of Artificial Sequence: Synthetic oligonucleotide
  Sense strand starting at position 43 of SEQ ID NO: 1881654
auucgaaugucaccagauu

SEQ ID NO: 2061281 - RNA, 19 nt, Artificial Sequence
  Description of Artificial Sequence: Synthetic oligonucleotide
  Antisense strand to SEQ ID NO: 2061280
aaucuggugacauucgaau

SEQ ID NO: 2061282 - RNA, 19 nt, Artificial Sequence
  Description of Artificial Sequence: Synthetic oligonucleotide
  Sense strand starting at position 44 of SEQ ID NO: 1881654
uucgaaugucaccagauua

SEQ ID NO: 2061283 - RNA, 19 nt, Artificial Sequence
  Description of Artificial Sequence: Synthetic oligonucleotide
  Antisense strand to SEQ ID NO: 2061282
uaaucuggugacauucgaa

SEQ ID NO: 2061284 - RNA, 19 nt, Artificial Sequence
  Description of Artificial Sequence: Synthetic oligonucleotide
  Sense strand starting at position 195 of SEQ ID NO: 1881654
ucucacaauugugugauaa

SEQ ID NO: 2061285 - RNA, 19 nt, Artificial Sequence
  Description of Artificial Sequence: Synthetic oligonucleotide
  Antisense strand to SEQ ID NO: 2061284
uuaucacacaauugugaga

SEQ ID NO: 2061286 - RNA, 19 nt, Artificial Sequence
  Description of Artificial Sequence: Synthetic oligonucleotide
  Sense strand starting at position 196 of SEQ ID NO: 1881654
cucacaauugugugauaau

SEQ ID NO: 2061287 - RNA, 19 nt, Artificial Sequence
  Description of Artificial Sequence: Synthetic oligonucleotide
  Antisense strand to SEQ ID NO: 2061286
auuaucacacaauugugag

SEQ ID NO: 2061288 - RNA, 19 nt, Artificial Sequence
  Description of Artificial Sequence: Synthetic oligonucleotide
  Sense strand starting at position 371 of SEQ ID NO: 1881654
auuccaccagucugugaaa

SEQ ID NO: 2061289 - RNA, 19 nt, Artificial Sequence
  Description of Artificial Sequence: Synthetic oligonucleotide
  Antisense strand to SEQ ID NO: 2061288
uuucacagacugguggaau

SEQ ID NO: 2061290 - RNA, 19 nt, Artificial Sequence
  Description of Artificial Sequence: Synthetic oligonucleotide
  Sense strand starting at position 528 of SEQ ID NO: 1881654
aaguguauacaaugaaaug

SEQ ID NO: 2061291 - RNA, 19 nt, Artificial Sequence
  Description of Artificial Sequence: Synthetic oligonucleotide
  Antisense strand to SEQ ID NO: 2061290
cauuucauuguauacacuu

SEQ ID NO: 2061292 - RNA, 19 nt, Artificial Sequence
  Description of Artificial Sequence: Synthetic oligonucleotide
  Sense strand starting at position 537 of SEQ ID NO: 1881654
caaugaaaugcaugauagu

SEQ ID NO: 2061293 - RNA, 19 nt, Artificial Sequence
  Description of Artificial Sequence: Synthetic oligonucleotide
  Antisense strand to SEQ ID NO: 2061292
acuaucaugcauuucauug

SEQ ID NO: 2061294 - RNA, 19 nt, Artificial Sequence
  Description of Artificial Sequence: Synthetic oligonucleotide
  Sense strand starting at position 1086 of SEQ ID NO: 1881654
uauaguuaaggguggaauu

SEQ ID NO: 2061295 - RNA, 19 nt, Artificial Sequence
  Description of Artificial Sequence: Synthetic oligonucleotide
  Antisense strand to SEQ ID NO: 2061294
aauuccacccuuaacuaua

SEQ ID NO: 2061296 - RNA, 19 nt, Artificial Sequence
  Description of Artificial Sequence: Synthetic oligonucleotide
  Sense strand starting at position 1134 of SEQ ID NO: 1881654
uucugugaauaagucacaa

SEQ ID NO: 2061297 - RNA, 19 nt, Artificial Sequence
  Description of Artificial Sequence: Synthetic oligonucleotide
  Antisense strand to SEQ ID NO: 2061296
uugugacuuauucacagaa

SEQ ID NO: 2061298 - RNA, 19 nt, Artificial Sequence
  Description of Artificial Sequence: Synthetic oligonucleotide
  Sense strand starting at position 1171 of SEQ ID NO: 1881654
agacaaguuauaggauagu

SEQ ID NO: 2061299 - RNA, 19 nt, Artificial Sequence
  Description of Artificial Sequence: Synthetic oligonucleotide
  Antisense strand to SEQ ID NO: 2061298
acuauccuauaacuugucu

SEQ ID NO: 2061300 - RNA, 19 nt, Artificial Sequence
  Description of Artificial Sequence: Synthetic oligonucleotide
  Sense strand starting at position 1392 of SEQ ID NO: 1881654
guuaaagacaaauguguga

SEQ ID NO: 2061301 - RNA, 19 nt, Artificial Sequence
  Description of Artificial Sequence: Synthetic oligonucleotide
  Antisense strand to SEQ ID NO: 2061300
ucacacauuugucuuuaac

SEQ ID NO: 2061302 - RNA, 19 nt, Artificial Sequence
  Description of Artificial Sequence: Synthetic oligonucleotide
  Sense strand starting at position 1399 of SEQ ID NO: 1881654
acaaaugugugauccacca

SEQ ID NO: 2061303 - RNA, 19 nt, Artificial Sequence
  Description of Artificial Sequence: Synthetic oligonucleotide
  Antisense strand to SEQ ID NO: 2061302
ugguggaucacacauuugu

SEQ ID NO: 2061304 - RNA, 19 nt, Artificial Sequence
  Description of Artificial Sequence: Synthetic oligonucleotide
  Sense strand starting at position 1472 of SEQ ID NO: 1881654
uugguaagguacucuuaau

SEQ ID NO: 2061305 - RNA, 19 nt, Artificial Sequence
  Description of Artificial Sequence: Synthetic oligonucleotide
  Antisense strand to SEQ ID NO: 2061304
auuaagaguaccuuaccaa

SEQ ID NO: 2061306 - RNA, 19 nt, Artificial Sequence
  Description of Artificial Sequence: Synthetic oligonucleotide
  Sense strand starting at position 1695 of SEQ ID NO: 1881654
ucuguacuucuggaaucaa

SEQ ID NO: 2061307 - RNA, 19 nt, Artificial Sequence
  Description of Artificial Sequence: Synthetic oligonucleotide
  Antisense strand to SEQ ID NO: 2061306
uugauuccagaaguacaga

SEQ ID NO: 2061308 - RNA, 19 nt, Artificial Sequence
  Description of Artificial Sequence: Synthetic oligonucleotide
  Sense strand starting at position 1831 of SEQ ID NO: 1881654
ucaugugauuaagugauaa

SEQ ID NO: 2061309 - RNA, 19 nt, Artificial Sequence
  Description of Artificial Sequence: Synthetic oligonucleotide
  Antisense strand to SEQ ID NO: 2061308
uuaucacuuaaucacauga

SEQ ID NO: 2061310 - RNA, 19 nt, Artificial Sequence
  Description of Artificial Sequence: Synthetic oligonucleotide
  Sense strand starting at position 1843 of SEQ ID NO: 1881654
gugauaaggauaugucuau

SEQ ID NO: 2061311 - RNA, 19 nt, Artificial Sequence
  Description of Artificial Sequence: Synthetic oligonucleotide
  Antisense strand to SEQ ID NO: 2061310
auagacauauccuuaucac

SEQ ID NO: 2061312 - RNA, 19 nt, Artificial Sequence
  Description of Artificial Sequence: Synthetic oligonucleotide
  Sense strand starting at position 1847 of SEQ ID NO: 1881654
uaaggauaugucuauggcu

SEQ ID NO: 2061313 - RNA, 19 nt, Artificial Sequence
  Description of Artificial Sequence: Synthetic oligonucleotide
  Antisense strand to SEQ ID NO: 2061312
agccauagacauauccuua

SEQ ID NO: 2061314 - RNA, 19 nt, Artificial Sequence
  Description of Artificial Sequence: Synthetic oligonucleotide
  Sense strand starting at position 1853 of SEQ ID NO: 1881654
uaugucuauggcuaugauu

SEQ ID NO: 2061315 - RNA, 19 nt, Artificial Sequence
  Description of Artificial Sequence: Synthetic oligonucleotide
  Antisense strand to SEQ ID NO: 2061314
aaucauagccauagacaua

SEQ ID NO: 2061316 - RNA, 19 nt, Artificial Sequence
  Description of Artificial Sequence: Synthetic oligonucleotide
  Sense strand starting at position 1862 of SEQ ID NO: 1881654
ggcuaugauuuggcucuau

SEQ ID NO: 2061317 - RNA, 19 nt, Artificial Sequence
  Description of Artificial Sequence: Synthetic oligonucleotide
  Antisense strand to SEQ ID NO: 2061316
auagagccaaaucauagcc

SEQ ID NO: 2061318 - RNA, 19 nt, Artificial Sequence
  Description of Artificial Sequence: Synthetic oligonucleotide
  Sense strand starting at position 2119 of SEQ ID NO: 1881654
augugagugcaguaauaaa

SEQ ID NO: 2061319 - RNA, 19 nt, Artificial Sequence
  Description of Artificial Sequence: Synthetic oligonucleotide
  Antisense strand to SEQ ID NO: 2061318
uuuauuacugcacucacau

SEQ ID NO: 2061320 - RNA, 19 nt, Artificial Sequence
  Description of Artificial Sequence: Synthetic oligonucleotide
  Sense strand starting at position 2155 of SEQ ID NO: 1881654
gaguaucuacuuugaggaa

SEQ ID NO: 2061321 - RNA, 19 nt, Artificial Sequence
  Description of Artificial Sequence: Synthetic oligonucleotide
  Antisense strand to SEQ ID NO: 2061320
uuccucaaaguagauacuc

SEQ ID NO: 2061322 - RNA, 19 nt, Artificial Sequence
  Description of Artificial Sequence: Synthetic oligonucleotide
  Sense strand starting at position 2167 of SEQ ID NO: 1881654
ugaggaagucuuuaagucu

SEQ ID NO: 2061323 - RNA, 19 nt, Artificial Sequence
  Description of Artificial Sequence: Synthetic oligonucleotide
  Antisense strand to SEQ ID NO: 2061322
agacuuaaagacuuccuca

SEQ ID NO: 2061324 - RNA, 19 nt, Artificial Sequence
  Description of Artificial Sequence: Synthetic oligonucleotide
  Sense strand starting at position 2170 of SEQ ID NO: 1881654
ggaagucuuuaagucucau

SEQ ID NO: 2061325 - RNA, 19 nt, Artificial Sequence
  Description of Artificial Sequence: Synthetic oligonucleotide
  Antisense strand to SEQ ID NO: 2061324
augagacuuaaagacuucc

SEQ ID NO: 2061326 - RNA, 19 nt, Artificial Sequence
  Description of Artificial Sequence: Synthetic oligonucleotide
  Sense strand starting at position 2349 of SEQ ID NO: 1881654
uuaucaauuugguaagaac

SEQ ID NO: 2061327 - RNA, 19 nt, Artificial Sequence
  Description of Artificial Sequence: Synthetic oligonucleotide
  Antisense strand to SEQ ID NO: 2061326
guucuuaccaaauugauaa

SEQ ID NO: 2061328 - RNA, 19 nt, Artificial Sequence
  Description of Artificial Sequence: Synthetic oligonucleotide
  Sense strand starting at position 2352 of SEQ ID NO: 1881654
ucaauuugguaagaacaaa

SEQ ID NO: 2061329 - RNA, 19 nt, Artificial Sequence
  Description of Artificial Sequence: Synthetic oligonucleotide
  Antisense strand to SEQ ID NO: 2061328
uuuguucuuaccaaauuga

SEQ ID NO: 2061330 - RNA, 19 nt, Artificial Sequence
  Description of Artificial Sequence: Synthetic oligonucleotide
  Sense strand starting at position 2402 of SEQ ID NO: 1881654
aaguauacuuuguuaggga

SEQ ID NO: 2061331 - RNA, 19 nt, Artificial Sequence
  Description of Artificial Sequence: Synthetic oligonucleotide
  Antisense strand to SEQ ID NO: 2061330
ucccuaacaaaguauacuu

SEQ ID NO: 2061332 - RNA, 19 nt, Artificial Sequence
  Description of Artificial Sequence: Synthetic oligonucleotide
  Sense strand starting at position 2705 of SEQ ID NO: 1881654
cucuuuaugccugaugauc

SEQ ID NO: 2061333 - RNA, 19 nt, Artificial Sequence
  Description of Artificial Sequence: Synthetic oligonucleotide
  Antisense strand to SEQ ID NO: 2061332
gaucaucaggcauaaagag

SEQ ID NO: 2061334 - RNA, 19 nt, Artificial Sequence
  Description of Artificial Sequence: Synthetic oligonucleotide
  Sense strand starting at position 2994 of SEQ ID NO: 1881654
agaaaugccuaauuaugua

SEQ ID NO: 2061335 - RNA, 19 nt, Artificial Sequence
  Description of Artificial Sequence: Synthetic oligonucleotide
  Antisense strand to SEQ ID NO: 2061334
uacauaauuaggcauuucu

SEQ ID NO: 2061336 - RNA, 19 nt, Artificial Sequence
  Description of Artificial Sequence: Synthetic oligonucleotide
  Sense strand starting at position 3075 of SEQ ID NO: 1881654
auaaccgagauauguaaga

SEQ ID NO: 2061337 - RNA, 19 nt, Artificial Sequence
  Description of Artificial Sequence: Synthetic oligonucleotide
  Antisense strand to SEQ ID NO: 2061336
ucuuacauaucucgguuau

SEQ ID NO: 2061338 - RNA, 19 nt, Artificial Sequence
  Description of Artificial Sequence: Synthetic oligonucleotide
  Sense strand starting at position 3209 of SEQ ID NO: 1881654
uuguaaguagcauggagaa

SEQ ID NO: 2061339 - RNA, 19 nt, Artificial Sequence
  Description of Artificial Sequence: Synthetic oligonucleotide
  Antisense strand to SEQ ID NO: 2061338
uucuccaugcuacuuacaa

SEQ ID NO: 2061340 - RNA, 19 nt, Artificial Sequence
  Description of Artificial Sequence: Synthetic oligonucleotide
  Sense strand starting at position 3278 of SEQ ID NO: 1881654
aaaugaguccaguguuuaa

SEQ ID NO: 2061341 - RNA, 19 nt, Artificial Sequence
  Description of Artificial Sequence: Synthetic oligonucleotide
  Antisense strand to SEQ ID NO: 2061340
uuaaacacuggacucauuu

SEQ ID NO: 2061342 - RNA, 19 nt, Artificial Sequence
  Description of Artificial Sequence: Synthetic oligonucleotide
  Sense strand starting at position 3527 of SEQ ID NO: 1881654
ucagaucugaacugugaug

SEQ ID NO: 2061343 - RNA, 19 nt, Artificial Sequence
  Description of Artificial Sequence: Synthetic oligonucleotide
  Antisense strand to SEQ ID NO: 2061342
caucacaguucagaucuga

SEQ ID NO: 2061344 - RNA, 19 nt, Artificial Sequence
  Description of Artificial Sequence: Synthetic oligonucleotide
  Sense strand starting at position 3551 of SEQ ID NO: 1881654
uuuggaugauguguaauag

SEQ ID NO: 2061345 - RNA, 19 nt, Artificial Sequence
  Description of Artificial Sequence: Synthetic oligonucleotide
  Antisense strand to SEQ ID NO: 2061344
cuauuacacaucauccaaa

SEQ ID NO: 2061346 - RNA, 19 nt, Artificial Sequence
  Description of Artificial Sequence: Synthetic oligonucleotide
  Sense strand starting at position 3612 of SEQ ID NO: 1881654
aaacaugguugugugaaau

SEQ ID NO: 2061347 - RNA, 19 nt, Artificial Sequence
  Description of Artificial Sequence: Synthetic oligonucleotide
  Antisense strand to SEQ ID NO: 2061346
auuucacacaaccauguuu

SEQ ID NO: 2061348 - RNA, 19 nt, Artificial Sequence
  Description of Artificial Sequence: Synthetic oligonucleotide
  Sense strand starting at position 3620 of SEQ ID NO: 1881654
uugugugaaauacagucau

SEQ ID NO: 2061349 - RNA, 19 nt, Artificial Sequence
  Description of Artificial Sequence: Synthetic oligonucleotide
  Antisense strand to SEQ ID NO: 2061348
augacuguauuucacacaa

SEQ ID NO: 2061350 - RNA, 19 nt, Artificial Sequence
  Description of Artificial Sequence: Synthetic oligonucleotide
  Sense strand starting at position 3675 of SEQ ID NO: 1881654
cugauaauuugggauacaa

SEQ ID NO: 2061351 - RNA, 19 nt, Artificial Sequence
  Description of Artificial Sequence: Synthetic oligonucleotide
  Antisense strand to SEQ ID NO: 2061350
uuguaucccaaauuaucag

SEQ ID NO: 2061352 - RNA, 19 nt, Artificial Sequence
  Description of Artificial Sequence: Synthetic oligonucleotide
  Sense strand starting at position 3697 of SEQ ID NO: 1881654
aagugaauuaguggugaca

SEQ ID NO: 2061353 - RNA, 19 nt, Artificial Sequence
  Description of Artificial Sequence: Synthetic oligonucleotide
  Antisense strand to SEQ ID NO: 2061352
ugucaccacuaauucacuu

SEQ ID NO: 2061354 - RNA, 19 nt, Artificial Sequence
  Description of Artificial Sequence: Synthetic oligonucleotide
  Sense strand starting at position 3700 of SEQ ID NO: 1881654
ugaauuaguggugacaucu

SEQ ID NO: 2061355 - RNA, 19 nt, Artificial Sequence
  Description of Artificial Sequence: Synthetic oligonucleotide
  Antisense strand to SEQ ID NO: 2061354
agaugucaccacuaauuca

SEQ ID NO: 2061356 - RNA, 19 nt, Artificial Sequence
  Description of Artificial Sequence: Synthetic oligonucleotide
  Sense strand starting at position 3838 of SEQ ID NO: 1881654
gccuaccauuugucaguuu

SEQ ID NO: 2061357 - RNA, 19 nt, Artificial Sequence
  Description of Artificial Sequence: Synthetic oligonucleotide
  Antisense strand to SEQ ID NO: 2061356
aaacugacaaaugguaggc

SEQ ID NO: 2061358 - RNA, 19 nt, Artificial Sequence
  Description of Artificial Sequence: Synthetic oligonucleotide
  Sense strand starting at position 3932 of SEQ ID NO: 1881654
aggaccagcuuauuguaua

SEQ ID NO: 2061359 - RNA, 19 nt, Artificial Sequence
  Description of Artificial Sequence: Synthetic oligonucleotide
  Antisense strand to SEQ ID NO: 2061358
uauacaauaagcugguccu

SEQ ID NO: 2061360 - RNA, 19 nt, Artificial Sequence
  Description of Artificial Sequence: Synthetic oligonucleotide
  Sense strand starting at position 441 of SEQ ID NO: 1881655
cuuauacuuuagguagauc

SEQ ID NO: 2061361 - RNA, 19 nt, Artificial Sequence
  Description of Artificial Sequence: Synthetic oligonucleotide
  Antisense strand to SEQ ID NO: 2061360
gaucuaccuaaaguauaag

SEQ ID NO: 2061362 - RNA, 19 nt, Artificial Sequence
  Description of Artificial Sequence: Synthetic oligonucleotide
  Sense strand starting at position 466 of SEQ ID NO: 1881655
ucaauuaagguuuggugaa

SEQ ID NO: 2061363 - RNA, 19 nt, Artificial Sequence
  Description of Artificial Sequence: Synthetic oligonucleotide
  Antisense strand to SEQ ID NO: 2061362
uucaccaaaccuuaauuga

SEQ ID NO: 2061364 - RNA, 19 nt, Artificial Sequence
  Description of Artificial Sequence: Synthetic oligonucleotide
  Sense strand starting at position 468 of SEQ ID NO: 1881655
aauuaagguuuggugaaau

SEQ ID NO: 2061365 - RNA, 19 nt, Artificial Sequence
  Description of Artificial Sequence: Synthetic oligonucleotide
  Antisense strand to SEQ ID NO: 2061364
auuucaccaaaccuuaauu

SEQ ID NO: 2061366 - RNA, 19 nt, Artificial Sequence
  Description of Artificial Sequence: Synthetic oligonucleotide
  Sense strand starting at position 489 of SEQ ID NO: 1881655
ucauguuuaccaggagcau

SEQ ID NO: 2061367 - RNA, 19 nt, Artificial Sequence
  Description of Artificial Sequence: Synthetic oligonucleotide
  Antisense strand to SEQ ID NO: 2061366
augcuccugguaaacauga

SEQ ID NO: 2061368 - RNA, 19 nt, Artificial Sequence
  Description of Artificial Sequence: Synthetic oligonucleotide
  Sense strand starting at position 490 of SEQ ID NO: 1881655
cauguuuaccaggagcauu

SEQ ID NO: 2061369 - RNA, 19 nt, Artificial Sequence
  Description of Artificial Sequence: Synthetic oligonucleotide
  Antisense strand to SEQ ID NO: 2061368
aaugcuccugguaaacaug

SEQ ID NO: 2061370 - RNA, 19 nt, Artificial Sequence
  Description of Artificial Sequence: Synthetic oligonucleotide
  Sense strand starting at position 556 of SEQ ID NO: 1881655
ugaauaaucagcugaguug

SEQ ID NO: 2061371 - RNA, 19 nt, Artificial Sequence
  Description of Artificial Sequence: Synthetic oligonucleotide
  Antisense strand to SEQ ID NO: 2061370
caacucagcugauuauuca

SEQ ID NO: 2061372 - RNA, 19 nt, Artificial Sequence
  Description of Artificial Sequence: Synthetic oligonucleotide
  Sense strand starting at position 766 of SEQ ID NO: 1881655
guuauaaaguagguguaua

SEQ ID NO: 2061373 - RNA, 19 nt, Artificial Sequence
  Description of Artificial Sequence: Synthetic oligonucleotide
  Antisense strand to SEQ ID NO: 2061372
uauacaccuacuuuauaac

SEQ ID NO: 2061374 - RNA, 19 nt, Artificial Sequence
  Description of Artificial Sequence: Synthetic oligonucleotide
  Sense strand starting at position 946 of SEQ ID NO: 1881655
ggauuauagucaccuuguu

SEQ ID NO: 2061375 - RNA, 19 nt, Artificial Sequence
  Description of Artificial Sequence: Synthetic oligonucleotide
  Antisense strand to SEQ ID NO: 2061374
aacaaggugacuauaaucc

SEQ ID NO: 2061376 - RNA, 19 nt, Artificial Sequence
  Description of Artificial Sequence: Synthetic oligonucleotide
  Sense strand starting at position 967 of SEQ ID NO: 1881655
gcuaucaaagaguagguau

SEQ ID NO: 2061377 - RNA, 19 nt, Artificial Sequence
  Description of Artificial Sequence: Synthetic oligonucleotide
  Antisense strand to SEQ ID NO: 2061376
auaccuacucuuugauagc

SEQ ID NO: 2061378 - RNA, 19 nt, Artificial Sequence
  Description of Artificial Sequence: Synthetic oligonucleotide
  Sense strand starting at position 969 of SEQ ID NO: 1881655
uaucaaagaguagguauua

SEQ ID NO: 2061379 - RNA, 19 nt, Artificial Sequence
  Description of Artificial Sequence: Synthetic oligonucleotide
  Antisense strand to SEQ ID NO: 2061378
uaauaccuacucuuugaua

SEQ ID NO: 2061380 - RNA, 19 nt, Artificial Sequence
  Description of Artificial Sequence: Synthetic oligonucleotide
  Sense strand starting at position 978 of SEQ ID NO: 1881655
guagguauuagucauccua

SEQ ID NO: 2061381 - RNA, 19 nt, Artificial Sequence
  Description of Artificial Sequence: Synthetic oligonucleotide
  Antisense strand to SEQ ID NO: 2061380
uaggaugacuaauaccuac

SEQ ID NO: 2061382 - RNA, 19 nt, Artificial Sequence
  Description of Artificial Sequence: Synthetic oligonucleotide
  Sense strand starting at position 1181 of SEQ ID NO: 1881655
ugaucuccaguuugaucua

SEQ ID NO: 2061383 - RNA, 19 nt, Artificial Sequence
  Description of Artificial Sequence: Synthetic oligonucleotide
  Antisense strand to SEQ ID NO: 2061382
uagaucaaacuggagauca

SEQ ID NO: 2061384 - RNA, 19 nt, Artificial Sequence
  Description of Artificial Sequence: Synthetic oligonucleotide
  Sense strand starting at position 1623 of SEQ ID NO: 1881655
agauuugcguuucucuaau

SEQ ID NO: 2061385 - RNA, 19 nt, Artificial Sequence
  Description of Artificial Sequence: Synthetic oligonucleotide
  Antisense strand to SEQ ID NO: 2061384
auuagagaaacgcaaaucu

SEQ ID NO: 2061386 - RNA, 19 nt, Artificial Sequence
  Description of Artificial Sequence: Synthetic oligonucleotide
  Sense strand starting at position 2220 of SEQ ID NO: 1881655
guugaauaccaguagugaa

SEQ ID NO: 2061387 - RNA, 19 nt, Artificial Sequence
  Description of Artificial Sequence: Synthetic oligonucleotide
  Antisense strand to SEQ ID NO: 2061386
uucacuacugguauucaac

SEQ ID NO: 2061388 - RNA, 19 nt, Artificial Sequence
  Description of Artificial Sequence: Synthetic oligonucleotide
  Sense strand starting at position 2439 of SEQ ID NO: 1881655
uugaaaugaucaucugguu

SEQ ID NO: 2061389 - RNA, 19 nt, Artificial Sequence
  Description of Artificial Sequence: Synthetic oligonucleotide
  Antisense strand to SEQ ID NO: 2061388
aaccagaugaucauuucaa

SEQ ID NO: 2061390 - RNA, 19 nt, Artificial Sequence
  Description of Artificial Sequence: Synthetic oligonucleotide
  Sense strand starting at position 2549 of SEQ ID NO: 1881655
ugugaugaaugaucuuguu

SEQ ID NO: 2061391 - RNA, 19 nt, Artificial Sequence
  Description of Artificial Sequence: Synthetic oligonucleotide
  Antisense strand to SEQ ID NO: 2061390
aacaagaucauucaucaca

SEQ ID NO: 2061392 - RNA, 19 nt, Artificial Sequence
  Description of Artificial Sequence: Synthetic oligonucleotide
  Sense strand starting at position 2803 of SEQ ID NO: 1881655
uggaaucauuuacaguauu

SEQ ID NO: 2061393 - RNA, 19 nt, Artificial Sequence
  Description of Artificial Sequence: Synthetic oligonucleotide
  Antisense strand to SEQ ID NO: 2061392
aauacuguaaaugauucca

SEQ ID NO: 2061394 - RNA, 19 nt, Artificial Sequence
  Description of Artificial Sequence: Synthetic oligonucleotide
  Sense strand starting at position 2945 of SEQ ID NO: 1881655
auuugaguuuauguagcua

SEQ ID NO: 2061395 - RNA, 19 nt, Artificial Sequence
  Description of Artificial Sequence: Synthetic oligonucleotide
  Antisense strand to SEQ ID NO: 2061394
uagcuacauaaacucaaau

SEQ ID NO: 2061396 - RNA, 19 nt, Artificial Sequence
  Description of Artificial Sequence: Synthetic oligonucleotide
  Sense strand starting at position 3001 of SEQ ID NO: 1881655
cuaauaagaguuuaggcau

SEQ ID NO: 2061397 - RNA, 19 nt, Artificial Sequence
  Description of Artificial Sequence: Synthetic oligonucleotide
  Antisense strand to SEQ ID NO: 2061396
augccuaaacucuuauuag

SEQ ID NO: 2061398 - RNA, 19 nt, Artificial Sequence
  Description of Artificial Sequence: Synthetic oligonucleotide
  Sense strand starting at position 3004 of SEQ ID NO: 1881655
auaagaguuuaggcaugaa

SEQ ID NO: 2061399 - RNA, 19 nt, Artificial Sequence
  Description of Artificial Sequence: Synthetic oligonucleotide
  Antisense strand to SEQ ID NO: 2061398
uucaugccuaaacucuuau

SEQ ID NO: 2061400 - RNA, 19 nt, Artificial Sequence
  Description of Artificial Sequence: Synthetic oligonucleotide
  Sense strand starting at position 3029 of SEQ ID NO: 1881655
uaagaaaggcguugguaga

SEQ ID NO: 2061401 - RNA, 19 nt, Artificial Sequence
  Description of Artificial Sequence: Synthetic oligonucleotide
  Antisense strand to SEQ ID NO: 2061400
ucuaccaacgccuuucuua

SEQ ID NO: 2061402 - RNA, 19 nt, Artificial Sequence
  Description of Artificial Sequence: Synthetic oligonucleotide
  Sense strand starting at position 3056 of SEQ ID NO: 1881655
gagagaauuugcugaaaua

SEQ ID NO: 2061403 - RNA, 19 nt, Artificial Sequence
  Description of Artificial Sequence: Synthetic oligonucleotide
  Antisense strand to SEQ ID NO: 2061402
uauuucagcaaauucucuc

SEQ ID NO: 2061404 - RNA, 19 nt, Artificial Sequence
  Description of Artificial Sequence: Synthetic oligonucleotide
  Sense strand starting at position 3074 of SEQ ID NO: 1881655
auuuaaugccaugguucuu

SEQ ID NO: 2061405 - RNA, 19 nt, Artificial Sequence
  Description of Artificial Sequence: Synthetic oligonucleotide
  Antisense strand to SEQ ID NO: 2061404
aagaaccauggcauuaaau

SEQ ID NO: 2061406 - RNA, 19 nt, Artificial Sequence
  Description of Artificial Sequence: Synthetic oligonucleotide
  Sense strand starting at position 3088 of SEQ ID NO: 1881655
uucuuuagggugcaucaga

SEQ ID NO: 2061407 - RNA, 19 nt, Artificial Sequence
  Description of Artificial Sequence: Synthetic oligonucleotide
  Antisense strand to SEQ ID NO: 2061406
ucugaugcacccuaaagaa

SEQ ID NO: 2061408 - RNA, 19 nt, Artificial Sequence
  Description of Artificial Sequence: Synthetic oligonucleotide
  Sense strand starting at position 3128 of SEQ ID NO: 1881655
aucagauugcuaggcucaa

SEQ ID NO: 2061409 - RNA, 19 nt, Artificial Sequence
  Description of Artificial Sequence: Synthetic oligonucleotide
  Antisense strand to SEQ ID NO: 2061408
uugagccuagcaaucugau

SEQ ID NO: 2061410 - RNA, 19 nt, Artificial Sequence
  Description of Artificial Sequence: Synthetic oligonucleotide
  Sense strand starting at position 3129 of SEQ ID NO: 1881655
ucagauugcuaggcucaaa

SEQ ID NO: 2061411 - RNA, 19 nt, Artificial Sequence
  Description of Artificial Sequence: Synthetic oligonucleotide
  Antisense strand to SEQ ID NO: 2061410
uuugagccuagcaaucuga

SEQ ID NO: 2061412 - RNA, 19 nt, Artificial Sequence
  Description of Artificial Sequence: Synthetic oligonucleotide
  Sense strand starting at position 3202 of SEQ ID NO: 1881655
ccagaaguuccugggcaug

SEQ ID NO: 2061413 - RNA, 19 nt, Artificial Sequence
  Description of Artificial Sequence: Synthetic oligonucleotide
  Antisense strand to SEQ ID NO: 2061412
caugcccaggaacuucugg

SEQ ID NO: 2061414 - RNA, 19 nt, Artificial Sequence
  Description of Artificial Sequence: Synthetic oligonucleotide
  Sense strand starting at position 3204 of SEQ ID NO: 1881655
agaaguuccugggcaugau

SEQ ID NO: 2061415 - RNA, 19 nt, Artificial Sequence
  Description of Artificial Sequence: Synthetic oligonucleotide
  Antisense strand to SEQ ID NO: 2061414
aucaugcccaggaacuucu

SEQ ID NO: 2061416 - RNA, 19 nt, Artificial Sequence
  Description of Artificial Sequence: Synthetic oligonucleotide
  Sense strand starting at position 3265 of SEQ ID NO: 1881655
agaggauucuaauugccaa

SEQ ID NO: 2061417 - RNA, 19 nt, Artificial Sequence
  Description of Artificial Sequence: Synthetic oligonucleotide
  Antisense strand to SEQ ID NO: 2061416
uuggcaauuagaauccucu

SEQ ID NO: 2061418 - RNA, 19 nt, Artificial Sequence
  Description of Artificial Sequence: Synthetic oligonucleotide
  Sense strand starting at position 3287 of SEQ ID NO: 1881655
uuucccaucgugcaaagaa

SEQ ID NO: 2061419 - RNA, 19 nt, Artificial Sequence
  Description of Artificial Sequence: Synthetic oligonucleotide
  Antisense strand to SEQ ID NO: 2061418
uucuuugcacgaugggaaa

SEQ ID NO: 2061420 - RNA, 19 nt, Artificial Sequence
  Description of Artificial Sequence: Synthetic oligonucleotide
  Sense strand starting at position 3323 of SEQ ID NO: 1881655
agacaagaagcuugaaguu

SEQ ID NO: 2061421 - RNA, 19 nt, Artificial Sequence
  Description of Artificial Sequence: Synthetic oligonucleotide
  Antisense strand to SEQ ID NO: 2061420
aacuucaagcuucuugucu

SEQ ID NO: 2061422 - RNA, 19 nt, Artificial Sequence
  Description of Artificial Sequence: Synthetic oligonucleotide
  Sense strand starting at position 3492 of SEQ ID NO: 1881655
agggaaagugugugagcua

SEQ ID NO: 2061423 - RNA, 19 nt, Artificial Sequence
  Description of Artificial Sequence: Synthetic oligonucleotide
  Antisense strand to SEQ ID NO: 2061422
uagcucacacacuuucccu

SEQ ID NO: 2061424 - RNA, 19 nt, Artificial Sequence
  Description of Artificial Sequence: Synthetic oligonucleotide
  Sense strand starting at position 3497 of SEQ ID NO: 1881655
aagugugugagcuaaguga

SEQ ID NO: 2061425 - RNA, 19 nt, Artificial Sequence
  Description of Artificial Sequence: Synthetic oligonucleotide
  Antisense strand to SEQ ID NO: 2061424
ucacuuagcucacacacuu

SEQ ID NO: 2061426 - RNA, 19 nt, Artificial Sequence
  Description of Artificial Sequence: Synthetic oligonucleotide
  Sense strand starting at position 3572 of SEQ ID NO: 1881655
ggagaaggucacuggagua

SEQ ID NO: 2061427 - RNA, 19 nt, Artificial Sequence
  Description of Artificial Sequence: Synthetic oligonucleotide
  Antisense strand to SEQ ID NO: 2061426
uacuccagugaccuucucc

SEQ ID NO: 2061428 - RNA, 19 nt, Artificial Sequence
  Description of Artificial Sequence: Synthetic oligonucleotide
  Sense strand starting at position 3602 of SEQ ID NO: 1881655
gcucaauuucgaggucucu

SEQ ID NO: 2061429 - RNA, 19 nt, Artificial Sequence
  Description of Artificial Sequence: Synthetic oligonucleotide
  Antisense strand to SEQ ID NO: 2061428
agagaccucgaaauugagc

SEQ ID NO: 2061430 - RNA, 19 nt, Artificial Sequence
  Description of Artificial Sequence: Synthetic oligonucleotide
  Sense strand starting at position 3608 of SEQ ID NO: 1881655
uuucgaggucucuagaggu

SEQ ID NO: 2061431 - RNA, 19 nt, Artificial Sequence
  Description of Artificial Sequence: Synthetic oligonucleotide
  Antisense strand to SEQ ID NO: 2061430
accucuagagaccucgaaa

SEQ ID NO: 2061432 - RNA, 19 nt, Artificial Sequence
  Description of Artificial Sequence: Synthetic oligonucleotide
  Sense strand starting at position 3725 of SEQ ID NO: 1881655
ucaggaguugcugggauga

SEQ ID NO: 2061433 - RNA, 19 nt, Artificial Sequence
  Description of Artificial Sequence: Synthetic oligonucleotide
  Antisense strand to SEQ ID NO: 2061432
ucaucccagcaacuccuga

SEQ ID NO: 2061434 - RNA, 19 nt, Artificial Sequence
  Description of Artificial Sequence: Synthetic oligonucleotide
  Sense strand starting at position 3742 of SEQ ID NO: 1881655
gagaguuuggcagaugcua

SEQ ID NO: 2061435 - RNA, 19 nt, Artificial Sequence
  Description of Artificial Sequence: Synthetic oligonucleotide
  Antisense strand to SEQ ID NO: 2061434
uagcaucugccaaacucuc

SEQ ID NO: 2061436 - RNA, 19 nt, Artificial Sequence
  Description of Artificial Sequence: Synthetic oligonucleotide
  Sense strand starting at position 3789 of SEQ ID NO: 1881655
agagacugaaucuguaagu

SEQ ID NO: 2061437 - RNA, 19 nt, Artificial Sequence
  Description of Artificial Sequence: Synthetic oligonucleotide
  Antisense strand to SEQ ID NO: 2061436
acuuacagauucagucucu

SEQ ID NO: 2061438 - RNA, 19 nt, Artificial Sequence
  Description of Artificial Sequence: Synthetic oligonucleotide
  Sense strand starting at position 3977 of SEQ ID NO: 1881655
cccagacacuguuuagcaa

SEQ ID NO: 2061439 - RNA, 19 nt, Artificial Sequence
  Description of Artificial Sequence: Synthetic oligonucleotide
  Antisense strand to SEQ ID NO: 2061438
uugcuaaacagugucuggg

SEQ ID NO: 2061440 - RNA, 19 nt, Artificial Sequence
  Description of Artificial Sequence: Synthetic oligonucleotide
  Sense strand starting at position 189 of SEQ ID NO: 1881656
ugugcaaagaauggugaau

SEQ ID NO: 2061441 - RNA, 19 nt, Artificial Sequence
  Description of Artificial Sequence: Synthetic oligonucleotide
  Antisense strand to SEQ ID NO: 2061440
auucaccauucuuugcaca

SEQ ID NO: 2061442 - RNA, 19 nt, Artificial Sequence
  Description of Artificial Sequence: Synthetic oligonucleotide
  Sense strand starting at position 715 of SEQ ID NO: 1881656
uagaguuugccagauaagc

SEQ ID NO: 2061443 - RNA, 19 nt, Artificial Sequence
  Description of Artificial Sequence: Synthetic oligonucleotide
  Antisense strand to SEQ ID NO: 2061442
gcuuaucuggcaaacucua

SEQ ID NO: 2061444 - RNA, 19 nt, Artificial Sequence
  Description of Artificial Sequence: Synthetic oligonucleotide
  Sense strand starting at position 735 of SEQ ID NO: 1881656
aucccugaaucagugaagu

SEQ ID NO: 2061445 - RNA, 19 nt, Artificial Sequence
  Description of Artificial Sequence: Synthetic oligonucleotide
  Antisense strand to SEQ ID NO: 2061444
acuucacugauucagggau

SEQ ID NO: 2061446 - RNA, 19 nt, Artificial Sequence
  Description of Artificial Sequence: Synthetic oligonucleotide
  Sense strand starting at position 737 of SEQ ID NO: 1881656
cccugaaucagugaagugu

SEQ ID NO: 2061447 - RNA, 19 nt, Artificial Sequence
  Description of Artificial Sequence: Synthetic oligonucleotide
  Antisense strand to SEQ ID NO: 2061446
acacuucacugauucaggg

SEQ ID NO: 2061448 - RNA, 19 nt, Artificial Sequence
  Description of Artificial Sequence: Synthetic oligonucleotide
  Sense strand starting at position 746 of SEQ ID NO: 1881656
agugaagugugauugaaca

SEQ ID NO: 2061449 - RNA, 19 nt, Artificial Sequence
  Description of Artificial Sequence: Synthetic oligonucleotide
  Antisense strand to SEQ ID NO: 2061448
uguucaaucacacuucacu

SEQ ID NO: 2061450 - RNA, 19 nt, Artificial Sequence
  Description of Artificial Sequence: Synthetic oligonucleotide
  Sense strand starting at position 845 of SEQ ID NO: 1881656
aauuguguuguggagaaau

SEQ ID NO: 2061451 - RNA, 19 nt, Artificial Sequence
  Description of Artificial Sequence: Synthetic oligonucleotide
  Antisense strand to SEQ ID NO: 2061450
auuucuccacaacacaauu

SEQ ID NO: 2061452 - RNA, 19 nt, Artificial Sequence
  Description of Artificial Sequence: Synthetic oligonucleotide
  Sense strand starting at position 847 of SEQ ID NO: 1881656
uuguguuguggagaaauau

SEQ ID NO: 2061453 - RNA, 19 nt, Artificial Sequence
  Description of Artificial Sequence: Synthetic oligonucleotide
  Antisense strand to SEQ ID NO: 2061452
auauuucuccacaacacaa

SEQ ID NO: 2061454 - RNA, 19 nt, Artificial Sequence
  Description of Artificial Sequence: Synthetic oligonucleotide
  Sense strand starting at position 856 of SEQ ID NO: 1881656
ggagaaauauuuggauucu

SEQ ID NO: 2061455 - RNA, 19 nt, Artificial Sequence
  Description of Artificial Sequence: Synthetic oligonucleotide
  Antisense strand to SEQ ID NO: 2061454
agaauccaaauauuucucc

SEQ ID NO: 2061456 - RNA, 19 nt, Artificial Sequence
  Description of Artificial Sequence: Synthetic oligonucleotide
  Sense strand starting at position 913 of SEQ ID NO: 1881656
augguaugaauugggaguu

SEQ ID NO: 2061457 - RNA, 19 nt, Artificial Sequence
  Description of Artificial Sequence: Synthetic oligonucleotide
  Antisense strand to SEQ ID NO: 2061456
aacucccaauucauaccau

SEQ ID NO: 2061458 - RNA, 19 nt, Artificial Sequence
  Description of Artificial Sequence: Synthetic oligonucleotide
  Sense strand starting at position 1023 of SEQ ID NO: 1881656
accugauauuggccaauaa

SEQ ID NO: 2061459 - RNA, 19 nt, Artificial Sequence
  Description of Artificial Sequence: Synthetic oligonucleotide
  Antisense strand to SEQ ID NO: 2061458
uuauuggccaauaucaggu

SEQ ID NO: 2061460 - RNA, 19 nt, Artificial Sequence
  Description of Artificial Sequence: Synthetic oligonucleotide
  Sense strand starting at position 1024 of SEQ ID NO: 1881656
ccugauauuggccaauaac

SEQ ID NO: 2061461 - RNA, 19 nt, Artificial Sequence
  Description of Artificial Sequence: Synthetic oligonucleotide
  Antisense strand to SEQ ID NO: 2061460
guuauuggccaauaucagg

SEQ ID NO: 2061462 - RNA, 19 nt, Artificial Sequence
  Description of Artificial Sequence: Synthetic oligonucleotide
  Sense strand starting at position 1055 of SEQ ID NO: 1881656
uuguuucuccaugaagacu

SEQ ID NO: 2061463 - RNA, 19 nt, Artificial Sequence
  Description of Artificial Sequence: Synthetic oligonucleotide
  Antisense strand to SEQ ID NO: 2061462
agucuucauggagaaacaa

SEQ ID NO: 2061464 - RNA, 19 nt, Artificial Sequence
  Description of Artificial Sequence: Synthetic oligonucleotide
  Sense strand starting at position 1173 of SEQ ID NO: 1881656
uuucuagaugauugauugu

SEQ ID NO: 2061465 - RNA, 19 nt, Artificial Sequence
  Description of Artificial Sequence: Synthetic oligonucleotide
  Antisense strand to SEQ ID NO: 2061464
acaaucaaucaucuagaaa

SEQ ID NO: 2061466 - RNA, 19 nt, Artificial Sequence
  Description of Artificial Sequence: Synthetic oligonucleotide
  Sense strand starting at position 1176 of SEQ ID NO: 1881656
cuagaugauugauugugaa

SEQ ID NO: 2061467 - RNA, 19 nt, Artificial Sequence
  Description of Artificial Sequence: Synthetic oligonucleotide
  Antisense strand to SEQ ID NO: 2061466
uucacaaucaaucaucuag

SEQ ID NO: 2061468 - RNA, 19 nt, Artificial Sequence
  Description of Artificial Sequence: Synthetic oligonucleotide
  Sense strand starting at position 1184 of SEQ ID NO: 1881656
uugauugugaaguggaaga

SEQ ID NO: 2061469 - RNA, 19 nt, Artificial Sequence
  Description of Artificial Sequence: Synthetic oligonucleotide
  Antisense strand to SEQ ID NO: 2061468
ucuuccacuucacaaucaa

SEQ ID NO: 2061470 - RNA, 19 nt, Artificial Sequence
  Description of Artificial Sequence: Synthetic oligonucleotide
  Sense strand starting at position 1318 of SEQ ID NO: 1881656
acugguucuccagaguuuc

SEQ ID NO: 2061471 - RNA, 19 nt, Artificial Sequence
  Description of Artificial Sequence: Synthetic oligonucleotide
  Antisense strand to SEQ ID NO: 2061470
gaaacucuggagaaccagu

SEQ ID NO: 2061472 - RNA, 19 nt, Artificial Sequence
  Description of Artificial Sequence: Synthetic oligonucleotide
  Sense strand starting at position 1335 of SEQ ID NO: 1881656
ucuagagugcauuauuauc

SEQ ID NO: 2061473 - RNA, 19 nt, Artificial Sequence
  Description of Artificial Sequence: Synthetic oligonucleotide
  Antisense strand to SEQ ID NO: 2061472
gauaauaaugcacucuaga

SEQ ID NO: 2061474 - RNA, 19 nt, Artificial Sequence
  Description of Artificial Sequence: Synthetic oligonucleotide
  Sense strand starting at position 1752 of SEQ ID NO: 1881656
uguccaaauguuuauaggu

SEQ ID NO: 2061475 - RNA, 19 nt, Artificial Sequence
  Description of Artificial Sequence: Synthetic oligonucleotide
  Antisense strand to SEQ ID NO: 2061474
accuauaaacauuuggaca

SEQ ID NO: 2061476 - RNA, 19 nt, Artificial Sequence
  Description of Artificial Sequence: Synthetic oligonucleotide
  Sense strand starting at position 2001 of SEQ ID NO: 1881656
cagagaaaguguuucucua

SEQ ID NO: 2061477 - RNA, 19 nt, Artificial Sequence
  Description of Artificial Sequence: Synthetic oligonucleotide
  Antisense strand to SEQ ID NO: 2061476
uagagaaacacuuucucug

SEQ ID NO: 2061478 - RNA, 19 nt, Artificial Sequence
  Description of Artificial Sequence: Synthetic oligonucleotide
  Sense strand starting at position 2003 of SEQ ID NO: 1881656
gagaaaguguuucucuaaa

SEQ ID NO: 2061479 - RNA, 19 nt, Artificial Sequence
  Description of Artificial Sequence: Synthetic oligonucleotide
  Antisense strand to SEQ ID NO: 2061478
uuuagagaaacacuuucuc

SEQ ID NO: 2061480 - RNA, 19 nt, Artificial Sequence
  Description of Artificial Sequence: Synthetic oligonucleotide
  Sense strand starting at position 2027 of SEQ ID NO: 1881656
aaugaaguuguguagauug

SEQ ID NO: 2061481 - RNA, 19 nt, Artificial Sequence
  Description of Artificial Sequence: Synthetic oligonucleotide
  Antisense strand to SEQ ID NO: 2061480
caaucuacacaacuucauu

SEQ ID NO: 2061482 - RNA, 19 nt, Artificial Sequence
  Description of Artificial Sequence: Synthetic oligonucleotide
  Sense strand starting at position 2117 of SEQ ID NO: 1881656
ugucaagugguagaguaua

SEQ ID NO: 2061483 - RNA, 19 nt, Artificial Sequence
  Description of Artificial Sequence: Synthetic oligonucleotide
  Antisense strand to SEQ ID NO: 2061482
uauacucuaccacuugaca

SEQ ID NO: 2061484 - RNA, 19 nt, Artificial Sequence
  Description of Artificial Sequence: Synthetic oligonucleotide
  Sense strand starting at position 2173 of SEQ ID NO: 1881656
agcuuuggccaauagaaau

SEQ ID NO: 2061485 - RNA, 19 nt, Artificial Sequence
  Description of Artificial Sequence: Synthetic oligonucleotide
  Antisense strand to SEQ ID NO: 2061484
auuucuauuggccaaagcu

SEQ ID NO: 2061486 - RNA, 19 nt, Artificial Sequence
  Description of Artificial Sequence: Synthetic oligonucleotide
  Sense strand starting at position 2289 of SEQ ID NO: 1881656
gcuagcccucuugaggaua

SEQ ID NO: 2061487 - RNA, 19 nt, Artificial Sequence
  Description of Artificial Sequence: Synthetic oligonucleotide
  Antisense strand to SEQ ID NO: 2061486
uauccucaagagggcuagc

SEQ ID NO: 2061488 - RNA, 19 nt, Artificial Sequence
  Description of Artificial Sequence: Synthetic oligonucleotide
  Sense strand starting at position 2351 of SEQ ID NO: 1881656
cugccagacaguugaagaa

SEQ ID NO: 2061489 - RNA, 19 nt, Artificial Sequence
  Description of Artificial Sequence: Synthetic oligonucleotide
  Antisense strand to SEQ ID NO: 2061488
uucuucaacugucuggcag

SEQ ID NO: 2061490 - RNA, 19 nt, Artificial Sequence
  Description of Artificial Sequence: Synthetic oligonucleotide
  Sense strand starting at position 2549 of SEQ ID NO: 1881656
auagcaacuguugauauaa

SEQ ID NO: 2061491 - RNA, 19 nt, Artificial Sequence
  Description of Artificial Sequence: Synthetic oligonucleotide
  Antisense strand to SEQ ID NO: 2061490
uuauaucaacaguugcuau

SEQ ID NO: 2061492 - RNA, 19 nt, Artificial Sequence
  Description of Artificial Sequence: Synthetic oligonucleotide
  Sense strand starting at position 2650 of SEQ ID NO: 1881656
ucccuaaguucuuuaagga

SEQ ID NO: 2061493 - RNA, 19 nt, Artificial Sequence
  Description of Artificial Sequence: Synthetic oligonucleotide
  Antisense strand to SEQ ID NO: 2061492
uccuuaaagaacuuaggga

SEQ ID NO: 2061494 - RNA, 19 nt, Artificial Sequence
  Description of Artificial Sequence: Synthetic oligonucleotide
  Sense strand starting at position 2724 of SEQ ID NO: 1881656
guagaauaaguguaaacuu

SEQ ID NO: 2061495 - RNA, 19 nt, Artificial Sequence
  Description of Artificial Sequence: Synthetic oligonucleotide
  Antisense strand to SEQ ID NO: 2061494
aaguuuacacuuauucuac

SEQ ID NO: 2061496 - RNA, 19 nt, Artificial Sequence
  Description of Artificial Sequence: Synthetic oligonucleotide
  Sense strand starting at position 2882 of SEQ ID NO: 1881656
caggauaguccugaguugu

SEQ ID NO: 2061497 - RNA, 19 nt, Artificial Sequence
  Description of Artificial Sequence: Synthetic oligonucleotide
  Antisense strand to SEQ ID NO: 2061496
acaacucaggacuauccug

SEQ ID NO: 2061498 - RNA, 19 nt, Artificial Sequence
  Description of Artificial Sequence: Synthetic oligonucleotide
  Sense strand starting at position 2892 of SEQ ID NO: 1881656
cugaguugucaucaucaau

SEQ ID NO: 2061499 - RNA, 19 nt, Artificial Sequence
  Description of Artificial Sequence: Synthetic oligonucleotide
  Antisense strand to SEQ ID NO: 2061498
auugaugaugacaacucag

SEQ ID NO: 2061500 - RNA, 19 nt, Artificial Sequence
  Description of Artificial Sequence: Synthetic oligonucleotide
  Sense strand starting at position 2895 of SEQ ID NO: 1881656
aguugucaucaucaaucua

SEQ ID NO: 2061501 - RNA, 19 nt, Artificial Sequence
  Description of Artificial Sequence: Synthetic oligonucleotide
  Antisense strand to SEQ ID NO: 2061500
uagauugaugaugacaacu

SEQ ID NO: 2061502 - RNA, 19 nt, Artificial Sequence
  Description of Artificial Sequence: Synthetic oligonucleotide
  Sense strand starting at position 3589 of SEQ ID NO: 1881656
ugaugauggugacuugaac

SEQ ID NO: 2061503 - RNA, 19 nt, Artificial Sequence
  Description of Artificial Sequence: Synthetic oligonucleotide
  Antisense strand to SEQ ID NO: 2061502
guucaagucaccaucauca

SEQ ID NO: 2061504 - RNA, 19 nt, Artificial Sequence
  Description of Artificial Sequence: Synthetic oligonucleotide
  Sense strand starting at position 3598 of SEQ ID NO: 1881656
ugacuugaacuagaguguu

SEQ ID NO: 2061505 - RNA, 19 nt, Artificial Sequence
  Description of Artificial Sequence: Synthetic oligonucleotide
  Antisense strand to SEQ ID NO: 2061504
aacacucuaguucaaguca

SEQ ID NO: 2061506 - RNA, 19 nt, Artificial Sequence
  Description of Artificial Sequence: Synthetic oligonucleotide
  Sense strand starting at position 3694 of SEQ ID NO: 1881656
acgaguaaccacuaauucu

SEQ ID NO: 2061507 - RNA, 19 nt, Artificial Sequence
  Description of Artificial Sequence: Synthetic oligonucleotide
  Antisense strand to SEQ ID NO: 2061506
agaauuagugguuacucgu

SEQ ID NO: 2061508 - RNA, 19 nt, Artificial Sequence
  Description of Artificial Sequence: Synthetic oligonucleotide
  Sense strand starting at position 3720 of SEQ ID NO: 1881656
acaauuaagugggugguaa

SEQ ID NO: 2061509 - RNA, 19 nt, Artificial Sequence
  Description of Artificial Sequence: Synthetic oligonucleotide
  Antisense strand to SEQ ID NO: 2061508
uuaccacccacuuaauugu

SEQ ID NO: 2061510 - RNA, 19 nt, Artificial Sequence
  Description of Artificial Sequence: Synthetic oligonucleotide
  Sense strand starting at position 3721 of SEQ ID NO: 1881656
caauuaagugggugguaaa

SEQ ID NO: 2061511 - RNA, 19 nt, Artificial Sequence
  Description of Artificial Sequence: Synthetic oligonucleotide
  Antisense strand to SEQ ID NO: 2061510
uuuaccacccacuuaauug

SEQ ID NO: 2061512 - RNA, 19 nt, Artificial Sequence
  Description of Artificial Sequence: Synthetic oligonucleotide
  Sense strand starting at position 3837 of SEQ ID NO: 1881656
acaugucaaguauauaguu

SEQ ID NO: 2061513 - RNA, 19 nt, Artificial Sequence
  Description of Artificial Sequence: Synthetic oligonucleotide
  Antisense strand to SEQ ID NO: 2061512
aacuauauacuugacaugu

SEQ ID NO: 2061514 - RNA, 19 nt, Artificial Sequence
  Description of Artificial Sequence: Synthetic oligonucleotide
  Sense strand starting at position 3893 of SEQ ID NO: 1881656
ugggaauauuaaguguagu

SEQ ID NO: 2061515 - RNA, 19 nt, Artificial Sequence
  Description of Artificial Sequence: Synthetic oligonucleotide
  Antisense strand to SEQ ID NO: 2061514
acuacacuuaauauuccca

SEQ ID NO: 2061516 - RNA, 19 nt, Artificial Sequence
  Description of Artificial Sequence: Synthetic oligonucleotide
  Sense strand starting at position 3894 of SEQ ID NO: 1881656
gggaauauuaaguguagug

SEQ ID NO: 2061517 - RNA, 19 nt, Artificial Sequence
  Description of Artificial Sequence: Synthetic oligonucleotide
  Antisense strand to SEQ ID NO: 2061516
cacuacacuuaauauuccc

SEQ ID NO: 2061518 - RNA, 19 nt, Artificial Sequence
  Description of Artificial Sequence: Synthetic oligonucleotide
  Sense strand starting at position 3964 of SEQ ID NO: 1881656
caguuagagcuuuauagga

SEQ ID NO: 2061519 - RNA, 19 nt, Artificial Sequence
  Description of Artificial Sequence: Synthetic oligonucleotide
  Antisense strand to SEQ ID NO: 2061518
uccuauaaagcucuaacug

SEQ ID NO: 2061520 - RNA, 19 nt, Artificial Sequence
  Description of Artificial Sequence: Synthetic oligonucleotide
  Sense strand starting at position 672 of SEQ ID NO: 1881657
guuuguaguaaauacagua

SEQ ID NO: 2061521 - RNA, 19 nt, Artificial Sequence
  Description of Artificial Sequence: Synthetic oligonucleotide
  Antisense strand to SEQ ID NO: 2061520
uacuguauuuacuacaaac

SEQ ID NO: 2061522 - RNA, 19 nt, Artificial Sequence
  Description of Artificial Sequence: Synthetic oligonucleotide
  Sense strand starting at position 792 of SEQ ID NO: 1881657
ugaacuaagccuugagaua

SEQ ID NO: 2061523 - RNA, 19 nt, Artificial Sequence
  Description of Artificial Sequence: Synthetic oligonucleotide
  Antisense strand to SEQ ID NO: 2061522
uaucucaaggcuuaguuca

SEQ ID NO: 2061524 - RNA, 19 nt, Artificial Sequence
  Description of Artificial Sequence: Synthetic oligonucleotide
  Sense strand starting at position 830 of SEQ ID NO: 1881657
caguaauggcgagagagua

SEQ ID NO: 2061525 - RNA, 19 nt, Artificial Sequence
  Description of Artificial Sequence: Synthetic oligonucleotide
  Antisense strand to SEQ ID NO: 2061524
uacucucucgccauuacug

SEQ ID NO: 2061526 - RNA, 19 nt, Artificial Sequence
  Description of Artificial Sequence: Synthetic oligonucleotide
  Sense strand starting at position 854 of SEQ ID NO: 1881657
aagacauuaugguuagugu

SEQ ID NO: 2061527 - RNA, 19 nt, Artificial Sequence
  Description of Artificial Sequence: Synthetic oligonucleotide
  Antisense strand to SEQ ID NO: 2061526
acacuaaccauaaugucuu

SEQ ID NO: 2061528 - RNA, 19 nt, Artificial Sequence
  Description of Artificial Sequence: Synthetic oligonucleotide
  Sense strand starting at position 855 of SEQ ID NO: 1881657
agacauuaugguuaguguu

SEQ ID NO: 2061529 - RNA, 19 nt, Artificial Sequence
  Description of Artificial Sequence: Synthetic oligonucleotide
  Antisense strand to SEQ ID NO: 2061528
aacacuaaccauaaugucu

SEQ ID NO: 2061530 - RNA, 19 nt, Artificial Sequence
  Description of Artificial Sequence: Synthetic oligonucleotide
  Sense strand starting at position 857 of SEQ ID NO: 1881657
acauuaugguuaguguuau

SEQ ID NO: 2061531 - RNA, 19 nt, Artificial Sequence
  Description of Artificial Sequence: Synthetic oligonucleotide
  Antisense strand to SEQ ID NO: 2061530
auaacacuaaccauaaugu

SEQ ID NO: 2061532 - RNA, 19 nt, Artificial Sequence
  Description of Artificial Sequence: Synthetic oligonucleotide
  Sense strand starting at position 865 of SEQ ID NO: 1881657
guuaguguuauguaacaau

SEQ ID NO: 2061533 - RNA, 19 nt, Artificial Sequence
  Description of Artificial Sequence: Synthetic oligonucleotide
  Antisense strand to SEQ ID NO: 2061532
auuguuacauaacacuaac

SEQ ID NO: 2061534 - RNA, 19 nt, Artificial Sequence
  Description of Artificial Sequence: Synthetic oligonucleotide
  Sense strand starting at position 943 of SEQ ID NO: 1881657
ugguauucuggaugaggau

SEQ ID NO: 2061535 - RNA, 19 nt, Artificial Sequence
  Description of Artificial Sequence: Synthetic oligonucleotide
  Antisense strand to SEQ ID NO: 2061534
auccucauccagaauacca

SEQ ID NO: 2061536 - RNA, 19 nt, Artificial Sequence
  Description of Artificial Sequence: Synthetic oligonucleotide
  Sense strand starting at position 1111 of SEQ ID NO: 1881657
aucuucuccugaguguaga

SEQ ID NO: 2061537 - RNA, 19 nt, Artificial Sequence
  Description of Artificial Sequence: Synthetic oligonucleotide
  Antisense strand to SEQ ID NO: 2061536
ucuacacucaggagaagau

SEQ ID NO: 2061538 - RNA, 19 nt, Artificial Sequence
  Description of Artificial Sequence: Synthetic oligonucleotide
  Sense strand starting at position 1578 of SEQ ID NO: 1881657
gguaauugaggccauaucu

SEQ ID NO: 2061539 - RNA, 19 nt, Artificial Sequence
  Description of Artificial Sequence: Synthetic oligonucleotide
  Antisense strand to SEQ ID NO: 2061538
agauauggccucaauuacc

SEQ ID NO: 2061540 - RNA, 19 nt, Artificial Sequence
  Description of Artificial Sequence: Synthetic oligonucleotide
  Sense strand starting at position 1604 of SEQ ID NO: 1881657
cuuuacuucuagguugagu

SEQ ID NO: 2061541 - RNA, 19 nt, Artificial Sequence
  Description of Artificial Sequence: Synthetic oligonucleotide
  Antisense strand to SEQ ID NO: 2061540
acucaaccuagaaguaaag

SEQ ID NO: 2061542 - RNA, 19 nt, Artificial Sequence
  Description of Artificial Sequence: Synthetic oligonucleotide
  Sense strand starting at position 1609 of SEQ ID NO: 1881657
cuucuagguugagucugaa

SEQ ID NO: 2061543 - RNA, 19 nt, Artificial Sequence
  Description of Artificial Sequence: Synthetic oligonucleotide
  Antisense strand to SEQ ID NO: 2061542
uucagacucaaccuagaag

SEQ ID NO: 2061544 - RNA, 19 nt, Artificial Sequence
  Description of Artificial Sequence: Synthetic oligonucleotide
  Sense strand starting at position 1612 of SEQ ID NO: 1881657
cuagguugagucugaaguu

SEQ ID NO: 2061545 - RNA, 19 nt, Artificial Sequence
  Description of Artificial Sequence: Synthetic oligonucleotide
  Antisense strand to SEQ ID NO: 2061544
aacuucagacucaaccuag

SEQ ID NO: 2061546 - RNA, 19 nt, Artificial Sequence
  Description of Artificial Sequence: Synthetic oligonucleotide
  Sense strand starting at position 1625 of SEQ ID NO: 1881657
gaaguuaucuuucugggaa

SEQ ID NO: 2061547 - RNA, 19 nt, Artificial Sequence
  Description of Artificial Sequence: Synthetic oligonucleotide
  Antisense strand to SEQ ID NO: 2061546
uucccagaaagauaacuuc

SEQ ID NO: 2061548 - RNA, 19 nt, Artificial Sequence
  Description of Artificial Sequence: Synthetic oligonucleotide
  Sense strand starting at position 1628 of SEQ ID NO: 1881657
guuaucuuucugggaagug

SEQ ID NO: 2061549 - RNA, 19 nt, Artificial Sequence
  Description of Artificial Sequence: Synthetic oligonucleotide
  Antisense strand to SEQ ID NO: 2061548
cacuucccagaaagauaac

SEQ ID NO: 2061550 - RNA, 19 nt, Artificial Sequence
  Description of Artificial Sequence: Synthetic oligonucleotide
  Sense strand starting at position 1863 of SEQ ID NO: 1881657
agggacgaacuuuguuaga

SEQ ID NO: 2061551 - RNA, 19 nt, Artificial Sequence
  Description of Artificial Sequence: Synthetic oligonucleotide
  Antisense strand to SEQ ID NO: 2061550
ucuaacaaaguucgucccu

SEQ ID NO: 2061552 - RNA, 19 nt, Artificial Sequence
  Description of Artificial Sequence: Synthetic oligonucleotide
  Sense strand starting at position 1865 of SEQ ID NO: 1881657
ggacgaacuuuguuagaag

SEQ ID NO: 2061553 - RNA, 19 nt, Artificial Sequence
  Description of Artificial Sequence: Synthetic oligonucleotide
  Antisense strand to SEQ ID NO: 2061552
cuucuaacaaaguucgucc

SEQ ID NO: 2061554 - RNA, 19 nt, Artificial Sequence
  Description of Artificial Sequence: Synthetic oligonucleotide
  Sense strand starting at position 1989 of SEQ ID NO: 1881657
cggagccaucuacaucaga

SEQ ID NO: 2061555 - RNA, 19 nt, Artificial Sequence
  Description of Artificial Sequence: Synthetic oligonucleotide
  Antisense strand to SEQ ID NO: 2061554
ucugauguagauggcuccg

SEQ ID NO: 2061556 - RNA, 19 nt, Artificial Sequence
  Description of Artificial Sequence: Synthetic oligonucleotide
  Sense strand starting at position 2014 of SEQ ID NO: 1881657
gaugaagaucaacgaaguu

SEQ ID NO: 2061557 - RNA, 19 nt, Artificial Sequence
  Description of Artificial Sequence: Synthetic oligonucleotide
  Antisense strand to SEQ ID NO: 2061556
aacuucguugaucuucauc

SEQ ID NO: 2061558 - RNA, 19 nt, Artificial Sequence
  Description of Artificial Sequence: Synthetic oligonucleotide
  Sense strand starting at position 2073 of SEQ ID NO: 1881657
ggcauagcaggguaaucaa

SEQ ID NO: 2061559 - RNA, 19 nt, Artificial Sequence
  Description of Artificial Sequence: Synthetic oligonucleotide
  Antisense strand to SEQ ID NO: 2061558
uugauuacccugcuaugcc

SEQ ID NO: 2061560 - RNA, 19 nt, Artificial Sequence
  Description of Artificial Sequence: Synthetic oligonucleotide
  Sense strand starting at position 2346 of SEQ ID NO: 1881657
gugauauggaagugaguug

SEQ ID NO: 2061561 - RNA, 19 nt, Artificial Sequence
  Description of Artificial Sequence: Synthetic oligonucleotide
  Antisense strand to SEQ ID NO: 2061560
caacucacuuccauaucac

SEQ ID NO: 2061562 - RNA, 19 nt, Artificial Sequence
  Description of Artificial Sequence: Synthetic oligonucleotide
  Sense strand starting at position 2537 of SEQ ID NO: 1881657
gcggaacuaccagauccau

SEQ ID NO: 2061563 - RNA, 19 nt, Artificial Sequence
  Description of Artificial Sequence: Synthetic oligonucleotide
  Antisense strand to SEQ ID NO: 2061562
auggaucugguaguuccgc

SEQ ID NO: 2061564 - RNA, 19 nt, Artificial Sequence
  Description of Artificial Sequence: Synthetic oligonucleotide
  Sense strand starting at position 2637 of SEQ ID NO: 1881657
gugggugugguugaaggaa

SEQ ID NO: 2061565 - RNA, 19 nt, Artificial Sequence
  Description of Artificial Sequence: Synthetic oligonucleotide
  Antisense strand to SEQ ID NO: 2061564
uuccuucaaccacacccac

SEQ ID NO: 2061566 - RNA, 19 nt, Artificial Sequence
  Description of Artificial Sequence: Synthetic oligonucleotide
  Sense strand starting at position 2697 of SEQ ID NO: 1881657
cuguaaggucuaggcugaa

SEQ ID NO: 2061567 - RNA, 19 nt, Artificial Sequence
  Description of Artificial Sequence: Synthetic oligonucleotide
  Antisense strand to SEQ ID NO: 2061566
uucagccuagaccuuacag

SEQ ID NO: 2061568 - RNA, 19 nt, Artificial Sequence
  Description of Artificial Sequence: Synthetic oligonucleotide
  Sense strand starting at position 2777 of SEQ ID NO: 1881657
gcaggagaguugaagaguu

SEQ ID NO: 2061569 - RNA, 19 nt, Artificial Sequence
  Description of Artificial Sequence: Synthetic oligonucleotide
  Antisense strand to SEQ ID NO: 2061568
aacucuucaacucuccugc

SEQ ID NO: 2061570 - RNA, 19 nt, Artificial Sequence
  Description of Artificial Sequence: Synthetic oligonucleotide
  Sense strand starting at position 2787 of SEQ ID NO: 1881657
ugaagaguugcaggaugua

SEQ ID NO: 2061571 - RNA, 19 nt, Artificial Sequence
  Description of Artificial Sequence: Synthetic oligonucleotide
  Antisense strand to SEQ ID NO: 2061570
uacauccugcaacucuuca

SEQ ID NO: 2061572 - RNA, 19 nt, Artificial Sequence
  Description of Artificial Sequence: Synthetic oligonucleotide
  Sense strand starting at position 2856 of SEQ ID NO: 1881657
ugaagaucaaguggcauua

SEQ ID NO: 2061573 - RNA, 19 nt, Artificial Sequence
  Description of Artificial Sequence: Synthetic oligonucleotide
  Antisense strand to SEQ ID NO: 2061572
uaaugccacuugaucuuca

SEQ ID NO: 2061574 - RNA, 19 nt, Artificial Sequence
  Description of Artificial Sequence: Synthetic oligonucleotide
  Sense strand starting at position 3528 of SEQ ID NO: 1881657
uguagcaugagugaggaaa

SEQ ID NO: 2061575 - RNA, 19 nt, Artificial Sequence
  Description of Artificial Sequence: Synthetic oligonucleotide
  Antisense strand to SEQ ID NO: 2061574
uuuccucacucaugcuaca

SEQ ID NO: 2061576 - RNA, 19 nt, Artificial Sequence
  Description of Artificial Sequence: Synthetic oligonucleotide
  Sense strand starting at position 3568 of SEQ ID NO: 1881657
ugccaagauuuaggaauua

SEQ ID NO: 2061577 - RNA, 19 nt, Artificial Sequence
  Description of Artificial Sequence: Synthetic oligonucleotide
  Antisense strand to SEQ ID NO: 2061576
uaauuccuaaaucuuggca

SEQ ID NO: 2061578 - RNA, 19 nt, Artificial Sequence
  Description of Artificial Sequence: Synthetic oligonucleotide
  Sense strand starting at position 3616 of SEQ ID NO: 1881657
cugaccaaucaugguguaa

SEQ ID NO: 2061579 - RNA, 19 nt, Artificial Sequence
  Description of Artificial Sequence: Synthetic oligonucleotide
  Antisense strand to SEQ ID NO: 2061578
uuacaccaugauuggucag

SEQ ID NO: 2061580 - RNA, 19 nt, Artificial Sequence
  Description of Artificial Sequence: Synthetic oligonucleotide
  Sense strand starting at position 3628 of SEQ ID NO: 1881657
gguguaauuucugugugua

SEQ ID NO: 2061581 - RNA, 19 nt, Artificial Sequence
  Description of Artificial Sequence: Synthetic oligonucleotide
  Antisense strand to SEQ ID NO: 2061580
uacacacagaaauuacacc

SEQ ID NO: 2061582 - RNA, 19 nt, Artificial Sequence
  Description of Artificial Sequence: Synthetic oligonucleotide
  Sense strand starting at position 3629 of SEQ ID NO: 1881657
guguaauuucuguguguau

SEQ ID NO: 2061583 - RNA, 19 nt, Artificial Sequence
  Description of Artificial Sequence: Synthetic oligonucleotide
  Antisense strand to SEQ ID NO: 2061582
auacacacagaaauuacac

SEQ ID NO: 2061584 - RNA, 19 nt, Artificial Sequence
  Description of Artificial Sequence: Synthetic oligonucleotide
  Sense strand starting at position 3630 of SEQ ID NO: 1881657
uguaauuucuguguguaug

SEQ ID NO: 2061585 - RNA, 19 nt, Artificial Sequence
  Description of Artificial Sequence: Synthetic oligonucleotide
  Antisense strand to SEQ ID NO: 2061584
cauacacacagaaauuaca

SEQ ID NO: 2061586 - RNA, 19 nt, Artificial Sequence
  Description of Artificial Sequence: Synthetic oligonucleotide
  Sense strand starting at position 3740 of SEQ ID NO: 1881657
acuuuauguugguucucaa

SEQ ID NO: 2061587 - RNA, 19 nt, Artificial Sequence
  Description of Artificial Sequence: Synthetic oligonucleotide
  Antisense strand to SEQ ID NO: 2061586
uugagaaccaacauaaagu

SEQ ID NO: 2061588 - RNA, 19 nt, Artificial Sequence
  Description of Artificial Sequence: Synthetic oligonucleotide
  Sense strand starting at position 3804 of SEQ ID NO: 1881657
gaaucuguagcuuagagac

SEQ ID NO: 2061589 - RNA, 19 nt, Artificial Sequence
  Description of Artificial Sequence: Synthetic oligonucleotide
  Antisense strand to SEQ ID NO: 2061588
gucucuaagcuacagauuc

SEQ ID NO: 2061590 - RNA, 19 nt, Artificial Sequence
  Description of Artificial Sequence: Synthetic oligonucleotide
  Sense strand starting at position 3837 of SEQ ID NO: 1881657
gucuguaaagacuagguua

SEQ ID NO: 2061591 - RNA, 19 nt, Artificial Sequence
  Description of Artificial Sequence: Synthetic oligonucleotide
  Antisense strand to SEQ ID NO: 2061590
uaaccuagucuuuacagac

SEQ ID NO: 2061592 - RNA, 19 nt, Artificial Sequence
  Description of Artificial Sequence: Synthetic oligonucleotide
  Sense strand starting at position 3839 of SEQ ID NO: 1881657
cuguaaagacuagguuauu

SEQ ID NO: 2061593 - RNA, 19 nt, Artificial Sequence
  Description of Artificial Sequence: Synthetic oligonucleotide
  Antisense strand to SEQ ID NO: 2061592
aauaaccuagucuuuacag

SEQ ID NO: 2061594 - RNA, 19 nt, Artificial Sequence
  Description of Artificial Sequence: Synthetic oligonucleotide
  Sense strand starting at position 3851 of SEQ ID NO: 1881657
gguuauuuaucagcuccua

SEQ ID NO: 2061595 - RNA, 19 nt, Artificial Sequence
  Description of Artificial Sequence: Synthetic oligonucleotide
  Antisense strand to SEQ ID NO: 2061594
uaggagcugauaaauaacc

SEQ ID NO: 2061596 - RNA, 19 nt, Artificial Sequence
  Description of Artificial Sequence: Synthetic oligonucleotide
  Sense strand starting at position 3877 of SEQ ID NO: 1881657
uugauagaagcuuagccaa

SEQ ID NO: 2061597 - RNA, 19 nt, Artificial Sequence
  Description of Artificial Sequence: Synthetic oligonucleotide
  Antisense strand to SEQ ID NO: 2061596
uuggcuaagcuucuaucaa

SEQ ID NO: 2061598 - RNA, 19 nt, Artificial Sequence
  Description of Artificial Sequence: Synthetic oligonucleotide
  Sense strand starting at position 3879 of SEQ ID NO: 1881657
gauagaagcuuagccaaga

SEQ ID NO: 2061599 - RNA, 19 nt, Artificial Sequence
  Description of Artificial Sequence: Synthetic oligonucleotide
  Antisense strand to SEQ ID NO: 2061598
ucuuggcuaagcuucuauc

SEQ ID NO: 2061600 - RNA, 19 nt, Artificial Sequence
  Description of Artificial Sequence: Synthetic oligonucleotide
  Sense strand starting at position 45 of SEQ ID NO: 1881658
gcuauacuucugcagaaug

SEQ ID NO: 2061601 - RNA, 19 nt, Artificial Sequence
  Description of Artificial Sequence: Synthetic oligonucleotide
  Antisense strand to SEQ ID NO: 2061600
cauucugcagaaguauagc

SEQ ID NO: 2061602 - RNA, 19 nt, Artificial Sequence
  Description of Artificial Sequence: Synthetic oligonucleotide
  Sense strand starting at position 47 of SEQ ID NO: 1881658
uauacuucugcagaauggu

SEQ ID NO: 2061603 - RNA, 19 nt, Artificial Sequence
  Description of Artificial Sequence: Synthetic oligonucleotide
  Antisense strand to SEQ ID NO: 2061602
accauucugcagaaguaua

SEQ ID NO: 2061604 - RNA, 19 nt, Artificial Sequence
  Description of Artificial Sequence: Synthetic oligonucleotide
  Sense strand starting at position 50 of SEQ ID NO: 1881658
acuucugcagaaugguuaa

SEQ ID NO: 2061605 - RNA, 19 nt, Artificial Sequence
  Description of Artificial Sequence: Synthetic oligonucleotide
  Antisense strand to SEQ ID NO: 2061604
uuaaccauucugcagaagu

SEQ ID NO: 2061606 - RNA, 19 nt, Artificial Sequence
  Description of Artificial Sequence: Synthetic oligonucleotide
  Sense strand starting at position 176 of SEQ ID NO: 1881658
guaaacgacuucucccaca

SEQ ID NO: 2061607 - RNA, 19 nt, Artificial Sequence
  Description of Artificial Sequence: Synthetic oligonucleotide
  Antisense strand to SEQ ID NO: 2061606
ugugggagaagucguuuac

SEQ ID NO: 2061608 - RNA, 19 nt, Artificial Sequence
  Description of Artificial Sequence: Synthetic oligonucleotide
  Sense strand starting at position 181 of SEQ ID NO: 1881658
cgacuucucccacaaucag

SEQ ID NO: 2061609 - RNA, 19 nt, Artificial Sequence
  Description of Artificial Sequence: Synthetic oligonucleotide
  Antisense strand to SEQ ID NO: 2061608
cugauugugggagaagucg

SEQ ID NO: 2061610 - RNA, 19 nt, Artificial Sequence
  Description of Artificial Sequence: Synthetic oligonucleotide
  Sense strand starting at position 247 of SEQ ID NO: 1881658
gcaucaugacugcaacuuu

SEQ ID NO: 2061611 - RNA, 19 nt, Artificial Sequence
  Description of Artificial Sequence: Synthetic oligonucleotide
  Antisense strand to SEQ ID NO: 2061610
aaaguugcagucaugaugc

SEQ ID NO: 2061612 - RNA, 19 nt, Artificial Sequence
  Description of Artificial Sequence: Synthetic oligonucleotide
  Sense strand starting at position 264 of SEQ ID NO: 1881658
uuugauccucaagaagcau

SEQ ID NO: 2061613 - RNA, 19 nt, Artificial Sequence
  Description of Artificial Sequence: Synthetic oligonucleotide
  Antisense strand to SEQ ID NO: 2061612
augcuucuugaggaucaaa

SEQ ID NO: 2061614 - RNA, 19 nt, Artificial Sequence
  Description of Artificial Sequence: Synthetic oligonucleotide
  Sense strand starting at position 318 of SEQ ID NO: 1881658
ggccguggucuaucggagu

SEQ ID NO: 2061615 - RNA, 19 nt, Artificial Sequence
  Description of Artificial Sequence: Synthetic oligonucleotide
  Antisense strand to SEQ ID NO: 2061614
acuccgauagaccacggcc

SEQ ID NO: 2061616 - RNA, 19 nt, Artificial Sequence
  Description of Artificial Sequence: Synthetic oligonucleotide
  Sense strand starting at position 322 of SEQ ID NO: 1881658
guggucuaucggaguuugu

SEQ ID NO: 2061617 - RNA, 19 nt, Artificial Sequence
  Description of Artificial Sequence: Synthetic oligonucleotide
  Antisense strand to SEQ ID NO: 2061616
acaaacuccgauagaccac

SEQ ID NO: 2061618 - RNA, 19 nt, Artificial Sequence
  Description of Artificial Sequence: Synthetic oligonucleotide
  Sense strand starting at position 344 of SEQ ID NO: 1881658
auauuucuuugagaccaag

SEQ ID NO: 2061619 - RNA, 19 nt, Artificial Sequence
  Description of Artificial Sequence: Synthetic oligonucleotide
  Antisense strand to SEQ ID NO: 2061618
cuuggucucaaagaaauau

SEQ ID NO: 2061620 - RNA, 19 nt, Artificial Sequence
  Description of Artificial Sequence: Synthetic oligonucleotide
  Sense strand starting at position 381 of SEQ ID NO: 1881658
ugcaaugacuacuuggaaa

SEQ ID NO: 2061621 - RNA, 19 nt, Artificial Sequence
  Description of Artificial Sequence: Synthetic oligonucleotide
  Antisense strand to SEQ ID NO: 2061620
uuuccaaguagucauugca

SEQ ID NO: 2061622 - RNA, 19 nt, Artificial Sequence
  Description of Artificial Sequence: Synthetic oligonucleotide
  Sense strand starting at position 484 of SEQ ID NO: 1881658
gcuaguuaccaggauauua

SEQ ID NO: 2061623 - RNA, 19 nt, Artificial Sequence
  Description of Artificial Sequence: Synthetic oligonucleotide
  Antisense strand to SEQ ID NO: 2061622
uaauauccugguaacuagc

SEQ ID NO: 2061624 - RNA, 19 nt, Artificial Sequence
  Description of Artificial Sequence: Synthetic oligonucleotide
  Sense strand starting at position 572 of SEQ ID NO: 1881658
ucacauuuacguggucaua

SEQ ID NO: 2061625 - RNA, 19 nt, Artificial Sequence
  Description of Artificial Sequence: Synthetic oligonucleotide
  Antisense strand to SEQ ID NO: 2061624
uaugaccacguaaauguga

SEQ ID NO: 2061626 - RNA, 19 nt, Artificial Sequence
  Description of Artificial Sequence: Synthetic oligonucleotide
  Sense strand starting at position 617 of SEQ ID NO: 1881658
ugcuuaucagcagagacua

SEQ ID NO: 2061627 - RNA, 19 nt, Artificial Sequence
  Description of Artificial Sequence: Synthetic oligonucleotide
  Antisense strand to SEQ ID NO: 2061626
uagucucugcugauaagca

SEQ ID NO: 2061628 - RNA, 19 nt, Artificial Sequence
  Description of Artificial Sequence: Synthetic oligonucleotide
  Sense strand starting at position 772 of SEQ ID NO: 1881658
gcaguuagguaucuauaaa

SEQ ID NO: 2061629 - RNA, 19 nt, Artificial Sequence
  Description of Artificial Sequence: Synthetic oligonucleotide
  Antisense strand to SEQ ID NO: 2061628
uuuauagauaccuaacugc

SEQ ID NO: 2061630 - RNA, 19 nt, Artificial Sequence
  Description of Artificial Sequence: Synthetic oligonucleotide
  Sense strand starting at position 836 of SEQ ID NO: 1881658
agaugaauuaugggcggaa

SEQ ID NO: 2061631 - RNA, 19 nt, Artificial Sequence
  Description of Artificial Sequence: Synthetic oligonucleotide
  Antisense strand to SEQ ID NO: 2061630
uuccgcccauaauucaucu

SEQ ID NO: 2061632 - RNA, 19 nt, Artificial Sequence
  Description of Artificial Sequence: Synthetic oligonucleotide
  Sense strand starting at position 837 of SEQ ID NO: 1881658
gaugaauuaugggcggaac

SEQ ID NO: 2061633 - RNA, 19 nt, Artificial Sequence
  Description of Artificial Sequence: Synthetic oligonucleotide
  Antisense strand to SEQ ID NO: 2061632
guuccgcccauaauucauc

SEQ ID NO: 2061634 - RNA, 19 nt, Artificial Sequence
  Description of Artificial Sequence: Synthetic oligonucleotide
  Sense strand starting at position 838 of SEQ ID NO: 1881658
augaauuaugggcggaaca

SEQ ID NO: 2061635 - RNA, 19 nt, Artificial Sequence
  Description of Artificial Sequence: Synthetic oligonucleotide
  Antisense strand to SEQ ID NO: 2061634
uguuccgcccauaauucau

SEQ ID NO: 2061636 - RNA, 19 nt, Artificial Sequence
  Description of Artificial Sequence: Synthetic oligonucleotide
  Sense strand starting at position 839 of SEQ ID NO: 1881658
ugaauuaugggcggaacau

SEQ ID NO: 2061637 - RNA, 19 nt, Artificial Sequence
  Description of Artificial Sequence: Synthetic oligonucleotide
  Antisense strand to SEQ ID NO: 2061636
auguuccgcccauaauuca

SEQ ID NO: 2061638 - RNA, 19 nt, Artificial Sequence
  Description of Artificial Sequence: Synthetic oligonucleotide
  Sense strand starting at position 1033 of SEQ ID NO: 1881658
agacaugcuuaucugacaa

SEQ ID NO: 2061639 - RNA, 19 nt, Artificial Sequence
  Description of Artificial Sequence: Synthetic oligonucleotide
  Antisense strand to SEQ ID NO: 2061638
uugucagauaagcaugucu

SEQ ID NO: 2061640 - RNA, 19 nt, Artificial Sequence
  Description of Artificial Sequence: Synthetic oligonucleotide
  Sense strand starting at position 1223 of SEQ ID NO: 1881658
ggauucuacguccacaaau

SEQ ID NO: 2061641 - RNA, 19 nt, Artificial Sequence
  Description of Artificial Sequence: Synthetic oligonucleotide
  Antisense strand to SEQ ID NO: 2061640
auuuguggacguagaaucc

SEQ ID NO: 2061642 - RNA, 19 nt, Artificial Sequence
  Description of Artificial Sequence: Synthetic oligonucleotide
  Sense strand starting at position 1225 of SEQ ID NO: 1881658
auucuacguccacaaaugu

SEQ ID NO: 2061643 - RNA, 19 nt, Artificial Sequence
  Description of Artificial Sequence: Synthetic oligonucleotide
  Antisense strand to SEQ ID NO: 2061642
acauuuguggacguagaau

SEQ ID NO: 2061644 - RNA, 19 nt, Artificial Sequence
  Description of Artificial Sequence: Synthetic oligonucleotide
  Sense strand starting at position 1236 of SEQ ID NO: 1881658
acaaauguggauugcaauu

SEQ ID NO: 2061645 - RNA, 19 nt, Artificial Sequence
  Description of Artificial Sequence: Synthetic oligonucleotide
  Antisense strand to SEQ ID NO: 2061644
aauugcaauccacauuugu

SEQ ID NO: 2061646 - RNA, 19 nt, Artificial Sequence
  Description of Artificial Sequence: Synthetic oligonucleotide
  Sense strand starting at position 1242 of SEQ ID NO: 1881658
guggauugcaauuggagau

SEQ ID NO: 2061647 - RNA, 19 nt, Artificial Sequence
  Description of Artificial Sequence: Synthetic oligonucleotide
  Antisense strand to SEQ ID NO: 2061646
aucuccaauugcaauccac

SEQ ID NO: 2061648 - RNA, 19 nt, Artificial Sequence
  Description of Artificial Sequence: Synthetic oligonucleotide
  Sense strand starting at position 1302 of SEQ ID NO: 1881658
cugcucauagaguaaacaa

SEQ ID NO: 2061649 - RNA, 19 nt, Artificial Sequence
  Description of Artificial Sequence: Synthetic oligonucleotide
  Antisense strand to SEQ ID NO: 2061648
uuguuuacucuaugagcag

SEQ ID NO: 2061650 - RNA, 19 nt, Artificial Sequence
  Description of Artificial Sequence: Synthetic oligonucleotide
  Sense strand starting at position 1723 of SEQ ID NO: 1881658
acagccucccgagaauaau

SEQ ID NO: 2061651 - RNA, 19 nt, Artificial Sequence
  Description of Artificial Sequence: Synthetic oligonucleotide
  Antisense strand to SEQ ID NO: 2061650
auuauucucgggaggcugu

SEQ ID NO: 2061652 - RNA, 19 nt, Artificial Sequence
  Description of Artificial Sequence: Synthetic oligonucleotide
  Sense strand starting at position 1755 of SEQ ID NO: 1881658
cugguauccuaagcacaaa

SEQ ID NO: 2061653 - RNA, 19 nt, Artificial Sequence
  Description of Artificial Sequence: Synthetic oligonucleotide
  Antisense strand to SEQ ID NO: 2061652
uuugugcuuaggauaccag

SEQ ID NO: 2061654 - RNA, 19 nt, Artificial Sequence
  Description of Artificial Sequence: Synthetic oligonucleotide
  Sense strand starting at position 1758 of SEQ ID NO: 1881658
guauccuaagcacaaagau

SEQ ID NO: 2061655 - RNA, 19 nt, Artificial Sequence
  Description of Artificial Sequence: Synthetic oligonucleotide
  Antisense strand to SEQ ID NO: 2061654
aucuuugugcuuaggauac

SEQ ID NO: 2061656 - RNA, 19 nt, Artificial Sequence
  Description of Artificial Sequence: Synthetic oligonucleotide
  Sense strand starting at position 1817 of SEQ ID NO: 1881658
cuuuguuugggugcgaguu

SEQ ID NO: 2061657 - RNA, 19 nt, Artificial Sequence
  Description of Artificial Sequence: Synthetic oligonucleotide
  Antisense strand to SEQ ID NO: 2061656
aacucgcacccaaacaaag

SEQ ID NO: 2061658 - RNA, 19 nt, Artificial Sequence
  Description of Artificial Sequence: Synthetic oligonucleotide
  Sense strand starting at position 1827 of SEQ ID NO: 1881658
gugcgaguuacagugcuau

SEQ ID NO: 2061659 - RNA, 19 nt, Artificial Sequence
  Description of Artificial Sequence: Synthetic oligonucleotide
  Antisense strand to SEQ ID NO: 2061658
auagcacuguaacucgcac

SEQ ID NO: 2061660 - RNA, 19 nt, Artificial Sequence
  Description of Artificial Sequence: Synthetic oligonucleotide
  Sense strand starting at position 1860 of SEQ ID NO: 1881658
auguaaacccaucaacguu

SEQ ID NO: 2061661 - RNA, 19 nt, Artificial Sequence
  Description of Artificial Sequence: Synthetic oligonucleotide
  Antisense strand to SEQ ID NO: 2061660
aacguugauggguuuacau

SEQ ID NO: 2061662 - RNA, 19 nt, Artificial Sequence
  Description of Artificial Sequence: Synthetic oligonucleotide
  Sense strand starting at position 2166 of SEQ ID NO: 1881658
ugaagaggguaccauauuu

SEQ ID NO: 2061663 - RNA, 19 nt, Artificial Sequence
  Description of Artificial Sequence: Synthetic oligonucleotide
  Antisense strand to SEQ ID NO: 2061662
aaauaugguacccucuuca

SEQ ID NO: 2061664 - RNA, 19 nt, Artificial Sequence
  Description of Artificial Sequence: Synthetic oligonucleotide
  Sense strand starting at position 2480 of SEQ ID NO: 1881658
gugaaccucauguguauuu

SEQ ID NO: 2061665 - RNA, 19 nt, Artificial Sequence
  Description of Artificial Sequence: Synthetic oligonucleotide
  Antisense strand to SEQ ID NO: 2061664
aaauacacaugagguucac

SEQ ID NO: 2061666 - RNA, 19 nt, Artificial Sequence
  Description of Artificial Sequence: Synthetic oligonucleotide
  Sense strand starting at position 2842 of SEQ ID NO: 1881658
gggugaucuaagugacagg

SEQ ID NO: 2061667 - RNA, 19 nt, Artificial Sequence
  Description of Artificial Sequence: Synthetic oligonucleotide
  Antisense strand to SEQ ID NO: 2061666
ccugucacuuagaucaccc

SEQ ID NO: 2061668 - RNA, 19 nt, Artificial Sequence
  Description of Artificial Sequence: Synthetic oligonucleotide
  Sense strand starting at position 2849 of SEQ ID NO: 1881658
cuaagugacaggcauggua

SEQ ID NO: 2061669 - RNA, 19 nt, Artificial Sequence
  Description of Artificial Sequence: Synthetic oligonucleotide
  Antisense strand to SEQ ID NO: 2061668
uaccaugccugucacuuag

SEQ ID NO: 2061670 - RNA, 19 nt, Artificial Sequence
  Description of Artificial Sequence: Synthetic oligonucleotide
  Sense strand starting at position 2959 of SEQ ID NO: 1881658
accuauuuaugggauacau

SEQ ID NO: 2061671 - RNA, 19 nt, Artificial Sequence
  Description of Artificial Sequence: Synthetic oligonucleotide
  Antisense strand to SEQ ID NO: 2061670
auguaucccauaaauaggu

SEQ ID NO: 2061672 - RNA, 19 nt, Artificial Sequence
  Description of Artificial Sequence: Synthetic oligonucleotide
  Sense strand starting at position 3143 of SEQ ID NO: 1881658
uguccuauugaccauuaga

SEQ ID NO: 2061673 - RNA, 19 nt, Artificial Sequence
  Description of Artificial Sequence: Synthetic oligonucleotide
  Antisense strand to SEQ ID NO: 2061672
ucuaauggucaauaggaca

SEQ ID NO: 2061674 - RNA, 19 nt, Artificial Sequence
  Description of Artificial Sequence: Synthetic oligonucleotide
  Sense strand starting at position 3565 of SEQ ID NO: 1881658
aagaguuaccuugggauug

SEQ ID NO: 2061675 - RNA, 19 nt, Artificial Sequence
  Description of Artificial Sequence: Synthetic oligonucleotide
  Antisense strand to SEQ ID NO: 2061674
caaucccaagguaacucuu

SEQ ID NO: 2061676 - RNA, 19 nt, Artificial Sequence
  Description of Artificial Sequence: Synthetic oligonucleotide
  Sense strand starting at position 3783 of SEQ ID NO: 1881658
uacuguuuauacuugggau

SEQ ID NO: 2061677 - RNA, 19 nt, Artificial Sequence
  Description of Artificial Sequence: Synthetic oligonucleotide
  Antisense strand to SEQ ID NO: 2061676
aucccaaguauaaacagua

SEQ ID NO: 2061678 - RNA, 19 nt, Artificial Sequence
  Description of Artificial Sequence: Synthetic oligonucleotide
  Sense strand starting at position 3796 of SEQ ID NO: 1881658
ugggauuccuuauccacaa

SEQ ID NO: 2061679 - RNA, 19 nt, Artificial Sequence
  Description of Artificial Sequence: Synthetic oligonucleotide
  Antisense strand to SEQ ID NO: 2061678
uuguggauaaggaauccca

SEQ ID NO: 2061680 - RNA, 19 nt, Artificial Sequence
  Description of Artificial Sequence: Synthetic oligonucleotide
  Sense strand starting at position 6 of SEQ ID NO: 1881659
uugagaaaucuuuguacua

SEQ ID NO: 2061681 - RNA, 19 nt, Artificial Sequence
  Description of Artificial Sequence: Synthetic oligonucleotide
  Antisense strand to SEQ ID NO: 2061680
uaguacaaagauuucucaa

SEQ ID NO: 2061682 - RNA, 19 nt, Artificial Sequence
  Description of Artificial Sequence: Synthetic oligonucleotide
  Sense strand starting at position 7 of SEQ ID NO: 1881659
ugagaaaucuuuguacuau

SEQ ID NO: 2061683 - RNA, 19 nt, Artificial Sequence
  Description of Artificial Sequence: Synthetic oligonucleotide
  Antisense strand to SEQ ID NO: 2061682
auaguacaaagauuucuca

SEQ ID NO: 2061684 - RNA, 19 nt, Artificial Sequence
  Description of Artificial Sequence: Synthetic oligonucleotide
  Sense strand starting at position 13 of SEQ ID NO: 1881659
aucuuuguacuauguaaac

SEQ ID NO: 2061685 - RNA, 19 nt, Artificial Sequence
  Description of Artificial Sequence: Synthetic oligonucleotide
  Antisense strand to SEQ ID NO: 2061684
guuuacauaguacaaagau

SEQ ID NO: 2061686 - RNA, 19 nt, Artificial Sequence
  Description of Artificial Sequence: Synthetic oligonucleotide
  Sense strand starting at position 353 of SEQ ID NO: 1881659
gagacaagguuugucuugu

SEQ ID NO: 2061687 - RNA, 19 nt, Artificial Sequence
  Description of Artificial Sequence: Synthetic oligonucleotide
  Antisense strand to SEQ ID NO: 2061686
acaagacaaaccuugucuc

SEQ ID NO: 2061688 - RNA, 19 nt, Artificial Sequence
  Description of Artificial Sequence: Synthetic oligonucleotide
  Sense strand starting at position 380 of SEQ ID NO: 1881659
aacuauguugcucagguua

SEQ ID NO: 2061689 - RNA, 19 nt, Artificial Sequence
  Description of Artificial Sequence: Synthetic oligonucleotide
  Antisense strand to SEQ ID NO: 2061688
uaaccugagcaacauaguu

SEQ ID NO: 2061690 - RNA, 19 nt, Artificial Sequence
  Description of Artificial Sequence: Synthetic oligonucleotide
  Sense strand starting at position 514 of SEQ ID NO: 1881659
augaguuauugucucauga

SEQ ID NO: 2061691 - RNA, 19 nt, Artificial Sequence
  Description of Artificial Sequence: Synthetic oligonucleotide
  Antisense strand to SEQ ID NO: 2061690
ucaugagacaauaacucau

SEQ ID NO: 2061692 - RNA, 19 nt, Artificial Sequence
  Description of Artificial Sequence: Synthetic oligonucleotide
  Sense strand starting at position 521 of SEQ ID NO: 1881659
auugucucaugagcaaauu

SEQ ID NO: 2061693 - RNA, 19 nt, Artificial Sequence
  Description of Artificial Sequence: Synthetic oligonucleotide
  Antisense strand to SEQ ID NO: 2061692
aauuugcucaugagacaau

SEQ ID NO: 2061694 - RNA, 19 nt, Artificial Sequence
  Description of Artificial Sequence: Synthetic oligonucleotide
  Sense strand starting at position 713 of SEQ ID NO: 1881659
auacauuucugggauugaa

SEQ ID NO: 2061695 - RNA, 19 nt, Artificial Sequence
  Description of Artificial Sequence: Synthetic oligonucleotide
  Antisense strand to SEQ ID NO: 2061694
uucaaucccagaaauguau

SEQ ID NO: 2061696 - RNA, 19 nt, Artificial Sequence
  Description of Artificial Sequence: Synthetic oligonucleotide
  Sense strand starting at position 864 of SEQ ID NO: 1881659
guuacugagccaggaaauu

SEQ ID NO: 2061697 - RNA, 19 nt, Artificial Sequence
  Description of Artificial Sequence: Synthetic oligonucleotide
  Antisense strand to SEQ ID NO: 2061696
aauuuccuggcucaguaac

SEQ ID NO: 2061698 - RNA, 19 nt, Artificial Sequence
  Description of Artificial Sequence: Synthetic oligonucleotide
  Sense strand starting at position 981 of SEQ ID NO: 1881659
gacaguuugcaauaaugca

SEQ ID NO: 2061699 - RNA, 19 nt, Artificial Sequence
  Description of Artificial Sequence: Synthetic oligonucleotide
  Antisense strand to SEQ ID NO: 2061698
ugcauuauugcaaacuguc

SEQ ID NO: 2061700 - RNA, 19 nt, Artificial Sequence
  Description of Artificial Sequence: Synthetic oligonucleotide
  Sense strand starting at position 989 of SEQ ID NO: 1881659
gcaauaaugcaaugaaaua

SEQ ID NO: 2061701 - RNA, 19 nt, Artificial Sequence
  Description of Artificial Sequence: Synthetic oligonucleotide
  Antisense strand to SEQ ID NO: 2061700
uauuucauugcauuauugc

SEQ ID NO: 2061702 - RNA, 19 nt, Artificial Sequence
  Description of Artificial Sequence: Synthetic oligonucleotide
  Sense strand starting at position 1110 of SEQ ID NO: 1881659
gugcuaggugcugagaaca

SEQ ID NO: 2061703 - RNA, 19 nt, Artificial Sequence
  Description of Artificial Sequence: Synthetic oligonucleotide
  Antisense strand to SEQ ID NO: 2061702
uguucucagcaccuagcac

SEQ ID NO: 2061704 - RNA, 19 nt, Artificial Sequence
  Description of Artificial Sequence: Synthetic oligonucleotide
  Sense strand starting at position 1147 of SEQ ID NO: 1881659
uugucucuccuuugaaaga

SEQ ID NO: 2061705 - RNA, 19 nt, Artificial Sequence
  Description of Artificial Sequence: Synthetic oligonucleotide
  Antisense strand to SEQ ID NO: 2061704
ucuuucaaaggagagacaa

SEQ ID NO: 2061706 - RNA, 19 nt, Artificial Sequence
  Description of Artificial Sequence: Synthetic oligonucleotide
  Sense strand starting at position 1202 of SEQ ID NO: 1881659
gucguaugagugcuaugcu

SEQ ID NO: 2061707 - RNA, 19 nt, Artificial Sequence
  Description of Artificial Sequence: Synthetic oligonucleotide
  Antisense strand to SEQ ID NO: 2061706
agcauagcacucauacgac

SEQ ID NO: 2061708 - RNA, 19 nt, Artificial Sequence
  Description of Artificial Sequence: Synthetic oligonucleotide
  Sense strand starting at position 1210 of SEQ ID NO: 1881659
agugcuaugcuagaaacaa

SEQ ID NO: 2061709 - RNA, 19 nt, Artificial Sequence
  Description of Artificial Sequence: Synthetic oligonucleotide
  Antisense strand to SEQ ID NO: 2061708
uuguuucuagcauagcacu

SEQ ID NO: 2061710 - RNA, 19 nt, Artificial Sequence
  Description of Artificial Sequence: Synthetic oligonucleotide
  Sense strand starting at position 1398 of SEQ ID NO: 1881659
uguguuaugaucgaauaug

SEQ ID NO: 2061711 - RNA, 19 nt, Artificial Sequence
  Description of Artificial Sequence: Synthetic oligonucleotide
  Antisense strand to SEQ ID NO: 2061710
cauauucgaucauaacaca

SEQ ID NO: 2061712 - RNA, 19 nt, Artificial Sequence
  Description of Artificial Sequence: Synthetic oligonucleotide
  Sense strand starting at position 1408 of SEQ ID NO: 1881659
ucgaauaugaagugcaaga

SEQ ID NO: 2061713 - RNA, 19 nt, Artificial Sequence
  Description of Artificial Sequence: Synthetic oligonucleotide
  Antisense strand to SEQ ID NO: 2061712
ucuugcacuucauauucga

SEQ ID NO: 2061714 - RNA, 19 nt, Artificial Sequence
  Description of Artificial Sequence: Synthetic oligonucleotide
  Sense strand starting at position 1466 of SEQ ID NO: 1881659
cucaaaggucuuggugaaa

SEQ ID NO: 2061715 - RNA, 19 nt, Artificial Sequence
  Description of Artificial Sequence: Synthetic oligonucleotide
  Antisense strand to SEQ ID NO: 2061714
uuucaccaagaccuuugag

SEQ ID NO: 2061716 - RNA, 19 nt, Artificial Sequence
  Description of Artificial Sequence: Synthetic oligonucleotide
  Sense strand starting at position 1582 of SEQ ID NO: 1881659
ggauaauaguuaccuggca

SEQ ID NO: 2061717 - RNA, 19 nt, Artificial Sequence
  Description of Artificial Sequence: Synthetic oligonucleotide
  Antisense strand to SEQ ID NO: 2061716
ugccagguaacuauuaucc

SEQ ID NO: 2061718 - RNA, 19 nt, Artificial Sequence
  Description of Artificial Sequence: Synthetic oligonucleotide
  Sense strand starting at position 1583 of SEQ ID NO: 1881659
gauaauaguuaccuggcaa

SEQ ID NO: 2061719 - RNA, 19 nt, Artificial Sequence
  Description of Artificial Sequence: Synthetic oligonucleotide
  Antisense strand to SEQ ID NO: 2061718
uugccagguaacuauuauc

SEQ ID NO: 2061720 - RNA, 19 nt, Artificial Sequence
  Description of Artificial Sequence: Synthetic oligonucleotide
  Sense strand starting at position 1595 of SEQ ID NO: 1881659
cuggcaagauuguuguaaa

SEQ ID NO: 2061721 - RNA, 19 nt, Artificial Sequence
  Description of Artificial Sequence: Synthetic oligonucleotide
  Antisense strand to SEQ ID NO: 2061720
uuuacaacaaucuugccag

SEQ ID NO: 2061722 - RNA, 19 nt, Artificial Sequence
  Description of Artificial Sequence: Synthetic oligonucleotide
  Sense strand starting at position 1605 of SEQ ID NO: 1881659
uguuguaaagaguauagau

SEQ ID NO: 2061723 - RNA, 19 nt, Artificial Sequence
  Description of Artificial Sequence: Synthetic oligonucleotide
  Antisense strand to SEQ ID NO: 2061722
aucuauacucuuuacaaca

SEQ ID NO: 2061724 - RNA, 19 nt, Artificial Sequence
  Description of Artificial Sequence: Synthetic oligonucleotide
  Sense strand starting at position 1736 of SEQ ID NO: 1881659
ggaugaauuguauaacggu

SEQ ID NO: 2061725 - RNA, 19 nt, Artificial Sequence
  Description of Artificial Sequence: Synthetic oligonucleotide
  Antisense strand to SEQ ID NO: 2061724
accguuauacaauucaucc

SEQ ID NO: 2061726 - RNA, 19 nt, Artificial Sequence
  Description of Artificial Sequence: Synthetic oligonucleotide
  Sense strand starting at position 1856 of SEQ ID NO: 1881659
gucuccaaaguugauuaua

SEQ ID NO: 2061727 - RNA, 19 nt, Artificial Sequence
  Description of Artificial Sequence: Synthetic oligonucleotide
  Antisense strand to SEQ ID NO: 2061726
uauaaucaacuuuggagac

SEQ ID NO: 2061728 - RNA, 19 nt, Artificial Sequence
  Description of Artificial Sequence: Synthetic oligonucleotide
  Sense strand starting at position 1866 of SEQ ID NO: 1881659
uugauuauauccuucugua

SEQ ID NO: 2061729 - RNA, 19 nt, Artificial Sequence
  Description of Artificial Sequence: Synthetic oligonucleotide
  Antisense strand to SEQ ID NO: 2061728
uacagaaggauauaaucaa

SEQ ID NO: 2061730 - RNA, 19 nt, Artificial Sequence
  Description of Artificial Sequence: Synthetic oligonucleotide
  Sense strand starting at position 1888 of SEQ ID NO: 1881659
agguauauaucauucugua

SEQ ID NO: 2061731 - RNA, 19 nt, Artificial Sequence
  Description of Artificial Sequence: Synthetic oligonucleotide
  Antisense strand to SEQ ID NO: 2061730
uacagaaugauauauaccu

SEQ ID NO: 2061732 - RNA, 19 nt, Artificial Sequence
  Description of Artificial Sequence: Synthetic oligonucleotide
  Sense strand starting at position 1927 of SEQ ID NO: 1881659
ucuuauauagugggagcua

SEQ ID NO: 2061733 - RNA, 19 nt, Artificial Sequence
  Description of Artificial Sequence: Synthetic oligonucleotide
  Antisense strand to SEQ ID NO: 2061732
uagcucccacuauauaaga

SEQ ID NO: 2061734 - RNA, 19 nt, Artificial Sequence
  Description of Artificial Sequence: Synthetic oligonucleotide
  Sense strand starting at position 2008 of SEQ ID NO: 1881659
gagagaacauauggcauuu

SEQ ID NO: 2061735 - RNA, 19 nt, Artificial Sequence
  Description of Artificial Sequence: Synthetic oligonucleotide
  Antisense strand to SEQ ID NO: 2061734
aaaugccauauguucucuc

SEQ ID NO: 2061736 - RNA, 19 nt, Artificial Sequence
  Description of Artificial Sequence: Synthetic oligonucleotide
  Sense strand starting at position 2130 of SEQ ID NO: 1881659
acucauaggcucugggauu

SEQ ID NO: 2061737 - RNA, 19 nt, Artificial Sequence
  Description of Artificial Sequence: Synthetic oligonucleotide
  Antisense strand to SEQ ID NO: 2061736
aaucccagagccuaugagu

SEQ ID NO: 2061738 - RNA, 19 nt, Artificial Sequence
  Description of Artificial Sequence: Synthetic oligonucleotide
  Sense strand starting at position 2436 of SEQ ID NO: 1881659
acagcuuugacgggagacu

SEQ ID NO: 2061739 - RNA, 19 nt, Artificial Sequence
  Description of Artificial Sequence: Synthetic oligonucleotide
  Antisense strand to SEQ ID NO: 2061738
agucucccgucaaagcugu

SEQ ID NO: 2061740 - RNA, 19 nt, Artificial Sequence
  Description of Artificial Sequence: Synthetic oligonucleotide
  Sense strand starting at position 2881 of SEQ ID NO: 1881659
cauccauuaguagguguga

SEQ ID NO: 2061741 - RNA, 19 nt, Artificial Sequence
  Description of Artificial Sequence: Synthetic oligonucleotide
  Antisense strand to SEQ ID NO: 2061740
ucacaccuacuaauggaug

SEQ ID NO: 2061742 - RNA, 19 nt, Artificial Sequence
  Description of Artificial Sequence: Synthetic oligonucleotide
  Sense strand starting at position 2882 of SEQ ID NO: 1881659
auccauuaguaggugugau

SEQ ID NO: 2061743 - RNA, 19 nt, Artificial Sequence
  Description of Artificial Sequence: Synthetic oligonucleotide
  Antisense strand to SEQ ID NO: 2061742
aucacaccuacuaauggau

SEQ ID NO: 2061744 - RNA, 19 nt, Artificial Sequence
  Description of Artificial Sequence: Synthetic oligonucleotide
  Sense strand starting at position 2921 of SEQ ID NO: 1881659
gucuuagacccgcauuaag

SEQ ID NO: 2061745 - RNA, 19 nt, Artificial Sequence
  Description of Artificial Sequence: Synthetic oligonucleotide
  Antisense strand to SEQ ID NO: 2061744
cuuaaugcgggucuaagac

SEQ ID NO: 2061746 - RNA, 19 nt, Artificial Sequence
  Description of Artificial Sequence: Synthetic oligonucleotide
  Sense strand starting at position 3169 of SEQ ID NO: 1881659
uguguagcucaauaaaugu

SEQ ID NO: 2061747 - RNA, 19 nt, Artificial Sequence
  Description of Artificial Sequence: Synthetic oligonucleotide
  Antisense strand to SEQ ID NO: 2061746
acauuuauugagcuacaca

SEQ ID NO: 2061748 - RNA, 19 nt, Artificial Sequence
  Description of Artificial Sequence: Synthetic oligonucleotide
  Sense strand starting at position 3390 of SEQ ID NO: 1881659
ugggucaugcaguguauuu

SEQ ID NO: 2061749 - RNA, 19 nt, Artificial Sequence
  Description of Artificial Sequence: Synthetic oligonucleotide
  Antisense strand to SEQ ID NO: 2061748
aaauacacugcaugaccca

SEQ ID NO: 2061750 - RNA, 19 nt, Artificial Sequence
  Description of Artificial Sequence: Synthetic oligonucleotide
  Sense strand starting at position 3453 of SEQ ID NO: 1881659
ucuagugauuuagaacuuu

SEQ ID NO: 2061751 - RNA, 19 nt, Artificial Sequence
  Description of Artificial Sequence: Synthetic oligonucleotide
  Antisense strand to SEQ ID NO: 2061750
aaaguucuaaaucacuaga

SEQ ID NO: 2061752 - RNA, 19 nt, Artificial Sequence
  Description of Artificial Sequence: Synthetic oligonucleotide
  Sense strand starting at position 3571 of SEQ ID NO: 1881659
uuguguuaaaggcagagaa

SEQ ID NO: 2061753 - RNA, 19 nt, Artificial Sequence
  Description of Artificial Sequence: Synthetic oligonucleotide
  Antisense strand to SEQ ID NO: 2061752
uucucugccuuuaacacaa

SEQ ID NO: 2061754 - RNA, 19 nt, Artificial Sequence
  Description of Artificial Sequence: Synthetic oligonucleotide
  Sense strand starting at position 3821 of SEQ ID NO: 1881659
ucaugcauguauuugcaua

SEQ ID NO: 2061755 - RNA, 19 nt, Artificial Sequence
  Description of Artificial Sequence: Synthetic oligonucleotide
  Antisense strand to SEQ ID NO: 2061754
uaugcaaauacaugcauga

SEQ ID NO: 2061756 - RNA, 19 nt, Artificial Sequence
  Description of Artificial Sequence: Synthetic oligonucleotide
  Sense strand starting at position 3893 of SEQ ID NO: 1881659
gggauugucaggugaagag

SEQ ID NO: 2061757 - RNA, 19 nt, Artificial Sequence
  Description of Artificial Sequence: Synthetic oligonucleotide
  Antisense strand to SEQ ID NO: 2061756
cucuucaccugacaauccc

SEQ ID NO: 2061758 - RNA, 19 nt, Artificial Sequence
  Description of Artificial Sequence: Synthetic oligonucleotide
  Sense strand starting at position 3938 of SEQ ID NO: 1881659
uuagauccuuugguacaau

SEQ ID NO: 2061759 - RNA, 19 nt, Artificial Sequence
  Description of Artificial Sequence: Synthetic oligonucleotide
  Antisense strand to SEQ ID NO: 2061758
auuguaccaaaggaucuaa

SEQ ID NO: 2061760 - RNA, 19 nt, Artificial Sequence
  Description of Artificial Sequence: Synthetic oligonucleotide
  Sense strand starting at position 57 of SEQ ID NO: 1881660
gcaucuccucagcaaagau

SEQ ID NO: 2061761 - RNA, 19 nt, Artificial Sequence
  Description of Artificial Sequence: Synthetic oligonucleotide
  Antisense strand to SEQ ID NO: 2061760
aucuuugcugaggagaugc

SEQ ID NO: 2061762 - RNA, 19 nt, Artificial Sequence
  Description of Artificial Sequence: Synthetic oligonucleotide
  Sense strand starting at position 254 of SEQ ID NO: 1881660
acauucuagcaucauguau

SEQ ID NO: 2061763 - RNA, 19 nt, Artificial Sequence
  Description of Artificial Sequence: Synthetic oligonucleotide
  Antisense strand to SEQ ID NO: 2061762
auacaugaugcuagaaugu

SEQ ID NO: 2061764 - RNA, 19 nt, Artificial Sequence
  Description of Artificial Sequence: Synthetic oligonucleotide
  Sense strand starting at position 278 of SEQ ID NO: 1881660
aucaaaguugccgagugaa

SEQ ID NO: 2061765 - RNA, 19 nt, Artificial Sequence
  Description of Artificial Sequence: Synthetic oligonucleotide
  Antisense strand to SEQ ID NO: 2061764
uucacucggcaacuuugau

SEQ ID NO: 2061766 - RNA, 19 nt, Artificial Sequence
  Description of Artificial Sequence: Synthetic oligonucleotide
  Sense strand starting at position 416 of SEQ ID NO: 1881660
ucaaaugugcaauauuguu

SEQ ID NO: 2061767 - RNA, 19 nt, Artificial Sequence
  Description of Artificial Sequence: Synthetic oligonucleotide
  Antisense strand to SEQ ID NO: 2061766
aacaauauugcacauuuga

SEQ ID NO: 2061768 - RNA, 19 nt, Artificial Sequence
  Description of Artificial Sequence: Synthetic oligonucleotide
  Sense strand starting at position 455 of SEQ ID NO: 1881660
acugcaauauuguuugaaa

SEQ ID NO: 2061769 - RNA, 19 nt, Artificial Sequence
  Description of Artificial Sequence: Synthetic oligonucleotide
  Antisense strand to SEQ ID NO: 2061768
uuucaaacaauauugcagu

SEQ ID NO: 2061770 - RNA, 19 nt, Artificial Sequence
  Description of Artificial Sequence: Synthetic oligonucleotide
  Sense strand starting at position 456 of SEQ ID NO: 1881660
cugcaauauuguuugaaau

SEQ ID NO: 2061771 - RNA, 19 nt, Artificial Sequence
  Description of Artificial Sequence: Synthetic oligonucleotide
  Antisense strand to SEQ ID NO: 2061770
auuucaaacaauauugcag

SEQ ID NO: 2061772 - RNA, 19 nt, Artificial Sequence
  Description of Artificial Sequence: Synthetic oligonucleotide
  Sense strand starting at position 538 of SEQ ID NO: 1881660
auagguaauacaggauagu

SEQ ID NO: 2061773 - RNA, 19 nt, Artificial Sequence
  Description of Artificial Sequence: Synthetic oligonucleotide
  Antisense strand to SEQ ID NO: 2061772
acuauccuguauuaccuau

SEQ ID NO: 2061774 - RNA, 19 nt, Artificial Sequence
  Description of Artificial Sequence: Synthetic oligonucleotide
  Sense strand starting at position 1174 of SEQ ID NO: 1881660
guaagaagaucucuauuga

SEQ ID NO: 2061775 - RNA, 19 nt, Artificial Sequence
  Description of Artificial Sequence: Synthetic oligonucleotide
  Antisense strand to SEQ ID NO: 2061774
ucaauagagaucuucuuac

SEQ ID NO: 2061776 - RNA, 19 nt, Artificial Sequence
  Description of Artificial Sequence: Synthetic oligonucleotide
  Sense strand starting at position 1196 of SEQ ID NO: 1881660
aauggaucauuacuggagu

SEQ ID NO: 2061777 - RNA, 19 nt, Artificial Sequence
  Description of Artificial Sequence: Synthetic oligonucleotide
  Antisense strand to SEQ ID NO: 2061776
acuccaguaaugauccauu

SEQ ID NO: 2061778 - RNA, 19 nt, Artificial Sequence
  Description of Artificial Sequence: Synthetic oligonucleotide
  Sense strand starting at position 1199 of SEQ ID NO: 1881660
ggaucauuacuggagugca

SEQ ID NO: 2061779 - RNA, 19 nt, Artificial Sequence
  Description of Artificial Sequence: Synthetic oligonucleotide
  Antisense strand to SEQ ID NO: 2061778
ugcacuccaguaaugaucc

SEQ ID NO: 2061780 - RNA, 19 nt, Artificial Sequence
  Description of Artificial Sequence: Synthetic oligonucleotide
  Sense strand starting at position 1209 of SEQ ID NO: 1881660
uggagugcaauugguaaau

SEQ ID NO: 2061781 - RNA, 19 nt, Artificial Sequence
  Description of Artificial Sequence: Synthetic oligonucleotide
  Antisense strand to SEQ ID NO: 2061780
auuuaccaauugcacucca

SEQ ID NO: 2061782 - RNA, 19 nt, Artificial Sequence
  Description of Artificial Sequence: Synthetic oligonucleotide
  Sense strand starting at position 1397 of SEQ ID NO: 1881660
acaaguaaguucccacuua

SEQ ID NO: 2061783 - RNA, 19 nt, Artificial Sequence
  Description of Artificial Sequence: Synthetic oligonucleotide
  Antisense strand to SEQ ID NO: 2061782
uaagugggaacuuacuugu

SEQ ID NO: 2061784 - RNA, 19 nt, Artificial Sequence
  Description of Artificial Sequence: Synthetic oligonucleotide
  Sense strand starting at position 1452 of SEQ ID NO: 1881660
acaggcaaauuugaucaga

SEQ ID NO: 2061785 - RNA, 19 nt, Artificial Sequence
  Description of Artificial Sequence: Synthetic oligonucleotide
  Antisense strand to SEQ ID NO: 2061784
ucugaucaaauuugccugu

SEQ ID NO: 2061786 - RNA, 19 nt, Artificial Sequence
  Description of Artificial Sequence: Synthetic oligonucleotide
  Sense strand starting at position 1640 of SEQ ID NO: 1881660
cgguuucucacguaauuug

SEQ ID NO: 2061787 - RNA, 19 nt, Artificial Sequence
  Description of Artificial Sequence: Synthetic oligonucleotide
  Antisense strand to SEQ ID NO: 2061786
caaauuacgugagaaaccg

SEQ ID NO: 2061788 - RNA, 19 nt, Artificial Sequence
  Description of Artificial Sequence: Synthetic oligonucleotide
  Sense strand starting at position 1643 of SEQ ID NO: 1881660
uuucucacguaauuuguga

SEQ ID NO: 2061789 - RNA, 19 nt, Artificial Sequence
  Description of Artificial Sequence: Synthetic oligonucleotide
  Antisense strand to SEQ ID NO: 2061788
ucacaaauuacgugagaaa

SEQ ID NO: 2061790 - RNA, 19 nt, Artificial Sequence
  Description of Artificial Sequence: Synthetic oligonucleotide
  Sense strand starting at position 1786 of SEQ ID NO: 1881660
augaauuaccuaggaguuu

SEQ ID NO: 2061791 - RNA, 19 nt, Artificial Sequence
  Description of Artificial Sequence: Synthetic oligonucleotide
  Antisense strand to SEQ ID NO: 2061790
aaacuccuagguaauucau

SEQ ID NO: 2061792 - RNA, 19 nt, Artificial Sequence
  Description of Artificial Sequence: Synthetic oligonucleotide
  Sense strand starting at position 1829 of SEQ ID NO: 1881660
guaaguuugagauggguug

SEQ ID NO: 2061793 - RNA, 19 nt, Artificial Sequence
  Description of Artificial Sequence: Synthetic oligonucleotide
  Antisense strand to SEQ ID NO: 2061792
caacccaucucaaacuuac

SEQ ID NO: 2061794 - RNA, 19 nt, Artificial Sequence
  Description of Artificial Sequence: Synthetic oligonucleotide
  Sense strand starting at position 1844 of SEQ ID NO: 1881660
guugcaacaguuuguauuu

SEQ ID NO: 2061795 - RNA, 19 nt, Artificial Sequence
  Description of Artificial Sequence: Synthetic oligonucleotide
  Antisense strand to SEQ ID NO: 2061794
aaauacaaacuguugcaac

SEQ ID NO: 2061796 - RNA, 19 nt, Artificial Sequence
  Description of Artificial Sequence: Synthetic oligonucleotide
  Sense strand starting at position 2127 of SEQ ID NO: 1881660
uugcauacaguugaagauu

SEQ ID NO: 2061797 - RNA, 19 nt, Artificial Sequence
  Description of Artificial Sequence: Synthetic oligonucleotide
  Antisense strand to SEQ ID NO: 2061796
aaucuucaacuguaugcaa

SEQ ID NO: 2061798 - RNA, 19 nt, Artificial Sequence
  Description of Artificial Sequence: Synthetic oligonucleotide
  Sense strand starting at position 2139 of SEQ ID NO: 1881660
gaagauuggcuguaccuau

SEQ ID NO: 2061799 - RNA, 19 nt, Artificial Sequence
  Description of Artificial Sequence: Synthetic oligonucleotide
  Antisense strand to SEQ ID NO: 2061798
auagguacagccaaucuuc

SEQ ID NO: 2061800 - RNA, 19 nt, Artificial Sequence
  Description of Artificial Sequence: Synthetic oligonucleotide
  Sense strand starting at position 2164 of SEQ ID NO: 1881660
cucagaucugagcaaguga

SEQ ID NO: 2061801 - RNA, 19 nt, Artificial Sequence
  Description of Artificial Sequence: Synthetic oligonucleotide
  Antisense strand to SEQ ID NO: 2061800
ucacuugcucagaucugag

SEQ ID NO: 2061802 - RNA, 19 nt, Artificial Sequence
  Description of Artificial Sequence: Synthetic oligonucleotide
  Sense strand starting at position 2224 of SEQ ID NO: 1881660
uggagugcccucuaugaaa

SEQ ID NO: 2061803 - RNA, 19 nt, Artificial Sequence
  Description of Artificial Sequence: Synthetic oligonucleotide
  Antisense strand to SEQ ID NO: 2061802
uuucauagagggcacucca

SEQ ID NO: 2061804 - RNA, 19 nt, Artificial Sequence
  Description of Artificial Sequence: Synthetic oligonucleotide
  Sense strand starting at position 2310 of SEQ ID NO: 1881660
guguauaagguugaccaga

SEQ ID NO: 2061805 - RNA, 19 nt, Artificial Sequence
  Description of Artificial Sequence: Synthetic oligonucleotide
  Antisense strand to SEQ ID NO: 2061804
ucuggucaaccuuauacac

SEQ ID NO: 2061806 - RNA, 19 nt, Artificial Sequence
  Description of Artificial Sequence: Synthetic oligonucleotide
  Sense strand starting at position 2312 of SEQ ID NO: 1881660
guauaagguugaccagaua

SEQ ID NO: 2061807 - RNA, 19 nt, Artificial Sequence
  Description of Artificial Sequence: Synthetic oligonucleotide
  Antisense strand to SEQ ID NO: 2061806
uaucuggucaaccuuauac

SEQ ID NO: 2061808 - RNA, 19 nt, Artificial Sequence
  Description of Artificial Sequence: Synthetic oligonucleotide
  Sense strand starting at position 2425 of SEQ ID NO: 1881660
uacuucugguuggcaaaga

SEQ ID NO: 2061809 - RNA, 19 nt, Artificial Sequence
  Description of Artificial Sequence: Synthetic oligonucleotide
  Antisense strand to SEQ ID NO: 2061808
ucuuugccaaccagaagua

SEQ ID NO: 2061810 - RNA, 19 nt, Artificial Sequence
  Description of Artificial Sequence: Synthetic oligonucleotide
  Sense strand starting at position 2541 of SEQ ID NO: 1881660
aggguuguaagcuaucuaa

SEQ ID NO: 2061811 - RNA, 19 nt, Artificial Sequence
  Description of Artificial Sequence: Synthetic oligonucleotide
  Antisense strand to SEQ ID NO: 2061810
uuagauagcuuacaacccu

SEQ ID NO: 2061812 - RNA, 19 nt, Artificial Sequence
  Description of Artificial Sequence: Synthetic oligonucleotide
  Sense strand starting at position 2606 of SEQ ID NO: 1881660
guuuguucugaguaugaug

SEQ ID NO: 2061813 - RNA, 19 nt, Artificial Sequence
  Description of Artificial Sequence: Synthetic oligonucleotide
  Antisense strand to SEQ ID NO: 2061812
caucauacucagaacaaac

SEQ ID NO: 2061814 - RNA, 19 nt, Artificial Sequence
  Description of Artificial Sequence: Synthetic oligonucleotide
  Sense strand starting at position 2658 of SEQ ID NO: 1881660
ggugacaucagauguccuu

SEQ ID NO: 2061815 - RNA, 19 nt, Artificial Sequence
  Description of Artificial Sequence: Synthetic oligonucleotide
  Antisense strand to SEQ ID NO: 2061814
aaggacaucugaugucacc

SEQ ID NO: 2061816 - RNA, 19 nt, Artificial Sequence
  Description of Artificial Sequence: Synthetic oligonucleotide
  Sense strand starting at position 2834 of SEQ ID NO: 1881660
uucugacugaugugaugau

SEQ ID NO: 2061817 - RNA, 19 nt, Artificial Sequence
  Description of Artificial Sequence: Synthetic oligonucleotide
  Antisense strand to SEQ ID NO: 2061816
aucaucacaucagucagaa

SEQ ID NO: 2061818 - RNA, 19 nt, Artificial Sequence
  Description of Artificial Sequence: Synthetic oligonucleotide
  Sense strand starting at position 3021 of SEQ ID NO: 1881660
uguaaugaugauggccuaa

SEQ ID NO: 2061819 - RNA, 19 nt, Artificial Sequence
  Description of Artificial Sequence: Synthetic oligonucleotide
  Antisense strand to SEQ ID NO: 2061818
uuaggccaucaucauuaca

SEQ ID NO: 2061820 - RNA, 19 nt, Artificial Sequence
  Description of Artificial Sequence: Synthetic oligonucleotide
  Sense strand starting at position 3153 of SEQ ID NO: 1881660
auauauacccuggguaaga

SEQ ID NO: 2061821 - RNA, 19 nt, Artificial Sequence
  Description of Artificial Sequence: Synthetic oligonucleotide
  Antisense strand to SEQ ID NO: 2061820
ucuuacccaggguauauau

SEQ ID NO: 2061822 - RNA, 19 nt, Artificial Sequence
  Description of Artificial Sequence: Synthetic oligonucleotide
  Sense strand starting at position 3240 of SEQ ID NO: 1881660
aguaacaaucuuugaguga

SEQ ID NO: 2061823 - RNA, 19 nt, Artificial Sequence
  Description of Artificial Sequence: Synthetic oligonucleotide
  Antisense strand to SEQ ID NO: 2061822
ucacucaaagauuguuacu

SEQ ID NO: 2061824 - RNA, 19 nt, Artificial Sequence
  Description of Artificial Sequence: Synthetic oligonucleotide
  Sense strand starting at position 3243 of SEQ ID NO: 1881660
aacaaucuuugagugauug

SEQ ID NO: 2061825 - RNA, 19 nt, Artificial Sequence
  Description of Artificial Sequence: Synthetic oligonucleotide
  Antisense strand to SEQ ID NO: 2061824
caaucacucaaagauuguu

SEQ ID NO: 2061826 - RNA, 19 nt, Artificial Sequence
  Description of Artificial Sequence: Synthetic oligonucleotide
  Sense strand starting at position 3244 of SEQ ID NO: 1881660
acaaucuuugagugauugu

SEQ ID NO: 2061827 - RNA, 19 nt, Artificial Sequence
  Description of Artificial Sequence: Synthetic oligonucleotide
  Antisense strand to SEQ ID NO: 2061826
acaaucacucaaagauugu

SEQ ID NO: 2061828 - RNA, 19 nt, Artificial Sequence
  Description of Artificial Sequence: Synthetic oligonucleotide
  Sense strand starting at position 3251 of SEQ ID NO: 1881660
uugagugauugucucugag

SEQ ID NO: 2061829 - RNA, 19 nt, Artificial Sequence
  Description of Artificial Sequence: Synthetic oligonucleotide
  Antisense strand to SEQ ID NO: 2061828
cucagagacaaucacucaa

SEQ ID NO: 2061830 - RNA, 19 nt, Artificial Sequence
  Description of Artificial Sequence: Synthetic oligonucleotide
  Sense strand starting at position 3257 of SEQ ID NO: 1881660
gauugucucugagugauac

SEQ ID NO: 2061831 - RNA, 19 nt, Artificial Sequence
  Description of Artificial Sequence: Synthetic oligonucleotide
  Antisense strand to SEQ ID NO: 2061830
guaucacucagagacaauc

SEQ ID NO: 2061832 - RNA, 19 nt, Artificial Sequence
  Description of Artificial Sequence: Synthetic oligonucleotide
  Sense strand starting at position 3407 of SEQ ID NO: 1881660
gagccauggcauuaugaau

SEQ ID NO: 2061833 - RNA, 19 nt, Artificial Sequence
  Description of Artificial Sequence: Synthetic oligonucleotide
  Antisense strand to SEQ ID NO: 2061832
auucauaaugccauggcuc

SEQ ID NO: 2061834 - RNA, 19 nt, Artificial Sequence
  Description of Artificial Sequence: Synthetic oligonucleotide
  Sense strand starting at position 3537 of SEQ ID NO: 1881660
cgagaagaaucuuuacaug

SEQ ID NO: 2061835 - RNA, 19 nt, Artificial Sequence
  Description of Artificial Sequence: Synthetic oligonucleotide
  Antisense strand to SEQ ID NO: 2061834
cauguaaagauucuucucg

SEQ ID NO: 2061836 - RNA, 19 nt, Artificial Sequence
  Description of Artificial Sequence: Synthetic oligonucleotide
  Sense strand starting at position 3709 of SEQ ID NO: 1881660
uggugaucugcacauccua

SEQ ID NO: 2061837 - RNA, 19 nt, Artificial Sequence
  Description of Artificial Sequence: Synthetic oligonucleotide
  Antisense strand to SEQ ID NO: 2061836
uaggaugugcagaucacca

SEQ ID NO: 2061838 - RNA, 19 nt, Artificial Sequence
  Description of Artificial Sequence: Synthetic oligonucleotide
  Sense strand starting at position 3772 of SEQ ID NO: 1881660
uagagagaauuauagauga

SEQ ID NO: 2061839 - RNA, 19 nt, Artificial Sequence
  Description of Artificial Sequence: Synthetic oligonucleotide
  Antisense strand to SEQ ID NO: 2061838
ucaucuauaauucucucua

SEQ ID NO: 2061840 - RNA, 19 nt, Artificial Sequence
  Description of Artificial Sequence: Synthetic oligonucleotide
  Sense strand starting at position 59 of SEQ ID NO: 1881661
ccuuguuucuaaucuuguu

SEQ ID NO: 2061841 - RNA, 19 nt, Artificial Sequence
  Description of Artificial Sequence: Synthetic oligonucleotide
  Antisense strand to SEQ ID NO: 2061840
aacaagauuagaaacaagg

SEQ ID NO: 2061842 - RNA, 19 nt, Artificial Sequence
  Description of Artificial Sequence: Synthetic oligonucleotide
  Sense strand starting at position 71 of SEQ ID NO: 1881661
ucuuguuugcuccucugua

SEQ ID NO: 2061843 - RNA, 19 nt, Artificial Sequence
  Description of Artificial Sequence: Synthetic oligonucleotide
  Antisense strand to SEQ ID NO: 2061842
uacagaggagcaaacaaga

SEQ ID NO: 2061844 - RNA, 19 nt, Artificial Sequence
  Description of Artificial Sequence: Synthetic oligonucleotide
  Sense strand starting at position 72 of SEQ ID NO: 1881661
cuuguuugcuccucuguau

SEQ ID NO: 2061845 - RNA, 19 nt, Artificial Sequence
  Description of Artificial Sequence: Synthetic oligonucleotide
  Antisense strand to SEQ ID NO: 2061844
auacagaggagcaaacaag

SEQ ID NO: 2061846 - RNA, 19 nt, Artificial Sequence
  Description of Artificial Sequence: Synthetic oligonucleotide
  Sense strand starting at position 75 of SEQ ID NO: 1881661
guuugcuccucuguaugaa

SEQ ID NO: 2061847 - RNA, 19 nt, Artificial Sequence
  Description of Artificial Sequence: Synthetic oligonucleotide
  Antisense strand to SEQ ID NO: 2061846
uucauacagaggagcaaac

SEQ ID NO: 2061848 - RNA, 19 nt, Artificial Sequence
  Description of Artificial Sequence: Synthetic oligonucleotide
  Sense strand starting at position 131 of SEQ ID NO: 1881661
aggucuuaugcuugaugcu

SEQ ID NO: 2061849 - RNA, 19 nt, Artificial Sequence
  Description of Artificial Sequence: Synthetic oligonucleotide
  Antisense strand to SEQ ID NO: 2061848
agcaucaagcauaagaccu

SEQ ID NO: 2061850 - RNA, 19 nt, Artificial Sequence
  Description of Artificial Sequence: Synthetic oligonucleotide
  Sense strand starting at position 132 of SEQ ID NO: 1881661
ggucuuaugcuugaugcuu

SEQ ID NO: 2061851 - RNA, 19 nt, Artificial Sequence
  Description of Artificial Sequence: Synthetic oligonucleotide
  Antisense strand to SEQ ID NO: 2061850
aagcaucaagcauaagacc

SEQ ID NO: 2061852 - RNA, 19 nt, Artificial Sequence
  Description of Artificial Sequence: Synthetic oligonucleotide
  Sense strand starting at position 328 of SEQ ID NO: 1881661
gggcuccuucccugucuaa

SEQ ID NO: 2061853 - RNA, 19 nt, Artificial Sequence
  Description of Artificial Sequence: Synthetic oligonucleotide
  Antisense strand to SEQ ID NO: 2061852
uuagacagggaaggagccc

SEQ ID NO: 2061854 - RNA, 19 nt, Artificial Sequence
  Description of Artificial Sequence: Synthetic oligonucleotide
  Sense strand starting at position 408 of SEQ ID NO: 1881661
ugaccugcuuuggcagaau

SEQ ID NO: 2061855 - RNA, 19 nt, Artificial Sequence
  Description of Artificial Sequence: Synthetic oligonucleotide
  Antisense strand to SEQ ID NO: 2061854
auucugccaaagcagguca

SEQ ID NO: 2061856 - RNA, 19 nt, Artificial Sequence
  Description of Artificial Sequence: Synthetic oligonucleotide
  Sense strand starting at position 411 of SEQ ID NO: 1881661
ccugcuuuggcagaaucaa

SEQ ID NO: 2061857 - RNA, 19 nt, Artificial Sequence
  Description of Artificial Sequence: Synthetic oligonucleotide
  Antisense strand to SEQ ID NO: 2061856
uugauucugccaaagcagg

SEQ ID NO: 2061858 - RNA, 19 nt, Artificial Sequence
  Description of Artificial Sequence: Synthetic oligonucleotide
  Sense strand starting at position 466 of SEQ ID NO: 1881661
cggauucccagucaagguu

SEQ ID NO: 2061859 - RNA, 19 nt, Artificial Sequence
  Description of Artificial Sequence: Synthetic oligonucleotide
  Antisense strand to SEQ ID NO: 2061858
aaccuugacugggaauccg

SEQ ID NO: 2061860 - RNA, 19 nt, Artificial Sequence
  Description of Artificial Sequence: Synthetic oligonucleotide
  Sense strand starting at position 538 of SEQ ID NO: 1881661
gccucaaacucagugcuua

SEQ ID NO: 2061861 - RNA, 19 nt, Artificial Sequence
  Description of Artificial Sequence: Synthetic oligonucleotide
  Antisense strand to SEQ ID NO: 2061860
uaagcacugaguuugaggc

SEQ ID NO: 2061862 - RNA, 19 nt, Artificial Sequence
  Description of Artificial Sequence: Synthetic oligonucleotide
  Sense strand starting at position 1023 of SEQ ID NO: 1881661
gagagugagucaucucaca

SEQ ID NO: 2061863 - RNA, 19 nt, Artificial Sequence
  Description of Artificial Sequence: Synthetic oligonucleotide
  Antisense strand to SEQ ID NO: 2061862
ugugagaugacucacucuc

SEQ ID NO: 2061864 - RNA, 19 nt, Artificial Sequence
  Description of Artificial Sequence: Synthetic oligonucleotide
  Sense strand starting at position 1028 of SEQ ID NO: 1881661
ugagucaucucacacagug

SEQ ID NO: 2061865 - RNA, 19 nt, Artificial Sequence
  Description of Artificial Sequence: Synthetic oligonucleotide
  Antisense strand to SEQ ID NO: 2061864
cacugugugagaugacuca

SEQ ID NO: 2061866 - RNA, 19 nt, Artificial Sequence
  Description of Artificial Sequence: Synthetic oligonucleotide
  Sense strand starting at position 1657 of SEQ ID NO: 1881661
aaagauguggcuuauacac

SEQ ID NO: 2061867 - RNA, 19 nt, Artificial Sequence
  Description of Artificial Sequence: Synthetic oligonucleotide
  Antisense strand to SEQ ID NO: 2061866
guguauaagccacaucuuu

SEQ ID NO: 2061868 - RNA, 19 nt, Artificial Sequence
  Description of Artificial Sequence: Synthetic oligonucleotide
  Sense strand starting at position 1668 of SEQ ID NO: 1881661
uuauacacgcaaugaaaua

SEQ ID NO: 2061869 - RNA, 19 nt, Artificial Sequence
  Description of Artificial Sequence: Synthetic oligonucleotide
  Antisense strand to SEQ ID NO: 2061868
uauuucauugcguguauaa

SEQ ID NO: 2061870 - RNA, 19 nt, Artificial Sequence
  Description of Artificial Sequence: Synthetic oligonucleotide
  Sense strand starting at position 1706 of SEQ ID NO: 1881661
aaugucuugucagaugcua

SEQ ID NO: 2061871 - RNA, 19 nt, Artificial Sequence
  Description of Artificial Sequence: Synthetic oligonucleotide
  Antisense strand to SEQ ID NO: 2061870
uagcaucugacaagacauu

SEQ ID NO: 2061872 - RNA, 19 nt, Artificial Sequence
  Description of Artificial Sequence: Synthetic oligonucleotide
  Sense strand starting at position 1778 of SEQ ID NO: 1881661
gugacaaugcaugauucca

SEQ ID NO: 2061873 - RNA, 19 nt, Artificial Sequence
  Description of Artificial Sequence: Synthetic oligonucleotide
  Antisense strand to SEQ ID NO: 2061872
uggaaucaugcauugucac

SEQ ID NO: 2061874 - RNA, 19 nt, Artificial Sequence
  Description of Artificial Sequence: Synthetic oligonucleotide
  Sense strand starting at position 1886 of SEQ ID NO: 1881661
gccagagaucgaggguuau

SEQ ID NO: 2061875 - RNA, 19 nt, Artificial Sequence
  Description of Artificial Sequence: Synthetic oligonucleotide
  Antisense strand to SEQ ID NO: 2061874
auaacccucgaucucuggc

SEQ ID NO: 2061876 - RNA, 19 nt, Artificial Sequence
  Description of Artificial Sequence: Synthetic oligonucleotide
  Sense strand starting at position 1896 of SEQ ID NO: 1881661
gaggguuauuuagaauaag

SEQ ID NO: 2061877 - RNA, 19 nt, Artificial Sequence
  Description of Artificial Sequence: Synthetic oligonucleotide
  Antisense strand to SEQ ID NO: 2061876
cuuauucuaaauaacccuc

SEQ ID NO: 2061878 - RNA, 19 nt, Artificial Sequence
  Description of Artificial Sequence: Synthetic oligonucleotide
  Sense strand starting at position 1986 of SEQ ID NO: 1881661
cuuggucuuacugaggauu

SEQ ID NO: 2061879 - RNA, 19 nt, Artificial Sequence
  Description of Artificial Sequence: Synthetic oligonucleotide
  Antisense strand to SEQ ID NO: 2061878
aauccucaguaagaccaag

SEQ ID NO: 2061880 - RNA, 19 nt, Artificial Sequence
  Description of Artificial Sequence: Synthetic oligonucleotide
  Sense strand starting at position 1988 of SEQ ID NO: 1881661
uggucuuacugaggauucu

SEQ ID NO: 2061881 - RNA, 19 nt, Artificial Sequence
  Description of Artificial Sequence: Synthetic oligonucleotide
  Antisense strand to SEQ ID NO: 2061880
agaauccucaguaagacca

SEQ ID NO: 2061882 - RNA, 19 nt, Artificial Sequence
  Description of Artificial Sequence: Synthetic oligonucleotide
  Sense strand starting at position 1994 of SEQ ID NO: 1881661
uacugaggauucugaagca

SEQ ID NO: 2061883 - RNA, 19 nt, Artificial Sequence
  Description of Artificial Sequence: Synthetic oligonucleotide
  Antisense strand to SEQ ID NO: 2061882
ugcuucagaauccucagua

SEQ ID NO: 2061884 - RNA, 19 nt, Artificial Sequence
  Description of Artificial Sequence: Synthetic oligonucleotide
  Sense strand starting at position 2007 of SEQ ID NO: 1881661
gaagcaguucuguaaccuc

SEQ ID NO: 2061885 - RNA, 19 nt, Artificial Sequence
  Description of Artificial Sequence: Synthetic oligonucleotide
  Antisense strand to SEQ ID NO: 2061884
gagguuacagaacugcuuc

SEQ ID NO: 2061886 - RNA, 19 nt, Artificial Sequence
  Description of Artificial Sequence: Synthetic oligonucleotide
  Sense strand starting at position 2231 of SEQ ID NO: 1881661
uggaaacuguucccagguu

SEQ ID NO: 2061887 - RNA, 19 nt, Artificial Sequence
  Description of Artificial Sequence: Synthetic oligonucleotide
  Antisense strand to SEQ ID NO: 2061886
aaccugggaacaguuucca

SEQ ID NO: 2061888 - RNA, 19 nt, Artificial Sequence
  Description of Artificial Sequence: Synthetic oligonucleotide
  Sense strand starting at position 2528 of SEQ ID NO: 1881661
aggagaucuuuaccugcca

SEQ ID NO: 2061889 - RNA, 19 nt, Artificial Sequence
  Description of Artificial Sequence: Synthetic oligonucleotide
  Antisense strand to SEQ ID NO: 2061888
uggcagguaaagaucuccu

SEQ ID NO: 2061890 - RNA, 19 nt, Artificial Sequence
  Description of Artificial Sequence: Synthetic oligonucleotide
  Sense strand starting at position 2529 of SEQ ID NO: 1881661
ggagaucuuuaccugccaa

SEQ ID NO: 2061891 - RNA, 19 nt, Artificial Sequence
  Description of Artificial Sequence: Synthetic oligonucleotide
  Antisense strand to SEQ ID NO: 2061890
uuggcagguaaagaucucc

SEQ ID NO: 2061892 - RNA, 19 nt, Artificial Sequence
  Description of Artificial Sequence: Synthetic oligonucleotide
  Sense strand starting at position 2659 of SEQ ID NO: 1881661
uuaacaugugacuggaagu

SEQ ID NO: 2061893 - RNA, 19 nt, Artificial Sequence
  Description of Artificial Sequence: Synthetic oligonucleotide
  Antisense strand to SEQ ID NO: 2061892
acuuccagucacauguuaa

SEQ ID NO: 2061894 - RNA, 19 nt, Artificial Sequence
  Description of Artificial Sequence: Synthetic oligonucleotide
  Sense strand starting at position 2669 of SEQ ID NO: 1881661
acuggaaguuuguaucaaa

SEQ ID NO: 2061895 - RNA, 19 nt, Artificial Sequence
  Description of Artificial Sequence: Synthetic oligonucleotide
  Antisense strand to SEQ ID NO: 2061894
uuugauacaaacuuccagu

SEQ ID NO: 2061896 - RNA, 19 nt, Artificial Sequence
  Description of Artificial Sequence: Synthetic oligonucleotide
  Sense strand starting at position 2709 of SEQ ID NO: 1881661
gaauaaagcucuccagagu

SEQ ID NO: 2061897 - RNA, 19 nt, Artificial Sequence
  Description of Artificial Sequence: Synthetic oligonucleotide
  Antisense strand to SEQ ID NO: 2061896
acucuggagagcuuuauuc

SEQ ID NO: 2061898 - RNA, 19 nt, Artificial Sequence
  Description of Artificial Sequence: Synthetic oligonucleotide
  Sense strand starting at position 2743 of SEQ ID NO: 1881661
aaguuacuguuuguggaua

SEQ ID NO: 2061899 - RNA, 19 nt, Artificial Sequence
  Description of Artificial Sequence: Synthetic oligonucleotide
  Antisense strand to SEQ ID NO: 2061898
uauccacaaacaguaacuu

SEQ ID NO: 2061900 - RNA, 19 nt, Artificial Sequence
  Description of Artificial Sequence: Synthetic oligonucleotide
  Sense strand starting at position 2744 of SEQ ID NO: 1881661
aguuacuguuuguggauaa

SEQ ID NO: 2061901 - RNA, 19 nt, Artificial Sequence
  Description of Artificial Sequence: Synthetic oligonucleotide
  Antisense strand to SEQ ID NO: 2061900
uuauccacaaacaguaacu

SEQ ID NO: 2061902 - RNA, 19 nt, Artificial Sequence
  Description of Artificial Sequence: Synthetic oligonucleotide
  Sense strand starting at position 2745 of SEQ ID NO: 1881661
guuacuguuuguggauaau

SEQ ID NO: 2061903 - RNA, 19 nt, Artificial Sequence
  Description of Artificial Sequence: Synthetic oligonucleotide
  Antisense strand to SEQ ID NO: 2061902
auuauccacaaacaguaac

SEQ ID NO: 2061904 - RNA, 19 nt, Artificial Sequence
  Description of Artificial Sequence: Synthetic oligonucleotide
  Sense strand starting at position 2748 of SEQ ID NO: 1881661
acuguuuguggauaauauc

SEQ ID NO: 2061905 - RNA, 19 nt, Artificial Sequence
  Description of Artificial Sequence: Synthetic oligonucleotide
  Antisense strand to SEQ ID NO: 2061904
gauauuauccacaaacagu

SEQ ID NO: 2061906 - RNA, 19 nt, Artificial Sequence
  Description of Artificial Sequence: Synthetic oligonucleotide
  Sense strand starting at position 2756 of SEQ ID NO: 1881661
uggauaauaucaucaugca

SEQ ID NO: 2061907 - RNA, 19 nt, Artificial Sequence
  Description of Artificial Sequence: Synthetic oligonucleotide
  Antisense strand to SEQ ID NO: 2061906
ugcaugaugauauuaucca

SEQ ID NO: 2061908 - RNA, 19 nt, Artificial Sequence
  Description of Artificial Sequence: Synthetic oligonucleotide
  Sense strand starting at position 2860 of SEQ ID NO: 1881661
uauagaugcuuguugggau

SEQ ID NO: 2061909 - RNA, 19 nt, Artificial Sequence
  Description of Artificial Sequence: Synthetic oligonucleotide
  Antisense strand to SEQ ID NO: 2061908
aucccaacaagcaucuaua

SEQ ID NO: 2061910 - RNA, 19 nt, Artificial Sequence
  Description of Artificial Sequence: Synthetic oligonucleotide
  Sense strand starting at position 2905 of SEQ ID NO: 1881661
cucuauugcccaggcuuau

SEQ ID NO: 2061911 - RNA, 19 nt, Artificial Sequence
  Description of Artificial Sequence: Synthetic oligonucleotide
  Antisense strand to SEQ ID NO: 2061910
auaagccugggcaauagag

SEQ ID NO: 2061912 - RNA, 19 nt, Artificial Sequence
  Description of Artificial Sequence: Synthetic oligonucleotide
  Sense strand starting at position 3369 of SEQ ID NO: 1881661
agcaaucaaucuugagaaa

SEQ ID NO: 2061913 - RNA, 19 nt, Artificial Sequence
  Description of Artificial Sequence: Synthetic oligonucleotide
  Antisense strand to SEQ ID NO: 2061912
uuucucaagauugauugcu

SEQ ID NO: 2061914 - RNA, 19 nt, Artificial Sequence
  Description of Artificial Sequence: Synthetic oligonucleotide
  Sense strand starting at position 3824 of SEQ ID NO: 1881661
ugauauuggucucggcaau

SEQ ID NO: 2061915 - RNA, 19 nt, Artificial Sequence
  Description of Artificial Sequence: Synthetic oligonucleotide
  Antisense strand to SEQ ID NO: 2061914
auugccgagaccaauauca

SEQ ID NO: 2061916 - RNA, 19 nt, Artificial Sequence
  Description of Artificial Sequence: Synthetic oligonucleotide
  Sense strand starting at position 3825 of SEQ ID NO: 1881661
gauauuggucucggcaaua

SEQ ID NO: 2061917 - RNA, 19 nt, Artificial Sequence
  Description of Artificial Sequence: Synthetic oligonucleotide
  Antisense strand to SEQ ID NO: 2061916
uauugccgagaccaauauc

SEQ ID NO: 2061918 - RNA, 19 nt, Artificial Sequence
  Description of Artificial Sequence: Synthetic oligonucleotide
  Sense strand starting at position 3896 of SEQ ID NO: 1881661
gugagacugcaucaaagua

SEQ ID NO: 2061919 - RNA, 19 nt, Artificial Sequence
  Description of Artificial Sequence: Synthetic oligonucleotide
  Antisense strand to SEQ ID NO: 2061918
uacuuugaugcagucucac

SEQ ID NO: 2061920 - RNA, 19 nt, Artificial Sequence
  Description of Artificial Sequence: Synthetic oligonucleotide
  Sense strand starting at position 721 of SEQ ID NO: 1881662
aaaugucuucuuugggauu

SEQ ID NO: 2061921 - RNA, 19 nt, Artificial Sequence
  Description of Artificial Sequence: Synthetic oligonucleotide
  Antisense strand to SEQ ID NO: 2061920
aaucccaaagaagacauuu

SEQ ID NO: 2061922 - RNA, 19 nt, Artificial Sequence
  Description of Artificial Sequence: Synthetic oligonucleotide
  Sense strand starting at position 1255 of SEQ ID NO: 1881662
ggucgagugcuagaaagca

SEQ ID NO: 2061923 - RNA, 19 nt, Artificial Sequence
  Description of Artificial Sequence: Synthetic oligonucleotide
  Antisense strand to SEQ ID NO: 2061922
ugcuuucuagcacucgacc

SEQ ID NO: 2061924 - RNA, 19 nt, Artificial Sequence
  Description of Artificial Sequence: Synthetic oligonucleotide
  Sense strand starting at position 1604 of SEQ ID NO: 1881662
aggccuagcgucgauaauu

SEQ ID NO: 2061925 - RNA, 19 nt, Artificial Sequence
  Description of Artificial Sequence: Synthetic oligonucleotide
  Antisense strand to SEQ ID NO: 2061924
aauuaucgacgcuaggccu

SEQ ID NO: 2061926 - RNA, 19 nt, Artificial Sequence
  Description of Artificial Sequence: Synthetic oligonucleotide
  Sense strand starting at position 1605 of SEQ ID NO: 1881662
ggccuagcgucgauaauug

SEQ ID NO: 2061927 - RNA, 19 nt, Artificial Sequence
  Description of Artificial Sequence: Synthetic oligonucleotide
  Antisense strand to SEQ ID NO: 2061926
caauuaucgacgcuaggcc

SEQ ID NO: 2061928 - RNA, 19 nt, Artificial Sequence
  Description of Artificial Sequence: Synthetic oligonucleotide
  Sense strand starting at position 1614 of SEQ ID NO: 1881662
ucgauaauugcacacggga

SEQ ID NO: 2061929 - RNA, 19 nt, Artificial Sequence
  Description of Artificial Sequence: Synthetic oligonucleotide
  Antisense strand to SEQ ID NO: 2061928
ucccgugugcaauuaucga

SEQ ID NO: 2061930 - RNA, 19 nt, Artificial Sequence
  Description of Artificial Sequence: Synthetic oligonucleotide
  Sense strand starting at position 1616 of SEQ ID NO: 1881662
gauaauugcacacgggagu

SEQ ID NO: 2061931 - RNA, 19 nt, Artificial Sequence
  Description of Artificial Sequence: Synthetic oligonucleotide
  Antisense strand to SEQ ID NO: 2061930
acucccgugugcaauuauc

SEQ ID NO: 2061932 - RNA, 19 nt, Artificial Sequence
  Description of Artificial Sequence: Synthetic oligonucleotide
  Sense strand starting at position 1650 of SEQ ID NO: 1881662
ggaguacacguuugaauua

SEQ ID NO: 2061933 - RNA, 19 nt, Artificial Sequence
  Description of Artificial Sequence: Synthetic oligonucleotide
  Antisense strand to SEQ ID NO: 2061932
uaauucaaacguguacucc

SEQ ID NO: 2061934 - RNA, 19 nt, Artificial Sequence
  Description of Artificial Sequence: Synthetic oligonucleotide
  Sense strand starting at position 1661 of SEQ ID NO: 1881662
uugaauuaaugacuccgaa

SEQ ID NO: 2061935 - RNA, 19 nt, Artificial Sequence
  Description of Artificial Sequence: Synthetic oligonucleotide
  Antisense strand to SEQ ID NO: 2061934
uucggagucauuaauucaa

SEQ ID NO: 2061936 - RNA, 19 nt, Artificial Sequence
  Description of Artificial Sequence: Synthetic oligonucleotide
  Sense strand starting at position 2320 of SEQ ID NO: 1881662
cuggaaauauaacaguaau

SEQ ID NO: 2061937 - RNA, 19 nt, Artificial Sequence
  Description of Artificial Sequence: Synthetic oligonucleotide
  Antisense strand to SEQ ID NO: 2061936
auuacuguuauauuuccag

SEQ ID NO: 2061938 - RNA, 19 nt, Artificial Sequence
  Description of Artificial Sequence: Synthetic oligonucleotide
  Sense strand starting at position 2399 of SEQ ID NO: 1881662
ggagccugucuccaugaga

SEQ ID NO: 2061939 - RNA, 19 nt, Artificial Sequence
  Description of Artificial Sequence: Synthetic oligonucleotide
  Antisense strand to SEQ ID NO: 2061938
ucucauggagacaggcucc

SEQ ID NO: 2061940 - RNA, 19 nt, Artificial Sequence
  Description of Artificial Sequence: Synthetic oligonucleotide
  Sense strand starting at position 2402 of SEQ ID NO: 1881662
gccugucuccaugagagua

SEQ ID NO: 2061941 - RNA, 19 nt, Artificial Sequence
  Description of Artificial Sequence: Synthetic oligonucleotide
  Antisense strand to SEQ ID NO: 2061940
uacucucauggagacaggc

SEQ ID NO: 2061942 - RNA, 19 nt, Artificial Sequence
  Description of Artificial Sequence: Synthetic oligonucleotide
  Sense strand starting at position 2421 of SEQ ID NO: 1881662
gggacucugugucuucgau

SEQ ID NO: 2061943 - RNA, 19 nt, Artificial Sequence
  Description of Artificial Sequence: Synthetic oligonucleotide
  Antisense strand to SEQ ID NO: 2061942
aucgaagacacagaguccc

SEQ ID NO: 2061944 - RNA, 19 nt, Artificial Sequence
  Description of Artificial Sequence: Synthetic oligonucleotide
  Sense strand starting at position 2469 of SEQ ID NO: 1881662
gugacuaucccauaaaguc

SEQ ID NO: 2061945 - RNA, 19 nt, Artificial Sequence
  Description of Artificial Sequence: Synthetic oligonucleotide
  Antisense strand to SEQ ID NO: 2061944
gacuuuaugggauagucac

SEQ ID NO: 2061946 - RNA, 19 nt, Artificial Sequence
  Description of Artificial Sequence: Synthetic oligonucleotide
  Sense strand starting at position 2484 of SEQ ID NO: 1881662
agucaacacuuagugaaua

SEQ ID NO: 2061947 - RNA, 19 nt, Artificial Sequence
  Description of Artificial Sequence: Synthetic oligonucleotide
  Antisense strand to SEQ ID NO: 2061946
uauucacuaaguguugacu

SEQ ID NO: 2061948 - RNA, 19 nt, Artificial Sequence
  Description of Artificial Sequence: Synthetic oligonucleotide
  Sense strand starting at position 2504 of SEQ ID NO: 1881662
acaaaugagugagugagua

SEQ ID NO: 2061949 - RNA, 19 nt, Artificial Sequence
  Description of Artificial Sequence: Synthetic oligonucleotide
  Antisense strand to SEQ ID NO: 2061948
uacucacucacucauuugu

SEQ ID NO: 2061950 - RNA, 19 nt, Artificial Sequence
  Description of Artificial Sequence: Synthetic oligonucleotide
  Sense strand starting at position 2508 of SEQ ID NO: 1881662
augagugagugaguaauau

SEQ ID NO: 2061951 - RNA, 19 nt, Artificial Sequence
  Description of Artificial Sequence: Synthetic oligonucleotide
  Antisense strand to SEQ ID NO: 2061950
auauuacucacucacucau

SEQ ID NO: 2061952 - RNA, 19 nt, Artificial Sequence
  Description of Artificial Sequence: Synthetic oligonucleotide
  Sense strand starting at position 2583 of SEQ ID NO: 1881662
gcucuuuaacacggagaga

SEQ ID NO: 2061953 - RNA, 19 nt, Artificial Sequence
  Description of Artificial Sequence: Synthetic oligonucleotide
  Antisense strand to SEQ ID NO: 2061952
ucucuccguguuaaagagc

SEQ ID NO: 2061954 - RNA, 19 nt, Artificial Sequence
  Description of Artificial Sequence: Synthetic oligonucleotide
  Sense strand starting at position 2610 of SEQ ID NO: 1881662
auggaaugcaucugagauu

SEQ ID NO: 2061955 - RNA, 19 nt, Artificial Sequence
  Description of Artificial Sequence: Synthetic oligonucleotide
  Antisense strand to SEQ ID NO: 2061954
aaucucagaugcauuccau

SEQ ID NO: 2061956 - RNA, 19 nt, Artificial Sequence
  Description of Artificial Sequence: Synthetic oligonucleotide
  Sense strand starting at position 2611 of SEQ ID NO: 1881662
uggaaugcaucugagauuu

SEQ ID NO: 2061957 - RNA, 19 nt, Artificial Sequence
  Description of Artificial Sequence: Synthetic oligonucleotide
  Antisense strand to SEQ ID NO: 2061956
aaaucucagaugcauucca

SEQ ID NO: 2061958 - RNA, 19 nt, Artificial Sequence
  Description of Artificial Sequence: Synthetic oligonucleotide
  Sense strand starting at position 2712 of SEQ ID NO: 1881662
cacacaguucgauggaaau

SEQ ID NO: 2061959 - RNA, 19 nt, Artificial Sequence
  Description of Artificial Sequence: Synthetic oligonucleotide
  Antisense strand to SEQ ID NO: 2061958
auuuccaucgaacugugug

SEQ ID NO: 2061960 - RNA, 19 nt, Artificial Sequence
  Description of Artificial Sequence: Synthetic oligonucleotide
  Sense strand starting at position 2781 of SEQ ID NO: 1881662
ccuacuauaucugugcaga

SEQ ID NO: 2061961 - RNA, 19 nt, Artificial Sequence
  Description of Artificial Sequence: Synthetic oligonucleotide
  Antisense strand to SEQ ID NO: 2061960
ucugcacagauauaguagg

SEQ ID NO: 2061962 - RNA, 19 nt, Artificial Sequence
  Description of Artificial Sequence: Synthetic oligonucleotide
  Sense strand starting at position 2782 of SEQ ID NO: 1881662
cuacuauaucugugcagaa

SEQ ID NO: 2061963 - RNA, 19 nt, Artificial Sequence
  Description of Artificial Sequence: Synthetic oligonucleotide
  Antisense strand to SEQ ID NO: 2061962
uucugcacagauauaguag

SEQ ID NO: 2061964 - RNA, 19 nt, Artificial Sequence
  Description of Artificial Sequence: Synthetic oligonucleotide
  Sense strand starting at position 2783 of SEQ ID NO: 1881662
uacuauaucugugcagaag

SEQ ID NO: 2061965 - RNA, 19 nt, Artificial Sequence
  Description of Artificial Sequence: Synthetic oligonucleotide
  Antisense strand to SEQ ID NO: 2061964
cuucugcacagauauagua

SEQ ID NO: 2061966 - RNA, 19 nt, Artificial Sequence
  Description of Artificial Sequence: Synthetic oligonucleotide
  Sense strand starting at position 2784 of SEQ ID NO: 1881662
acuauaucugugcagaaga

SEQ ID NO: 2061967 - RNA, 19 nt, Artificial Sequence
  Description of Artificial Sequence: Synthetic oligonucleotide
  Antisense strand to SEQ ID NO: 2061966
ucuucugcacagauauagu

SEQ ID NO: 2061968 - RNA, 19 nt, Artificial Sequence
  Description of Artificial Sequence: Synthetic oligonucleotide
  Sense strand starting at position 2795 of SEQ ID NO: 1881662
gcagaagagcccugaguua

SEQ ID NO: 2061969 - RNA, 19 nt, Artificial Sequence
  Description of Artificial Sequence: Synthetic oligonucleotide
  Antisense strand to SEQ ID NO: 2061968
uaacucagggcucuucugc

SEQ ID NO: 2061970 - RNA, 19 nt, Artificial Sequence
  Description of Artificial Sequence: Synthetic oligonucleotide
  Sense strand starting at position 2866 of SEQ ID NO: 1881662
uaaggaguuucucuaggcu

SEQ ID NO: 2061971 - RNA, 19 nt, Artificial Sequence
  Description of Artificial Sequence: Synthetic oligonucleotide
  Antisense strand to SEQ ID NO: 2061970
agccuagagaaacuccuua

SEQ ID NO: 2061972 - RNA, 19 nt, Artificial Sequence
  Description of Artificial Sequence: Synthetic oligonucleotide
  Sense strand starting at position 3175 of SEQ ID NO: 1881662
guuuaccuuccuggaggau

SEQ ID NO: 2061973 - RNA, 19 nt, Artificial Sequence
  Description of Artificial Sequence: Synthetic oligonucleotide
  Antisense strand to SEQ ID NO: 2061972
auccuccaggaagguaaac

SEQ ID NO: 2061974 - RNA, 19 nt, Artificial Sequence
  Description of Artificial Sequence: Synthetic oligonucleotide
  Sense strand starting at position 3379 of SEQ ID NO: 1881662
ccaagugccuugguacaaa

SEQ ID NO: 2061975 - RNA, 19 nt, Artificial Sequence
  Description of Artificial Sequence: Synthetic oligonucleotide
  Antisense strand to SEQ ID NO: 2061974
uuuguaccaaggcacuugg

SEQ ID NO: 2061976 - RNA, 19 nt, Artificial Sequence
  Description of Artificial Sequence: Synthetic oligonucleotide
  Sense strand starting at position 3405 of SEQ ID NO: 1881662
cugcauucuuuggcuagga

SEQ ID NO: 2061977 - RNA, 19 nt, Artificial Sequence
  Description of Artificial Sequence: Synthetic oligonucleotide
  Antisense strand to SEQ ID NO: 2061976
uccuagccaaagaaugcag

SEQ ID NO: 2061978 - RNA, 19 nt, Artificial Sequence
  Description of Artificial Sequence: Synthetic oligonucleotide
  Sense strand starting at position 3406 of SEQ ID NO: 1881662
ugcauucuuuggcuaggau

SEQ ID NO: 2061979 - RNA, 19 nt, Artificial Sequence
  Description of Artificial Sequence: Synthetic oligonucleotide
  Antisense strand to SEQ ID NO: 2061978
auccuagccaaagaaugca

SEQ ID NO: 2061980 - RNA, 19 nt, Artificial Sequence
  Description of Artificial Sequence: Synthetic oligonucleotide
  Sense strand starting at position 3407 of SEQ ID NO: 1881662
gcauucuuuggcuaggauc

SEQ ID NO: 2061981 - RNA, 19 nt, Artificial Sequence
  Description of Artificial Sequence: Synthetic oligonucleotide
  Antisense strand to SEQ ID NO: 2061980
gauccuagccaaagaaugc

SEQ ID NO: 2061982 - RNA, 19 nt, Artificial Sequence
  Description of Artificial Sequence: Synthetic oligonucleotide
  Sense strand starting at position 3467 of SEQ ID NO: 1881662
gcuguuguuuagcuagaca

SEQ ID NO: 2061983 - RNA, 19 nt, Artificial Sequence
  Description of Artificial Sequence: Synthetic oligonucleotide
  Antisense strand to SEQ ID NO: 2061982
ugucuagcuaaacaacagc

SEQ ID NO: 2061984 - RNA, 19 nt, Artificial Sequence
  Description of Artificial Sequence: Synthetic oligonucleotide
  Sense strand starting at position 3470 of SEQ ID NO: 1881662
guuguuuagcuagacagca

SEQ ID NO: 2061985 - RNA, 19 nt, Artificial Sequence
  Description of Artificial Sequence: Synthetic oligonucleotide
  Antisense strand to SEQ ID NO: 2061984
ugcugucuagcuaaacaac

SEQ ID NO: 2061986 - RNA, 19 nt, Artificial Sequence
  Description of Artificial Sequence: Synthetic oligonucleotide
  Sense strand starting at position 3488 of SEQ ID NO: 1881662
acaacagaguuuguggaaa

SEQ ID NO: 2061987 - RNA, 19 nt, Artificial Sequence
  Description of Artificial Sequence: Synthetic oligonucleotide
  Antisense strand to SEQ ID NO: 2061986
uuuccacaaacucuguugu

SEQ ID NO: 2061988 - RNA, 19 nt, Artificial Sequence
  Description of Artificial Sequence: Synthetic oligonucleotide
  Sense strand starting at position 3518 of SEQ ID NO: 1881662
agguuuaguucauucguuu

SEQ ID NO: 2061989 - RNA, 19 nt, Artificial Sequence
  Description of Artificial Sequence: Synthetic oligonucleotide
  Antisense strand to SEQ ID NO: 2061988
aaacgaaugaacuaaaccu

SEQ ID NO: 2061990 - RNA, 19 nt, Artificial Sequence
  Description of Artificial Sequence: Synthetic oligonucleotide
  Sense strand starting at position 3533 of SEQ ID NO: 1881662
guuugcugacccugugauu

SEQ ID NO: 2061991 - RNA, 19 nt, Artificial Sequence
  Description of Artificial Sequence: Synthetic oligonucleotide
  Antisense strand to SEQ ID NO: 2061990
aaucacagggucagcaaac

SEQ ID NO: 2061992 - RNA, 19 nt, Artificial Sequence
  Description of Artificial Sequence: Synthetic oligonucleotide
  Sense strand starting at position 3658 of SEQ ID NO: 1881662
ucuccuagguaugaaagaa

SEQ ID NO: 2061993 - RNA, 19 nt, Artificial Sequence
  Description of Artificial Sequence: Synthetic oligonucleotide
  Antisense strand to SEQ ID NO: 2061992
uucuuucauaccuaggaga

SEQ ID NO: 2061994 - RNA, 19 nt, Artificial Sequence
  Description of Artificial Sequence: Synthetic oligonucleotide
  Sense strand starting at position 3854 of SEQ ID NO: 1881662
guaaauaauuucugcauga

SEQ ID NO: 2061995 - RNA, 19 nt, Artificial Sequence
  Description of Artificial Sequence: Synthetic oligonucleotide
  Antisense strand to SEQ ID NO: 2061994
ucaugcagaaauuauuuac

SEQ ID NO: 2061996 - RNA, 19 nt, Artificial Sequence
  Description of Artificial Sequence: Synthetic oligonucleotide
  Sense strand starting at position 3892 of SEQ ID NO: 1881662
ugaaguugucuuggguaga

SEQ ID NO: 2061997 - RNA, 19 nt, Artificial Sequence
  Description of Artificial Sequence: Synthetic oligonucleotide
  Antisense strand to SEQ ID NO: 2061996
ucuacccaagacaacuuca

SEQ ID NO: 2061998 - RNA, 19 nt, Artificial Sequence
  Description of Artificial Sequence: Synthetic oligonucleotide
  Sense strand starting at position 3953 of SEQ ID NO: 1881662
ugcuccuuacaugaugaaa

SEQ ID NO: 2061999 - RNA, 19 nt, Artificial Sequence
  Description of Artificial Sequence: Synthetic oligonucleotide
  Antisense strand to SEQ ID NO: 2061998
uuucaucauguaaggagca

SEQ ID NO: 2062000 - RNA, 19 nt, Artificial Sequence
  Description of Artificial Sequence: Synthetic oligonucleotide
  Sense strand starting at position 213 of SEQ ID NO: 1881663
acauaauguccuggaguuu

SEQ ID NO: 2062001 - RNA, 19 nt, Artificial Sequence
  Description of Artificial Sequence: Synthetic oligonucleotide
  Antisense strand to SEQ ID NO: 2062000
aaacuccaggacauuaugu

SEQ ID NO: 2062002 - RNA, 19 nt, Artificial Sequence
  Description of Artificial Sequence: Synthetic oligonucleotide
  Sense strand starting at position 224 of SEQ ID NO: 1881663
uggaguuucccuuguagac

SEQ ID NO: 2062003 - RNA, 19 nt, Artificial Sequence
  Description of Artificial Sequence: Synthetic oligonucleotide
  Antisense strand to SEQ ID NO: 2062002
gucuacaagggaaacucca

SEQ ID NO: 2062004 - RNA, 19 nt, Artificial Sequence
  Description of Artificial Sequence: Synthetic oligonucleotide
  Sense strand starting at position 228 of SEQ ID NO: 1881663
guuucccuuguagacaaau

SEQ ID NO: 2062005 - RNA, 19 nt, Artificial Sequence
  Description of Artificial Sequence: Synthetic oligonucleotide
  Antisense strand to SEQ ID NO: 2062004
auuugucuacaagggaaac

SEQ ID NO: 2062006 - RNA, 19 nt, Artificial Sequence
  Description of Artificial Sequence: Synthetic oligonucleotide
  Sense strand starting at position 239 of SEQ ID NO: 1881663
agacaaauacuuuggucau

SEQ ID NO: 2062007 - RNA, 19 nt, Artificial Sequence
  Description of Artificial Sequence: Synthetic oligonucleotide
  Antisense strand to SEQ ID NO: 2062006
augaccaaaguauuugucu

SEQ ID NO: 2062008 - RNA, 19 nt, Artificial Sequence
  Description of Artificial Sequence: Synthetic oligonucleotide
  Sense strand starting at position 253 of SEQ ID NO: 1881663
gucauuuauuuguaaucag

SEQ ID NO: 2062009 - RNA, 19 nt, Artificial Sequence
  Description of Artificial Sequence: Synthetic oligonucleotide
  Antisense strand to SEQ ID NO: 2062008
cugauuacaaauaaaugac

SEQ ID NO: 2062010 - RNA, 19 nt, Artificial Sequence
  Description of Artificial Sequence: Synthetic oligonucleotide
  Sense strand starting at position 283 of SEQ ID NO: 1881663
agcagauuacagcacuuau

SEQ ID NO: 2062011 - RNA, 19 nt, Artificial Sequence
  Description of Artificial Sequence: Synthetic oligonucleotide
  Antisense strand to SEQ ID NO: 2062010
auaagugcuguaaucugcu

SEQ ID NO: 2062012 - RNA, 19 nt, Artificial Sequence
  Description of Artificial Sequence: Synthetic oligonucleotide
  Sense strand starting at position 362 of SEQ ID NO: 1881663
gguugugauucuucugaaa

SEQ ID NO: 2062013 - RNA, 19 nt, Artificial Sequence
  Description of Artificial Sequence: Synthetic oligonucleotide
  Antisense strand to SEQ ID NO: 2062012
uuucagaagaaucacaacc

SEQ ID NO: 2062014 - RNA, 19 nt, Artificial Sequence
  Description of Artificial Sequence: Synthetic oligonucleotide
  Sense strand starting at position 423 of SEQ ID NO: 1881663
ccuggcauguaaucaggaa

SEQ ID NO: 2062015 - RNA, 19 nt, Artificial Sequence
  Description of Artificial Sequence: Synthetic oligonucleotide
  Antisense strand to SEQ ID NO: 2062014
uuccugauuacaugccagg

SEQ ID NO: 2062016 - RNA, 19 nt, Artificial Sequence
  Description of Artificial Sequence: Synthetic oligonucleotide
  Sense strand starting at position 459 of SEQ ID NO: 1881663
aguuacaaccuccagucau

SEQ ID NO: 2062017 - RNA, 19 nt, Artificial Sequence
  Description of Artificial Sequence: Synthetic oligonucleotide
  Antisense strand to SEQ ID NO: 2062016
augacuggagguuguaacu

SEQ ID NO: 2062018 - RNA, 19 nt, Artificial Sequence
  Description of Artificial Sequence: Synthetic oligonucleotide
  Sense strand starting at position 1052 of SEQ ID NO: 1881663
uaaugauggcuccaaguua

SEQ ID NO: 2062019 - RNA, 19 nt, Artificial Sequence
  Description of Artificial Sequence: Synthetic oligonucleotide
  Antisense strand to SEQ ID NO: 2062018
uaacuuggagccaucauua

SEQ ID NO: 2062020 - RNA, 19 nt, Artificial Sequence
  Description of Artificial Sequence: Synthetic oligonucleotide
  Sense strand starting at position 1079 of SEQ ID NO: 1881663
agcaguguaguguaaauaa

SEQ ID NO: 2062021 - RNA, 19 nt, Artificial Sequence
  Description of Artificial Sequence: Synthetic oligonucleotide
  Antisense strand to SEQ ID NO: 2062020
uuauuuacacuacacugcu

SEQ ID NO: 2062022 - RNA, 19 nt, Artificial Sequence
  Description of Artificial Sequence: Synthetic oligonucleotide
  Sense strand starting at position 1216 of SEQ ID NO: 1881663
cgaagaaaugauuguacuc

SEQ ID NO: 2062023 - RNA, 19 nt, Artificial Sequence
  Description of Artificial Sequence: Synthetic oligonucleotide
  Antisense strand to SEQ ID NO: 2062022
gaguacaaucauuucuucg

SEQ ID NO: 2062024 - RNA, 19 nt, Artificial Sequence
  Description of Artificial Sequence: Synthetic oligonucleotide
  Sense strand starting at position 1242 of SEQ ID NO: 1881663
guauuauauuaagcagcaa

SEQ ID NO: 2062025 - RNA, 19 nt, Artificial Sequence
  Description of Artificial Sequence: Synthetic oligonucleotide
  Antisense strand to SEQ ID NO: 2062024
uugcugcuuaauauaauac

SEQ ID NO: 2062026 - RNA, 19 nt, Artificial Sequence
  Description of Artificial Sequence: Synthetic oligonucleotide
  Sense strand starting at position 1329 of SEQ ID NO: 1881663
gcaggaaaguccucuucca

SEQ ID NO: 2062027 - RNA, 19 nt, Artificial Sequence
  Description of Artificial Sequence: Synthetic oligonucleotide
  Antisense strand to SEQ ID NO: 2062026
uggaagaggacuuuccugc

SEQ ID NO: 2062028 - RNA, 19 nt, Artificial Sequence
  Description of Artificial Sequence: Synthetic oligonucleotide
  Sense strand starting at position 1568 of SEQ ID NO: 1881663
augccagcucugcagauaa

SEQ ID NO: 2062029 - RNA, 19 nt, Artificial Sequence
  Description of Artificial Sequence: Synthetic oligonucleotide
  Antisense strand to SEQ ID NO: 2062028
uuaucugcagagcuggcau

SEQ ID NO: 2062030 - RNA, 19 nt, Artificial Sequence
  Description of Artificial Sequence: Synthetic oligonucleotide
  Sense strand starting at position 1654 of SEQ ID NO: 1881663
acaacuuaacuguaagguu

SEQ ID NO: 2062031 - RNA, 19 nt, Artificial Sequence
  Description of Artificial Sequence: Synthetic oligonucleotide
  Antisense strand to SEQ ID NO: 2062030
aaccuuacaguuaaguugu

SEQ ID NO: 2062032 - RNA, 19 nt, Artificial Sequence
  Description of Artificial Sequence: Synthetic oligonucleotide
  Sense strand starting at position 1676 of SEQ ID NO: 1881663
uucuaagaguuccugcaaa

SEQ ID NO: 2062033 - RNA, 19 nt, Artificial Sequence
  Description of Artificial Sequence: Synthetic oligonucleotide
  Antisense strand to SEQ ID NO: 2062032
uuugcaggaacucuuagaa

SEQ ID NO: 2062034 - RNA, 19 nt, Artificial Sequence
  Description of Artificial Sequence: Synthetic oligonucleotide
  Sense strand starting at position 1926 of SEQ ID NO: 1881663
gcgacauaacuuuaccaaa

SEQ ID NO: 2062035 - RNA, 19 nt, Artificial Sequence
  Description of Artificial Sequence: Synthetic oligonucleotide
  Antisense strand to SEQ ID NO: 2062034
uuugguaaaguuaugucgc

SEQ ID NO: 2062036 - RNA, 19 nt, Artificial Sequence
  Description of Artificial Sequence: Synthetic oligonucleotide
  Sense strand starting at position 1952 of SEQ ID NO: 1881663
ugaguagauccugaucagu

SEQ ID NO: 2062037 - RNA, 19 nt, Artificial Sequence
  Description of Artificial Sequence: Synthetic oligonucleotide
  Antisense strand to SEQ ID NO: 2062036
acugaucaggaucuacuca

SEQ ID NO: 2062038 - RNA, 19 nt, Artificial Sequence
  Description of Artificial Sequence: Synthetic oligonucleotide
  Sense strand starting at position 1985 of SEQ ID NO: 1881663
gggagaaaccgcuaaagca

SEQ ID NO: 2062039 - RNA, 19 nt, Artificial Sequence
  Description of Artificial Sequence: Synthetic oligonucleotide
  Antisense strand to SEQ ID NO: 2062038
ugcuuuagcgguuucuccc

SEQ ID NO: 2062040 - RNA, 19 nt, Artificial Sequence
  Description of Artificial Sequence: Synthetic oligonucleotide
  Sense strand starting at position 2172 of SEQ ID NO: 1881663
ugaguuguaagcuguauuu

SEQ ID NO: 2062041 - RNA, 19 nt, Artificial Sequence
  Description of Artificial Sequence: Synthetic oligonucleotide
  Antisense strand to SEQ ID NO: 2062040
aaauacagcuuacaacuca

SEQ ID NO: 2062042 - RNA, 19 nt, Artificial Sequence
  Description of Artificial Sequence: Synthetic oligonucleotide
  Sense strand starting at position 2738 of SEQ ID NO: 1881663
gugagacccugucuccuau

SEQ ID NO: 2062043 - RNA, 19 nt, Artificial Sequence
  Description of Artificial Sequence: Synthetic oligonucleotide
  Antisense strand to SEQ ID NO: 2062042
auaggagacagggucucac

SEQ ID NO: 2062044 - RNA, 19 nt, Artificial Sequence
  Description of Artificial Sequence: Synthetic oligonucleotide
  Sense strand starting at position 2887 of SEQ ID NO: 1881663
cuguguaaucauuagaaug

SEQ ID NO: 2062045 - RNA, 19 nt, Artificial Sequence
  Description of Artificial Sequence: Synthetic oligonucleotide
  Antisense strand to SEQ ID NO: 2062044
cauucuaaugauuacacag

SEQ ID NO: 2062046 - RNA, 19 nt, Artificial Sequence
  Description of Artificial Sequence: Synthetic oligonucleotide
  Sense strand starting at position 2949 of SEQ ID NO: 1881663
cugauagcaugccuuauuu

SEQ ID NO: 2062047 - RNA, 19 nt, Artificial Sequence
  Description of Artificial Sequence: Synthetic oligonucleotide
  Antisense strand to SEQ ID NO: 2062046
aaauaaggcaugcuaucag

SEQ ID NO: 2062048 - RNA, 19 nt, Artificial Sequence
  Description of Artificial Sequence: Synthetic oligonucleotide
  Sense strand starting at position 3038 of SEQ ID NO: 1881663
gcaaaucuaugagcugaaa

SEQ ID NO: 2062049 - RNA, 19 nt, Artificial Sequence
  Description of Artificial Sequence: Synthetic oligonucleotide
  Antisense strand to SEQ ID NO: 2062048
uuucagcucauagauuugc

SEQ ID NO: 2062050 - RNA, 19 nt, Artificial Sequence
  Description of Artificial Sequence: Synthetic oligonucleotide
  Sense strand starting at position 3085 of SEQ ID NO: 1881663
guuuauuauugaguguaga

SEQ ID NO: 2062051 - RNA, 19 nt, Artificial Sequence
  Description of Artificial Sequence: Synthetic oligonucleotide
  Antisense strand to SEQ ID NO: 2062050
ucuacacucaauaauaaac

SEQ ID NO: 2062052 - RNA, 19 nt, Artificial Sequence
  Description of Artificial Sequence: Synthetic oligonucleotide
  Sense strand starting at position 3086 of SEQ ID NO: 1881663
uuuauuauugaguguagag

SEQ ID NO: 2062053 - RNA, 19 nt, Artificial Sequence
  Description of Artificial Sequence: Synthetic oligonucleotide
  Antisense strand to SEQ ID NO: 2062052
cucuacacucaauaauaaa

SEQ ID NO: 2062054 - RNA, 19 nt, Artificial Sequence
  Description of Artificial Sequence: Synthetic oligonucleotide
  Sense strand starting at position 3088 of SEQ ID NO: 1881663
uauuauugaguguagagua

SEQ ID NO: 2062055 - RNA, 19 nt, Artificial Sequence
  Description of Artificial Sequence: Synthetic oligonucleotide
  Antisense strand to SEQ ID NO: 2062054
uacucuacacucaauaaua

SEQ ID NO: 2062056 - RNA, 19 nt, Artificial Sequence
  Description of Artificial Sequence: Synthetic oligonucleotide
  Sense strand starting at position 3161 of SEQ ID NO: 1881663
cugguucuugaugaguuua

SEQ ID NO: 2062057 - RNA, 19 nt, Artificial Sequence
  Description of Artificial Sequence: Synthetic oligonucleotide
  Antisense strand to SEQ ID NO: 2062056
uaaacucaucaagaaccag

SEQ ID NO: 2062058 - RNA, 19 nt, Artificial Sequence
  Description of Artificial Sequence: Synthetic oligonucleotide
  Sense strand starting at position 3163 of SEQ ID NO: 1881663
gguucuugaugaguuuaug

SEQ ID NO: 2062059 - RNA, 19 nt, Artificial Sequence
  Description of Artificial Sequence: Synthetic oligonucleotide
  Antisense strand to SEQ ID NO: 2062058
cauaaacucaucaagaacc

SEQ ID NO: 2062060 - RNA, 19 nt, Artificial Sequence
  Description of Artificial Sequence: Synthetic oligonucleotide
  Sense strand starting at position 3166 of SEQ ID NO: 1881663
ucuugaugaguuuaugggu

SEQ ID NO: 2062061 - RNA, 19 nt, Artificial Sequence
  Description of Artificial Sequence: Synthetic oligonucleotide
  Antisense strand to SEQ ID NO: 2062060
acccauaaacucaucaaga

SEQ ID NO: 2062062 - RNA, 19 nt, Artificial Sequence
  Description of Artificial Sequence: Synthetic oligonucleotide
  Sense strand starting at position 3171 of SEQ ID NO: 1881663
augaguuuauggguauaac

SEQ ID NO: 2062063 - RNA, 19 nt, Artificial Sequence
  Description of Artificial Sequence: Synthetic oligonucleotide
  Antisense strand to SEQ ID NO: 2062062
guuauacccauaaacucau

SEQ ID NO: 2062064 - RNA, 19 nt, Artificial Sequence
  Description of Artificial Sequence: Synthetic oligonucleotide
  Sense strand starting at position 3172 of SEQ ID NO: 1881663
ugaguuuauggguauaacu

SEQ ID NO: 2062065 - RNA, 19 nt, Artificial Sequence
  Description of Artificial Sequence: Synthetic oligonucleotide
  Antisense strand to SEQ ID NO: 2062064
aguuauacccauaaacuca

SEQ ID NO: 2062066 - RNA, 19 nt, Artificial Sequence
  Description of Artificial Sequence: Synthetic oligonucleotide
  Sense strand starting at position 3216 of SEQ ID NO: 1881663
cgcauuaaacccuaaguaa

SEQ ID NO: 2062067 - RNA, 19 nt, Artificial Sequence
  Description of Artificial Sequence: Synthetic oligonucleotide
  Antisense strand to SEQ ID NO: 2062066
uuacuuaggguuuaaugcg

SEQ ID NO: 2062068 - RNA, 19 nt, Artificial Sequence
  Description of Artificial Sequence: Synthetic oligonucleotide
  Sense strand starting at position 3391 of SEQ ID NO: 1881663
aucuaaguaugcccaugau

SEQ ID NO: 2062069 - RNA, 19 nt, Artificial Sequence
  Description of Artificial Sequence: Synthetic oligonucleotide
  Antisense strand to SEQ ID NO: 2062068
aucaugggcauacuuagau

SEQ ID NO: 2062070 - RNA, 19 nt, Artificial Sequence
  Description of Artificial Sequence: Synthetic oligonucleotide
  Sense strand starting at position 3591 of SEQ ID NO: 1881663
uucguccuggucuaugaaa

SEQ ID NO: 2062071 - RNA, 19 nt, Artificial Sequence
  Description of Artificial Sequence: Synthetic oligonucleotide
  Antisense strand to SEQ ID NO: 2062070
uuucauagaccaggacgaa

SEQ ID NO: 2062072 - RNA, 19 nt, Artificial Sequence
  Description of Artificial Sequence: Synthetic oligonucleotide
  Sense strand starting at position 3623 of SEQ ID NO: 1881663
aggcaacaucaccaaguuu

SEQ ID NO: 2062073 - RNA, 19 nt, Artificial Sequence
  Description of Artificial Sequence: Synthetic oligonucleotide
  Antisense strand to SEQ ID NO: 2062072
aaacuuggugauguugccu

SEQ ID NO: 2062074 - RNA, 19 nt, Artificial Sequence
  Description of Artificial Sequence: Synthetic oligonucleotide
  Sense strand starting at position 3655 of SEQ ID NO: 1881663
gaucaaguguggccauaau

SEQ ID NO: 2062075 - RNA, 19 nt, Artificial Sequence
  Description of Artificial Sequence: Synthetic oligonucleotide
  Antisense strand to SEQ ID NO: 2062074
auuauggccacacuugauc

SEQ ID NO: 2062076 - RNA, 19 nt, Artificial Sequence
  Description of Artificial Sequence: Synthetic oligonucleotide
  Sense strand starting at position 3725 of SEQ ID NO: 1881663
guccauuaacuugaaguuu

SEQ ID NO: 2062077 - RNA, 19 nt, Artificial Sequence
  Description of Artificial Sequence: Synthetic oligonucleotide
  Antisense strand to SEQ ID NO: 2062076
aaacuucaaguuaauggac

SEQ ID NO: 2062078 - RNA, 19 nt, Artificial Sequence
  Description of Artificial Sequence: Synthetic oligonucleotide
  Sense strand starting at position 3981 of SEQ ID NO: 1881663
aaacuuuacguggaucuau

SEQ ID NO: 2062079 - RNA, 19 nt, Artificial Sequence
  Description of Artificial Sequence: Synthetic oligonucleotide
  Antisense strand to SEQ ID NO: 2062078
auagauccacguaaaguuu

SEQ ID NO: 2062080 - RNA, 19 nt, Artificial Sequence
  Description of Artificial Sequence: Synthetic oligonucleotide
  Sense strand starting at position 256 of SEQ ID NO: 1881664
aaauuugguuagcaugaua

SEQ ID NO: 2062081 - RNA, 19 nt, Artificial Sequence
  Description of Artificial Sequence: Synthetic oligonucleotide
  Antisense strand to SEQ ID NO: 2062080
uaucaugcuaaccaaauuu

SEQ ID NO: 2062082 - RNA, 19 nt, Artificial Sequence
  Description of Artificial Sequence: Synthetic oligonucleotide
  Sense strand starting at position 268 of SEQ ID NO: 1881664
caugauauccugugugagg

SEQ ID NO: 2062083 - RNA, 19 nt, Artificial Sequence
  Description of Artificial Sequence: Synthetic oligonucleotide
  Antisense strand to SEQ ID NO: 2062082
ccucacacaggauaucaug

SEQ ID NO: 2062084 - RNA, 19 nt, Artificial Sequence
  Description of Artificial Sequence: Synthetic oligonucleotide
  Sense strand starting at position 269 of SEQ ID NO: 1881664
augauauccugugugaggu

SEQ ID NO: 2062085 - RNA, 19 nt, Artificial Sequence
  Description of Artificial Sequence: Synthetic oligonucleotide
  Antisense strand to SEQ ID NO: 2062084
accucacacaggauaucau

SEQ ID NO: 2062086 - RNA, 19 nt, Artificial Sequence
  Description of Artificial Sequence: Synthetic oligonucleotide
  Sense strand starting at position 368 of SEQ ID NO: 1881664
ucuuaaucagguuguagca

SEQ ID NO: 2062087 - RNA, 19 nt, Artificial Sequence
  Description of Artificial Sequence: Synthetic oligonucleotide
  Antisense strand to SEQ ID NO: 2062086
ugcuacaaccugauuaaga

SEQ ID NO: 2062088 - RNA, 19 nt, Artificial Sequence
  Description of Artificial Sequence: Synthetic oligonucleotide
  Sense strand starting at position 399 of SEQ ID NO: 1881664
uuguauaaagcuugacaag

SEQ ID NO: 2062089 - RNA, 19 nt, Artificial Sequence
  Description of Artificial Sequence: Synthetic oligonucleotide
  Antisense strand to SEQ ID NO: 2062088
cuugucaagcuuuauacaa

SEQ ID NO: 2062090 - RNA, 19 nt, Artificial Sequence
  Description of Artificial Sequence: Synthetic oligonucleotide
  Sense strand starting at position 400 of SEQ ID NO: 1881664
uguauaaagcuugacaagu

SEQ ID NO: 2062091 - RNA, 19 nt, Artificial Sequence
  Description of Artificial Sequence: Synthetic oligonucleotide
  Antisense strand to SEQ ID NO: 2062090
acuugucaagcuuuauaca

SEQ ID NO: 2062092 - RNA, 19 nt, Artificial Sequence
  Description of Artificial Sequence: Synthetic oligonucleotide
  Sense strand starting at position 813 of SEQ ID NO: 1881664
agauuucuauuccauguau

SEQ ID NO: 2062093 - RNA, 19 nt, Artificial Sequence
  Description of Artificial Sequence: Synthetic oligonucleotide
  Antisense strand to SEQ ID NO: 2062092
auacauggaauagaaaucu

SEQ ID NO: 2062094 - RNA, 19 nt, Artificial Sequence
  Description of Artificial Sequence: Synthetic oligonucleotide
  Sense strand starting at position 892 of SEQ ID NO: 1881664
ugguuucugucccucagau

SEQ ID NO: 2062095 - RNA, 19 nt, Artificial Sequence
  Description of Artificial Sequence: Synthetic oligonucleotide
  Antisense strand to SEQ ID NO: 2062094
aucugagggacagaaacca

SEQ ID NO: 2062096 - RNA, 19 nt, Artificial Sequence
  Description of Artificial Sequence: Synthetic oligonucleotide
  Sense strand starting at position 894 of SEQ ID NO: 1881664
guuucugucccucagauau

SEQ ID NO: 2062097 - RNA, 19 nt, Artificial Sequence
  Description of Artificial Sequence: Synthetic oligonucleotide
  Antisense strand to SEQ ID NO: 2062096
auaucugagggacagaaac

SEQ ID NO: 2062098 - RNA, 19 nt, Artificial Sequence
  Description of Artificial Sequence: Synthetic oligonucleotide
  Sense strand starting at position 905 of SEQ ID NO: 1881664
ucagauauuuacugaauug

SEQ ID NO: 2062099 - RNA, 19 nt, Artificial Sequence
  Description of Artificial Sequence: Synthetic oligonucleotide
  Antisense strand to SEQ ID NO: 2062098
caauucaguaaauaucuga

SEQ ID NO: 2062100 - RNA, 19 nt, Artificial Sequence
  Description of Artificial Sequence: Synthetic oligonucleotide
  Sense strand starting at position 923 of SEQ ID NO: 1881664
gaaauacauuguguuugau

SEQ ID NO: 2062101 - RNA, 19 nt, Artificial Sequence
  Description of Artificial Sequence: Synthetic oligonucleotide
  Antisense strand to SEQ ID NO: 2062100
aucaaacacaauguauuuc

SEQ ID NO: 2062102 - RNA, 19 nt, Artificial Sequence
  Description of Artificial Sequence: Synthetic oligonucleotide
  Sense strand starting at position 952 of SEQ ID NO: 1881664
gagaaaccauguuugaugu

SEQ ID NO: 2062103 - RNA, 19 nt, Artificial Sequence
  Description of Artificial Sequence: Synthetic oligonucleotide
  Antisense strand to SEQ ID NO: 2062102
acaucaaacaugguuucuc

SEQ ID NO: 2062104 - RNA, 19 nt, Artificial Sequence
  Description of Artificial Sequence: Synthetic oligonucleotide
  Sense strand starting at position 953 of SEQ ID NO: 1881664
agaaaccauguuugaugua

SEQ ID NO: 2062105 - RNA, 19 nt, Artificial Sequence
  Description of Artificial Sequence: Synthetic oligonucleotide
  Antisense strand to SEQ ID NO: 2062104
uacaucaaacaugguuucu

SEQ ID NO: 2062106 - RNA, 19 nt, Artificial Sequence
  Description of Artificial Sequence: Synthetic oligonucleotide
  Sense strand starting at position 965 of SEQ ID NO: 1881664
ugauguaagccuggucaaa

SEQ ID NO: 2062107 - RNA, 19 nt, Artificial Sequence
  Description of Artificial Sequence: Synthetic oligonucleotide
  Antisense strand to SEQ ID NO: 2062106
uuugaccaggcuuacauca

SEQ ID NO: 2062108 - RNA, 19 nt, Artificial Sequence
  Description of Artificial Sequence: Synthetic oligonucleotide
  Sense strand starting at position 967 of SEQ ID NO: 1881664
auguaagccuggucaaaua

SEQ ID NO: 2062109 - RNA, 19 nt, Artificial Sequence
  Description of Artificial Sequence: Synthetic oligonucleotide
  Antisense strand to SEQ ID NO: 2062108
uauuugaccaggcuuacau

SEQ ID NO: 2062110 - RNA, 19 nt, Artificial Sequence
  Description of Artificial Sequence: Synthetic oligonucleotide
  Sense strand starting at position 1010 of SEQ ID NO: 1881664
gucugaaucgcucagauuc

SEQ ID NO: 2062111 - RNA, 19 nt, Artificial Sequence
  Description of Artificial Sequence: Synthetic oligonucleotide
  Antisense strand to SEQ ID NO: 2062110
gaaucugagcgauucagac

SEQ ID NO: 2062112 - RNA, 19 nt, Artificial Sequence
  Description of Artificial Sequence: Synthetic oligonucleotide
  Sense strand starting at position 1127 of SEQ ID NO: 1881664
guaagaaguuuaucagauu

SEQ ID NO: 2062113 - RNA, 19 nt, Artificial Sequence
  Description of Artificial Sequence: Synthetic oligonucleotide
  Antisense strand to SEQ ID NO: 2062112
aaucugauaaacuucuuac

SEQ ID NO: 2062114 - RNA, 19 nt, Artificial Sequence
  Description of Artificial Sequence: Synthetic oligonucleotide
  Sense strand starting at position 1252 of SEQ ID NO: 1881664
gaggauagagccugucuca

SEQ ID NO: 2062115 - RNA, 19 nt, Artificial Sequence
  Description of Artificial Sequence: Synthetic oligonucleotide
  Antisense strand to SEQ ID NO: 2062114
ugagacaggcucuauccuc

SEQ ID NO: 2062116 - RNA, 19 nt, Artificial Sequence
  Description of Artificial Sequence: Synthetic oligonucleotide
  Sense strand starting at position 1255 of SEQ ID NO: 1881664
gauagagccugucucauuc

SEQ ID NO: 2062117 - RNA, 19 nt, Artificial Sequence
  Description of Artificial Sequence: Synthetic oligonucleotide
  Antisense strand to SEQ ID NO: 2062116
gaaugagacaggcucuauc

SEQ ID NO: 2062118 - RNA, 19 nt, Artificial Sequence
  Description of Artificial Sequence: Synthetic oligonucleotide
  Sense strand starting at position 1373 of SEQ ID NO: 1881664
augggaucaguagggcaua

SEQ ID NO: 2062119 - RNA, 19 nt, Artificial Sequence
  Description of Artificial Sequence: Synthetic oligonucleotide
  Antisense strand to SEQ ID NO: 2062118
uaugcccuacugaucccau

SEQ ID NO: 2062120 - RNA, 19 nt, Artificial Sequence
  Description of Artificial Sequence: Synthetic oligonucleotide
  Sense strand starting at position 1415 of SEQ ID NO: 1881664
agagaugucuuccuacuua

SEQ ID NO: 2062121 - RNA, 19 nt, Artificial Sequence
  Description of Artificial Sequence: Synthetic oligonucleotide
  Antisense strand to SEQ ID NO: 2062120
uaaguaggaagacaucucu

SEQ ID NO: 2062122 - RNA, 19 nt, Artificial Sequence
  Description of Artificial Sequence: Synthetic oligonucleotide
  Sense strand starting at position 1462 of SEQ ID NO: 1881664
gucugaggugccuggaaau

SEQ ID NO: 2062123 - RNA, 19 nt, Artificial Sequence
  Description of Artificial Sequence: Synthetic oligonucleotide
  Antisense strand to SEQ ID NO: 2062122
auuuccaggcaccucagac

SEQ ID NO: 2062124 - RNA, 19 nt, Artificial Sequence
  Description of Artificial Sequence: Synthetic oligonucleotide
  Sense strand starting at position 1474 of SEQ ID NO: 1881664
uggaaauacucaccggaug

SEQ ID NO: 2062125 - RNA, 19 nt, Artificial Sequence
  Description of Artificial Sequence: Synthetic oligonucleotide
  Antisense strand to SEQ ID NO: 2062124
cauccggugaguauuucca

SEQ ID NO: 2062126 - RNA, 19 nt, Artificial Sequence
  Description of Artificial Sequence: Synthetic oligonucleotide
  Sense strand starting at position 2390 of SEQ ID NO: 1881664
gcgagucuccuggaaacuu

SEQ ID NO: 2062127 - RNA, 19 nt, Artificial Sequence
  Description of Artificial Sequence: Synthetic oligonucleotide
  Antisense strand to SEQ ID NO: 2062126
aaguuuccaggagacucgc

SEQ ID NO: 2062128 - RNA, 19 nt, Artificial Sequence
  Description of Artificial Sequence: Synthetic oligonucleotide
  Sense strand starting at position 2401 of SEQ ID NO: 1881664
ggaaacuuggcuuguccca

SEQ ID NO: 2062129 - RNA, 19 nt, Artificial Sequence
  Description of Artificial Sequence: Synthetic oligonucleotide
  Antisense strand to SEQ ID NO: 2062128
ugggacaagccaaguuucc

SEQ ID NO: 2062130 - RNA, 19 nt, Artificial Sequence
  Description of Artificial Sequence: Synthetic oligonucleotide
  Sense strand starting at position 2572 of SEQ ID NO: 1881664
guuugaucuccugauucug

SEQ ID NO: 2062131 - RNA, 19 nt, Artificial Sequence
  Description of Artificial Sequence: Synthetic oligonucleotide
  Antisense strand to SEQ ID NO: 2062130
cagaaucaggagaucaaac

SEQ ID NO: 2062132 - RNA, 19 nt, Artificial Sequence
  Description of Artificial Sequence: Synthetic oligonucleotide
  Sense strand starting at position 2619 of SEQ ID NO: 1881664
gugggagugugauagauuu

SEQ ID NO: 2062133 - RNA, 19 nt, Artificial Sequence
  Description of Artificial Sequence: Synthetic oligonucleotide
  Antisense strand to SEQ ID NO: 2062132
aaaucuaucacacucccac

SEQ ID NO: 2062134 - RNA, 19 nt, Artificial Sequence
  Description of Artificial Sequence: Synthetic oligonucleotide
  Sense strand starting at position 2690 of SEQ ID NO: 1881664
uuuggagcuguggguuaaa

SEQ ID NO: 2062135 - RNA, 19 nt, Artificial Sequence
  Description of Artificial Sequence: Synthetic oligonucleotide
  Antisense strand to SEQ ID NO: 2062134
uuuaacccacagcuccaaa

SEQ ID NO: 2062136 - RNA, 19 nt, Artificial Sequence
  Description of Artificial Sequence: Synthetic oligonucleotide
  Sense strand starting at position 2720 of SEQ ID NO: 1881664
uuagcuuuggccuaggaau

SEQ ID NO: 2062137 - RNA, 19 nt, Artificial Sequence
  Description of Artificial Sequence: Synthetic oligonucleotide
  Antisense strand to SEQ ID NO: 2062136
auuccuaggccaaagcuaa

SEQ ID NO: 2062138 - RNA, 19 nt, Artificial Sequence
  Description of Artificial Sequence: Synthetic oligonucleotide
  Sense strand starting at position 2746 of SEQ ID NO: 1881664
uugugaauuuguccuaagu

SEQ ID NO: 2062139 - RNA, 19 nt, Artificial Sequence
  Description of Artificial Sequence: Synthetic oligonucleotide
  Antisense strand to SEQ ID NO: 2062138
acuuaggacaaauucacaa

SEQ ID NO: 2062140 - RNA, 19 nt, Artificial Sequence
  Description of Artificial Sequence: Synthetic oligonucleotide
  Sense strand starting at position 2767 of SEQ ID NO: 1881664
gcagucaaaugggcaaaua

SEQ ID NO: 2062141 - RNA, 19 nt, Artificial Sequence
  Description of Artificial Sequence: Synthetic oligonucleotide
  Antisense strand to SEQ ID NO: 2062140
uauuugcccauuugacugc

SEQ ID NO: 2062142 - RNA, 19 nt, Artificial Sequence
  Description of Artificial Sequence: Synthetic oligonucleotide
  Sense strand starting at position 2778 of SEQ ID NO: 1881664
ggcaaauauguauguacaa

SEQ ID NO: 2062143 - RNA, 19 nt, Artificial Sequence
  Description of Artificial Sequence: Synthetic oligonucleotide
  Antisense strand to SEQ ID NO: 2062142
uuguacauacauauuugcc

SEQ ID NO: 2062144 - RNA, 19 nt, Artificial Sequence
  Description of Artificial Sequence: Synthetic oligonucleotide
  Sense strand starting at position 2779 of SEQ ID NO: 1881664
gcaaauauguauguacaag

SEQ ID NO: 2062145 - RNA, 19 nt, Artificial Sequence
  Description of Artificial Sequence: Synthetic oligonucleotide
  Antisense strand to SEQ ID NO: 2062144
cuuguacauacauauuugc

SEQ ID NO: 2062146 - RNA, 19 nt, Artificial Sequence
  Description of Artificial Sequence: Synthetic oligonucleotide
  Sense strand starting at position 2852 of SEQ ID NO: 1881664
cccaguaagauuggugaag

SEQ ID NO: 2062147 - RNA, 19 nt, Artificial Sequence
  Description of Artificial Sequence: Synthetic oligonucleotide
  Antisense strand to SEQ ID NO: 2062146
cuucaccaaucuuacuggg

SEQ ID NO: 2062148 - RNA, 19 nt, Artificial Sequence
  Description of Artificial Sequence: Synthetic oligonucleotide
  Sense strand starting at position 2853 of SEQ ID NO: 1881664
ccaguaagauuggugaagu

SEQ ID NO: 2062149 - RNA, 19 nt, Artificial Sequence
  Description of Artificial Sequence: Synthetic oligonucleotide
  Antisense strand to SEQ ID NO: 2062148
acuucaccaaucuuacugg

SEQ ID NO: 2062150 - RNA, 19 nt, Artificial Sequence
  Description of Artificial Sequence: Synthetic oligonucleotide
  Sense strand starting at position 2864 of SEQ ID NO: 1881664
ggugaaguaagcuacagua

SEQ ID NO: 2062151 - RNA, 19 nt, Artificial Sequence
  Description of Artificial Sequence: Synthetic oligonucleotide
  Antisense strand to SEQ ID NO: 2062150
uacuguagcuuacuucacc

SEQ ID NO: 2062152 - RNA, 19 nt, Artificial Sequence
  Description of Artificial Sequence: Synthetic oligonucleotide
  Sense strand starting at position 2888 of SEQ ID NO: 1881664
agacaucgaauauguugua

SEQ ID NO: 2062153 - RNA, 19 nt, Artificial Sequence
  Description of Artificial Sequence: Synthetic oligonucleotide
  Antisense strand to SEQ ID NO: 2062152
uacaacauauucgaugucu

SEQ ID NO: 2062154 - RNA, 19 nt, Artificial Sequence
  Description of Artificial Sequence: Synthetic oligonucleotide
  Sense strand starting at position 2915 of SEQ ID NO: 1881664
aaaugaggauucguugaca

SEQ ID NO: 2062155 - RNA, 19 nt, Artificial Sequence
  Description of Artificial Sequence: Synthetic oligonucleotide
  Antisense strand to SEQ ID NO: 2062154
ugucaacgaauccucauuu

SEQ ID NO: 2062156 - RNA, 19 nt, Artificial Sequence
  Description of Artificial Sequence: Synthetic oligonucleotide
  Sense strand starting at position 3079 of SEQ ID NO: 1881664
aauagugauucuuucugag

SEQ ID NO: 2062157 - RNA, 19 nt, Artificial Sequence
  Description of Artificial Sequence: Synthetic oligonucleotide
  Antisense strand to SEQ ID NO: 2062156
cucagaaagaaucacuauu

SEQ ID NO: 2062158 - RNA, 19 nt, Artificial Sequence
  Description of Artificial Sequence: Synthetic oligonucleotide
  Sense strand starting at position 3095 of SEQ ID NO: 1881664
gagcgauguguuuaaggca

SEQ ID NO: 2062159 - RNA, 19 nt, Artificial Sequence
  Description of Artificial Sequence: Synthetic oligonucleotide
  Antisense strand to SEQ ID NO: 2062158
ugccuuaaacacaucgcuc

SEQ ID NO: 2062160 - RNA, 19 nt, Artificial Sequence
  Description of Artificial Sequence: Synthetic oligonucleotide
  Sense strand starting at position 82 of SEQ ID NO: 1881665
uacaucagucagggaggua

SEQ ID NO: 2062161 - RNA, 19 nt, Artificial Sequence
  Description of Artificial Sequence: Synthetic oligonucleotide
  Antisense strand to SEQ ID NO: 2062160
uaccucccugacugaugua

SEQ ID NO: 2062162 - RNA, 19 nt, Artificial Sequence
  Description of Artificial Sequence: Synthetic oligonucleotide
  Sense strand starting at position 95 of SEQ ID NO: 1881665
gagguaaggucccuauaua

SEQ ID NO: 2062163 - RNA, 19 nt, Artificial Sequence
  Description of Artificial Sequence: Synthetic oligonucleotide
  Antisense strand to SEQ ID NO: 2062162
uauauagggaccuuaccuc

SEQ ID NO: 2062164 - RNA, 19 nt, Artificial Sequence
  Description of Artificial Sequence: Synthetic oligonucleotide
  Sense strand starting at position 96 of SEQ ID NO: 1881665
agguaaggucccuauauau

SEQ ID NO: 2062165 - RNA, 19 nt, Artificial Sequence
  Description of Artificial Sequence: Synthetic oligonucleotide
  Antisense strand to SEQ ID NO: 2062164
auauauagggaccuuaccu

SEQ ID NO: 2062166 - RNA, 19 nt, Artificial Sequence
  Description of Artificial Sequence: Synthetic oligonucleotide
  Sense strand starting at position 438 of SEQ ID NO: 1881665
gccaguuuccgccucccaa

SEQ ID NO: 2062167 - RNA, 19 nt, Artificial Sequence
  Description of Artificial Sequence: Synthetic oligonucleotide
  Antisense strand to SEQ ID NO: 2062166
uugggaggcggaaacuggc

SEQ ID NO: 2062168 - RNA, 19 nt, Artificial Sequence
  Description of Artificial Sequence: Synthetic oligonucleotide
  Sense strand starting at position 688 of SEQ ID NO: 1881665
aucacaaggccugaaguau

SEQ ID NO: 2062169 - RNA, 19 nt, Artificial Sequence
  Description of Artificial Sequence: Synthetic oligonucleotide
  Antisense strand to SEQ ID NO: 2062168
auacuucaggccuugugau

SEQ ID NO: 2062170 - RNA, 19 nt, Artificial Sequence
  Description of Artificial Sequence: Synthetic oligonucleotide
  Sense strand starting at position 743 of SEQ ID NO: 1881665
ucugcucauguaugggaau

SEQ ID NO: 2062171 - RNA, 19 nt, Artificial Sequence
  Description of Artificial Sequence: Synthetic oligonucleotide
  Antisense strand to SEQ ID NO: 2062170
auucccauacaugagcaga

SEQ ID NO: 2062172 - RNA, 19 nt, Artificial Sequence
  Description of Artificial Sequence: Synthetic oligonucleotide
  Sense strand starting at position 761 of SEQ ID NO: 1881665
uuuguaguucuauaaggau

SEQ ID NO: 2062173 - RNA, 19 nt, Artificial Sequence
  Description of Artificial Sequence: Synthetic oligonucleotide
  Antisense strand to SEQ ID NO: 2062172
auccuuauagaacuacaaa

SEQ ID NO: 2062174 - RNA, 19 nt, Artificial Sequence
  Description of Artificial Sequence: Synthetic oligonucleotide
  Sense strand starting at position 976 of SEQ ID NO: 1881665
gcugaaauguucuugucaa

SEQ ID NO: 2062175 - RNA, 19 nt, Artificial Sequence
  Description of Artificial Sequence: Synthetic oligonucleotide
  Antisense strand to SEQ ID NO: 2062174
uugacaagaacauuucagc

SEQ ID NO: 2062176 - RNA, 19 nt, Artificial Sequence
  Description of Artificial Sequence: Synthetic oligonucleotide
  Sense strand starting at position 1147 of SEQ ID NO: 1881665
uggguuguuccagggagca

SEQ ID NO: 2062177 - RNA, 19 nt, Artificial Sequence
  Description of Artificial Sequence: Synthetic oligonucleotide
  Antisense strand to SEQ ID NO: 2062176
ugcucccuggaacaaccca

SEQ ID NO: 2062178 - RNA, 19 nt, Artificial Sequence
  Description of Artificial Sequence: Synthetic oligonucleotide
  Sense strand starting at position 1233 of SEQ ID NO: 1881665
ccuggagaagccuauguau

SEQ ID NO: 2062179 - RNA, 19 nt, Artificial Sequence
  Description of Artificial Sequence: Synthetic oligonucleotide
  Antisense strand to SEQ ID NO: 2062178
auacauaggcuucuccagg

SEQ ID NO: 2062180 - RNA, 19 nt, Artificial Sequence
  Description of Artificial Sequence: Synthetic oligonucleotide
  Sense strand starting at position 1246 of SEQ ID NO: 1881665
auguauuuguuugcaugga

SEQ ID NO: 2062181 - RNA, 19 nt, Artificial Sequence
  Description of Artificial Sequence: Synthetic oligonucleotide
  Antisense strand to SEQ ID NO: 2062180
uccaugcaaacaaauacau

SEQ ID NO: 2062182 - RNA, 19 nt, Artificial Sequence
  Description of Artificial Sequence: Synthetic oligonucleotide
  Sense strand starting at position 1247 of SEQ ID NO: 1881665
uguauuuguuugcauggaa

SEQ ID NO: 2062183 - RNA, 19 nt, Artificial Sequence
  Description of Artificial Sequence: Synthetic oligonucleotide
  Antisense strand to SEQ ID NO: 2062182
uuccaugcaaacaaauaca

SEQ ID NO: 2062184 - RNA, 19 nt, Artificial Sequence
  Description of Artificial Sequence: Synthetic oligonucleotide
  Sense strand starting at position 1371 of SEQ ID NO: 1881665
auaaacuuacuccaguguu

SEQ ID NO: 2062185 - RNA, 19 nt, Artificial Sequence
  Description of Artificial Sequence: Synthetic oligonucleotide
  Antisense strand to SEQ ID NO: 2062184
aacacuggaguaaguuuau

SEQ ID NO: 2062186 - RNA, 19 nt, Artificial Sequence
  Description of Artificial Sequence: Synthetic oligonucleotide
  Sense strand starting at position 1700 of SEQ ID NO: 1881665
gcaagauccuaugugauuc

SEQ ID NO: 2062187 - RNA, 19 nt, Artificial Sequence
  Description of Artificial Sequence: Synthetic oligonucleotide
  Antisense strand to SEQ ID NO: 2062186
gaaucacauaggaucuugc

SEQ ID NO: 2062188 - RNA, 19 nt, Artificial Sequence
  Description of Artificial Sequence: Synthetic oligonucleotide
  Sense strand starting at position 1704 of SEQ ID NO: 1881665
gauccuaugugauuccugu

SEQ ID NO: 2062189 - RNA, 19 nt, Artificial Sequence
  Description of Artificial Sequence: Synthetic oligonucleotide
  Antisense strand to SEQ ID NO: 2062188
acaggaaucacauaggauc

SEQ ID NO: 2062190 - RNA, 19 nt, Artificial Sequence
  Description of Artificial Sequence: Synthetic oligonucleotide
  Sense strand starting at position 1724 of SEQ ID NO: 1881665
cacauuccaguuugagaga

SEQ ID NO: 2062191 - RNA, 19 nt, Artificial Sequence
  Description of Artificial Sequence: Synthetic oligonucleotide
  Antisense strand to SEQ ID NO: 2062190
ucucucaaacuggaaugug

SEQ ID NO: 2062192 - RNA, 19 nt, Artificial Sequence
  Description of Artificial Sequence: Synthetic oligonucleotide
  Sense strand starting at position 1733 of SEQ ID NO: 1881665
guuugagagacaugugucu

SEQ ID NO: 2062193 - RNA, 19 nt, Artificial Sequence
  Description of Artificial Sequence: Synthetic oligonucleotide
  Antisense strand to SEQ ID NO: 2062192
agacacaugucucucaaac

SEQ ID NO: 2062194 - RNA, 19 nt, Artificial Sequence
  Description of Artificial Sequence: Synthetic oligonucleotide
  Sense strand starting at position 1735 of SEQ ID NO: 1881665
uugagagacaugugucuag

SEQ ID NO: 2062195 - RNA, 19 nt, Artificial Sequence
  Description of Artificial Sequence: Synthetic oligonucleotide
  Antisense strand to SEQ ID NO: 2062194
cuagacacaugucucucaa

SEQ ID NO: 2062196 - RNA, 19 nt, Artificial Sequence
  Description of Artificial Sequence: Synthetic oligonucleotide
  Sense strand starting at position 1738 of SEQ ID NO: 1881665
agagacaugugucuaggga

SEQ ID NO: 2062197 - RNA, 19 nt, Artificial Sequence
  Description of Artificial Sequence: Synthetic oligonucleotide
  Antisense strand to SEQ ID NO: 2062196
ucccuagacacaugucucu

SEQ ID NO: 2062198 - RNA, 19 nt, Artificial Sequence
  Description of Artificial Sequence: Synthetic oligonucleotide
  Sense strand starting at position 1844 of SEQ ID NO: 1881665
ucuagauggcuaugugugu

SEQ ID NO: 2062199 - RNA, 19 nt, Artificial Sequence
  Description of Artificial Sequence: Synthetic oligonucleotide
  Antisense strand to SEQ ID NO: 2062198
acacacauagccaucuaga

SEQ ID NO: 2062200 - RNA, 19 nt, Artificial Sequence
  Description of Artificial Sequence: Synthetic oligonucleotide
  Sense strand starting at position 1848 of SEQ ID NO: 1881665
gauggcuauguguguuaaa

SEQ ID NO: 2062201 - RNA, 19 nt, Artificial Sequence
  Description of Artificial Sequence: Synthetic oligonucleotide
  Antisense strand to SEQ ID NO: 2062200
uuuaacacacauagccauc

SEQ ID NO: 2062202 - RNA, 19 nt, Artificial Sequence
  Description of Artificial Sequence: Synthetic oligonucleotide
  Sense strand starting at position 1895 of SEQ ID NO: 1881665
uguguauggccagaguuga

SEQ ID NO: 2062203 - RNA, 19 nt, Artificial Sequence
  Description of Artificial Sequence: Synthetic oligonucleotide
  Antisense strand to SEQ ID NO: 2062202
ucaacucuggccauacaca

SEQ ID NO: 2062204 - RNA, 19 nt, Artificial Sequence
  Description of Artificial Sequence: Synthetic oligonucleotide
  Sense strand starting at position 1962 of SEQ ID NO: 1881665
gcccaaggucaugacauaa

SEQ ID NO: 2062205 - RNA, 19 nt, Artificial Sequence
  Description of Artificial Sequence: Synthetic oligonucleotide
  Antisense strand to SEQ ID NO: 2062204
uuaugucaugaccuugggc

SEQ ID NO: 2062206 - RNA, 19 nt, Artificial Sequence
  Description of Artificial Sequence: Synthetic oligonucleotide
  Sense strand starting at position 2039 of SEQ ID NO: 1881665
ggacucugacagugauagu

SEQ ID NO: 2062207 - RNA, 19 nt, Artificial Sequence
  Description of Artificial Sequence: Synthetic oligonucleotide
  Antisense strand to SEQ ID NO: 2062206
acuaucacugucagagucc

SEQ ID NO: 2062208 - RNA, 19 nt, Artificial Sequence
  Description of Artificial Sequence: Synthetic oligonucleotide
  Sense strand starting at position 2048 of SEQ ID NO: 1881665
cagugauaguguccauuuc

SEQ ID NO: 2062209 - RNA, 19 nt, Artificial Sequence
  Description of Artificial Sequence: Synthetic oligonucleotide
  Antisense strand to SEQ ID NO: 2062208
gaaauggacacuaucacug

SEQ ID NO: 2062210 - RNA, 19 nt, Artificial Sequence
  Description of Artificial Sequence: Synthetic oligonucleotide
  Sense strand starting at position 2255 of SEQ ID NO: 1881665
ccugccaaauguguauuaa

SEQ ID NO: 2062211 - RNA, 19 nt, Artificial Sequence
  Description of Artificial Sequence: Synthetic oligonucleotide
  Antisense strand to SEQ ID NO: 2062210
uuaauacacauuuggcagg

SEQ ID NO: 2062212 - RNA, 19 nt, Artificial Sequence
  Description of Artificial Sequence: Synthetic oligonucleotide
  Sense strand starting at position 2256 of SEQ ID NO: 1881665
cugccaaauguguauuaaa

SEQ ID NO: 2062213 - RNA, 19 nt, Artificial Sequence
  Description of Artificial Sequence: Synthetic oligonucleotide
  Antisense strand to SEQ ID NO: 2062212
uuuaauacacauuuggcag

SEQ ID NO: 2062214 - RNA, 19 nt, Artificial Sequence
  Description of Artificial Sequence: Synthetic oligonucleotide
  Sense strand starting at position 2322 of SEQ ID NO: 1881665
gacuccaguuuauaggaaa

SEQ ID NO: 2062215 - RNA, 19 nt, Artificial Sequence
  Description of Artificial Sequence: Synthetic oligonucleotide
  Antisense strand to SEQ ID NO: 2062214
uuuccuauaaacuggaguc

SEQ ID NO: 2062216 - RNA, 19 nt, Artificial Sequence
  Description of Artificial Sequence: Synthetic oligonucleotide
  Sense strand starting at position 2459 of SEQ ID NO: 1881665
ugagccaguccugaugaga

SEQ ID NO: 2062217 - RNA, 19 nt, Artificial Sequence
  Description of Artificial Sequence: Synthetic oligonucleotide
  Antisense strand to SEQ ID NO: 2062216
ucucaucaggacuggcuca

SEQ ID NO: 2062218 - RNA, 19 nt, Artificial Sequence
  Description of Artificial Sequence: Synthetic oligonucleotide
  Sense strand starting at position 2472 of SEQ ID NO: 1881665
augagaaagccucguugcu

SEQ ID NO: 2062219 - RNA, 19 nt, Artificial Sequence
  Description of Artificial Sequence: Synthetic oligonucleotide
  Antisense strand to SEQ ID NO: 2062218
agcaacgaggcuuucucau

SEQ ID NO: 2062220 - RNA, 19 nt, Artificial Sequence
  Description of Artificial Sequence: Synthetic oligonucleotide
  Sense strand starting at position 2524 of SEQ ID NO: 1881665
ugaagacacuguuuaugaa

SEQ ID NO: 2062221 - RNA, 19 nt, Artificial Sequence
  Description of Artificial Sequence: Synthetic oligonucleotide
  Antisense strand to SEQ ID NO: 2062220
uucauaaacagugucuuca

SEQ ID NO: 2062222 - RNA, 19 nt, Artificial Sequence
  Description of Artificial Sequence: Synthetic oligonucleotide
  Sense strand starting at position 2691 of SEQ ID NO: 1881665
uggcuucuuauguggagga

SEQ ID NO: 2062223 - RNA, 19 nt, Artificial Sequence
  Description of Artificial Sequence: Synthetic oligonucleotide
  Antisense strand to SEQ ID NO: 2062222
uccuccacauaagaagcca

SEQ ID NO: 2062224 - RNA, 19 nt, Artificial Sequence
  Description of Artificial Sequence: Synthetic oligonucleotide
  Sense strand starting at position 2693 of SEQ ID NO: 1881665
gcuucuuauguggaggaaa

SEQ ID NO: 2062225 - RNA, 19 nt, Artificial Sequence
  Description of Artificial Sequence: Synthetic oligonucleotide
  Antisense strand to SEQ ID NO: 2062224
uuuccuccacauaagaagc

SEQ ID NO: 2062226 - RNA, 19 nt, Artificial Sequence
  Description of Artificial Sequence: Synthetic oligonucleotide
  Sense strand starting at position 2909 of SEQ ID NO: 1881665
gcagcuaaaucuucugaga

SEQ ID NO: 2062227 - RNA, 19 nt, Artificial Sequence
  Description of Artificial Sequence: Synthetic oligonucleotide
  Antisense strand to SEQ ID NO: 2062226
ucucagaagauuuagcugc

SEQ ID NO: 2062228 - RNA, 19 nt, Artificial Sequence
  Description of Artificial Sequence: Synthetic oligonucleotide
  Sense strand starting at position 3282 of SEQ ID NO: 1881665
agaagcaauuuagaagagu

SEQ ID NO: 2062229 - RNA, 19 nt, Artificial Sequence
  Description of Artificial Sequence: Synthetic oligonucleotide
  Antisense strand to SEQ ID NO: 2062228
acucuucuaaauugcuucu

SEQ ID NO: 2062230 - RNA, 19 nt, Artificial Sequence
  Description of Artificial Sequence: Synthetic oligonucleotide
  Sense strand starting at position 3384 of SEQ ID NO: 1881665
cugugaggcugaccuauau

SEQ ID NO: 2062231 - RNA, 19 nt, Artificial Sequence
  Description of Artificial Sequence: Synthetic oligonucleotide
  Antisense strand to SEQ ID NO: 2062230
auauaggucagccucacag

SEQ ID NO: 2062232 - RNA, 19 nt, Artificial Sequence
  Description of Artificial Sequence: Synthetic oligonucleotide
  Sense strand starting at position 3407 of SEQ ID NO: 1881665
cuucuuauaucggcagaag

SEQ ID NO: 2062233 - RNA, 19 nt, Artificial Sequence
  Description of Artificial Sequence: Synthetic oligonucleotide
  Antisense strand to SEQ ID NO: 2062232
cuucugccgauauaagaag

SEQ ID NO: 2062234 - RNA, 19 nt, Artificial Sequence
  Description of Artificial Sequence: Synthetic oligonucleotide
  Sense strand starting at position 3408 of SEQ ID NO: 1881665
uucuuauaucggcagaagu

SEQ ID NO: 2062235 - RNA, 19 nt, Artificial Sequence
  Description of Artificial Sequence: Synthetic oligonucleotide
  Antisense strand to SEQ ID NO: 2062234
acuucugccgauauaagaa

SEQ ID NO: 2062236 - RNA, 19 nt, Artificial Sequence
  Description of Artificial Sequence: Synthetic oligonucleotide
  Sense strand starting at position 3410 of SEQ ID NO: 1881665
cuuauaucggcagaaguga

SEQ ID NO: 2062237 - RNA, 19 nt, Artificial Sequence
  Description of Artificial Sequence: Synthetic oligonucleotide
  Antisense strand to SEQ ID NO: 2062236
ucacuucugccgauauaag

SEQ ID NO: 2062238 - RNA, 19 nt, Artificial Sequence
  Description of Artificial Sequence: Synthetic oligonucleotide
  Sense strand starting at position 3646 of SEQ ID NO: 1881665
agucuauagccagaccaaa

SEQ ID NO: 2062239 - RNA, 19 nt, Artificial Sequence
  Description of Artificial Sequence: Synthetic oligonucleotide
  Antisense strand to SEQ ID NO: 2062238
uuuggucuggcuauagacu

SEQ ID NO: 2062240 - RNA, 19 nt, Artificial Sequence
  Description of Artificial Sequence: Synthetic oligonucleotide
  Sense strand starting at position 33 of SEQ ID NO: 1881666
agugacaauuuaugaugaa

SEQ ID NO: 2062241 - RNA, 19 nt, Artificial Sequence
  Description of Artificial Sequence: Synthetic oligonucleotide
  Antisense strand to SEQ ID NO: 2062240
uucaucauaaauugucacu

SEQ ID NO: 2062242 - RNA, 19 nt, Artificial Sequence
  Description of Artificial Sequence: Synthetic oligonucleotide
  Sense strand starting at position 34 of SEQ ID NO: 1881666
gugacaauuuaugaugaaa

SEQ ID NO: 2062243 - RNA, 19 nt, Artificial Sequence
  Description of Artificial Sequence: Synthetic oligonucleotide
  Antisense strand to SEQ ID NO: 2062242
uuucaucauaaauugucac

SEQ ID NO: 2062244 - RNA, 19 nt, Artificial Sequence
  Description of Artificial Sequence: Synthetic oligonucleotide
  Sense strand starting at position 46 of SEQ ID NO: 1881666
gaugaaauguggucacagg

SEQ ID NO: 2062245 - RNA, 19 nt, Artificial Sequence
  Description of Artificial Sequence: Synthetic oligonucleotide
  Antisense strand to SEQ ID NO: 2062244
ccugugaccacauuucauc

SEQ ID NO: 2062246 - RNA, 19 nt, Artificial Sequence
  Description of Artificial Sequence: Synthetic oligonucleotide
  Sense strand starting at position 47 of SEQ ID NO: 1881666
augaaauguggucacaggu

SEQ ID NO: 2062247 - RNA, 19 nt, Artificial Sequence
  Description of Artificial Sequence: Synthetic oligonucleotide
  Antisense strand to SEQ ID NO: 2062246
accugugaccacauuucau

SEQ ID NO: 2062248 - RNA, 19 nt, Artificial Sequence
  Description of Artificial Sequence: Synthetic oligonucleotide
  Sense strand starting at position 125 of SEQ ID NO: 1881666
acaauuauccuggguacgu

SEQ ID NO: 2062249 - RNA, 19 nt, Artificial Sequence
  Description of Artificial Sequence: Synthetic oligonucleotide
  Antisense strand to SEQ ID NO: 2062248
acguacccaggauaauugu

SEQ ID NO: 2062250 - RNA, 19 nt, Artificial Sequence
  Description of Artificial Sequence: Synthetic oligonucleotide
  Sense strand starting at position 126 of SEQ ID NO: 1881666
caauuauccuggguacgua

SEQ ID NO: 2062251 - RNA, 19 nt, Artificial Sequence
  Description of Artificial Sequence: Synthetic oligonucleotide
  Antisense strand to SEQ ID NO: 2062250
uacguacccaggauaauug

SEQ ID NO: 2062252 - RNA, 19 nt, Artificial Sequence
  Description of Artificial Sequence: Synthetic oligonucleotide
  Sense strand starting at position 138 of SEQ ID NO: 1881666
guacguaugcuagcguaua

SEQ ID NO: 2062253 - RNA, 19 nt, Artificial Sequence
  Description of Artificial Sequence: Synthetic oligonucleotide
  Antisense strand to SEQ ID NO: 2062252
uauacgcuagcauacguac

SEQ ID NO: 2062254 - RNA, 19 nt, Artificial Sequence
  Description of Artificial Sequence: Synthetic oligonucleotide
  Sense strand starting at position 140 of SEQ ID NO: 1881666
acguaugcuagcguauauu

SEQ ID NO: 2062255 - RNA, 19 nt, Artificial Sequence
  Description of Artificial Sequence: Synthetic oligonucleotide
  Antisense strand to SEQ ID NO: 2062254
aauauacgcuagcauacgu

SEQ ID NO: 2062256 - RNA, 19 nt, Artificial Sequence
  Description of Artificial Sequence: Synthetic oligonucleotide
  Sense strand starting at position 202 of SEQ ID NO: 1881666
uagagaucuugcuuuguuu

SEQ ID NO: 2062257 - RNA, 19 nt, Artificial Sequence
  Description of Artificial Sequence: Synthetic oligonucleotide
  Antisense strand to SEQ ID NO: 2062256
aaacaaagcaagaucucua

SEQ ID NO: 2062258 - RNA, 19 nt, Artificial Sequence
  Description of Artificial Sequence: Synthetic oligonucleotide
  Sense strand starting at position 236 of SEQ ID NO: 1881666
uucugugcuacagagguua

SEQ ID NO: 2062259 - RNA, 19 nt, Artificial Sequence
  Description of Artificial Sequence: Synthetic oligonucleotide
  Antisense strand to SEQ ID NO: 2062258
uaaccucuguagcacagaa

SEQ ID NO: 2062260 - RNA, 19 nt, Artificial Sequence
  Description of Artificial Sequence: Synthetic oligonucleotide
  Sense strand starting at position 248 of SEQ ID NO: 1881666
gagguuaucccuugcuauu

SEQ ID NO: 2062261 - RNA, 19 nt, Artificial Sequence
  Description of Artificial Sequence: Synthetic oligonucleotide
  Antisense strand to SEQ ID NO: 2062260
aauagcaagggauaaccuc

SEQ ID NO: 2062262 - RNA, 19 nt, Artificial Sequence
  Description of Artificial Sequence: Synthetic oligonucleotide
  Sense strand starting at position 250 of SEQ ID NO: 1881666
gguuaucccuugcuauuaa

SEQ ID NO: 2062263 - RNA, 19 nt, Artificial Sequence
  Description of Artificial Sequence: Synthetic oligonucleotide
  Antisense strand to SEQ ID NO: 2062262
uuaauagcaagggauaacc

SEQ ID NO: 2062264 - RNA, 19 nt, Artificial Sequence
  Description of Artificial Sequence: Synthetic oligonucleotide
  Sense strand starting at position 273 of SEQ ID NO: 1881666
aguauuauaacugguguuu

SEQ ID NO: 2062265 - RNA, 19 nt, Artificial Sequence
  Description of Artificial Sequence: Synthetic oligonucleotide
  Antisense strand to SEQ ID NO: 2062264
aaacaccaguuauaauacu

SEQ ID NO: 2062266 - RNA, 19 nt, Artificial Sequence
  Description of Artificial Sequence: Synthetic oligonucleotide
  Sense strand starting at position 279 of SEQ ID NO: 1881666
auaacugguguuuaaacua

SEQ ID NO: 2062267 - RNA, 19 nt, Artificial Sequence
  Description of Artificial Sequence: Synthetic oligonucleotide
  Antisense strand to SEQ ID NO: 2062266
uaguuuaaacaccaguuau

SEQ ID NO: 2062268 - RNA, 19 nt, Artificial Sequence
  Description of Artificial Sequence: Synthetic oligonucleotide
  Sense strand starting at position 401 of SEQ ID NO: 1881666
gggcauaauagcugauguu

SEQ ID NO: 2062269 - RNA, 19 nt, Artificial Sequence
  Description of Artificial Sequence: Synthetic oligonucleotide
  Antisense strand to SEQ ID NO: 2062268
aacaucagcuauuaugccc

SEQ ID NO: 2062270 - RNA, 19 nt, Artificial Sequence
  Description of Artificial Sequence: Synthetic oligonucleotide
  Sense strand starting at position 402 of SEQ ID NO: 1881666
ggcauaauagcugauguuu

SEQ ID NO: 2062271 - RNA, 19 nt, Artificial Sequence
  Description of Artificial Sequence: Synthetic oligonucleotide
  Antisense strand to SEQ ID NO: 2062270
aaacaucagcuauuaugcc

SEQ ID NO: 2062272 - RNA, 19 nt, Artificial Sequence
  Description of Artificial Sequence: Synthetic oligonucleotide
  Sense strand starting at position 451 of SEQ ID NO: 1881666
gaacaugauuuggaggcaa

SEQ ID NO: 2062273 - RNA, 19 nt, Artificial Sequence
  Description of Artificial Sequence: Synthetic oligonucleotide
  Antisense strand to SEQ ID NO: 2062272
uugccuccaaaucauguuc

SEQ ID NO: 2062274 - RNA, 19 nt, Artificial Sequence
  Description of Artificial Sequence: Synthetic oligonucleotide
  Sense strand starting at position 542 of SEQ ID NO: 1881666
gaagguaacuugcuauaua

SEQ ID NO: 2062275 - RNA, 19 nt, Artificial Sequence
  Description of Artificial Sequence: Synthetic oligonucleotide
  Antisense strand to SEQ ID NO: 2062274
uauauagcaaguuaccuuc

SEQ ID NO: 2062276 - RNA, 19 nt, Artificial Sequence
  Description of Artificial Sequence: Synthetic oligonucleotide
  Sense strand starting at position 545 of SEQ ID NO: 1881666
gguaacuugcuauauaacu

SEQ ID NO: 2062277 - RNA, 19 nt, Artificial Sequence
  Description of Artificial Sequence: Synthetic oligonucleotide
  Antisense strand to SEQ ID NO: 2062276
aguuauauagcaaguuacc

SEQ ID NO: 2062278 - RNA, 19 nt, Artificial Sequence
  Description of Artificial Sequence: Synthetic oligonucleotide
  Sense strand starting at position 705 of SEQ ID NO: 1881666
cuucgugauaaguagaaca

SEQ ID NO: 2062279 - RNA, 19 nt, Artificial Sequence
  Description of Artificial Sequence: Synthetic oligonucleotide
  Antisense strand to SEQ ID NO: 2062278
uguucuacuuaucacgaag

SEQ ID NO: 2062280 - RNA, 19 nt, Artificial Sequence
  Description of Artificial Sequence: Synthetic oligonucleotide
  Sense strand starting at position 707 of SEQ ID NO: 1881666
ucgugauaaguagaacaau

SEQ ID NO: 2062281 - RNA, 19 nt, Artificial Sequence
  Description of Artificial Sequence: Synthetic oligonucleotide
  Antisense strand to SEQ ID NO: 2062280
auuguucuacuuaucacga

SEQ ID NO: 2062282 - RNA, 19 nt, Artificial Sequence
  Description of Artificial Sequence: Synthetic oligonucleotide
  Sense strand starting at position 1141 of SEQ ID NO: 1881666
ggagugacugaguguagga

SEQ ID NO: 2062283 - RNA, 19 nt, Artificial Sequence
  Description of Artificial Sequence: Synthetic oligonucleotide
  Antisense strand to SEQ ID NO: 2062282
uccuacacucagucacucc

SEQ ID NO: 2062284 - RNA, 19 nt, Artificial Sequence
  Description of Artificial Sequence: Synthetic oligonucleotide
  Sense strand starting at position 1143 of SEQ ID NO: 1881666
agugacugaguguaggauu

SEQ ID NO: 2062285 - RNA, 19 nt, Artificial Sequence
  Description of Artificial Sequence: Synthetic oligonucleotide
  Antisense strand to SEQ ID NO: 2062284
aauccuacacucagucacu

SEQ ID NO: 2062286 - RNA, 19 nt, Artificial Sequence
  Description of Artificial Sequence: Synthetic oligonucleotide
  Sense strand starting at position 1617 of SEQ ID NO: 1881666
guuaccguaucaucaagaa

SEQ ID NO: 2062287 - RNA, 19 nt, Artificial Sequence
  Description of Artificial Sequence: Synthetic oligonucleotide
  Antisense strand to SEQ ID NO: 2062286
uucuugaugauacgguaac

SEQ ID NO: 2062288 - RNA, 19 nt, Artificial Sequence
  Description of Artificial Sequence: Synthetic oligonucleotide
  Sense strand starting at position 1621 of SEQ ID NO: 1881666
ccguaucaucaagaaguaa

SEQ ID NO: 2062289 - RNA, 19 nt, Artificial Sequence
  Description of Artificial Sequence: Synthetic oligonucleotide
  Antisense strand to SEQ ID NO: 2062288
uuacuucuugaugauacgg

SEQ ID NO: 2062290 - RNA, 19 nt, Artificial Sequence
  Description of Artificial Sequence: Synthetic oligonucleotide
  Sense strand starting at position 2260 of SEQ ID NO: 1881666
ugacauaugccauaaugug

SEQ ID NO: 2062291 - RNA, 19 nt, Artificial Sequence
  Description of Artificial Sequence: Synthetic oligonucleotide
  Antisense strand to SEQ ID NO: 2062290
cacauuauggcauauguca

SEQ ID NO: 2062292 - RNA, 19 nt, Artificial Sequence
  Description of Artificial Sequence: Synthetic oligonucleotide
  Sense strand starting at position 2384 of SEQ ID NO: 1881666
gaggauuaauggcugccua

SEQ ID NO: 2062293 - RNA, 19 nt, Artificial Sequence
  Description of Artificial Sequence: Synthetic oligonucleotide
  Antisense strand to SEQ ID NO: 2062292
uaggcagccauuaauccuc

SEQ ID NO: 2062294 - RNA, 19 nt, Artificial Sequence
  Description of Artificial Sequence: Synthetic oligonucleotide
  Sense strand starting at position 2506 of SEQ ID NO: 1881666
gaugguugcuacuuuguga

SEQ ID NO: 2062295 - RNA, 19 nt, Artificial Sequence
  Description of Artificial Sequence: Synthetic oligonucleotide
  Antisense strand to SEQ ID NO: 2062294
ucacaaaguagcaaccauc

SEQ ID NO: 2062296 - RNA, 19 nt, Artificial Sequence
  Description of Artificial Sequence: Synthetic oligonucleotide
  Sense strand starting at position 2509 of SEQ ID NO: 1881666
gguugcuacuuugugaaua

SEQ ID NO: 2062297 - RNA, 19 nt, Artificial Sequence
  Description of Artificial Sequence: Synthetic oligonucleotide
  Antisense strand to SEQ ID NO: 2062296
uauucacaaaguagcaacc

SEQ ID NO: 2062298 - RNA, 19 nt, Artificial Sequence
  Description of Artificial Sequence: Synthetic oligonucleotide
  Sense strand starting at position 2514 of SEQ ID NO: 1881666
cuacuuugugaauaugcua

SEQ ID NO: 2062299 - RNA, 19 nt, Artificial Sequence
  Description of Artificial Sequence: Synthetic oligonucleotide
  Antisense strand to SEQ ID NO: 2062298
uagcauauucacaaaguag

SEQ ID NO: 2062300 - RNA, 19 nt, Artificial Sequence
  Description of Artificial Sequence: Synthetic oligonucleotide
  Sense strand starting at position 2737 of SEQ ID NO: 1881666
caguuaagauguuuaguuu

SEQ ID NO: 2062301 - RNA, 19 nt, Artificial Sequence
  Description of Artificial Sequence: Synthetic oligonucleotide
  Antisense strand to SEQ ID NO: 2062300
aaacuaaacaucuuaacug

SEQ ID NO: 2062302 - RNA, 19 nt, Artificial Sequence
  Description of Artificial Sequence: Synthetic oligonucleotide
  Sense strand starting at position 3012 of SEQ ID NO: 1881666
uuagauuaaugcguucuaa

SEQ ID NO: 2062303 - RNA, 19 nt, Artificial Sequence
  Description of Artificial Sequence: Synthetic oligonucleotide
  Antisense strand to SEQ ID NO: 2062302
uuagaacgcauuaaucuaa

SEQ ID NO: 2062304 - RNA, 19 nt, Artificial Sequence
  Description of Artificial Sequence: Synthetic oligonucleotide
  Sense strand starting at position 3036 of SEQ ID NO: 1881666
gcauuaaucagaggucaug

SEQ ID NO: 2062305 - RNA, 19 nt, Artificial Sequence
  Description of Artificial Sequence: Synthetic oligonucleotide
  Antisense strand to SEQ ID NO: 2062304
caugaccucugauuaaugc

SEQ ID NO: 2062306 - RNA, 19 nt, Artificial Sequence
  Description of Artificial Sequence: Synthetic oligonucleotide
  Sense strand starting at position 3126 of SEQ ID NO: 1881666
uucugaacaugcuuagaaa

SEQ ID NO: 2062307 - RNA, 19 nt, Artificial Sequence
  Description of Artificial Sequence: Synthetic oligonucleotide
  Antisense strand to SEQ ID NO: 2062306
uuucuaagcauguucagaa

SEQ ID NO: 2062308 - RNA, 19 nt, Artificial Sequence
  Description of Artificial Sequence: Synthetic oligonucleotide
  Sense strand starting at position 3346 of SEQ ID NO: 1881666
cuguuuaugcauuaugucu

SEQ ID NO: 2062309 - RNA, 19 nt, Artificial Sequence
  Description of Artificial Sequence: Synthetic oligonucleotide
  Antisense strand to SEQ ID NO: 2062308
agacauaaugcauaaacag

SEQ ID NO: 2062310 - RNA, 19 nt, Artificial Sequence
  Description of Artificial Sequence: Synthetic oligonucleotide
  Sense strand starting at position 3828 of SEQ ID NO: 1881666
guuguacuguaaucauaug

SEQ ID NO: 2062311 - RNA, 19 nt, Artificial Sequence
  Description of Artificial Sequence: Synthetic oligonucleotide
  Antisense strand to SEQ ID NO: 2062310
cauaugauuacaguacaac

SEQ ID NO: 2062312 - RNA, 19 nt, Artificial Sequence
  Description of Artificial Sequence: Synthetic oligonucleotide
  Sense strand starting at position 3846 of SEQ ID NO: 1881666
gguaucuguuucccuauca

SEQ ID NO: 2062313 - RNA, 19 nt, Artificial Sequence
  Description of Artificial Sequence: Synthetic oligonucleotide
  Antisense strand to SEQ ID NO: 2062312
ugauagggaaacagauacc

SEQ ID NO: 2062314 - RNA, 19 nt, Artificial Sequence
  Description of Artificial Sequence: Synthetic oligonucleotide
  Sense strand starting at position 3847 of SEQ ID NO: 1881666
guaucuguuucccuaucau

SEQ ID NO: 2062315 - RNA, 19 nt, Artificial Sequence
  Description of Artificial Sequence: Synthetic oligonucleotide
  Antisense strand to SEQ ID NO: 2062314
augauagggaaacagauac

SEQ ID NO: 2062316 - RNA, 19 nt, Artificial Sequence
  Description of Artificial Sequence: Synthetic oligonucleotide
  Sense strand starting at position 3953 of SEQ ID NO: 1881666
gcugguuuccacugaauca

SEQ ID NO: 2062317 - RNA, 19 nt, Artificial Sequence
  Description of Artificial Sequence: Synthetic oligonucleotide
  Antisense strand to SEQ ID NO: 2062316
ugauucaguggaaaccagc

SEQ ID NO: 2062318 - RNA, 19 nt, Artificial Sequence
  Description of Artificial Sequence: Synthetic oligonucleotide
  Sense strand starting at position 3967 of SEQ ID NO: 1881666
aaucaauggcuuugguacu

SEQ ID NO: 2062319 - RNA, 19 nt, Artificial Sequence
  Description of Artificial Sequence: Synthetic oligonucleotide
  Antisense strand to SEQ ID NO: 2062318
aguaccaaagccauugauu

SEQ ID NO: 2062320 - RNA, 19 nt, Artificial Sequence
  Description of Artificial Sequence: Synthetic oligonucleotide
  Sense strand starting at position 124 of SEQ ID NO: 1881667
ucagaaacagugcaaguau

SEQ ID NO: 2062321 - RNA, 19 nt, Artificial Sequence
  Description of Artificial Sequence: Synthetic oligonucleotide
  Antisense strand to SEQ ID NO: 2062320
auacuugcacuguuucuga

SEQ ID NO: 2062322 - RNA, 19 nt, Artificial Sequence
  Description of Artificial Sequence: Synthetic oligonucleotide
  Sense strand starting at position 451 of SEQ ID NO: 1881667
agaugauaaugggagauga

SEQ ID NO: 2062323 - RNA, 19 nt, Artificial Sequence
  Description of Artificial Sequence: Synthetic oligonucleotide
  Antisense strand to SEQ ID NO: 2062322
ucaucucccauuaucaucu

SEQ ID NO: 2062324 - RNA, 19 nt, Artificial Sequence
  Description of Artificial Sequence: Synthetic oligonucleotide
  Sense strand starting at position 661 of SEQ ID NO: 1881667
ugggauaucaaaugugauc

SEQ ID NO: 2062325 - RNA, 19 nt, Artificial Sequence
  Description of Artificial Sequence: Synthetic oligonucleotide
  Antisense strand to SEQ ID NO: 2062324
gaucacauuugauauccca

SEQ ID NO: 2062326 - RNA, 19 nt, Artificial Sequence
  Description of Artificial Sequence: Synthetic oligonucleotide
  Sense strand starting at position 995 of SEQ ID NO: 1881667
uggccaugauaucugauaa

SEQ ID NO: 2062327 - RNA, 19 nt, Artificial Sequence
  Description of Artificial Sequence: Synthetic oligonucleotide
  Antisense strand to SEQ ID NO: 2062326
uuaucagauaucauggcca

SEQ ID NO: 2062328 - RNA, 19 nt, Artificial Sequence
  Description of Artificial Sequence: Synthetic oligonucleotide
  Sense strand starting at position 996 of SEQ ID NO: 1881667
ggccaugauaucugauaag

SEQ ID NO: 2062329 - RNA, 19 nt, Artificial Sequence
  Description of Artificial Sequence: Synthetic oligonucleotide
  Antisense strand to SEQ ID NO: 2062328
cuuaucagauaucauggcc

SEQ ID NO: 2062330 - RNA, 19 nt, Artificial Sequence
  Description of Artificial Sequence: Synthetic oligonucleotide
  Sense strand starting at position 1073 of SEQ ID NO: 1881667
gucauucugcaccaagaua

SEQ ID NO: 2062331 - RNA, 19 nt, Artificial Sequence
  Description of Artificial Sequence: Synthetic oligonucleotide
  Antisense strand to SEQ ID NO: 2062330
uaucuuggugcagaaugac

SEQ ID NO: 2062332 - RNA, 19 nt, Artificial Sequence
  Description of Artificial Sequence: Synthetic oligonucleotide
  Sense strand starting at position 1261 of SEQ ID NO: 1881667
cuacaauuacgcuacagaa

SEQ ID NO: 2062333 - RNA, 19 nt, Artificial Sequence
  Description of Artificial Sequence: Synthetic oligonucleotide
  Antisense strand to SEQ ID NO: 2062332
uucuguagcguaauuguag

SEQ ID NO: 2062334 - RNA, 19 nt, Artificial Sequence
  Description of Artificial Sequence: Synthetic oligonucleotide
  Sense strand starting at position 1290 of SEQ ID NO: 1881667
gaucaaugucaaggcaaug

SEQ ID NO: 2062335 - RNA, 19 nt, Artificial Sequence
  Description of Artificial Sequence: Synthetic oligonucleotide
  Antisense strand to SEQ ID NO: 2062334
cauugccuugacauugauc

SEQ ID NO: 2062336 - RNA, 19 nt, Artificial Sequence
  Description of Artificial Sequence: Synthetic oligonucleotide
  Sense strand starting at position 1397 of SEQ ID NO: 1881667
cacugagauucugcaguau

SEQ ID NO: 2062337 - RNA, 19 nt, Artificial Sequence
  Description of Artificial Sequence: Synthetic oligonucleotide
  Antisense strand to SEQ ID NO: 2062336
auacugcagaaucucagug

SEQ ID NO: 2062338 - RNA, 19 nt, Artificial Sequence
  Description of Artificial Sequence: Synthetic oligonucleotide
  Sense strand starting at position 1401 of SEQ ID NO: 1881667
gagauucugcaguaucggu

SEQ ID NO: 2062339 - RNA, 19 nt, Artificial Sequence
  Description of Artificial Sequence: Synthetic oligonucleotide
  Antisense strand to SEQ ID NO: 2062338
accgauacugcagaaucuc

SEQ ID NO: 2062340 - RNA, 19 nt, Artificial Sequence
  Description of Artificial Sequence: Synthetic oligonucleotide
  Sense strand starting at position 1427 of SEQ ID NO: 1881667
cauugugagcuugauuaau

SEQ ID NO: 2062341 - RNA, 19 nt, Artificial Sequence
  Description of Artificial Sequence: Synthetic oligonucleotide
  Antisense strand to SEQ ID NO: 2062340
auuaaucaagcucacaaug

SEQ ID NO: 2062342 - RNA, 19 nt, Artificial Sequence
  Description of Artificial Sequence: Synthetic oligonucleotide
  Sense strand starting at position 1562 of SEQ ID NO: 1881667
gggacaucccgaggauaug

SEQ ID NO: 2062343 - RNA, 19 nt, Artificial Sequence
  Description of Artificial Sequence: Synthetic oligonucleotide
  Antisense strand to SEQ ID NO: 2062342
cauauccucgggauguccc

SEQ ID NO: 2062344 - RNA, 19 nt, Artificial Sequence
  Description of Artificial Sequence: Synthetic oligonucleotide
  Sense strand starting at position 1762 of SEQ ID NO: 1881667
gggucacuauuugauaaau

SEQ ID NO: 2062345 - RNA, 19 nt, Artificial Sequence
  Description of Artificial Sequence: Synthetic oligonucleotide
  Antisense strand to SEQ ID NO: 2062344
auuuaucaaauagugaccc

SEQ ID NO: 2062346 - RNA, 19 nt, Artificial Sequence
  Description of Artificial Sequence: Synthetic oligonucleotide
  Sense strand starting at position 1764 of SEQ ID NO: 1881667
gucacuauuugauaaauga

SEQ ID NO: 2062347 - RNA, 19 nt, Artificial Sequence
  Description of Artificial Sequence: Synthetic oligonucleotide
  Antisense strand to SEQ ID NO: 2062346
ucauuuaucaaauagugac

SEQ ID NO: 2062348 - RNA, 19 nt, Artificial Sequence
  Description of Artificial Sequence: Synthetic oligonucleotide
  Sense strand starting at position 1779 of SEQ ID NO: 1881667
augauuauuugauagccau

SEQ ID NO: 2062349 - RNA, 19 nt, Artificial Sequence
  Description of Artificial Sequence: Synthetic oligonucleotide
  Antisense strand to SEQ ID NO: 2062348
auggcuaucaaauaaucau

SEQ ID NO: 2062350 - RNA, 19 nt, Artificial Sequence
  Description of Artificial Sequence: Synthetic oligonucleotide
  Sense strand starting at position 1805 of SEQ ID NO: 1881667
ugcuauguaccauaucuga

SEQ ID NO: 2062351 - RNA, 19 nt, Artificial Sequence
  Description of Artificial Sequence: Synthetic oligonucleotide
  Antisense strand to SEQ ID NO: 2062350
ucagauaugguacauagca

SEQ ID NO: 2062352 - RNA, 19 nt, Artificial Sequence
  Description of Artificial Sequence: Synthetic oligonucleotide
  Sense strand starting at position 2227 of SEQ ID NO: 1881667
agcuaauaguaaucuaagu

SEQ ID NO: 2062353 - RNA, 19 nt, Artificial Sequence
  Description of Artificial Sequence: Synthetic oligonucleotide
  Antisense strand to SEQ ID NO: 2062352
acuuagauuacuauuagcu

SEQ ID NO: 2062354 - RNA, 19 nt, Artificial Sequence
  Description of Artificial Sequence: Synthetic oligonucleotide
  Sense strand starting at position 2232 of SEQ ID NO: 1881667
auaguaaucuaagucuuug

SEQ ID NO: 2062355 - RNA, 19 nt, Artificial Sequence
  Description of Artificial Sequence: Synthetic oligonucleotide
  Antisense strand to SEQ ID NO: 2062354
caaagacuuagauuacuau

SEQ ID NO: 2062356 - RNA, 19 nt, Artificial Sequence
  Description of Artificial Sequence: Synthetic oligonucleotide
  Sense strand starting at position 2300 of SEQ ID NO: 1881667
gauaaauaacacugucguu

SEQ ID NO: 2062357 - RNA, 19 nt, Artificial Sequence
  Description of Artificial Sequence: Synthetic oligonucleotide
  Antisense strand to SEQ ID NO: 2062356
aacgacaguguuauuuauc

SEQ ID NO: 2062358 - RNA, 19 nt, Artificial Sequence
  Description of Artificial Sequence: Synthetic oligonucleotide
  Sense strand starting at position 2313 of SEQ ID NO: 1881667
gucguuucccuagaacuuu

SEQ ID NO: 2062359 - RNA, 19 nt, Artificial Sequence
  Description of Artificial Sequence: Synthetic oligonucleotide
  Antisense strand to SEQ ID NO: 2062358
aaaguucuagggaaacgac

SEQ ID NO: 2062360 - RNA, 19 nt, Artificial Sequence
  Description of Artificial Sequence: Synthetic oligonucleotide
  Sense strand starting at position 2513 of SEQ ID NO: 1881667
aguauuaugccauaaagac

SEQ ID NO: 2062361 - RNA, 19 nt, Artificial Sequence
  Description of Artificial Sequence: Synthetic oligonucleotide
  Antisense strand to SEQ ID NO: 2062360
gucuuuauggcauaauacu

SEQ ID NO: 2062362 - RNA, 19 nt, Artificial Sequence
  Description of Artificial Sequence: Synthetic oligonucleotide
  Sense strand starting at position 2534 of SEQ ID NO: 1881667
agagacugaugagaaauau

SEQ ID NO: 2062363 - RNA, 19 nt, Artificial Sequence
  Description of Artificial Sequence: Synthetic oligonucleotide
  Antisense strand to SEQ ID NO: 2062362
auauuucucaucagucucu

SEQ ID NO: 2062364 - RNA, 19 nt, Artificial Sequence
  Description of Artificial Sequence: Synthetic oligonucleotide
  Sense strand starting at position 2857 of SEQ ID NO: 1881667
ugaguaaguguucaagaag

SEQ ID NO: 2062365 - RNA, 19 nt, Artificial Sequence
  Description of Artificial Sequence: Synthetic oligonucleotide
  Antisense strand to SEQ ID NO: 2062364
cuucuugaacacuuacuca

SEQ ID NO: 2062366 - RNA, 19 nt, Artificial Sequence
  Description of Artificial Sequence: Synthetic oligonucleotide
  Sense strand starting at position 2900 of SEQ ID NO: 1881667
ggccacugauaauucugaa

SEQ ID NO: 2062367 - RNA, 19 nt, Artificial Sequence
  Description of Artificial Sequence: Synthetic oligonucleotide
  Antisense strand to SEQ ID NO: 2062366
uucagaauuaucaguggcc

SEQ ID NO: 2062368 - RNA, 19 nt, Artificial Sequence
  Description of Artificial Sequence: Synthetic oligonucleotide
  Sense strand starting at position 3033 of SEQ ID NO: 1881667
uauugugauuaugcagaaa

SEQ ID NO: 2062369 - RNA, 19 nt, Artificial Sequence
  Description of Artificial Sequence: Synthetic oligonucleotide
  Antisense strand to SEQ ID NO: 2062368
uuucugcauaaucacaaua

SEQ ID NO: 2062370 - RNA, 19 nt, Artificial Sequence
  Description of Artificial Sequence: Synthetic oligonucleotide
  Sense strand starting at position 3109 of SEQ ID NO: 1881667
auagaaaucuuauugucag

SEQ ID NO: 2062371 - RNA, 19 nt, Artificial Sequence
  Description of Artificial Sequence: Synthetic oligonucleotide
  Antisense strand to SEQ ID NO: 2062370
cugacaauaagauuucuau

SEQ ID NO: 2062372 - RNA, 19 nt, Artificial Sequence
  Description of Artificial Sequence: Synthetic oligonucleotide
  Sense strand starting at position 3112 of SEQ ID NO: 1881667
gaaaucuuauugucagaug

SEQ ID NO: 2062373 - RNA, 19 nt, Artificial Sequence
  Description of Artificial Sequence: Synthetic oligonucleotide
  Antisense strand to SEQ ID NO: 2062372
caucugacaauaagauuuc

SEQ ID NO: 2062374 - RNA, 19 nt, Artificial Sequence
  Description of Artificial Sequence: Synthetic oligonucleotide
  Sense strand starting at position 3152 of SEQ ID NO: 1881667
uugaacugaguuugcaaau

SEQ ID NO: 2062375 - RNA, 19 nt, Artificial Sequence
  Description of Artificial Sequence: Synthetic oligonucleotide
  Antisense strand to SEQ ID NO: 2062374
auuugcaaacucaguucaa

SEQ ID NO: 2062376 - RNA, 19 nt, Artificial Sequence
  Description of Artificial Sequence: Synthetic oligonucleotide
  Sense strand starting at position 3153 of SEQ ID NO: 1881667
ugaacugaguuugcaaauu

SEQ ID NO: 2062377 - RNA, 19 nt, Artificial Sequence
  Description of Artificial Sequence: Synthetic oligonucleotide
  Antisense strand to SEQ ID NO: 2062376
aauuugcaaacucaguuca

SEQ ID NO: 2062378 - RNA, 19 nt, Artificial Sequence
  Description of Artificial Sequence: Synthetic oligonucleotide
  Sense strand starting at position 3277 of SEQ ID NO: 1881667
ugagaaacaugguuuacua

SEQ ID NO: 2062379 - RNA, 19 nt, Artificial Sequence
  Description of Artificial Sequence: Synthetic oligonucleotide
  Antisense strand to SEQ ID NO: 2062378
uaguaaaccauguuucuca

SEQ ID NO: 2062380 - RNA, 19 nt, Artificial Sequence
  Description of Artificial Sequence: Synthetic oligonucleotide
  Sense strand starting at position 3456 of SEQ ID NO: 1881667
augcauauccagcauugca

SEQ ID NO: 2062381 - RNA, 19 nt, Artificial Sequence
  Description of Artificial Sequence: Synthetic oligonucleotide
  Antisense strand to SEQ ID NO: 2062380
ugcaaugcuggauaugcau

SEQ ID NO: 2062382 - RNA, 19 nt, Artificial Sequence
  Description of Artificial Sequence: Synthetic oligonucleotide
  Sense strand starting at position 3543 of SEQ ID NO: 1881667
caggauucuggaugaugca

SEQ ID NO: 2062383 - RNA, 19 nt, Artificial Sequence
  Description of Artificial Sequence: Synthetic oligonucleotide
  Antisense strand to SEQ ID NO: 2062382
ugcaucauccagaauccug

SEQ ID NO: 2062384 - RNA, 19 nt, Artificial Sequence
  Description of Artificial Sequence: Synthetic oligonucleotide
  Sense strand starting at position 3718 of SEQ ID NO: 1881667
ggaauugguaaguggucua

SEQ ID NO: 2062385 - RNA, 19 nt, Artificial Sequence
  Description of Artificial Sequence: Synthetic oligonucleotide
  Antisense strand to SEQ ID NO: 2062384
uagaccacuuaccaauucc

SEQ ID NO: 2062386 - RNA, 19 nt, Artificial Sequence
  Description of Artificial Sequence: Synthetic oligonucleotide
  Sense strand starting at position 3813 of SEQ ID NO: 1881667
gaauuauauuguguggcag

SEQ ID NO: 2062387 - RNA, 19 nt, Artificial Sequence
  Description of Artificial Sequence: Synthetic oligonucleotide
  Antisense strand to SEQ ID NO: 2062386
cugccacacaauauaauuc

SEQ ID NO: 2062388 - RNA, 19 nt, Artificial Sequence
  Description of Artificial Sequence: Synthetic oligonucleotide
  Sense strand starting at position 3814 of SEQ ID NO: 1881667
aauuauauuguguggcaga

SEQ ID NO: 2062389 - RNA, 19 nt, Artificial Sequence
  Description of Artificial Sequence: Synthetic oligonucleotide
  Antisense strand to SEQ ID NO: 2062388
ucugccacacaauauaauu

SEQ ID NO: 2062390 - RNA, 19 nt, Artificial Sequence
  Description of Artificial Sequence: Synthetic oligonucleotide
  Sense strand starting at position 3819 of SEQ ID NO: 1881667
uauuguguggcagacugua

SEQ ID NO: 2062391 - RNA, 19 nt, Artificial Sequence
  Description of Artificial Sequence: Synthetic oligonucleotide
  Antisense strand to SEQ ID NO: 2062390
uacagucugccacacaaua

SEQ ID NO: 2062392 - RNA, 19 nt, Artificial Sequence
  Description of Artificial Sequence: Synthetic oligonucleotide
  Sense strand starting at position 3922 of SEQ ID NO: 1881667
guauaaacuugggcaggua

SEQ ID NO: 2062393 - RNA, 19 nt, Artificial Sequence
  Description of Artificial Sequence: Synthetic oligonucleotide
  Antisense strand to SEQ ID NO: 2062392
uaccugcccaaguuuauac

SEQ ID NO: 2062394 - RNA, 19 nt, Artificial Sequence
  Description of Artificial Sequence: Synthetic oligonucleotide
  Sense strand starting at position 3957 of SEQ ID NO: 1881667
ugacuucucuggucaacug

SEQ ID NO: 2062395 - RNA, 19 nt, Artificial Sequence
  Description of Artificial Sequence: Synthetic oligonucleotide
  Antisense strand to SEQ ID NO: 2062394
caguugaccagagaaguca

SEQ ID NO: 2062396 - RNA, 19 nt, Artificial Sequence
  Description of Artificial Sequence: Synthetic oligonucleotide
  Sense strand starting at position 3958 of SEQ ID NO: 1881667
gacuucucuggucaacuga

SEQ ID NO: 2062397 - RNA, 19 nt, Artificial Sequence
  Description of Artificial Sequence: Synthetic oligonucleotide
  Antisense strand to SEQ ID NO: 2062396
ucaguugaccagagaaguc

SEQ ID NO: 2062398 - RNA, 19 nt, Artificial Sequence
  Description of Artificial Sequence: Synthetic oligonucleotide
  Sense strand starting at position 3965 of SEQ ID NO: 1881667
cuggucaacugauuacaga

SEQ ID NO: 2062399 - RNA, 19 nt, Artificial Sequence
  Description of Artificial Sequence: Synthetic oligonucleotide
  Antisense strand to SEQ ID NO: 2062398
ucuguaaucaguugaccag

SEQ ID NO: 2062400 - RNA, 19 nt, Artificial Sequence
  Description of Artificial Sequence: Synthetic oligonucleotide
  Sense strand starting at position 20 of SEQ ID NO: 1881668
cccugaacucauggcuaaa

SEQ ID NO: 2062401 - RNA, 19 nt, Artificial Sequence
  Description of Artificial Sequence: Synthetic oligonucleotide
  Antisense strand to SEQ ID NO: 2062400
uuuagccaugaguucaggg

SEQ ID NO: 2062402 - RNA, 19 nt, Artificial Sequence
  Description of Artificial Sequence: Synthetic oligonucleotide
  Sense strand starting at position 23 of SEQ ID NO: 1881668
ugaacucauggcuaaaggu

SEQ ID NO: 2062403 - RNA, 19 nt, Artificial Sequence
  Description of Artificial Sequence: Synthetic oligonucleotide
  Antisense strand to SEQ ID NO: 2062402
accuuuagccaugaguuca

SEQ ID NO: 2062404 - RNA, 19 nt, Artificial Sequence
  Description of Artificial Sequence: Synthetic oligonucleotide
  Sense strand starting at position 30 of SEQ ID NO: 1881668
auggcuaaagguuaugauu

SEQ ID NO: 2062405 - RNA, 19 nt, Artificial Sequence
  Description of Artificial Sequence: Synthetic oligonucleotide
  Antisense strand to SEQ ID NO: 2062404
aaucauaaccuuuagccau

SEQ ID NO: 2062406 - RNA, 19 nt, Artificial Sequence
  Description of Artificial Sequence: Synthetic oligonucleotide
  Sense strand starting at position 125 of SEQ ID NO: 1881668
cugcauagugaaggaaaga

SEQ ID NO: 2062407 - RNA, 19 nt, Artificial Sequence
  Description of Artificial Sequence: Synthetic oligonucleotide
  Antisense strand to SEQ ID NO: 2062406
ucuuuccuucacuaugcag

SEQ ID NO: 2062408 - RNA, 19 nt, Artificial Sequence
  Description of Artificial Sequence: Synthetic oligonucleotide
  Sense strand starting at position 238 of SEQ ID NO: 1881668
ugccuacauugagcaaaua

SEQ ID NO: 2062409 - RNA, 19 nt, Artificial Sequence
  Description of Artificial Sequence: Synthetic oligonucleotide
  Antisense strand to SEQ ID NO: 2062408
uauuugcucaauguaggca

SEQ ID NO: 2062410 - RNA, 19 nt, Artificial Sequence
  Description of Artificial Sequence: Synthetic oligonucleotide
  Sense strand starting at position 239 of SEQ ID NO: 1881668
gccuacauugagcaaauaa

SEQ ID NO: 2062411 - RNA, 19 nt, Artificial Sequence
  Description of Artificial Sequence: Synthetic oligonucleotide
  Antisense strand to SEQ ID NO: 2062410
uuauuugcucaauguaggc

SEQ ID NO: 2062412 - RNA, 19 nt, Artificial Sequence
  Description of Artificial Sequence: Synthetic oligonucleotide
  Sense strand starting at position 796 of SEQ ID NO: 1881668
uaaugagccuuuguuugaa

SEQ ID NO: 2062413 - RNA, 19 nt, Artificial Sequence
  Description of Artificial Sequence: Synthetic oligonucleotide
  Antisense strand to SEQ ID NO: 2062412
uucaaacaaaggcucauua

SEQ ID NO: 2062414 - RNA, 19 nt, Artificial Sequence
  Description of Artificial Sequence: Synthetic oligonucleotide
  Sense strand starting at position 847 of SEQ ID NO: 1881668
gaacuaugauguuuagcaa

SEQ ID NO: 2062415 - RNA, 19 nt, Artificial Sequence
  Description of Artificial Sequence: Synthetic oligonucleotide
  Antisense strand to SEQ ID NO: 2062414
uugcuaaacaucauaguuc

SEQ ID NO: 2062416 - RNA, 19 nt, Artificial Sequence
  Description of Artificial Sequence: Synthetic oligonucleotide
  Sense strand starting at position 850 of SEQ ID NO: 1881668
cuaugauguuuagcaauga

SEQ ID NO: 2062417 - RNA, 19 nt, Artificial Sequence
  Description of Artificial Sequence: Synthetic oligonucleotide
  Antisense strand to SEQ ID NO: 2062416
ucauugcuaaacaucauag

SEQ ID NO: 2062418 - RNA, 19 nt, Artificial Sequence
  Description of Artificial Sequence: Synthetic oligonucleotide
  Sense strand starting at position 865 of SEQ ID NO: 1881668
augauuugauaguaaagag

SEQ ID NO: 2062419 - RNA, 19 nt, Artificial Sequence
  Description of Artificial Sequence: Synthetic oligonucleotide
  Antisense strand to SEQ ID NO: 2062418
cucuuuacuaucaaaucau

SEQ ID NO: 2062420 - RNA, 19 nt, Artificial Sequence
  Description of Artificial Sequence: Synthetic oligonucleotide
  Sense strand starting at position 877 of SEQ ID NO: 1881668
uaaagagauuucuguagaa

SEQ ID NO: 2062421 - RNA, 19 nt, Artificial Sequence
  Description of Artificial Sequence: Synthetic oligonucleotide
  Antisense strand to SEQ ID NO: 2062420
uucuacagaaaucucuuua

SEQ ID NO: 2062422 - RNA, 19 nt, Artificial Sequence
  Description of Artificial Sequence: Synthetic oligonucleotide
  Sense strand starting at position 906 of SEQ ID NO: 1881668
uuaccaguaguggaaaguu

SEQ ID NO: 2062423 - RNA, 19 nt, Artificial Sequence
  Description of Artificial Sequence: Synthetic oligonucleotide
  Antisense strand to SEQ ID NO: 2062422
aacuuuccacuacugguaa

SEQ ID NO: 2062424 - RNA, 19 nt, Artificial Sequence
  Description of Artificial Sequence: Synthetic oligonucleotide
  Sense strand starting at position 1032 of SEQ ID NO: 1881668
caguuaaagaaguggguaa

SEQ ID NO: 2062425 - RNA, 19 nt, Artificial Sequence
  Description of Artificial Sequence: Synthetic oligonucleotide
  Antisense strand to SEQ ID NO: 2062424
uuacccacuucuuuaacug

SEQ ID NO: 2062426 - RNA, 19 nt, Artificial Sequence
  Description of Artificial Sequence: Synthetic oligonucleotide
  Sense strand starting at position 1033 of SEQ ID NO: 1881668
aguuaaagaaguggguaaa

SEQ ID NO: 2062427 - RNA, 19 nt, Artificial Sequence
  Description of Artificial Sequence: Synthetic oligonucleotide
  Antisense strand to SEQ ID NO: 2062426
uuuacccacuucuuuaacu

SEQ ID NO: 2062428 - RNA, 19 nt, Artificial Sequence
  Description of Artificial Sequence: Synthetic oligonucleotide
  Sense strand starting at position 1128 of SEQ ID NO: 1881668
gcuguuagaucacuuacaa

SEQ ID NO: 2062429 - RNA, 19 nt, Artificial Sequence
  Description of Artificial Sequence: Synthetic oligonucleotide
  Antisense strand to SEQ ID NO: 2062428
uuguaagugaucuaacagc

SEQ ID NO: 2062430 - RNA, 19 nt, Artificial Sequence
  Description of Artificial Sequence: Synthetic oligonucleotide
  Sense strand starting at position 1203 of SEQ ID NO: 1881668
cggcaauuccaguaauuaa

SEQ ID NO: 2062431 - RNA, 19 nt, Artificial Sequence
  Description of Artificial Sequence: Synthetic oligonucleotide
  Antisense strand to SEQ ID NO: 2062430
uuaauuacuggaauugccg

SEQ ID NO: 2062432 - RNA, 19 nt, Artificial Sequence
  Description of Artificial Sequence: Synthetic oligonucleotide
  Sense strand starting at position 1371 of SEQ ID NO: 1881668
ggagauacauaucuucugu

SEQ ID NO: 2062433 - RNA, 19 nt, Artificial Sequence
  Description of Artificial Sequence: Synthetic oligonucleotide
  Antisense strand to SEQ ID NO: 2062432
acagaagauauguaucucc

SEQ ID NO: 2062434 - RNA, 19 nt, Artificial Sequence
  Description of Artificial Sequence: Synthetic oligonucleotide
  Sense strand starting at position 1377 of SEQ ID NO: 1881668
acauaucuucuguguuaaa

SEQ ID NO: 2062435 - RNA, 19 nt, Artificial Sequence
  Description of Artificial Sequence: Synthetic oligonucleotide
  Antisense strand to SEQ ID NO: 2062434
uuuaacacagaagauaugu

SEQ ID NO: 2062436 - RNA, 19 nt, Artificial Sequence
  Description of Artificial Sequence: Synthetic oligonucleotide
  Sense strand starting at position 1426 of SEQ ID NO: 1881668
ucaggucucaugcagaguu

SEQ ID NO: 2062437 - RNA, 19 nt, Artificial Sequence
  Description of Artificial Sequence: Synthetic oligonucleotide
  Antisense strand to SEQ ID NO: 2062436
aacucugcaugagaccuga

SEQ ID NO: 2062438 - RNA, 19 nt, Artificial Sequence
  Description of Artificial Sequence: Synthetic oligonucleotide
  Sense strand starting at position 1526 of SEQ ID NO: 1881668
uuucuaagaugucugaaga

SEQ ID NO: 2062439 - RNA, 19 nt, Artificial Sequence
  Description of Artificial Sequence: Synthetic oligonucleotide
  Antisense strand to SEQ ID NO: 2062438
ucuucagacaucuuagaaa

SEQ ID NO: 2062440 - RNA, 19 nt, Artificial Sequence
  Description of Artificial Sequence: Synthetic oligonucleotide
  Sense strand starting at position 1527 of SEQ ID NO: 1881668
uucuaagaugucugaagac

SEQ ID NO: 2062441 - RNA, 19 nt, Artificial Sequence
  Description of Artificial Sequence: Synthetic oligonucleotide
  Antisense strand to SEQ ID NO: 2062440
gucuucagacaucuuagaa

SEQ ID NO: 2062442 - RNA, 19 nt, Artificial Sequence
  Description of Artificial Sequence: Synthetic oligonucleotide
  Sense strand starting at position 1571 of SEQ ID NO: 1881668
cccuuacuaguccaguuau

SEQ ID NO: 2062443 - RNA, 19 nt, Artificial Sequence
  Description of Artificial Sequence: Synthetic oligonucleotide
  Antisense strand to SEQ ID NO: 2062442
auaacuggacuaguaaggg

SEQ ID NO: 2062444 - RNA, 19 nt, Artificial Sequence
  Description of Artificial Sequence: Synthetic oligonucleotide
  Sense strand starting at position 1757 of SEQ ID NO: 1881668
gcuaauaugcaugauguca

SEQ ID NO: 2062445 - RNA, 19 nt, Artificial Sequence
  Description of Artificial Sequence: Synthetic oligonucleotide
  Antisense strand to SEQ ID NO: 2062444
ugacaucaugcauauuagc

SEQ ID NO: 2062446 - RNA, 19 nt, Artificial Sequence
  Description of Artificial Sequence: Synthetic oligonucleotide
  Sense strand starting at position 1765 of SEQ ID NO: 1881668
gcaugaugucaacaucgac

SEQ ID NO: 2062447 - RNA, 19 nt, Artificial Sequence
  Description of Artificial Sequence: Synthetic oligonucleotide
  Antisense strand to SEQ ID NO: 2062446
gucgauguugacaucaugc

SEQ ID NO: 2062448 - RNA, 19 nt, Artificial Sequence
  Description of Artificial Sequence: Synthetic oligonucleotide
  Sense strand starting at position 2116 of SEQ ID NO: 1881668
ggugaugaauuugggagau

SEQ ID NO: 2062449 - RNA, 19 nt, Artificial Sequence
  Description of Artificial Sequence: Synthetic oligonucleotide
  Antisense strand to SEQ ID NO: 2062448
aucucccaaauucaucacc

SEQ ID NO: 2062450 - RNA, 19 nt, Artificial Sequence
  Description of Artificial Sequence: Synthetic oligonucleotide
  Sense strand starting at position 2407 of SEQ ID NO: 1881668
uaagucagauugccaauga

SEQ ID NO: 2062451 - RNA, 19 nt, Artificial Sequence
  Description of Artificial Sequence: Synthetic oligonucleotide
  Antisense strand to SEQ ID NO: 2062450
ucauuggcaaucugacuua

SEQ ID NO: 2062452 - RNA, 19 nt, Artificial Sequence
  Description of Artificial Sequence: Synthetic oligonucleotide
  Sense strand starting at position 2546 of SEQ ID NO: 1881668
ucaagcuugcuugaugauu

SEQ ID NO: 2062453 - RNA, 19 nt, Artificial Sequence
  Description of Artificial Sequence: Synthetic oligonucleotide
  Antisense strand to SEQ ID NO: 2062452
aaucaucaagcaagcuuga

SEQ ID NO: 2062454 - RNA, 19 nt, Artificial Sequence
  Description of Artificial Sequence: Synthetic oligonucleotide
  Sense strand starting at position 2695 of SEQ ID NO: 1881668
caccuugagcccuagaguu

SEQ ID NO: 2062455 - RNA, 19 nt, Artificial Sequence
  Description of Artificial Sequence: Synthetic oligonucleotide
  Antisense strand to SEQ ID NO: 2062454
aacucuagggcucaaggug

SEQ ID NO: 2062456 - RNA, 19 nt, Artificial Sequence
  Description of Artificial Sequence: Synthetic oligonucleotide
  Sense strand starting at position 2904 of SEQ ID NO: 1881668
aggauugguggaggcagau

SEQ ID NO: 2062457 - RNA, 19 nt, Artificial Sequence
  Description of Artificial Sequence: Synthetic oligonucleotide
  Antisense strand to SEQ ID NO: 2062456
aucugccuccaccaauccu

SEQ ID NO: 2062458 - RNA, 19 nt, Artificial Sequence
  Description of Artificial Sequence: Synthetic oligonucleotide
  Sense strand starting at position 2929 of SEQ ID NO: 1881668
ugacgaugcagccaagagu

SEQ ID NO: 2062459 - RNA, 19 nt, Artificial Sequence
  Description of Artificial Sequence: Synthetic oligonucleotide
  Antisense strand to SEQ ID NO: 2062458
acucuuggcugcaucguca

SEQ ID NO: 2062460 - RNA, 19 nt, Artificial Sequence
  Description of Artificial Sequence: Synthetic oligonucleotide
  Sense strand starting at position 2944 of SEQ ID NO: 1881668
gagugccuacucuaaauga

SEQ ID NO: 2062461 - RNA, 19 nt, Artificial Sequence
  Description of Artificial Sequence: Synthetic oligonucleotide
  Antisense strand to SEQ ID NO: 2062460
ucauuuagaguaggcacuc

SEQ ID NO: 2062462 - RNA, 19 nt, Artificial Sequence
  Description of Artificial Sequence: Synthetic oligonucleotide
  Sense strand starting at position 2952 of SEQ ID NO: 1881668
acucuaaaugaguguaaag

SEQ ID NO: 2062463 - RNA, 19 nt, Artificial Sequence
  Description of Artificial Sequence: Synthetic oligonucleotide
  Antisense strand to SEQ ID NO: 2062462
cuuuacacucauuuagagu

SEQ ID NO: 2062464 - RNA, 19 nt, Artificial Sequence
  Description of Artificial Sequence: Synthetic oligonucleotide
  Sense strand starting at position 3212 of SEQ ID NO: 1881668
uggugcauuugucuaacuu

SEQ ID NO: 2062465 - RNA, 19 nt, Artificial Sequence
  Description of Artificial Sequence: Synthetic oligonucleotide
  Antisense strand to SEQ ID NO: 2062464
aaguuagacaaaugcacca

SEQ ID NO: 2062466 - RNA, 19 nt, Artificial Sequence
  Description of Artificial Sequence: Synthetic oligonucleotide
  Sense strand starting at position 3325 of SEQ ID NO: 1881668
ucagaaucaugcucugauu

SEQ ID NO: 2062467 - RNA, 19 nt, Artificial Sequence
  Description of Artificial Sequence: Synthetic oligonucleotide
  Antisense strand to SEQ ID NO: 2062466
aaucagagcaugauucuga

SEQ ID NO: 2062468 - RNA, 19 nt, Artificial Sequence
  Description of Artificial Sequence: Synthetic oligonucleotide
  Sense strand starting at position 3327 of SEQ ID NO: 1881668
agaaucaugcucugauucu

SEQ ID NO: 2062469 - RNA, 19 nt, Artificial Sequence
  Description of Artificial Sequence: Synthetic oligonucleotide
  Antisense strand to SEQ ID NO: 2062468
agaaucagagcaugauucu

SEQ ID NO: 2062470 - RNA, 19 nt, Artificial Sequence
  Description of Artificial Sequence: Synthetic oligonucleotide
  Sense strand starting at position 3433 of SEQ ID NO: 1881668
ugaagagcucccuguauga

SEQ ID NO: 2062471 - RNA, 19 nt, Artificial Sequence
  Description of Artificial Sequence: Synthetic oligonucleotide
  Antisense strand to SEQ ID NO: 2062470
ucauacagggagcucuuca

SEQ ID NO: 2062472 - RNA, 19 nt, Artificial Sequence
  Description of Artificial Sequence: Synthetic oligonucleotide
  Sense strand starting at position 3452 of SEQ ID NO: 1881668
ggcccucugcuggagaauu

SEQ ID NO: 2062473 - RNA, 19 nt, Artificial Sequence
  Description of Artificial Sequence: Synthetic oligonucleotide
  Antisense strand to SEQ ID NO: 2062472
aauucuccagcagagggcc

SEQ ID NO: 2062474 - RNA, 19 nt, Artificial Sequence
  Description of Artificial Sequence: Synthetic oligonucleotide
  Sense strand starting at position 3556 of SEQ ID NO: 1881668
ggcuaauggaaguguaaca

SEQ ID NO: 2062475 - RNA, 19 nt, Artificial Sequence
  Description of Artificial Sequence: Synthetic oligonucleotide
  Antisense strand to SEQ ID NO: 2062474
uguuacacuuccauuagcc

SEQ ID NO: 2062476 - RNA, 19 nt, Artificial Sequence
  Description of Artificial Sequence: Synthetic oligonucleotide
  Sense strand starting at position 3929 of SEQ ID NO: 1881668
cgaaucuaacuuggagauu

SEQ ID NO: 2062477 - RNA, 19 nt, Artificial Sequence
  Description of Artificial Sequence: Synthetic oligonucleotide
  Antisense strand to SEQ ID NO: 2062476
aaucuccaaguuagauucg

SEQ ID NO: 2062478 - RNA, 19 nt, Artificial Sequence
  Description of Artificial Sequence: Synthetic oligonucleotide
  Sense strand starting at position 3965 of SEQ ID NO: 1881668
uauuaagagcucuguuagg

SEQ ID NO: 2062479 - RNA, 19 nt, Artificial Sequence
  Description of Artificial Sequence: Synthetic oligonucleotide
  Antisense strand to SEQ ID NO: 2062478
ccuaacagagcucuuaaua

SEQ ID NO: 2062480 - RNA, 19 nt, Artificial Sequence
  Description of Artificial Sequence: Synthetic oligonucleotide
  Sense strand starting at position 122 of SEQ ID NO: 1881669
acauuaacacaucaguguu

SEQ ID NO: 2062481 - RNA, 19 nt, Artificial Sequence
  Description of Artificial Sequence: Synthetic oligonucleotide
  Antisense strand to SEQ ID NO: 2062480
aacacugauguguuaaugu

SEQ ID NO: 2062482 - RNA, 19 nt, Artificial Sequence
  Description of Artificial Sequence: Synthetic oligonucleotide
  Sense strand starting at position 124 of SEQ ID NO: 1881669
auuaacacaucaguguuua

SEQ ID NO: 2062483 - RNA, 19 nt, Artificial Sequence
  Description of Artificial Sequence: Synthetic oligonucleotide
  Antisense strand to SEQ ID NO: 2062482
uaaacacugauguguuaau

SEQ ID NO: 2062484 - RNA, 19 nt, Artificial Sequence
  Description of Artificial Sequence: Synthetic oligonucleotide
  Sense strand starting at position 514 of SEQ ID NO: 1881669
gguauuguaauagguagaa

SEQ ID NO: 2062485 - RNA, 19 nt, Artificial Sequence
  Description of Artificial Sequence: Synthetic oligonucleotide
  Antisense strand to SEQ ID NO: 2062484
uucuaccuauuacaauacc

SEQ ID NO: 2062486 - RNA, 19 nt, Artificial Sequence
  Description of Artificial Sequence: Synthetic oligonucleotide
  Sense strand starting at position 518 of SEQ ID NO: 1881669
uuguaauagguagaauagu

SEQ ID NO: 2062487 - RNA, 19 nt, Artificial Sequence
  Description of Artificial Sequence: Synthetic oligonucleotide
  Antisense strand to SEQ ID NO: 2062486
acuauucuaccuauuacaa

SEQ ID NO: 2062488 - RNA, 19 nt, Artificial Sequence
  Description of Artificial Sequence: Synthetic oligonucleotide
  Sense strand starting at position 661 of SEQ ID NO: 1881669
gguauaaugugaucauaaa

SEQ ID NO: 2062489 - RNA, 19 nt, Artificial Sequence
  Description of Artificial Sequence: Synthetic oligonucleotide
  Antisense strand to SEQ ID NO: 2062488
uuuaugaucacauuauacc

SEQ ID NO: 2062490 - RNA, 19 nt, Artificial Sequence
  Description of Artificial Sequence: Synthetic oligonucleotide
  Sense strand starting at position 728 of SEQ ID NO: 1881669
gagagauagcagcaugagu

SEQ ID NO: 2062491 - RNA, 19 nt, Artificial Sequence
  Description of Artificial Sequence: Synthetic oligonucleotide
  Antisense strand to SEQ ID NO: 2062490
acucaugcugcuaucucuc

SEQ ID NO: 2062492 - RNA, 19 nt, Artificial Sequence
  Description of Artificial Sequence: Synthetic oligonucleotide
  Sense strand starting at position 959 of SEQ ID NO: 1881669
uucuuaagucgcgaaauuu

SEQ ID NO: 2062493 - RNA, 19 nt, Artificial Sequence
  Description of Artificial Sequence: Synthetic oligonucleotide
  Antisense strand to SEQ ID NO: 2062492
aaauuucgcgacuuaagaa

SEQ ID NO: 2062494 - RNA, 19 nt, Artificial Sequence
  Description of Artificial Sequence: Synthetic oligonucleotide
  Sense strand starting at position 986 of SEQ ID NO: 1881669
cuguuauagcaguaauaga

SEQ ID NO: 2062495 - RNA, 19 nt, Artificial Sequence
  Description of Artificial Sequence: Synthetic oligonucleotide
  Antisense strand to SEQ ID NO: 2062494
ucuauuacugcuauaacag

SEQ ID NO: 2062496 - RNA, 19 nt, Artificial Sequence
  Description of Artificial Sequence: Synthetic oligonucleotide
  Sense strand starting at position 1088 of SEQ ID NO: 1881669
auuaguuuccaggaaaugu

SEQ ID NO: 2062497 - RNA, 19 nt, Artificial Sequence
  Description of Artificial Sequence: Synthetic oligonucleotide
  Antisense strand to SEQ ID NO: 2062496
acauuuccuggaaacuaau

SEQ ID NO: 2062498 - RNA, 19 nt, Artificial Sequence
  Description of Artificial Sequence: Synthetic oligonucleotide
  Sense strand starting at position 1114 of SEQ ID NO: 1881669
uguuaucucuauuuguuga

SEQ ID NO: 2062499 - RNA, 19 nt, Artificial Sequence
  Description of Artificial Sequence: Synthetic oligonucleotide
  Antisense strand to SEQ ID NO: 2062498
ucaacaaauagagauaaca

SEQ ID NO: 2062500 - RNA, 19 nt, Artificial Sequence
  Description of Artificial Sequence: Synthetic oligonucleotide
  Sense strand starting at position 1133 of SEQ ID NO: 1881669
gauuuaucauaagauagug

SEQ ID NO: 2062501 - RNA, 19 nt, Artificial Sequence
  Description of Artificial Sequence: Synthetic oligonucleotide
  Antisense strand to SEQ ID NO: 2062500
cacuaucuuaugauaaauc

SEQ ID NO: 2062502 - RNA, 19 nt, Artificial Sequence
  Description of Artificial Sequence: Synthetic oligonucleotide
  Sense strand starting at position 1211 of SEQ ID NO: 1881669
aagcuauacguguugcuca

SEQ ID NO: 2062503 - RNA, 19 nt, Artificial Sequence
  Description of Artificial Sequence: Synthetic oligonucleotide
  Antisense strand to SEQ ID NO: 2062502
ugagcaacacguauagcuu

SEQ ID NO: 2062504 - RNA, 19 nt, Artificial Sequence
  Description of Artificial Sequence: Synthetic oligonucleotide
  Sense strand starting at position 1213 of SEQ ID NO: 1881669
gcuauacguguugcucaaa

SEQ ID NO: 2062505 - RNA, 19 nt, Artificial Sequence
  Description of Artificial Sequence: Synthetic oligonucleotide
  Antisense strand to SEQ ID NO: 2062504
uuugagcaacacguauagc

SEQ ID NO: 2062506 - RNA, 19 nt, Artificial Sequence
  Description of Artificial Sequence: Synthetic oligonucleotide
  Sense strand starting at position 1251 of SEQ ID NO: 1881669
gagcuaugacuccaugcca

SEQ ID NO: 2062507 - RNA, 19 nt, Artificial Sequence
  Description of Artificial Sequence: Synthetic oligonucleotide
  Antisense strand to SEQ ID NO: 2062506
uggcauggagucauagcuc

SEQ ID NO: 2062508 - RNA, 19 nt, Artificial Sequence
  Description of Artificial Sequence: Synthetic oligonucleotide
  Sense strand starting at position 1483 of SEQ ID NO: 1881669
accagugcccucuaaagaa

SEQ ID NO: 2062509 - RNA, 19 nt, Artificial Sequence
  Description of Artificial Sequence: Synthetic oligonucleotide
  Antisense strand to SEQ ID NO: 2062508
uucuuuagagggcacuggu

SEQ ID NO: 2062510 - RNA, 19 nt, Artificial Sequence
  Description of Artificial Sequence: Synthetic oligonucleotide
  Sense strand starting at position 1627 of SEQ ID NO: 1881669
ggaacauguuuccugggau

SEQ ID NO: 2062511 - RNA, 19 nt, Artificial Sequence
  Description of Artificial Sequence: Synthetic oligonucleotide
  Antisense strand to SEQ ID NO: 2062510
aucccaggaaacauguucc

SEQ ID NO: 2062512 - RNA, 19 nt, Artificial Sequence
  Description of Artificial Sequence: Synthetic oligonucleotide
  Sense strand starting at position 2006 of SEQ ID NO: 1881669
ugagaauuacauuguucuc

SEQ ID NO: 2062513 - RNA, 19 nt, Artificial Sequence
  Description of Artificial Sequence: Synthetic oligonucleotide
  Antisense strand to SEQ ID NO: 2062512
gagaacaauguaauucuca

SEQ ID NO: 2062514 - RNA, 19 nt, Artificial Sequence
  Description of Artificial Sequence: Synthetic oligonucleotide
  Sense strand starting at position 2147 of SEQ ID NO: 1881669
aucugaauuuaagagaggu

SEQ ID NO: 2062515 - RNA, 19 nt, Artificial Sequence
  Description of Artificial Sequence: Synthetic oligonucleotide
  Antisense strand to SEQ ID NO: 2062514
accucucuuaaauucagau

SEQ ID NO: 2062516 - RNA, 19 nt, Artificial Sequence
  Description of Artificial Sequence: Synthetic oligonucleotide
  Sense strand starting at position 2199 of SEQ ID NO: 1881669
agauuaguggcacagucua

SEQ ID NO: 2062517 - RNA, 19 nt, Artificial Sequence
  Description of Artificial Sequence: Synthetic oligonucleotide
  Antisense strand to SEQ ID NO: 2062516
uagacugugccacuaaucu

SEQ ID NO: 2062518 - RNA, 19 nt, Artificial Sequence
  Description of Artificial Sequence: Synthetic oligonucleotide
  Sense strand starting at position 2252 of SEQ ID NO: 1881669
uuagaaauaucugcaacug

SEQ ID NO: 2062519 - RNA, 19 nt, Artificial Sequence
  Description of Artificial Sequence: Synthetic oligonucleotide
  Antisense strand to SEQ ID NO: 2062518
caguugcagauauuucuaa

SEQ ID NO: 2062520 - RNA, 19 nt, Artificial Sequence
  Description of Artificial Sequence: Synthetic oligonucleotide
  Sense strand starting at position 2307 of SEQ ID NO: 1881669
augggaugcucagugaaua

SEQ ID NO: 2062521 - RNA, 19 nt, Artificial Sequence
  Description of Artificial Sequence: Synthetic oligonucleotide
  Antisense strand to SEQ ID NO: 2062520
uauucacugagcaucccau

SEQ ID NO: 2062522 - RNA, 19 nt, Artificial Sequence
  Description of Artificial Sequence: Synthetic oligonucleotide
  Sense strand starting at position 2411 of SEQ ID NO: 1881669
uuggucaaaccagauugua

SEQ ID NO: 2062523 - RNA, 19 nt, Artificial Sequence
  Description of Artificial Sequence: Synthetic oligonucleotide
  Antisense strand to SEQ ID NO: 2062522
uacaaucugguuugaccaa

SEQ ID NO: 2062524 - RNA, 19 nt, Artificial Sequence
  Description of Artificial Sequence: Synthetic oligonucleotide
  Sense strand starting at position 2414 of SEQ ID NO: 1881669
gucaaaccagauuguauua

SEQ ID NO: 2062525 - RNA, 19 nt, Artificial Sequence
  Description of Artificial Sequence: Synthetic oligonucleotide
  Antisense strand to SEQ ID NO: 2062524
uaauacaaucugguuugac

SEQ ID NO: 2062526 - RNA, 19 nt, Artificial Sequence
  Description of Artificial Sequence: Synthetic oligonucleotide
  Sense strand starting at position 2426 of SEQ ID NO: 1881669
uguauuaauggaugacuau

SEQ ID NO: 2062527 - RNA, 19 nt, Artificial Sequence
  Description of Artificial Sequence: Synthetic oligonucleotide
  Antisense strand to SEQ ID NO: 2062526
auagucauccauuaauaca

SEQ ID NO: 2062528 - RNA, 19 nt, Artificial Sequence
  Description of Artificial Sequence: Synthetic oligonucleotide
  Sense strand starting at position 2449 of SEQ ID NO: 1881669
cucuaucaguaggcagaaa

SEQ ID NO: 2062529 - RNA, 19 nt, Artificial Sequence
  Description of Artificial Sequence: Synthetic oligonucleotide
  Antisense strand to SEQ ID NO: 2062528
uuucugccuacugauagag

SEQ ID NO: 2062530 - RNA, 19 nt, Artificial Sequence
  Description of Artificial Sequence: Synthetic oligonucleotide
  Sense strand starting at position 2477 of SEQ ID NO: 1881669
gugaguauuaauugggauc

SEQ ID NO: 2062531 - RNA, 19 nt, Artificial Sequence
  Description of Artificial Sequence: Synthetic oligonucleotide
  Antisense strand to SEQ ID NO: 2062530
gaucccaauuaauacucac

SEQ ID NO: 2062532 - RNA, 19 nt, Artificial Sequence
  Description of Artificial Sequence: Synthetic oligonucleotide
  Sense strand starting at position 2478 of SEQ ID NO: 1881669
ugaguauuaauugggauca

SEQ ID NO: 2062533 - RNA, 19 nt, Artificial Sequence
  Description of Artificial Sequence: Synthetic oligonucleotide
  Antisense strand to SEQ ID NO: 2062532
ugaucccaauuaauacuca

SEQ ID NO: 2062534 - RNA, 19 nt, Artificial Sequence
  Description of Artificial Sequence: Synthetic oligonucleotide
  Sense strand starting at position 2609 of SEQ ID NO: 1881669
ucugaaucacgguacagua

SEQ ID NO: 2062535 - RNA, 19 nt, Artificial Sequence
  Description of Artificial Sequence: Synthetic oligonucleotide
  Antisense strand to SEQ ID NO: 2062534
uacuguaccgugauucaga

SEQ ID NO: 2062536 - RNA, 19 nt, Artificial Sequence
  Description of Artificial Sequence: Synthetic oligonucleotide
  Sense strand starting at position 3259 of SEQ ID NO: 1881669
agaauaaacucagugcucu

SEQ ID NO: 2062537 - RNA, 19 nt, Artificial Sequence
  Description of Artificial Sequence: Synthetic oligonucleotide
  Antisense strand to SEQ ID NO: 2062536
agagcacugaguuuauucu

SEQ ID NO: 2062538 - RNA, 19 nt, Artificial Sequence
  Description of Artificial Sequence: Synthetic oligonucleotide
  Sense strand starting at position 3326 of SEQ ID NO: 1881669
acugguuaccucuggagaa

SEQ ID NO: 2062539 - RNA, 19 nt, Artificial Sequence
  Description of Artificial Sequence: Synthetic oligonucleotide
  Antisense strand to SEQ ID NO: 2062538
uucuccagagguaaccagu

SEQ ID NO: 2062540 - RNA, 19 nt, Artificial Sequence
  Description of Artificial Sequence: Synthetic oligonucleotide
  Sense strand starting at position 3433 of SEQ ID NO: 1881669
aggucaagucaaugggaua

SEQ ID NO: 2062541 - RNA, 19 nt, Artificial Sequence
  Description of Artificial Sequence: Synthetic oligonucleotide
  Antisense strand to SEQ ID NO: 2062540
uaucccauugacuugaccu

SEQ ID NO: 2062542 - RNA, 19 nt, Artificial Sequence
  Description of Artificial Sequence: Synthetic oligonucleotide
  Sense strand starting at position 3434 of SEQ ID NO: 1881669
ggucaagucaaugggauaa

SEQ ID NO: 2062543 - RNA, 19 nt, Artificial Sequence
  Description of Artificial Sequence: Synthetic oligonucleotide
  Antisense strand to SEQ ID NO: 2062542
uuaucccauugacuugacc

SEQ ID NO: 2062544 - RNA, 19 nt, Artificial Sequence
  Description of Artificial Sequence: Synthetic oligonucleotide
  Sense strand starting at position 3479 of SEQ ID NO: 1881669
ucugucauccuugagauca

SEQ ID NO: 2062545 - RNA, 19 nt, Artificial Sequence
  Description of Artificial Sequence: Synthetic oligonucleotide
  Antisense strand to SEQ ID NO: 2062544
ugaucucaaggaugacaga

SEQ ID NO: 2062546 - RNA, 19 nt, Artificial Sequence
  Description of Artificial Sequence: Synthetic oligonucleotide
  Sense strand starting at position 3531 of SEQ ID NO: 1881669
cugggugugauauaaagca

SEQ ID NO: 2062547 - RNA, 19 nt, Artificial Sequence
  Description of Artificial Sequence: Synthetic oligonucleotide
  Antisense strand to SEQ ID NO: 2062546
ugcuuuauaucacacccag

SEQ ID NO: 2062548 - RNA, 19 nt, Artificial Sequence
  Description of Artificial Sequence: Synthetic oligonucleotide
  Sense strand starting at position 3574 of SEQ ID NO: 1881669
ucccaauuuguaugaucgu

SEQ ID NO: 2062549 - RNA, 19 nt, Artificial Sequence
  Description of Artificial Sequence: Synthetic oligonucleotide
  Antisense strand to SEQ ID NO: 2062548
acgaucauacaaauuggga

SEQ ID NO: 2062550 - RNA, 19 nt, Artificial Sequence
  Description of Artificial Sequence: Synthetic oligonucleotide
  Sense strand starting at position 3674 of SEQ ID NO: 1881669
cauggaugugauugugaga

SEQ ID NO: 2062551 - RNA, 19 nt, Artificial Sequence
  Description of Artificial Sequence: Synthetic oligonucleotide
  Antisense strand to SEQ ID NO: 2062550
ucucacaaucacauccaug

SEQ ID NO: 2062552 - RNA, 19 nt, Artificial Sequence
  Description of Artificial Sequence: Synthetic oligonucleotide
  Sense strand starting at position 3805 of SEQ ID NO: 1881669
cauugacaguuguuagaua

SEQ ID NO: 2062553 - RNA, 19 nt, Artificial Sequence
  Description of Artificial Sequence: Synthetic oligonucleotide
  Antisense strand to SEQ ID NO: 2062552
uaucuaacaacugucaaug

SEQ ID NO: 2062554 - RNA, 19 nt, Artificial Sequence
  Description of Artificial Sequence: Synthetic oligonucleotide
  Sense strand starting at position 3925 of SEQ ID NO: 1881669
auagcaagaguuuagugaa

SEQ ID NO: 2062555 - RNA, 19 nt, Artificial Sequence
  Description of Artificial Sequence: Synthetic oligonucleotide
  Antisense strand to SEQ ID NO: 2062554
uucacuaaacucuugcuau

SEQ ID NO: 2062556 - RNA, 19 nt, Artificial Sequence
  Description of Artificial Sequence: Synthetic oligonucleotide
  Sense strand starting at position 3932 of SEQ ID NO: 1881669
gaguuuagugaagacguua

SEQ ID NO: 2062557 - RNA, 19 nt, Artificial Sequence
  Description of Artificial Sequence: Synthetic oligonucleotide
  Antisense strand to SEQ ID NO: 2062556
uaacgucuucacuaaacuc

SEQ ID NO: 2062558 - RNA, 19 nt, Artificial Sequence
  Description of Artificial Sequence: Synthetic oligonucleotide
  Sense strand starting at position 3937 of SEQ ID NO: 1881669
uagugaagacguuaggagu

SEQ ID NO: 2062559 - RNA, 19 nt, Artificial Sequence
  Description of Artificial Sequence: Synthetic oligonucleotide
  Antisense strand to SEQ ID NO: 2062558
acuccuaacgucuucacua

SEQ ID NO: 2062560 - RNA, 19 nt, Artificial Sequence
  Description of Artificial Sequence: Synthetic oligonucleotide
  Sense strand starting at position 41 of SEQ ID NO: 1881670
ugaguacaucaucaaagca

SEQ ID NO: 2062561 - RNA, 19 nt, Artificial Sequence
  Description of Artificial Sequence: Synthetic oligonucleotide
  Antisense strand to SEQ ID NO: 2062560
ugcuuugaugauguacuca

SEQ ID NO: 2062562 - RNA, 19 nt, Artificial Sequence
  Description of Artificial Sequence: Synthetic oligonucleotide
  Sense strand starting at position 179 of SEQ ID NO: 1881670
uaagguagucacugguaga

SEQ ID NO: 2062563 - RNA, 19 nt, Artificial Sequence
  Description of Artificial Sequence: Synthetic oligonucleotide
  Antisense strand to SEQ ID NO: 2062562
ucuaccagugacuaccuua

SEQ ID NO: 2062564 - RNA, 19 nt, Artificial Sequence
  Description of Artificial Sequence: Synthetic oligonucleotide
  Sense strand starting at position 180 of SEQ ID NO: 1881670
aagguagucacugguagac

SEQ ID NO: 2062565 - RNA, 19 nt, Artificial Sequence
  Description of Artificial Sequence: Synthetic oligonucleotide
  Antisense strand to SEQ ID NO: 2062564
gucuaccagugacuaccuu

SEQ ID NO: 2062566 - RNA, 19 nt, Artificial Sequence
  Description of Artificial Sequence: Synthetic oligonucleotide
  Sense strand starting at position 348 of SEQ ID NO: 1881670
cucaaugaauggucacuga

SEQ ID NO: 2062567 - RNA, 19 nt, Artificial Sequence
  Description of Artificial Sequence: Synthetic oligonucleotide
  Antisense strand to SEQ ID NO: 2062566
ucagugaccauucauugag

SEQ ID NO: 2062568 - RNA, 19 nt, Artificial Sequence
  Description of Artificial Sequence: Synthetic oligonucleotide
  Sense strand starting at position 352 of SEQ ID NO: 1881670
augaauggucacugaaucu

SEQ ID NO: 2062569 - RNA, 19 nt, Artificial Sequence
  Description of Artificial Sequence: Synthetic oligonucleotide
  Antisense strand to SEQ ID NO: 2062568
agauucagugaccauucau

SEQ ID NO: 2062570 - RNA, 19 nt, Artificial Sequence
  Description of Artificial Sequence: Synthetic oligonucleotide
  Sense strand starting at position 423 of SEQ ID NO: 1881670
cuguuuaccuugguaaaga

SEQ ID NO: 2062571 - RNA, 19 nt, Artificial Sequence
  Description of Artificial Sequence: Synthetic oligonucleotide
  Antisense strand to SEQ ID NO: 2062570
ucuuuaccaagguaaacag

SEQ ID NO: 2062572 - RNA, 19 nt, Artificial Sequence
  Description of Artificial Sequence: Synthetic oligonucleotide
  Sense strand starting at position 755 of SEQ ID NO: 1881670
ggaggucuccugggaaaca

SEQ ID NO: 2062573 - RNA, 19 nt, Artificial Sequence
  Description of Artificial Sequence: Synthetic oligonucleotide
  Antisense strand to SEQ ID NO: 2062572
uguuucccaggagaccucc

SEQ ID NO: 2062574 - RNA, 19 nt, Artificial Sequence
  Description of Artificial Sequence: Synthetic oligonucleotide
  Sense strand starting at position 819 of SEQ ID NO: 1881670
guuauuaguaaguggaaga

SEQ ID NO: 2062575 - RNA, 19 nt, Artificial Sequence
  Description of Artificial Sequence: Synthetic oligonucleotide
  Antisense strand to SEQ ID NO: 2062574
ucuuccacuuacuaauaac

SEQ ID NO: 2062576 - RNA, 19 nt, Artificial Sequence
  Description of Artificial Sequence: Synthetic oligonucleotide
  Sense strand starting at position 873 of SEQ ID NO: 1881670
gcuuuaaaucugugacaac

SEQ ID NO: 2062577 - RNA, 19 nt, Artificial Sequence
  Description of Artificial Sequence: Synthetic oligonucleotide
  Antisense strand to SEQ ID NO: 2062576
guugucacagauuuaaagc

SEQ ID NO: 2062578 - RNA, 19 nt, Artificial Sequence
  Description of Artificial Sequence: Synthetic oligonucleotide
  Sense strand starting at position 952 of SEQ ID NO: 1881670
guuaucacacuuuguagaa

SEQ ID NO: 2062579 - RNA, 19 nt, Artificial Sequence
  Description of Artificial Sequence: Synthetic oligonucleotide
  Antisense strand to SEQ ID NO: 2062578
uucuacaaagugugauaac

SEQ ID NO: 2062580 - RNA, 19 nt, Artificial Sequence
  Description of Artificial Sequence: Synthetic oligonucleotide
  Sense strand starting at position 962 of SEQ ID NO: 1881670
uuuguagaaucacccaaga

SEQ ID NO: 2062581 - RNA, 19 nt, Artificial Sequence
  Description of Artificial Sequence: Synthetic oligonucleotide
  Antisense strand to SEQ ID NO: 2062580
ucuugggugauucuacaaa

SEQ ID NO: 2062582 - RNA, 19 nt, Artificial Sequence
  Description of Artificial Sequence: Synthetic oligonucleotide
  Sense strand starting at position 1042 of SEQ ID NO: 1881670
uuaccuaucgcauaugaaa

SEQ ID NO: 2062583 - RNA, 19 nt, Artificial Sequence
  Description of Artificial Sequence: Synthetic oligonucleotide
  Antisense strand to SEQ ID NO: 2062582
uuucauaugcgauagguaa

SEQ ID NO: 2062584 - RNA, 19 nt, Artificial Sequence
  Description of Artificial Sequence: Synthetic oligonucleotide
  Sense strand starting at position 1280 of SEQ ID NO: 1881670
agucaaugugcuuaaagca

SEQ ID NO: 2062585 - RNA, 19 nt, Artificial Sequence
  Description of Artificial Sequence: Synthetic oligonucleotide
  Antisense strand to SEQ ID NO: 2062584
ugcuuuaagcacauugacu

SEQ ID NO: 2062586 - RNA, 19 nt, Artificial Sequence
  Description of Artificial Sequence: Synthetic oligonucleotide
  Sense strand starting at position 1287 of SEQ ID NO: 1881670
gugcuuaaagcacaagaau

SEQ ID NO: 2062587 - RNA, 19 nt, Artificial Sequence
  Description of Artificial Sequence: Synthetic oligonucleotide
  Antisense strand to SEQ ID NO: 2062586
auucuugugcuuuaagcac

SEQ ID NO: 2062588 - RNA, 19 nt, Artificial Sequence
  Description of Artificial Sequence: Synthetic oligonucleotide
  Sense strand starting at position 1459 of SEQ ID NO: 1881670
cuggguuuccuuuaguaaa

SEQ ID NO: 2062589 - RNA, 19 nt, Artificial Sequence
  Description of Artificial Sequence: Synthetic oligonucleotide
  Antisense strand to SEQ ID NO: 2062588
uuuacuaaaggaaacccag

SEQ ID NO: 2062590 - RNA, 19 nt, Artificial Sequence
  Description of Artificial Sequence: Synthetic oligonucleotide
  Sense strand starting at position 1461 of SEQ ID NO: 1881670
ggguuuccuuuaguaaauu

SEQ ID NO: 2062591 - RNA, 19 nt, Artificial Sequence
  Description of Artificial Sequence: Synthetic oligonucleotide
  Antisense strand to SEQ ID NO: 2062590
aauuuacuaaaggaaaccc

SEQ ID NO: 2062592 - RNA, 19 nt, Artificial Sequence
  Description of Artificial Sequence: Synthetic oligonucleotide
  Sense strand starting at position 1482 of SEQ ID NO: 1881670
aguguugauuuacagaaua

SEQ ID NO: 2062593 - RNA, 19 nt, Artificial Sequence
  Description of Artificial Sequence: Synthetic oligonucleotide
  Antisense strand to SEQ ID NO: 2062592
uauucuguaaaucaacacu

SEQ ID NO: 2062594 - RNA, 19 nt, Artificial Sequence
  Description of Artificial Sequence: Synthetic oligonucleotide
  Sense strand starting at position 1754 of SEQ ID NO: 1881670
agcuuagauccauagucua

SEQ ID NO: 2062595 - RNA, 19 nt, Artificial Sequence
  Description of Artificial Sequence: Synthetic oligonucleotide
  Antisense strand to SEQ ID NO: 2062594
uagacuauggaucuaagcu

SEQ ID NO: 2062596 - RNA, 19 nt, Artificial Sequence
  Description of Artificial Sequence: Synthetic oligonucleotide
  Sense strand starting at position 1757 of SEQ ID NO: 1881670
uuagauccauagucuauca

SEQ ID NO: 2062597 - RNA, 19 nt, Artificial Sequence
  Description of Artificial Sequence: Synthetic oligonucleotide
  Antisense strand to SEQ ID NO: 2062596
ugauagacuauggaucuaa

SEQ ID NO: 2062598 - RNA, 19 nt, Artificial Sequence
  Description of Artificial Sequence: Synthetic oligonucleotide
  Sense strand starting at position 1834 of SEQ ID NO: 1881670
ggcuuaccugucuaaacac

SEQ ID NO: 2062599 - RNA, 19 nt, Artificial Sequence
  Description of Artificial Sequence: Synthetic oligonucleotide
  Antisense strand to SEQ ID NO: 2062598
guguuuagacagguaagcc

SEQ ID NO: 2062600 - RNA, 19 nt, Artificial Sequence
  Description of Artificial Sequence: Synthetic oligonucleotide
  Sense strand starting at position 2012 of SEQ ID NO: 1881670
ggcgcauucacggugguau

SEQ ID NO: 2062601 - RNA, 19 nt, Artificial Sequence
  Description of Artificial Sequence: Synthetic oligonucleotide
  Antisense strand to SEQ ID NO: 2062600
auaccaccgugaaugcgcc

SEQ ID NO: 2062602 - RNA, 19 nt, Artificial Sequence
  Description of Artificial Sequence: Synthetic oligonucleotide
  Sense strand starting at position 2085 of SEQ ID NO: 1881670
gagcccuuacugcaguuaa

SEQ ID NO: 2062603 - RNA, 19 nt, Artificial Sequence
  Description of Artificial Sequence: Synthetic oligonucleotide
  Antisense strand to SEQ ID NO: 2062602
uuaacugcaguaagggcuc

SEQ ID NO: 2062604 - RNA, 19 nt, Artificial Sequence
  Description of Artificial Sequence: Synthetic oligonucleotide
  Sense strand starting at position 2207 of SEQ ID NO: 1881670
ucacucucagcugaugaua

SEQ ID NO: 2062605 - RNA, 19 nt, Artificial Sequence
  Description of Artificial Sequence: Synthetic oligonucleotide
  Antisense strand to SEQ ID NO: 2062604
uaucaucagcugagaguga

SEQ ID NO: 2062606 - RNA, 19 nt, Artificial Sequence
  Description of Artificial Sequence: Synthetic oligonucleotide
  Sense strand starting at position 2390 of SEQ ID NO: 1881670
ggcacagcuccagaaauuc

SEQ ID NO: 2062607 - RNA, 19 nt, Artificial Sequence
  Description of Artificial Sequence: Synthetic oligonucleotide
  Antisense strand to SEQ ID NO: 2062606
gaauuucuggagcugugcc

SEQ ID NO: 2062608 - RNA, 19 nt, Artificial Sequence
  Description of Artificial Sequence: Synthetic oligonucleotide
  Sense strand starting at position 2967 of SEQ ID NO: 1881670
ugugaauacagaugugaga

SEQ ID NO: 2062609 - RNA, 19 nt, Artificial Sequence
  Description of Artificial Sequence: Synthetic oligonucleotide
  Antisense strand to SEQ ID NO: 2062608
ucucacaucuguauucaca

SEQ ID NO: 2062610 - RNA, 19 nt, Artificial Sequence
  Description of Artificial Sequence: Synthetic oligonucleotide
  Sense strand starting at position 3027 of SEQ ID NO: 1881670
aucuuuaggcuccagaacu

SEQ ID NO: 2062611 - RNA, 19 nt, Artificial Sequence
  Description of Artificial Sequence: Synthetic oligonucleotide
  Antisense strand to SEQ ID NO: 2062610
aguucuggagccuaaagau

SEQ ID NO: 2062612 - RNA, 19 nt, Artificial Sequence
  Description of Artificial Sequence: Synthetic oligonucleotide
  Sense strand starting at position 3106 of SEQ ID NO: 1881670
gccuguaaacauugaagug

SEQ ID NO: 2062613 - RNA, 19 nt, Artificial Sequence
  Description of Artificial Sequence: Synthetic oligonucleotide
  Antisense strand to SEQ ID NO: 2062612
cacuucaauguuuacaggc

SEQ ID NO: 2062614 - RNA, 19 nt, Artificial Sequence
  Description of Artificial Sequence: Synthetic oligonucleotide
  Sense strand starting at position 3116 of SEQ ID NO: 1881670
auugaagugcuccagaacu

SEQ ID NO: 2062615 - RNA, 19 nt, Artificial Sequence
  Description of Artificial Sequence: Synthetic oligonucleotide
  Antisense strand to SEQ ID NO: 2062614
aguucuggagcacuucaau

SEQ ID NO: 2062616 - RNA, 19 nt, Artificial Sequence
  Description of Artificial Sequence: Synthetic oligonucleotide
  Sense strand starting at position 3126 of SEQ ID NO: 1881670
uccagaacuugguccuuga

SEQ ID NO: 2062617 - RNA, 19 nt, Artificial Sequence
  Description of Artificial Sequence: Synthetic oligonucleotide
  Antisense strand to SEQ ID NO: 2062616
ucaaggaccaaguucugga

SEQ ID NO: 2062618 - RNA, 19 nt, Artificial Sequence
  Description of Artificial Sequence: Synthetic oligonucleotide
  Sense strand starting at position 3129 of SEQ ID NO: 1881670
agaacuugguccuugaaca

SEQ ID NO: 2062619 - RNA, 19 nt, Artificial Sequence
  Description of Artificial Sequence: Synthetic oligonucleotide
  Antisense strand to SEQ ID NO: 2062618
uguucaaggaccaaguucu

SEQ ID NO: 2062620 - RNA, 19 nt, Artificial Sequence
  Description of Artificial Sequence: Synthetic oligonucleotide
  Sense strand starting at position 3130 of SEQ ID NO: 1881670
gaacuugguccuugaacau

SEQ ID NO: 2062621 - RNA, 19 nt, Artificial Sequence
  Description of Artificial Sequence: Synthetic oligonucleotide
  Antisense strand to SEQ ID NO: 2062620
auguucaaggaccaaguuc

SEQ ID NO: 2062622 - RNA, 19 nt, Artificial Sequence
  Description of Artificial Sequence: Synthetic oligonucleotide
  Sense strand starting at position 3576 of SEQ ID NO: 1881670
ggaugagccucagcuggau

SEQ ID NO: 2062623 - RNA, 19 nt, Artificial Sequence
  Description of Artificial Sequence: Synthetic oligonucleotide
  Antisense strand to SEQ ID NO: 2062622
auccagcugaggcucaucc

SEQ ID NO: 2062624 - RNA, 19 nt, Artificial Sequence
  Description of Artificial Sequence: Synthetic oligonucleotide
  Sense strand starting at position 3651 of SEQ ID NO: 1881670
cagagugaccucgauaagu

SEQ ID NO: 2062625 - RNA, 19 nt, Artificial Sequence
  Description of Artificial Sequence: Synthetic oligonucleotide
  Antisense strand to SEQ ID NO: 2062624
acuuaucgaggucacucug

SEQ ID NO: 2062626 - RNA, 19 nt, Artificial Sequence
  Description of Artificial Sequence: Synthetic oligonucleotide
  Sense strand starting at position 3653 of SEQ ID NO: 1881670
gagugaccucgauaaguug

SEQ ID NO: 2062627 - RNA, 19 nt, Artificial Sequence
  Description of Artificial Sequence: Synthetic oligonucleotide
  Antisense strand to SEQ ID NO: 2062626
caacuuaucgaggucacuc

SEQ ID NO: 2062628 - RNA, 19 nt, Artificial Sequence
  Description of Artificial Sequence: Synthetic oligonucleotide
  Sense strand starting at position 3659 of SEQ ID NO: 1881670
ccucgauaaguuggauuau

SEQ ID NO: 2062629 - RNA, 19 nt, Artificial Sequence
  Description of Artificial Sequence: Synthetic oligonucleotide
  Antisense strand to SEQ ID NO: 2062628
auaauccaacuuaucgagg

SEQ ID NO: 2062630 - RNA, 19 nt, Artificial Sequence
  Description of Artificial Sequence: Synthetic oligonucleotide
  Sense strand starting at position 3688 of SEQ ID NO: 1881670
agaauccuccagugacuuu

SEQ ID NO: 2062631 - RNA, 19 nt, Artificial Sequence
  Description of Artificial Sequence: Synthetic oligonucleotide
  Antisense strand to SEQ ID NO: 2062630
aaagucacuggaggauucu

SEQ ID NO: 2062632 - RNA, 19 nt, Artificial Sequence
  Description of Artificial Sequence: Synthetic oligonucleotide
  Sense strand starting at position 3735 of SEQ ID NO: 1881670
ugcauaaggccuuacauga

SEQ ID NO: 2062633 - RNA, 19 nt, Artificial Sequence
  Description of Artificial Sequence: Synthetic oligonucleotide
  Antisense strand to SEQ ID NO: 2062632
ucauguaaggccuuaugca

SEQ ID NO: 2062634 - RNA, 19 nt, Artificial Sequence
  Description of Artificial Sequence: Synthetic oligonucleotide
  Sense strand starting at position 3822 of SEQ ID NO: 1881670
cugcuucuugaccaaggua

SEQ ID NO: 2062635 - RNA, 19 nt, Artificial Sequence
  Description of Artificial Sequence: Synthetic oligonucleotide
  Antisense strand to SEQ ID NO: 2062634
uaccuuggucaagaagcag

SEQ ID NO: 2062636 - RNA, 19 nt, Artificial Sequence
  Description of Artificial Sequence: Synthetic oligonucleotide
  Sense strand starting at position 3911 of SEQ ID NO: 1881670
gcgugcuaccaccucgauu

SEQ ID NO: 2062637 - RNA, 19 nt, Artificial Sequence
  Description of Artificial Sequence: Synthetic oligonucleotide
  Antisense strand to SEQ ID NO: 2062636
aaucgaggugguagcacgc

SEQ ID NO: 2062638 - RNA, 19 nt, Artificial Sequence
  Description of Artificial Sequence: Synthetic oligonucleotide
  Sense strand starting at position 3944 of SEQ ID NO: 1881670
cucagauguuaccuucuga

SEQ ID NO: 2062639 - RNA, 19 nt, Artificial Sequence
  Description of Artificial Sequence: Synthetic oligonucleotide
  Antisense strand to SEQ ID NO: 2062638
ucagaagguaacaucugag

SEQ ID NO: 2062640 - RNA, 19 nt, Artificial Sequence
  Description of Artificial Sequence: Synthetic oligonucleotide
  Sense strand starting at position 210 of SEQ ID NO: 1881671
gcuguagagcugcauuuga

SEQ ID NO: 2062641 - RNA, 19 nt, Artificial Sequence
  Description of Artificial Sequence: Synthetic oligonucleotide
  Antisense strand to SEQ ID NO: 2062640
ucaaaugcagcucuacagc

SEQ ID NO: 2062642 - RNA, 19 nt, Artificial Sequence
  Description of Artificial Sequence: Synthetic oligonucleotide
  Sense strand starting at position 217 of SEQ ID NO: 1881671
agcugcauuugaguguuga

SEQ ID NO: 2062643 - RNA, 19 nt, Artificial Sequence
  Description of Artificial Sequence: Synthetic oligonucleotide
  Antisense strand to SEQ ID NO: 2062642
ucaacacucaaaugcagcu

SEQ ID NO: 2062644 - RNA, 19 nt, Artificial Sequence
  Description of Artificial Sequence: Synthetic oligonucleotide
  Sense strand starting at position 306 of SEQ ID NO: 1881671
cuuuaauuggcagacugau

SEQ ID NO: 2062645 - RNA, 19 nt, Artificial Sequence
  Description of Artificial Sequence: Synthetic oligonucleotide
  Antisense strand to SEQ ID NO: 2062644
aucagucugccaauuaaag

SEQ ID NO: 2062646 - RNA, 19 nt, Artificial Sequence
  Description of Artificial Sequence: Synthetic oligonucleotide
  Sense strand starting at position 349 of SEQ ID NO: 1881671
ggaucagaauaucuuaguu

SEQ ID NO: 2062647 - RNA, 19 nt, Artificial Sequence
  Description of Artificial Sequence: Synthetic oligonucleotide
  Antisense strand to SEQ ID NO: 2062646
aacuaagauauucugaucc

SEQ ID NO: 2062648 - RNA, 19 nt, Artificial Sequence
  Description of Artificial Sequence: Synthetic oligonucleotide
  Sense strand starting at position 507 of SEQ ID NO: 1881671
gaugauauaaugugugaga

SEQ ID NO: 2062649 - RNA, 19 nt, Artificial Sequence
  Description of Artificial Sequence: Synthetic oligonucleotide
  Antisense strand to SEQ ID NO: 2062648
ucucacacauuauaucauc

SEQ ID NO: 2062650 - RNA, 19 nt, Artificial Sequence
  Description of Artificial Sequence: Synthetic oligonucleotide
  Sense strand starting at position 509 of SEQ ID NO: 1881671
ugauauaaugugugagaga

SEQ ID NO: 2062651 - RNA, 19 nt, Artificial Sequence
  Description of Artificial Sequence: Synthetic oligonucleotide
  Antisense strand to SEQ ID NO: 2062650
ucucucacacauuauauca

SEQ ID NO: 2062652 - RNA, 19 nt, Artificial Sequence
  Description of Artificial Sequence: Synthetic oligonucleotide
  Sense strand starting at position 522 of SEQ ID NO: 1881671
gagagauacuuugugauua

SEQ ID NO: 2062653 - RNA, 19 nt, Artificial Sequence
  Description of Artificial Sequence: Synthetic oligonucleotide
  Antisense strand to SEQ ID NO: 2062652
uaaucacaaaguaucucuc

SEQ ID NO: 2062654 - RNA, 19 nt, Artificial Sequence
  Description of Artificial Sequence: Synthetic oligonucleotide
  Sense strand starting at position 631 of SEQ ID NO: 1881671
acaauuaugcuaugaaaug

SEQ ID NO: 2062655 - RNA, 19 nt, Artificial Sequence
  Description of Artificial Sequence: Synthetic oligonucleotide
  Antisense strand to SEQ ID NO: 2062654
cauuucauagcauaauugu

SEQ ID NO: 2062656 - RNA, 19 nt, Artificial Sequence
  Description of Artificial Sequence: Synthetic oligonucleotide
  Sense strand starting at position 1316 of SEQ ID NO: 1881671
agaagagauuuccaaaguu

SEQ ID NO: 2062657 - RNA, 19 nt, Artificial Sequence
  Description of Artificial Sequence: Synthetic oligonucleotide
  Antisense strand to SEQ ID NO: 2062656
aacuuuggaaaucucuucu

SEQ ID NO: 2062658 - RNA, 19 nt, Artificial Sequence
  Description of Artificial Sequence: Synthetic oligonucleotide
  Sense strand starting at position 1365 of SEQ ID NO: 1881671
cugagaaacacugguugau

SEQ ID NO: 2062659 - RNA, 19 nt, Artificial Sequence
  Description of Artificial Sequence: Synthetic oligonucleotide
  Antisense strand to SEQ ID NO: 2062658
aucaaccaguguuucucag

SEQ ID NO: 2062660 - RNA, 19 nt, Artificial Sequence
  Description of Artificial Sequence: Synthetic oligonucleotide
  Sense strand starting at position 1367 of SEQ ID NO: 1881671
gagaaacacugguugaugu

SEQ ID NO: 2062661 - RNA, 19 nt, Artificial Sequence
  Description of Artificial Sequence: Synthetic oligonucleotide
  Antisense strand to SEQ ID NO: 2062660
acaucaaccaguguuucuc

SEQ ID NO: 2062662 - RNA, 19 nt, Artificial Sequence
  Description of Artificial Sequence: Synthetic oligonucleotide
  Sense strand starting at position 1369 of SEQ ID NO: 1881671
gaaacacugguugauguuu

SEQ ID NO: 2062663 - RNA, 19 nt, Artificial Sequence
  Description of Artificial Sequence: Synthetic oligonucleotide
  Antisense strand to SEQ ID NO: 2062662
aaacaucaaccaguguuuc

SEQ ID NO: 2062664 - RNA, 19 nt, Artificial Sequence
  Description of Artificial Sequence: Synthetic oligonucleotide
  Sense strand starting at position 1389 of SEQ ID NO: 1881671
ugacuucuauguuuauaga

SEQ ID NO: 2062665 - RNA, 19 nt, Artificial Sequence
  Description of Artificial Sequence: Synthetic oligonucleotide
  Antisense strand to SEQ ID NO: 2062664
ucuauaaacauagaaguca

SEQ ID NO: 2062666 - RNA, 19 nt, Artificial Sequence
  Description of Artificial Sequence: Synthetic oligonucleotide
  Sense strand starting at position 1407 of SEQ ID NO: 1881671
auagcuugagaguaccuaa

SEQ ID NO: 2062667 - RNA, 19 nt, Artificial Sequence
  Description of Artificial Sequence: Synthetic oligonucleotide
  Antisense strand to SEQ ID NO: 2062666
uuagguacucucaagcuau

SEQ ID NO: 2062668 - RNA, 19 nt, Artificial Sequence
  Description of Artificial Sequence: Synthetic oligonucleotide
  Sense strand starting at position 1474 of SEQ ID NO: 1881671
cuauguuuccuauauauug

SEQ ID NO: 2062669 - RNA, 19 nt, Artificial Sequence
  Description of Artificial Sequence: Synthetic oligonucleotide
  Antisense strand to SEQ ID NO: 2062668
caauauauaggaaacauag

SEQ ID NO: 2062670 - RNA, 19 nt, Artificial Sequence
  Description of Artificial Sequence: Synthetic oligonucleotide
  Sense strand starting at position 1593 of SEQ ID NO: 1881671
gugaauuuacuaugccucu

SEQ ID NO: 2062671 - RNA, 19 nt, Artificial Sequence
  Description of Artificial Sequence: Synthetic oligonucleotide
  Antisense strand to SEQ ID NO: 2062670
agaggcauaguaaauucac

SEQ ID NO: 2062672 - RNA, 19 nt, Artificial Sequence
  Description of Artificial Sequence: Synthetic oligonucleotide
  Sense strand starting at position 1643 of SEQ ID NO: 1881671
ccaguacugccauaauaug

SEQ ID NO: 2062673 - RNA, 19 nt, Artificial Sequence
  Description of Artificial Sequence: Synthetic oligonucleotide
  Antisense strand to SEQ ID NO: 2062672
cauauuauggcaguacugg

SEQ ID NO: 2062674 - RNA, 19 nt, Artificial Sequence
  Description of Artificial Sequence: Synthetic oligonucleotide
  Sense strand starting at position 1668 of SEQ ID NO: 1881671
uuucuaggaggcugaaauu

SEQ ID NO: 2062675 - RNA, 19 nt, Artificial Sequence
  Description of Artificial Sequence: Synthetic oligonucleotide
  Antisense strand to SEQ ID NO: 2062674
aauuucagccuccuagaaa

SEQ ID NO: 2062676 - RNA, 19 nt, Artificial Sequence
  Description of Artificial Sequence: Synthetic oligonucleotide
  Sense strand starting at position 1679 of SEQ ID NO: 1881671
cugaaauucugagccauga

SEQ ID NO: 2062677 - RNA, 19 nt, Artificial Sequence
  Description of Artificial Sequence: Synthetic oligonucleotide
  Antisense strand to SEQ ID NO: 2062676
ucauggcucagaauuucag

SEQ ID NO: 2062678 - RNA, 19 nt, Artificial Sequence
  Description of Artificial Sequence: Synthetic oligonucleotide
  Sense strand starting at position 1690 of SEQ ID NO: 1881671
agccaugaagaaugcaaua

SEQ ID NO: 2062679 - RNA, 19 nt, Artificial Sequence
  Description of Artificial Sequence: Synthetic oligonucleotide
  Antisense strand to SEQ ID NO: 2062678
uauugcauucuucauggcu

SEQ ID NO: 2062680 - RNA, 19 nt, Artificial Sequence
  Description of Artificial Sequence: Synthetic oligonucleotide
  Sense strand starting at position 1803 of SEQ ID NO: 1881671
gaggguugauauuccuaca

SEQ ID NO: 2062681 - RNA, 19 nt, Artificial Sequence
  Description of Artificial Sequence: Synthetic oligonucleotide
  Antisense strand to SEQ ID NO: 2062680
uguaggaauaucaacccuc

SEQ ID NO: 2062682 - RNA, 19 nt, Artificial Sequence
  Description of Artificial Sequence: Synthetic oligonucleotide
  Sense strand starting at position 2567 of SEQ ID NO: 1881671
guaucuauccaagggaaca

SEQ ID NO: 2062683 - RNA, 19 nt, Artificial Sequence
  Description of Artificial Sequence: Synthetic oligonucleotide
  Antisense strand to SEQ ID NO: 2062682
uguucccuuggauagauac

SEQ ID NO: 2062684 - RNA, 19 nt, Artificial Sequence
  Description of Artificial Sequence: Synthetic oligonucleotide
  Sense strand starting at position 2636 of SEQ ID NO: 1881671
acguguaggaaaugauaac

SEQ ID NO: 2062685 - RNA, 19 nt, Artificial Sequence
  Description of Artificial Sequence: Synthetic oligonucleotide
  Antisense strand to SEQ ID NO: 2062684
guuaucauuuccuacacgu

SEQ ID NO: 2062686 - RNA, 19 nt, Artificial Sequence
  Description of Artificial Sequence: Synthetic oligonucleotide
  Sense strand starting at position 2751 of SEQ ID NO: 1881671
cugucauguauuugaggca

SEQ ID NO: 2062687 - RNA, 19 nt, Artificial Sequence
  Description of Artificial Sequence: Synthetic oligonucleotide
  Antisense strand to SEQ ID NO: 2062686
ugccucaaauacaugacag

SEQ ID NO: 2062688 - RNA, 19 nt, Artificial Sequence
  Description of Artificial Sequence: Synthetic oligonucleotide
  Sense strand starting at position 2766 of SEQ ID NO: 1881671
ggcacauauuacuuggaaa

SEQ ID NO: 2062689 - RNA, 19 nt, Artificial Sequence
  Description of Artificial Sequence: Synthetic oligonucleotide
  Antisense strand to SEQ ID NO: 2062688
uuuccaaguaauaugugcc

SEQ ID NO: 2062690 - RNA, 19 nt, Artificial Sequence
  Description of Artificial Sequence: Synthetic oligonucleotide
  Sense strand starting at position 2779 of SEQ ID NO: 1881671
uggaaaugugacugguuua

SEQ ID NO: 2062691 - RNA, 19 nt, Artificial Sequence
  Description of Artificial Sequence: Synthetic oligonucleotide
  Antisense strand to SEQ ID NO: 2062690
uaaaccagucacauuucca

SEQ ID NO: 2062692 - RNA, 19 nt, Artificial Sequence
  Description of Artificial Sequence: Synthetic oligonucleotide
  Sense strand starting at position 2780 of SEQ ID NO: 1881671
ggaaaugugacugguuuag

SEQ ID NO: 2062693 - RNA, 19 nt, Artificial Sequence
  Description of Artificial Sequence: Synthetic oligonucleotide
  Antisense strand to SEQ ID NO: 2062692
cuaaaccagucacauuucc

SEQ ID NO: 2062694 - RNA, 19 nt, Artificial Sequence
  Description of Artificial Sequence: Synthetic oligonucleotide
  Sense strand starting at position 2782 of SEQ ID NO: 1881671
aaaugugacugguuuagac

SEQ ID NO: 2062695 - RNA, 19 nt, Artificial Sequence
  Description of Artificial Sequence: Synthetic oligonucleotide
  Antisense strand to SEQ ID NO: 2062694
gucuaaaccagucacauuu

SEQ ID NO: 2062696 - RNA, 19 nt, Artificial Sequence
  Description of Artificial Sequence: Synthetic oligonucleotide
  Sense strand starting at position 2784 of SEQ ID NO: 1881671
augugacugguuuagacua

SEQ ID NO: 2062697 - RNA, 19 nt, Artificial Sequence
  Description of Artificial Sequence: Synthetic oligonucleotide
  Antisense strand to SEQ ID NO: 2062696
uagucuaaaccagucacau

SEQ ID NO: 2062698 - RNA, 19 nt, Artificial Sequence
  Description of Artificial Sequence: Synthetic oligonucleotide
  Sense strand starting at position 2792 of SEQ ID NO: 1881671
gguuuagacuaacuagacu

SEQ ID NO: 2062699 - RNA, 19 nt, Artificial Sequence
  Description of Artificial Sequence: Synthetic oligonucleotide
  Antisense strand to SEQ ID NO: 2062698
agucuaguuagucuaaacc

SEQ ID NO: 2062700 - RNA, 19 nt, Artificial Sequence
  Description of Artificial Sequence: Synthetic oligonucleotide
  Sense strand starting at position 2807 of SEQ ID NO: 1881671
gacuaacagugagucauau

SEQ ID NO: 2062701 - RNA, 19 nt, Artificial Sequence
  Description of Artificial Sequence: Synthetic oligonucleotide
  Antisense strand to SEQ ID NO: 2062700
auaugacucacuguuaguc

SEQ ID NO: 2062702 - RNA, 19 nt, Artificial Sequence
  Description of Artificial Sequence: Synthetic oligonucleotide
  Sense strand starting at position 2824 of SEQ ID NO: 1881671
auccuagauugggcauauu

SEQ ID NO: 2062703 - RNA, 19 nt, Artificial Sequence
  Description of Artificial Sequence: Synthetic oligonucleotide
  Antisense strand to SEQ ID NO: 2062702
aauaugcccaaucuaggau

SEQ ID NO: 2062704 - RNA, 19 nt, Artificial Sequence
  Description of Artificial Sequence: Synthetic oligonucleotide
  Sense strand starting at position 2827 of SEQ ID NO: 1881671
cuagauugggcauauuguu

SEQ ID NO: 2062705 - RNA, 19 nt, Artificial Sequence
  Description of Artificial Sequence: Synthetic oligonucleotide
  Antisense strand to SEQ ID NO: 2062704
aacaauaugcccaaucuag

SEQ ID NO: 2062706 - RNA, 19 nt, Artificial Sequence
  Description of Artificial Sequence: Synthetic oligonucleotide
  Sense strand starting at position 2968 of SEQ ID NO: 1881671
guaucuggauuugaauaaa

SEQ ID NO: 2062707 - RNA, 19 nt, Artificial Sequence
  Description of Artificial Sequence: Synthetic oligonucleotide
  Antisense strand to SEQ ID NO: 2062706
uuuauucaaauccagauac

SEQ ID NO: 2062708 - RNA, 19 nt, Artificial Sequence
  Description of Artificial Sequence: Synthetic oligonucleotide
  Sense strand starting at position 2989 of SEQ ID NO: 1881671
cguauuuguuacucucaga

SEQ ID NO: 2062709 - RNA, 19 nt, Artificial Sequence
  Description of Artificial Sequence: Synthetic oligonucleotide
  Antisense strand to SEQ ID NO: 2062708
ucugagaguaacaaauacg

SEQ ID NO: 2062710 - RNA, 19 nt, Artificial Sequence
  Description of Artificial Sequence: Synthetic oligonucleotide
  Sense strand starting at position 3091 of SEQ ID NO: 1881671
gcuaaaguucuagaaaucu

SEQ ID NO: 2062711 - RNA, 19 nt, Artificial Sequence
  Description of Artificial Sequence: Synthetic oligonucleotide
  Antisense strand to SEQ ID NO: 2062710
agauuucuagaacuuuagc

SEQ ID NO: 2062712 - RNA, 19 nt, Artificial Sequence
  Description of Artificial Sequence: Synthetic oligonucleotide
  Sense strand starting at position 3123 of SEQ ID NO: 1881671
augccuaugcuugauaaua

SEQ ID NO: 2062713 - RNA, 19 nt, Artificial Sequence
  Description of Artificial Sequence: Synthetic oligonucleotide
  Antisense strand to SEQ ID NO: 2062712
uauuaucaagcauaggcau

SEQ ID NO: 2062714 - RNA, 19 nt, Artificial Sequence
  Description of Artificial Sequence: Synthetic oligonucleotide
  Sense strand starting at position 3385 of SEQ ID NO: 1881671
aggauuagaguuggaaagu

SEQ ID NO: 2062715 - RNA, 19 nt, Artificial Sequence
  Description of Artificial Sequence: Synthetic oligonucleotide
  Antisense strand to SEQ ID NO: 2062714
acuuuccaacucuaauccu

SEQ ID NO: 2062716 - RNA, 19 nt, Artificial Sequence
  Description of Artificial Sequence: Synthetic oligonucleotide
  Sense strand starting at position 3450 of SEQ ID NO: 1881671
uucuauguacaaugagaua

SEQ ID NO: 2062717 - RNA, 19 nt, Artificial Sequence
  Description of Artificial Sequence: Synthetic oligonucleotide
  Antisense strand to SEQ ID NO: 2062716
uaucucauuguacauagaa

SEQ ID NO: 2062718 - RNA, 19 nt, Artificial Sequence
  Description of Artificial Sequence: Synthetic oligonucleotide
  Sense strand starting at position 3462 of SEQ ID NO: 1881671
ugagauauccugggacucu

SEQ ID NO: 2062719 - RNA, 19 nt, Artificial Sequence
  Description of Artificial Sequence: Synthetic oligonucleotide
  Antisense strand to SEQ ID NO: 2062718
agagucccaggauaucuca

SEQ ID NO: 2062720 - RNA, 19 nt, Artificial Sequence
  Description of Artificial Sequence: Synthetic oligonucleotide
  Sense strand starting at position 225 of SEQ ID NO: 1881672
ugagacaucuccuugacau

SEQ ID NO: 2062721 - RNA, 19 nt, Artificial Sequence
  Description of Artificial Sequence: Synthetic oligonucleotide
  Antisense strand to SEQ ID NO: 2062720
augucaaggagaugucuca

SEQ ID NO: 2062722 - RNA, 19 nt, Artificial Sequence
  Description of Artificial Sequence: Synthetic oligonucleotide
  Sense strand starting at position 539 of SEQ ID NO: 1881672
uugucauuugaaugucuuu

SEQ ID NO: 2062723 - RNA, 19 nt, Artificial Sequence
  Description of Artificial Sequence: Synthetic oligonucleotide
  Antisense strand to SEQ ID NO: 2062722
aaagacauucaaaugacaa

SEQ ID NO: 2062724 - RNA, 19 nt, Artificial Sequence
  Description of Artificial Sequence: Synthetic oligonucleotide
  Sense strand starting at position 575 of SEQ ID NO: 1881672
ucaggucuuucgccuauuu

SEQ ID NO: 2062725 - RNA, 19 nt, Artificial Sequence
  Description of Artificial Sequence: Synthetic oligonucleotide
  Antisense strand to SEQ ID NO: 2062724
aaauaggcgaaagaccuga

SEQ ID NO: 2062726 - RNA, 19 nt, Artificial Sequence
  Description of Artificial Sequence: Synthetic oligonucleotide
  Sense strand starting at position 686 of SEQ ID NO: 1881672
aguuucugucucuauagau

SEQ ID NO: 2062727 - RNA, 19 nt, Artificial Sequence
  Description of Artificial Sequence: Synthetic oligonucleotide
  Antisense strand to SEQ ID NO: 2062726
aucuauagagacagaaacu

SEQ ID NO: 2062728 - RNA, 19 nt, Artificial Sequence
  Description of Artificial Sequence: Synthetic oligonucleotide
  Sense strand starting at position 876 of SEQ ID NO: 1881672
ugucuacauuuauaagaga

SEQ ID NO: 2062729 - RNA, 19 nt, Artificial Sequence
  Description of Artificial Sequence: Synthetic oligonucleotide
  Antisense strand to SEQ ID NO: 2062728
ucucuuauaaauguagaca

SEQ ID NO: 2062730 - RNA, 19 nt, Artificial Sequence
  Description of Artificial Sequence: Synthetic oligonucleotide
  Sense strand starting at position 1002 of SEQ ID NO: 1881672
uugaaagaguuuguaaaga

SEQ ID NO: 2062731 - RNA, 19 nt, Artificial Sequence
  Description of Artificial Sequence: Synthetic oligonucleotide
  Antisense strand to SEQ ID NO: 2062730
ucuuuacaaacucuuucaa

SEQ ID NO: 2062732 - RNA, 19 nt, Artificial Sequence
  Description of Artificial Sequence: Synthetic oligonucleotide
  Sense strand starting at position 1075 of SEQ ID NO: 1881672
ggaauugggcuuuaaguug

SEQ ID NO: 2062733 - RNA, 19 nt, Artificial Sequence
  Description of Artificial Sequence: Synthetic oligonucleotide
  Antisense strand to SEQ ID NO: 2062732
caacuuaaagcccaauucc

SEQ ID NO: 2062734 - RNA, 19 nt, Artificial Sequence
  Description of Artificial Sequence: Synthetic oligonucleotide
  Sense strand starting at position 1084 of SEQ ID NO: 1881672
cuuuaaguugugggaaaug

SEQ ID NO: 2062735 - RNA, 19 nt, Artificial Sequence
  Description of Artificial Sequence: Synthetic oligonucleotide
  Antisense strand to SEQ ID NO: 2062734
cauuucccacaacuuaaag

SEQ ID NO: 2062736 - RNA, 19 nt, Artificial Sequence
  Description of Artificial Sequence: Synthetic oligonucleotide
  Sense strand starting at position 1162 of SEQ ID NO: 1881672
cuuugaaucaauggugguu

SEQ ID NO: 2062737 - RNA, 19 nt, Artificial Sequence
  Description of Artificial Sequence: Synthetic oligonucleotide
  Antisense strand to SEQ ID NO: 2062736
aaccaccauugauucaaag

SEQ ID NO: 2062738 - RNA, 19 nt, Artificial Sequence
  Description of Artificial Sequence: Synthetic oligonucleotide
  Sense strand starting at position 1531 of SEQ ID NO: 1881672
cagguuagauuauugacuu

SEQ ID NO: 2062739 - RNA, 19 nt, Artificial Sequence
  Description of Artificial Sequence: Synthetic oligonucleotide
  Antisense strand to SEQ ID NO: 2062738
aagucaauaaucuaaccug

SEQ ID NO: 2062740 - RNA, 19 nt, Artificial Sequence
  Description of Artificial Sequence: Synthetic oligonucleotide
  Sense strand starting at position 1693 of SEQ ID NO: 1881672
uugauuacucaagagugug

SEQ ID NO: 2062741 - RNA, 19 nt, Artificial Sequence
  Description of Artificial Sequence: Synthetic oligonucleotide
  Antisense strand to SEQ ID NO: 2062740
cacacucuugaguaaucaa

SEQ ID NO: 2062742 - RNA, 19 nt, Artificial Sequence
  Description of Artificial Sequence: Synthetic oligonucleotide
  Sense strand starting at position 1787 of SEQ ID NO: 1881672
uggagaccauacuuuguau

SEQ ID NO: 2062743 - RNA, 19 nt, Artificial Sequence
  Description of Artificial Sequence: Synthetic oligonucleotide
  Antisense strand to SEQ ID NO: 2062742
auacaaaguauggucucca

SEQ ID NO: 2062744 - RNA, 19 nt, Artificial Sequence
  Description of Artificial Sequence: Synthetic oligonucleotide
  Sense strand starting at position 1862 of SEQ ID NO: 1881672
gggaauguuccauauguac

SEQ ID NO: 2062745 - RNA, 19 nt, Artificial Sequence
  Description of Artificial Sequence: Synthetic oligonucleotide
  Antisense strand to SEQ ID NO: 2062744
guacauauggaacauuccc

SEQ ID NO: 2062746 - RNA, 19 nt, Artificial Sequence
  Description of Artificial Sequence: Synthetic oligonucleotide
  Sense strand starting at position 1921 of SEQ ID NO: 1881672
cuaguuggugucuaucaca

SEQ ID NO: 2062747 - RNA, 19 nt, Artificial Sequence
  Description of Artificial Sequence: Synthetic oligonucleotide
  Antisense strand to SEQ ID NO: 2062746
ugugauagacaccaacuag

SEQ ID NO: 2062748 - RNA, 19 nt, Artificial Sequence
  Description of Artificial Sequence: Synthetic oligonucleotide
  Sense strand starting at position 2042 of SEQ ID NO: 1881672
gcagaaauacuugacuagu

SEQ ID NO: 2062749 - RNA, 19 nt, Artificial Sequence
  Description of Artificial Sequence: Synthetic oligonucleotide
  Antisense strand to SEQ ID NO: 2062748
acuagucaaguauuucugc

SEQ ID NO: 2062750 - RNA, 19 nt, Artificial Sequence
  Description of Artificial Sequence: Synthetic oligonucleotide
  Sense strand starting at position 2045 of SEQ ID NO: 1881672
gaaauacuugacuaguugu

SEQ ID NO: 2062751 - RNA, 19 nt, Artificial Sequence
  Description of Artificial Sequence: Synthetic oligonucleotide
  Antisense strand to SEQ ID NO: 2062750
acaacuagucaaguauuuc

SEQ ID NO: 2062752 - RNA, 19 nt, Artificial Sequence
  Description of Artificial Sequence: Synthetic oligonucleotide
  Sense strand starting at position 2226 of SEQ ID NO: 1881672
aaauauucuuguguaagag

SEQ ID NO: 2062753 - RNA, 19 nt, Artificial Sequence
  Description of Artificial Sequence: Synthetic oligonucleotide
  Antisense strand to SEQ ID NO: 2062752
cucuuacacaagaauauuu

SEQ ID NO: 2062754 - RNA, 19 nt, Artificial Sequence
  Description of Artificial Sequence: Synthetic oligonucleotide
  Sense strand starting at position 2429 of SEQ ID NO: 1881672
gaaugccuacuguaagaca

SEQ ID NO: 2062755 - RNA, 19 nt, Artificial Sequence
  Description of Artificial Sequence: Synthetic oligonucleotide
  Antisense strand to SEQ ID NO: 2062754
ugucuuacaguaggcauuc

SEQ ID NO: 2062756 - RNA, 19 nt, Artificial Sequence
  Description of Artificial Sequence: Synthetic oligonucleotide
  Sense strand starting at position 2450 of SEQ ID NO: 1881672
cccuaagaguacuuauagu

SEQ ID NO: 2062757 - RNA, 19 nt, Artificial Sequence
  Description of Artificial Sequence: Synthetic oligonucleotide
  Antisense strand to SEQ ID NO: 2062756
acuauaaguacucuuaggg

SEQ ID NO: 2062758 - RNA, 19 nt, Artificial Sequence
  Description of Artificial Sequence: Synthetic oligonucleotide
  Sense strand starting at position 2502 of SEQ ID NO: 1881672
ccagaaucugauggccaau

SEQ ID NO: 2062759 - RNA, 19 nt, Artificial Sequence
  Description of Artificial Sequence: Synthetic oligonucleotide
  Antisense strand to SEQ ID NO: 2062758
auuggccaucagauucugg

SEQ ID NO: 2062760 - RNA, 19 nt, Artificial Sequence
  Description of Artificial Sequence: Synthetic oligonucleotide
  Sense strand starting at position 2605 of SEQ ID NO: 1881672
augcuuucuguccacagga

SEQ ID NO: 2062761 - RNA, 19 nt, Artificial Sequence
  Description of Artificial Sequence: Synthetic oligonucleotide
  Antisense strand to SEQ ID NO: 2062760
uccuguggacagaaagcau

SEQ ID NO: 2062762 - RNA, 19 nt, Artificial Sequence
  Description of Artificial Sequence: Synthetic oligonucleotide
  Sense strand starting at position 2607 of SEQ ID NO: 1881672
gcuuucuguccacaggauu

SEQ ID NO: 2062763 - RNA, 19 nt, Artificial Sequence
  Description of Artificial Sequence: Synthetic oligonucleotide
  Antisense strand to SEQ ID NO: 2062762
aauccuguggacagaaagc

SEQ ID NO: 2062764 - RNA, 19 nt, Artificial Sequence
  Description of Artificial Sequence: Synthetic oligonucleotide
  Sense strand starting at position 2658 of SEQ ID NO: 1881672
uucugaugugggcaagaag

SEQ ID NO: 2062765 - RNA, 19 nt, Artificial Sequence
  Description of Artificial Sequence: Synthetic oligonucleotide
  Antisense strand to SEQ ID NO: 2062764
cuucuugcccacaucagaa

SEQ ID NO: 2062766 - RNA, 19 nt, Artificial Sequence
  Description of Artificial Sequence: Synthetic oligonucleotide
  Sense strand starting at position 2680 of SEQ ID NO: 1881672
uguuguacccaauaacuga

SEQ ID NO: 2062767 - RNA, 19 nt, Artificial Sequence
  Description of Artificial Sequence: Synthetic oligonucleotide
  Antisense strand to SEQ ID NO: 2062766
ucaguuauuggguacaaca

SEQ ID NO: 2062768 - RNA, 19 nt, Artificial Sequence
  Description of Artificial Sequence: Synthetic oligonucleotide
  Sense strand starting at position 2948 of SEQ ID NO: 1881672
cagaauuguagugaggguu

SEQ ID NO: 2062769 - RNA, 19 nt, Artificial Sequence
  Description of Artificial Sequence: Synthetic oligonucleotide
  Antisense strand to SEQ ID NO: 2062768
aacccucacuacaauucug

SEQ ID NO: 2062770 - RNA, 19 nt, Artificial Sequence
  Description of Artificial Sequence: Synthetic oligonucleotide
  Sense strand starting at position 2954 of SEQ ID NO: 1881672
uguagugaggguuaaauau

SEQ ID NO: 2062771 - RNA, 19 nt, Artificial Sequence
  Description of Artificial Sequence: Synthetic oligonucleotide
  Antisense strand to SEQ ID NO: 2062770
auauuuaacccucacuaca

SEQ ID NO: 2062772 - RNA, 19 nt, Artificial Sequence
  Description of Artificial Sequence: Synthetic oligonucleotide
  Sense strand starting at position 2997 of SEQ ID NO: 1881672
gugggcacucuccaagagu

SEQ ID NO: 2062773 - RNA, 19 nt, Artificial Sequence
  Description of Artificial Sequence: Synthetic oligonucleotide
  Antisense strand to SEQ ID NO: 2062772
acucuuggagagugcccac

SEQ ID NO: 2062774 - RNA, 19 nt, Artificial Sequence
  Description of Artificial Sequence: Synthetic oligonucleotide
  Sense strand starting at position 3064 of SEQ ID NO: 1881672
ucuggacuuacaugugagu

SEQ ID NO: 2062775 - RNA, 19 nt, Artificial Sequence
  Description of Artificial Sequence: Synthetic oligonucleotide
  Antisense strand to SEQ ID NO: 2062774
acucacauguaaguccaga

SEQ ID NO: 2062776 - RNA, 19 nt, Artificial Sequence
  Description of Artificial Sequence: Synthetic oligonucleotide
  Sense strand starting at position 3078 of SEQ ID NO: 1881672
ugaguucucagcuaggagu

SEQ ID NO: 2062777 - RNA, 19 nt, Artificial Sequence
  Description of Artificial Sequence: Synthetic oligonucleotide
  Antisense strand to SEQ ID NO: 2062776
acuccuagcugagaacuca

SEQ ID NO: 2062778 - RNA, 19 nt, Artificial Sequence
  Description of Artificial Sequence: Synthetic oligonucleotide
  Sense strand starting at position 3092 of SEQ ID NO: 1881672
ggaguuaaggcucauucug

SEQ ID NO: 2062779 - RNA, 19 nt, Artificial Sequence
  Description of Artificial Sequence: Synthetic oligonucleotide
  Antisense strand to SEQ ID NO: 2062778
cagaaugagccuuaacucc

SEQ ID NO: 2062780 - RNA, 19 nt, Artificial Sequence
  Description of Artificial Sequence: Synthetic oligonucleotide
  Sense strand starting at position 3094 of SEQ ID NO: 1881672
aguuaaggcucauucugaa

SEQ ID NO: 2062781 - RNA, 19 nt, Artificial Sequence
  Description of Artificial Sequence: Synthetic oligonucleotide
  Antisense strand to SEQ ID NO: 2062780
uucagaaugagccuuaacu

SEQ ID NO: 2062782 - RNA, 19 nt, Artificial Sequence
  Description of Artificial Sequence: Synthetic oligonucleotide
  Sense strand starting at position 3166 of SEQ ID NO: 1881672
auacucuucccuggagcaa

SEQ ID NO: 2062783 - RNA, 19 nt, Artificial Sequence
  Description of Artificial Sequence: Synthetic oligonucleotide
  Antisense strand to SEQ ID NO: 2062782
uugcuccagggaagaguau

SEQ ID NO: 2062784 - RNA, 19 nt, Artificial Sequence
  Description of Artificial Sequence: Synthetic oligonucleotide
  Sense strand starting at position 3231 of SEQ ID NO: 1881672
aguugucagcuggaauacu

SEQ ID NO: 2062785 - RNA, 19 nt, Artificial Sequence
  Description of Artificial Sequence: Synthetic oligonucleotide
  Antisense strand to SEQ ID NO: 2062784
aguauuccagcugacaacu

SEQ ID NO: 2062786 - RNA, 19 nt, Artificial Sequence
  Description of Artificial Sequence: Synthetic oligonucleotide
  Sense strand starting at position 3500 of SEQ ID NO: 1881672
acccacaauguuuauagua

SEQ ID NO: 2062787 - RNA, 19 nt, Artificial Sequence
  Description of Artificial Sequence: Synthetic oligonucleotide
  Antisense strand to SEQ ID NO: 2062786
uacuauaaacauugugggu

SEQ ID NO: 2062788 - RNA, 19 nt, Artificial Sequence
  Description of Artificial Sequence: Synthetic oligonucleotide
  Sense strand starting at position 3514 of SEQ ID NO: 1881672
uaguaugcuguggauacau

SEQ ID NO: 2062789 - RNA, 19 nt, Artificial Sequence
  Description of Artificial Sequence: Synthetic oligonucleotide
  Antisense strand to SEQ ID NO: 2062788
auguauccacagcauacua

SEQ ID NO: 2062790 - RNA, 19 nt, Artificial Sequence
  Description of Artificial Sequence: Synthetic oligonucleotide
  Sense strand starting at position 3555 of SEQ ID NO: 1881672
agggaacuuaugugacuca

SEQ ID NO: 2062791 - RNA, 19 nt, Artificial Sequence
  Description of Artificial Sequence: Synthetic oligonucleotide
  Antisense strand to SEQ ID NO: 2062790
ugagucacauaaguucccu

SEQ ID NO: 2062792 - RNA, 19 nt, Artificial Sequence
  Description of Artificial Sequence: Synthetic oligonucleotide
  Sense strand starting at position 3576 of SEQ ID NO: 1881672
acucaaugcugaccaagau

SEQ ID NO: 2062793 - RNA, 19 nt, Artificial Sequence
  Description of Artificial Sequence: Synthetic oligonucleotide
  Antisense strand to SEQ ID NO: 2062792
aucuuggucagcauugagu

SEQ ID NO: 2062794 - RNA, 19 nt, Artificial Sequence
  Description of Artificial Sequence: Synthetic oligonucleotide
  Sense strand starting at position 3615 of SEQ ID NO: 1881672
auggcaaacugaucauuaa

SEQ ID NO: 2062795 - RNA, 19 nt, Artificial Sequence
  Description of Artificial Sequence: Synthetic oligonucleotide
  Antisense strand to SEQ ID NO: 2062794
uuaaugaucaguuugccau

SEQ ID NO: 2062796 - RNA, 19 nt, Artificial Sequence
  Description of Artificial Sequence: Synthetic oligonucleotide
  Sense strand starting at position 3868 of SEQ ID NO: 1881672
ucaaaucaugcucaguaga

SEQ ID NO: 2062797 - RNA, 19 nt, Artificial Sequence
  Description of Artificial Sequence: Synthetic oligonucleotide
  Antisense strand to SEQ ID NO: 2062796
ucuacugagcaugauuuga

SEQ ID NO: 2062798 - RNA, 19 nt, Artificial Sequence
  Description of Artificial Sequence: Synthetic oligonucleotide
  Sense strand starting at position 3960 of SEQ ID NO: 1881672
cagauaacgucuccuaaug

SEQ ID NO: 2062799 - RNA, 19 nt, Artificial Sequence
  Description of Artificial Sequence: Synthetic oligonucleotide
  Antisense strand to SEQ ID NO: 2062798
cauuaggagacguuaucug

SEQ ID NO: 2062800 - RNA, 19 nt, Artificial Sequence
  Description of Artificial Sequence: Synthetic oligonucleotide
  Sense strand starting at position 352 of SEQ ID NO: 1881673
gguguuccugcagaaagga

SEQ ID NO: 2062801 - RNA, 19 nt, Artificial Sequence
  Description of Artificial Sequence: Synthetic oligonucleotide
  Antisense strand to SEQ ID NO: 2062800
uccuuucugcaggaacacc

SEQ ID NO: 2062802 - RNA, 19 nt, Artificial Sequence
  Description of Artificial Sequence: Synthetic oligonucleotide
  Sense strand starting at position 445 of SEQ ID NO: 1881673
ugaacucagagaugaguuu

SEQ ID NO: 2062803 - RNA, 19 nt, Artificial Sequence
  Description of Artificial Sequence: Synthetic oligonucleotide
  Antisense strand to SEQ ID NO: 2062802
aaacucaucucugaguuca

SEQ ID NO: 2062804 - RNA, 19 nt, Artificial Sequence
  Description of Artificial Sequence: Synthetic oligonucleotide
  Sense strand starting at position 454 of SEQ ID NO: 1881673
agaugaguuuaauuaguac

SEQ ID NO: 2062805 - RNA, 19 nt, Artificial Sequence
  Description of Artificial Sequence: Synthetic oligonucleotide
  Antisense strand to SEQ ID NO: 2062804
guacuaauuaaacucaucu

SEQ ID NO: 2062806 - RNA, 19 nt, Artificial Sequence
  Description of Artificial Sequence: Synthetic oligonucleotide
  Sense strand starting at position 463 of SEQ ID NO: 1881673
uaauuaguacuccaggugu

SEQ ID NO: 2062807 - RNA, 19 nt, Artificial Sequence
  Description of Artificial Sequence: Synthetic oligonucleotide
  Antisense strand to SEQ ID NO: 2062806
acaccuggaguacuaauua

SEQ ID NO: 2062808 - RNA, 19 nt, Artificial Sequence
  Description of Artificial Sequence: Synthetic oligonucleotide
  Sense strand starting at position 489 of SEQ ID NO: 1881673
acuguacuuuacucacaga

SEQ ID NO: 2062809 - RNA, 19 nt, Artificial Sequence
  Description of Artificial Sequence: Synthetic oligonucleotide
  Antisense strand to SEQ ID NO: 2062808
ucugugaguaaaguacagu

SEQ ID NO: 2062810 - RNA, 19 nt, Artificial Sequence
  Description of Artificial Sequence: Synthetic oligonucleotide
  Sense strand starting at position 529 of SEQ ID NO: 1881673
uuauacuagugauccugaa

SEQ ID NO: 2062811 - RNA, 19 nt, Artificial Sequence
  Description of Artificial Sequence: Synthetic oligonucleotide
  Antisense strand to SEQ ID NO: 2062810
uucaggaucacuaguauaa

SEQ ID NO: 2062812 - RNA, 19 nt, Artificial Sequence
  Description of Artificial Sequence: Synthetic oligonucleotide
  Sense strand starting at position 533 of SEQ ID NO: 1881673
acuagugauccugaaggca

SEQ ID NO: 2062813 - RNA, 19 nt, Artificial Sequence
  Description of Artificial Sequence: Synthetic oligonucleotide
  Antisense strand to SEQ ID NO: 2062812
ugccuucaggaucacuagu

SEQ ID NO: 2062814 - RNA, 19 nt, Artificial Sequence
  Description of Artificial Sequence: Synthetic oligonucleotide
  Sense strand starting at position 1143 of SEQ ID NO: 1881673
uugaauguacagugauaac

SEQ ID NO: 2062815 - RNA, 19 nt, Artificial Sequence
  Description of Artificial Sequence: Synthetic oligonucleotide
  Antisense strand to SEQ ID NO: 2062814
guuaucacuguacauucaa

SEQ ID NO: 2062816 - RNA, 19 nt, Artificial Sequence
  Description of Artificial Sequence: Synthetic oligonucleotide
  Sense strand starting at position 1251 of SEQ ID NO: 1881673
uauugaacaguauggcaua

SEQ ID NO: 2062817 - RNA, 19 nt, Artificial Sequence
  Description of Artificial Sequence: Synthetic oligonucleotide
  Antisense strand to SEQ ID NO: 2062816
uaugccauacuguucaaua

SEQ ID NO: 2062818 - RNA, 19 nt, Artificial Sequence
  Description of Artificial Sequence: Synthetic oligonucleotide
  Sense strand starting at position 1416 of SEQ ID NO: 1881673
ccauauaugcaguacuaug

SEQ ID NO: 2062819 - RNA, 19 nt, Artificial Sequence
  Description of Artificial Sequence: Synthetic oligonucleotide
  Antisense strand to SEQ ID NO: 2062818
cauaguacugcauauaugg

SEQ ID NO: 2062820 - RNA, 19 nt, Artificial Sequence
  Description of Artificial Sequence: Synthetic oligonucleotide
  Sense strand starting at position 1444 of SEQ ID NO: 1881673
acacauauguaccuaugau

SEQ ID NO: 2062821 - RNA, 19 nt, Artificial Sequence
  Description of Artificial Sequence: Synthetic oligonucleotide
  Antisense strand to SEQ ID NO: 2062820
aucauagguacauaugugu

SEQ ID NO: 2062822 - RNA, 19 nt, Artificial Sequence
  Description of Artificial Sequence: Synthetic oligonucleotide
  Sense strand starting at position 1617 of SEQ ID NO: 1881673
augcuuaaccagggauaac

SEQ ID NO: 2062823 - RNA, 19 nt, Artificial Sequence
  Description of Artificial Sequence: Synthetic oligonucleotide
  Antisense strand to SEQ ID NO: 2062822
guuaucccugguuaagcau

SEQ ID NO: 2062824 - RNA, 19 nt, Artificial Sequence
  Description of Artificial Sequence: Synthetic oligonucleotide
  Sense strand starting at position 1885 of SEQ ID NO: 1881673
uucccagucuaauugggau

SEQ ID NO: 2062825 - RNA, 19 nt, Artificial Sequence
  Description of Artificial Sequence: Synthetic oligonucleotide
  Antisense strand to SEQ ID NO: 2062824
aucccaauuagacugggaa

SEQ ID NO: 2062826 - RNA, 19 nt, Artificial Sequence
  Description of Artificial Sequence: Synthetic oligonucleotide
  Sense strand starting at position 2067 of SEQ ID NO: 1881673
uuguaaccacaauguauua

SEQ ID NO: 2062827 - RNA, 19 nt, Artificial Sequence
  Description of Artificial Sequence: Synthetic oligonucleotide
  Antisense strand to SEQ ID NO: 2062826
uaauacauugugguuacaa

SEQ ID NO: 2062828 - RNA, 19 nt, Artificial Sequence
  Description of Artificial Sequence: Synthetic oligonucleotide
  Sense strand starting at position 2093 of SEQ ID NO: 1881673
gaagucagacaauggucuu

SEQ ID NO: 2062829 - RNA, 19 nt, Artificial Sequence
  Description of Artificial Sequence: Synthetic oligonucleotide
  Antisense strand to SEQ ID NO: 2062828
aagaccauugucugacuuc

SEQ ID NO: 2062830 - RNA, 19 nt, Artificial Sequence
  Description of Artificial Sequence: Synthetic oligonucleotide
  Sense strand starting at position 2096 of SEQ ID NO: 1881673
gucagacaauggucuuuaa

SEQ ID NO: 2062831 - RNA, 19 nt, Artificial Sequence
  Description of Artificial Sequence: Synthetic oligonucleotide
  Antisense strand to SEQ ID NO: 2062830
uuaaagaccauugucugac

SEQ ID NO: 2062832 - RNA, 19 nt, Artificial Sequence
  Description of Artificial Sequence: Synthetic oligonucleotide
  Sense strand starting at position 2160 of SEQ ID NO: 1881673
cagaauuguuugguuauga

SEQ ID NO: 2062833 - RNA, 19 nt, Artificial Sequence
  Description of Artificial Sequence: Synthetic oligonucleotide
  Antisense strand to SEQ ID NO: 2062832
ucauaaccaaacaauucug

SEQ ID NO: 2062834 - RNA, 19 nt, Artificial Sequence
  Description of Artificial Sequence: Synthetic oligonucleotide
  Sense strand starting at position 2161 of SEQ ID NO: 1881673
agaauuguuugguuaugau

SEQ ID NO: 2062835 - RNA, 19 nt, Artificial Sequence
  Description of Artificial Sequence: Synthetic oligonucleotide
  Antisense strand to SEQ ID NO: 2062834
aucauaaccaaacaauucu

SEQ ID NO: 2062836 - RNA, 19 nt, Artificial Sequence
  Description of Artificial Sequence: Synthetic oligonucleotide
  Sense strand starting at position 2186 of SEQ ID NO: 1881673
gccuuuccuguuuaagaag

SEQ ID NO: 2062837 - RNA, 19 nt, Artificial Sequence
  Description of Artificial Sequence: Synthetic oligonucleotide
  Antisense strand to SEQ ID NO: 2062836
cuucuuaaacaggaaaggc

SEQ ID NO: 2062838 - RNA, 19 nt, Artificial Sequence
  Description of Artificial Sequence: Synthetic oligonucleotide
  Sense strand starting at position 2266 of SEQ ID NO: 1881673
uggccuuugaaguaugaaa

SEQ ID NO: 2062839 - RNA, 19 nt, Artificial Sequence
  Description of Artificial Sequence: Synthetic oligonucleotide
  Antisense strand to SEQ ID NO: 2062838
uuucauacuucaaaggcca

SEQ ID NO: 2062840 - RNA, 19 nt, Artificial Sequence
  Description of Artificial Sequence: Synthetic oligonucleotide
  Sense strand starting at position 2268 of SEQ ID NO: 1881673
gccuuugaaguaugaaaua

SEQ ID NO: 2062841 - RNA, 19 nt, Artificial Sequence
  Description of Artificial Sequence: Synthetic oligonucleotide
  Antisense strand to SEQ ID NO: 2062840
uauuucauacuucaaaggc

SEQ ID NO: 2062842 - RNA, 19 nt, Artificial Sequence
  Description of Artificial Sequence: Synthetic oligonucleotide
  Sense strand starting at position 2288 of SEQ ID NO: 1881673
ugcguugcuccauuaagug

SEQ ID NO: 2062843 - RNA, 19 nt, Artificial Sequence
  Description of Artificial Sequence: Synthetic oligonucleotide
  Antisense strand to SEQ ID NO: 2062842
cacuuaauggagcaacgca

SEQ ID NO: 2062844 - RNA, 19 nt, Artificial Sequence
  Description of Artificial Sequence: Synthetic oligonucleotide
  Sense strand starting at position 2395 of SEQ ID NO: 1881673
acuaaugcaucuucuggaa

SEQ ID NO: 2062845 - RNA, 19 nt, Artificial Sequence
  Description of Artificial Sequence: Synthetic oligonucleotide
  Antisense strand to SEQ ID NO: 2062844
uuccagaagaugcauuagu

SEQ ID NO: 2062846 - RNA, 19 nt, Artificial Sequence
  Description of Artificial Sequence: Synthetic oligonucleotide
  Sense strand starting at position 2420 of SEQ ID NO: 1881673
agcugucagaaugauggua

SEQ ID NO: 2062847 - RNA, 19 nt, Artificial Sequence
  Description of Artificial Sequence: Synthetic oligonucleotide
  Antisense strand to SEQ ID NO: 2062846
uaccaucauucugacagcu

SEQ ID NO: 2062848 - RNA, 19 nt, Artificial Sequence
  Description of Artificial Sequence: Synthetic oligonucleotide
  Sense strand starting at position 2455 of SEQ ID NO: 1881673
uuuguuauggaggaaugua

SEQ ID NO: 2062849 - RNA, 19 nt, Artificial Sequence
  Description of Artificial Sequence: Synthetic oligonucleotide
  Antisense strand to SEQ ID NO: 2062848
uacauuccuccauaacaaa

SEQ ID NO: 2062850 - RNA, 19 nt, Artificial Sequence
  Description of Artificial Sequence: Synthetic oligonucleotide
  Sense strand starting at position 2835 of SEQ ID NO: 1881673
aucauauugguauaggguu

SEQ ID NO: 2062851 - RNA, 19 nt, Artificial Sequence
  Description of Artificial Sequence: Synthetic oligonucleotide
  Antisense strand to SEQ ID NO: 2062850
aacccuauaccaauaugau

SEQ ID NO: 2062852 - RNA, 19 nt, Artificial Sequence
  Description of Artificial Sequence: Synthetic oligonucleotide
  Sense strand starting at position 2842 of SEQ ID NO: 1881673
ugguauaggguuuaaacga

SEQ ID NO: 2062853 - RNA, 19 nt, Artificial Sequence
  Description of Artificial Sequence: Synthetic oligonucleotide
  Antisense strand to SEQ ID NO: 2062852
ucguuuaaacccuauacca

SEQ ID NO: 2062854 - RNA, 19 nt, Artificial Sequence
  Description of Artificial Sequence: Synthetic oligonucleotide
  Sense strand starting at position 2991 of SEQ ID NO: 1881673
uauugagagcucuaguuaa

SEQ ID NO: 2062855 - RNA, 19 nt, Artificial Sequence
  Description of Artificial Sequence: Synthetic oligonucleotide
  Antisense strand to SEQ ID NO: 2062854
uuaacuagagcucucaaua

SEQ ID NO: 2062856 - RNA, 19 nt, Artificial Sequence
  Description of Artificial Sequence: Synthetic oligonucleotide
  Sense strand starting at position 2999 of SEQ ID NO: 1881673
gcucuaguuaaggaaaguu

SEQ ID NO: 2062857 - RNA, 19 nt, Artificial Sequence
  Description of Artificial Sequence: Synthetic oligonucleotide
  Antisense strand to SEQ ID NO: 2062856
aacuuuccuuaacuagagc

SEQ ID NO: 2062858 - RNA, 19 nt, Artificial Sequence
  Description of Artificial Sequence: Synthetic oligonucleotide
  Sense strand starting at position 3158 of SEQ ID NO: 1881673
ugggcuuguucagugauuu

SEQ ID NO: 2062859 - RNA, 19 nt, Artificial Sequence
  Description of Artificial Sequence: Synthetic oligonucleotide
  Antisense strand to SEQ ID NO: 2062858
aaaucacugaacaagccca

SEQ ID NO: 2062860 - RNA, 19 nt, Artificial Sequence
  Description of Artificial Sequence: Synthetic oligonucleotide
  Sense strand starting at position 3159 of SEQ ID NO: 1881673
gggcuuguucagugauuug

SEQ ID NO: 2062861 - RNA, 19 nt, Artificial Sequence
  Description of Artificial Sequence: Synthetic oligonucleotide
  Antisense strand to SEQ ID NO: 2062860
caaaucacugaacaagccc

SEQ ID NO: 2062862 - RNA, 19 nt, Artificial Sequence
  Description of Artificial Sequence: Synthetic oligonucleotide
  Sense strand starting at position 3379 of SEQ ID NO: 1881673
uuauucuguccguuguguu

SEQ ID NO: 2062863 - RNA, 19 nt, Artificial Sequence
  Description of Artificial Sequence: Synthetic oligonucleotide
  Antisense strand to SEQ ID NO: 2062862
aacacaacggacagaauaa

SEQ ID NO: 2062864 - RNA, 19 nt, Artificial Sequence
  Description of Artificial Sequence: Synthetic oligonucleotide
  Sense strand starting at position 3384 of SEQ ID NO: 1881673
cuguccguuguguuauuaa

SEQ ID NO: 2062865 - RNA, 19 nt, Artificial Sequence
  Description of Artificial Sequence: Synthetic oligonucleotide
  Antisense strand to SEQ ID NO: 2062864
uuaauaacacaacggacag

SEQ ID NO: 2062866 - RNA, 19 nt, Artificial Sequence
  Description of Artificial Sequence: Synthetic oligonucleotide
  Sense strand starting at position 3475 of SEQ ID NO: 1881673
cuaacaagguuauugaguu

SEQ ID NO: 2062867 - RNA, 19 nt, Artificial Sequence
  Description of Artificial Sequence: Synthetic oligonucleotide
  Antisense strand to SEQ ID NO: 2062866
aacucaauaaccuuguuag

SEQ ID NO: 2062868 - RNA, 19 nt, Artificial Sequence
  Description of Artificial Sequence: Synthetic oligonucleotide
  Sense strand starting at position 3637 of SEQ ID NO: 1881673
auuagaauuuagcaaucag

SEQ ID NO: 2062869 - RNA, 19 nt, Artificial Sequence
  Description of Artificial Sequence: Synthetic oligonucleotide
  Antisense strand to SEQ ID NO: 2062868
cugauugcuaaauucuaau

SEQ ID NO: 2062870 - RNA, 19 nt, Artificial Sequence
  Description of Artificial Sequence: Synthetic oligonucleotide
  Sense strand starting at position 3794 of SEQ ID NO: 1881673
gugcaaauccgauauggga

SEQ ID NO: 2062871 - RNA, 19 nt, Artificial Sequence
  Description of Artificial Sequence: Synthetic oligonucleotide
  Antisense strand to SEQ ID NO: 2062870
ucccauaucggauuugcac

SEQ ID NO: 2062872 - RNA, 19 nt, Artificial Sequence
  Description of Artificial Sequence: Synthetic oligonucleotide
  Sense strand starting at position 3881 of SEQ ID NO: 1881673
ucuuaaggaugcuuaagau

SEQ ID NO: 2062873 - RNA, 19 nt, Artificial Sequence
  Description of Artificial Sequence: Synthetic oligonucleotide
  Antisense strand to SEQ ID NO: 2062872
aucuuaagcauccuuaaga

SEQ ID NO: 2062874 - RNA, 19 nt, Artificial Sequence
  Description of Artificial Sequence: Synthetic oligonucleotide
  Sense strand starting at position 3887 of SEQ ID NO: 1881673
ggaugcuuaagaugucaau

SEQ ID NO: 2062875 - RNA, 19 nt, Artificial Sequence
  Description of Artificial Sequence: Synthetic oligonucleotide
  Antisense strand to SEQ ID NO: 2062874
auugacaucuuaagcaucc

SEQ ID NO: 2062876 - RNA, 19 nt, Artificial Sequence
  Description of Artificial Sequence: Synthetic oligonucleotide
  Sense strand starting at position 3916 of SEQ ID NO: 1881673
uuaaguaauugagcauaca

SEQ ID NO: 2062877 - RNA, 19 nt, Artificial Sequence
  Description of Artificial Sequence: Synthetic oligonucleotide
  Antisense strand to SEQ ID NO: 2062876
uguaugcucaauuacuuaa

SEQ ID NO: 2062878 - RNA, 19 nt, Artificial Sequence
  Description of Artificial Sequence: Synthetic oligonucleotide
  Sense strand starting at position 3932 of SEQ ID NO: 1881673
acaugauauagauggagcu

SEQ ID NO: 2062879 - RNA, 19 nt, Artificial Sequence
  Description of Artificial Sequence: Synthetic oligonucleotide
  Antisense strand to SEQ ID NO: 2062878
agcuccaucuauaucaugu

SEQ ID NO: 2062880 - RNA, 19 nt, Artificial Sequence
  Description of Artificial Sequence: Synthetic oligonucleotide
  Sense strand starting at position 263 of SEQ ID NO: 1881674
gcuaauauguaacuuagag

SEQ ID NO: 2062881 - RNA, 19 nt, Artificial Sequence
  Description of Artificial Sequence: Synthetic oligonucleotide
  Antisense strand to SEQ ID NO: 2062880
cucuaaguuacauauuagc

SEQ ID NO: 2062882 - RNA, 19 nt, Artificial Sequence
  Description of Artificial Sequence: Synthetic oligonucleotide
  Sense strand starting at position 366 of SEQ ID NO: 1881674
ggcacagucucacuaaauu

SEQ ID NO: 2062883 - RNA, 19 nt, Artificial Sequence
  Description of Artificial Sequence: Synthetic oligonucleotide
  Antisense strand to SEQ ID NO: 2062882
aauuuagugagacugugcc

SEQ ID NO: 2062884 - RNA, 19 nt, Artificial Sequence
  Description of Artificial Sequence: Synthetic oligonucleotide
  Sense strand starting at position 479 of SEQ ID NO: 1881674
ucaguaaaguuaucucaaa

SEQ ID NO: 2062885 - RNA, 19 nt, Artificial Sequence
  Description of Artificial Sequence: Synthetic oligonucleotide
  Antisense strand to SEQ ID NO: 2062884
uuugagauaacuuuacuga

SEQ ID NO: 2062886 - RNA, 19 nt, Artificial Sequence
  Description of Artificial Sequence: Synthetic oligonucleotide
  Sense strand starting at position 500 of SEQ ID NO: 1881674
cgaauugucuaauugaaag

SEQ ID NO: 2062887 - RNA, 19 nt, Artificial Sequence
  Description of Artificial Sequence: Synthetic oligonucleotide
  Antisense strand to SEQ ID NO: 2062886
cuuucaauuagacaauucg

SEQ ID NO: 2062888 - RNA, 19 nt, Artificial Sequence
  Description of Artificial Sequence: Synthetic oligonucleotide
  Sense strand starting at position 577 of SEQ ID NO: 1881674
gaaagagaauuccagaaga

SEQ ID NO: 2062889 - RNA, 19 nt, Artificial Sequence
  Description of Artificial Sequence: Synthetic oligonucleotide
  Antisense strand to SEQ ID NO: 2062888
ucuucuggaauucucuuuc

SEQ ID NO: 2062890 - RNA, 19 nt, Artificial Sequence
  Description of Artificial Sequence: Synthetic oligonucleotide
  Sense strand starting at position 694 of SEQ ID NO: 1881674
aagcaaguagaugguaaau

SEQ ID NO: 2062891 - RNA, 19 nt, Artificial Sequence
  Description of Artificial Sequence: Synthetic oligonucleotide
  Antisense strand to SEQ ID NO: 2062890
auuuaccaucuacuugcuu

SEQ ID NO: 2062892 - RNA, 19 nt, Artificial Sequence
  Description of Artificial Sequence: Synthetic oligonucleotide
  Sense strand starting at position 959 of SEQ ID NO: 1881674
agggauuccauaggcauga

SEQ ID NO: 2062893 - RNA, 19 nt, Artificial Sequence
  Description of Artificial Sequence: Synthetic oligonucleotide
  Antisense strand to SEQ ID NO: 2062892
ucaugccuauggaaucccu

SEQ ID NO: 2062894 - RNA, 19 nt, Artificial Sequence
  Description of Artificial Sequence: Synthetic oligonucleotide
  Sense strand starting at position 960 of SEQ ID NO: 1881674
gggauuccauaggcaugaa

SEQ ID NO: 2062895 - RNA, 19 nt, Artificial Sequence
  Description of Artificial Sequence: Synthetic oligonucleotide
  Antisense strand to SEQ ID NO: 2062894
uucaugccuauggaauccc

SEQ ID NO: 2062896 - RNA, 19 nt, Artificial Sequence
  Description of Artificial Sequence: Synthetic oligonucleotide
  Sense strand starting at position 1067 of SEQ ID NO: 1881674
ggcagaucuuaagcaaaua

SEQ ID NO: 2062897 - RNA, 19 nt, Artificial Sequence
  Description of Artificial Sequence: Synthetic oligonucleotide
  Antisense strand to SEQ ID NO: 2062896
uauuugcuuaagaucugcc

SEQ ID NO: 2062898 - RNA, 19 nt, Artificial Sequence
  Description of Artificial Sequence: Synthetic oligonucleotide
  Sense strand starting at position 1182 of SEQ ID NO: 1881674
ggaggugagguagauaguu

SEQ ID NO: 2062899 - RNA, 19 nt, Artificial Sequence
  Description of Artificial Sequence: Synthetic oligonucleotide
  Antisense strand to SEQ ID NO: 2062898
aacuaucuaccucaccucc

SEQ ID NO: 2062900 - RNA, 19 nt, Artificial Sequence
  Description of Artificial Sequence: Synthetic oligonucleotide
  Sense strand starting at position 1190 of SEQ ID NO: 1881674
gguagauaguuacuggaac

SEQ ID NO: 2062901 - RNA, 19 nt, Artificial Sequence
  Description of Artificial Sequence: Synthetic oligonucleotide
  Antisense strand to SEQ ID NO: 2062900
guuccaguaacuaucuacc

SEQ ID NO: 2062902 - RNA, 19 nt, Artificial Sequence
  Description of Artificial Sequence: Synthetic oligonucleotide
  Sense strand starting at position 1213 of SEQ ID NO: 1881674
gaucaacugguuuguacau

SEQ ID NO: 2062903 - RNA, 19 nt, Artificial Sequence
  Description of Artificial Sequence: Synthetic oligonucleotide
  Antisense strand to SEQ ID NO: 2062902
auguacaaaccaguugauc

SEQ ID NO: 2062904 - RNA, 19 nt, Artificial Sequence
  Description of Artificial Sequence: Synthetic oligonucleotide
  Sense strand starting at position 1214 of SEQ ID NO: 1881674
aucaacugguuuguacaua

SEQ ID NO: 2062905 - RNA, 19 nt, Artificial Sequence
  Description of Artificial Sequence: Synthetic oligonucleotide
  Antisense strand to SEQ ID NO: 2062904
uauguacaaaccaguugau

SEQ ID NO: 2062906 - RNA, 19 nt, Artificial Sequence
  Description of Artificial Sequence: Synthetic oligonucleotide
  Sense strand starting at position 1324 of SEQ ID NO: 1881674
aacaguuaagauugugagu

SEQ ID NO: 2062907 - RNA, 19 nt, Artificial Sequence
  Description of Artificial Sequence: Synthetic oligonucleotide
  Antisense strand to SEQ ID NO: 2062906
acucacaaucuuaacuguu

SEQ ID NO: 2062908 - RNA, 19 nt, Artificial Sequence
  Description of Artificial Sequence: Synthetic oligonucleotide
  Sense strand starting at position 1335 of SEQ ID NO: 1881674
uugugaguucucugaggau

SEQ ID NO: 2062909 - RNA, 19 nt, Artificial Sequence
  Description of Artificial Sequence: Synthetic oligonucleotide
  Antisense strand to SEQ ID NO: 2062908
auccucagagaacucacaa

SEQ ID NO: 2062910 - RNA, 19 nt, Artificial Sequence
  Description of Artificial Sequence: Synthetic oligonucleotide
  Sense strand starting at position 1339 of SEQ ID NO: 1881674
gaguucucugaggaucuuu

SEQ ID NO: 2062911 - RNA, 19 nt, Artificial Sequence
  Description of Artificial Sequence: Synthetic oligonucleotide
  Antisense strand to SEQ ID NO: 2062910
aaagauccucagagaacuc

SEQ ID NO: 2062912 - RNA, 19 nt, Artificial Sequence
  Description of Artificial Sequence: Synthetic oligonucleotide
  Sense strand starting at position 1380 of SEQ ID NO: 1881674
gcaauagaguuccuccaga

SEQ ID NO: 2062913 - RNA, 19 nt, Artificial Sequence
  Description of Artificial Sequence: Synthetic oligonucleotide
  Antisense strand to SEQ ID NO: 2062912
ucuggaggaacucuauugc

SEQ ID NO: 2062914 - RNA, 19 nt, Artificial Sequence
  Description of Artificial Sequence: Synthetic oligonucleotide
  Sense strand starting at position 1468 of SEQ ID NO: 1881674
ggcucuuugcaaugaauaa

SEQ ID NO: 2062915 - RNA, 19 nt, Artificial Sequence
  Description of Artificial Sequence: Synthetic oligonucleotide
  Antisense strand to SEQ ID NO: 2062914
uuauucauugcaaagagcc

SEQ ID NO: 2062916 - RNA, 19 nt, Artificial Sequence
  Description of Artificial Sequence: Synthetic oligonucleotide
  Sense strand starting at position 1537 of SEQ ID NO: 1881674
cugcuagaguaaucaauuc

SEQ ID NO: 2062917 - RNA, 19 nt, Artificial Sequence
  Description of Artificial Sequence: Synthetic oligonucleotide
  Antisense strand to SEQ ID NO: 2062916
gaauugauuacucuagcag

SEQ ID NO: 2062918 - RNA, 19 nt, Artificial Sequence
  Description of Artificial Sequence: Synthetic oligonucleotide
  Sense strand starting at position 1621 of SEQ ID NO: 1881674
uaagauuucuguuuguguu

SEQ ID NO: 2062919 - RNA, 19 nt, Artificial Sequence
  Description of Artificial Sequence: Synthetic oligonucleotide
  Antisense strand to SEQ ID NO: 2062918
aacacaaacagaaaucuua

SEQ ID NO: 2062920 - RNA, 19 nt, Artificial Sequence
  Description of Artificial Sequence: Synthetic oligonucleotide
  Sense strand starting at position 1622 of SEQ ID NO: 1881674
aagauuucuguuuguguuu

SEQ ID NO: 2062921 - RNA, 19 nt, Artificial Sequence
  Description of Artificial Sequence: Synthetic oligonucleotide
  Antisense strand to SEQ ID NO: 2062920
aaacacaaacagaaaucuu

SEQ ID NO: 2062922 - RNA, 19 nt, Artificial Sequence
  Description of Artificial Sequence: Synthetic oligonucleotide
  Sense strand starting at position 1623 of SEQ ID NO: 1881674
agauuucuguuuguguuua

SEQ ID NO: 2062923 - RNA, 19 nt, Artificial Sequence
  Description of Artificial Sequence: Synthetic oligonucleotide
  Antisense strand to SEQ ID NO: 2062922
uaaacacaaacagaaaucu

SEQ ID NO: 2062924 - RNA, 19 nt, Artificial Sequence
  Description of Artificial Sequence: Synthetic oligonucleotide
  Sense strand starting at position 1628 of SEQ ID NO: 1881674
ucuguuuguguuuaaagaa

SEQ ID NO: 2062925 - RNA, 19 nt, Artificial Sequence
  Description of Artificial Sequence: Synthetic oligonucleotide
  Antisense strand to SEQ ID NO: 2062924
uucuuuaaacacaaacaga

SEQ ID NO: 2062926 - RNA, 19 nt, Artificial Sequence
  Description of Artificial Sequence: Synthetic oligonucleotide
  Sense strand starting at position 1879 of SEQ ID NO: 1881674
auggaauuacugugaucca

SEQ ID NO: 2062927 - RNA, 19 nt, Artificial Sequence
  Description of Artificial Sequence: Synthetic oligonucleotide
  Antisense strand to SEQ ID NO: 2062926
uggaucacaguaauuccau

SEQ ID NO: 2062928 - RNA, 19 nt, Artificial Sequence
  Description of Artificial Sequence: Synthetic oligonucleotide
  Sense strand starting at position 1973 of SEQ ID NO: 1881674
uauguuccacaggaaugua

SEQ ID NO: 2062929 - RNA, 19 nt, Artificial Sequence
  Description of Artificial Sequence: Synthetic oligonucleotide
  Antisense strand to SEQ ID NO: 2062928
uacauuccuguggaacaua

SEQ ID NO: 2062930 - RNA, 19 nt, Artificial Sequence
  Description of Artificial Sequence: Synthetic oligonucleotide
  Sense strand starting at position 1981 of SEQ ID NO: 1881674
acaggaauguaagcaagau

SEQ ID NO: 2062931 - RNA, 19 nt, Artificial Sequence
  Description of Artificial Sequence: Synthetic oligonucleotide
  Antisense strand to SEQ ID NO: 2062930
aucuugcuuacauuccugu

SEQ ID NO: 2062932 - RNA, 19 nt, Artificial Sequence
  Description of Artificial Sequence: Synthetic oligonucleotide
  Sense strand starting at position 2285 of SEQ ID NO: 1881674
augccuggccaagauacau

SEQ ID NO: 2062933 - RNA, 19 nt, Artificial Sequence
  Description of Artificial Sequence: Synthetic oligonucleotide
  Antisense strand to SEQ ID NO: 2062932
auguaucuuggccaggcau

SEQ ID NO: 2062934 - RNA, 19 nt, Artificial Sequence
  Description of Artificial Sequence: Synthetic oligonucleotide
  Sense strand starting at position 2311 of SEQ ID NO: 1881674
gaugguaugguacagugaa

SEQ ID NO: 2062935 - RNA, 19 nt, Artificial Sequence
  Description of Artificial Sequence: Synthetic oligonucleotide
  Antisense strand to SEQ ID NO: 2062934
uucacuguaccauaccauc

SEQ ID NO: 2062936 - RNA, 19 nt, Artificial Sequence
  Description of Artificial Sequence: Synthetic oligonucleotide
  Sense strand starting at position 2373 of SEQ ID NO: 1881674
uuugcacuccuauggaaag

SEQ ID NO: 2062937 - RNA, 19 nt, Artificial Sequence
  Description of Artificial Sequence: Synthetic oligonucleotide
  Antisense strand to SEQ ID NO: 2062936
cuuuccauaggagugcaaa

SEQ ID NO: 2062938 - RNA, 19 nt, Artificial Sequence
  Description of Artificial Sequence: Synthetic oligonucleotide
  Sense strand starting at position 2540 of SEQ ID NO: 1881674
uguugcuaacucuaacgaa

SEQ ID NO: 2062939 - RNA, 19 nt, Artificial Sequence
  Description of Artificial Sequence: Synthetic oligonucleotide
  Antisense strand to SEQ ID NO: 2062938
uucguuagaguuagcaaca

SEQ ID NO: 2062940 - RNA, 19 nt, Artificial Sequence
  Description of Artificial Sequence: Synthetic oligonucleotide
  Sense strand starting at position 2926 of SEQ ID NO: 1881674
aucugauuccagugaccau

SEQ ID NO: 2062941 - RNA, 19 nt, Artificial Sequence
  Description of Artificial Sequence: Synthetic oligonucleotide
  Antisense strand to SEQ ID NO: 2062940
auggucacuggaaucagau

SEQ ID NO: 2062942 - RNA, 19 nt, Artificial Sequence
  Description of Artificial Sequence: Synthetic oligonucleotide
  Sense strand starting at position 2976 of SEQ ID NO: 1881674
auguacacuuagucaaauu

SEQ ID NO: 2062943 - RNA, 19 nt, Artificial Sequence
  Description of Artificial Sequence: Synthetic oligonucleotide
  Antisense strand to SEQ ID NO: 2062942
aauuugacuaaguguacau

SEQ ID NO: 2062944 - RNA, 19 nt, Artificial Sequence
  Description of Artificial Sequence: Synthetic oligonucleotide
  Sense strand starting at position 2996 of SEQ ID NO: 1881674
cuaaguguaucuguacaaa

SEQ ID NO: 2062945 - RNA, 19 nt, Artificial Sequence
  Description of Artificial Sequence: Synthetic oligonucleotide
  Antisense strand to SEQ ID NO: 2062944
uuuguacagauacacuuag

SEQ ID NO: 2062946 - RNA, 19 nt, Artificial Sequence
  Description of Artificial Sequence: Synthetic oligonucleotide
  Sense strand starting at position 2999 of SEQ ID NO: 1881674
aguguaucuguacaaaugu

SEQ ID NO: 2062947 - RNA, 19 nt, Artificial Sequence
  Description of Artificial Sequence: Synthetic oligonucleotide
  Antisense strand to SEQ ID NO: 2062946
acauuuguacagauacacu

SEQ ID NO: 2062948 - RNA, 19 nt, Artificial Sequence
  Description of Artificial Sequence: Synthetic oligonucleotide
  Sense strand starting at position 3059 of SEQ ID NO: 1881674
ucaggauuguuguuaacug

SEQ ID NO: 2062949 - RNA, 19 nt, Artificial Sequence
  Description of Artificial Sequence: Synthetic oligonucleotide
  Antisense strand to SEQ ID NO: 2062948
caguuaacaacaauccuga

SEQ ID NO: 2062950 - RNA, 19 nt, Artificial Sequence
  Description of Artificial Sequence: Synthetic oligonucleotide
  Sense strand starting at position 3292 of SEQ ID NO: 1881674
agauuacaugaauguuuac

SEQ ID NO: 2062951 - RNA, 19 nt, Artificial Sequence
  Description of Artificial Sequence: Synthetic oligonucleotide
  Antisense strand to SEQ ID NO: 2062950
guaaacauucauguaaucu

SEQ ID NO: 2062952 - RNA, 19 nt, Artificial Sequence
  Description of Artificial Sequence: Synthetic oligonucleotide
  Sense strand starting at position 3322 of SEQ ID NO: 1881674
gcucauuaaugguuuauuu

SEQ ID NO: 2062953 - RNA, 19 nt, Artificial Sequence
  Description of Artificial Sequence: Synthetic oligonucleotide
  Antisense strand to SEQ ID NO: 2062952
aaauaaaccauuaaugagc

SEQ ID NO: 2062954 - RNA, 19 nt, Artificial Sequence
  Description of Artificial Sequence: Synthetic oligonucleotide
  Sense strand starting at position 3529 of SEQ ID NO: 1881674
guaagcuauuagucaaaua

SEQ ID NO: 2062955 - RNA, 19 nt, Artificial Sequence
  Description of Artificial Sequence: Synthetic oligonucleotide
  Antisense strand to SEQ ID NO: 2062954
uauuugacuaauagcuuac

SEQ ID NO: 2062956 - RNA, 19 nt, Artificial Sequence
  Description of Artificial Sequence: Synthetic oligonucleotide
  Sense strand starting at position 3619 of SEQ ID NO: 1881674
cucuaugugcuugagauug

SEQ ID NO: 2062957 - RNA, 19 nt, Artificial Sequence
  Description of Artificial Sequence: Synthetic oligonucleotide
  Antisense strand to SEQ ID NO: 2062956
caaucucaagcacauagag

SEQ ID NO: 2062958 - RNA, 19 nt, Artificial Sequence
  Description of Artificial Sequence: Synthetic oligonucleotide
  Sense strand starting at position 3630 of SEQ ID NO: 1881674
ugagauuguucaguaagga

SEQ ID NO: 2062959 - RNA, 19 nt, Artificial Sequence
  Description of Artificial Sequence: Synthetic oligonucleotide
  Antisense strand to SEQ ID NO: 2062958
uccuuacugaacaaucuca

SEQ ID NO: 2062960 - RNA, 19 nt, Artificial Sequence
  Description of Artificial Sequence: Synthetic oligonucleotide
  Sense strand starting at position 116 of SEQ ID NO: 1881675
aggugaugcauaugaaaug

SEQ ID NO: 2062961 - RNA, 19 nt, Artificial Sequence
  Description of Artificial Sequence: Synthetic oligonucleotide
  Antisense strand to SEQ ID NO: 2062960
cauuucauaugcaucaccu

SEQ ID NO: 2062962 - RNA, 19 nt, Artificial Sequence
  Description of Artificial Sequence: Synthetic oligonucleotide
  Sense strand starting at position 222 of SEQ ID NO: 1881675
uuggcaauacauugaauua

SEQ ID NO: 2062963 - RNA, 19 nt, Artificial Sequence
  Description of Artificial Sequence: Synthetic oligonucleotide
  Antisense strand to SEQ ID NO: 2062962
uaauucaauguauugccaa

SEQ ID NO: 2062964 - RNA, 19 nt, Artificial Sequence
  Description of Artificial Sequence: Synthetic oligonucleotide
  Sense strand starting at position 357 of SEQ ID NO: 1881675
caaagcagugguuaucaua

SEQ ID NO: 2062965 - RNA, 19 nt, Artificial Sequence
  Description of Artificial Sequence: Synthetic oligonucleotide
  Antisense strand to SEQ ID NO: 2062964
uaugauaaccacugcuuug

SEQ ID NO: 2062966 - RNA, 19 nt, Artificial Sequence
  Description of Artificial Sequence: Synthetic oligonucleotide
  Sense strand starting at position 365 of SEQ ID NO: 1881675
ugguuaucauacuuaagug

SEQ ID NO: 2062967 - RNA, 19 nt, Artificial Sequence
  Description of Artificial Sequence: Synthetic oligonucleotide
  Antisense strand to SEQ ID NO: 2062966
cacuuaaguaugauaacca

SEQ ID NO: 2062968 - RNA, 19 nt, Artificial Sequence
  Description of Artificial Sequence: Synthetic oligonucleotide
  Sense strand starting at position 397 of SEQ ID NO: 1881675
cuuagagacuaugcuuaau

SEQ ID NO: 2062969 - RNA, 19 nt, Artificial Sequence
  Description of Artificial Sequence: Synthetic oligonucleotide
  Antisense strand to SEQ ID NO: 2062968
auuaagcauagucucuaag

SEQ ID NO: 2062970 - RNA, 19 nt, Artificial Sequence
  Description of Artificial Sequence: Synthetic oligonucleotide
  Sense strand starting at position 400 of SEQ ID NO: 1881675
agagacuaugcuuaaucuu

SEQ ID NO: 2062971 - RNA, 19 nt, Artificial Sequence
  Description of Artificial Sequence: Synthetic oligonucleotide
  Antisense strand to SEQ ID NO: 2062970
aagauuaagcauagucucu

SEQ ID NO: 2062972 - RNA, 19 nt, Artificial Sequence
  Description of Artificial Sequence: Synthetic oligonucleotide
  Sense strand starting at position 436 of SEQ ID NO: 1881675
ggcucucaccucugagauu

SEQ ID NO: 2062973 - RNA, 19 nt, Artificial Sequence
  Description of Artificial Sequence: Synthetic oligonucleotide
  Antisense strand to SEQ ID NO: 2062972
aaucucagaggugagagcc

SEQ ID NO: 2062974 - RNA, 19 nt, Artificial Sequence
  Description of Artificial Sequence: Synthetic oligonucleotide
  Sense strand starting at position 463 of SEQ ID NO: 1881675
ggaggucuggaguaaagcu

SEQ ID NO: 2062975 - RNA, 19 nt, Artificial Sequence
  Description of Artificial Sequence: Synthetic oligonucleotide
  Antisense strand to SEQ ID NO: 2062974
agcuuuacuccagaccucc

SEQ ID NO: 2062976 - RNA, 19 nt, Artificial Sequence
  Description of Artificial Sequence: Synthetic oligonucleotide
  Sense strand starting at position 470 of SEQ ID NO: 1881675
uggaguaaagcucagccau

SEQ ID NO: 2062977 - RNA, 19 nt, Artificial Sequence
  Description of Artificial Sequence: Synthetic oligonucleotide
  Antisense strand to SEQ ID NO: 2062976
auggcugagcuuuacucca

SEQ ID NO: 2062978 - RNA, 19 nt, Artificial Sequence
  Description of Artificial Sequence: Synthetic oligonucleotide
  Sense strand starting at position 638 of SEQ ID NO: 1881675
uuaaucaucuagucuguca

SEQ ID NO: 2062979 - RNA, 19 nt, Artificial Sequence
  Description of Artificial Sequence: Synthetic oligonucleotide
  Antisense strand to SEQ ID NO: 2062978
ugacagacuagaugauuaa

SEQ ID NO: 2062980 - RNA, 19 nt, Artificial Sequence
  Description of Artificial Sequence: Synthetic oligonucleotide
  Sense strand starting at position 657 of SEQ ID NO: 1881675
aaauguaugcuguaagaau

SEQ ID NO: 2062981 - RNA, 19 nt, Artificial Sequence
  Description of Artificial Sequence: Synthetic oligonucleotide
  Antisense strand to SEQ ID NO: 2062980
auucuuacagcauacauuu

SEQ ID NO: 2062982 - RNA, 19 nt, Artificial Sequence
  Description of Artificial Sequence: Synthetic oligonucleotide
  Sense strand starting at position 723 of SEQ ID NO: 1881675
uguauuauagaugguauag

SEQ ID NO: 2062983 - RNA, 19 nt, Artificial Sequence
  Description of Artificial Sequence: Synthetic oligonucleotide
  Antisense strand to SEQ ID NO: 2062982
cuauaccaucuauaauaca

SEQ ID NO: 2062984 - RNA, 19 nt, Artificial Sequence
  Description of Artificial Sequence: Synthetic oligonucleotide
  Sense strand starting at position 905 of SEQ ID NO: 1881675
uuuacuagguaucuuagaa

SEQ ID NO: 2062985 - RNA, 19 nt, Artificial Sequence
  Description of Artificial Sequence: Synthetic oligonucleotide
  Antisense strand to SEQ ID NO: 2062984
uucuaagauaccuaguaaa

SEQ ID NO: 2062986 - RNA, 19 nt, Artificial Sequence
  Description of Artificial Sequence: Synthetic oligonucleotide
  Sense strand starting at position 912 of SEQ ID NO: 1881675
gguaucuuagaagaugcuu

SEQ ID NO: 2062987 - RNA, 19 nt, Artificial Sequence
  Description of Artificial Sequence: Synthetic oligonucleotide
  Antisense strand to SEQ ID NO: 2062986
aagcaucuucuaagauacc

SEQ ID NO: 2062988 - RNA, 19 nt, Artificial Sequence
  Description of Artificial Sequence: Synthetic oligonucleotide
  Sense strand starting at position 917 of SEQ ID NO: 1881675
cuuagaagaugcuuucuaa

SEQ ID NO: 2062989 - RNA, 19 nt, Artificial Sequence
  Description of Artificial Sequence: Synthetic oligonucleotide
  Antisense strand to SEQ ID NO: 2062988
uuagaaagcaucuucuaag

SEQ ID NO: 2062990 - RNA, 19 nt, Artificial Sequence
  Description of Artificial Sequence: Synthetic oligonucleotide
  Sense strand starting at position 920 of SEQ ID NO: 1881675
agaagaugcuuucuaauau

SEQ ID NO: 2062991 - RNA, 19 nt, Artificial Sequence
  Description of Artificial Sequence: Synthetic oligonucleotide
  Antisense strand to SEQ ID NO: 2062990
auauuagaaagcaucuucu

SEQ ID NO: 2062992 - RNA, 19 nt, Artificial Sequence
  Description of Artificial Sequence: Synthetic oligonucleotide
  Sense strand starting at position 1075 of SEQ ID NO: 1881675
guugcuguacuagaauaug

SEQ ID NO: 2062993 - RNA, 19 nt, Artificial Sequence
  Description of Artificial Sequence: Synthetic oligonucleotide
  Antisense strand to SEQ ID NO: 2062992
cauauucuaguacagcaac

SEQ ID NO: 2062994 - RNA, 19 nt, Artificial Sequence
  Description of Artificial Sequence: Synthetic oligonucleotide
  Sense strand starting at position 1144 of SEQ ID NO: 1881675
uuuggaacucauugaugac

SEQ ID NO: 2062995 - RNA, 19 nt, Artificial Sequence
  Description of Artificial Sequence: Synthetic oligonucleotide
  Antisense strand to SEQ ID NO: 2062994
gucaucaaugaguuccaaa

SEQ ID NO: 2062996 - RNA, 19 nt, Artificial Sequence
  Description of Artificial Sequence: Synthetic oligonucleotide
  Sense strand starting at position 1212 of SEQ ID NO: 1881675
acuguaugucagcaacacu

SEQ ID NO: 2062997 - RNA, 19 nt, Artificial Sequence
  Description of Artificial Sequence: Synthetic oligonucleotide
  Antisense strand to SEQ ID NO: 2062996
aguguugcugacauacagu

SEQ ID NO: 2062998 - RNA, 19 nt, Artificial Sequence
  Description of Artificial Sequence: Synthetic oligonucleotide
  Sense strand starting at position 1215 of SEQ ID NO: 1881675
guaugucagcaacacuuaa

SEQ ID NO: 2062999 - RNA, 19 nt, Artificial Sequence
  Description of Artificial Sequence: Synthetic oligonucleotide
  Antisense strand to SEQ ID NO: 2062998
uuaaguguugcugacauac

SEQ ID NO: 2063000 - RNA, 19 nt, Artificial Sequence
  Description of Artificial Sequence: Synthetic oligonucleotide
  Sense strand starting at position 1345 of SEQ ID NO: 1881675
uucugucaaucauuguaag

SEQ ID NO: 2063001 - RNA, 19 nt, Artificial Sequence
  Description of Artificial Sequence: Synthetic oligonucleotide
  Antisense strand to SEQ ID NO: 2063000
cuuacaaugauugacagaa

SEQ ID NO: 2063002 - RNA, 19 nt, Artificial Sequence
  Description of Artificial Sequence: Synthetic oligonucleotide
  Sense strand starting at position 1346 of SEQ ID NO: 1881675
ucugucaaucauuguaaga

SEQ ID NO: 2063003 - RNA, 19 nt, Artificial Sequence
  Description of Artificial Sequence: Synthetic oligonucleotide
  Antisense strand to SEQ ID NO: 2063002
ucuuacaaugauugacaga

SEQ ID NO: 2063004 - RNA, 19 nt, Artificial Sequence
  Description of Artificial Sequence: Synthetic oligonucleotide
  Sense strand starting at position 1703 of SEQ ID NO: 1881675
acacaaauaugauaugaag

SEQ ID NO: 2063005 - RNA, 19 nt, Artificial Sequence
  Description of Artificial Sequence: Synthetic oligonucleotide
  Antisense strand to SEQ ID NO: 2063004
cuucauaucauauuugugu

SEQ ID NO: 2063006 - RNA, 19 nt, Artificial Sequence
  Description of Artificial Sequence: Synthetic oligonucleotide
  Sense strand starting at position 1714 of SEQ ID NO: 1881675
auaugaaggucagcuuuga

SEQ ID NO: 2063007 - RNA, 19 nt, Artificial Sequence
  Description of Artificial Sequence: Synthetic oligonucleotide
  Antisense strand to SEQ ID NO: 2063006
ucaaagcugaccuucauau

SEQ ID NO: 2063008 - RNA, 19 nt, Artificial Sequence
  Description of Artificial Sequence: Synthetic oligonucleotide
  Sense strand starting at position 1766 of SEQ ID NO: 1881675
gugauauaauaugccuaag

SEQ ID NO: 2063009 - RNA, 19 nt, Artificial Sequence
  Description of Artificial Sequence: Synthetic oligonucleotide
  Antisense strand to SEQ ID NO: 2063008
cuuaggcauauuauaucac

SEQ ID NO: 2063010 - RNA, 19 nt, Artificial Sequence
  Description of Artificial Sequence: Synthetic oligonucleotide
  Sense strand starting at position 1839 of SEQ ID NO: 1881675
uaucuuguggcauaauaag

SEQ ID NO: 2063011 - RNA, 19 nt, Artificial Sequence
  Description of Artificial Sequence: Synthetic oligonucleotide
  Antisense strand to SEQ ID NO: 2063010
cuuauuaugccacaagaua

SEQ ID NO: 2063012 - RNA, 19 nt, Artificial Sequence
  Description of Artificial Sequence: Synthetic oligonucleotide
  Sense strand starting at position 2098 of SEQ ID NO: 1881675
acaaauacuugguuuggau

SEQ ID NO: 2063013 - RNA, 19 nt, Artificial Sequence
  Description of Artificial Sequence: Synthetic oligonucleotide
  Antisense strand to SEQ ID NO: 2063012
auccaaaccaaguauuugu

SEQ ID NO: 2063014 - RNA, 19 nt, Artificial Sequence
  Description of Artificial Sequence: Synthetic oligonucleotide
  Sense strand starting at position 2100 of SEQ ID NO: 1881675
aaauacuugguuuggauau

SEQ ID NO: 2063015 - RNA, 19 nt, Artificial Sequence
  Description of Artificial Sequence: Synthetic oligonucleotide
  Antisense strand to SEQ ID NO: 2063014
auauccaaaccaaguauuu

SEQ ID NO: 2063016 - RNA, 19 nt, Artificial Sequence
  Description of Artificial Sequence: Synthetic oligonucleotide
  Sense strand starting at position 2759 of SEQ ID NO: 1881675
ggugauaaggagugaguuu

SEQ ID NO: 2063017 - RNA, 19 nt, Artificial Sequence
  Description of Artificial Sequence: Synthetic oligonucleotide
  Antisense strand to SEQ ID NO: 2063016
aaacucacuccuuaucacc

SEQ ID NO: 2063018 - RNA, 19 nt, Artificial Sequence
  Description of Artificial Sequence: Synthetic oligonucleotide
  Sense strand starting at position 2806 of SEQ ID NO: 1881675
ccugauggcugaucauuaa

SEQ ID NO: 2063019 - RNA, 19 nt, Artificial Sequence
  Description of Artificial Sequence: Synthetic oligonucleotide
  Antisense strand to SEQ ID NO: 2063018
uuaaugaucagccaucagg

SEQ ID NO: 2063020 - RNA, 19 nt, Artificial Sequence
  Description of Artificial Sequence: Synthetic oligonucleotide
  Sense strand starting at position 3233 of SEQ ID NO: 1881675
uugcuacuuugggugauuu

SEQ ID NO: 2063021 - RNA, 19 nt, Artificial Sequence
  Description of Artificial Sequence: Synthetic oligonucleotide
  Antisense strand to SEQ ID NO: 2063020
aaaucacccaaaguagcaa

SEQ ID NO: 2063022 - RNA, 19 nt, Artificial Sequence
  Description of Artificial Sequence: Synthetic oligonucleotide
  Sense strand starting at position 3296 of SEQ ID NO: 1881675
uaccuauuagcugguagga

SEQ ID NO: 2063023 - RNA, 19 nt, Artificial Sequence
  Description of Artificial Sequence: Synthetic oligonucleotide
  Antisense strand to SEQ ID NO: 2063022
uccuaccagcuaauaggua

SEQ ID NO: 2063024 - RNA, 19 nt, Artificial Sequence
  Description of Artificial Sequence: Synthetic oligonucleotide
  Sense strand starting at position 3331 of SEQ ID NO: 1881675
agcuuaugauaugcagacu

SEQ ID NO: 2063025 - RNA, 19 nt, Artificial Sequence
  Description of Artificial Sequence: Synthetic oligonucleotide
  Antisense strand to SEQ ID NO: 2063024
agucugcauaucauaagcu

SEQ ID NO: 2063026 - RNA, 19 nt, Artificial Sequence
  Description of Artificial Sequence: Synthetic oligonucleotide
  Sense strand starting at position 3440 of SEQ ID NO: 1881675
uugauaaucuuagccuaug

SEQ ID NO: 2063027 - RNA, 19 nt, Artificial Sequence
  Description of Artificial Sequence: Synthetic oligonucleotide
  Antisense strand to SEQ ID NO: 2063026
cauaggcuaagauuaucaa

SEQ ID NO: 2063028 - RNA, 19 nt, Artificial Sequence
  Description of Artificial Sequence: Synthetic oligonucleotide
  Sense strand starting at position 3482 of SEQ ID NO: 1881675
uccacaaauguccaguaga

SEQ ID NO: 2063029 - RNA, 19 nt, Artificial Sequence
  Description of Artificial Sequence: Synthetic oligonucleotide
  Antisense strand to SEQ ID NO: 2063028
ucuacuggacauuugugga

SEQ ID NO: 2063030 - RNA, 19 nt, Artificial Sequence
  Description of Artificial Sequence: Synthetic oligonucleotide
  Sense strand starting at position 3556 of SEQ ID NO: 1881675
gugaacuucccauaaugcu

SEQ ID NO: 2063031 - RNA, 19 nt, Artificial Sequence
  Description of Artificial Sequence: Synthetic oligonucleotide
  Antisense strand to SEQ ID NO: 2063030
agcauuaugggaaguucac

SEQ ID NO: 2063032 - RNA, 19 nt, Artificial Sequence
  Description of Artificial Sequence: Synthetic oligonucleotide
  Sense strand starting at position 3610 of SEQ ID NO: 1881675
aguugucauccugaaguac

SEQ ID NO: 2063033 - RNA, 19 nt, Artificial Sequence
  Description of Artificial Sequence: Synthetic oligonucleotide
  Antisense strand to SEQ ID NO: 2063032
guacuucaggaugacaacu

SEQ ID NO: 2063034 - RNA, 19 nt, Artificial Sequence
  Description of Artificial Sequence: Synthetic oligonucleotide
  Sense strand starting at position 3684 of SEQ ID NO: 1881675
uuuggccaucccuggauua

SEQ ID NO: 2063035 - RNA, 19 nt, Artificial Sequence
  Description of Artificial Sequence: Synthetic oligonucleotide
  Antisense strand to SEQ ID NO: 2063034
uaauccagggauggccaaa

SEQ ID NO: 2063036 - RNA, 19 nt, Artificial Sequence
  Description of Artificial Sequence: Synthetic oligonucleotide
  Sense strand starting at position 3686 of SEQ ID NO: 1881675
uggccaucccuggauuaca

SEQ ID NO: 2063037 - RNA, 19 nt, Artificial Sequence
  Description of Artificial Sequence: Synthetic oligonucleotide
  Antisense strand to SEQ ID NO: 2063036
uguaauccagggauggcca

SEQ ID NO: 2063038 - RNA, 19 nt, Artificial Sequence
  Description of Artificial Sequence: Synthetic oligonucleotide
  Sense strand starting at position 3758 of SEQ ID NO: 1881675
cugaauacaugcuuacuga

SEQ ID NO: 2063039 - RNA, 19 nt, Artificial Sequence
  Description of Artificial Sequence: Synthetic oligonucleotide
  Antisense strand to SEQ ID NO: 2063038
ucaguaagcauguauucag

SEQ ID NO: 2063040 - RNA, 19 nt, Artificial Sequence
  Description of Artificial Sequence: Synthetic oligonucleotide
  Sense strand starting at position 149 of SEQ ID NO: 1881676
ugguuuaugucuuggagcu

SEQ ID NO: 2063041 - RNA, 19 nt, Artificial Sequence
  Description of Artificial Sequence: Synthetic oligonucleotide
  Antisense strand to SEQ ID NO: 2063040
agcuccaagacauaaacca

SEQ ID NO: 2063042 - RNA, 19 nt, Artificial Sequence
  Description of Artificial Sequence: Synthetic oligonucleotide
  Sense strand starting at position 150 of SEQ ID NO: 1881676
gguuuaugucuuggagcuc

SEQ ID NO: 2063043 - RNA, 19 nt, Artificial Sequence
  Description of Artificial Sequence: Synthetic oligonucleotide
  Antisense strand to SEQ ID NO: 2063042
gagcuccaagacauaaacc

SEQ ID NO: 2063044 - RNA, 19 nt, Artificial Sequence
  Description of Artificial Sequence: Synthetic oligonucleotide
  Sense strand starting at position 151 of SEQ ID NO: 1881676
guuuaugucuuggagcuca

SEQ ID NO: 2063045 - RNA, 19 nt, Artificial Sequence
  Description of Artificial Sequence: Synthetic oligonucleotide
  Antisense strand to SEQ ID NO: 2063044
ugagcuccaagacauaaac

SEQ ID NO: 2063046 - RNA, 19 nt, Artificial Sequence
  Description of Artificial Sequence: Synthetic oligonucleotide
  Sense strand starting at position 197 of SEQ ID NO: 1881676
gcagauucuggcugaggca

SEQ ID NO: 2063047 - RNA, 19 nt, Artificial Sequence
  Description of Artificial Sequence: Synthetic oligonucleotide
  Antisense strand to SEQ ID NO: 2063046
ugccucagccagaaucugc

SEQ ID NO: 2063048 - RNA, 19 nt, Artificial Sequence
  Description of Artificial Sequence: Synthetic oligonucleotide
  Sense strand starting at position 432 of SEQ ID NO: 1881676
gacccaaguuucuggaaca

SEQ ID NO: 2063049 - RNA, 19 nt, Artificial Sequence
  Description of Artificial Sequence: Synthetic oligonucleotide
  Antisense strand to SEQ ID NO: 2063048
uguuccagaaacuuggguc

SEQ ID NO: 2063050 - RNA, 19 nt, Artificial Sequence
  Description of Artificial Sequence: Synthetic oligonucleotide
  Sense strand starting at position 455 of SEQ ID NO: 1881676
guuuaagguuccuuccaga

SEQ ID NO: 2063051 - RNA, 19 nt, Artificial Sequence
  Description of Artificial Sequence: Synthetic oligonucleotide
  Antisense strand to SEQ ID NO: 2063050
ucuggaaggaaccuuaaac

SEQ ID NO: 2063052 - RNA, 19 nt, Artificial Sequence
  Description of Artificial Sequence: Synthetic oligonucleotide
  Sense strand starting at position 458 of SEQ ID NO: 1881676
uaagguuccuuccagaaga

SEQ ID NO: 2063053 - RNA, 19 nt, Artificial Sequence
  Description of Artificial Sequence: Synthetic oligonucleotide
  Antisense strand to SEQ ID NO: 2063052
ucuucuggaaggaaccuua

SEQ ID NO: 2063054 - RNA, 19 nt, Artificial Sequence
  Description of Artificial Sequence: Synthetic oligonucleotide
  Sense strand starting at position 725 of SEQ ID NO: 1881676
ccacgaagcguugauauaa

SEQ ID NO: 2063055 - RNA, 19 nt, Artificial Sequence
  Description of Artificial Sequence: Synthetic oligonucleotide
  Antisense strand to SEQ ID NO: 2063054
uuauaucaacgcuucgugg

SEQ ID NO: 2063056 - RNA, 19 nt, Artificial Sequence
  Description of Artificial Sequence: Synthetic oligonucleotide
  Sense strand starting at position 733 of SEQ ID NO: 1881676
cguugauauaaaggaagau

SEQ ID NO: 2063057 - RNA, 19 nt, Artificial Sequence
  Description of Artificial Sequence: Synthetic oligonucleotide
  Antisense strand to SEQ ID NO: 2063056
aucuuccuuuauaucaacg

SEQ ID NO: 2063058 - RNA, 19 nt, Artificial Sequence
  Description of Artificial Sequence: Synthetic oligonucleotide
  Sense strand starting at position 742 of SEQ ID NO: 1881676
aaaggaagaugcucauguu

SEQ ID NO: 2063059 - RNA, 19 nt, Artificial Sequence
  Description of Artificial Sequence: Synthetic oligonucleotide
  Antisense strand to SEQ ID NO: 2063058
aacaugagcaucuuccuuu

SEQ ID NO: 2063060 - RNA, 19 nt, Artificial Sequence
  Description of Artificial Sequence: Synthetic oligonucleotide
  Sense strand starting at position 745 of SEQ ID NO: 1881676
ggaagaugcucauguuaag

SEQ ID NO: 2063061 - RNA, 19 nt, Artificial Sequence
  Description of Artificial Sequence: Synthetic oligonucleotide
  Antisense strand to SEQ ID NO: 2063060
cuuaacaugagcaucuucc

SEQ ID NO: 2063062 - RNA, 19 nt, Artificial Sequence
  Description of Artificial Sequence: Synthetic oligonucleotide
  Sense strand starting at position 748 of SEQ ID NO: 1881676
agaugcucauguuaagaaa

SEQ ID NO: 2063063 - RNA, 19 nt, Artificial Sequence
  Description of Artificial Sequence: Synthetic oligonucleotide
  Antisense strand to SEQ ID NO: 2063062
uuucuuaacaugagcaucu

SEQ ID NO: 2063064 - RNA, 19 nt, Artificial Sequence
  Description of Artificial Sequence: Synthetic oligonucleotide
  Sense strand starting at position 793 of SEQ ID NO: 1881676
aggagcuuauuauccugaa

SEQ ID NO: 2063065 - RNA, 19 nt, Artificial Sequence
  Description of Artificial Sequence: Synthetic oligonucleotide
  Antisense strand to SEQ ID NO: 2063064
uucaggauaauaagcuccu

SEQ ID NO: 2063066 - RNA, 19 nt, Artificial Sequence
  Description of Artificial Sequence: Synthetic oligonucleotide
  Sense strand starting at position 794 of SEQ ID NO: 1881676
ggagcuuauuauccugaag

SEQ ID NO: 2063067 - RNA, 19 nt, Artificial Sequence
  Description of Artificial Sequence: Synthetic oligonucleotide
  Antisense strand to SEQ ID NO: 2063066
cuucaggauaauaagcucc

SEQ ID NO: 2063068 - RNA, 19 nt, Artificial Sequence
  Description of Artificial Sequence: Synthetic oligonucleotide
  Sense strand starting at position 796 of SEQ ID NO: 1881676
agcuuauuauccugaagug

SEQ ID NO: 2063069 - RNA, 19 nt, Artificial Sequence
  Description of Artificial Sequence: Synthetic oligonucleotide
  Antisense strand to SEQ ID NO: 2063068
cacuucaggauaauaagcu

SEQ ID NO: 2063070 - RNA, 19 nt, Artificial Sequence
  Description of Artificial Sequence: Synthetic oligonucleotide
  Sense strand starting at position 797 of SEQ ID NO: 1881676
gcuuauuauccugaaguga

SEQ ID NO: 2063071 - RNA, 19 nt, Artificial Sequence
  Description of Artificial Sequence: Synthetic oligonucleotide
  Antisense strand to SEQ ID NO: 2063070
ucacuucaggauaauaagc

SEQ ID NO: 2063072 - RNA, 19 nt, Artificial Sequence
  Description of Artificial Sequence: Synthetic oligonucleotide
  Sense strand starting at position 1102 of SEQ ID NO: 1881676
gccugagucagaugcccau

SEQ ID NO: 2063073 - RNA, 19 nt, Artificial Sequence
  Description of Artificial Sequence: Synthetic oligonucleotide
  Antisense strand to SEQ ID NO: 2063072
augggcaucugacucaggc

SEQ ID NO: 2063074 - RNA, 19 nt, Artificial Sequence
  Description of Artificial Sequence: Synthetic oligonucleotide
  Sense strand starting at position 1106 of SEQ ID NO: 1881676
gagucagaugcccauguca

SEQ ID NO: 2063075 - RNA, 19 nt, Artificial Sequence
  Description of Artificial Sequence: Synthetic oligonucleotide
  Antisense strand to SEQ ID NO: 2063074
ugacaugggcaucugacuc

SEQ ID NO: 2063076 - RNA, 19 nt, Artificial Sequence
  Description of Artificial Sequence: Synthetic oligonucleotide
  Sense strand starting at position 1204 of SEQ ID NO: 1881676
uauauauucuccgacagag

SEQ ID NO: 2063077 - RNA, 19 nt, Artificial Sequence
  Description of Artificial Sequence: Synthetic oligonucleotide
  Antisense strand to SEQ ID NO: 2063076
cucugucggagaauauaua

SEQ ID NO: 2063078 - RNA, 19 nt, Artificial Sequence
  Description of Artificial Sequence: Synthetic oligonucleotide
  Sense strand starting at position 1206 of SEQ ID NO: 1881676
uauauucuccgacagagca

SEQ ID NO: 2063079 - RNA, 19 nt, Artificial Sequence
  Description of Artificial Sequence: Synthetic oligonucleotide
  Antisense strand to SEQ ID NO: 2063078
ugcucugucggagaauaua

SEQ ID NO: 2063080 - RNA, 19 nt, Artificial Sequence
  Description of Artificial Sequence: Synthetic oligonucleotide
  Sense strand starting at position 1380 of SEQ ID NO: 1881676
cuccgcaucuguggacaaa

SEQ ID NO: 2063081 - RNA, 19 nt, Artificial Sequence
  Description of Artificial Sequence: Synthetic oligonucleotide
  Antisense strand to SEQ ID NO: 2063080
uuuguccacagaugcggag

SEQ ID NO: 2063082 - RNA, 19 nt, Artificial Sequence
  Description of Artificial Sequence: Synthetic oligonucleotide
  Sense strand starting at position 1679 of SEQ ID NO: 1881676
ccauauccagcucagagau

SEQ ID NO: 2063083 - RNA, 19 nt, Artificial Sequence
  Description of Artificial Sequence: Synthetic oligonucleotide
  Antisense strand to SEQ ID NO: 2063082
aucucugagcuggauaugg

SEQ ID NO: 2063084 - RNA, 19 nt, Artificial Sequence
  Description of Artificial Sequence: Synthetic oligonucleotide
  Sense strand starting at position 2179 of SEQ ID NO: 1881676
gguggagucucucaccagu

SEQ ID NO: 2063085 - RNA, 19 nt, Artificial Sequence
  Description of Artificial Sequence: Synthetic oligonucleotide
  Antisense strand to SEQ ID NO: 2063084
acuggugagagacuccacc

SEQ ID NO: 2063086 - RNA, 19 nt, Artificial Sequence
  Description of Artificial Sequence: Synthetic oligonucleotide
  Sense strand starting at position 2664 of SEQ ID NO: 1881676
ugugaacacugugggauua

SEQ ID NO: 2063087 - RNA, 19 nt, Artificial Sequence
  Description of Artificial Sequence: Synthetic oligonucleotide
  Antisense strand to SEQ ID NO: 2063086
uaaucccacaguguucaca

SEQ ID NO: 2063088 - RNA, 19 nt, Artificial Sequence
  Description of Artificial Sequence: Synthetic oligonucleotide
  Sense strand starting at position 2665 of SEQ ID NO: 1881676
gugaacacugugggauuau

SEQ ID NO: 2063089 - RNA, 19 nt, Artificial Sequence
  Description of Artificial Sequence: Synthetic oligonucleotide
  Antisense strand to SEQ ID NO: 2063088
auaaucccacaguguucac

SEQ ID NO: 2063090 - RNA, 19 nt, Artificial Sequence
  Description of Artificial Sequence: Synthetic oligonucleotide
  Sense strand starting at position 2850 of SEQ ID NO: 1881676
gugaguaugcccugccaug

SEQ ID NO: 2063091 - RNA, 19 nt, Artificial Sequence
  Description of Artificial Sequence: Synthetic oligonucleotide
  Antisense strand to SEQ ID NO: 2063090
cauggcagggcauacucac

SEQ ID NO: 2063092 - RNA, 19 nt, Artificial Sequence
  Description of Artificial Sequence: Synthetic oligonucleotide
  Sense strand starting at position 2882 of SEQ ID NO: 1881676
cgccgucuuccugugauca

SEQ ID NO: 2063093 - RNA, 19 nt, Artificial Sequence
  Description of Artificial Sequence: Synthetic oligonucleotide
  Antisense strand to SEQ ID NO: 2063092
ugaucacaggaagacggcg

SEQ ID NO: 2063094 - RNA, 19 nt, Artificial Sequence
  Description of Artificial Sequence: Synthetic oligonucleotide
  Sense strand starting at position 2883 of SEQ ID NO: 1881676
gccgucuuccugugaucag

SEQ ID NO: 2063095 - RNA, 19 nt, Artificial Sequence
  Description of Artificial Sequence: Synthetic oligonucleotide
  Antisense strand to SEQ ID NO: 2063094
cugaucacaggaagacggc

SEQ ID NO: 2063096 - RNA, 19 nt, Artificial Sequence
  Description of Artificial Sequence: Synthetic oligonucleotide
  Sense strand starting at position 2890 of SEQ ID NO: 1881676
uccugugaucagggugcau

SEQ ID NO: 2063097 - RNA, 19 nt, Artificial Sequence
  Description of Artificial Sequence: Synthetic oligonucleotide
  Antisense strand to SEQ ID NO: 2063096
augcacccugaucacagga

SEQ ID NO: 2063098 - RNA, 19 nt, Artificial Sequence
  Description of Artificial Sequence: Synthetic oligonucleotide
  Sense strand starting at position 2899 of SEQ ID NO: 1881676
cagggugcauccugcuuaa

SEQ ID NO: 2063099 - RNA, 19 nt, Artificial Sequence
  Description of Artificial Sequence: Synthetic oligonucleotide
  Antisense strand to SEQ ID NO: 2063098
uuaagcaggaugcacccug

SEQ ID NO: 2063100 - RNA, 19 nt, Artificial Sequence
  Description of Artificial Sequence: Synthetic oligonucleotide
  Sense strand starting at position 2902 of SEQ ID NO: 1881676
ggugcauccugcuuaagcu

SEQ ID NO: 2063101 - RNA, 19 nt, Artificial Sequence
  Description of Artificial Sequence: Synthetic oligonucleotide
  Antisense strand to SEQ ID NO: 2063100
agcuuaagcaggaugcacc

SEQ ID NO: 2063102 - RNA, 19 nt, Artificial Sequence
  Description of Artificial Sequence: Synthetic oligonucleotide
  Sense strand starting at position 3121 of SEQ ID NO: 1881676
ccagcacuguccucagauc

SEQ ID NO: 2063103 - RNA, 19 nt, Artificial Sequence
  Description of Artificial Sequence: Synthetic oligonucleotide
  Antisense strand to SEQ ID NO: 2063102
gaucugaggacagugcugg

SEQ ID NO: 2063104 - RNA, 19 nt, Artificial Sequence
  Description of Artificial Sequence: Synthetic oligonucleotide
  Sense strand starting at position 3270 of SEQ ID NO: 1881676
gggagaagccggugaaauu

SEQ ID NO: 2063105 - RNA, 19 nt, Artificial Sequence
  Description of Artificial Sequence: Synthetic oligonucleotide
  Antisense strand to SEQ ID NO: 2063104
aauuucaccggcuucuccc

SEQ ID NO: 2063106 - RNA, 19 nt, Artificial Sequence
  Description of Artificial Sequence: Synthetic oligonucleotide
  Sense strand starting at position 3543 of SEQ ID NO: 1881676
ggucacauaugucagggau

SEQ ID NO: 2063107 - RNA, 19 nt, Artificial Sequence
  Description of Artificial Sequence: Synthetic oligonucleotide
  Antisense strand to SEQ ID NO: 2063106
aucccugacauaugugacc

SEQ ID NO: 2063108 - RNA, 19 nt, Artificial Sequence
  Description of Artificial Sequence: Synthetic oligonucleotide
  Sense strand starting at position 3546 of SEQ ID NO: 1881676
cacauaugucagggauccu

SEQ ID NO: 2063109 - RNA, 19 nt, Artificial Sequence
  Description of Artificial Sequence: Synthetic oligonucleotide
  Antisense strand to SEQ ID NO: 2063108
aggaucccugacauaugug

SEQ ID NO: 2063110 - RNA, 19 nt, Artificial Sequence
  Description of Artificial Sequence: Synthetic oligonucleotide
  Sense strand starting at position 3638 of SEQ ID NO: 1881676
gcugcauucucucuaaaug

SEQ ID NO: 2063111 - RNA, 19 nt, Artificial Sequence
  Description of Artificial Sequence: Synthetic oligonucleotide
  Antisense strand to SEQ ID NO: 2063110
cauuuagagagaaugcagc

SEQ ID NO: 2063112 - RNA, 19 nt, Artificial Sequence
  Description of Artificial Sequence: Synthetic oligonucleotide
  Sense strand starting at position 3690 of SEQ ID NO: 1881676
cgcacuuuacaacgaguca

SEQ ID NO: 2063113 - RNA, 19 nt, Artificial Sequence
  Description of Artificial Sequence: Synthetic oligonucleotide
  Antisense strand to SEQ ID NO: 2063112
ugacucguuguaaagugcg

SEQ ID NO: 2063114 - RNA, 19 nt, Artificial Sequence
  Description of Artificial Sequence: Synthetic oligonucleotide
  Sense strand starting at position 3927 of SEQ ID NO: 1881676
agauauuccugacuugguu

SEQ ID NO: 2063115 - RNA, 19 nt, Artificial Sequence
  Description of Artificial Sequence: Synthetic oligonucleotide
  Antisense strand to SEQ ID NO: 2063114
aaccaagucaggaauaucu

SEQ ID NO: 2063116 - RNA, 19 nt, Artificial Sequence
  Description of Artificial Sequence: Synthetic oligonucleotide
  Sense strand starting at position 30 of SEQ ID NO: 1881677
uacugagguucgcuuucua

SEQ ID NO: 2063117 - RNA, 19 nt, Artificial Sequence
  Description of Artificial Sequence: Synthetic oligonucleotide
  Antisense strand to SEQ ID NO: 2063116
uagaaagcgaaccucagua

SEQ ID NO: 2063118 - RNA, 19 nt, Artificial Sequence
  Description of Artificial Sequence: Synthetic oligonucleotide
  Sense strand starting at position 493 of SEQ ID NO: 1881677
caguucugaugucugcaua

SEQ ID NO: 2063119 - RNA, 19 nt, Artificial Sequence
  Description of Artificial Sequence: Synthetic oligonucleotide
  Antisense strand to SEQ ID NO: 2063118
uaugcagacaucagaacug

SEQ ID NO: 2063120 - RNA, 19 nt, Artificial Sequence
  Description of Artificial Sequence: Synthetic oligonucleotide
  Sense strand starting at position 494 of SEQ ID NO: 1881677
aguucugaugucugcauau

SEQ ID NO: 2063121 - RNA, 19 nt, Artificial Sequence
  Description of Artificial Sequence: Synthetic oligonucleotide
  Antisense strand to SEQ ID NO: 2063120
auaugcagacaucagaacu

SEQ ID NO: 2063122 - RNA, 19 nt, Artificial Sequence
  Description of Artificial Sequence: Synthetic oligonucleotide
  Sense strand starting at position 496 of SEQ ID NO: 1881677
uucugaugucugcauauuc

SEQ ID NO: 2063123 - RNA, 19 nt, Artificial Sequence
  Description of Artificial Sequence: Synthetic oligonucleotide
  Antisense strand to SEQ ID NO: 2063122
gaauaugcagacaucagaa

SEQ ID NO: 2063124 - RNA, 19 nt, Artificial Sequence
  Description of Artificial Sequence: Synthetic oligonucleotide
  Sense strand starting at position 1071 of SEQ ID NO: 1881677
gggucuuauucccuucgga

SEQ ID NO: 2063125 - RNA, 19 nt, Artificial Sequence
  Description of Artificial Sequence: Synthetic oligonucleotide
  Antisense strand to SEQ ID NO: 2063124
uccgaagggaauaagaccc

SEQ ID NO: 2063126 - RNA, 19 nt, Artificial Sequence
  Description of Artificial Sequence: Synthetic oligonucleotide
  Sense strand starting at position 1074 of SEQ ID NO: 1881677
ucuuauucccuucggaagu

SEQ ID NO: 2063127 - RNA, 19 nt, Artificial Sequence
  Description of Artificial Sequence: Synthetic oligonucleotide
  Antisense strand to SEQ ID NO: 2063126
acuuccgaagggaauaaga

SEQ ID NO: 2063128 - RNA, 19 nt, Artificial Sequence
  Description of Artificial Sequence: Synthetic oligonucleotide
  Sense strand starting at position 1315 of SEQ ID NO: 1881677
cagcgagucuuguucuaga

SEQ ID NO: 2063129 - RNA, 19 nt, Artificial Sequence
  Description of Artificial Sequence: Synthetic oligonucleotide
  Antisense strand to SEQ ID NO: 2063128
ucuagaacaagacucgcug

SEQ ID NO: 2063130 - RNA, 19 nt, Artificial Sequence
  Description of Artificial Sequence: Synthetic oligonucleotide
  Sense strand starting at position 1362 of SEQ ID NO: 1881677
cucccuuccugugcagaaa

SEQ ID NO: 2063131 - RNA, 19 nt, Artificial Sequence
  Description of Artificial Sequence: Synthetic oligonucleotide
  Antisense strand to SEQ ID NO: 2063130
uuucugcacaggaagggag

SEQ ID NO: 2063132 - RNA, 19 nt, Artificial Sequence
  Description of Artificial Sequence: Synthetic oligonucleotide
  Sense strand starting at position 1363 of SEQ ID NO: 1881677
ucccuuccugugcagaaau

SEQ ID NO: 2063133 - RNA, 19 nt, Artificial Sequence
  Description of Artificial Sequence: Synthetic oligonucleotide
  Antisense strand to SEQ ID NO: 2063132
auuucugcacaggaaggga

SEQ ID NO: 2063134 - RNA, 19 nt, Artificial Sequence
  Description of Artificial Sequence: Synthetic oligonucleotide
  Sense strand starting at position 1365 of SEQ ID NO: 1881677
ccuuccugugcagaaauca

SEQ ID NO: 2063135 - RNA, 19 nt, Artificial Sequence
  Description of Artificial Sequence: Synthetic oligonucleotide
  Antisense strand to SEQ ID NO: 2063134
ugauuucugcacaggaagg

SEQ ID NO: 2063136 - RNA, 19 nt, Artificial Sequence
  Description of Artificial Sequence: Synthetic oligonucleotide
  Sense strand starting at position 1410 of SEQ ID NO: 1881677
gcacauaguccagauaaug

SEQ ID NO: 2063137 - RNA, 19 nt, Artificial Sequence
  Description of Artificial Sequence: Synthetic oligonucleotide
  Antisense strand to SEQ ID NO: 2063136
cauuaucuggacuaugugc

SEQ ID NO: 2063138 - RNA, 19 nt, Artificial Sequence
  Description of Artificial Sequence: Synthetic oligonucleotide
  Sense strand starting at position 1420 of SEQ ID NO: 1881677
cagauaaugcccuaugugu

SEQ ID NO: 2063139 - RNA, 19 nt, Artificial Sequence
  Description of Artificial Sequence: Synthetic oligonucleotide
  Antisense strand to SEQ ID NO: 2063138
acacauagggcauuaucug

SEQ ID NO: 2063140 - RNA, 19 nt, Artificial Sequence
  Description of Artificial Sequence: Synthetic oligonucleotide
  Sense strand starting at position 1422 of SEQ ID NO: 1881677
gauaaugcccuauguguaa

SEQ ID NO: 2063141 - RNA, 19 nt, Artificial Sequence
  Description of Artificial Sequence: Synthetic oligonucleotide
  Antisense strand to SEQ ID NO: 2063140
uuacacauagggcauuauc

SEQ ID NO: 2063142 - RNA, 19 nt, Artificial Sequence
  Description of Artificial Sequence: Synthetic oligonucleotide
  Sense strand starting at position 1426 of SEQ ID NO: 1881677
augcccuauguguaauaua

SEQ ID NO: 2063143 - RNA, 19 nt, Artificial Sequence
  Description of Artificial Sequence: Synthetic oligonucleotide
  Antisense strand to SEQ ID NO: 2063142
uauauuacacauagggcau

SEQ ID NO: 2063144 - RNA, 19 nt, Artificial Sequence
  Description of Artificial Sequence: Synthetic oligonucleotide
  Sense strand starting at position 1554 of SEQ ID NO: 1881677
guuugucaccgccauaaag

SEQ ID NO: 2063145 - RNA, 19 nt, Artificial Sequence
  Description of Artificial Sequence: Synthetic oligonucleotide
  Antisense strand to SEQ ID NO: 2063144
cuuuauggcggugacaaac

SEQ ID NO: 2063146 - RNA, 19 nt, Artificial Sequence
  Description of Artificial Sequence: Synthetic oligonucleotide
  Sense strand starting at position 1564 of SEQ ID NO: 1881677
gccauaaaguccucuggcu

SEQ ID NO: 2063147 - RNA, 19 nt, Artificial Sequence
  Description of Artificial Sequence: Synthetic oligonucleotide
  Antisense strand to SEQ ID NO: 2063146
agccagaggacuuuauggc

SEQ ID NO: 2063148 - RNA, 19 nt, Artificial Sequence
  Description of Artificial Sequence: Synthetic oligonucleotide
  Sense strand starting at position 1698 of SEQ ID NO: 1881677
aacucagucccgggugaga

SEQ ID NO: 2063149 - RNA, 19 nt, Artificial Sequence
  Description of Artificial Sequence: Synthetic oligonucleotide
  Antisense strand to SEQ ID NO: 2063148
ucucacccgggacugaguu

SEQ ID NO: 2063150 - RNA, 19 nt, Artificial Sequence
  Description of Artificial Sequence: Synthetic oligonucleotide
  Sense strand starting at position 1707 of SEQ ID NO: 1881677
ccgggugagaugugcagau

SEQ ID NO: 2063151 - RNA, 19 nt, Artificial Sequence
  Description of Artificial Sequence: Synthetic oligonucleotide
  Antisense strand to SEQ ID NO: 2063150
aucugcacaucucacccgg

SEQ ID NO: 2063152 - RNA, 19 nt, Artificial Sequence
  Description of Artificial Sequence: Synthetic oligonucleotide
  Sense strand starting at position 1723 of SEQ ID NO: 1881677
gaugguguugugggugaga

SEQ ID NO: 2063153 - RNA, 19 nt, Artificial Sequence
  Description of Artificial Sequence: Synthetic oligonucleotide
  Antisense strand to SEQ ID NO: 2063152
ucucacccacaacaccauc

SEQ ID NO: 2063154 - RNA, 19 nt, Artificial Sequence
  Description of Artificial Sequence: Synthetic oligonucleotide
  Sense strand starting at position 1726 of SEQ ID NO: 1881677
gguguugugggugagauga

SEQ ID NO: 2063155 - RNA, 19 nt, Artificial Sequence
  Description of Artificial Sequence: Synthetic oligonucleotide
  Antisense strand to SEQ ID NO: 2063154
ucaucucacccacaacacc

SEQ ID NO: 2063156 - RNA, 19 nt, Artificial Sequence
  Description of Artificial Sequence: Synthetic oligonucleotide
  Sense strand starting at position 1736 of SEQ ID NO: 1881677
gugagaugaguuugugauc

SEQ ID NO: 2063157 - RNA, 19 nt, Artificial Sequence
  Description of Artificial Sequence: Synthetic oligonucleotide
  Antisense strand to SEQ ID NO: 2063156
gaucacaaacucaucucac

SEQ ID NO: 2063158 - RNA, 19 nt, Artificial Sequence
  Description of Artificial Sequence: Synthetic oligonucleotide
  Sense strand starting at position 1937 of SEQ ID NO: 1881677
auaaauacccguugaaugu

SEQ ID NO: 2063159 - RNA, 19 nt, Artificial Sequence
  Description of Artificial Sequence: Synthetic oligonucleotide
  Antisense strand to SEQ ID NO: 2063158
acauucaacggguauuuau

SEQ ID NO: 2063160 - RNA, 19 nt, Artificial Sequence
  Description of Artificial Sequence: Synthetic oligonucleotide
  Sense strand starting at position 1938 of SEQ ID NO: 1881677
uaaauacccguugaaugua

SEQ ID NO: 2063161 - RNA, 19 nt, Artificial Sequence
  Description of Artificial Sequence: Synthetic oligonucleotide
  Antisense strand to SEQ ID NO: 2063160
uacauucaacggguauuua

SEQ ID NO: 2063162 - RNA, 19 nt, Artificial Sequence
  Description of Artificial Sequence: Synthetic oligonucleotide
  Sense strand starting at position 2377 of SEQ ID NO: 1881677
ggguuuccugcucagagga

SEQ ID NO: 2063163 - RNA, 19 nt, Artificial Sequence
  Description of Artificial Sequence: Synthetic oligonucleotide
  Antisense strand to SEQ ID NO: 2063162
uccucugagcaggaaaccc

SEQ ID NO: 2063164 - RNA, 19 nt, Artificial Sequence
  Description of Artificial Sequence: Synthetic oligonucleotide
  Sense strand starting at position 2481 of SEQ ID NO: 1881677
cacauaugucugugcugga

SEQ ID NO: 2063165 - RNA, 19 nt, Artificial Sequence
  Description of Artificial Sequence: Synthetic oligonucleotide
  Antisense strand to SEQ ID NO: 2063164
uccagcacagacauaugug

SEQ ID NO: 2063166 - RNA, 19 nt, Artificial Sequence
  Description of Artificial Sequence: Synthetic oligonucleotide
  Sense strand starting at position 2515 of SEQ ID NO: 1881677
ggaauucaugagugcagca

SEQ ID NO: 2063167 - RNA, 19 nt, Artificial Sequence
  Description of Artificial Sequence: Synthetic oligonucleotide
  Antisense strand to SEQ ID NO: 2063166
ugcugcacucaugaauucc

SEQ ID NO: 2063168 - RNA, 19 nt, Artificial Sequence
  Description of Artificial Sequence: Synthetic oligonucleotide
  Sense strand starting at position 2615 of SEQ ID NO: 1881677
agaagaaugugacgacaag

SEQ ID NO: 2063169 - RNA, 19 nt, Artificial Sequence
  Description of Artificial Sequence: Synthetic oligonucleotide
  Antisense strand to SEQ ID NO: 2063168
cuugucgucacauucuucu

SEQ ID NO: 2063170 - RNA, 19 nt, Artificial Sequence
  Description of Artificial Sequence: Synthetic oligonucleotide
  Sense strand starting at position 2928 of SEQ ID NO: 1881677
ccacaaacgucaguagaaa

SEQ ID NO: 2063171 - RNA, 19 nt, Artificial Sequence
  Description of Artificial Sequence: Synthetic oligonucleotide
  Antisense strand to SEQ ID NO: 2063170
uuucuacugacguuugugg

SEQ ID NO: 2063172 - RNA, 19 nt, Artificial Sequence
  Description of Artificial Sequence: Synthetic oligonucleotide
  Sense strand starting at position 2929 of SEQ ID NO: 1881677
cacaaacgucaguagaaau

SEQ ID NO: 2063173 - RNA, 19 nt, Artificial Sequence
  Description of Artificial Sequence: Synthetic oligonucleotide
  Antisense strand to SEQ ID NO: 2063172
auuucuacugacguuugug

SEQ ID NO: 2063174 - RNA, 19 nt, Artificial Sequence
  Description of Artificial Sequence: Synthetic oligonucleotide
  Sense strand starting at position 2961 of SEQ ID NO: 1881677
guuggccucccugaagagu

SEQ ID NO: 2063175 - RNA, 19 nt, Artificial Sequence
  Description of Artificial Sequence: Synthetic oligonucleotide
  Antisense strand to SEQ ID NO: 2063174
acucuucagggaggccaac

SEQ ID NO: 2063176 - RNA, 19 nt, Artificial Sequence
  Description of Artificial Sequence: Synthetic oligonucleotide
  Sense strand starting at position 3109 of SEQ ID NO: 1881677
ccugguucccagggcaaau

SEQ ID NO: 2063177 - RNA, 19 nt, Artificial Sequence
  Description of Artificial Sequence: Synthetic oligonucleotide
  Antisense strand to SEQ ID NO: 2063176
auuugcccugggaaccagg

SEQ ID NO: 2063178 - RNA, 19 nt, Artificial Sequence
  Description of Artificial Sequence: Synthetic oligonucleotide
  Sense strand starting at position 3308 of SEQ ID NO: 1881677
agggauuccuaggauccga

SEQ ID NO: 2063179 - RNA, 19 nt, Artificial Sequence
  Description of Artificial Sequence: Synthetic oligonucleotide
  Antisense strand to SEQ ID NO: 2063178
ucggauccuaggaaucccu

SEQ ID NO: 2063180 - RNA, 19 nt, Artificial Sequence
  Description of Artificial Sequence: Synthetic oligonucleotide
  Sense strand starting at position 3312 of SEQ ID NO: 1881677
auuccuaggauccgagaga

SEQ ID NO: 2063181 - RNA, 19 nt, Artificial Sequence
  Description of Artificial Sequence: Synthetic oligonucleotide
  Antisense strand to SEQ ID NO: 2063180
ucucucggauccuaggaau

SEQ ID NO: 2063182 - RNA, 19 nt, Artificial Sequence
  Description of Artificial Sequence: Synthetic oligonucleotide
  Sense strand starting at position 3535 of SEQ ID NO: 1881677
gccugaaugcugggauccu

SEQ ID NO: 2063183 - RNA, 19 nt, Artificial Sequence
  Description of Artificial Sequence: Synthetic oligonucleotide
  Antisense strand to SEQ ID NO: 2063182
aggaucccagcauucaggc

SEQ ID NO: 2063184 - RNA, 19 nt, Artificial Sequence
  Description of Artificial Sequence: Synthetic oligonucleotide
  Sense strand starting at position 3544 of SEQ ID NO: 1881677
cugggauccugguauuuac

SEQ ID NO: 2063185 - RNA, 19 nt, Artificial Sequence
  Description of Artificial Sequence: Synthetic oligonucleotide
  Antisense strand to SEQ ID NO: 2063184
guaaauaccaggaucccag

SEQ ID NO: 2063186 - RNA, 19 nt, Artificial Sequence
  Description of Artificial Sequence: Synthetic oligonucleotide
  Sense strand starting at position 3641 of SEQ ID NO: 1881677
accuuucuuuguuuaaagu

SEQ ID NO: 2063187 - RNA, 19 nt, Artificial Sequence
  Description of Artificial Sequence: Synthetic oligonucleotide
  Antisense strand to SEQ ID NO: 2063186
acuuuaaacaaagaaaggu

SEQ ID NO: 2063188 - RNA, 19 nt, Artificial Sequence
  Description of Artificial Sequence: Synthetic oligonucleotide
  Sense strand starting at position 3740 of SEQ ID NO: 1881677
uguuaaguaggacgguuua

SEQ ID NO: 2063189 - RNA, 19 nt, Artificial Sequence
  Description of Artificial Sequence: Synthetic oligonucleotide
  Antisense strand to SEQ ID NO: 2063188
uaaaccguccuacuuaaca

SEQ ID NO: 2063190 - RNA, 19 nt, Artificial Sequence
  Description of Artificial Sequence: Synthetic oligonucleotide
  Sense strand starting at position 3791 of SEQ ID NO: 1881677
gagaaacaguuucuguuua

SEQ ID NO: 2063191 - RNA, 19 nt, Artificial Sequence
  Description of Artificial Sequence: Synthetic oligonucleotide
  Antisense strand to SEQ ID NO: 2063190
uaaacagaaacuguuucuc

SEQ ID NO: 2063192 - RNA, 19 nt, Artificial Sequence
  Description of Artificial Sequence: Synthetic oligonucleotide
  Sense strand starting at position 3802 of SEQ ID NO: 1881677
ucuguuuacugagcagcua

SEQ ID NO: 2063193 - RNA, 19 nt, Artificial Sequence
  Description of Artificial Sequence: Synthetic oligonucleotide
  Antisense strand to SEQ ID NO: 2063192
uagcugcucaguaaacaga

SEQ ID NO: 2063194 - RNA, 19 nt, Artificial Sequence
  Description of Artificial Sequence: Synthetic oligonucleotide
  Sense strand starting at position 3919 of SEQ ID NO: 1881677
gggacugccucacugcaaa

SEQ ID NO: 2063195 - RNA, 19 nt, Artificial Sequence
  Description of Artificial Sequence: Synthetic oligonucleotide
  Antisense strand to SEQ ID NO: 2063194
uuugcagugaggcaguccc

SEQ ID NO: 2063196 - RNA, 19 nt, Artificial Sequence
  Description of Artificial Sequence: Synthetic oligonucleotide
  Sense strand starting at position 63 of SEQ ID NO: 1881678
ggaguaucauagccagaau

SEQ ID NO: 2063197 - RNA, 19 nt, Artificial Sequence
  Description of Artificial Sequence: Synthetic oligonucleotide
  Antisense strand to SEQ ID NO: 2063196
auucuggcuaugauacucc

SEQ ID NO: 2063198 - RNA, 19 nt, Artificial Sequence
  Description of Artificial Sequence: Synthetic oligonucleotide
  Sense strand starting at position 66 of SEQ ID NO: 1881678
guaucauagccagaauuaa

SEQ ID NO: 2063199 - RNA, 19 nt, Artificial Sequence
  Description of Artificial Sequence: Synthetic oligonucleotide
  Antisense strand to SEQ ID NO: 2063198
uuaauucuggcuaugauac

SEQ ID NO: 2063200 - RNA, 19 nt, Artificial Sequence
  Description of Artificial Sequence: Synthetic oligonucleotide
  Sense strand starting at position 193 of SEQ ID NO: 1881678
guauaaguuagagaugcau

SEQ ID NO: 2063201 - RNA, 19 nt, Artificial Sequence
  Description of Artificial Sequence: Synthetic oligonucleotide
  Antisense strand to SEQ ID NO: 2063200
augcaucucuaacuuauac

SEQ ID NO: 2063202 - RNA, 19 nt, Artificial Sequence
  Description of Artificial Sequence: Synthetic oligonucleotide
  Sense strand starting at position 253 of SEQ ID NO: 1881678
cuaugaagcuuucuggaag

SEQ ID NO: 2063203 - RNA, 19 nt, Artificial Sequence
  Description of Artificial Sequence: Synthetic oligonucleotide
  Antisense strand to SEQ ID NO: 2063202
cuuccagaaagcuucauag

SEQ ID NO: 2063204 - RNA, 19 nt, Artificial Sequence
  Description of Artificial Sequence: Synthetic oligonucleotide
  Sense strand starting at position 256 of SEQ ID NO: 1881678
ugaagcuuucuggaaguau

SEQ ID NO: 2063205 - RNA, 19 nt, Artificial Sequence
  Description of Artificial Sequence: Synthetic oligonucleotide
  Antisense strand to SEQ ID NO: 2063204
auacuuccagaaagcuuca

SEQ ID NO: 2063206 - RNA, 19 nt, Artificial Sequence
  Description of Artificial Sequence: Synthetic oligonucleotide
  Sense strand starting at position 290 of SEQ ID NO: 1881678
aaaucauguuaucugagga

SEQ ID NO: 2063207 - RNA, 19 nt, Artificial Sequence
  Description of Artificial Sequence: Synthetic oligonucleotide
  Antisense strand to SEQ ID NO: 2063206
uccucagauaacaugauuu

SEQ ID NO: 2063208 - RNA, 19 nt, Artificial Sequence
  Description of Artificial Sequence: Synthetic oligonucleotide
  Sense strand starting at position 303 of SEQ ID NO: 1881678
ugaggaaccuucucaguua

SEQ ID NO: 2063209 - RNA, 19 nt, Artificial Sequence
  Description of Artificial Sequence: Synthetic oligonucleotide
  Antisense strand to SEQ ID NO: 2063208
uaacugagaagguuccuca

SEQ ID NO: 2063210 - RNA, 19 nt, Artificial Sequence
  Description of Artificial Sequence: Synthetic oligonucleotide
  Sense strand starting at position 306 of SEQ ID NO: 1881678
ggaaccuucucaguuagaa

SEQ ID NO: 2063211 - RNA, 19 nt, Artificial Sequence
  Description of Artificial Sequence: Synthetic oligonucleotide
  Antisense strand to SEQ ID NO: 2063210
uucuaacugagaagguucc

SEQ ID NO: 2063212 - RNA, 19 nt, Artificial Sequence
  Description of Artificial Sequence: Synthetic oligonucleotide
  Sense strand starting at position 613 of SEQ ID NO: 1881678
uucucuauuaucggaggua

SEQ ID NO: 2063213 - RNA, 19 nt, Artificial Sequence
  Description of Artificial Sequence: Synthetic oligonucleotide
  Antisense strand to SEQ ID NO: 2063212
uaccuccgauaauagagaa

SEQ ID NO: 2063214 - RNA, 19 nt, Artificial Sequence
  Description of Artificial Sequence: Synthetic oligonucleotide
  Sense strand starting at position 654 of SEQ ID NO: 1881678
uuaguauuagcaggugauu

SEQ ID NO: 2063215 - RNA, 19 nt, Artificial Sequence
  Description of Artificial Sequence: Synthetic oligonucleotide
  Antisense strand to SEQ ID NO: 2063214
aaucaccugcuaauacuaa

SEQ ID NO: 2063216 - RNA, 19 nt, Artificial Sequence
  Description of Artificial Sequence: Synthetic oligonucleotide
  Sense strand starting at position 666 of SEQ ID NO: 1881678
ggugauucauguguagaga

SEQ ID NO: 2063217 - RNA, 19 nt, Artificial Sequence
  Description of Artificial Sequence: Synthetic oligonucleotide
  Antisense strand to SEQ ID NO: 2063216
ucucuacacaugaaucacc

SEQ ID NO: 2063218 - RNA, 19 nt, Artificial Sequence
  Description of Artificial Sequence: Synthetic oligonucleotide
  Sense strand starting at position 667 of SEQ ID NO: 1881678
gugauucauguguagagag

SEQ ID NO: 2063219 - RNA, 19 nt, Artificial Sequence
  Description of Artificial Sequence: Synthetic oligonucleotide
  Antisense strand to SEQ ID NO: 2063218
cucucuacacaugaaucac

SEQ ID NO: 2063220 - RNA, 19 nt, Artificial Sequence
  Description of Artificial Sequence: Synthetic oligonucleotide
  Sense strand starting at position 720 of SEQ ID NO: 1881678
ugcacaguucuccaaguca

SEQ ID NO: 2063221 - RNA, 19 nt, Artificial Sequence
  Description of Artificial Sequence: Synthetic oligonucleotide
  Antisense strand to SEQ ID NO: 2063220
ugacuuggagaacugugca

SEQ ID NO: 2063222 - RNA, 19 nt, Artificial Sequence
  Description of Artificial Sequence: Synthetic oligonucleotide
  Sense strand starting at position 750 of SEQ ID NO: 1881678
ccagcaacucugcagagaa

SEQ ID NO: 2063223 - RNA, 19 nt, Artificial Sequence
  Description of Artificial Sequence: Synthetic oligonucleotide
  Antisense strand to SEQ ID NO: 2063222
uucucugcagaguugcugg

SEQ ID NO: 2063224 - RNA, 19 nt, Artificial Sequence
  Description of Artificial Sequence: Synthetic oligonucleotide
  Sense strand starting at position 860 of SEQ ID NO: 1881678
uuguuaguuuaaccacaaa

SEQ ID NO: 2063225 - RNA, 19 nt, Artificial Sequence
  Description of Artificial Sequence: Synthetic oligonucleotide
  Antisense strand to SEQ ID NO: 2063224
uuugugguuaaacuaacaa

SEQ ID NO: 2063226 - RNA, 19 nt, Artificial Sequence
  Description of Artificial Sequence: Synthetic oligonucleotide
  Sense strand starting at position 875 of SEQ ID NO: 1881678
caaagaagccguuaucauu

SEQ ID NO: 2063227 - RNA, 19 nt, Artificial Sequence
  Description of Artificial Sequence: Synthetic oligonucleotide
  Antisense strand to SEQ ID NO: 2063226
aaugauaacggcuucuuug

SEQ ID NO: 2063228 - RNA, 19 nt, Artificial Sequence
  Description of Artificial Sequence: Synthetic oligonucleotide
  Sense strand starting at position 1039 of SEQ ID NO: 1881678
uugauucuucgccaacuga

SEQ ID NO: 2063229 - RNA, 19 nt, Artificial Sequence
  Description of Artificial Sequence: Synthetic oligonucleotide
  Antisense strand to SEQ ID NO: 2063228
ucaguuggcgaagaaucaa

SEQ ID NO: 2063230 - RNA, 19 nt, Artificial Sequence
  Description of Artificial Sequence: Synthetic oligonucleotide
  Sense strand starting at position 1074 of SEQ ID NO: 1881678
ugaaacuuugaagguuuau

SEQ ID NO: 2063231 - RNA, 19 nt, Artificial Sequence
  Description of Artificial Sequence: Synthetic oligonucleotide
  Antisense strand to SEQ ID NO: 2063230
auaaaccuucaaaguuuca

SEQ ID NO: 2063232 - RNA, 19 nt, Artificial Sequence
  Description of Artificial Sequence: Synthetic oligonucleotide
  Sense strand starting at position 1134 of SEQ ID NO: 1881678
ccgaucuuaccaggacuua

SEQ ID NO: 2063233 - RNA, 19 nt, Artificial Sequence
  Description of Artificial Sequence: Synthetic oligonucleotide
  Antisense strand to SEQ ID NO: 2063232
uaaguccugguaagaucgg

SEQ ID NO: 2063234 - RNA, 19 nt, Artificial Sequence
  Description of Artificial Sequence: Synthetic oligonucleotide
  Sense strand starting at position 1318 of SEQ ID NO: 1881678
uccauuagguaacucgaaa

SEQ ID NO: 2063235 - RNA, 19 nt, Artificial Sequence
  Description of Artificial Sequence: Synthetic oligonucleotide
  Antisense strand to SEQ ID NO: 2063234
uuucgaguuaccuaaugga

SEQ ID NO: 2063236 - RNA, 19 nt, Artificial Sequence
  Description of Artificial Sequence: Synthetic oligonucleotide
  Sense strand starting at position 1346 of SEQ ID NO: 1881678
ucuggaaugugcucuacau

SEQ ID NO: 2063237 - RNA, 19 nt, Artificial Sequence
  Description of Artificial Sequence: Synthetic oligonucleotide
  Antisense strand to SEQ ID NO: 2063236
auguagagcacauuccaga

SEQ ID NO: 2063238 - RNA, 19 nt, Artificial Sequence
  Description of Artificial Sequence: Synthetic oligonucleotide
  Sense strand starting at position 1348 of SEQ ID NO: 1881678
uggaaugugcucuacauau

SEQ ID NO: 2063239 - RNA, 19 nt, Artificial Sequence
  Description of Artificial Sequence: Synthetic oligonucleotide
  Antisense strand to SEQ ID NO: 2063238
auauguagagcacauucca

SEQ ID NO: 2063240 - RNA, 19 nt, Artificial Sequence
  Description of Artificial Sequence: Synthetic oligonucleotide
  Sense strand starting at position 1554 of SEQ ID NO: 1881678
uagauaaauccagguuggu

SEQ ID NO: 2063241 - RNA, 19 nt, Artificial Sequence
  Description of Artificial Sequence: Synthetic oligonucleotide
  Antisense strand to SEQ ID NO: 2063240
accaaccuggauuuaucua

SEQ ID NO: 2063242 - RNA, 19 nt, Artificial Sequence
  Description of Artificial Sequence: Synthetic oligonucleotide
  Sense strand starting at position 1596 of SEQ ID NO: 1881678
aacgcuucccgcguucuaa

SEQ ID NO: 2063243 - RNA, 19 nt, Artificial Sequence
  Description of Artificial Sequence: Synthetic oligonucleotide
  Antisense strand to SEQ ID NO: 2063242
uuagaacgcgggaagcguu

SEQ ID NO: 2063244 - RNA, 19 nt, Artificial Sequence
  Description of Artificial Sequence: Synthetic oligonucleotide
  Sense strand starting at position 2256 of SEQ ID NO: 1881678
uuucuuggcgccgcagaaa

SEQ ID NO: 2063245 - RNA, 19 nt, Artificial Sequence
  Description of Artificial Sequence: Synthetic oligonucleotide
  Antisense strand to SEQ ID NO: 2063244
uuucugcggcgccaagaaa

SEQ ID NO: 2063246 - RNA, 19 nt, Artificial Sequence
  Description of Artificial Sequence: Synthetic oligonucleotide
  Sense strand starting at position 2268 of SEQ ID NO: 1881678
gcagaaauauggccuaagu

SEQ ID NO: 2063247 - RNA, 19 nt, Artificial Sequence
  Description of Artificial Sequence: Synthetic oligonucleotide
  Antisense strand to SEQ ID NO: 2063246
acuuaggccauauuucugc

SEQ ID NO: 2063248 - RNA, 19 nt, Artificial Sequence
  Description of Artificial Sequence: Synthetic oligonucleotide
  Sense strand starting at position 2270 of SEQ ID NO: 1881678
agaaauauggccuaaguuu

SEQ ID NO: 2063249 - RNA, 19 nt, Artificial Sequence
  Description of Artificial Sequence: Synthetic oligonucleotide
  Antisense strand to SEQ ID NO: 2063248
aaacuuaggccauauuucu

SEQ ID NO: 2063250 - RNA, 19 nt, Artificial Sequence
  Description of Artificial Sequence: Synthetic oligonucleotide
  Sense strand starting at position 2453 of SEQ ID NO: 1881678
uguguaugucuguuuguuu

SEQ ID NO: 2063251 - RNA, 19 nt, Artificial Sequence
  Description of Artificial Sequence: Synthetic oligonucleotide
  Antisense strand to SEQ ID NO: 2063250
aaacaaacagacauacaca

SEQ ID NO: 2063252 - RNA, 19 nt, Artificial Sequence
  Description of Artificial Sequence: Synthetic oligonucleotide
  Sense strand starting at position 2947 of SEQ ID NO: 1881678
gagugagacucuguaacac

SEQ ID NO: 2063253 - RNA, 19 nt, Artificial Sequence
  Description of Artificial Sequence: Synthetic oligonucleotide
  Antisense strand to SEQ ID NO: 2063252
guguuacagagucucacuc

SEQ ID NO: 2063254 - RNA, 19 nt, Artificial Sequence
  Description of Artificial Sequence: Synthetic oligonucleotide
  Sense strand starting at position 3010 of SEQ ID NO: 1881678
guaagucuuguagaugcua

SEQ ID NO: 2063255 - RNA, 19 nt, Artificial Sequence
  Description of Artificial Sequence: Synthetic oligonucleotide
  Antisense strand to SEQ ID NO: 2063254
uagcaucuacaagacuuac

SEQ ID NO: 2063256 - RNA, 19 nt, Artificial Sequence
  Description of Artificial Sequence: Synthetic oligonucleotide
  Sense strand starting at position 3136 of SEQ ID NO: 1881678
agaguuauaccauguaacu

SEQ ID NO: 2063257 - RNA, 19 nt, Artificial Sequence
  Description of Artificial Sequence: Synthetic oligonucleotide
  Antisense strand to SEQ ID NO: 2063256
aguuacaugguauaacucu

SEQ ID NO: 2063258 - RNA, 19 nt, Artificial Sequence
  Description of Artificial Sequence: Synthetic oligonucleotide
  Sense strand starting at position 3146 of SEQ ID NO: 1881678
cauguaacugaugguacau

SEQ ID NO: 2063259 - RNA, 19 nt, Artificial Sequence
  Description of Artificial Sequence: Synthetic oligonucleotide
  Antisense strand to SEQ ID NO: 2063258
auguaccaucaguuacaug

SEQ ID NO: 2063260 - RNA, 19 nt, Artificial Sequence
  Description of Artificial Sequence: Synthetic oligonucleotide
  Sense strand starting at position 3187 of SEQ ID NO: 1881678
ugaguacauuaaguaacua

SEQ ID NO: 2063261 - RNA, 19 nt, Artificial Sequence
  Description of Artificial Sequence: Synthetic oligonucleotide
  Antisense strand to SEQ ID NO: 2063260
uaguuacuuaauguacuca

SEQ ID NO: 2063262 - RNA, 19 nt, Artificial Sequence
  Description of Artificial Sequence: Synthetic oligonucleotide
  Sense strand starting at position 3236 of SEQ ID NO: 1881678
gggaaagccuugucuuaau

SEQ ID NO: 2063263 - RNA, 19 nt, Artificial Sequence
  Description of Artificial Sequence: Synthetic oligonucleotide
  Antisense strand to SEQ ID NO: 2063262
auuaagacaaggcuuuccc

SEQ ID NO: 2063264 - RNA, 19 nt, Artificial Sequence
  Description of Artificial Sequence: Synthetic oligonucleotide
  Sense strand starting at position 3276 of SEQ ID NO: 1881678
gugaguggugacuaucuga

SEQ ID NO: 2063265 - RNA, 19 nt, Artificial Sequence
  Description of Artificial Sequence: Synthetic oligonucleotide
  Antisense strand to SEQ ID NO: 2063264
ucagauagucaccacucac

SEQ ID NO: 2063266 - RNA, 19 nt, Artificial Sequence
  Description of Artificial Sequence: Synthetic oligonucleotide
  Sense strand starting at position 3328 of SEQ ID NO: 1881678
ggcaguuguaaguaaagaa

SEQ ID NO: 2063267 - RNA, 19 nt, Artificial Sequence
  Description of Artificial Sequence: Synthetic oligonucleotide
  Antisense strand to SEQ ID NO: 2063266
uucuuuacuuacaacugcc

SEQ ID NO: 2063268 - RNA, 19 nt, Artificial Sequence
  Description of Artificial Sequence: Synthetic oligonucleotide
  Sense strand starting at position 3394 of SEQ ID NO: 1881678
ugggcagaaucagcagaaa

SEQ ID NO: 2063269 - RNA, 19 nt, Artificial Sequence
  Description of Artificial Sequence: Synthetic oligonucleotide
  Antisense strand to SEQ ID NO: 2063268
uuucugcugauucugccca

SEQ ID NO: 2063270 - RNA, 19 nt, Artificial Sequence
  Description of Artificial Sequence: Synthetic oligonucleotide
  Sense strand starting at position 3612 of SEQ ID NO: 1881678
augagugcuaaauggauau

SEQ ID NO: 2063271 - RNA, 19 nt, Artificial Sequence
  Description of Artificial Sequence: Synthetic oligonucleotide
  Antisense strand to SEQ ID NO: 2063270
auauccauuuagcacucau

SEQ ID NO: 2063272 - RNA, 19 nt, Artificial Sequence
  Description of Artificial Sequence: Synthetic oligonucleotide
  Sense strand starting at position 3660 of SEQ ID NO: 1881678
uccuaagugucacugagag

SEQ ID NO: 2063273 - RNA, 19 nt, Artificial Sequence
  Description of Artificial Sequence: Synthetic oligonucleotide
  Antisense strand to SEQ ID NO: 2063272
cucucagugacacuuagga

SEQ ID NO: 2063274 - RNA, 19 nt, Artificial Sequence
  Description of Artificial Sequence: Synthetic oligonucleotide
  Sense strand starting at position 3662 of SEQ ID NO: 1881678
cuaagugucacugagagcu

SEQ ID NO: 2063275 - RNA, 19 nt, Artificial Sequence
  Description of Artificial Sequence: Synthetic oligonucleotide
  Antisense strand to SEQ ID NO: 2063274
agcucucagugacacuuag

SEQ ID NO: 2063276 - RNA, 19 nt, Artificial Sequence
  Description of Artificial Sequence: Synthetic oligonucleotide
  Sense strand starting at position 28 of SEQ ID NO: 1881679
augcuaccuugguccauau

SEQ ID NO: 2063277 - RNA, 19 nt, Artificial Sequence
  Description of Artificial Sequence: Synthetic oligonucleotide
  Antisense strand to SEQ ID NO: 2063276
auauggaccaagguagcau

SEQ ID NO: 2063278 - RNA, 19 nt, Artificial Sequence
  Description of Artificial Sequence: Synthetic oligonucleotide
  Sense strand starting at position 38 of SEQ ID NO: 1881679
gguccauauguauagcaaa

SEQ ID NO: 2063279 - RNA, 19 nt, Artificial Sequence
  Description of Artificial Sequence: Synthetic oligonucleotide
  Antisense strand to SEQ ID NO: 2063278
uuugcuauacauauggacc

SEQ ID NO: 2063280 - RNA, 19 nt, Artificial Sequence
  Description of Artificial Sequence: Synthetic oligonucleotide
  Sense strand starting at position 93 of SEQ ID NO: 1881679
gaaagaagucuuugcuaag

SEQ ID NO: 2063281 - RNA, 19 nt, Artificial Sequence
  Description of Artificial Sequence: Synthetic oligonucleotide
  Antisense strand to SEQ ID NO: 2063280
cuuagcaaagacuucuuuc

SEQ ID NO: 2063282 - RNA, 19 nt, Artificial Sequence
  Description of Artificial Sequence: Synthetic oligonucleotide
  Sense strand starting at position 94 of SEQ ID NO: 1881679
aaagaagucuuugcuaagu

SEQ ID NO: 2063283 - RNA, 19 nt, Artificial Sequence
  Description of Artificial Sequence: Synthetic oligonucleotide
  Antisense strand to SEQ ID NO: 2063282
acuuagcaaagacuucuuu

SEQ ID NO: 2063284 - RNA, 19 nt, Artificial Sequence
  Description of Artificial Sequence: Synthetic oligonucleotide
  Sense strand starting at position 176 of SEQ ID NO: 1881679
cugguuuaaagaggucauu

SEQ ID NO: 2063285 - RNA, 19 nt, Artificial Sequence
  Description of Artificial Sequence: Synthetic oligonucleotide
  Antisense strand to SEQ ID NO: 2063284
aaugaccucuuuaaaccag

SEQ ID NO: 2063286 - RNA, 19 nt, Artificial Sequence
  Description of Artificial Sequence: Synthetic oligonucleotide
  Sense strand starting at position 665 of SEQ ID NO: 1881679
ugaugaaagcacuagccau

SEQ ID NO: 2063287 - RNA, 19 nt, Artificial Sequence
  Description of Artificial Sequence: Synthetic oligonucleotide
  Antisense strand to SEQ ID NO: 2063286
auggcuagugcuuucauca

SEQ ID NO: 2063288 - RNA, 19 nt, Artificial Sequence
  Description of Artificial Sequence: Synthetic oligonucleotide
  Sense strand starting at position 747 of SEQ ID NO: 1881679
gcaaucaauuugcaugaau

SEQ ID NO: 2063289 - RNA, 19 nt, Artificial Sequence
  Description of Artificial Sequence: Synthetic oligonucleotide
  Antisense strand to SEQ ID NO: 2063288
auucaugcaaauugauugc

SEQ ID NO: 2063290 - RNA, 19 nt, Artificial Sequence
  Description of Artificial Sequence: Synthetic oligonucleotide
  Sense strand starting at position 869 of SEQ ID NO: 1881679
guaccaguacguuacaaau

SEQ ID NO: 2063291 - RNA, 19 nt, Artificial Sequence
  Description of Artificial Sequence: Synthetic oligonucleotide
  Antisense strand to SEQ ID NO: 2063290
auuuguaacguacugguac

SEQ ID NO: 2063292 - RNA, 19 nt, Artificial Sequence
  Description of Artificial Sequence: Synthetic oligonucleotide
  Sense strand starting at position 953 of SEQ ID NO: 1881679
accagcaguuucuuuauga

SEQ ID NO: 2063293 - RNA, 19 nt, Artificial Sequence
  Description of Artificial Sequence: Synthetic oligonucleotide
  Antisense strand to SEQ ID NO: 2063292
ucauaaagaaacugcuggu

SEQ ID NO: 2063294 - RNA, 19 nt, Artificial Sequence
  Description of Artificial Sequence: Synthetic oligonucleotide
  Sense strand starting at position 954 of SEQ ID NO: 1881679
ccagcaguuucuuuaugag

SEQ ID NO: 2063295 - RNA, 19 nt, Artificial Sequence
  Description of Artificial Sequence: Synthetic oligonucleotide
  Antisense strand to SEQ ID NO: 2063294
cucauaaagaaacugcugg

SEQ ID NO: 2063296 - RNA, 19 nt, Artificial Sequence
  Description of Artificial Sequence: Synthetic oligonucleotide
  Sense strand starting at position 1008 of SEQ ID NO: 1881679
cugugauguuuacucacaa

SEQ ID NO: 2063297 - RNA, 19 nt, Artificial Sequence
  Description of Artificial Sequence: Synthetic oligonucleotide
  Antisense strand to SEQ ID NO: 2063296
uugugaguaaacaucacag

SEQ ID NO: 2063298 - RNA, 19 nt, Artificial Sequence
  Description of Artificial Sequence: Synthetic oligonucleotide
  Sense strand starting at position 1009 of SEQ ID NO: 1881679
ugugauguuuacucacaau

SEQ ID NO: 2063299 - RNA, 19 nt, Artificial Sequence
  Description of Artificial Sequence: Synthetic oligonucleotide
  Antisense strand to SEQ ID NO: 2063298
auugugaguaaacaucaca

SEQ ID NO: 2063300 - RNA, 19 nt, Artificial Sequence
  Description of Artificial Sequence: Synthetic oligonucleotide
  Sense strand starting at position 1070 of SEQ ID NO: 1881679
guucuauucuucucaaggu

SEQ ID NO: 2063301 - RNA, 19 nt, Artificial Sequence
  Description of Artificial Sequence: Synthetic oligonucleotide
  Antisense strand to SEQ ID NO: 2063300
accuugagaagaauagaac

SEQ ID NO: 2063302 - RNA, 19 nt, Artificial Sequence
  Description of Artificial Sequence: Synthetic oligonucleotide
  Sense strand starting at position 1192 of SEQ ID NO: 1881679
guagaaucauuugauguuc

SEQ ID NO: 2063303 - RNA, 19 nt, Artificial Sequence
  Description of Artificial Sequence: Synthetic oligonucleotide
  Antisense strand to SEQ ID NO: 2063302
gaacaucaaaugauucuac

SEQ ID NO: 2063304 - RNA, 19 nt, Artificial Sequence
  Description of Artificial Sequence: Synthetic oligonucleotide
  Sense strand starting at position 1299 of SEQ ID NO: 1881679
cucgguggucguaaauguu

SEQ ID NO: 2063305 - RNA, 19 nt, Artificial Sequence
  Description of Artificial Sequence: Synthetic oligonucleotide
  Antisense strand to SEQ ID NO: 2063304
aacauuuacgaccaccgag

SEQ ID NO: 2063306 - RNA, 19 nt, Artificial Sequence
  Description of Artificial Sequence: Synthetic oligonucleotide
  Sense strand starting at position 1460 of SEQ ID NO: 1881679
ucggguaagucccugacuu

SEQ ID NO: 2063307 - RNA, 19 nt, Artificial Sequence
  Description of Artificial Sequence: Synthetic oligonucleotide
  Antisense strand to SEQ ID NO: 2063306
aagucagggacuuacccga

SEQ ID NO: 2063308 - RNA, 19 nt, Artificial Sequence
  Description of Artificial Sequence: Synthetic oligonucleotide
  Sense strand starting at position 1462 of SEQ ID NO: 1881679
ggguaagucccugacuucu

SEQ ID NO: 2063309 - RNA, 19 nt, Artificial Sequence
  Description of Artificial Sequence: Synthetic oligonucleotide
  Antisense strand to SEQ ID NO: 2063308
agaagucagggacuuaccc

SEQ ID NO: 2063310 - RNA, 19 nt, Artificial Sequence
  Description of Artificial Sequence: Synthetic oligonucleotide
  Sense strand starting at position 1470 of SEQ ID NO: 1881679
cccugacuucuccgaaccu

SEQ ID NO: 2063311 - RNA, 19 nt, Artificial Sequence
  Description of Artificial Sequence: Synthetic oligonucleotide
  Antisense strand to SEQ ID NO: 2063310
agguucggagaagucaggg

SEQ ID NO: 2063312 - RNA, 19 nt, Artificial Sequence
  Description of Artificial Sequence: Synthetic oligonucleotide
  Sense strand starting at position 1487 of SEQ ID NO: 1881679
cucagaucccuaugaagug

SEQ ID NO: 2063313 - RNA, 19 nt, Artificial Sequence
  Description of Artificial Sequence: Synthetic oligonucleotide
  Antisense strand to SEQ ID NO: 2063312
cacuucauagggaucugag

SEQ ID NO: 2063314 - RNA, 19 nt, Artificial Sequence
  Description of Artificial Sequence: Synthetic oligonucleotide
  Sense strand starting at position 2195 of SEQ ID NO: 1881679
gagaucugccgaggauaac

SEQ ID NO: 2063315 - RNA, 19 nt, Artificial Sequence
  Description of Artificial Sequence: Synthetic oligonucleotide
  Antisense strand to SEQ ID NO: 2063314
guuauccucggcagaucuc

SEQ ID NO: 2063316 - RNA, 19 nt, Artificial Sequence
  Description of Artificial Sequence: Synthetic oligonucleotide
  Sense strand starting at position 2493 of SEQ ID NO: 1881679
gcugcugccguuucuagau

SEQ ID NO: 2063317 - RNA, 19 nt, Artificial Sequence
  Description of Artificial Sequence: Synthetic oligonucleotide
  Antisense strand to SEQ ID NO: 2063316
aucuagaaacggcagcagc

SEQ ID NO: 2063318 - RNA, 19 nt, Artificial Sequence
  Description of Artificial Sequence: Synthetic oligonucleotide
  Sense strand starting at position 2543 of SEQ ID NO: 1881679
gcauaaggacaguguauua

SEQ ID NO: 2063319 - RNA, 19 nt, Artificial Sequence
  Description of Artificial Sequence: Synthetic oligonucleotide
  Antisense strand to SEQ ID NO: 2063318
uaauacacuguccuuaugc

SEQ ID NO: 2063320 - RNA, 19 nt, Artificial Sequence
  Description of Artificial Sequence: Synthetic oligonucleotide
  Sense strand starting at position 2586 of SEQ ID NO: 1881679
ggucuuucggguagugguu

SEQ ID NO: 2063321 - RNA, 19 nt, Artificial Sequence
  Description of Artificial Sequence: Synthetic oligonucleotide
  Antisense strand to SEQ ID NO: 2063320
aaccacuacccgaaagacc

SEQ ID NO: 2063322 - RNA, 19 nt, Artificial Sequence
  Description of Artificial Sequence: Synthetic oligonucleotide
  Sense strand starting at position 2658 of SEQ ID NO: 1881679
gacagaacuucuguuggau

SEQ ID NO: 2063323 - RNA, 19 nt, Artificial Sequence
  Description of Artificial Sequence: Synthetic oligonucleotide
  Antisense strand to SEQ ID NO: 2063322
auccaacagaaguucuguc

SEQ ID NO: 2063324 - RNA, 19 nt, Artificial Sequence
  Description of Artificial Sequence: Synthetic oligonucleotide
  Sense strand starting at position 2754 of SEQ ID NO: 1881679
uugagcugguauucugaua

SEQ ID NO: 2063325 - RNA, 19 nt, Artificial Sequence
  Description of Artificial Sequence: Synthetic oligonucleotide
  Antisense strand to SEQ ID NO: 2063324
uaucagaauaccagcucaa

SEQ ID NO: 2063326 - RNA, 19 nt, Artificial Sequence
  Description of Artificial Sequence: Synthetic oligonucleotide
  Sense strand starting at position 2854 of SEQ ID NO: 1881679
aaggaucuguaucagaaag

SEQ ID NO: 2063327 - RNA, 19 nt, Artificial Sequence
  Description of Artificial Sequence: Synthetic oligonucleotide
  Antisense strand to SEQ ID NO: 2063326
cuuucugauacagauccuu

SEQ ID NO: 2063328 - RNA, 19 nt, Artificial Sequence
  Description of Artificial Sequence: Synthetic oligonucleotide
  Sense strand starting at position 2903 of SEQ ID NO: 1881679
gggagaucuuaucugcaua

SEQ ID NO: 2063329 - RNA, 19 nt, Artificial Sequence
  Description of Artificial Sequence: Synthetic oligonucleotide
  Antisense strand to SEQ ID NO: 2063328
uaugcagauaagaucuccc

SEQ ID NO: 2063330 - RNA, 19 nt, Artificial Sequence
  Description of Artificial Sequence: Synthetic oligonucleotide
  Sense strand starting at position 3008 of SEQ ID NO: 1881679
ccauuucuugaguagcgua

SEQ ID NO: 2063331 - RNA, 19 nt, Artificial Sequence
  Description of Artificial Sequence: Synthetic oligonucleotide
  Antisense strand to SEQ ID NO: 2063330
uacgcuacucaagaaaugg

SEQ ID NO: 2063332 - RNA, 19 nt, Artificial Sequence
  Description of Artificial Sequence: Synthetic oligonucleotide
  Sense strand starting at position 3025 of SEQ ID NO: 1881679
uaggaugcuguauaauauu

SEQ ID NO: 2063333 - RNA, 19 nt, Artificial Sequence
  Description of Artificial Sequence: Synthetic oligonucleotide
  Antisense strand to SEQ ID NO: 2063332
aauauuauacagcauccua

SEQ ID NO: 2063334 - RNA, 19 nt, Artificial Sequence
  Description of Artificial Sequence: Synthetic oligonucleotide
  Sense strand starting at position 3064 of SEQ ID NO: 1881679
gacuccucugcguauguaa

SEQ ID NO: 2063335 - RNA, 19 nt, Artificial Sequence
  Description of Artificial Sequence: Synthetic oligonucleotide
  Antisense strand to SEQ ID NO: 2063334
uuacauacgcagaggaguc

SEQ ID NO: 2063336 - RNA, 19 nt, Artificial Sequence
  Description of Artificial Sequence: Synthetic oligonucleotide
  Sense strand starting at position 3072 of SEQ ID NO: 1881679
ugcguauguaauuaaguac

SEQ ID NO: 2063337 - RNA, 19 nt, Artificial Sequence
  Description of Artificial Sequence: Synthetic oligonucleotide
  Antisense strand to SEQ ID NO: 2063336
guacuuaauuacauacgca

SEQ ID NO: 2063338 - RNA, 19 nt, Artificial Sequence
  Description of Artificial Sequence: Synthetic oligonucleotide
  Sense strand starting at position 3102 of SEQ ID NO: 1881679
cuuguuaaugucuauguca

SEQ ID NO: 2063339 - RNA, 19 nt, Artificial Sequence
  Description of Artificial Sequence: Synthetic oligonucleotide
  Antisense strand to SEQ ID NO: 2063338
ugacauagacauuaacaag

SEQ ID NO: 2063340 - RNA, 19 nt, Artificial Sequence
  Description of Artificial Sequence: Synthetic oligonucleotide
  Sense strand starting at position 3545 of SEQ ID NO: 1881679
ucguuuacugcucacaaac

SEQ ID NO: 2063341 - RNA, 19 nt, Artificial Sequence
  Description of Artificial Sequence: Synthetic oligonucleotide
  Antisense strand to SEQ ID NO: 2063340
guuugugagcaguaaacga

SEQ ID NO: 2063342 - RNA, 19 nt, Artificial Sequence
  Description of Artificial Sequence: Synthetic oligonucleotide
  Sense strand starting at position 3564 of SEQ ID NO: 1881679
ccuguaggauaacuuugau

SEQ ID NO: 2063343 - RNA, 19 nt, Artificial Sequence
  Description of Artificial Sequence: Synthetic oligonucleotide
  Antisense strand to SEQ ID NO: 2063342
aucaaaguuauccuacagg

SEQ ID NO: 2063344 - RNA, 19 nt, Artificial Sequence
  Description of Artificial Sequence: Synthetic oligonucleotide
  Sense strand starting at position 3567 of SEQ ID NO: 1881679
guaggauaacuuugaucuu

SEQ ID NO: 2063345 - RNA, 19 nt, Artificial Sequence
  Description of Artificial Sequence: Synthetic oligonucleotide
  Antisense strand to SEQ ID NO: 2063344
aagaucaaaguuauccuac

SEQ ID NO: 2063346 - RNA, 19 nt, Artificial Sequence
  Description of Artificial Sequence: Synthetic oligonucleotide
  Sense strand starting at position 3570 of SEQ ID NO: 1881679
ggauaacuuugaucuucuu

SEQ ID NO: 2063347 - RNA, 19 nt, Artificial Sequence
  Description of Artificial Sequence: Synthetic oligonucleotide
  Antisense strand to SEQ ID NO: 2063346
aagaagaucaaaguuaucc

SEQ ID NO: 2063348 - RNA, 19 nt, Artificial Sequence
  Description of Artificial Sequence: Synthetic oligonucleotide
  Sense strand starting at position 3621 of SEQ ID NO: 1881679
gcuauaguacuccauugua

SEQ ID NO: 2063349 - RNA, 19 nt, Artificial Sequence
  Description of Artificial Sequence: Synthetic oligonucleotide
  Antisense strand to SEQ ID NO: 2063348
uacaauggaguacuauagc

SEQ ID NO: 2063350 - RNA, 19 nt, Artificial Sequence
  Description of Artificial Sequence: Synthetic oligonucleotide
  Sense strand starting at position 3702 of SEQ ID NO: 1881679
gcuaguuaagaauguggua

SEQ ID NO: 2063351 - RNA, 19 nt, Artificial Sequence
  Description of Artificial Sequence: Synthetic oligonucleotide
  Antisense strand to SEQ ID NO: 2063350
uaccacauucuuaacuagc

SEQ ID NO: 2063352 - RNA, 19 nt, Artificial Sequence
  Description of Artificial Sequence: Synthetic oligonucleotide
  Sense strand starting at position 3721 of SEQ ID NO: 1881679
acauuuguguugcccauaa

SEQ ID NO: 2063353 - RNA, 19 nt, Artificial Sequence
  Description of Artificial Sequence: Synthetic oligonucleotide
  Antisense strand to SEQ ID NO: 2063352
uuaugggcaacacaaaugu

SEQ ID NO: 2063354 - RNA, 19 nt, Artificial Sequence
  Description of Artificial Sequence: Synthetic oligonucleotide
  Sense strand starting at position 3742 of SEQ ID NO: 1881679
uugcuuugugacguuucua

SEQ ID NO: 2063355 - RNA, 19 nt, Artificial Sequence
  Description of Artificial Sequence: Synthetic oligonucleotide
  Antisense strand to SEQ ID NO: 2063354
uagaaacgucacaaagcaa

SEQ ID NO: 2063356 - RNA, 19 nt, Artificial Sequence
  Description of Artificial Sequence: Synthetic oligonucleotide
  Sense strand starting at position 417 of SEQ ID NO: 1881680
ggccauuaacugcaugcua

SEQ ID NO: 2063357 - RNA, 19 nt, Artificial Sequence
  Description of Artificial Sequence: Synthetic oligonucleotide
  Antisense strand to SEQ ID NO: 2063356
uagcaugcaguuaauggcc

SEQ ID NO: 2063358 - RNA, 19 nt, Artificial Sequence
  Description of Artificial Sequence: Synthetic oligonucleotide
  Sense strand starting at position 645 of SEQ ID NO: 1881680
ugauauaucggaggcaaca

SEQ ID NO: 2063359 - RNA, 19 nt, Artificial Sequence
  Description of Artificial Sequence: Synthetic oligonucleotide
  Antisense strand to SEQ ID NO: 2063358
uguugccuccgauauauca

SEQ ID NO: 2063360 - RNA, 19 nt, Artificial Sequence
  Description of Artificial Sequence: Synthetic oligonucleotide
  Sense strand starting at position 776 of SEQ ID NO: 1881680
agguaaagaugacaaauga

SEQ ID NO: 2063361 - RNA, 19 nt, Artificial Sequence
  Description of Artificial Sequence: Synthetic oligonucleotide
  Antisense strand to SEQ ID NO: 2063360
ucauuugucaucuuuaccu

SEQ ID NO: 2063362 - RNA, 19 nt, Artificial Sequence
  Description of Artificial Sequence: Synthetic oligonucleotide
  Sense strand starting at position 852 of SEQ ID NO: 1881680
ugggauuucugugacucag

SEQ ID NO: 2063363 - RNA, 19 nt, Artificial Sequence
  Description of Artificial Sequence: Synthetic oligonucleotide
  Antisense strand to SEQ ID NO: 2063362
cugagucacagaaauccca

SEQ ID NO: 2063364 - RNA, 19 nt, Artificial Sequence
  Description of Artificial Sequence: Synthetic oligonucleotide
  Sense strand starting at position 911 of SEQ ID NO: 1881680
caagguuguuaaccagauu

SEQ ID NO: 2063365 - RNA, 19 nt, Artificial Sequence
  Description of Artificial Sequence: Synthetic oligonucleotide
  Antisense strand to SEQ ID NO: 2063364
aaucugguuaacaaccuug

SEQ ID NO: 2063366 - RNA, 19 nt, Artificial Sequence
  Description of Artificial Sequence: Synthetic oligonucleotide
  Sense strand starting at position 1118 of SEQ ID NO: 1881680
auggaaaucuaccuagagu

SEQ ID NO: 2063367 - RNA, 19 nt, Artificial Sequence
  Description of Artificial Sequence: Synthetic oligonucleotide
  Antisense strand to SEQ ID NO: 2063366
acucuagguagauuuccau

SEQ ID NO: 2063368 - RNA, 19 nt, Artificial Sequence
  Description of Artificial Sequence: Synthetic oligonucleotide
  Sense strand starting at position 1167 of SEQ ID NO: 1881680
agaagugggcccgauaaca

SEQ ID NO: 2063369 - RNA, 19 nt, Artificial Sequence
  Description of Artificial Sequence: Synthetic oligonucleotide
  Antisense strand to SEQ ID NO: 2063368
uguuaucgggcccacuucu

SEQ ID NO: 2063370 - RNA, 19 nt, Artificial Sequence
  Description of Artificial Sequence: Synthetic oligonucleotide
  Sense strand starting at position 1245 of SEQ ID NO: 1881680
acuaguaacugccuuagga

SEQ ID NO: 2063371 - RNA, 19 nt, Artificial Sequence
  Description of Artificial Sequence: Synthetic oligonucleotide
  Antisense strand to SEQ ID NO: 2063370
uccuaaggcaguuacuagu

SEQ ID NO: 2063372 - RNA, 19 nt, Artificial Sequence
  Description of Artificial Sequence: Synthetic oligonucleotide
  Sense strand starting at position 2027 of SEQ ID NO: 1881680
uuccuuauccgguaaagug

SEQ ID NO: 2063373 - RNA, 19 nt, Artificial Sequence
  Description of Artificial Sequence: Synthetic oligonucleotide
  Antisense strand to SEQ ID NO: 2063372
cacuuuaccggauaaggaa

SEQ ID NO: 2063374 - RNA, 19 nt, Artificial Sequence
  Description of Artificial Sequence: Synthetic oligonucleotide
  Sense strand starting at position 2223 of SEQ ID NO: 1881680
gcaagacugcccuaaacuc

SEQ ID NO: 2063375 - RNA, 19 nt, Artificial Sequence
  Description of Artificial Sequence: Synthetic oligonucleotide
  Antisense strand to SEQ ID NO: 2063374
gaguuuagggcagucuugc

SEQ ID NO: 2063376 - RNA, 19 nt, Artificial Sequence
  Description of Artificial Sequence: Synthetic oligonucleotide
  Sense strand starting at position 2321 of SEQ ID NO: 1881680
gaugacaggaggugucaau

SEQ ID NO: 2063377 - RNA, 19 nt, Artificial Sequence
  Description of Artificial Sequence: Synthetic oligonucleotide
  Antisense strand to SEQ ID NO: 2063376
auugacaccuccugucauc

SEQ ID NO: 2063378 - RNA, 19 nt, Artificial Sequence
  Description of Artificial Sequence: Synthetic oligonucleotide
  Sense strand starting at position 2402 of SEQ ID NO: 1881680
ggagucagcguuccgaagu

SEQ ID NO: 2063379 - RNA, 19 nt, Artificial Sequence
  Description of Artificial Sequence: Synthetic oligonucleotide
  Antisense strand to SEQ ID NO: 2063378
acuucggaacgcugacucc

SEQ ID NO: 2063380 - RNA, 19 nt, Artificial Sequence
  Description of Artificial Sequence: Synthetic oligonucleotide
  Sense strand starting at position 2405 of SEQ ID NO: 1881680
gucagcguuccgaaguaga

SEQ ID NO: 2063381 - RNA, 19 nt, Artificial Sequence
  Description of Artificial Sequence: Synthetic oligonucleotide
  Antisense strand to SEQ ID NO: 2063380
ucuacuucggaacgcugac

SEQ ID NO: 2063382 - RNA, 19 nt, Artificial Sequence
  Description of Artificial Sequence: Synthetic oligonucleotide
  Sense strand starting at position 2408 of SEQ ID NO: 1881680
agcguuccgaaguagagau

SEQ ID NO: 2063383 - RNA, 19 nt, Artificial Sequence
  Description of Artificial Sequence: Synthetic oligonucleotide
  Antisense strand to SEQ ID NO: 2063382
aucucuacuucggaacgcu

SEQ ID NO: 2063384 - RNA, 19 nt, Artificial Sequence
  Description of Artificial Sequence: Synthetic oligonucleotide
  Sense strand starting at position 2484 of SEQ ID NO: 1881680
uuucucauacaagguuaga

SEQ ID NO: 2063385 - RNA, 19 nt, Artificial Sequence
  Description of Artificial Sequence: Synthetic oligonucleotide
  Antisense strand to SEQ ID NO: 2063384
ucuaaccuuguaugagaaa

SEQ ID NO: 2063386 - RNA, 19 nt, Artificial Sequence
  Description of Artificial Sequence: Synthetic oligonucleotide
  Sense strand starting at position 2489 of SEQ ID NO: 1881680
cauacaagguuagagaaua

SEQ ID NO: 2063387 - RNA, 19 nt, Artificial Sequence
  Description of Artificial Sequence: Synthetic oligonucleotide
  Antisense strand to SEQ ID NO: 2063386
uauucucuaaccuuguaug

SEQ ID NO: 2063388 - RNA, 19 nt, Artificial Sequence
  Description of Artificial Sequence: Synthetic oligonucleotide
  Sense strand starting at position 2497 of SEQ ID NO: 1881680
guuagagaauaguuacaac

SEQ ID NO: 2063389 - RNA, 19 nt, Artificial Sequence
  Description of Artificial Sequence: Synthetic oligonucleotide
  Antisense strand to SEQ ID NO: 2063388
guuguaacuauucucuaac

SEQ ID NO: 2063390 - RNA, 19 nt, Artificial Sequence
  Description of Artificial Sequence: Synthetic oligonucleotide
  Sense strand starting at position 2500 of SEQ ID NO: 1881680
agagaauaguuacaacaau

SEQ ID NO: 2063391 - RNA, 19 nt, Artificial Sequence
  Description of Artificial Sequence: Synthetic oligonucleotide
  Antisense strand to SEQ ID NO: 2063390
auuguuguaacuauucucu

SEQ ID NO: 2063392 - RNA, 19 nt, Artificial Sequence
  Description of Artificial Sequence: Synthetic oligonucleotide
  Sense strand starting at position 2521 of SEQ ID NO: 1881680
gauuauagacaguguuucu

SEQ ID NO: 2063393 - RNA, 19 nt, Artificial Sequence
  Description of Artificial Sequence: Synthetic oligonucleotide
  Antisense strand to SEQ ID NO: 2063392
agaaacacugucuauaauc

SEQ ID NO: 2063394 - RNA, 19 nt, Artificial Sequence
  Description of Artificial Sequence: Synthetic oligonucleotide
  Sense strand starting at position 2614 of SEQ ID NO: 1881680
agcagaaguuaaucuauaa

SEQ ID NO: 2063395 - RNA, 19 nt, Artificial Sequence
  Description of Artificial Sequence: Synthetic oligonucleotide
  Antisense strand to SEQ ID NO: 2063394
uuauagauuaacuucugcu

SEQ ID NO: 2063396 - RNA, 19 nt, Artificial Sequence
  Description of Artificial Sequence: Synthetic oligonucleotide
  Sense strand starting at position 2684 of SEQ ID NO: 1881680
cuagccauuguauagaaca

SEQ ID NO: 2063397 - RNA, 19 nt, Artificial Sequence
  Description of Artificial Sequence: Synthetic oligonucleotide
  Antisense strand to SEQ ID NO: 2063396
uguucuauacaauggcuag

SEQ ID NO: 2063398 - RNA, 19 nt, Artificial Sequence
  Description of Artificial Sequence: Synthetic oligonucleotide
  Sense strand starting at position 2754 of SEQ ID NO: 1881680
ccacguguaacucagauga

SEQ ID NO: 2063399 - RNA, 19 nt, Artificial Sequence
  Description of Artificial Sequence: Synthetic oligonucleotide
  Antisense strand to SEQ ID NO: 2063398
ucaucugaguuacacgugg

SEQ ID NO: 2063400 - RNA, 19 nt, Artificial Sequence
  Description of Artificial Sequence: Synthetic oligonucleotide
  Sense strand starting at position 2758 of SEQ ID NO: 1881680
guguaacucagaugacagu

SEQ ID NO: 2063401 - RNA, 19 nt, Artificial Sequence
  Description of Artificial Sequence: Synthetic oligonucleotide
  Antisense strand to SEQ ID NO: 2063400
acugucaucugaguuacac

SEQ ID NO: 2063402 - RNA, 19 nt, Artificial Sequence
  Description of Artificial Sequence: Synthetic oligonucleotide
  Sense strand starting at position 2918 of SEQ ID NO: 1881680
gggagaguugcaggaaagu

SEQ ID NO: 2063403 - RNA, 19 nt, Artificial Sequence
  Description of Artificial Sequence: Synthetic oligonucleotide
  Antisense strand to SEQ ID NO: 2063402
acuuuccugcaacucuccc

SEQ ID NO: 2063404 - RNA, 19 nt, Artificial Sequence
  Description of Artificial Sequence: Synthetic oligonucleotide
  Sense strand starting at position 2927 of SEQ ID NO: 1881680
gcaggaaaguggcuugagu

SEQ ID NO: 2063405 - RNA, 19 nt, Artificial Sequence
  Description of Artificial Sequence: Synthetic oligonucleotide
  Antisense strand to SEQ ID NO: 2063404
acucaagccacuuuccugc

SEQ ID NO: 2063406 - RNA, 19 nt, Artificial Sequence
  Description of Artificial Sequence: Synthetic oligonucleotide
  Sense strand starting at position 2929 of SEQ ID NO: 1881680
aggaaaguggcuugaguag

SEQ ID NO: 2063407 - RNA, 19 nt, Artificial Sequence
  Description of Artificial Sequence: Synthetic oligonucleotide
  Antisense strand to SEQ ID NO: 2063406
cuacucaagccacuuuccu

SEQ ID NO: 2063408 - RNA, 19 nt, Artificial Sequence
  Description of Artificial Sequence: Synthetic oligonucleotide
  Sense strand starting at position 3006 of SEQ ID NO: 1881680
uugucauaguccuuuguag

SEQ ID NO: 2063409 - RNA, 19 nt, Artificial Sequence
  Description of Artificial Sequence: Synthetic oligonucleotide
  Antisense strand to SEQ ID NO: 2063408
cuacaaaggacuaugacaa

SEQ ID NO: 2063410 - RNA, 19 nt, Artificial Sequence
  Description of Artificial Sequence: Synthetic oligonucleotide
  Sense strand starting at position 3014 of SEQ ID NO: 1881680
guccuuuguagugugcaau

SEQ ID NO: 2063411 - RNA, 19 nt, Artificial Sequence
  Description of Artificial Sequence: Synthetic oligonucleotide
  Antisense strand to SEQ ID NO: 2063410
auugcacacuacaaaggac

SEQ ID NO: 2063412 - RNA, 19 nt, Artificial Sequence
  Description of Artificial Sequence: Synthetic oligonucleotide
  Sense strand starting at position 3029 of SEQ ID NO: 1881680
caaugagcuuucccuggga

SEQ ID NO: 2063413 - RNA, 19 nt, Artificial Sequence
  Description of Artificial Sequence: Synthetic oligonucleotide
  Antisense strand to SEQ ID NO: 2063412
ucccagggaaagcucauug

SEQ ID NO: 2063414 - RNA, 19 nt, Artificial Sequence
  Description of Artificial Sequence: Synthetic oligonucleotide
  Sense strand starting at position 3031 of SEQ ID NO: 1881680
augagcuuucccugggaca

SEQ ID NO: 2063415 - RNA, 19 nt, Artificial Sequence
  Description of Artificial Sequence: Synthetic oligonucleotide
  Antisense strand to SEQ ID NO: 2063414
ugucccagggaaagcucau

SEQ ID NO: 2063416 - RNA, 19 nt, Artificial Sequence
  Description of Artificial Sequence: Synthetic oligonucleotide
  Sense strand starting at position 3032 of SEQ ID NO: 1881680
ugagcuuucccugggacau

SEQ ID NO: 2063417 - RNA, 19 nt, Artificial Sequence
  Description of Artificial Sequence: Synthetic oligonucleotide
  Antisense strand to SEQ ID NO: 2063416
augucccagggaaagcuca

SEQ ID NO: 2063418 - RNA, 19 nt, Artificial Sequence
  Description of Artificial Sequence: Synthetic oligonucleotide
  Sense strand starting at position 3033 of SEQ ID NO: 1881680
gagcuuucccugggacaug

SEQ ID NO: 2063419 - RNA, 19 nt, Artificial Sequence
  Description of Artificial Sequence: Synthetic oligonucleotide
  Antisense strand to SEQ ID NO: 2063418
caugucccagggaaagcuc

SEQ ID NO: 2063420 - RNA, 19 nt, Artificial Sequence
  Description of Artificial Sequence: Synthetic oligonucleotide
  Sense strand starting at position 3227 of SEQ ID NO: 1881680
auugauggcuuauuguaca

SEQ ID NO: 2063421 - RNA, 19 nt, Artificial Sequence
  Description of Artificial Sequence: Synthetic oligonucleotide
  Antisense strand to SEQ ID NO: 2063420
uguacaauaagccaucaau

SEQ ID NO: 2063422 - RNA, 19 nt, Artificial Sequence
  Description of Artificial Sequence: Synthetic oligonucleotide
  Sense strand starting at position 3303 of SEQ ID NO: 1881680
gauagcauuuauuagaugu

SEQ ID NO: 2063423 - RNA, 19 nt, Artificial Sequence
  Description of Artificial Sequence: Synthetic oligonucleotide
  Antisense strand to SEQ ID NO: 2063422
acaucuaauaaaugcuauc

SEQ ID NO: 2063424 - RNA, 19 nt, Artificial Sequence
  Description of Artificial Sequence: Synthetic oligonucleotide
  Sense strand starting at position 3317 of SEQ ID NO: 1881680
gaugucaggcacuguuuaa

SEQ ID NO: 2063425 - RNA, 19 nt, Artificial Sequence
  Description of Artificial Sequence: Synthetic oligonucleotide
  Antisense strand to SEQ ID NO: 2063424
uuaaacagugccugacauc

SEQ ID NO: 2063426 - RNA, 19 nt, Artificial Sequence
  Description of Artificial Sequence: Synthetic oligonucleotide
  Sense strand starting at position 3434 of SEQ ID NO: 1881680
gcaauuugcccuugaucau

SEQ ID NO: 2063427 - RNA, 19 nt, Artificial Sequence
  Description of Artificial Sequence: Synthetic oligonucleotide
  Antisense strand to SEQ ID NO: 2063426
augaucaagggcaaauugc

SEQ ID NO: 2063428 - RNA, 19 nt, Artificial Sequence
  Description of Artificial Sequence: Synthetic oligonucleotide
  Sense strand starting at position 3484 of SEQ ID NO: 1881680
uccuaaguagucuaguauu

SEQ ID NO: 2063429 - RNA, 19 nt, Artificial Sequence
  Description of Artificial Sequence: Synthetic oligonucleotide
  Antisense strand to SEQ ID NO: 2063428
aauacuagacuacuuagga

SEQ ID NO: 2063430 - RNA, 19 nt, Artificial Sequence
  Description of Artificial Sequence: Synthetic oligonucleotide
  Sense strand starting at position 3897 of SEQ ID NO: 1881680
cucugagaaugauauaacu

SEQ ID NO: 2063431 - RNA, 19 nt, Artificial Sequence
  Description of Artificial Sequence: Synthetic oligonucleotide
  Antisense strand to SEQ ID NO: 2063430
aguuauaucauucucagag

SEQ ID NO: 2063432 - RNA, 19 nt, Artificial Sequence
  Description of Artificial Sequence: Synthetic oligonucleotide
  Sense strand starting at position 3958 of SEQ ID NO: 1881680
gcugcacuuguauaagaac

SEQ ID NO: 2063433 - RNA, 19 nt, Artificial Sequence
  Description of Artificial Sequence: Synthetic oligonucleotide
  Antisense strand to SEQ ID NO: 2063432
guucuuauacaagugcagc

SEQ ID NO: 2063434 - RNA, 19 nt, Artificial Sequence
  Description of Artificial Sequence: Synthetic oligonucleotide
  Sense strand starting at position 3967 of SEQ ID NO: 1881680
guauaagaacuguaaguuu

SEQ ID NO: 2063435 - RNA, 19 nt, Artificial Sequence
  Description of Artificial Sequence: Synthetic oligonucleotide
  Antisense strand to SEQ ID NO: 2063434
aaacuuacaguucuuauac

SEQ ID NO: 2063436 - RNA, 19 nt, Artificial Sequence
  Description of Artificial Sequence: Synthetic oligonucleotide
  Sense strand starting at position 83 of SEQ ID NO: 1881681
uggcuauguggagaagguu

SEQ ID NO: 2063437 - RNA, 19 nt, Artificial Sequence
  Description of Artificial Sequence: Synthetic oligonucleotide
  Antisense strand to SEQ ID NO: 2063436
aaccuucuccacauagcca

SEQ ID NO: 2063438 - RNA, 19 nt, Artificial Sequence
  Description of Artificial Sequence: Synthetic oligonucleotide
  Sense strand starting at position 207 of SEQ ID NO: 1881681
ccuccaaugccucaggaaa

SEQ ID NO: 2063439 - RNA, 19 nt, Artificial Sequence
  Description of Artificial Sequence: Synthetic oligonucleotide
  Antisense strand to SEQ ID NO: 2063438
uuuccugaggcauuggagg

SEQ ID NO: 2063440 - RNA, 19 nt, Artificial Sequence
  Description of Artificial Sequence: Synthetic oligonucleotide
  Sense strand starting at position 306 of SEQ ID NO: 1881681
cuaauugagggcuggacua

SEQ ID NO: 2063441 - RNA, 19 nt, Artificial Sequence
  Description of Artificial Sequence: Synthetic oligonucleotide
  Antisense strand to SEQ ID NO: 2063440
uaguccagcccucaauuag

SEQ ID NO: 2063442 - RNA, 19 nt, Artificial Sequence
  Description of Artificial Sequence: Synthetic oligonucleotide
  Sense strand starting at position 357 of SEQ ID NO: 1881681
cguucugaacaaugacaca

SEQ ID NO: 2063443 - RNA, 19 nt, Artificial Sequence
  Description of Artificial Sequence: Synthetic oligonucleotide
  Antisense strand to SEQ ID NO: 2063442
ugugucauuguucagaacg

SEQ ID NO: 2063444 - RNA, 19 nt, Artificial Sequence
  Description of Artificial Sequence: Synthetic oligonucleotide
  Sense strand starting at position 531 of SEQ ID NO: 1881681
agcuguaacccuuagagaa

SEQ ID NO: 2063445 - RNA, 19 nt, Artificial Sequence
  Description of Artificial Sequence: Synthetic oligonucleotide
  Antisense strand to SEQ ID NO: 2063444
uucucuaaggguuacagcu

SEQ ID NO: 2063446 - RNA, 19 nt, Artificial Sequence
  Description of Artificial Sequence: Synthetic oligonucleotide
  Sense strand starting at position 626 of SEQ ID NO: 1881681
gaccuugcguuuccuauuu

SEQ ID NO: 2063447 - RNA, 19 nt, Artificial Sequence
  Description of Artificial Sequence: Synthetic oligonucleotide
  Antisense strand to SEQ ID NO: 2063446
aaauaggaaacgcaagguc

SEQ ID NO: 2063448 - RNA, 19 nt, Artificial Sequence
  Description of Artificial Sequence: Synthetic oligonucleotide
  Sense strand starting at position 663 of SEQ ID NO: 1881681
ucagcaugucccuauuguu

SEQ ID NO: 2063449 - RNA, 19 nt, Artificial Sequence
  Description of Artificial Sequence: Synthetic oligonucleotide
  Antisense strand to SEQ ID NO: 2063448
aacaauagggacaugcuga

SEQ ID NO: 2063450 - RNA, 19 nt, Artificial Sequence
  Description of Artificial Sequence: Synthetic oligonucleotide
  Sense strand starting at position 668 of SEQ ID NO: 1881681
augucccuauuguuaucaa

SEQ ID NO: 2063451 - RNA, 19 nt, Artificial Sequence
  Description of Artificial Sequence: Synthetic oligonucleotide
  Antisense strand to SEQ ID NO: 2063450
uugauaacaauagggacau

SEQ ID NO: 2063452 - RNA, 19 nt, Artificial Sequence
  Description of Artificial Sequence: Synthetic oligonucleotide
  Sense strand starting at position 752 of SEQ ID NO: 1881681
cuccgacuuuaugugauga

SEQ ID NO: 2063453 - RNA, 19 nt, Artificial Sequence
  Description of Artificial Sequence: Synthetic oligonucleotide
  Antisense strand to SEQ ID NO: 2063452
ucaucacauaaagucggag

SEQ ID NO: 2063454 - RNA, 19 nt, Artificial Sequence
  Description of Artificial Sequence: Synthetic oligonucleotide
  Sense strand starting at position 768 of SEQ ID NO: 1881681
ugagaaguucucuauuccu

SEQ ID NO: 2063455 - RNA, 19 nt, Artificial Sequence
  Description of Artificial Sequence: Synthetic oligonucleotide
  Antisense strand to SEQ ID NO: 2063454
aggaauagagaacuucuca

SEQ ID NO: 2063456 - RNA, 19 nt, Artificial Sequence
  Description of Artificial Sequence: Synthetic oligonucleotide
  Sense strand starting at position 875 of SEQ ID NO: 1881681
agguuuaucucagcauaac

SEQ ID NO: 2063457 - RNA, 19 nt, Artificial Sequence
  Description of Artificial Sequence: Synthetic oligonucleotide
  Antisense strand to SEQ ID NO: 2063456
guuaugcugagauaaaccu

SEQ ID NO: 2063458 - RNA, 19 nt, Artificial Sequence
  Description of Artificial Sequence: Synthetic oligonucleotide
  Sense strand starting at position 876 of SEQ ID NO: 1881681
gguuuaucucagcauaaca

SEQ ID NO: 2063459 - RNA, 19 nt, Artificial Sequence
  Description of Artificial Sequence: Synthetic oligonucleotide
  Antisense strand to SEQ ID NO: 2063458
uguuaugcugagauaaacc

SEQ ID NO: 2063460 - RNA, 19 nt, Artificial Sequence
  Description of Artificial Sequence: Synthetic oligonucleotide
  Sense strand starting at position 955 of SEQ ID NO: 1881681
guaucaaacucacucuugu

SEQ ID NO: 2063461 - RNA, 19 nt, Artificial Sequence
  Description of Artificial Sequence: Synthetic oligonucleotide
  Antisense strand to SEQ ID NO: 2063460
acaagagugaguuugauac

SEQ ID NO: 2063462 - RNA, 19 nt, Artificial Sequence
  Description of Artificial Sequence: Synthetic oligonucleotide
  Sense strand starting at position 1768 of SEQ ID NO: 1881681
cugaguuucugacccgagu

SEQ ID NO: 2063463 - RNA, 19 nt, Artificial Sequence
  Description of Artificial Sequence: Synthetic oligonucleotide
  Antisense strand to SEQ ID NO: 2063462
acucgggucagaaacucag

SEQ ID NO: 2063464 - RNA, 19 nt, Artificial Sequence
  Description of Artificial Sequence: Synthetic oligonucleotide
  Sense strand starting at position 1770 of SEQ ID NO: 1881681
gaguuucugacccgaguac

SEQ ID NO: 2063465 - RNA, 19 nt, Artificial Sequence
  Description of Artificial Sequence: Synthetic oligonucleotide
  Antisense strand to SEQ ID NO: 2063464
guacucgggucagaaacuc

SEQ ID NO: 2063466 - RNA, 19 nt, Artificial Sequence
  Description of Artificial Sequence: Synthetic oligonucleotide
  Sense strand starting at position 2053 of SEQ ID NO: 1881681
gcgcaaugccuggugcaua

SEQ ID NO: 2063467 - RNA, 19 nt, Artificial Sequence
  Description of Artificial Sequence: Synthetic oligonucleotide
  Antisense strand to SEQ ID NO: 2063466
uaugcaccaggcauugcgc

SEQ ID NO: 2063468 - RNA, 19 nt, Artificial Sequence
  Description of Artificial Sequence: Synthetic oligonucleotide
  Sense strand starting at position 2090 of SEQ ID NO: 1881681
aacugugauguugaugcua

SEQ ID NO: 2063469 - RNA, 19 nt, Artificial Sequence
  Description of Artificial Sequence: Synthetic oligonucleotide
  Antisense strand to SEQ ID NO: 2063468
uagcaucaacaucacaguu

SEQ ID NO: 2063470 - RNA, 19 nt, Artificial Sequence
  Description of Artificial Sequence: Synthetic oligonucleotide
  Sense strand starting at position 2283 of SEQ ID NO: 1881681
cuaugcauuucugcugcua

SEQ ID NO: 2063471 - RNA, 19 nt, Artificial Sequence
  Description of Artificial Sequence: Synthetic oligonucleotide
  Antisense strand to SEQ ID NO: 2063470
uagcagcagaaaugcauag

SEQ ID NO: 2063472 - RNA, 19 nt, Artificial Sequence
  Description of Artificial Sequence: Synthetic oligonucleotide
  Sense strand starting at position 2510 of SEQ ID NO: 1881681
agguuuguuccauagcuaa

SEQ ID NO: 2063473 - RNA, 19 nt, Artificial Sequence
  Description of Artificial Sequence: Synthetic oligonucleotide
  Antisense strand to SEQ ID NO: 2063472
uuagcuauggaacaaaccu

SEQ ID NO: 2063474 - RNA, 19 nt, Artificial Sequence
  Description of Artificial Sequence: Synthetic oligonucleotide
  Sense strand starting at position 2561 of SEQ ID NO: 1881681
acccgucagcuaggaauua

SEQ ID NO: 2063475 - RNA, 19 nt, Artificial Sequence
  Description of Artificial Sequence: Synthetic oligonucleotide
  Antisense strand to SEQ ID NO: 2063474
uaauuccuagcugacgggu

SEQ ID NO: 2063476 - RNA, 19 nt, Artificial Sequence
  Description of Artificial Sequence: Synthetic oligonucleotide
  Sense strand starting at position 2815 of SEQ ID NO: 1881681
auggcaucucugggaugua

SEQ ID NO: 2063477 - RNA, 19 nt, Artificial Sequence
  Description of Artificial Sequence: Synthetic oligonucleotide
  Antisense strand to SEQ ID NO: 2063476
uacaucccagagaugccau

SEQ ID NO: 2063478 - RNA, 19 nt, Artificial Sequence
  Description of Artificial Sequence: Synthetic oligonucleotide
  Sense strand starting at position 2884 of SEQ ID NO: 1881681
caaggcugucagcauguaa

SEQ ID NO: 2063479 - RNA, 19 nt, Artificial Sequence
  Description of Artificial Sequence: Synthetic oligonucleotide
  Antisense strand to SEQ ID NO: 2063478
uuacaugcugacagccuug

SEQ ID NO: 2063480 - RNA, 19 nt, Artificial Sequence
  Description of Artificial Sequence: Synthetic oligonucleotide
  Sense strand starting at position 2888 of SEQ ID NO: 1881681
gcugucagcauguaaggaa

SEQ ID NO: 2063481 - RNA, 19 nt, Artificial Sequence
  Description of Artificial Sequence: Synthetic oligonucleotide
  Antisense strand to SEQ ID NO: 2063480
uuccuuacaugcugacagc

SEQ ID NO: 2063482 - RNA, 19 nt, Artificial Sequence
  Description of Artificial Sequence: Synthetic oligonucleotide
  Sense strand starting at position 3018 of SEQ ID NO: 1881681
aagauuuagugacaguuac

SEQ ID NO: 2063483 - RNA, 19 nt, Artificial Sequence
  Description of Artificial Sequence: Synthetic oligonucleotide
  Antisense strand to SEQ ID NO: 2063482
guaacugucacuaaaucuu

SEQ ID NO: 2063484 - RNA, 19 nt, Artificial Sequence
  Description of Artificial Sequence: Synthetic oligonucleotide
  Sense strand starting at position 3032 of SEQ ID NO: 1881681
guuacaauuugguaaagga

SEQ ID NO: 2063485 - RNA, 19 nt, Artificial Sequence
  Description of Artificial Sequence: Synthetic oligonucleotide
  Antisense strand to SEQ ID NO: 2063484
uccuuuaccaaauuguaac

SEQ ID NO: 2063486 - RNA, 19 nt, Artificial Sequence
  Description of Artificial Sequence: Synthetic oligonucleotide
  Sense strand starting at position 3072 of SEQ ID NO: 1881681
gcugaauuacaaggcagau

SEQ ID NO: 2063487 - RNA, 19 nt, Artificial Sequence
  Description of Artificial Sequence: Synthetic oligonucleotide
  Antisense strand to SEQ ID NO: 2063486
aucugccuuguaauucagc

SEQ ID NO: 2063488 - RNA, 19 nt, Artificial Sequence
  Description of Artificial Sequence: Synthetic oligonucleotide
  Sense strand starting at position 3090 of SEQ ID NO: 1881681
uugggauagugcucuguca

SEQ ID NO: 2063489 - RNA, 19 nt, Artificial Sequence
  Description of Artificial Sequence: Synthetic oligonucleotide
  Antisense strand to SEQ ID NO: 2063488
ugacagagcacuaucccaa

SEQ ID NO: 2063490 - RNA, 19 nt, Artificial Sequence
  Description of Artificial Sequence: Synthetic oligonucleotide
  Sense strand starting at position 3092 of SEQ ID NO: 1881681
gggauagugcucugucaga

SEQ ID NO: 2063491 - RNA, 19 nt, Artificial Sequence
  Description of Artificial Sequence: Synthetic oligonucleotide
  Antisense strand to SEQ ID NO: 2063490
ucugacagagcacuauccc

SEQ ID NO: 2063492 - RNA, 19 nt, Artificial Sequence
  Description of Artificial Sequence: Synthetic oligonucleotide
  Sense strand starting at position 3163 of SEQ ID NO: 1881681
uggccaccuucuuuaaguu

SEQ ID NO: 2063493 - RNA, 19 nt, Artificial Sequence
  Description of Artificial Sequence: Synthetic oligonucleotide
  Antisense strand to SEQ ID NO: 2063492
aacuuaaagaagguggcca

SEQ ID NO: 2063494 - RNA, 19 nt, Artificial Sequence
  Description of Artificial Sequence: Synthetic oligonucleotide
  Sense strand starting at position 3266 of SEQ ID NO: 1881681
agguucuuguacuuugauu

SEQ ID NO: 2063495 - RNA, 19 nt, Artificial Sequence
  Description of Artificial Sequence: Synthetic oligonucleotide
  Antisense strand to SEQ ID NO: 2063494
aaucaaaguacaagaaccu

SEQ ID NO: 2063496 - RNA, 19 nt, Artificial Sequence
  Description of Artificial Sequence: Synthetic oligonucleotide
  Sense strand starting at position 3268 of SEQ ID NO: 1881681
guucuuguacuuugauuua

SEQ ID NO: 2063497 - RNA, 19 nt, Artificial Sequence
  Description of Artificial Sequence: Synthetic oligonucleotide
  Antisense strand to SEQ ID NO: 2063496
uaaaucaaaguacaagaac

SEQ ID NO: 2063498 - RNA, 19 nt, Artificial Sequence
  Description of Artificial Sequence: Synthetic oligonucleotide
  Sense strand starting at position 3445 of SEQ ID NO: 1881681
cagugugagagugaaaugu

SEQ ID NO: 2063499 - RNA, 19 nt, Artificial Sequence
  Description of Artificial Sequence: Synthetic oligonucleotide
  Antisense strand to SEQ ID NO: 2063498
acauuucacucucacacug

SEQ ID NO: 2063500 - RNA, 19 nt, Artificial Sequence
  Description of Artificial Sequence: Synthetic oligonucleotide
  Sense strand starting at position 3447 of SEQ ID NO: 1881681
gugugagagugaaauguca

SEQ ID NO: 2063501 - RNA, 19 nt, Artificial Sequence
  Description of Artificial Sequence: Synthetic oligonucleotide
  Antisense strand to SEQ ID NO: 2063500
ugacauuucacucucacac

SEQ ID NO: 2063502 - RNA, 19 nt, Artificial Sequence
  Description of Artificial Sequence: Synthetic oligonucleotide
  Sense strand starting at position 3454 of SEQ ID NO: 1881681
agugaaaugucagccagag

SEQ ID NO: 2063503 - RNA, 19 nt, Artificial Sequence
  Description of Artificial Sequence: Synthetic oligonucleotide
  Antisense strand to SEQ ID NO: 2063502
cucuggcugacauuucacu

SEQ ID NO: 2063504 - RNA, 19 nt, Artificial Sequence
  Description of Artificial Sequence: Synthetic oligonucleotide
  Sense strand starting at position 3456 of SEQ ID NO: 1881681
ugaaaugucagccagagca

SEQ ID NO: 2063505 - RNA, 19 nt, Artificial Sequence
  Description of Artificial Sequence: Synthetic oligonucleotide
  Antisense strand to SEQ ID NO: 2063504
ugcucuggcugacauuuca

SEQ ID NO: 2063506 - RNA, 19 nt, Artificial Sequence
  Description of Artificial Sequence: Synthetic oligonucleotide
  Sense strand starting at position 3458 of SEQ ID NO: 1881681
aaaugucagccagagcaga

SEQ ID NO: 2063507 - RNA, 19 nt, Artificial Sequence
  Description of Artificial Sequence: Synthetic oligonucleotide
  Antisense strand to SEQ ID NO: 2063506
ucugcucuggcugacauuu

SEQ ID NO: 2063508 - RNA, 19 nt, Artificial Sequence
  Description of Artificial Sequence: Synthetic oligonucleotide
  Sense strand starting at position 3576 of SEQ ID NO: 1881681
gaaccaggcugcuuggaau

SEQ ID NO: 2063509 - RNA, 19 nt, Artificial Sequence
  Description of Artificial Sequence: Synthetic oligonucleotide
  Antisense strand to SEQ ID NO: 2063508
auuccaagcagccugguuc

SEQ ID NO: 2063510 - RNA, 19 nt, Artificial Sequence
  Description of Artificial Sequence: Synthetic oligonucleotide
  Sense strand starting at position 3587 of SEQ ID NO: 1881681
cuuggaauguucuuguaca

SEQ ID NO: 2063511 - RNA, 19 nt, Artificial Sequence
  Description of Artificial Sequence: Synthetic oligonucleotide
  Antisense strand to SEQ ID NO: 2063510
uguacaagaacauuccaag

SEQ ID NO: 2063512 - RNA, 19 nt, Artificial Sequence
  Description of Artificial Sequence: Synthetic oligonucleotide
  Sense strand starting at position 3640 of SEQ ID NO: 1881681
ggaauauucccaggagugg

SEQ ID NO: 2063513 - RNA, 19 nt, Artificial Sequence
  Description of Artificial Sequence: Synthetic oligonucleotide
  Antisense strand to SEQ ID NO: 2063512
ccacuccugggaauauucc

SEQ ID NO: 2063514 - RNA, 19 nt, Artificial Sequence
  Description of Artificial Sequence: Synthetic oligonucleotide
  Sense strand starting at position 3751 of SEQ ID NO: 1881681
ugaaguuuccauggcuauu

SEQ ID NO: 2063515 - RNA, 19 nt, Artificial Sequence
  Description of Artificial Sequence: Synthetic oligonucleotide
  Antisense strand to SEQ ID NO: 2063514
aauagccauggaaacuuca

SEQ ID NO: 2063516 - RNA, 19 nt, Artificial Sequence
  Description of Artificial Sequence: Synthetic oligonucleotide
  Sense strand starting at position 2048 of SEQ ID NO: 1881682
gugcuucugcgcccggaaa

SEQ ID NO: 2063517 - RNA, 19 nt, Artificial Sequence
  Description of Artificial Sequence: Synthetic oligonucleotide
  Antisense strand to SEQ ID NO: 2063516
uuuccgggcgcagaagcac

SEQ ID NO: 2063518 - RNA, 19 nt, Artificial Sequence
  Description of Artificial Sequence: Synthetic oligonucleotide
  Sense strand starting at position 2050 of SEQ ID NO: 1881682
gcuucugcgcccggaaaga

SEQ ID NO: 2063519 - RNA, 19 nt, Artificial Sequence
  Description of Artificial Sequence: Synthetic oligonucleotide
  Antisense strand to SEQ ID NO: 2063518
ucuuuccgggcgcagaagc

SEQ ID NO: 2063520 - RNA, 19 nt, Artificial Sequence
  Description of Artificial Sequence: Synthetic oligonucleotide
  Sense strand starting at position 2658 of SEQ ID NO: 1881682
ugcagagauguacgucacu

SEQ ID NO: 2063521 - RNA, 19 nt, Artificial Sequence
  Description of Artificial Sequence: Synthetic oligonucleotide
  Antisense strand to SEQ ID NO: 2063520
agugacguacaucucugca

SEQ ID NO: 2063522 - RNA, 19 nt, Artificial Sequence
  Description of Artificial Sequence: Synthetic oligonucleotide
  Sense strand starting at position 3862 of SEQ ID NO: 1881682
cccuuaucgugauuccuca

SEQ ID NO: 2063523 - RNA, 19 nt, Artificial Sequence
  Description of Artificial Sequence: Synthetic oligonucleotide
  Antisense strand to SEQ ID NO: 2063522
ugaggaaucacgauaaggg

SEQ ID NO: 2063524 - RNA, 19 nt, Artificial Sequence
  Description of Artificial Sequence: Synthetic oligonucleotide
  Sense strand starting at position 3941 of SEQ ID NO: 1881682
ucgggaugccaguggagaa

SEQ ID NO: 2063525 - RNA, 19 nt, Artificial Sequence
  Description of Artificial Sequence: Synthetic oligonucleotide
  Antisense strand to SEQ ID NO: 2063524
uucuccacuggcaucccga

SEQ ID NO: 2063526 - RNA, 19 nt, Artificial Sequence
  Description of Artificial Sequence: Synthetic oligonucleotide
  Sense strand starting at position 3971 of SEQ ID NO: 1881682
guguccuguucggagguau

SEQ ID NO: 2063527 - RNA, 19 nt, Artificial Sequence
  Description of Artificial Sequence: Synthetic oligonucleotide
  Antisense strand to SEQ ID NO: 2063526
auaccuccgaacaggacac

SEQ ID NO: 2063528 - RNA, 19 nt, Artificial Sequence
  Description of Artificial Sequence: Synthetic oligonucleotide
  Sense strand starting at position 3972 of SEQ ID NO: 1881682
uguccuguucggagguaug

SEQ ID NO: 2063529 - RNA, 19 nt, Artificial Sequence
  Description of Artificial Sequence: Synthetic oligonucleotide
  Antisense strand to SEQ ID NO: 2063528
cauaccuccgaacaggaca

SEQ ID NO: 2063530 - RNA, 19 nt, Artificial Sequence
  Description of Artificial Sequence: Synthetic oligonucleotide
  Sense strand starting at position 1 of SEQ ID NO: 1881683
ugauaaucacauugcagua

SEQ ID NO: 2063531 - RNA, 19 nt, Artificial Sequence
  Description of Artificial Sequence: Synthetic oligonucleotide
  Antisense strand to SEQ ID NO: 2063530
uacugcaaugugauuauca

SEQ ID NO: 2063532 - RNA, 19 nt, Artificial Sequence
  Description of Artificial Sequence: Synthetic oligonucleotide
  Sense strand starting at position 13 of SEQ ID NO: 1881683
ugcaguaaccagugaauga

SEQ ID NO: 2063533 - RNA, 19 nt, Artificial Sequence
  Description of Artificial Sequence: Synthetic oligonucleotide
  Antisense strand to SEQ ID NO: 2063532
ucauucacugguuacugca

SEQ ID NO: 2063534 - RNA, 19 nt, Artificial Sequence
  Description of Artificial Sequence: Synthetic oligonucleotide
  Sense strand starting at position 14 of SEQ ID NO: 1881683
gcaguaaccagugaaugaa

SEQ ID NO: 2063535 - RNA, 19 nt, Artificial Sequence
  Description of Artificial Sequence: Synthetic oligonucleotide
  Antisense strand to SEQ ID NO: 2063534
uucauucacugguuacugc

SEQ ID NO: 2063536 - RNA, 19 nt, Artificial Sequence
  Description of Artificial Sequence: Synthetic oligonucleotide
  Sense strand starting at position 17 of SEQ ID NO: 1881683
guaaccagugaaugaacaa

SEQ ID NO: 2063537 - RNA, 19 nt, Artificial Sequence
  Description of Artificial Sequence: Synthetic oligonucleotide
  Antisense strand to SEQ ID NO: 2063536
uuguucauucacugguuac

SEQ ID NO: 2063538 - RNA, 19 nt, Artificial Sequence
  Description of Artificial Sequence: Synthetic oligonucleotide
  Sense strand starting at position 104 of SEQ ID NO: 1881683
gcacaagaggcauaacgua

SEQ ID NO: 2063539 - RNA, 19 nt, Artificial Sequence
  Description of Artificial Sequence: Synthetic oligonucleotide
  Antisense strand to SEQ ID NO: 2063538
uacguuaugccucuugugc

SEQ ID NO: 2063540 - RNA, 19 nt, Artificial Sequence
  Description of Artificial Sequence: Synthetic oligonucleotide
  Sense strand starting at position 180 of SEQ ID NO: 1881683
agugucacuauguaaagua

SEQ ID NO: 2063541 - RNA, 19 nt, Artificial Sequence
  Description of Artificial Sequence: Synthetic oligonucleotide
  Antisense strand to SEQ ID NO: 2063540
uacuuuacauagugacacu

SEQ ID NO: 2063542 - RNA, 19 nt, Artificial Sequence
  Description of Artificial Sequence: Synthetic oligonucleotide
  Sense strand starting at position 247 of SEQ ID NO: 1881683
ucuaaugagcugcaaacaa

SEQ ID NO: 2063543 - RNA, 19 nt, Artificial Sequence
  Description of Artificial Sequence: Synthetic oligonucleotide
  Antisense strand to SEQ ID NO: 2063542
uuguuugcagcucauuaga

SEQ ID NO: 2063544 - RNA, 19 nt, Artificial Sequence
  Description of Artificial Sequence: Synthetic oligonucleotide
  Sense strand starting at position 264 of SEQ ID NO: 1881683
aacccacgugcauaugaaa

SEQ ID NO: 2063545 - RNA, 19 nt, Artificial Sequence
  Description of Artificial Sequence: Synthetic oligonucleotide
  Antisense strand to SEQ ID NO: 2063544
uuucauaugcacguggguu

SEQ ID NO: 2063546 - RNA, 19 nt, Artificial Sequence
  Description of Artificial Sequence: Synthetic oligonucleotide
  Sense strand starting at position 328 of SEQ ID NO: 1881683
uuuagaauucgaugcuaua

SEQ ID NO: 2063547 - RNA, 19 nt, Artificial Sequence
  Description of Artificial Sequence: Synthetic oligonucleotide
  Antisense strand to SEQ ID NO: 2063546
uauagcaucgaauucuaaa

SEQ ID NO: 2063548 - RNA, 19 nt, Artificial Sequence
  Description of Artificial Sequence: Synthetic oligonucleotide
  Sense strand starting at position 455 of SEQ ID NO: 1881683
uccuaaucugcugaguuga

SEQ ID NO: 2063549 - RNA, 19 nt, Artificial Sequence
  Description of Artificial Sequence: Synthetic oligonucleotide
  Antisense strand to SEQ ID NO: 2063548
ucaacucagcagauuagga

SEQ ID NO: 2063550 - RNA, 19 nt, Artificial Sequence
  Description of Artificial Sequence: Synthetic oligonucleotide
  Sense strand starting at position 521 of SEQ ID NO: 1881683
cagguuacugcuguucgua

SEQ ID NO: 2063551 - RNA, 19 nt, Artificial Sequence
  Description of Artificial Sequence: Synthetic oligonucleotide
  Antisense strand to SEQ ID NO: 2063550
uacgaacagcaguaaccug

SEQ ID NO: 2063552 - RNA, 19 nt, Artificial Sequence
  Description of Artificial Sequence: Synthetic oligonucleotide
  Sense strand starting at position 522 of SEQ ID NO: 1881683
agguuacugcuguucguau

SEQ ID NO: 2063553 - RNA, 19 nt, Artificial Sequence
  Description of Artificial Sequence: Synthetic oligonucleotide
  Antisense strand to SEQ ID NO: 2063552
auacgaacagcaguaaccu

SEQ ID NO: 2063554 - RNA, 19 nt, Artificial Sequence
  Description of Artificial Sequence: Synthetic oligonucleotide
  Sense strand starting at position 544 of SEQ ID NO: 1881683
acuuguuucucuuuggaaa

SEQ ID NO: 2063555 - RNA, 19 nt, Artificial Sequence
  Description of Artificial Sequence: Synthetic oligonucleotide
  Antisense strand to SEQ ID NO: 2063554
uuuccaaagagaaacaagu

SEQ ID NO: 2063556 - RNA, 19 nt, Artificial Sequence
  Description of Artificial Sequence: Synthetic oligonucleotide
  Sense strand starting at position 545 of SEQ ID NO: 1881683
cuuguuucucuuuggaaac

SEQ ID NO: 2063557 - RNA, 19 nt, Artificial Sequence
  Description of Artificial Sequence: Synthetic oligonucleotide
  Antisense strand to SEQ ID NO: 2063556
guuuccaaagagaaacaag

SEQ ID NO: 2063558 - RNA, 19 nt, Artificial Sequence
  Description of Artificial Sequence: Synthetic oligonucleotide
  Sense strand starting at position 658 of SEQ ID NO: 1881683
gugaguuuauacuuuggaa

SEQ ID NO: 2063559 - RNA, 19 nt, Artificial Sequence
  Description of Artificial Sequence: Synthetic oligonucleotide
  Antisense strand to SEQ ID NO: 2063558
uuccaaaguauaaacucac

SEQ ID NO: 2063560 - RNA, 19 nt, Artificial Sequence
  Description of Artificial Sequence: Synthetic oligonucleotide
  Sense strand starting at position 660 of SEQ ID NO: 1881683
gaguuuauacuuuggaagu

SEQ ID NO: 2063561 - RNA, 19 nt, Artificial Sequence
  Description of Artificial Sequence: Synthetic oligonucleotide
  Antisense strand to SEQ ID NO: 2063560
acuuccaaaguauaaacuc

SEQ ID NO: 2063562 - RNA, 19 nt, Artificial Sequence
  Description of Artificial Sequence: Synthetic oligonucleotide
  Sense strand starting at position 724 of SEQ ID NO: 1881683
gcuuaucauuuggaagaua

SEQ ID NO: 2063563 - RNA, 19 nt, Artificial Sequence
  Description of Artificial Sequence: Synthetic oligonucleotide
  Antisense strand to SEQ ID NO: 2063562
uaucuuccaaaugauaagc

SEQ ID NO: 2063564 - RNA, 19 nt, Artificial Sequence
  Description of Artificial Sequence: Synthetic oligonucleotide
  Sense strand starting at position 744 of SEQ ID NO: 1881683
gugcacauuuaauaaagga

SEQ ID NO: 2063565 - RNA, 19 nt, Artificial Sequence
  Description of Artificial Sequence: Synthetic oligonucleotide
  Antisense strand to SEQ ID NO: 2063564
uccuuuauuaaaugugcac

SEQ ID NO: 2063566 - RNA, 19 nt, Artificial Sequence
  Description of Artificial Sequence: Synthetic oligonucleotide
  Sense strand starting at position 1052 of SEQ ID NO: 1881683
auuagcaguuaauccgaaa

SEQ ID NO: 2063567 - RNA, 19 nt, Artificial Sequence
  Description of Artificial Sequence: Synthetic oligonucleotide
  Antisense strand to SEQ ID NO: 2063566
uuucggauuaacugcuaau

SEQ ID NO: 2063568 - RNA, 19 nt, Artificial Sequence
  Description of Artificial Sequence: Synthetic oligonucleotide
  Sense strand starting at position 1192 of SEQ ID NO: 1881683
agauaaggauuagaagaau

SEQ ID NO: 2063569 - RNA, 19 nt, Artificial Sequence
  Description of Artificial Sequence: Synthetic oligonucleotide
  Antisense strand to SEQ ID NO: 2063568
auucuucuaauccuuaucu

SEQ ID NO: 2063570 - RNA, 19 nt, Artificial Sequence
  Description of Artificial Sequence: Synthetic oligonucleotide
  Sense strand starting at position 1204 of SEQ ID NO: 1881683
gaagaaucagcaggagguu

SEQ ID NO: 2063571 - RNA, 19 nt, Artificial Sequence
  Description of Artificial Sequence: Synthetic oligonucleotide
  Antisense strand to SEQ ID NO: 2063570
aaccuccugcugauucuuc

SEQ ID NO: 2063572 - RNA, 19 nt, Artificial Sequence
  Description of Artificial Sequence: Synthetic oligonucleotide
  Sense strand starting at position 2146 of SEQ ID NO: 1881683
uagggagguucuuugggaa

SEQ ID NO: 2063573 - RNA, 19 nt, Artificial Sequence
  Description of Artificial Sequence: Synthetic oligonucleotide
  Antisense strand to SEQ ID NO: 2063572
uucccaaagaaccucccua

SEQ ID NO: 2063574 - RNA, 19 nt, Artificial Sequence
  Description of Artificial Sequence: Synthetic oligonucleotide
  Sense strand starting at position 2202 of SEQ ID NO: 1881683
gcgguagacagcuagaauu

SEQ ID NO: 2063575 - RNA, 19 nt, Artificial Sequence
  Description of Artificial Sequence: Synthetic oligonucleotide
  Antisense strand to SEQ ID NO: 2063574
aauucuagcugucuaccgc

SEQ ID NO: 2063576 - RNA, 19 nt, Artificial Sequence
  Description of Artificial Sequence: Synthetic oligonucleotide
  Sense strand starting at position 2374 of SEQ ID NO: 1881683
gaggaugcacguuggaaga

SEQ ID NO: 2063577 - RNA, 19 nt, Artificial Sequence
  Description of Artificial Sequence: Synthetic oligonucleotide
  Antisense strand to SEQ ID NO: 2063576
ucuuccaacgugcauccuc

SEQ ID NO: 2063578 - RNA, 19 nt, Artificial Sequence
  Description of Artificial Sequence: Synthetic oligonucleotide
  Sense strand starting at position 2393 of SEQ ID NO: 1881683
aaugaaagcgaauggaauu

SEQ ID NO: 2063579 - RNA, 19 nt, Artificial Sequence
  Description of Artificial Sequence: Synthetic oligonucleotide
  Antisense strand to SEQ ID NO: 2063578
aauuccauucgcuuucauu

SEQ ID NO: 2063580 - RNA, 19 nt, Artificial Sequence
  Description of Artificial Sequence: Synthetic oligonucleotide
  Sense strand starting at position 2546 of SEQ ID NO: 1881683
cuguuuacagaguaaauac

SEQ ID NO: 2063581 - RNA, 19 nt, Artificial Sequence
  Description of Artificial Sequence: Synthetic oligonucleotide
  Antisense strand to SEQ ID NO: 2063580
guauuuacucuguaaacag

SEQ ID NO: 2063582 - RNA, 19 nt, Artificial Sequence
  Description of Artificial Sequence: Synthetic oligonucleotide
  Sense strand starting at position 2702 of SEQ ID NO: 1881683
agaauugagguuuggaguu

SEQ ID NO: 2063583 - RNA, 19 nt, Artificial Sequence
  Description of Artificial Sequence: Synthetic oligonucleotide
  Antisense strand to SEQ ID NO: 2063582
aacuccaaaccucaauucu

SEQ ID NO: 2063584 - RNA, 19 nt, Artificial Sequence
  Description of Artificial Sequence: Synthetic oligonucleotide
  Sense strand starting at position 2708 of SEQ ID NO: 1881683
gagguuuggaguuguuaag

SEQ ID NO: 2063585 - RNA, 19 nt, Artificial Sequence
  Description of Artificial Sequence: Synthetic oligonucleotide
  Antisense strand to SEQ ID NO: 2063584
cuuaacaacuccaaaccuc

SEQ ID NO: 2063586 - RNA, 19 nt, Artificial Sequence
  Description of Artificial Sequence: Synthetic oligonucleotide
  Sense strand starting at position 3056 of SEQ ID NO: 1881683
uacaucuggcaguggaauu

SEQ ID NO: 2063587 - RNA, 19 nt, Artificial Sequence
  Description of Artificial Sequence: Synthetic oligonucleotide
  Antisense strand to SEQ ID NO: 2063586
aauuccacugccagaugua

SEQ ID NO: 2063588 - RNA, 19 nt, Artificial Sequence
  Description of Artificial Sequence: Synthetic oligonucleotide
  Sense strand starting at position 3057 of SEQ ID NO: 1881683
acaucuggcaguggaauua

SEQ ID NO: 2063589 - RNA, 19 nt, Artificial Sequence
  Description of Artificial Sequence: Synthetic oligonucleotide
  Antisense strand to SEQ ID NO: 2063588
uaauuccacugccagaugu

SEQ ID NO: 2063590 - RNA, 19 nt, Artificial Sequence
  Description of Artificial Sequence: Synthetic oligonucleotide
  Sense strand starting at position 3090 of SEQ ID NO: 1881683
agagauacuuaagaaauag

SEQ ID NO: 2063591 - RNA, 19 nt, Artificial Sequence
  Description of Artificial Sequence: Synthetic oligonucleotide
  Antisense strand to SEQ ID NO: 2063590
cuauuucuuaaguaucucu

SEQ ID NO: 2063592 - RNA, 19 nt, Artificial Sequence
  Description of Artificial Sequence: Synthetic oligonucleotide
  Sense strand starting at position 3110 of SEQ ID NO: 1881683
auauaugagacucguagua

SEQ ID NO: 2063593 - RNA, 19 nt, Artificial Sequence
  Description of Artificial Sequence: Synthetic oligonucleotide
  Antisense strand to SEQ ID NO: 2063592
uacuacgagucucauauau

SEQ ID NO: 2063594 - RNA, 19 nt, Artificial Sequence
  Description of Artificial Sequence: Synthetic oligonucleotide
  Sense strand starting at position 3206 of SEQ ID NO: 1881683
gucugacuccuacaaacug

SEQ ID NO: 2063595 - RNA, 19 nt, Artificial Sequence
  Description of Artificial Sequence: Synthetic oligonucleotide
  Antisense strand to SEQ ID NO: 2063594
caguuuguaggagucagac

SEQ ID NO: 2063596 - RNA, 19 nt, Artificial Sequence
  Description of Artificial Sequence: Synthetic oligonucleotide
  Sense strand starting at position 3306 of SEQ ID NO: 1881683
guauauauuccauaagugc

SEQ ID NO: 2063597 - RNA, 19 nt, Artificial Sequence
  Description of Artificial Sequence: Synthetic oligonucleotide
  Antisense strand to SEQ ID NO: 2063596
gcacuuauggaauauauac

SEQ ID NO: 2063598 - RNA, 19 nt, Artificial Sequence
  Description of Artificial Sequence: Synthetic oligonucleotide
  Sense strand starting at position 3315 of SEQ ID NO: 1881683
ccauaagugcaagaaccau

SEQ ID NO: 2063599 - RNA, 19 nt, Artificial Sequence
  Description of Artificial Sequence: Synthetic oligonucleotide
  Antisense strand to SEQ ID NO: 2063598
augguucuugcacuuaugg

SEQ ID NO: 2063600 - RNA, 19 nt, Artificial Sequence
  Description of Artificial Sequence: Synthetic oligonucleotide
  Sense strand starting at position 3510 of SEQ ID NO: 1881683
ggcuuaggauggcuuugaa

SEQ ID NO: 2063601 - RNA, 19 nt, Artificial Sequence
  Description of Artificial Sequence: Synthetic oligonucleotide
  Antisense strand to SEQ ID NO: 2063600
uucaaagccauccuaagcc

SEQ ID NO: 2063602 - RNA, 19 nt, Artificial Sequence
  Description of Artificial Sequence: Synthetic oligonucleotide
  Sense strand starting at position 3546 of SEQ ID NO: 1881683
ucguaaacuuuauugaaac

SEQ ID NO: 2063603 - RNA, 19 nt, Artificial Sequence
  Description of Artificial Sequence: Synthetic oligonucleotide
  Antisense strand to SEQ ID NO: 2063602
guuucaauaaaguuuacga

SEQ ID NO: 2063604 - RNA, 19 nt, Artificial Sequence
  Description of Artificial Sequence: Synthetic oligonucleotide
  Sense strand starting at position 3902 of SEQ ID NO: 1881683
cugccagaagcucaggaau

SEQ ID NO: 2063605 - RNA, 19 nt, Artificial Sequence
  Description of Artificial Sequence: Synthetic oligonucleotide
  Antisense strand to SEQ ID NO: 2063604
auuccugagcuucuggcag

SEQ ID NO: 2063606 - RNA, 19 nt, Artificial Sequence
  Description of Artificial Sequence: Synthetic oligonucleotide
  Sense strand starting at position 3922 of SEQ ID NO: 1881683
ggagauaucacguaucuuc

SEQ ID NO: 2063607 - RNA, 19 nt, Artificial Sequence
  Description of Artificial Sequence: Synthetic oligonucleotide
  Antisense strand to SEQ ID NO: 2063606
gaagauacgugauaucucc

SEQ ID NO: 2063608 - RNA, 19 nt, Artificial Sequence
  Description of Artificial Sequence: Synthetic oligonucleotide
  Sense strand starting at position 3970 of SEQ ID NO: 1881683
agaggaacugguugaaagu

SEQ ID NO: 2063609 - RNA, 19 nt, Artificial Sequence
  Description of Artificial Sequence: Synthetic oligonucleotide
  Antisense strand to SEQ ID NO: 2063608
acuuucaaccaguuccucu

SEQ ID NO: 2063610 - RNA, 19 nt, Artificial Sequence
  Description of Artificial Sequence: Synthetic oligonucleotide
  Sense strand starting at position 58 of SEQ ID NO: 1881684
caagaucaccgcugugaag

SEQ ID NO: 2063611 - RNA, 19 nt, Artificial Sequence
  Description of Artificial Sequence: Synthetic oligonucleotide
  Antisense strand to SEQ ID NO: 2063610
cuucacagcggugaucuug

SEQ ID NO: 2063612 - RNA, 19 nt, Artificial Sequence
  Description of Artificial Sequence: Synthetic oligonucleotide
  Sense strand starting at position 222 of SEQ ID NO: 1881684
ggaucuguggaggguagau

SEQ ID NO: 2063613 - RNA, 19 nt, Artificial Sequence
  Description of Artificial Sequence: Synthetic oligonucleotide
  Antisense strand to SEQ ID NO: 2063612
aucuacccuccacagaucc

SEQ ID NO: 2063614 - RNA, 19 nt, Artificial Sequence
  Description of Artificial Sequence: Synthetic oligonucleotide
  Sense strand starting at position 323 of SEQ ID NO: 1881684
gugggaauuuagcaucuuu

SEQ ID NO: 2063615 - RNA, 19 nt, Artificial Sequence
  Description of Artificial Sequence: Synthetic oligonucleotide
  Antisense strand to SEQ ID NO: 2063614
aaagaugcuaaauucccac

SEQ ID NO: 2063616 - RNA, 19 nt, Artificial Sequence
  Description of Artificial Sequence: Synthetic oligonucleotide
  Sense strand starting at position 332 of SEQ ID NO: 1881684
uagcaucuuugauagagau

SEQ ID NO: 2063617 - RNA, 19 nt, Artificial Sequence
  Description of Artificial Sequence: Synthetic oligonucleotide
  Antisense strand to SEQ ID NO: 2063616
aucucuaucaaagaugcua

SEQ ID NO: 2063618 - RNA, 19 nt, Artificial Sequence
  Description of Artificial Sequence: Synthetic oligonucleotide
  Sense strand starting at position 354 of SEQ ID NO: 1881684
aaauuuggguuuggaaaug

SEQ ID NO: 2063619 - RNA, 19 nt, Artificial Sequence
  Description of Artificial Sequence: Synthetic oligonucleotide
  Antisense strand to SEQ ID NO: 2063618
cauuuccaaacccaaauuu

SEQ ID NO: 2063620 - RNA, 19 nt, Artificial Sequence
  Description of Artificial Sequence: Synthetic oligonucleotide
  Sense strand starting at position 359 of SEQ ID NO: 1881684
uggguuuggaaauguugga

SEQ ID NO: 2063621 - RNA, 19 nt, Artificial Sequence
  Description of Artificial Sequence: Synthetic oligonucleotide
  Antisense strand to SEQ ID NO: 2063620
uccaacauuuccaaaccca

SEQ ID NO: 2063622 - RNA, 19 nt, Artificial Sequence
  Description of Artificial Sequence: Synthetic oligonucleotide
  Sense strand starting at position 401 of SEQ ID NO: 1881684
aguggaauuagccacuguu

SEQ ID NO: 2063623 - RNA, 19 nt, Artificial Sequence
  Description of Artificial Sequence: Synthetic oligonucleotide
  Antisense strand to SEQ ID NO: 2063622
aacaguggcuaauuccacu

SEQ ID NO: 2063624 - RNA, 19 nt, Artificial Sequence
  Description of Artificial Sequence: Synthetic oligonucleotide
  Sense strand starting at position 404 of SEQ ID NO: 1881684
ggaauuagccacuguuaau

SEQ ID NO: 2063625 - RNA, 19 nt, Artificial Sequence
  Description of Artificial Sequence: Synthetic oligonucleotide
  Antisense strand to SEQ ID NO: 2063624
auuaacaguggcuaauucc

SEQ ID NO: 2063626 - RNA, 19 nt, Artificial Sequence
  Description of Artificial Sequence: Synthetic oligonucleotide
  Sense strand starting at position 415 of SEQ ID NO: 1881684
cuguuaauauuugacgauu

SEQ ID NO: 2063627 - RNA, 19 nt, Artificial Sequence
  Description of Artificial Sequence: Synthetic oligonucleotide
  Antisense strand to SEQ ID NO: 2063626
aaucgucaaauauuaacag

SEQ ID NO: 2063628 - RNA, 19 nt, Artificial Sequence
  Description of Artificial Sequence: Synthetic oligonucleotide
  Sense strand starting at position 417 of SEQ ID NO: 1881684
guuaauauuugacgauuug

SEQ ID NO: 2063629 - RNA, 19 nt, Artificial Sequence
  Description of Artificial Sequence: Synthetic oligonucleotide
  Antisense strand to SEQ ID NO: 2063628
caaaucgucaaauauuaac

SEQ ID NO: 2063630 - RNA, 19 nt, Artificial Sequence
  Description of Artificial Sequence: Synthetic oligonucleotide
  Sense strand starting at position 460 of SEQ ID NO: 1881684
aggcuagagagaugaaguu

SEQ ID NO: 2063631 - RNA, 19 nt, Artificial Sequence
  Description of Artificial Sequence: Synthetic oligonucleotide
  Antisense strand to SEQ ID NO: 2063630
aacuucaucucucuagccu

SEQ ID NO: 2063632 - RNA, 19 nt, Artificial Sequence
  Description of Artificial Sequence: Synthetic oligonucleotide
  Sense strand starting at position 483 of SEQ ID NO: 1881684
gcugccaucauagagauga

SEQ ID NO: 2063633 - RNA, 19 nt, Artificial Sequence
  Description of Artificial Sequence: Synthetic oligonucleotide
  Antisense strand to SEQ ID NO: 2063632
ucaucucuaugauggcagc

SEQ ID NO: 2063634 - RNA, 19 nt, Artificial Sequence
  Description of Artificial Sequence: Synthetic oligonucleotide
  Sense strand starting at position 502 of SEQ ID NO: 1881684
gaguuaaagcagggaacuu

SEQ ID NO: 2063635 - RNA, 19 nt, Artificial Sequence
  Description of Artificial Sequence: Synthetic oligonucleotide
  Antisense strand to SEQ ID NO: 2063634
aaguucccugcuuuaacuc

SEQ ID NO: 2063636 - RNA, 19 nt, Artificial Sequence
  Description of Artificial Sequence: Synthetic oligonucleotide
  Sense strand starting at position 512 of SEQ ID NO: 1881684
agggaacuuuaauaaaugu

SEQ ID NO: 2063637 - RNA, 19 nt, Artificial Sequence
  Description of Artificial Sequence: Synthetic oligonucleotide
  Antisense strand to SEQ ID NO: 2063636
acauuuauuaaaguucccu

SEQ ID NO: 2063638 - RNA, 19 nt, Artificial Sequence
  Description of Artificial Sequence: Synthetic oligonucleotide
  Sense strand starting at position 619 of SEQ ID NO: 1881684
ggaaaugacugagaaggaa

SEQ ID NO: 2063639 - RNA, 19 nt, Artificial Sequence
  Description of Artificial Sequence: Synthetic oligonucleotide
  Antisense strand to SEQ ID NO: 2063638
uuccuucucagucauuucc

SEQ ID NO: 2063640 - RNA, 19 nt, Artificial Sequence
  Description of Artificial Sequence: Synthetic oligonucleotide
  Sense strand starting at position 689 of SEQ ID NO: 1881684
accaucacauggcuuagaa

SEQ ID NO: 2063641 - RNA, 19 nt, Artificial Sequence
  Description of Artificial Sequence: Synthetic oligonucleotide
  Antisense strand to SEQ ID NO: 2063640
uucuaagccaugugauggu

SEQ ID NO: 2063642 - RNA, 19 nt, Artificial Sequence
  Description of Artificial Sequence: Synthetic oligonucleotide
  Sense strand starting at position 722 of SEQ ID NO: 1881684
uuuggcaaugauggacaua

SEQ ID NO: 2063643 - RNA, 19 nt, Artificial Sequence
  Description of Artificial Sequence: Synthetic oligonucleotide
  Antisense strand to SEQ ID NO: 2063642
uauguccaucauugccaaa

SEQ ID NO: 2063644 - RNA, 19 nt, Artificial Sequence
  Description of Artificial Sequence: Synthetic oligonucleotide
  Sense strand starting at position 853 of SEQ ID NO: 1881684
uucuguuuccuacaucagu

SEQ ID NO: 2063645 - RNA, 19 nt, Artificial Sequence
  Description of Artificial Sequence: Synthetic oligonucleotide
  Antisense strand to SEQ ID NO: 2063644
acugauguaggaaacagaa

SEQ ID NO: 2063646 - RNA, 19 nt, Artificial Sequence
  Description of Artificial Sequence: Synthetic oligonucleotide
  Sense strand starting at position 870 of SEQ ID NO: 1881684
guuacuaaacuuugaggca

SEQ ID NO: 2063647 - RNA, 19 nt, Artificial Sequence
  Description of Artificial Sequence: Synthetic oligonucleotide
  Antisense strand to SEQ ID NO: 2063646
ugccucaaaguuuaguaac

SEQ ID NO: 2063648 - RNA, 19 nt, Artificial Sequence
  Description of Artificial Sequence: Synthetic oligonucleotide
  Sense strand starting at position 873 of SEQ ID NO: 1881684
acuaaacuuugaggcauuu

SEQ ID NO: 2063649 - RNA, 19 nt, Artificial Sequence
  Description of Artificial Sequence: Synthetic oligonucleotide
  Antisense strand to SEQ ID NO: 2063648
aaaugccucaaaguuuagu

SEQ ID NO: 2063650 - RNA, 19 nt, Artificial Sequence
  Description of Artificial Sequence: Synthetic oligonucleotide
  Sense strand starting at position 930 of SEQ ID NO: 1881684
aggugucuaaugugauuac

SEQ ID NO: 2063651 - RNA, 19 nt, Artificial Sequence
  Description of Artificial Sequence: Synthetic oligonucleotide
  Antisense strand to SEQ ID NO: 2063650
guaaucacauuagacaccu

SEQ ID NO: 2063652 - RNA, 19 nt, Artificial Sequence
  Description of Artificial Sequence: Synthetic oligonucleotide
  Sense strand starting at position 1029 of SEQ ID NO: 1881684
aucccuuuggugcaaauga

SEQ ID NO: 2063653 - RNA, 19 nt, Artificial Sequence
  Description of Artificial Sequence: Synthetic oligonucleotide
  Antisense strand to SEQ ID NO: 2063652
ucauuugcaccaaagggau

SEQ ID NO: 2063654 - RNA, 19 nt, Artificial Sequence
  Description of Artificial Sequence: Synthetic oligonucleotide
  Sense strand starting at position 1077 of SEQ ID NO: 1881684
acuguuaauugggcauaau

SEQ ID NO: 2063655 - RNA, 19 nt, Artificial Sequence
  Description of Artificial Sequence: Synthetic oligonucleotide
  Antisense strand to SEQ ID NO: 2063654
auuaugcccaauuaacagu

SEQ ID NO: 2063656 - RNA, 19 nt, Artificial Sequence
  Description of Artificial Sequence: Synthetic oligonucleotide
  Sense strand starting at position 1078 of SEQ ID NO: 1881684
cuguuaauugggcauaaug

SEQ ID NO: 2063657 - RNA, 19 nt, Artificial Sequence
  Description of Artificial Sequence: Synthetic oligonucleotide
  Antisense strand to SEQ ID NO: 2063656
cauuaugcccaauuaacag

SEQ ID NO: 2063658 - RNA, 19 nt, Artificial Sequence
  Description of Artificial Sequence: Synthetic oligonucleotide
  Sense strand starting at position 1114 of SEQ ID NO: 1881684
gggcucuugcaggaaugaa

SEQ ID NO: 2063659 - RNA, 19 nt, Artificial Sequence
  Description of Artificial Sequence: Synthetic oligonucleotide
  Antisense strand to SEQ ID NO: 2063658
uucauuccugcaagagccc

SEQ ID NO: 2063660 - RNA, 19 nt, Artificial Sequence
  Description of Artificial Sequence: Synthetic oligonucleotide
  Sense strand starting at position 1150 of SEQ ID NO: 1881684
ggaugagggauacguccau

SEQ ID NO: 2063661 - RNA, 19 nt, Artificial Sequence
  Description of Artificial Sequence: Synthetic oligonucleotide
  Antisense strand to SEQ ID NO: 2063660
auggacguaucccucaucc

SEQ ID NO: 2063662 - RNA, 19 nt, Artificial Sequence
  Description of Artificial Sequence: Synthetic oligonucleotide
  Sense strand starting at position 1232 of SEQ ID NO: 1881684
uuagauuaucuuugcuuag

SEQ ID NO: 2063663 - RNA, 19 nt, Artificial Sequence
  Description of Artificial Sequence: Synthetic oligonucleotide
  Antisense strand to SEQ ID NO: 2063662
cuaagcaaagauaaucuaa

SEQ ID NO: 2063664 - RNA, 19 nt, Artificial Sequence
  Description of Artificial Sequence: Synthetic oligonucleotide
  Sense strand starting at position 2147 of SEQ ID NO: 1881684
guuccuuugugccuuccaa

SEQ ID NO: 2063665 - RNA, 19 nt, Artificial Sequence
  Description of Artificial Sequence: Synthetic oligonucleotide
  Antisense strand to SEQ ID NO: 2063664
uuggaaggcacaaaggaac

SEQ ID NO: 2063666 - RNA, 19 nt, Artificial Sequence
  Description of Artificial Sequence: Synthetic oligonucleotide
  Sense strand starting at position 2303 of SEQ ID NO: 1881684
ggucaucugaguugugcag

SEQ ID NO: 2063667 - RNA, 19 nt, Artificial Sequence
  Description of Artificial Sequence: Synthetic oligonucleotide
  Antisense strand to SEQ ID NO: 2063666
cugcacaacucagaugacc

SEQ ID NO: 2063668 - RNA, 19 nt, Artificial Sequence
  Description of Artificial Sequence: Synthetic oligonucleotide
  Sense strand starting at position 2437 of SEQ ID NO: 1881684
gagggaagccuuugacaug

SEQ ID NO: 2063669 - RNA, 19 nt, Artificial Sequence
  Description of Artificial Sequence: Synthetic oligonucleotide
  Antisense strand to SEQ ID NO: 2063668
caugucaaaggcuucccuc

SEQ ID NO: 2063670 - RNA, 19 nt, Artificial Sequence
  Description of Artificial Sequence: Synthetic oligonucleotide
  Sense strand starting at position 2556 of SEQ ID NO: 1881684
gugaguccguagagugaga

SEQ ID NO: 2063671 - RNA, 19 nt, Artificial Sequence
  Description of Artificial Sequence: Synthetic oligonucleotide
  Antisense strand to SEQ ID NO: 2063670
ucucacucuacggacucac

SEQ ID NO: 2063672 - RNA, 19 nt, Artificial Sequence
  Description of Artificial Sequence: Synthetic oligonucleotide
  Sense strand starting at position 2572 of SEQ ID NO: 1881684
agagcaaguuuauuaagga

SEQ ID NO: 2063673 - RNA, 19 nt, Artificial Sequence
  Description of Artificial Sequence: Synthetic oligonucleotide
  Antisense strand to SEQ ID NO: 2063672
uccuuaauaaacuugcucu

SEQ ID NO: 2063674 - RNA, 19 nt, Artificial Sequence
  Description of Artificial Sequence: Synthetic oligonucleotide
  Sense strand starting at position 2573 of SEQ ID NO: 1881684
gagcaaguuuauuaaggaa

SEQ ID NO: 2063675 - RNA, 19 nt, Artificial Sequence
  Description of Artificial Sequence: Synthetic oligonucleotide
  Antisense strand to SEQ ID NO: 2063674
uuccuuaauaaacuugcuc

SEQ ID NO: 2063676 - RNA, 19 nt, Artificial Sequence
  Description of Artificial Sequence: Synthetic oligonucleotide
  Sense strand starting at position 2749 of SEQ ID NO: 1881684
ggugcucuaugccuguaau

SEQ ID NO: 2063677 - RNA, 19 nt, Artificial Sequence
  Description of Artificial Sequence: Synthetic oligonucleotide
  Antisense strand to SEQ ID NO: 2063676
auuacaggcauagagcacc

SEQ ID NO: 2063678 - RNA, 19 nt, Artificial Sequence
  Description of Artificial Sequence: Synthetic oligonucleotide
  Sense strand starting at position 2971 of SEQ ID NO: 1881684
ugggcugcuuagcuaauua

SEQ ID NO: 2063679 - RNA, 19 nt, Artificial Sequence
  Description of Artificial Sequence: Synthetic oligonucleotide
  Antisense strand to SEQ ID NO: 2063678
uaauuagcuaagcagccca

SEQ ID NO: 2063680 - RNA, 19 nt, Artificial Sequence
  Description of Artificial Sequence: Synthetic oligonucleotide
  Sense strand starting at position 3507 of SEQ ID NO: 1881684
guguguugacuuggagaga

SEQ ID NO: 2063681 - RNA, 19 nt, Artificial Sequence
  Description of Artificial Sequence: Synthetic oligonucleotide
  Antisense strand to SEQ ID NO: 2063680
ucucuccaagucaacacac

SEQ ID NO: 2063682 - RNA, 19 nt, Artificial Sequence
  Description of Artificial Sequence: Synthetic oligonucleotide
  Sense strand starting at position 3579 of SEQ ID NO: 1881684
cgaauuggucccuguaccu

SEQ ID NO: 2063683 - RNA, 19 nt, Artificial Sequence
  Description of Artificial Sequence: Synthetic oligonucleotide
  Antisense strand to SEQ ID NO: 2063682
agguacagggaccaauucg

SEQ ID NO: 2063684 - RNA, 19 nt, Artificial Sequence
  Description of Artificial Sequence: Synthetic oligonucleotide
  Sense strand starting at position 3639 of SEQ ID NO: 1881684
acuuguuguuucucagauu

SEQ ID NO: 2063685 - RNA, 19 nt, Artificial Sequence
  Description of Artificial Sequence: Synthetic oligonucleotide
  Antisense strand to SEQ ID NO: 2063684
aaucugagaaacaacaagu

SEQ ID NO: 2063686 - RNA, 19 nt, Artificial Sequence
  Description of Artificial Sequence: Synthetic oligonucleotide
  Sense strand starting at position 3743 of SEQ ID NO: 1881684
uuugacuguuccucaggaa

SEQ ID NO: 2063687 - RNA, 19 nt, Artificial Sequence
  Description of Artificial Sequence: Synthetic oligonucleotide
  Antisense strand to SEQ ID NO: 2063686
uuccugaggaacagucaaa

SEQ ID NO: 2063688 - RNA, 19 nt, Artificial Sequence
  Description of Artificial Sequence: Synthetic oligonucleotide
  Sense strand starting at position 3894 of SEQ ID NO: 1881684
uucccugcugcagaguaau

SEQ ID NO: 2063689 - RNA, 19 nt, Artificial Sequence
  Description of Artificial Sequence: Synthetic oligonucleotide
  Antisense strand to SEQ ID NO: 2063688
auuacucugcagcagggaa

SEQ ID NO: 2063690 - RNA, 19 nt, Artificial Sequence
  Description of Artificial Sequence: Synthetic oligonucleotide
  Sense strand starting at position 15 of SEQ ID NO: 1881685
uuaacaucuugggcuacau

SEQ ID NO: 2063691 - RNA, 19 nt, Artificial Sequence
  Description of Artificial Sequence: Synthetic oligonucleotide
  Antisense strand to SEQ ID NO: 2063690
auguagcccaagauguuaa

SEQ ID NO: 2063692 - RNA, 19 nt, Artificial Sequence
  Description of Artificial Sequence: Synthetic oligonucleotide
  Sense strand starting at position 364 of SEQ ID NO: 1881685
gcuucuacaguuuaugagu

SEQ ID NO: 2063693 - RNA, 19 nt, Artificial Sequence
  Description of Artificial Sequence: Synthetic oligonucleotide
  Antisense strand to SEQ ID NO: 2063692
acucauaaacuguagaagc

SEQ ID NO: 2063694 - RNA, 19 nt, Artificial Sequence
  Description of Artificial Sequence: Synthetic oligonucleotide
  Sense strand starting at position 750 of SEQ ID NO: 1881685
gaagcaugccacugacaag

SEQ ID NO: 2063695 - RNA, 19 nt, Artificial Sequence
  Description of Artificial Sequence: Synthetic oligonucleotide
  Antisense strand to SEQ ID NO: 2063694
cuugucaguggcaugcuuc

SEQ ID NO: 2063696 - RNA, 19 nt, Artificial Sequence
  Description of Artificial Sequence: Synthetic oligonucleotide
  Sense strand starting at position 1127 of SEQ ID NO: 1881685
aucugugucaaugguagga

SEQ ID NO: 2063697 - RNA, 19 nt, Artificial Sequence
  Description of Artificial Sequence: Synthetic oligonucleotide
  Antisense strand to SEQ ID NO: 2063696
uccuaccauugacacagau

SEQ ID NO: 2063698 - RNA, 19 nt, Artificial Sequence
  Description of Artificial Sequence: Synthetic oligonucleotide
  Sense strand starting at position 1131 of SEQ ID NO: 1881685
gugucaaugguaggaaagu

SEQ ID NO: 2063699 - RNA, 19 nt, Artificial Sequence
  Description of Artificial Sequence: Synthetic oligonucleotide
  Antisense strand to SEQ ID NO: 2063698
acuuuccuaccauugacac

SEQ ID NO: 2063700 - RNA, 19 nt, Artificial Sequence
  Description of Artificial Sequence: Synthetic oligonucleotide
  Sense strand starting at position 1142 of SEQ ID NO: 1881685
aggaaaguguacuuucuau

SEQ ID NO: 2063701 - RNA, 19 nt, Artificial Sequence
  Description of Artificial Sequence: Synthetic oligonucleotide
  Antisense strand to SEQ ID NO: 2063700
auagaaaguacacuuuccu

SEQ ID NO: 2063702 - RNA, 19 nt, Artificial Sequence
  Description of Artificial Sequence: Synthetic oligonucleotide
  Sense strand starting at position 1183 of SEQ ID NO: 1881685
gccuauuucuuucccugua

SEQ ID NO: 2063703 - RNA, 19 nt, Artificial Sequence
  Description of Artificial Sequence: Synthetic oligonucleotide
  Antisense strand to SEQ ID NO: 2063702
uacagggaaagaaauaggc

SEQ ID NO: 2063704 - RNA, 19 nt, Artificial Sequence
  Description of Artificial Sequence: Synthetic oligonucleotide
  Sense strand starting at position 1291 of SEQ ID NO: 1881685
guuccaaacguguaaguaa

SEQ ID NO: 2063705 - RNA, 19 nt, Artificial Sequence
  Description of Artificial Sequence: Synthetic oligonucleotide
  Antisense strand to SEQ ID NO: 2063704
uuacuuacacguuuggaac

SEQ ID NO: 2063706 - RNA, 19 nt, Artificial Sequence
  Description of Artificial Sequence: Synthetic oligonucleotide
  Sense strand starting at position 1338 of SEQ ID NO: 1881685
uuguaaagcucugucaaau

SEQ ID NO: 2063707 - RNA, 19 nt, Artificial Sequence
  Description of Artificial Sequence: Synthetic oligonucleotide
  Antisense strand to SEQ ID NO: 2063706
auuugacagagcuuuacaa

SEQ ID NO: 2063708 - RNA, 19 nt, Artificial Sequence
  Description of Artificial Sequence: Synthetic oligonucleotide
  Sense strand starting at position 2023 of SEQ ID NO: 1881685
cgucuaaaccaaugguaag

SEQ ID NO: 2063709 - RNA, 19 nt, Artificial Sequence
  Description of Artificial Sequence: Synthetic oligonucleotide
  Antisense strand to SEQ ID NO: 2063708
cuuaccauugguuuagacg

SEQ ID NO: 2063710 - RNA, 19 nt, Artificial Sequence
  Description of Artificial Sequence: Synthetic oligonucleotide
  Sense strand starting at position 2280 of SEQ ID NO: 1881685
cucauuguuccucagcuau

SEQ ID NO: 2063711 - RNA, 19 nt, Artificial Sequence
  Description of Artificial Sequence: Synthetic oligonucleotide
  Antisense strand to SEQ ID NO: 2063710
auagcugaggaacaaugag

SEQ ID NO: 2063712 - RNA, 19 nt, Artificial Sequence
  Description of Artificial Sequence: Synthetic oligonucleotide
  Sense strand starting at position 2303 of SEQ ID NO: 1881685
cccucaauacucggagaac

SEQ ID NO: 2063713 - RNA, 19 nt, Artificial Sequence
  Description of Artificial Sequence: Synthetic oligonucleotide
  Antisense strand to SEQ ID NO: 2063712
guucuccgaguauugaggg

SEQ ID NO: 2063714 - RNA, 19 nt, Artificial Sequence
  Description of Artificial Sequence: Synthetic oligonucleotide
  Sense strand starting at position 2412 of SEQ ID NO: 1881685
guucuaucuggcuaaauca

SEQ ID NO: 2063715 - RNA, 19 nt, Artificial Sequence
  Description of Artificial Sequence: Synthetic oligonucleotide
  Antisense strand to SEQ ID NO: 2063714
ugauuuagccagauagaac

SEQ ID NO: 2063716 - RNA, 19 nt, Artificial Sequence
  Description of Artificial Sequence: Synthetic oligonucleotide
  Sense strand starting at position 2431 of SEQ ID NO: 1881685
uaagccuagcuguggaaau

SEQ ID NO: 2063717 - RNA, 19 nt, Artificial Sequence
  Description of Artificial Sequence: Synthetic oligonucleotide
  Antisense strand to SEQ ID NO: 2063716
auuuccacagcuaggcuua

SEQ ID NO: 2063718 - RNA, 19 nt, Artificial Sequence
  Description of Artificial Sequence: Synthetic oligonucleotide
  Sense strand starting at position 2448 of SEQ ID NO: 1881685
auucguuuccugucguauu

SEQ ID NO: 2063719 - RNA, 19 nt, Artificial Sequence
  Description of Artificial Sequence: Synthetic oligonucleotide
  Antisense strand to SEQ ID NO: 2063718
aauacgacaggaaacgaau

SEQ ID NO: 2063720 - RNA, 19 nt, Artificial Sequence
  Description of Artificial Sequence: Synthetic oligonucleotide
  Sense strand starting at position 2774 of SEQ ID NO: 1881685
cuaaauuggcauugucuga

SEQ ID NO: 2063721 - RNA, 19 nt, Artificial Sequence
  Description of Artificial Sequence: Synthetic oligonucleotide
  Antisense strand to SEQ ID NO: 2063720
ucagacaaugccaauuuag

SEQ ID NO: 2063722 - RNA, 19 nt, Artificial Sequence
  Description of Artificial Sequence: Synthetic oligonucleotide
  Sense strand starting at position 2804 of SEQ ID NO: 1881685
uguguaauccuucugugcu

SEQ ID NO: 2063723 - RNA, 19 nt, Artificial Sequence
  Description of Artificial Sequence: Synthetic oligonucleotide
  Antisense strand to SEQ ID NO: 2063722
agcacagaaggauuacaca

SEQ ID NO: 2063724 - RNA, 19 nt, Artificial Sequence
  Description of Artificial Sequence: Synthetic oligonucleotide
  Sense strand starting at position 2871 of SEQ ID NO: 1881685
auuagauugugaguuuccu

SEQ ID NO: 2063725 - RNA, 19 nt, Artificial Sequence
  Description of Artificial Sequence: Synthetic oligonucleotide
  Antisense strand to SEQ ID NO: 2063724
aggaaacucacaaucuaau

SEQ ID NO: 2063726 - RNA, 19 nt, Artificial Sequence
  Description of Artificial Sequence: Synthetic oligonucleotide
  Sense strand starting at position 2877 of SEQ ID NO: 1881685
uugugaguuuccucaggau

SEQ ID NO: 2063727 - RNA, 19 nt, Artificial Sequence
  Description of Artificial Sequence: Synthetic oligonucleotide
  Antisense strand to SEQ ID NO: 2063726
auccugaggaaacucacaa

SEQ ID NO: 2063728 - RNA, 19 nt, Artificial Sequence
  Description of Artificial Sequence: Synthetic oligonucleotide
  Sense strand starting at position 2961 of SEQ ID NO: 1881685
augucuucugaaugaauaa

SEQ ID NO: 2063729 - RNA, 19 nt, Artificial Sequence
  Description of Artificial Sequence: Synthetic oligonucleotide
  Antisense strand to SEQ ID NO: 2063728
uuauucauucagaagacau

SEQ ID NO: 2063730 - RNA, 19 nt, Artificial Sequence
  Description of Artificial Sequence: Synthetic oligonucleotide
  Sense strand starting at position 2994 of SEQ ID NO: 1881685
uucugucuaugucuaauuu

SEQ ID NO: 2063731 - RNA, 19 nt, Artificial Sequence
  Description of Artificial Sequence: Synthetic oligonucleotide
  Antisense strand to SEQ ID NO: 2063730
aaauuagacauagacagaa

SEQ ID NO: 2063732 - RNA, 19 nt, Artificial Sequence
  Description of Artificial Sequence: Synthetic oligonucleotide
  Sense strand starting at position 3014 of SEQ ID NO: 1881685
ucuaauguucugugaaccu

SEQ ID NO: 2063733 - RNA, 19 nt, Artificial Sequence
  Description of Artificial Sequence: Synthetic oligonucleotide
  Antisense strand to SEQ ID NO: 2063732
agguucacagaacauuaga

SEQ ID NO: 2063734 - RNA, 19 nt, Artificial Sequence
  Description of Artificial Sequence: Synthetic oligonucleotide
  Sense strand starting at position 3025 of SEQ ID NO: 1881685
gugaaccuugcauacaaau

SEQ ID NO: 2063735 - RNA, 19 nt, Artificial Sequence
  Description of Artificial Sequence: Synthetic oligonucleotide
  Antisense strand to SEQ ID NO: 2063734
auuuguaugcaagguucac

SEQ ID NO: 2063736 - RNA, 19 nt, Artificial Sequence
  Description of Artificial Sequence: Synthetic oligonucleotide
  Sense strand starting at position 3094 of SEQ ID NO: 1881685
ugaaauugucuuuauugcu

SEQ ID NO: 2063737 - RNA, 19 nt, Artificial Sequence
  Description of Artificial Sequence: Synthetic oligonucleotide
  Antisense strand to SEQ ID NO: 2063736
agcaauaaagacaauuuca

SEQ ID NO: 2063738 - RNA, 19 nt, Artificial Sequence
  Description of Artificial Sequence: Synthetic oligonucleotide
  Sense strand starting at position 3360 of SEQ ID NO: 1881685
uucaguaucgcagaggaau

SEQ ID NO: 2063739 - RNA, 19 nt, Artificial Sequence
  Description of Artificial Sequence: Synthetic oligonucleotide
  Antisense strand to SEQ ID NO: 2063738
auuccucugcgauacugaa

SEQ ID NO: 2063740 - RNA, 19 nt, Artificial Sequence
  Description of Artificial Sequence: Synthetic oligonucleotide
  Sense strand starting at position 3362 of SEQ ID NO: 1881685
caguaucgcagaggaauga

SEQ ID NO: 2063741 - RNA, 19 nt, Artificial Sequence
  Description of Artificial Sequence: Synthetic oligonucleotide
  Antisense strand to SEQ ID NO: 2063740
ucauuccucugcgauacug

SEQ ID NO: 2063742 - RNA, 19 nt, Artificial Sequence
  Description of Artificial Sequence: Synthetic oligonucleotide
  Sense strand starting at position 3375 of SEQ ID NO: 1881685
gaaugacaagcauaugugu

SEQ ID NO: 2063743 - RNA, 19 nt, Artificial Sequence
  Description of Artificial Sequence: Synthetic oligonucleotide
  Antisense strand to SEQ ID NO: 2063742
acacauaugcuugucauuc

SEQ ID NO: 2063744 - RNA, 19 nt, Artificial Sequence
  Description of Artificial Sequence: Synthetic oligonucleotide
  Sense strand starting at position 3382 of SEQ ID NO: 1881685
aagcauauguguucuggag

SEQ ID NO: 2063745 - RNA, 19 nt, Artificial Sequence
  Description of Artificial Sequence: Synthetic oligonucleotide
  Antisense strand to SEQ ID NO: 2063744
cuccagaacacauaugcuu

SEQ ID NO: 2063746 - RNA, 19 nt, Artificial Sequence
  Description of Artificial Sequence: Synthetic oligonucleotide
  Sense strand starting at position 3386 of SEQ ID NO: 1881685
auauguguucuggaguuaa

SEQ ID NO: 2063747 - RNA, 19 nt, Artificial Sequence
  Description of Artificial Sequence: Synthetic oligonucleotide
  Antisense strand to SEQ ID NO: 2063746
uuaacuccagaacacauau

SEQ ID NO: 2063748 - RNA, 19 nt, Artificial Sequence
  Description of Artificial Sequence: Synthetic oligonucleotide
  Sense strand starting at position 3390 of SEQ ID NO: 1881685
guguucuggaguuaagcua

SEQ ID NO: 2063749 - RNA, 19 nt, Artificial Sequence
  Description of Artificial Sequence: Synthetic oligonucleotide
  Antisense strand to SEQ ID NO: 2063748
uagcuuaacuccagaacac

SEQ ID NO: 2063750 - RNA, 19 nt, Artificial Sequence
  Description of Artificial Sequence: Synthetic oligonucleotide
  Sense strand starting at position 3432 of SEQ ID NO: 1881685
agcuaugaguccuugugga

SEQ ID NO: 2063751 - RNA, 19 nt, Artificial Sequence
  Description of Artificial Sequence: Synthetic oligonucleotide
  Antisense strand to SEQ ID NO: 2063750
uccacaaggacucauagcu

SEQ ID NO: 2063752 - RNA, 19 nt, Artificial Sequence
  Description of Artificial Sequence: Synthetic oligonucleotide
  Sense strand starting at position 3489 of SEQ ID NO: 1881685
ggguuauugcgagacuuaa

SEQ ID NO: 2063753 - RNA, 19 nt, Artificial Sequence
  Description of Artificial Sequence: Synthetic oligonucleotide
  Antisense strand to SEQ ID NO: 2063752
uuaagucucgcaauaaccc

SEQ ID NO: 2063754 - RNA, 19 nt, Artificial Sequence
  Description of Artificial Sequence: Synthetic oligonucleotide
  Sense strand starting at position 3606 of SEQ ID NO: 1881685
ggacaucguaaguggcaaa

SEQ ID NO: 2063755 - RNA, 19 nt, Artificial Sequence
  Description of Artificial Sequence: Synthetic oligonucleotide
  Antisense strand to SEQ ID NO: 2063754
uuugccacuuacgaugucc

SEQ ID NO: 2063756 - RNA, 19 nt, Artificial Sequence
  Description of Artificial Sequence: Synthetic oligonucleotide
  Sense strand starting at position 3644 of SEQ ID NO: 1881685
guguaugaaccauggacga

SEQ ID NO: 2063757 - RNA, 19 nt, Artificial Sequence
  Description of Artificial Sequence: Synthetic oligonucleotide
  Antisense strand to SEQ ID NO: 2063756
ucguccaugguucauacac

SEQ ID NO: 2063758 - RNA, 19 nt, Artificial Sequence
  Description of Artificial Sequence: Synthetic oligonucleotide
  Sense strand starting at position 3801 of SEQ ID NO: 1881685
ucaggauauuaugcaauaa

SEQ ID NO: 2063759 - RNA, 19 nt, Artificial Sequence
  Description of Artificial Sequence: Synthetic oligonucleotide
  Antisense strand to SEQ ID NO: 2063758
uuauugcauaauauccuga

SEQ ID NO: 2063760 - RNA, 19 nt, Artificial Sequence
  Description of Artificial Sequence: Synthetic oligonucleotide
  Sense strand starting at position 3825 of SEQ ID NO: 1881685
gggugcuuucuugaauaca

SEQ ID NO: 2063761 - RNA, 19 nt, Artificial Sequence
  Description of Artificial Sequence: Synthetic oligonucleotide
  Antisense strand to SEQ ID NO: 2063760
uguauucaagaaagcaccc

SEQ ID NO: 2063762 - RNA, 19 nt, Artificial Sequence
  Description of Artificial Sequence: Synthetic oligonucleotide
  Sense strand starting at position 3836 of SEQ ID NO: 1881685
ugaauacacugguuugaca

SEQ ID NO: 2063763 - RNA, 19 nt, Artificial Sequence
  Description of Artificial Sequence: Synthetic oligonucleotide
  Antisense strand to SEQ ID NO: 2063762
ugucaaaccaguguauuca

SEQ ID NO: 2063764 - RNA, 19 nt, Artificial Sequence
  Description of Artificial Sequence: Synthetic oligonucleotide
  Sense strand starting at position 3923 of SEQ ID NO: 1881685
gagaacugggcauagcuau

SEQ ID NO: 2063765 - RNA, 19 nt, Artificial Sequence
  Description of Artificial Sequence: Synthetic oligonucleotide
  Antisense strand to SEQ ID NO: 2063764
auagcuaugcccaguucuc

SEQ ID NO: 2063766 - RNA, 19 nt, Artificial Sequence
  Description of Artificial Sequence: Synthetic oligonucleotide
  Sense strand starting at position 3950 of SEQ ID NO: 1881685
gagccaucagcauauguag

SEQ ID NO: 2063767 - RNA, 19 nt, Artificial Sequence
  Description of Artificial Sequence: Synthetic oligonucleotide
  Antisense strand to SEQ ID NO: 2063766
cuacauaugcugauggcuc

SEQ ID NO: 2063768 - RNA, 19 nt, Artificial Sequence
  Description of Artificial Sequence: Synthetic oligonucleotide
  Sense strand starting at position 3973 of SEQ ID NO: 1881685
ugaguugggcgauaggagu

SEQ ID NO: 2063769 - RNA, 19 nt, Artificial Sequence
  Description of Artificial Sequence: Synthetic oligonucleotide
  Antisense strand to SEQ ID NO: 2063768
acuccuaucgcccaacuca

SEQ ID NO: 2063770 - RNA, 19 nt, Artificial Sequence
  Description of Artificial Sequence: Synthetic oligonucleotide
  Sense strand starting at position 9 of SEQ ID NO: 1881686
cacuuuaucgguugauaga

SEQ ID NO: 2063771 - RNA, 19 nt, Artificial Sequence
  Description of Artificial Sequence: Synthetic oligonucleotide
  Antisense strand to SEQ ID NO: 2063770
ucuaucaaccgauaaagug

SEQ ID NO: 2063772 - RNA, 19 nt, Artificial Sequence
  Description of Artificial Sequence: Synthetic oligonucleotide
  Sense strand starting at position 10 of SEQ ID NO: 1881686
acuuuaucgguugauagac

SEQ ID NO: 2063773 - RNA, 19 nt, Artificial Sequence
  Description of Artificial Sequence: Synthetic oligonucleotide
  Antisense strand to SEQ ID NO: 2063772
gucuaucaaccgauaaagu

SEQ ID NO: 2063774 - RNA, 19 nt, Artificial Sequence
  Description of Artificial Sequence: Synthetic oligonucleotide
  Sense strand starting at position 16 of SEQ ID NO: 1881686
ucgguugauagacauuguu

SEQ ID NO: 2063775 - RNA, 19 nt, Artificial Sequence
  Description of Artificial Sequence: Synthetic oligonucleotide
  Antisense strand to SEQ ID NO: 2063774
aacaaugucuaucaaccga

SEQ ID NO: 2063776 - RNA, 19 nt, Artificial Sequence
  Description of Artificial Sequence: Synthetic oligonucleotide
  Sense strand starting at position 48 of SEQ ID NO: 1881686
ugcuauagauguuugaaac

SEQ ID NO: 2063777 - RNA, 19 nt, Artificial Sequence
  Description of Artificial Sequence: Synthetic oligonucleotide
  Antisense strand to SEQ ID NO: 2063776
guuucaaacaucuauagca

SEQ ID NO: 2063778 - RNA, 19 nt, Artificial Sequence
  Description of Artificial Sequence: Synthetic oligonucleotide
  Sense strand starting at position 49 of SEQ ID NO: 1881686
gcuauagauguuugaaaca

SEQ ID NO: 2063779 - RNA, 19 nt, Artificial Sequence
  Description of Artificial Sequence: Synthetic oligonucleotide
  Antisense strand to SEQ ID NO: 2063778
uguuucaaacaucuauagc

SEQ ID NO: 2063780 - RNA, 19 nt, Artificial Sequence
  Description of Artificial Sequence: Synthetic oligonucleotide
  Sense strand starting at position 201 of SEQ ID NO: 1881686
aguguaugaagguacuaau

SEQ ID NO: 2063781 - RNA, 19 nt, Artificial Sequence
  Description of Artificial Sequence: Synthetic oligonucleotide
  Antisense strand to SEQ ID NO: 2063780
auuaguaccuucauacacu

SEQ ID NO: 2063782 - RNA, 19 nt, Artificial Sequence
  Description of Artificial Sequence: Synthetic oligonucleotide
  Sense strand starting at position 230 of SEQ ID NO: 1881686
uuuaacagcgauugagaau

SEQ ID NO: 2063783 - RNA, 19 nt, Artificial Sequence
  Description of Artificial Sequence: Synthetic oligonucleotide
  Antisense strand to SEQ ID NO: 2063782
auucucaaucgcuguuaaa

SEQ ID NO: 2063784 - RNA, 19 nt, Artificial Sequence
  Description of Artificial Sequence: Synthetic oligonucleotide
  Sense strand starting at position 533 of SEQ ID NO: 1881686
gaggcagauuuauaaggga

SEQ ID NO: 2063785 - RNA, 19 nt, Artificial Sequence
  Description of Artificial Sequence: Synthetic oligonucleotide
  Antisense strand to SEQ ID NO: 2063784
ucccuuauaaaucugccuc

SEQ ID NO: 2063786 - RNA, 19 nt, Artificial Sequence
  Description of Artificial Sequence: Synthetic oligonucleotide
  Sense strand starting at position 577 of SEQ ID NO: 1881686
uaaagaugauguccauuga

SEQ ID NO: 2063787 - RNA, 19 nt, Artificial Sequence
  Description of Artificial Sequence: Synthetic oligonucleotide
  Antisense strand to SEQ ID NO: 2063786
ucaauggacaucaucuuua

SEQ ID NO: 2063788 - RNA, 19 nt, Artificial Sequence
  Description of Artificial Sequence: Synthetic oligonucleotide
  Sense strand starting at position 581 of SEQ ID NO: 1881686
gaugauguccauugaagac

SEQ ID NO: 2063789 - RNA, 19 nt, Artificial Sequence
  Description of Artificial Sequence: Synthetic oligonucleotide
  Antisense strand to SEQ ID NO: 2063788
gucuucaauggacaucauc

SEQ ID NO: 2063790 - RNA, 19 nt, Artificial Sequence
  Description of Artificial Sequence: Synthetic oligonucleotide
  Sense strand starting at position 627 of SEQ ID NO: 1881686
cugauucugaugugaugga

SEQ ID NO: 2063791 - RNA, 19 nt, Artificial Sequence
  Description of Artificial Sequence: Synthetic oligonucleotide
  Antisense strand to SEQ ID NO: 2063790
uccaucacaucagaaucag

SEQ ID NO: 2063792 - RNA, 19 nt, Artificial Sequence
  Description of Artificial Sequence: Synthetic oligonucleotide
  Sense strand starting at position 631 of SEQ ID NO: 1881686
uucugaugugauggaucca

SEQ ID NO: 2063793 - RNA, 19 nt, Artificial Sequence
  Description of Artificial Sequence: Synthetic oligonucleotide
  Antisense strand to SEQ ID NO: 2063792
uggauccaucacaucagaa

SEQ ID NO: 2063794 - RNA, 19 nt, Artificial Sequence
  Description of Artificial Sequence: Synthetic oligonucleotide
  Sense strand starting at position 680 of SEQ ID NO: 1881686
uagucaggguauucuuaaa

SEQ ID NO: 2063795 - RNA, 19 nt, Artificial Sequence
  Description of Artificial Sequence: Synthetic oligonucleotide
  Antisense strand to SEQ ID NO: 2063794
uuuaagaauacccugacua

SEQ ID NO: 2063796 - RNA, 19 nt, Artificial Sequence
  Description of Artificial Sequence: Synthetic oligonucleotide
  Sense strand starting at position 827 of SEQ ID NO: 1881686
agaaguaucuuacuagauu

SEQ ID NO: 2063797 - RNA, 19 nt, Artificial Sequence
  Description of Artificial Sequence: Synthetic oligonucleotide
  Antisense strand to SEQ ID NO: 2063796
aaucuaguaagauacuucu

SEQ ID NO: 2063798 - RNA, 19 nt, Artificial Sequence
  Description of Artificial Sequence: Synthetic oligonucleotide
  Sense strand starting at position 846 of SEQ ID NO: 1881686
cucagagacuauuccugga

SEQ ID NO: 2063799 - RNA, 19 nt, Artificial Sequence
  Description of Artificial Sequence: Synthetic oligonucleotide
  Antisense strand to SEQ ID NO: 2063798
uccaggaauagucucugag

SEQ ID NO: 2063800 - RNA, 19 nt, Artificial Sequence
  Description of Artificial Sequence: Synthetic oligonucleotide
  Sense strand starting at position 905 of SEQ ID NO: 1881686
uugaauugugcagaucucu

SEQ ID NO: 2063801 - RNA, 19 nt, Artificial Sequence
  Description of Artificial Sequence: Synthetic oligonucleotide
  Antisense strand to SEQ ID NO: 2063800
agagaucugcacaauucaa

SEQ ID NO: 2063802 - RNA, 19 nt, Artificial Sequence
  Description of Artificial Sequence: Synthetic oligonucleotide
  Sense strand starting at position 910 of SEQ ID NO: 1881686
uugugcagaucucugagaa

SEQ ID NO: 2063803 - RNA, 19 nt, Artificial Sequence
  Description of Artificial Sequence: Synthetic oligonucleotide
  Antisense strand to SEQ ID NO: 2063802
uucucagagaucugcacaa

SEQ ID NO: 2063804 - RNA, 19 nt, Artificial Sequence
  Description of Artificial Sequence: Synthetic oligonucleotide
  Sense strand starting at position 911 of SEQ ID NO: 1881686
ugugcagaucucugagaag

SEQ ID NO: 2063805 - RNA, 19 nt, Artificial Sequence
  Description of Artificial Sequence: Synthetic oligonucleotide
  Antisense strand to SEQ ID NO: 2063804
cuucucagagaucugcaca

SEQ ID NO: 2063806 - RNA, 19 nt, Artificial Sequence
  Description of Artificial Sequence: Synthetic oligonucleotide
  Sense strand starting at position 967 of SEQ ID NO: 1881686
uuucuuucccuggauggua

SEQ ID NO: 2063807 - RNA, 19 nt, Artificial Sequence
  Description of Artificial Sequence: Synthetic oligonucleotide
  Antisense strand to SEQ ID NO: 2063806
uaccauccagggaaagaaa

SEQ ID NO: 2063808 - RNA, 19 nt, Artificial Sequence
  Description of Artificial Sequence: Synthetic oligonucleotide
  Sense strand starting at position 997 of SEQ ID NO: 1881686
agaugcugacuuugauaca

SEQ ID NO: 2063809 - RNA, 19 nt, Artificial Sequence
  Description of Artificial Sequence: Synthetic oligonucleotide
  Antisense strand to SEQ ID NO: 2063808
uguaucaaagucagcaucu

SEQ ID NO: 2063810 - RNA, 19 nt, Artificial Sequence
  Description of Artificial Sequence: Synthetic oligonucleotide
  Sense strand starting at position 1090 of SEQ ID NO: 1881686
cuguuaguacucuacccau

SEQ ID NO: 2063811 - RNA, 19 nt, Artificial Sequence
  Description of Artificial Sequence: Synthetic oligonucleotide
  Antisense strand to SEQ ID NO: 2063810
auggguagaguacuaacag

SEQ ID NO: 2063812 - RNA, 19 nt, Artificial Sequence
  Description of Artificial Sequence: Synthetic oligonucleotide
  Sense strand starting at position 1118 of SEQ ID NO: 1881686
gguuucuuugccguuguca

SEQ ID NO: 2063813 - RNA, 19 nt, Artificial Sequence
  Description of Artificial Sequence: Synthetic oligonucleotide
  Antisense strand to SEQ ID NO: 2063812
ugacaacggcaaagaaacc

SEQ ID NO: 2063814 - RNA, 19 nt, Artificial Sequence
  Description of Artificial Sequence: Synthetic oligonucleotide
  Sense strand starting at position 1119 of SEQ ID NO: 1881686
guuucuuugccguugucau

SEQ ID NO: 2063815 - RNA, 19 nt, Artificial Sequence
  Description of Artificial Sequence: Synthetic oligonucleotide
  Antisense strand to SEQ ID NO: 2063814
augacaacggcaaagaaac

SEQ ID NO: 2063816 - RNA, 19 nt, Artificial Sequence
  Description of Artificial Sequence: Synthetic oligonucleotide
  Sense strand starting at position 1183 of SEQ ID NO: 1881686
gugucucuugguagacgga

SEQ ID NO: 2063817 - RNA, 19 nt, Artificial Sequence
  Description of Artificial Sequence: Synthetic oligonucleotide
  Antisense strand to SEQ ID NO: 2063816
uccgucuaccaagagacac

SEQ ID NO: 2063818 - RNA, 19 nt, Artificial Sequence
  Description of Artificial Sequence: Synthetic oligonucleotide
  Sense strand starting at position 1193 of SEQ ID NO: 1881686
guagacggaugcuuucaaa

SEQ ID NO: 2063819 - RNA, 19 nt, Artificial Sequence
  Description of Artificial Sequence: Synthetic oligonucleotide
  Antisense strand to SEQ ID NO: 2063818
uuugaaagcauccgucuac

SEQ ID NO: 2063820 - RNA, 19 nt, Artificial Sequence
  Description of Artificial Sequence: Synthetic oligonucleotide
  Sense strand starting at position 1299 of SEQ ID NO: 1881686
agcaaugucuggucagaga

SEQ ID NO: 2063821 - RNA, 19 nt, Artificial Sequence
  Description of Artificial Sequence: Synthetic oligonucleotide
  Antisense strand to SEQ ID NO: 2063820
ucucugaccagacauugcu

SEQ ID NO: 2063822 - RNA, 19 nt, Artificial Sequence
  Description of Artificial Sequence: Synthetic oligonucleotide
  Sense strand starting at position 1337 of SEQ ID NO: 1881686
gccacuugacuucggagaa

SEQ ID NO: 2063823 - RNA, 19 nt, Artificial Sequence
  Description of Artificial Sequence: Synthetic oligonucleotide
  Antisense strand to SEQ ID NO: 2063822
uucuccgaagucaaguggc

SEQ ID NO: 2063824 - RNA, 19 nt, Artificial Sequence
  Description of Artificial Sequence: Synthetic oligonucleotide
  Sense strand starting at position 1511 of SEQ ID NO: 1881686
auccaaguccugcaugaaa

SEQ ID NO: 2063825 - RNA, 19 nt, Artificial Sequence
  Description of Artificial Sequence: Synthetic oligonucleotide
  Antisense strand to SEQ ID NO: 2063824
uuucaugcaggacuuggau

SEQ ID NO: 2063826 - RNA, 19 nt, Artificial Sequence
  Description of Artificial Sequence: Synthetic oligonucleotide
  Sense strand starting at position 1513 of SEQ ID NO: 1881686
ccaaguccugcaugaaaca

SEQ ID NO: 2063827 - RNA, 19 nt, Artificial Sequence
  Description of Artificial Sequence: Synthetic oligonucleotide
  Antisense strand to SEQ ID NO: 2063826
uguuucaugcaggacuugg

SEQ ID NO: 2063828 - RNA, 19 nt, Artificial Sequence
  Description of Artificial Sequence: Synthetic oligonucleotide
  Sense strand starting at position 1674 of SEQ ID NO: 1881686
ucagaagguugauuaguuu

SEQ ID NO: 2063829 - RNA, 19 nt, Artificial Sequence
  Description of Artificial Sequence: Synthetic oligonucleotide
  Antisense strand to SEQ ID NO: 2063828
aaacuaaucaaccuucuga

SEQ ID NO: 2063830 - RNA, 19 nt, Artificial Sequence
  Description of Artificial Sequence: Synthetic oligonucleotide
  Sense strand starting at position 1767 of SEQ ID NO: 1881686
ugaaguccaguauggguua

SEQ ID NO: 2063831 - RNA, 19 nt, Artificial Sequence
  Description of Artificial Sequence: Synthetic oligonucleotide
  Antisense strand to SEQ ID NO: 2063830
uaacccauacuggacuuca

SEQ ID NO: 2063832 - RNA, 19 nt, Artificial Sequence
  Description of Artificial Sequence: Synthetic oligonucleotide
  Sense strand starting at position 1849 of SEQ ID NO: 1881686
gggaaagaguguuuccuua

SEQ ID NO: 2063833 - RNA, 19 nt, Artificial Sequence
  Description of Artificial Sequence: Synthetic oligonucleotide
  Antisense strand to SEQ ID NO: 2063832
uaaggaaacacucuuuccc

SEQ ID NO: 2063834 - RNA, 19 nt, Artificial Sequence
  Description of Artificial Sequence: Synthetic oligonucleotide
  Sense strand starting at position 2011 of SEQ ID NO: 1881686
uccugauuacauugagccu

SEQ ID NO: 2063835 - RNA, 19 nt, Artificial Sequence
  Description of Artificial Sequence: Synthetic oligonucleotide
  Antisense strand to SEQ ID NO: 2063834
aggcucaauguaaucagga

SEQ ID NO: 2063836 - RNA, 19 nt, Artificial Sequence
  Description of Artificial Sequence: Synthetic oligonucleotide
  Sense strand starting at position 2032 of SEQ ID NO: 1881686
cuggauaauccaggccaau

SEQ ID NO: 2063837 - RNA, 19 nt, Artificial Sequence
  Description of Artificial Sequence: Synthetic oligonucleotide
  Antisense strand to SEQ ID NO: 2063836
auuggccuggauuauccag

SEQ ID NO: 2063838 - RNA, 19 nt, Artificial Sequence
  Description of Artificial Sequence: Synthetic oligonucleotide
  Sense strand starting at position 2302 of SEQ ID NO: 1881686
auagaugcuucugcagaaa

SEQ ID NO: 2063839 - RNA, 19 nt, Artificial Sequence
  Description of Artificial Sequence: Synthetic oligonucleotide
  Antisense strand to SEQ ID NO: 2063838
uuucugcagaagcaucuau

SEQ ID NO: 2063840 - RNA, 19 nt, Artificial Sequence
  Description of Artificial Sequence: Synthetic oligonucleotide
  Sense strand starting at position 2486 of SEQ ID NO: 1881686
cugcuuaucuuccugaaag

SEQ ID NO: 2063841 - RNA, 19 nt, Artificial Sequence
  Description of Artificial Sequence: Synthetic oligonucleotide
  Antisense strand to SEQ ID NO: 2063840
cuuucaggaagauaagcag

SEQ ID NO: 2063842 - RNA, 19 nt, Artificial Sequence
  Description of Artificial Sequence: Synthetic oligonucleotide
  Sense strand starting at position 2488 of SEQ ID NO: 1881686
gcuuaucuuccugaaaguu

SEQ ID NO: 2063843 - RNA, 19 nt, Artificial Sequence
  Description of Artificial Sequence: Synthetic oligonucleotide
  Antisense strand to SEQ ID NO: 2063842
aacuuucaggaagauaagc

SEQ ID NO: 2063844 - RNA, 19 nt, Artificial Sequence
  Description of Artificial Sequence: Synthetic oligonucleotide
  Sense strand starting at position 3675 of SEQ ID NO: 1881686
ggacaucuucuggguagag

SEQ ID NO: 2063845 - RNA, 19 nt, Artificial Sequence
  Description of Artificial Sequence: Synthetic oligonucleotide
  Antisense strand to SEQ ID NO: 2063844
cucuacccagaagaugucc

SEQ ID NO: 2063846 - RNA, 19 nt, Artificial Sequence
  Description of Artificial Sequence: Synthetic oligonucleotide
  Sense strand starting at position 3676 of SEQ ID NO: 1881686
gacaucuucuggguagaga

SEQ ID NO: 2063847 - RNA, 19 nt, Artificial Sequence
  Description of Artificial Sequence: Synthetic oligonucleotide
  Antisense strand to SEQ ID NO: 2063846
ucucuacccagaagauguc

SEQ ID NO: 2063848 - RNA, 19 nt, Artificial Sequence
  Description of Artificial Sequence: Synthetic oligonucleotide
  Sense strand starting at position 3785 of SEQ ID NO: 1881686
guuagaucagauggcagaa

SEQ ID NO: 2063849 - RNA, 19 nt, Artificial Sequence
  Description of Artificial Sequence: Synthetic oligonucleotide
  Antisense strand to SEQ ID NO: 2063848
uucugccaucugaucuaac

SEQ ID NO: 2063850 - RNA, 19 nt, Artificial Sequence
  Description of Artificial Sequence: Synthetic oligonucleotide
  Sense strand starting at position 144 of SEQ ID NO: 1881687
ccagguaaauaacuguaua

SEQ ID NO: 2063851 - RNA, 19 nt, Artificial Sequence
  Description of Artificial Sequence: Synthetic oligonucleotide
  Antisense strand to SEQ ID NO: 2063850
uauacaguuauuuaccugg

SEQ ID NO: 2063852 - RNA, 19 nt, Artificial Sequence
  Description of Artificial Sequence: Synthetic oligonucleotide
  Sense strand starting at position 253 of SEQ ID NO: 1881687
ucuagcuaucaggauacca

SEQ ID NO: 2063853 - RNA, 19 nt, Artificial Sequence
  Description of Artificial Sequence: Synthetic oligonucleotide
  Antisense strand to SEQ ID NO: 2063852
ugguauccugauagcuaga

SEQ ID NO: 2063854 - RNA, 19 nt, Artificial Sequence
  Description of Artificial Sequence: Synthetic oligonucleotide
  Sense strand starting at position 481 of SEQ ID NO: 1881687
ccuggacagagaugcaauu

SEQ ID NO: 2063855 - RNA, 19 nt, Artificial Sequence
  Description of Artificial Sequence: Synthetic oligonucleotide
  Antisense strand to SEQ ID NO: 2063854
aauugcaucucuguccagg

SEQ ID NO: 2063856 - RNA, 19 nt, Artificial Sequence
  Description of Artificial Sequence: Synthetic oligonucleotide
  Sense strand starting at position 556 of SEQ ID NO: 1881687
gagauaauaugaguuguaa

SEQ ID NO: 2063857 - RNA, 19 nt, Artificial Sequence
  Description of Artificial Sequence: Synthetic oligonucleotide
  Antisense strand to SEQ ID NO: 2063856
uuacaacucauauuaucuc

SEQ ID NO: 2063858 - RNA, 19 nt, Artificial Sequence
  Description of Artificial Sequence: Synthetic oligonucleotide
  Sense strand starting at position 584 of SEQ ID NO: 1881687
gaugcuagaugucuagaau

SEQ ID NO: 2063859 - RNA, 19 nt, Artificial Sequence
  Description of Artificial Sequence: Synthetic oligonucleotide
  Antisense strand to SEQ ID NO: 2063858
auucuagacaucuagcauc

SEQ ID NO: 2063860 - RNA, 19 nt, Artificial Sequence
  Description of Artificial Sequence: Synthetic oligonucleotide
  Sense strand starting at position 585 of SEQ ID NO: 1881687
augcuagaugucuagaauc

SEQ ID NO: 2063861 - RNA, 19 nt, Artificial Sequence
  Description of Artificial Sequence: Synthetic oligonucleotide
  Antisense strand to SEQ ID NO: 2063860
gauucuagacaucuagcau

SEQ ID NO: 2063862 - RNA, 19 nt, Artificial Sequence
  Description of Artificial Sequence: Synthetic oligonucleotide
  Sense strand starting at position 587 of SEQ ID NO: 1881687
gcuagaugucuagaaucau

SEQ ID NO: 2063863 - RNA, 19 nt, Artificial Sequence
  Description of Artificial Sequence: Synthetic oligonucleotide
  Antisense strand to SEQ ID NO: 2063862
augauucuagacaucuagc

SEQ ID NO: 2063864 - RNA, 19 nt, Artificial Sequence
  Description of Artificial Sequence: Synthetic oligonucleotide
  Sense strand starting at position 707 of SEQ ID NO: 1881687
auaucugugguuuaggaca

SEQ ID NO: 2063865 - RNA, 19 nt, Artificial Sequence
  Description of Artificial Sequence: Synthetic oligonucleotide
  Antisense strand to SEQ ID NO: 2063864
uguccuaaaccacagauau

SEQ ID NO: 2063866 - RNA, 19 nt, Artificial Sequence
  Description of Artificial Sequence: Synthetic oligonucleotide
  Sense strand starting at position 731 of SEQ ID NO: 1881687
ucucgagugauccauagug

SEQ ID NO: 2063867 - RNA, 19 nt, Artificial Sequence
  Description of Artificial Sequence: Synthetic oligonucleotide
  Antisense strand to SEQ ID NO: 2063866
cacuauggaucacucgaga

SEQ ID NO: 2063868 - RNA, 19 nt, Artificial Sequence
  Description of Artificial Sequence: Synthetic oligonucleotide
  Sense strand starting at position 733 of SEQ ID NO: 1881687
ucgagugauccauagugaa

SEQ ID NO: 2063869 - RNA, 19 nt, Artificial Sequence
  Description of Artificial Sequence: Synthetic oligonucleotide
  Antisense strand to SEQ ID NO: 2063868
uucacuauggaucacucga

SEQ ID NO: 2063870 - RNA, 19 nt, Artificial Sequence
  Description of Artificial Sequence: Synthetic oligonucleotide
  Sense strand starting at position 743 of SEQ ID NO: 1881687
cauagugaaggaugacuuu

SEQ ID NO: 2063871 - RNA, 19 nt, Artificial Sequence
  Description of Artificial Sequence: Synthetic oligonucleotide
  Antisense strand to SEQ ID NO: 2063870
aaagucauccuucacuaug

SEQ ID NO: 2063872 - RNA, 19 nt, Artificial Sequence
  Description of Artificial Sequence: Synthetic oligonucleotide
  Sense strand starting at position 1059 of SEQ ID NO: 1881687
guaaguaaagcagauaucu

SEQ ID NO: 2063873 - RNA, 19 nt, Artificial Sequence
  Description of Artificial Sequence: Synthetic oligonucleotide
  Antisense strand to SEQ ID NO: 2063872
agauaucugcuuuacuuac

SEQ ID NO: 2063874 - RNA, 19 nt, Artificial Sequence
  Description of Artificial Sequence: Synthetic oligonucleotide
  Sense strand starting at position 1072 of SEQ ID NO: 1881687
auaucucucuagguuaaug

SEQ ID NO: 2063875 - RNA, 19 nt, Artificial Sequence
  Description of Artificial Sequence: Synthetic oligonucleotide
  Antisense strand to SEQ ID NO: 2063874
cauuaaccuagagagauau

SEQ ID NO: 2063876 - RNA, 19 nt, Artificial Sequence
  Description of Artificial Sequence: Synthetic oligonucleotide
  Sense strand starting at position 1272 of SEQ ID NO: 1881687
cuuggauucuaagaauuuc

SEQ ID NO: 2063877 - RNA, 19 nt, Artificial Sequence
  Description of Artificial Sequence: Synthetic oligonucleotide
  Antisense strand to SEQ ID NO: 2063876
gaaauucuuagaauccaag

SEQ ID NO: 2063878 - RNA, 19 nt, Artificial Sequence
  Description of Artificial Sequence: Synthetic oligonucleotide
  Sense strand starting at position 1387 of SEQ ID NO: 1881687
agacauacugaguguuacu

SEQ ID NO: 2063879 - RNA, 19 nt, Artificial Sequence
  Description of Artificial Sequence: Synthetic oligonucleotide
  Antisense strand to SEQ ID NO: 2063878
aguaacacucaguaugucu

SEQ ID NO: 2063880 - RNA, 19 nt, Artificial Sequence
  Description of Artificial Sequence: Synthetic oligonucleotide
  Sense strand starting at position 1394 of SEQ ID NO: 1881687
cugaguguuacugggaaga

SEQ ID NO: 2063881 - RNA, 19 nt, Artificial Sequence
  Description of Artificial Sequence: Synthetic oligonucleotide
  Antisense strand to SEQ ID NO: 2063880
ucuucccaguaacacucag

SEQ ID NO: 2063882 - RNA, 19 nt, Artificial Sequence
  Description of Artificial Sequence: Synthetic oligonucleotide
  Sense strand starting at position 1607 of SEQ ID NO: 1881687
cuccaauaugacugagauc

SEQ ID NO: 2063883 - RNA, 19 nt, Artificial Sequence
  Description of Artificial Sequence: Synthetic oligonucleotide
  Antisense strand to SEQ ID NO: 2063882
gaucucagucauauuggag

SEQ ID NO: 2063884 - RNA, 19 nt, Artificial Sequence
  Description of Artificial Sequence: Synthetic oligonucleotide
  Sense strand starting at position 1616 of SEQ ID NO: 1881687
gacugagaucuuggcauau

SEQ ID NO: 2063885 - RNA, 19 nt, Artificial Sequence
  Description of Artificial Sequence: Synthetic oligonucleotide
  Antisense strand to SEQ ID NO: 2063884
auaugccaagaucucaguc

SEQ ID NO: 2063886 - RNA, 19 nt, Artificial Sequence
  Description of Artificial Sequence: Synthetic oligonucleotide
  Sense strand starting at position 1700 of SEQ ID NO: 1881687
gcucaacaucuagagucau

SEQ ID NO: 2063887 - RNA, 19 nt, Artificial Sequence
  Description of Artificial Sequence: Synthetic oligonucleotide
  Antisense strand to SEQ ID NO: 2063886
augacucuagauguugagc

SEQ ID NO: 2063888 - RNA, 19 nt, Artificial Sequence
  Description of Artificial Sequence: Synthetic oligonucleotide
  Sense strand starting at position 1879 of SEQ ID NO: 1881687
gguuguggucacaguggua

SEQ ID NO: 2063889 - RNA, 19 nt, Artificial Sequence
  Description of Artificial Sequence: Synthetic oligonucleotide
  Antisense strand to SEQ ID NO: 2063888
uaccacugugaccacaacc

SEQ ID NO: 2063890 - RNA, 19 nt, Artificial Sequence
  Description of Artificial Sequence: Synthetic oligonucleotide
  Sense strand starting at position 1930 of SEQ ID NO: 1881687
gcacuaaggaaauguguga

SEQ ID NO: 2063891 - RNA, 19 nt, Artificial Sequence
  Description of Artificial Sequence: Synthetic oligonucleotide
  Antisense strand to SEQ ID NO: 2063890
ucacacauuuccuuagugc

SEQ ID NO: 2063892 - RNA, 19 nt, Artificial Sequence
  Description of Artificial Sequence: Synthetic oligonucleotide
  Sense strand starting at position 1934 of SEQ ID NO: 1881687
uaaggaaaugugugauacu

SEQ ID NO: 2063893 - RNA, 19 nt, Artificial Sequence
  Description of Artificial Sequence: Synthetic oligonucleotide
  Antisense strand to SEQ ID NO: 2063892
aguaucacacauuuccuua

SEQ ID NO: 2063894 - RNA, 19 nt, Artificial Sequence
  Description of Artificial Sequence: Synthetic oligonucleotide
  Sense strand starting at position 2047 of SEQ ID NO: 1881687
uggagaugacaguguguga

SEQ ID NO: 2063895 - RNA, 19 nt, Artificial Sequence
  Description of Artificial Sequence: Synthetic oligonucleotide
  Antisense strand to SEQ ID NO: 2063894
ucacacacugucaucucca

SEQ ID NO: 2063896 - RNA, 19 nt, Artificial Sequence
  Description of Artificial Sequence: Synthetic oligonucleotide
  Sense strand starting at position 2067 of SEQ ID NO: 1881687
aucugaggcuaugucauaa

SEQ ID NO: 2063897 - RNA, 19 nt, Artificial Sequence
  Description of Artificial Sequence: Synthetic oligonucleotide
  Antisense strand to SEQ ID NO: 2063896
uuaugacauagccucagau

SEQ ID NO: 2063898 - RNA, 19 nt, Artificial Sequence
  Description of Artificial Sequence: Synthetic oligonucleotide
  Sense strand starting at position 2105 of SEQ ID NO: 1881687
cuguuucugggagaaguca

SEQ ID NO: 2063899 - RNA, 19 nt, Artificial Sequence
  Description of Artificial Sequence: Synthetic oligonucleotide
  Antisense strand to SEQ ID NO: 2063898
ugacuucucccagaaacag

SEQ ID NO: 2063900 - RNA, 19 nt, Artificial Sequence
  Description of Artificial Sequence: Synthetic oligonucleotide
  Sense strand starting at position 2220 of SEQ ID NO: 1881687
aaaugacggucuuuggaaa

SEQ ID NO: 2063901 - RNA, 19 nt, Artificial Sequence
  Description of Artificial Sequence: Synthetic oligonucleotide
  Antisense strand to SEQ ID NO: 2063900
uuuccaaagaccgucauuu

SEQ ID NO: 2063902 - RNA, 19 nt, Artificial Sequence
  Description of Artificial Sequence: Synthetic oligonucleotide
  Sense strand starting at position 2367 of SEQ ID NO: 1881687
agagaauaaaugugguugu

SEQ ID NO: 2063903 - RNA, 19 nt, Artificial Sequence
  Description of Artificial Sequence: Synthetic oligonucleotide
  Antisense strand to SEQ ID NO: 2063902
acaaccacauuuauucucu

SEQ ID NO: 2063904 - RNA, 19 nt, Artificial Sequence
  Description of Artificial Sequence: Synthetic oligonucleotide
  Sense strand starting at position 2483 of SEQ ID NO: 1881687
gguguuaugauagaaguag

SEQ ID NO: 2063905 - RNA, 19 nt, Artificial Sequence
  Description of Artificial Sequence: Synthetic oligonucleotide
  Antisense strand to SEQ ID NO: 2063904
cuacuucuaucauaacacc

SEQ ID NO: 2063906 - RNA, 19 nt, Artificial Sequence
  Description of Artificial Sequence: Synthetic oligonucleotide
  Sense strand starting at position 2499 of SEQ ID NO: 1881687
uagaauacaagguguggua

SEQ ID NO: 2063907 - RNA, 19 nt, Artificial Sequence
  Description of Artificial Sequence: Synthetic oligonucleotide
  Antisense strand to SEQ ID NO: 2063906
uaccacaccuuguauucua

SEQ ID NO: 2063908 - RNA, 19 nt, Artificial Sequence
  Description of Artificial Sequence: Synthetic oligonucleotide
  Sense strand starting at position 2784 of SEQ ID NO: 1881687
gagaauugggcucacccuu

SEQ ID NO: 2063909 - RNA, 19 nt, Artificial Sequence
  Description of Artificial Sequence: Synthetic oligonucleotide
  Antisense strand to SEQ ID NO: 2063908
aagggugagcccaauucuc

SEQ ID NO: 2063910 - RNA, 19 nt, Artificial Sequence
  Description of Artificial Sequence: Synthetic oligonucleotide
  Sense strand starting at position 3261 of SEQ ID NO: 1881687
cuauauuugucuuccuggu

SEQ ID NO: 2063911 - RNA, 19 nt, Artificial Sequence
  Description of Artificial Sequence: Synthetic oligonucleotide
  Antisense strand to SEQ ID NO: 2063910
accaggaagacaaauauag

SEQ ID NO: 2063912 - RNA, 19 nt, Artificial Sequence
  Description of Artificial Sequence: Synthetic oligonucleotide
  Sense strand starting at position 3263 of SEQ ID NO: 1881687
auauuugucuuccugguua

SEQ ID NO: 2063913 - RNA, 19 nt, Artificial Sequence
  Description of Artificial Sequence: Synthetic oligonucleotide
  Antisense strand to SEQ ID NO: 2063912
uaaccaggaagacaaauau

SEQ ID NO: 2063914 - RNA, 19 nt, Artificial Sequence
  Description of Artificial Sequence: Synthetic oligonucleotide
  Sense strand starting at position 3498 of SEQ ID NO: 1881687
gcuagcauuuggguuacuu

SEQ ID NO: 2063915 - RNA, 19 nt, Artificial Sequence
  Description of Artificial Sequence: Synthetic oligonucleotide
  Antisense strand to SEQ ID NO: 2063914
aaguaacccaaaugcuagc

SEQ ID NO: 2063916 - RNA, 19 nt, Artificial Sequence
  Description of Artificial Sequence: Synthetic oligonucleotide
  Sense strand starting at position 3535 of SEQ ID NO: 1881687
agacucugcaucugagagu

SEQ ID NO: 2063917 - RNA, 19 nt, Artificial Sequence
  Description of Artificial Sequence: Synthetic oligonucleotide
  Antisense strand to SEQ ID NO: 2063916
acucucagaugcagagucu

SEQ ID NO: 2063918 - RNA, 19 nt, Artificial Sequence
  Description of Artificial Sequence: Synthetic oligonucleotide
  Sense strand starting at position 3544 of SEQ ID NO: 1881687
aucugagaguucuuuaaag

SEQ ID NO: 2063919 - RNA, 19 nt, Artificial Sequence
  Description of Artificial Sequence: Synthetic oligonucleotide
  Antisense strand to SEQ ID NO: 2063918
cuuuaaagaacucucagau

SEQ ID NO: 2063920 - RNA, 19 nt, Artificial Sequence
  Description of Artificial Sequence: Synthetic oligonucleotide
  Sense strand starting at position 3552 of SEQ ID NO: 1881687
guucuuuaaagauaugggu

SEQ ID NO: 2063921 - RNA, 19 nt, Artificial Sequence
  Description of Artificial Sequence: Synthetic oligonucleotide
  Antisense strand to SEQ ID NO: 2063920
acccauaucuuuaaagaac

SEQ ID NO: 2063922 - RNA, 19 nt, Artificial Sequence
  Description of Artificial Sequence: Synthetic oligonucleotide
  Sense strand starting at position 3620 of SEQ ID NO: 1881687
aggccaauuugggagaauu

SEQ ID NO: 2063923 - RNA, 19 nt, Artificial Sequence
  Description of Artificial Sequence: Synthetic oligonucleotide
  Antisense strand to SEQ ID NO: 2063922
aauucucccaaauuggccu

SEQ ID NO: 2063924 - RNA, 19 nt, Artificial Sequence
  Description of Artificial Sequence: Synthetic oligonucleotide
  Sense strand starting at position 3628 of SEQ ID NO: 1881687
uugggagaauugcuuaaga

SEQ ID NO: 2063925 - RNA, 19 nt, Artificial Sequence
  Description of Artificial Sequence: Synthetic oligonucleotide
  Antisense strand to SEQ ID NO: 2063924
ucuuaagcaauucucccaa

SEQ ID NO: 2063926 - RNA, 19 nt, Artificial Sequence
  Description of Artificial Sequence: Synthetic oligonucleotide
  Sense strand starting at position 3923 of SEQ ID NO: 1881687
uuaauacugguuuaucagu

SEQ ID NO: 2063927 - RNA, 19 nt, Artificial Sequence
  Description of Artificial Sequence: Synthetic oligonucleotide
  Antisense strand to SEQ ID NO: 2063926
acugauaaaccaguauuaa

SEQ ID NO: 2063928 - RNA, 19 nt, Artificial Sequence
  Description of Artificial Sequence: Synthetic oligonucleotide
  Sense strand starting at position 3931 of SEQ ID NO: 1881687
gguuuaucagucuagggaa

SEQ ID NO: 2063929 - RNA, 19 nt, Artificial Sequence
  Description of Artificial Sequence: Synthetic oligonucleotide
  Antisense strand to SEQ ID NO: 2063928
uucccuagacugauaaacc

SEQ ID NO: 2063930 - RNA, 19 nt, Artificial Sequence
  Description of Artificial Sequence: Synthetic oligonucleotide
  Sense strand starting at position 310 of SEQ ID NO: 1881688
ugguuaaucaagugacaga

SEQ ID NO: 2063931 - RNA, 19 nt, Artificial Sequence
  Description of Artificial Sequence: Synthetic oligonucleotide
  Antisense strand to SEQ ID NO: 2063930
ucugucacuugauuaacca

SEQ ID NO: 2063932 - RNA, 19 nt, Artificial Sequence
  Description of Artificial Sequence: Synthetic oligonucleotide
  Sense strand starting at position 321 of SEQ ID NO: 1881688
gugacagaauccuugcauu

SEQ ID NO: 2063933 - RNA, 19 nt, Artificial Sequence
  Description of Artificial Sequence: Synthetic oligonucleotide
  Antisense strand to SEQ ID NO: 2063932
aaugcaaggauucugucac

SEQ ID NO: 2063934 - RNA, 19 nt, Artificial Sequence
  Description of Artificial Sequence: Synthetic oligonucleotide
  Sense strand starting at position 340 of SEQ ID NO: 1881688
cugaauagaugauauacaa

SEQ ID NO: 2063935 - RNA, 19 nt, Artificial Sequence
  Description of Artificial Sequence: Synthetic oligonucleotide
  Antisense strand to SEQ ID NO: 2063934
uuguauaucaucuauucag

SEQ ID NO: 2063936 - RNA, 19 nt, Artificial Sequence
  Description of Artificial Sequence: Synthetic oligonucleotide
  Sense strand starting at position 412 of SEQ ID NO: 1881688
uaaacagggcguuaaauau

SEQ ID NO: 2063937 - RNA, 19 nt, Artificial Sequence
  Description of Artificial Sequence: Synthetic oligonucleotide
  Antisense strand to SEQ ID NO: 2063936
auauuuaacgcccuguuua

SEQ ID NO: 2063938 - RNA, 19 nt, Artificial Sequence
  Description of Artificial Sequence: Synthetic oligonucleotide
  Sense strand starting at position 607 of SEQ ID NO: 1881688
cugcccuggcuuuaugaaa

SEQ ID NO: 2063939 - RNA, 19 nt, Artificial Sequence
  Description of Artificial Sequence: Synthetic oligonucleotide
  Antisense strand to SEQ ID NO: 2063938
uuucauaaagccagggcag

SEQ ID NO: 2063940 - RNA, 19 nt, Artificial Sequence
  Description of Artificial Sequence: Synthetic oligonucleotide
  Sense strand starting at position 663 of SEQ ID NO: 1881688
ggaacuugcaucugagagu

SEQ ID NO: 2063941 - RNA, 19 nt, Artificial Sequence
  Description of Artificial Sequence: Synthetic oligonucleotide
  Antisense strand to SEQ ID NO: 2063940
acucucagaugcaaguucc

SEQ ID NO: 2063942 - RNA, 19 nt, Artificial Sequence
  Description of Artificial Sequence: Synthetic oligonucleotide
  Sense strand starting at position 709 of SEQ ID NO: 1881688
agcugaaaguaauucucau

SEQ ID NO: 2063943 - RNA, 19 nt, Artificial Sequence
  Description of Artificial Sequence: Synthetic oligonucleotide
  Antisense strand to SEQ ID NO: 2063942
augagaauuacuuucagcu

SEQ ID NO: 2063944 - RNA, 19 nt, Artificial Sequence
  Description of Artificial Sequence: Synthetic oligonucleotide
  Sense strand starting at position 737 of SEQ ID NO: 1881688
aggauuaagucguuuccag

SEQ ID NO: 2063945 - RNA, 19 nt, Artificial Sequence
  Description of Artificial Sequence: Synthetic oligonucleotide
  Antisense strand to SEQ ID NO: 2063944
cuggaaacgacuuaauccu

SEQ ID NO: 2063946 - RNA, 19 nt, Artificial Sequence
  Description of Artificial Sequence: Synthetic oligonucleotide
  Sense strand starting at position 970 of SEQ ID NO: 1881688
aauuaaugcggcugauaua

SEQ ID NO: 2063947 - RNA, 19 nt, Artificial Sequence
  Description of Artificial Sequence: Synthetic oligonucleotide
  Antisense strand to SEQ ID NO: 2063946
uauaucagccgcauuaauu

SEQ ID NO: 2063948 - RNA, 19 nt, Artificial Sequence
  Description of Artificial Sequence: Synthetic oligonucleotide
  Sense strand starting at position 971 of SEQ ID NO: 1881688
auuaaugcggcugauauau

SEQ ID NO: 2063949 - RNA, 19 nt, Artificial Sequence
  Description of Artificial Sequence: Synthetic oligonucleotide
  Antisense strand to SEQ ID NO: 2063948
auauaucagccgcauuaau

SEQ ID NO: 2063950 - RNA, 19 nt, Artificial Sequence
  Description of Artificial Sequence: Synthetic oligonucleotide
  Sense strand starting at position 1015 of SEQ ID NO: 1881688
cccaaaucugaguaaaguc

SEQ ID NO: 2063951 - RNA, 19 nt, Artificial Sequence
  Description of Artificial Sequence: Synthetic oligonucleotide
  Antisense strand to SEQ ID NO: 2063950
gacuuuacucagauuuggg

SEQ ID NO: 2063952 - RNA, 19 nt, Artificial Sequence
  Description of Artificial Sequence: Synthetic oligonucleotide
  Sense strand starting at position 1072 of SEQ ID NO: 1881688
gaggcaguucuugaacuuc

SEQ ID NO: 2063953 - RNA, 19 nt, Artificial Sequence
  Description of Artificial Sequence: Synthetic oligonucleotide
  Antisense strand to SEQ ID NO: 2063952
gaaguucaagaacugccuc

SEQ ID NO: 2063954 - RNA, 19 nt, Artificial Sequence
  Description of Artificial Sequence: Synthetic oligonucleotide
  Sense strand starting at position 1091 of SEQ ID NO: 1881688
uaacuuuagcaaugagcga

SEQ ID NO: 2063955 - RNA, 19 nt, Artificial Sequence
  Description of Artificial Sequence: Synthetic oligonucleotide
  Antisense strand to SEQ ID NO: 2063954
ucgcucauugcuaaaguua

SEQ ID NO: 2063956 - RNA, 19 nt, Artificial Sequence
  Description of Artificial Sequence: Synthetic oligonucleotide
  Sense strand starting at position 1115 of SEQ ID NO: 1881688
caaugugcauuugaaauga

SEQ ID NO: 2063957 - RNA, 19 nt, Artificial Sequence
  Description of Artificial Sequence: Synthetic oligonucleotide
  Antisense strand to SEQ ID NO: 2063956
ucauuucaaaugcacauug

SEQ ID NO: 2063958 - RNA, 19 nt, Artificial Sequence
  Description of Artificial Sequence: Synthetic oligonucleotide
  Sense strand starting at position 1119 of SEQ ID NO: 1881688
gugcauuugaaaugacguu

SEQ ID NO: 2063959 - RNA, 19 nt, Artificial Sequence
  Description of Artificial Sequence: Synthetic oligonucleotide
  Antisense strand to SEQ ID NO: 2063958
aacgucauuucaaaugcac

SEQ ID NO: 2063960 - RNA, 19 nt, Artificial Sequence
  Description of Artificial Sequence: Synthetic oligonucleotide
  Sense strand starting at position 1262 of SEQ ID NO: 1881688
cgcacauuugcauguaaug

SEQ ID NO: 2063961 - RNA, 19 nt, Artificial Sequence
  Description of Artificial Sequence: Synthetic oligonucleotide
  Antisense strand to SEQ ID NO: 2063960
cauuacaugcaaaugugcg

SEQ ID NO: 2063962 - RNA, 19 nt, Artificial Sequence
  Description of Artificial Sequence: Synthetic oligonucleotide
  Sense strand starting at position 1474 of SEQ ID NO: 1881688
ggcagaugucagcaggaga

SEQ ID NO: 2063963 - RNA, 19 nt, Artificial Sequence
  Description of Artificial Sequence: Synthetic oligonucleotide
  Antisense strand to SEQ ID NO: 2063962
ucuccugcugacaucugcc

SEQ ID NO: 2063964 - RNA, 19 nt, Artificial Sequence
  Description of Artificial Sequence: Synthetic oligonucleotide
  Sense strand starting at position 1633 of SEQ ID NO: 1881688
cagagaaucgcaggguagu

SEQ ID NO: 2063965 - RNA, 19 nt, Artificial Sequence
  Description of Artificial Sequence: Synthetic oligonucleotide
  Antisense strand to SEQ ID NO: 2063964
acuacccugcgauucucug

SEQ ID NO: 2063966 - RNA, 19 nt, Artificial Sequence
  Description of Artificial Sequence: Synthetic oligonucleotide
  Sense strand starting at position 1742 of SEQ ID NO: 1881688
ccaguuucccaagguuuaa

SEQ ID NO: 2063967 - RNA, 19 nt, Artificial Sequence
  Description of Artificial Sequence: Synthetic oligonucleotide
  Antisense strand to SEQ ID NO: 2063966
uuaaaccuugggaaacugg

SEQ ID NO: 2063968 - RNA, 19 nt, Artificial Sequence
  Description of Artificial Sequence: Synthetic oligonucleotide
  Sense strand starting at position 1951 of SEQ ID NO: 1881688
agcaguuucugaucaauaa

SEQ ID NO: 2063969 - RNA, 19 nt, Artificial Sequence
  Description of Artificial Sequence: Synthetic oligonucleotide
  Antisense strand to SEQ ID NO: 2063968
uuauugaucagaaacugcu

SEQ ID NO: 2063970 - RNA, 19 nt, Artificial Sequence
  Description of Artificial Sequence: Synthetic oligonucleotide
  Sense strand starting at position 1952 of SEQ ID NO: 1881688
gcaguuucugaucaauaac

SEQ ID NO: 2063971 - RNA, 19 nt, Artificial Sequence
  Description of Artificial Sequence: Synthetic oligonucleotide
  Antisense strand to SEQ ID NO: 2063970
guuauugaucagaaacugc

SEQ ID NO: 2063972 - RNA, 19 nt, Artificial Sequence
  Description of Artificial Sequence: Synthetic oligonucleotide
  Sense strand starting at position 2802 of SEQ ID NO: 1881688
aagggugcugcagaaguaa

SEQ ID NO: 2063973 - RNA, 19 nt, Artificial Sequence
  Description of Artificial Sequence: Synthetic oligonucleotide
  Antisense strand to SEQ ID NO: 2063972
uuacuucugcagcacccuu

SEQ ID NO: 2063974 - RNA, 19 nt, Artificial Sequence
  Description of Artificial Sequence: Synthetic oligonucleotide
  Sense strand starting at position 2810 of SEQ ID NO: 1881688
ugcagaaguaagugggaaa

SEQ ID NO: 2063975 - RNA, 19 nt, Artificial Sequence
  Description of Artificial Sequence: Synthetic oligonucleotide
  Antisense strand to SEQ ID NO: 2063974
uuucccacuuacuucugca

SEQ ID NO: 2063976 - RNA, 19 nt, Artificial Sequence
  Description of Artificial Sequence: Synthetic oligonucleotide
  Sense strand starting at position 2813 of SEQ ID NO: 1881688
agaaguaagugggaaagaa

SEQ ID NO: 2063977 - RNA, 19 nt, Artificial Sequence
  Description of Artificial Sequence: Synthetic oligonucleotide
  Antisense strand to SEQ ID NO: 2063976
uucuuucccacuuacuucu

SEQ ID NO: 2063978 - RNA, 19 nt, Artificial Sequence
  Description of Artificial Sequence: Synthetic oligonucleotide
  Sense strand starting at position 2993 of SEQ ID NO: 1881688
uccguaaagcaggacaaau

SEQ ID NO: 2063979 - RNA, 19 nt, Artificial Sequence
  Description of Artificial Sequence: Synthetic oligonucleotide
  Antisense strand to SEQ ID NO: 2063978
auuuguccugcuuuacgga

SEQ ID NO: 2063980 - RNA, 19 nt, Artificial Sequence
  Description of Artificial Sequence: Synthetic oligonucleotide
  Sense strand starting at position 3286 of SEQ ID NO: 1881688
gugauagaauuguuuacau

SEQ ID NO: 2063981 - RNA, 19 nt, Artificial Sequence
  Description of Artificial Sequence: Synthetic oligonucleotide
  Antisense strand to SEQ ID NO: 2063980
auguaaacaauucuaucac

SEQ ID NO: 2063982 - RNA, 19 nt, Artificial Sequence
  Description of Artificial Sequence: Synthetic oligonucleotide
  Sense strand starting at position 3368 of SEQ ID NO: 1881688
gagagaggccgaugcuuua

SEQ ID NO: 2063983 - RNA, 19 nt, Artificial Sequence
  Description of Artificial Sequence: Synthetic oligonucleotide
  Antisense strand to SEQ ID NO: 2063982
uaaagcaucggccucucuc

SEQ ID NO: 2063984 - RNA, 19 nt, Artificial Sequence
  Description of Artificial Sequence: Synthetic oligonucleotide
  Sense strand starting at position 3406 of SEQ ID NO: 1881688
gguagucugaaaugaaaca

SEQ ID NO: 2063985 - RNA, 19 nt, Artificial Sequence
  Description of Artificial Sequence: Synthetic oligonucleotide
  Antisense strand to SEQ ID NO: 2063984
uguuucauuucagacuacc

SEQ ID NO: 2063986 - RNA, 19 nt, Artificial Sequence
  Description of Artificial Sequence: Synthetic oligonucleotide
  Sense strand starting at position 3462 of SEQ ID NO: 1881688
cuaaauaugucugugacag

SEQ ID NO: 2063987 - RNA, 19 nt, Artificial Sequence
  Description of Artificial Sequence: Synthetic oligonucleotide
  Antisense strand to SEQ ID NO: 2063986
cugucacagacauauuuag

SEQ ID NO: 2063988 - RNA, 19 nt, Artificial Sequence
  Description of Artificial Sequence: Synthetic oligonucleotide
  Sense strand starting at position 3463 of SEQ ID NO: 1881688
uaaauaugucugugacagg

SEQ ID NO: 2063989 - RNA, 19 nt, Artificial Sequence
  Description of Artificial Sequence: Synthetic oligonucleotide
  Antisense strand to SEQ ID NO: 2063988
ccugucacagacauauuua

SEQ ID NO: 2063990 - RNA, 19 nt, Artificial Sequence
  Description of Artificial Sequence: Synthetic oligonucleotide
  Sense strand starting at position 3517 of SEQ ID NO: 1881688
cauugucaauguguuaaag

SEQ ID NO: 2063991 - RNA, 19 nt, Artificial Sequence
  Description of Artificial Sequence: Synthetic oligonucleotide
  Antisense strand to SEQ ID NO: 2063990
cuuuaacacauugacaaug

SEQ ID NO: 2063992 - RNA, 19 nt, Artificial Sequence
  Description of Artificial Sequence: Synthetic oligonucleotide
  Sense strand starting at position 3621 of SEQ ID NO: 1881688
gcaggcaaaucagcaauau

SEQ ID NO: 2063993 - RNA, 19 nt, Artificial Sequence
  Description of Artificial Sequence: Synthetic oligonucleotide
  Antisense strand to SEQ ID NO: 2063992
auauugcugauuugccugc

SEQ ID NO: 2063994 - RNA, 19 nt, Artificial Sequence
  Description of Artificial Sequence: Synthetic oligonucleotide
  Sense strand starting at position 3719 of SEQ ID NO: 1881688
auagcaaugucccugaaac

SEQ ID NO: 2063995 - RNA, 19 nt, Artificial Sequence
  Description of Artificial Sequence: Synthetic oligonucleotide
  Antisense strand to SEQ ID NO: 2063994
guuucagggacauugcuau

SEQ ID NO: 2063996 - RNA, 19 nt, Artificial Sequence
  Description of Artificial Sequence: Synthetic oligonucleotide
  Sense strand starting at position 3721 of SEQ ID NO: 1881688
agcaaugucccugaaacua

SEQ ID NO: 2063997 - RNA, 19 nt, Artificial Sequence
  Description of Artificial Sequence: Synthetic oligonucleotide
  Antisense strand to SEQ ID NO: 2063996
uaguuucagggacauugcu

SEQ ID NO: 2063998 - RNA, 19 nt, Artificial Sequence
  Description of Artificial Sequence: Synthetic oligonucleotide
  Sense strand starting at position 3733 of SEQ ID NO: 1881688
gaaacuaaggaguggcauu

SEQ ID NO: 2063999 - RNA, 19 nt, Artificial Sequence
  Description of Artificial Sequence: Synthetic oligonucleotide
  Antisense strand to SEQ ID NO: 2063998
aaugccacuccuuaguuuc

SEQ ID NO: 2064000 - RNA, 19 nt, Artificial Sequence
  Description of Artificial Sequence: Synthetic oligonucleotide
  Sense strand starting at position 3796 of SEQ ID NO: 1881688
uucuucaguggugaggaaa

SEQ ID NO: 2064001 - RNA, 19 nt, Artificial Sequence
  Description of Artificial Sequence: Synthetic oligonucleotide
  Antisense strand to SEQ ID NO: 2064000
uuuccucaccacugaagaa

SEQ ID NO: 2064002 - RNA, 19 nt, Artificial Sequence
  Description of Artificial Sequence: Synthetic oligonucleotide
  Sense strand starting at position 3864 of SEQ ID NO: 1881688
agaccuuucugcuuggaau

SEQ ID NO: 2064003 - RNA, 19 nt, Artificial Sequence
  Description of Artificial Sequence: Synthetic oligonucleotide
  Antisense strand to SEQ ID NO: 2064002
auuccaagcagaaaggucu

SEQ ID NO: 2064004 - RNA, 19 nt, Artificial Sequence
  Description of Artificial Sequence: Synthetic oligonucleotide
  Sense strand starting at position 3866 of SEQ ID NO: 1881688
accuuucugcuuggaauau

SEQ ID NO: 2064005 - RNA, 19 nt, Artificial Sequence
  Description of Artificial Sequence: Synthetic oligonucleotide
  Antisense strand to SEQ ID NO: 2064004
auauuccaagcagaaaggu

SEQ ID NO: 2064006 - RNA, 19 nt, Artificial Sequence
  Description of Artificial Sequence: Synthetic oligonucleotide
  Sense strand starting at position 3878 of SEQ ID NO: 1881688
ggaauauccuagucuucuu

SEQ ID NO: 2064007 - RNA, 19 nt, Artificial Sequence
  Description of Artificial Sequence: Synthetic oligonucleotide
  Antisense strand to SEQ ID NO: 2064006
aagaagacuaggauauucc

SEQ ID NO: 2064008 - RNA, 19 nt, Artificial Sequence
  Description of Artificial Sequence: Synthetic oligonucleotide
  Sense strand starting at position 3931 of SEQ ID NO: 1881688
ccaucugucucauucuuga

SEQ ID NO: 2064009 - RNA, 19 nt, Artificial Sequence
  Description of Artificial Sequence: Synthetic oligonucleotide
  Antisense strand to SEQ ID NO: 2064008
ucaagaaugagacagaugg

SEQ ID NO: 2064010 - RNA, 19 nt, Artificial Sequence
  Description of Artificial Sequence: Synthetic oligonucleotide
  Sense strand starting at position 81 of SEQ ID NO: 1881689
agaauugguuucccuaaua

SEQ ID NO: 2064011 - RNA, 19 nt, Artificial Sequence
  Description of Artificial Sequence: Synthetic oligonucleotide
  Antisense strand to SEQ ID NO: 2064010
uauuagggaaaccaauucu

SEQ ID NO: 2064012 - RNA, 19 nt, Artificial Sequence
  Description of Artificial Sequence: Synthetic oligonucleotide
  Sense strand starting at position 142 of SEQ ID NO: 1881689
aguccaacucuggaaugua

SEQ ID NO: 2064013 - RNA, 19 nt, Artificial Sequence
  Description of Artificial Sequence: Synthetic oligonucleotide
  Antisense strand to SEQ ID NO: 2064012
uacauuccagaguuggacu

SEQ ID NO: 2064014 - RNA, 19 nt, Artificial Sequence
  Description of Artificial Sequence: Synthetic oligonucleotide
  Sense strand starting at position 145 of SEQ ID NO: 1881689
ccaacucuggaauguaagu

SEQ ID NO: 2064015 - RNA, 19 nt, Artificial Sequence
  Description of Artificial Sequence: Synthetic oligonucleotide
  Antisense strand to SEQ ID NO: 2064014
acuuacauuccagaguugg

SEQ ID NO: 2064016 - RNA, 19 nt, Artificial Sequence
  Description of Artificial Sequence: Synthetic oligonucleotide
  Sense strand starting at position 403 of SEQ ID NO: 1881689
aguagauauaacggaaacu

SEQ ID NO: 2064017 - RNA, 19 nt, Artificial Sequence
  Description of Artificial Sequence: Synthetic oligonucleotide
  Antisense strand to SEQ ID NO: 2064016
aguuuccguuauaucuacu

SEQ ID NO: 2064018 - RNA, 19 nt, Artificial Sequence
  Description of Artificial Sequence: Synthetic oligonucleotide
  Sense strand starting at position 480 of SEQ ID NO: 1881689
ugcuuacuuuacuuaggaa

SEQ ID NO: 2064019 - RNA, 19 nt, Artificial Sequence
  Description of Artificial Sequence: Synthetic oligonucleotide
  Antisense strand to SEQ ID NO: 2064018
uuccuaaguaaaguaagca

SEQ ID NO: 2064020 - RNA, 19 nt, Artificial Sequence
  Description of Artificial Sequence: Synthetic oligonucleotide
  Sense strand starting at position 547 of SEQ ID NO: 1881689
gucagauguguuuauaugu

SEQ ID NO: 2064021 - RNA, 19 nt, Artificial Sequence
  Description of Artificial Sequence: Synthetic oligonucleotide
  Antisense strand to SEQ ID NO: 2064020
acauauaaacacaucugac

SEQ ID NO: 2064022 - RNA, 19 nt, Artificial Sequence
  Description of Artificial Sequence: Synthetic oligonucleotide
  Sense strand starting at position 608 of SEQ ID NO: 1881689
gcgucuguaggauacacau

SEQ ID NO: 2064023 - RNA, 19 nt, Artificial Sequence
  Description of Artificial Sequence: Synthetic oligonucleotide
  Antisense strand to SEQ ID NO: 2064022
auguguauccuacagacgc

SEQ ID NO: 2064024 - RNA, 19 nt, Artificial Sequence
  Description of Artificial Sequence: Synthetic oligonucleotide
  Sense strand starting at position 642 of SEQ ID NO: 1881689
aaaggauguugguucccaa

SEQ ID NO: 2064025 - RNA, 19 nt, Artificial Sequence
  Description of Artificial Sequence: Synthetic oligonucleotide
  Antisense strand to SEQ ID NO: 2064024
uugggaaccaacauccuuu

SEQ ID NO: 2064026 - RNA, 19 nt, Artificial Sequence
  Description of Artificial Sequence: Synthetic oligonucleotide
  Sense strand starting at position 645 of SEQ ID NO: 1881689
ggauguugguucccaaauc

SEQ ID NO: 2064027 - RNA, 19 nt, Artificial Sequence
  Description of Artificial Sequence: Synthetic oligonucleotide
  Antisense strand to SEQ ID NO: 2064026
gauuugggaaccaacaucc

SEQ ID NO: 2064028 - RNA, 19 nt, Artificial Sequence
  Description of Artificial Sequence: Synthetic oligonucleotide
  Sense strand starting at position 717 of SEQ ID NO: 1881689
ucuguaugagcagaucaau

SEQ ID NO: 2064029 - RNA, 19 nt, Artificial Sequence
  Description of Artificial Sequence: Synthetic oligonucleotide
  Antisense strand to SEQ ID NO: 2064028
auugaucugcucauacaga

SEQ ID NO: 2064030 - RNA, 19 nt, Artificial Sequence
  Description of Artificial Sequence: Synthetic oligonucleotide
  Sense strand starting at position 830 of SEQ ID NO: 1881689
aguuuacgccuuuagguau

SEQ ID NO: 2064031 - RNA, 19 nt, Artificial Sequence
  Description of Artificial Sequence: Synthetic oligonucleotide
  Antisense strand to SEQ ID NO: 2064030
auaccuaaaggcguaaacu

SEQ ID NO: 2064032 - RNA, 19 nt, Artificial Sequence
  Description of Artificial Sequence: Synthetic oligonucleotide
  Sense strand starting at position 1030 of SEQ ID NO: 1881689
ccaaguaaagcuugacuuu

SEQ ID NO: 2064033 - RNA, 19 nt, Artificial Sequence
  Description of Artificial Sequence: Synthetic oligonucleotide
  Antisense strand to SEQ ID NO: 2064032
aaagucaagcuuuacuugg

SEQ ID NO: 2064034 - RNA, 19 nt, Artificial Sequence
  Description of Artificial Sequence: Synthetic oligonucleotide
  Sense strand starting at position 1086 of SEQ ID NO: 1881689
uuuacuuugcaucagguaa

SEQ ID NO: 2064035 - RNA, 19 nt, Artificial Sequence
  Description of Artificial Sequence: Synthetic oligonucleotide
  Antisense strand to SEQ ID NO: 2064034
uuaccugaugcaaaguaaa

SEQ ID NO: 2064036 - RNA, 19 nt, Artificial Sequence
  Description of Artificial Sequence: Synthetic oligonucleotide
  Sense strand starting at position 1130 of SEQ ID NO: 1881689
uguagcuagaguuagaagu

SEQ ID NO: 2064037 - RNA, 19 nt, Artificial Sequence
  Description of Artificial Sequence: Synthetic oligonucleotide
  Antisense strand to SEQ ID NO: 2064036
acuucuaacucuagcuaca

SEQ ID NO: 2064038 - RNA, 19 nt, Artificial Sequence
  Description of Artificial Sequence: Synthetic oligonucleotide
  Sense strand starting at position 1137 of SEQ ID NO: 1881689
agaguuagaaguugguaau

SEQ ID NO: 2064039 - RNA, 19 nt, Artificial Sequence
  Description of Artificial Sequence: Synthetic oligonucleotide
  Antisense strand to SEQ ID NO: 2064038
auuaccaacuucuaacucu

SEQ ID NO: 2064040 - RNA, 19 nt, Artificial Sequence
  Description of Artificial Sequence: Synthetic oligonucleotide
  Sense strand starting at position 1138 of SEQ ID NO: 1881689
gaguuagaaguugguaauu

SEQ ID NO: 2064041 - RNA, 19 nt, Artificial Sequence
  Description of Artificial Sequence: Synthetic oligonucleotide
  Antisense strand to SEQ ID NO: 2064040
aauuaccaacuucuaacuc

SEQ ID NO: 2064042 - RNA, 19 nt, Artificial Sequence
  Description of Artificial Sequence: Synthetic oligonucleotide
  Sense strand starting at position 1143 of SEQ ID NO: 1881689
agaaguugguaauuccuaa

SEQ ID NO: 2064043 - RNA, 19 nt, Artificial Sequence
  Description of Artificial Sequence: Synthetic oligonucleotide
  Antisense strand to SEQ ID NO: 2064042
uuaggaauuaccaacuucu

SEQ ID NO: 2064044 - RNA, 19 nt, Artificial Sequence
  Description of Artificial Sequence: Synthetic oligonucleotide
  Sense strand starting at position 1150 of SEQ ID NO: 1881689
gguaauuccuaagccaagu

SEQ ID NO: 2064045 - RNA, 19 nt, Artificial Sequence
  Description of Artificial Sequence: Synthetic oligonucleotide
  Antisense strand to SEQ ID NO: 2064044
acuuggcuuaggaauuacc

SEQ ID NO: 2064046 - RNA, 19 nt, Artificial Sequence
  Description of Artificial Sequence: Synthetic oligonucleotide
  Sense strand starting at position 1396 of SEQ ID NO: 1881689
cccaucauuuguuacggaa

SEQ ID NO: 2064047 - RNA, 19 nt, Artificial Sequence
  Description of Artificial Sequence: Synthetic oligonucleotide
  Antisense strand to SEQ ID NO: 2064046
uuccguaacaaaugauggg

SEQ ID NO: 2064048 - RNA, 19 nt, Artificial Sequence
  Description of Artificial Sequence: Synthetic oligonucleotide
  Sense strand starting at position 1565 of SEQ ID NO: 1881689
uagagcggacuuugucaaa

SEQ ID NO: 2064049 - RNA, 19 nt, Artificial Sequence
  Description of Artificial Sequence: Synthetic oligonucleotide
  Antisense strand to SEQ ID NO: 2064048
uuugacaaaguccgcucua

SEQ ID NO: 2064050 - RNA, 19 nt, Artificial Sequence
  Description of Artificial Sequence: Synthetic oligonucleotide
  Sense strand starting at position 2029 of SEQ ID NO: 1881689
cccggagagcuccaacuuu

SEQ ID NO: 2064051 - RNA, 19 nt, Artificial Sequence
  Description of Artificial Sequence: Synthetic oligonucleotide
  Antisense strand to SEQ ID NO: 2064050
aaaguuggagcucuccggg

SEQ ID NO: 2064052 - RNA, 19 nt, Artificial Sequence
  Description of Artificial Sequence: Synthetic oligonucleotide
  Sense strand starting at position 2263 of SEQ ID NO: 1881689
acgagcaucaucgauacaa

SEQ ID NO: 2064053 - RNA, 19 nt, Artificial Sequence
  Description of Artificial Sequence: Synthetic oligonucleotide
  Antisense strand to SEQ ID NO: 2064052
uuguaucgaugaugcucgu

SEQ ID NO: 2064054 - RNA, 19 nt, Artificial Sequence
  Description of Artificial Sequence: Synthetic oligonucleotide
  Sense strand starting at position 2293 of SEQ ID NO: 1881689
gcaguuucgagugcguuaa

SEQ ID NO: 2064055 - RNA, 19 nt, Artificial Sequence
  Description of Artificial Sequence: Synthetic oligonucleotide
  Antisense strand to SEQ ID NO: 2064054
uuaacgcacucgaaacugc

SEQ ID NO: 2064056 - RNA, 19 nt, Artificial Sequence
  Description of Artificial Sequence: Synthetic oligonucleotide
  Sense strand starting at position 2303 of SEQ ID NO: 1881689
gugcguuaauauuuacuua

SEQ ID NO: 2064057 - RNA, 19 nt, Artificial Sequence
  Description of Artificial Sequence: Synthetic oligonucleotide
  Antisense strand to SEQ ID NO: 2064056
uaaguaaauauuaacgcac

SEQ ID NO: 2064058 - RNA, 19 nt, Artificial Sequence
  Description of Artificial Sequence: Synthetic oligonucleotide
  Sense strand starting at position 2337 of SEQ ID NO: 1881689
uggccaaauuacuuaaugu

SEQ ID NO: 2064059 - RNA, 19 nt, Artificial Sequence
  Description of Artificial Sequence: Synthetic oligonucleotide
  Antisense strand to SEQ ID NO: 2064058
acauuaaguaauuuggcca

SEQ ID NO: 2064060 - RNA, 19 nt, Artificial Sequence
  Description of Artificial Sequence: Synthetic oligonucleotide
  Sense strand starting at position 2530 of SEQ ID NO: 1881689
ugguguuacgcguugggau

SEQ ID NO: 2064061 - RNA, 19 nt, Artificial Sequence
  Description of Artificial Sequence: Synthetic oligonucleotide
  Antisense strand to SEQ ID NO: 2064060
aucccaacgcguaacacca

SEQ ID NO: 2064062 - RNA, 19 nt, Artificial Sequence
  Description of Artificial Sequence: Synthetic oligonucleotide
  Sense strand starting at position 2642 of SEQ ID NO: 1881689
auaugauagggucguauug

SEQ ID NO: 2064063 - RNA, 19 nt, Artificial Sequence
  Description of Artificial Sequence: Synthetic oligonucleotide
  Antisense strand to SEQ ID NO: 2064062
caauacgacccuaucauau

SEQ ID NO: 2064064 - RNA, 19 nt, Artificial Sequence
  Description of Artificial Sequence: Synthetic oligonucleotide
  Sense strand starting at position 2650 of SEQ ID NO: 1881689
gggucguauugguccagga

SEQ ID NO: 2064065 - RNA, 19 nt, Artificial Sequence
  Description of Artificial Sequence: Synthetic oligonucleotide
  Antisense strand to SEQ ID NO: 2064064
uccuggaccaauacgaccc

SEQ ID NO: 2064066 - RNA, 19 nt, Artificial Sequence
  Description of Artificial Sequence: Synthetic oligonucleotide
  Sense strand starting at position 2921 of SEQ ID NO: 1881689
caucgaggagcugaacauu

SEQ ID NO: 2064067 - RNA, 19 nt, Artificial Sequence
  Description of Artificial Sequence: Synthetic oligonucleotide
  Antisense strand to SEQ ID NO: 2064066
aauguucagcuccucgaug

SEQ ID NO: 2064068 - RNA, 19 nt, Artificial Sequence
  Description of Artificial Sequence: Synthetic oligonucleotide
  Sense strand starting at position 2972 of SEQ ID NO: 1881689
gcuguaucacugcagagca

SEQ ID NO: 2064069 - RNA, 19 nt, Artificial Sequence
  Description of Artificial Sequence: Synthetic oligonucleotide
  Antisense strand to SEQ ID NO: 2064068
ugcucugcagugauacagc

SEQ ID NO: 2064070 - RNA, 19 nt, Artificial Sequence
  Description of Artificial Sequence: Synthetic oligonucleotide
  Sense strand starting at position 3088 of SEQ ID NO: 1881689
uuugguguuguguaauuau

SEQ ID NO: 2064071 - RNA, 19 nt, Artificial Sequence
  Description of Artificial Sequence: Synthetic oligonucleotide
  Antisense strand to SEQ ID NO: 2064070
auaauuacacaacaccaaa

SEQ ID NO: 2064072 - RNA, 19 nt, Artificial Sequence
  Description of Artificial Sequence: Synthetic oligonucleotide
  Sense strand starting at position 3232 of SEQ ID NO: 1881689
ucugaugaguucuuucuuu

SEQ ID NO: 2064073 - RNA, 19 nt, Artificial Sequence
  Description of Artificial Sequence: Synthetic oligonucleotide
  Antisense strand to SEQ ID NO: 2064072
aaagaaagaacucaucaga

SEQ ID NO: 2064074 - RNA, 19 nt, Artificial Sequence
  Description of Artificial Sequence: Synthetic oligonucleotide
  Sense strand starting at position 3297 of SEQ ID NO: 1881689
caggcuugaugaguuccua

SEQ ID NO: 2064075 - RNA, 19 nt, Artificial Sequence
  Description of Artificial Sequence: Synthetic oligonucleotide
  Antisense strand to SEQ ID NO: 2064074
uaggaacucaucaagccug

SEQ ID NO: 2064076 - RNA, 19 nt, Artificial Sequence
  Description of Artificial Sequence: Synthetic oligonucleotide
  Sense strand starting at position 3311 of SEQ ID NO: 1881689
uccuaaggcuuugcagaga

SEQ ID NO: 2064077 - RNA, 19 nt, Artificial Sequence
  Description of Artificial Sequence: Synthetic oligonucleotide
  Antisense strand to SEQ ID NO: 2064076
ucucugcaaagccuuagga

SEQ ID NO: 2064078 - RNA, 19 nt, Artificial Sequence
  Description of Artificial Sequence: Synthetic oligonucleotide
  Sense strand starting at position 3391 of SEQ ID NO: 1881689
gcaggaaagugcucagaag

SEQ ID NO: 2064079 - RNA, 19 nt, Artificial Sequence
  Description of Artificial Sequence: Synthetic oligonucleotide
  Antisense strand to SEQ ID NO: 2064078
cuucugagcacuuuccugc

SEQ ID NO: 2064080 - RNA, 19 nt, Artificial Sequence
  Description of Artificial Sequence: Synthetic oligonucleotide
  Sense strand starting at position 3392 of SEQ ID NO: 1881689
caggaaagugcucagaagu

SEQ ID NO: 2064081 - RNA, 19 nt, Artificial Sequence
  Description of Artificial Sequence: Synthetic oligonucleotide
  Antisense strand to SEQ ID NO: 2064080
acuucugagcacuuuccug

SEQ ID NO: 2064082 - RNA, 19 nt, Artificial Sequence
  Description of Artificial Sequence: Synthetic oligonucleotide
  Sense strand starting at position 3402 of SEQ ID NO: 1881689
cucagaagugacuguuaag

SEQ ID NO: 2064083 - RNA, 19 nt, Artificial Sequence
  Description of Artificial Sequence: Synthetic oligonucleotide
  Antisense strand to SEQ ID NO: 2064082
cuuaacagucacuucugag

SEQ ID NO: 2064084 - RNA, 19 nt, Artificial Sequence
  Description of Artificial Sequence: Synthetic oligonucleotide
  Sense strand starting at position 3441 of SEQ ID NO: 1881689
gagggagaauucuaaggaa

SEQ ID NO: 2064085 - RNA, 19 nt, Artificial Sequence
  Description of Artificial Sequence: Synthetic oligonucleotide
  Antisense strand to SEQ ID NO: 2064084
uuccuuagaauucucccuc

SEQ ID NO: 2064086 - RNA, 19 nt, Artificial Sequence
  Description of Artificial Sequence: Synthetic oligonucleotide
  Sense strand starting at position 3444 of SEQ ID NO: 1881689
ggagaauucuaaggaagaa

SEQ ID NO: 2064087 - RNA, 19 nt, Artificial Sequence
  Description of Artificial Sequence: Synthetic oligonucleotide
  Antisense strand to SEQ ID NO: 2064086
uucuuccuuagaauucucc

SEQ ID NO: 2064088 - RNA, 19 nt, Artificial Sequence
  Description of Artificial Sequence: Synthetic oligonucleotide
  Sense strand starting at position 3517 of SEQ ID NO: 1881689
guucuaagaagagguucuu

SEQ ID NO: 2064089 - RNA, 19 nt, Artificial Sequence
  Description of Artificial Sequence: Synthetic oligonucleotide
  Antisense strand to SEQ ID NO: 2064088
aagaaccucuucuuagaac

SEQ ID NO: 2064090 - RNA, 19 nt, Artificial Sequence
  Description of Artificial Sequence: Synthetic oligonucleotide
  Sense strand starting at position 287 of SEQ ID NO: 1881690
gaaaguugggcucaacuuc

SEQ ID NO: 2064091 - RNA, 19 nt, Artificial Sequence
  Description of Artificial Sequence: Synthetic oligonucleotide
  Antisense strand to SEQ ID NO: 2064090
gaaguugagcccaacuuuc

SEQ ID NO: 2064092 - RNA, 19 nt, Artificial Sequence
  Description of Artificial Sequence: Synthetic oligonucleotide
  Sense strand starting at position 386 of SEQ ID NO: 1881690
gggauucccuuccuaacuu

SEQ ID NO: 2064093 - RNA, 19 nt, Artificial Sequence
  Description of Artificial Sequence: Synthetic oligonucleotide
  Antisense strand to SEQ ID NO: 2064092
aaguuaggaagggaauccc

SEQ ID NO: 2064094 - RNA, 19 nt, Artificial Sequence
  Description of Artificial Sequence: Synthetic oligonucleotide
  Sense strand starting at position 499 of SEQ ID NO: 1881690
cuagaugcuucuucugcua

SEQ ID NO: 2064095 - RNA, 19 nt, Artificial Sequence
  Description of Artificial Sequence: Synthetic oligonucleotide
  Antisense strand to SEQ ID NO: 2064094
uagcagaagaagcaucuag

SEQ ID NO: 2064096 - RNA, 19 nt, Artificial Sequence
  Description of Artificial Sequence: Synthetic oligonucleotide
  Sense strand starting at position 597 of SEQ ID NO: 1881690
ccuccaucugguuauuagu

SEQ ID NO: 2064097 - RNA, 19 nt, Artificial Sequence
  Description of Artificial Sequence: Synthetic oligonucleotide
  Antisense strand to SEQ ID NO: 2064096
acuaauaaccagauggagg

SEQ ID NO: 2064098 - RNA, 19 nt, Artificial Sequence
  Description of Artificial Sequence: Synthetic oligonucleotide
  Sense strand starting at position 694 of SEQ ID NO: 1881690
ucuguagaguuauggauuu

SEQ ID NO: 2064099 - RNA, 19 nt, Artificial Sequence
  Description of Artificial Sequence: Synthetic oligonucleotide
  Antisense strand to SEQ ID NO: 2064098
aaauccauaacucuacaga

SEQ ID NO: 2064100 - RNA, 19 nt, Artificial Sequence
  Description of Artificial Sequence: Synthetic oligonucleotide
  Sense strand starting at position 735 of SEQ ID NO: 1881690
augucuuugcucuaguacu

SEQ ID NO: 2064101 - RNA, 19 nt, Artificial Sequence
  Description of Artificial Sequence: Synthetic oligonucleotide
  Antisense strand to SEQ ID NO: 2064100
aguacuagagcaaagacau

SEQ ID NO: 2064102 - RNA, 19 nt, Artificial Sequence
  Description of Artificial Sequence: Synthetic oligonucleotide
  Sense strand starting at position 765 of SEQ ID NO: 1881690
cuugguauuucccacacuu

SEQ ID NO: 2064103 - RNA, 19 nt, Artificial Sequence
  Description of Artificial Sequence: Synthetic oligonucleotide
  Antisense strand to SEQ ID NO: 2064102
aagugugggaaauaccaag

SEQ ID NO: 2064104 - RNA, 19 nt, Artificial Sequence
  Description of Artificial Sequence: Synthetic oligonucleotide
  Sense strand starting at position 792 of SEQ ID NO: 1881690
gcuucauuagugggugaga

SEQ ID NO: 2064105 - RNA, 19 nt, Artificial Sequence
  Description of Artificial Sequence: Synthetic oligonucleotide
  Antisense strand to SEQ ID NO: 2064104
ucucacccacuaaugaagc

SEQ ID NO: 2064106 - RNA, 19 nt, Artificial Sequence
  Description of Artificial Sequence: Synthetic oligonucleotide
  Sense strand starting at position 873 of SEQ ID NO: 1881690
agagaaauaucuugagauu

SEQ ID NO: 2064107 - RNA, 19 nt, Artificial Sequence
  Description of Artificial Sequence: Synthetic oligonucleotide
  Antisense strand to SEQ ID NO: 2064106
aaucucaagauauuucucu

SEQ ID NO: 2064108 - RNA, 19 nt, Artificial Sequence
  Description of Artificial Sequence: Synthetic oligonucleotide
  Sense strand starting at position 998 of SEQ ID NO: 1881690
cuagccuuguuggccaaau

SEQ ID NO: 2064109 - RNA, 19 nt, Artificial Sequence
  Description of Artificial Sequence: Synthetic oligonucleotide
  Antisense strand to SEQ ID NO: 2064108
auuuggccaacaaggcuag

SEQ ID NO: 2064110 - RNA, 19 nt, Artificial Sequence
  Description of Artificial Sequence: Synthetic oligonucleotide
  Sense strand starting at position 999 of SEQ ID NO: 1881690
uagccuuguuggccaaaua

SEQ ID NO: 2064111 - RNA, 19 nt, Artificial Sequence
  Description of Artificial Sequence: Synthetic oligonucleotide
  Antisense strand to SEQ ID NO: 2064110
uauuuggccaacaaggcua

SEQ ID NO: 2064112 - RNA, 19 nt, Artificial Sequence
  Description of Artificial Sequence: Synthetic oligonucleotide
  Sense strand starting at position 1000 of SEQ ID NO: 1881690
agccuuguuggccaaauaa

SEQ ID NO: 2064113 - RNA, 19 nt, Artificial Sequence
  Description of Artificial Sequence: Synthetic oligonucleotide
  Antisense strand to SEQ ID NO: 2064112
uuauuuggccaacaaggcu

SEQ ID NO: 2064114 - RNA, 19 nt, Artificial Sequence
  Description of Artificial Sequence: Synthetic oligonucleotide
  Sense strand starting at position 1089 of SEQ ID NO: 1881690
auaggaucuggcgaucaca

SEQ ID NO: 2064115 - RNA, 19 nt, Artificial Sequence
  Description of Artificial Sequence: Synthetic oligonucleotide
  Antisense strand to SEQ ID NO: 2064114
ugugaucgccagauccuau

SEQ ID NO: 2064116 - RNA, 19 nt, Artificial Sequence
  Description of Artificial Sequence: Synthetic oligonucleotide
  Sense strand starting at position 1099 of SEQ ID NO: 1881690
gcgaucacacccuaaaucu

SEQ ID NO: 2064117 - RNA, 19 nt, Artificial Sequence
  Description of Artificial Sequence: Synthetic oligonucleotide
  Antisense strand to SEQ ID NO: 2064116
agauuuagggugugaucgc

SEQ ID NO: 2064118 - RNA, 19 nt, Artificial Sequence
  Description of Artificial Sequence: Synthetic oligonucleotide
  Sense strand starting at position 1265 of SEQ ID NO: 1881690
ugacaaauguguuucuuaa

SEQ ID NO: 2064119 - RNA, 19 nt, Artificial Sequence
  Description of Artificial Sequence: Synthetic oligonucleotide
  Antisense strand to SEQ ID NO: 2064118
uuaagaaacacauuuguca

SEQ ID NO: 2064120 - RNA, 19 nt, Artificial Sequence
  Description of Artificial Sequence: Synthetic oligonucleotide
  Sense strand starting at position 1267 of SEQ ID NO: 1881690
acaaauguguuucuuaaac

SEQ ID NO: 2064121 - RNA, 19 nt, Artificial Sequence
  Description of Artificial Sequence: Synthetic oligonucleotide
  Antisense strand to SEQ ID NO: 2064120
guuuaagaaacacauuugu

SEQ ID NO: 2064122 - RNA, 19 nt, Artificial Sequence
  Description of Artificial Sequence: Synthetic oligonucleotide
  Sense strand starting at position 1273 of SEQ ID NO: 1881690
guguuucuuaaacgagcuu

SEQ ID NO: 2064123 - RNA, 19 nt, Artificial Sequence
  Description of Artificial Sequence: Synthetic oligonucleotide
  Antisense strand to SEQ ID NO: 2064122
aagcucguuuaagaaacac

SEQ ID NO: 2064124 - RNA, 19 nt, Artificial Sequence
  Description of Artificial Sequence: Synthetic oligonucleotide
  Sense strand starting at position 2134 of SEQ ID NO: 1881690
accgaguuucggugggagu

SEQ ID NO: 2064125 - RNA, 19 nt, Artificial Sequence
  Description of Artificial Sequence: Synthetic oligonucleotide
  Antisense strand to SEQ ID NO: 2064124
acucccaccgaaacucggu

SEQ ID NO: 2064126 - RNA, 19 nt, Artificial Sequence
  Description of Artificial Sequence: Synthetic oligonucleotide
  Sense strand starting at position 2135 of SEQ ID NO: 1881690
ccgaguuucggugggagua

SEQ ID NO: 2064127 - RNA, 19 nt, Artificial Sequence
  Description of Artificial Sequence: Synthetic oligonucleotide
  Antisense strand to SEQ ID NO: 2064126
uacucccaccgaaacucgg

SEQ ID NO: 2064128 - RNA, 19 nt, Artificial Sequence
  Description of Artificial Sequence: Synthetic oligonucleotide
  Sense strand starting at position 2148 of SEQ ID NO: 1881690
ggaguagucuuagcggauu

SEQ ID NO: 2064129 - RNA, 19 nt, Artificial Sequence
  Description of Artificial Sequence: Synthetic oligonucleotide
  Antisense strand to SEQ ID NO: 2064128
aauccgcuaagacuacucc

SEQ ID NO: 2064130 - RNA, 19 nt, Artificial Sequence
  Description of Artificial Sequence: Synthetic oligonucleotide
  Sense strand starting at position 2252 of SEQ ID NO: 1881690
agcaguugcucugccuaaa

SEQ ID NO: 2064131 - RNA, 19 nt, Artificial Sequence
  Description of Artificial Sequence: Synthetic oligonucleotide
  Antisense strand to SEQ ID NO: 2064130
uuuaggcagagcaacugcu

SEQ ID NO: 2064132 - RNA, 19 nt, Artificial Sequence
  Description of Artificial Sequence: Synthetic oligonucleotide
  Sense strand starting at position 2276 of SEQ ID NO: 1881690
aaggguacuuuggauaaau

SEQ ID NO: 2064133 - RNA, 19 nt, Artificial Sequence
  Description of Artificial Sequence: Synthetic oligonucleotide
  Antisense strand to SEQ ID NO: 2064132
auuuauccaaaguacccuu

SEQ ID NO: 2064134 - RNA, 19 nt, Artificial Sequence
  Description of Artificial Sequence: Synthetic oligonucleotide
  Sense strand starting at position 2346 of SEQ ID NO: 1881690
agcuuuacaugcucugaaa

SEQ ID NO: 2064135 - RNA, 19 nt, Artificial Sequence
  Description of Artificial Sequence: Synthetic oligonucleotide
  Antisense strand to SEQ ID NO: 2064134
uuucagagcauguaaagcu

SEQ ID NO: 2064136 - RNA, 19 nt, Artificial Sequence
  Description of Artificial Sequence: Synthetic oligonucleotide
  Sense strand starting at position 2365 of SEQ ID NO: 1881690
agugcagacccagaaguuu

SEQ ID NO: 2064137 - RNA, 19 nt, Artificial Sequence
  Description of Artificial Sequence: Synthetic oligonucleotide
  Antisense strand to SEQ ID NO: 2064136
aaacuucugggucugcacu

SEQ ID NO: 2064138 - RNA, 19 nt, Artificial Sequence
  Description of Artificial Sequence: Synthetic oligonucleotide
  Sense strand starting at position 2373 of SEQ ID NO: 1881690
cccagaaguuuaccuguca

SEQ ID NO: 2064139 - RNA, 19 nt, Artificial Sequence
  Description of Artificial Sequence: Synthetic oligonucleotide
  Antisense strand to SEQ ID NO: 2064138
ugacagguaaacuucuggg

SEQ ID NO: 2064140 - RNA, 19 nt, Artificial Sequence
  Description of Artificial Sequence: Synthetic oligonucleotide
  Sense strand starting at position 2418 of SEQ ID NO: 1881690
agaaguuaacccuguccau

SEQ ID NO: 2064141 - RNA, 19 nt, Artificial Sequence
  Description of Artificial Sequence: Synthetic oligonucleotide
  Antisense strand to SEQ ID NO: 2064140
auggacaggguuaacuucu

SEQ ID NO: 2064142 - RNA, 19 nt, Artificial Sequence
  Description of Artificial Sequence: Synthetic oligonucleotide
  Sense strand starting at position 2443 of SEQ ID NO: 1881690
agaagacagugauacauaa

SEQ ID NO: 2064143 - RNA, 19 nt, Artificial Sequence
  Description of Artificial Sequence: Synthetic oligonucleotide
  Antisense strand to SEQ ID NO: 2064142
uuauguaucacugucuucu

SEQ ID NO: 2064144 - RNA, 19 nt, Artificial Sequence
  Description of Artificial Sequence: Synthetic oligonucleotide
  Sense strand starting at position 2540 of SEQ ID NO: 1881690
ucuauaggguugcuugaua

SEQ ID NO: 2064145 - RNA, 19 nt, Artificial Sequence
  Description of Artificial Sequence: Synthetic oligonucleotide
  Antisense strand to SEQ ID NO: 2064144
uaucaagcaacccuauaga

SEQ ID NO: 2064146 - RNA, 19 nt, Artificial Sequence
  Description of Artificial Sequence: Synthetic oligonucleotide
  Sense strand starting at position 2551 of SEQ ID NO: 1881690
gcuugauacgcccgaggaa

SEQ ID NO: 2064147 - RNA, 19 nt, Artificial Sequence
  Description of Artificial Sequence: Synthetic oligonucleotide
  Antisense strand to SEQ ID NO: 2064146
uuccucgggcguaucaagc

SEQ ID NO: 2064148 - RNA, 19 nt, Artificial Sequence
  Description of Artificial Sequence: Synthetic oligonucleotide
  Sense strand starting at position 2552 of SEQ ID NO: 1881690
cuugauacgcccgaggaau

SEQ ID NO: 2064149 - RNA, 19 nt, Artificial Sequence
  Description of Artificial Sequence: Synthetic oligonucleotide
  Antisense strand to SEQ ID NO: 2064148
auuccucgggcguaucaag

SEQ ID NO: 2064150 - RNA, 19 nt, Artificial Sequence
  Description of Artificial Sequence: Synthetic oligonucleotide
  Sense strand starting at position 2624 of SEQ ID NO: 1881690
acuguuacacugugaauug

SEQ ID NO: 2064151 - RNA, 19 nt, Artificial Sequence
  Description of Artificial Sequence: Synthetic oligonucleotide
  Antisense strand to SEQ ID NO: 2064150
caauucacaguguaacagu

SEQ ID NO: 2064152 - RNA, 19 nt, Artificial Sequence
  Description of Artificial Sequence: Synthetic oligonucleotide
  Sense strand starting at position 2631 of SEQ ID NO: 1881690
cacugugaauuggcuuaua

SEQ ID NO: 2064153 - RNA, 19 nt, Artificial Sequence
  Description of Artificial Sequence: Synthetic oligonucleotide
  Antisense strand to SEQ ID NO: 2064152
uauaagccaauucacagug

SEQ ID NO: 2064154 - RNA, 19 nt, Artificial Sequence
  Description of Artificial Sequence: Synthetic oligonucleotide
  Sense strand starting at position 2666 of SEQ ID NO: 1881690
auucuuaaccaaggagcau

SEQ ID NO: 2064155 - RNA, 19 nt, Artificial Sequence
  Description of Artificial Sequence: Synthetic oligonucleotide
  Antisense strand to SEQ ID NO: 2064154
augcuccuugguuaagaau

SEQ ID NO: 2064156 - RNA, 19 nt, Artificial Sequence
  Description of Artificial Sequence: Synthetic oligonucleotide
  Sense strand starting at position 2809 of SEQ ID NO: 1881690
uaucgaacaguugaaaugu

SEQ ID NO: 2064157 - RNA, 19 nt, Artificial Sequence
  Description of Artificial Sequence: Synthetic oligonucleotide
  Antisense strand to SEQ ID NO: 2064156
acauuucaacuguucgaua

SEQ ID NO: 2064158 - RNA, 19 nt, Artificial Sequence
  Description of Artificial Sequence: Synthetic oligonucleotide
  Sense strand starting at position 2818 of SEQ ID NO: 1881690
guugaaauguggcuacugu

SEQ ID NO: 2064159 - RNA, 19 nt, Artificial Sequence
  Description of Artificial Sequence: Synthetic oligonucleotide
  Antisense strand to SEQ ID NO: 2064158
acaguagccacauuucaac

SEQ ID NO: 2064160 - RNA, 19 nt, Artificial Sequence
  Description of Artificial Sequence: Synthetic oligonucleotide
  Sense strand starting at position 3271 of SEQ ID NO: 1881690
auugaaaugcguuggaagu

SEQ ID NO: 2064161 - RNA, 19 nt, Artificial Sequence
  Description of Artificial Sequence: Synthetic oligonucleotide
  Antisense strand to SEQ ID NO: 2064160
acuuccaacgcauuucaau

SEQ ID NO: 2064162 - RNA, 19 nt, Artificial Sequence
  Description of Artificial Sequence: Synthetic oligonucleotide
  Sense strand starting at position 3865 of SEQ ID NO: 1881690
ggaguuugagguuaaccua

SEQ ID NO: 2064163 - RNA, 19 nt, Artificial Sequence
  Description of Artificial Sequence: Synthetic oligonucleotide
  Antisense strand to SEQ ID NO: 2064162
uagguuaaccucaaacucc

SEQ ID NO: 2064164 - RNA, 19 nt, Artificial Sequence
  Description of Artificial Sequence: Synthetic oligonucleotide
  Sense strand starting at position 3872 of SEQ ID NO: 1881690
gagguuaaccuaggcaaca

SEQ ID NO: 2064165 - RNA, 19 nt, Artificial Sequence
  Description of Artificial Sequence: Synthetic oligonucleotide
  Antisense strand to SEQ ID NO: 2064164
uguugccuagguuaaccuc

SEQ ID NO: 2064166 - RNA, 19 nt, Artificial Sequence
  Description of Artificial Sequence: Synthetic oligonucleotide
  Sense strand starting at position 3959 of SEQ ID NO: 1881690
ggucccagcuauuuguauu

SEQ ID NO: 2064167 - RNA, 19 nt, Artificial Sequence
  Description of Artificial Sequence: Synthetic oligonucleotide
  Antisense strand to SEQ ID NO: 2064166
aauacaaauagcugggacc

SEQ ID NO: 2064168 - RNA, 19 nt, Artificial Sequence
  Description of Artificial Sequence: Synthetic oligonucleotide
  Sense strand starting at position 3971 of SEQ ID NO: 1881690
uuguauugcugagcccaga

SEQ ID NO: 2064169 - RNA, 19 nt, Artificial Sequence
  Description of Artificial Sequence: Synthetic oligonucleotide
  Antisense strand to SEQ ID NO: 2064168
ucugggcucagcaauacaa

SEQ ID NO: 2064170 - RNA, 19 nt, Artificial Sequence
  Description of Artificial Sequence: Synthetic oligonucleotide
  Sense strand starting at position 112 of SEQ ID NO: 1881691
gguggaaacagugguaauu

SEQ ID NO: 2064171 - RNA, 19 nt, Artificial Sequence
  Description of Artificial Sequence: Synthetic oligonucleotide
  Antisense strand to SEQ ID NO: 2064170
aauuaccacuguuuccacc

SEQ ID NO: 2064172 - RNA, 19 nt, Artificial Sequence
  Description of Artificial Sequence: Synthetic oligonucleotide
  Sense strand starting at position 128 of SEQ ID NO: 1881691
auuguugaggccggaacau

SEQ ID NO: 2064173 - RNA, 19 nt, Artificial Sequence
  Description of Artificial Sequence: Synthetic oligonucleotide
  Antisense strand to SEQ ID NO: 2064172
auguuccggccucaacaau

SEQ ID NO: 2064174 - RNA, 19 nt, Artificial Sequence
  Description of Artificial Sequence: Synthetic oligonucleotide
  Sense strand starting at position 162 of SEQ ID NO: 1881691
auguauacugguggauaau

SEQ ID NO: 2064175 - RNA, 19 nt, Artificial Sequence
  Description of Artificial Sequence: Synthetic oligonucleotide
  Antisense strand to SEQ ID NO: 2064174
auuauccaccaguauacau

SEQ ID NO: 2064176 - RNA, 19 nt, Artificial Sequence
  Description of Artificial Sequence: Synthetic oligonucleotide
  Sense strand starting at position 163 of SEQ ID NO: 1881691
uguauacugguggauaauu

SEQ ID NO: 2064177 - RNA, 19 nt, Artificial Sequence
  Description of Artificial Sequence: Synthetic oligonucleotide
  Antisense strand to SEQ ID NO: 2064176
aauuauccaccaguauaca

SEQ ID NO: 2064178 - RNA, 19 nt, Artificial Sequence
  Description of Artificial Sequence: Synthetic oligonucleotide
  Sense strand starting at position 204 of SEQ ID NO: 1881691
aucugaguuugcuuuccua

SEQ ID NO: 2064179 - RNA, 19 nt, Artificial Sequence
  Description of Artificial Sequence: Synthetic oligonucleotide
  Antisense strand to SEQ ID NO: 2064178
uaggaaagcaaacucagau

SEQ ID NO: 2064180 - RNA, 19 nt, Artificial Sequence
  Description of Artificial Sequence: Synthetic oligonucleotide
  Sense strand starting at position 207 of SEQ ID NO: 1881691
ugaguuugcuuuccuaucu

SEQ ID NO: 2064181 - RNA, 19 nt, Artificial Sequence
  Description of Artificial Sequence: Synthetic oligonucleotide
  Antisense strand to SEQ ID NO: 2064180
agauaggaaagcaaacuca

SEQ ID NO: 2064182 - RNA, 19 nt, Artificial Sequence
  Description of Artificial Sequence: Synthetic oligonucleotide
  Sense strand starting at position 337 of SEQ ID NO: 1881691
guagguuagccuggaugau

SEQ ID NO: 2064183 - RNA, 19 nt, Artificial Sequence
  Description of Artificial Sequence: Synthetic oligonucleotide
  Antisense strand to SEQ ID NO: 2064182
aucauccaggcuaaccuac

SEQ ID NO: 2064184 - RNA, 19 nt, Artificial Sequence
  Description of Artificial Sequence: Synthetic oligonucleotide
  Sense strand starting at position 349 of SEQ ID NO: 1881691
ggaugaucuugcucuaaau

SEQ ID NO: 2064185 - RNA, 19 nt, Artificial Sequence
  Description of Artificial Sequence: Synthetic oligonucleotide
  Antisense strand to SEQ ID NO: 2064184
auuuagagcaagaucaucc

SEQ ID NO: 2064186 - RNA, 19 nt, Artificial Sequence
  Description of Artificial Sequence: Synthetic oligonucleotide
  Sense strand starting at position 392 of SEQ ID NO: 1881691
agcuuuggcuacuugacau

SEQ ID NO: 2064187 - RNA, 19 nt, Artificial Sequence
  Description of Artificial Sequence: Synthetic oligonucleotide
  Antisense strand to SEQ ID NO: 2064186
augucaaguagccaaagcu

SEQ ID NO: 2064188 - RNA, 19 nt, Artificial Sequence
  Description of Artificial Sequence: Synthetic oligonucleotide
  Sense strand starting at position 414 of SEQ ID NO: 1881691
gcacaaaugaugggucuca

SEQ ID NO: 2064189 - RNA, 19 nt, Artificial Sequence
  Description of Artificial Sequence: Synthetic oligonucleotide
  Antisense strand to SEQ ID NO: 2064188
ugagacccaucauuugugc

SEQ ID NO: 2064190 - RNA, 19 nt, Artificial Sequence
  Description of Artificial Sequence: Synthetic oligonucleotide
  Sense strand starting at position 588 of SEQ ID NO: 1881691
aggcaaacuuaccuugauu

SEQ ID NO: 2064191 - RNA, 19 nt, Artificial Sequence
  Description of Artificial Sequence: Synthetic oligonucleotide
  Antisense strand to SEQ ID NO: 2064190
aaucaagguaaguuugccu

SEQ ID NO: 2064192 - RNA, 19 nt, Artificial Sequence
  Description of Artificial Sequence: Synthetic oligonucleotide
  Sense strand starting at position 802 of SEQ ID NO: 1881691
gcuccuaaguguuugaaag

SEQ ID NO: 2064193 - RNA, 19 nt, Artificial Sequence
  Description of Artificial Sequence: Synthetic oligonucleotide
  Antisense strand to SEQ ID NO: 2064192
cuuucaaacacuuaggagc

SEQ ID NO: 2064194 - RNA, 19 nt, Artificial Sequence
  Description of Artificial Sequence: Synthetic oligonucleotide
  Sense strand starting at position 803 of SEQ ID NO: 1881691
cuccuaaguguuugaaaga

SEQ ID NO: 2064195 - RNA, 19 nt, Artificial Sequence
  Description of Artificial Sequence: Synthetic oligonucleotide
  Antisense strand to SEQ ID NO: 2064194
ucuuucaaacacuuaggag

SEQ ID NO: 2064196 - RNA, 19 nt, Artificial Sequence
  Description of Artificial Sequence: Synthetic oligonucleotide
  Sense strand starting at position 895 of SEQ ID NO: 1881691
cagcacauacccugcgaua

SEQ ID NO: 2064197 - RNA, 19 nt, Artificial Sequence
  Description of Artificial Sequence: Synthetic oligonucleotide
  Antisense strand to SEQ ID NO: 2064196
uaucgcaggguaugugcug

SEQ ID NO: 2064198 - RNA, 19 nt, Artificial Sequence
  Description of Artificial Sequence: Synthetic oligonucleotide
  Sense strand starting at position 897 of SEQ ID NO: 1881691
gcacauacccugcgauauc

SEQ ID NO: 2064199 - RNA, 19 nt, Artificial Sequence
  Description of Artificial Sequence: Synthetic oligonucleotide
  Antisense strand to SEQ ID NO: 2064198
gauaucgcaggguaugugc

SEQ ID NO: 2064200 - RNA, 19 nt, Artificial Sequence
  Description of Artificial Sequence: Synthetic oligonucleotide
  Sense strand starting at position 906 of SEQ ID NO: 1881691
cugcgauaucuacauaacc

SEQ ID NO: 2064201 - RNA, 19 nt, Artificial Sequence
  Description of Artificial Sequence: Synthetic oligonucleotide
  Antisense strand to SEQ ID NO: 2064200
gguuauguagauaucgcag

SEQ ID NO: 2064202 - RNA, 19 nt, Artificial Sequence
  Description of Artificial Sequence: Synthetic oligonucleotide
  Sense strand starting at position 1010 of SEQ ID NO: 1881691
aguagcaagcagugaauua

SEQ ID NO: 2064203 - RNA, 19 nt, Artificial Sequence
  Description of Artificial Sequence: Synthetic oligonucleotide
  Antisense strand to SEQ ID NO: 2064202
uaauucacugcuugcuacu

SEQ ID NO: 2064204 - RNA, 19 nt, Artificial Sequence
  Description of Artificial Sequence: Synthetic oligonucleotide
  Sense strand starting at position 1011 of SEQ ID NO: 1881691
guagcaagcagugaauuau

SEQ ID NO: 2064205 - RNA, 19 nt, Artificial Sequence
  Description of Artificial Sequence: Synthetic oligonucleotide
  Antisense strand to SEQ ID NO: 2064204
auaauucacugcuugcuac

SEQ ID NO: 2064206 - RNA, 19 nt, Artificial Sequence
  Description of Artificial Sequence: Synthetic oligonucleotide
  Sense strand starting at position 1020 of SEQ ID NO: 1881691
agugaauuauccucaguau

SEQ ID NO: 2064207 - RNA, 19 nt, Artificial Sequence
  Description of Artificial Sequence: Synthetic oligonucleotide
  Antisense strand to SEQ ID NO: 2064206
auacugaggauaauucacu

SEQ ID NO: 2064208 - RNA, 19 nt, Artificial Sequence
  Description of Artificial Sequence: Synthetic oligonucleotide
  Sense strand starting at position 1021 of SEQ ID NO: 1881691
gugaauuauccucaguaug

SEQ ID NO: 2064209 - RNA, 19 nt, Artificial Sequence
  Description of Artificial Sequence: Synthetic oligonucleotide
  Antisense strand to SEQ ID NO: 2064208
cauacugaggauaauucac

SEQ ID NO: 2064210 - RNA, 19 nt, Artificial Sequence
  Description of Artificial Sequence: Synthetic oligonucleotide
  Sense strand starting at position 1023 of SEQ ID NO: 1881691
gaauuauccucaguauggu

SEQ ID NO: 2064211 - RNA, 19 nt, Artificial Sequence
  Description of Artificial Sequence: Synthetic oligonucleotide
  Antisense strand to SEQ ID NO: 2064210
accauacugaggauaauuc

SEQ ID NO: 2064212 - RNA, 19 nt, Artificial Sequence
  Description of Artificial Sequence: Synthetic oligonucleotide
  Sense strand starting at position 1055 of SEQ ID NO: 1881691
guaggagaaucccuacgua

SEQ ID NO: 2064213 - RNA, 19 nt, Artificial Sequence
  Description of Artificial Sequence: Synthetic oligonucleotide
  Antisense strand to SEQ ID NO: 2064212
uacguagggauucuccuac

SEQ ID NO: 2064214 - RNA, 19 nt, Artificial Sequence
  Description of Artificial Sequence: Synthetic oligonucleotide
  Sense strand starting at position 1058 of SEQ ID NO: 1881691
ggagaaucccuacguaagg

SEQ ID NO: 2064215 - RNA, 19 nt, Artificial Sequence
  Description of Artificial Sequence: Synthetic oligonucleotide
  Antisense strand to SEQ ID NO: 2064214
ccuuacguagggauucucc

SEQ ID NO: 2064216 - RNA, 19 nt, Artificial Sequence
  Description of Artificial Sequence: Synthetic oligonucleotide
  Sense strand starting at position 1143 of SEQ ID NO: 1881691
cguuuacauacugcguuua

SEQ ID NO: 2064217 - RNA, 19 nt, Artificial Sequence
  Description of Artificial Sequence: Synthetic oligonucleotide
  Antisense strand to SEQ ID NO: 2064216
uaaacgcaguauguaaacg

SEQ ID NO: 2064218 - RNA, 19 nt, Artificial Sequence
  Description of Artificial Sequence: Synthetic oligonucleotide
  Sense strand starting at position 1145 of SEQ ID NO: 1881691
uuuacauacugcguuuaca

SEQ ID NO: 2064219 - RNA, 19 nt, Artificial Sequence
  Description of Artificial Sequence: Synthetic oligonucleotide
  Antisense strand to SEQ ID NO: 2064218
uguaaacgcaguauguaaa

SEQ ID NO: 2064220 - RNA, 19 nt, Artificial Sequence
  Description of Artificial Sequence: Synthetic oligonucleotide
  Sense strand starting at position 2051 of SEQ ID NO: 1881691
gggcgucaccucggacaua

SEQ ID NO: 2064221 - RNA, 19 nt, Artificial Sequence
  Description of Artificial Sequence: Synthetic oligonucleotide
  Antisense strand to SEQ ID NO: 2064220
uauguccgaggugacgccc

SEQ ID NO: 2064222 - RNA, 19 nt, Artificial Sequence
  Description of Artificial Sequence: Synthetic oligonucleotide
  Sense strand starting at position 2645 of SEQ ID NO: 1881691
uuuauuagagcugaauagu

SEQ ID NO: 2064223 - RNA, 19 nt, Artificial Sequence
  Description of Artificial Sequence: Synthetic oligonucleotide
  Antisense strand to SEQ ID NO: 2064222
acuauucagcucuaauaaa

SEQ ID NO: 2064224 - RNA, 19 nt, Artificial Sequence
  Description of Artificial Sequence: Synthetic oligonucleotide
  Sense strand starting at position 3436 of SEQ ID NO: 1881691
ccgccacgcccgucaaauu

SEQ ID NO: 2064225 - RNA, 19 nt, Artificial Sequence
  Description of Artificial Sequence: Synthetic oligonucleotide
  Antisense strand to SEQ ID NO: 2064224
aauuugacgggcguggcgg

SEQ ID NO: 2064226 - RNA, 19 nt, Artificial Sequence
  Description of Artificial Sequence: Synthetic oligonucleotide
  Sense strand starting at position 3589 of SEQ ID NO: 1881691
ccuguccggccuguuauua

SEQ ID NO: 2064227 - RNA, 19 nt, Artificial Sequence
  Description of Artificial Sequence: Synthetic oligonucleotide
  Antisense strand to SEQ ID NO: 2064226
uaauaacaggccggacagg

SEQ ID NO: 2064228 - RNA, 19 nt, Artificial Sequence
  Description of Artificial Sequence: Synthetic oligonucleotide
  Sense strand starting at position 3590 of SEQ ID NO: 1881691
cuguccggccuguuauuau

SEQ ID NO: 2064229 - RNA, 19 nt, Artificial Sequence
  Description of Artificial Sequence: Synthetic oligonucleotide
  Antisense strand to SEQ ID NO: 2064228
auaauaacaggccggacag

SEQ ID NO: 2064230 - RNA, 19 nt, Artificial Sequence
  Description of Artificial Sequence: Synthetic oligonucleotide
  Sense strand starting at position 3612 of SEQ ID NO: 1881691
uaugauugauaucucguga

SEQ ID NO: 2064231 - RNA, 19 nt, Artificial Sequence
  Description of Artificial Sequence: Synthetic oligonucleotide
  Antisense strand to SEQ ID NO: 2064230
ucacgagauaucaaucaua

SEQ ID NO: 2064232 - RNA, 19 nt, Artificial Sequence
  Description of Artificial Sequence: Synthetic oligonucleotide
  Sense strand starting at position 3619 of SEQ ID NO: 1881691
gauaucucgugacucccua

SEQ ID NO: 2064233 - RNA, 19 nt, Artificial Sequence
  Description of Artificial Sequence: Synthetic oligonucleotide
  Antisense strand to SEQ ID NO: 2064232
uagggagucacgagauauc

SEQ ID NO: 2064234 - RNA, 19 nt, Artificial Sequence
  Description of Artificial Sequence: Synthetic oligonucleotide
  Sense strand starting at position 3713 of SEQ ID NO: 1881691
cguccuuaacuuugggaaa

SEQ ID NO: 2064235 - RNA, 19 nt, Artificial Sequence
  Description of Artificial Sequence: Synthetic oligonucleotide
  Antisense strand to SEQ ID NO: 2064234
uuucccaaaguuaaggacg

SEQ ID NO: 2064236 - RNA, 19 nt, Artificial Sequence
  Description of Artificial Sequence: Synthetic oligonucleotide
  Sense strand starting at position 3716 of SEQ ID NO: 1881691
ccuuaacuuugggaaauaa

SEQ ID NO: 2064237 - RNA, 19 nt, Artificial Sequence
  Description of Artificial Sequence: Synthetic oligonucleotide
  Antisense strand to SEQ ID NO: 2064236
uuauuucccaaaguuaagg

SEQ ID NO: 2064238 - RNA, 19 nt, Artificial Sequence
  Description of Artificial Sequence: Synthetic oligonucleotide
  Sense strand starting at position 3767 of SEQ ID NO: 1881691
cucgauugacauugauaag

SEQ ID NO: 2064239 - RNA, 19 nt, Artificial Sequence
  Description of Artificial Sequence: Synthetic oligonucleotide
  Antisense strand to SEQ ID NO: 2064238
cuuaucaaugucaaucgag

SEQ ID NO: 2064240 - RNA, 19 nt, Artificial Sequence
  Description of Artificial Sequence: Synthetic oligonucleotide
  Sense strand starting at position 3791 of SEQ ID NO: 1881691
agagauccucagugaaggu

SEQ ID NO: 2064241 - RNA, 19 nt, Artificial Sequence
  Description of Artificial Sequence: Synthetic oligonucleotide
  Antisense strand to SEQ ID NO: 2064240
accuucacugaggaucucu

SEQ ID NO: 2064242 - RNA, 19 nt, Artificial Sequence
  Description of Artificial Sequence: Synthetic oligonucleotide
  Sense strand starting at position 3820 of SEQ ID NO: 1881691
gcagcaguucgccuauuga

SEQ ID NO: 2064243 - RNA, 19 nt, Artificial Sequence
  Description of Artificial Sequence: Synthetic oligonucleotide
  Antisense strand to SEQ ID NO: 2064242
ucaauaggcgaacugcugc

SEQ ID NO: 2064244 - RNA, 19 nt, Artificial Sequence
  Description of Artificial Sequence: Synthetic oligonucleotide
  Sense strand starting at position 3831 of SEQ ID NO: 1881691
ccuauugauccucgguauu

SEQ ID NO: 2064245 - RNA, 19 nt, Artificial Sequence
  Description of Artificial Sequence: Synthetic oligonucleotide
  Antisense strand to SEQ ID NO: 2064244
aauaccgaggaucaauagg

SEQ ID NO: 2064246 - RNA, 19 nt, Artificial Sequence
  Description of Artificial Sequence: Synthetic oligonucleotide
  Sense strand starting at position 3876 of SEQ ID NO: 1881691
guaggaugauugcugaaau

SEQ ID NO: 2064247 - RNA, 19 nt, Artificial Sequence
  Description of Artificial Sequence: Synthetic oligonucleotide
  Antisense strand to SEQ ID NO: 2064246
auuucagcaaucauccuac

SEQ ID NO: 2064248 - RNA, 19 nt, Artificial Sequence
  Description of Artificial Sequence: Synthetic oligonucleotide
  Sense strand starting at position 3886 of SEQ ID NO: 1881691
ugcugaaaucugggaccuu

SEQ ID NO: 2064249 - RNA, 19 nt, Artificial Sequence
  Description of Artificial Sequence: Synthetic oligonucleotide
  Antisense strand to SEQ ID NO: 2064248
aaggucccagauuucagca

SEQ ID NO: 2064250 - RNA, 19 nt, Artificial Sequence
  Description of Artificial Sequence: Synthetic oligonucleotide
  Sense strand starting at position 2100 of SEQ ID NO: 1881692
gcagguuaaccugaauauc

SEQ ID NO: 2064251 - RNA, 19 nt, Artificial Sequence
  Description of Artificial Sequence: Synthetic oligonucleotide
  Antisense strand to SEQ ID NO: 2064250
gauauucagguuaaccugc

SEQ ID NO: 2064252 - RNA, 19 nt, Artificial Sequence
  Description of Artificial Sequence: Synthetic oligonucleotide
  Sense strand starting at position 2215 of SEQ ID NO: 1881692
cgcuuugagagaugguaaa

SEQ ID NO: 2064253 - RNA, 19 nt, Artificial Sequence
  Description of Artificial Sequence: Synthetic oligonucleotide
  Antisense strand to SEQ ID NO: 2064252
uuuaccaucucucaaagcg

SEQ ID NO: 2064254 - RNA, 19 nt, Artificial Sequence
  Description of Artificial Sequence: Synthetic oligonucleotide
  Sense strand starting at position 2315 of SEQ ID NO: 1881692
cccggugauccuuacucau

SEQ ID NO: 2064255 - RNA, 19 nt, Artificial Sequence
  Description of Artificial Sequence: Synthetic oligonucleotide
  Antisense strand to SEQ ID NO: 2064254
augaguaaggaucaccggg

SEQ ID NO: 2064256 - RNA, 19 nt, Artificial Sequence
  Description of Artificial Sequence: Synthetic oligonucleotide
  Sense strand starting at position 2317 of SEQ ID NO: 1881692
cggugauccuuacucauau

SEQ ID NO: 2064257 - RNA, 19 nt, Artificial Sequence
  Description of Artificial Sequence: Synthetic oligonucleotide
  Antisense strand to SEQ ID NO: 2064256
auaugaguaaggaucaccg

SEQ ID NO: 2064258 - RNA, 19 nt, Artificial Sequence
  Description of Artificial Sequence: Synthetic oligonucleotide
  Sense strand starting at position 2318 of SEQ ID NO: 1881692
ggugauccuuacucauauu

SEQ ID NO: 2064259 - RNA, 19 nt, Artificial Sequence
  Description of Artificial Sequence: Synthetic oligonucleotide
  Antisense strand to SEQ ID NO: 2064258
aauaugaguaaggaucacc

SEQ ID NO: 2064260 - RNA, 19 nt, Artificial Sequence
  Description of Artificial Sequence: Synthetic oligonucleotide
  Sense strand starting at position 2351 of SEQ ID NO: 1881692
cgguuagugcuugcggauu

SEQ ID NO: 2064261 - RNA, 19 nt, Artificial Sequence
  Description of Artificial Sequence: Synthetic oligonucleotide
  Antisense strand to SEQ ID NO: 2064260
aauccgcaagcacuaaccg

SEQ ID NO: 2064262 - RNA, 19 nt, Artificial Sequence
  Description of Artificial Sequence: Synthetic oligonucleotide
  Sense strand starting at position 2382 of SEQ ID NO: 1881692
agguuucgaaucugggaca

SEQ ID NO: 2064263 - RNA, 19 nt, Artificial Sequence
  Description of Artificial Sequence: Synthetic oligonucleotide
  Antisense strand to SEQ ID NO: 2064262
ugucccagauucgaaaccu

SEQ ID NO: 2064264 - RNA, 19 nt, Artificial Sequence
  Description of Artificial Sequence: Synthetic oligonucleotide
  Sense strand starting at position 2410 of SEQ ID NO: 1881692
gaacguuacagugagaguc

SEQ ID NO: 2064265 - RNA, 19 nt, Artificial Sequence
  Description of Artificial Sequence: Synthetic oligonucleotide
  Antisense strand to SEQ ID NO: 2064264
gacucucacuguaacguuc

SEQ ID NO: 2064266 - RNA, 19 nt, Artificial Sequence
  Description of Artificial Sequence: Synthetic oligonucleotide
  Sense strand starting at position 2422 of SEQ ID NO: 1881692
gagagucauuuggaagaug

SEQ ID NO: 2064267 - RNA, 19 nt, Artificial Sequence
  Description of Artificial Sequence: Synthetic oligonucleotide
  Antisense strand to SEQ ID NO: 2064266
caucuuccaaaugacucuc

SEQ ID NO: 2064268 - RNA, 19 nt, Artificial Sequence
  Description of Artificial Sequence: Synthetic oligonucleotide
  Sense strand starting at position 2563 of SEQ ID NO: 1881692
guuaaauuacuagagcuuu

SEQ ID NO: 2064269 - RNA, 19 nt, Artificial Sequence
  Description of Artificial Sequence: Synthetic oligonucleotide
  Antisense strand to SEQ ID NO: 2064268
aaagcucuaguaauuuaac

SEQ ID NO: 2064270 - RNA, 19 nt, Artificial Sequence
  Description of Artificial Sequence: Synthetic oligonucleotide
  Sense strand starting at position 2696 of SEQ ID NO: 1881692
ugucaucucucuuucuaga

SEQ ID NO: 2064271 - RNA, 19 nt, Artificial Sequence
  Description of Artificial Sequence: Synthetic oligonucleotide
  Antisense strand to SEQ ID NO: 2064270
ucuagaaagagagaugaca

SEQ ID NO: 2064272 - RNA, 19 nt, Artificial Sequence
  Description of Artificial Sequence: Synthetic oligonucleotide
  Sense strand starting at position 2802 of SEQ ID NO: 1881692
gauggaagcuuucugcaaa

SEQ ID NO: 2064273 - RNA, 19 nt, Artificial Sequence
  Description of Artificial Sequence: Synthetic oligonucleotide
  Antisense strand to SEQ ID NO: 2064272
uuugcagaaagcuuccauc

SEQ ID NO: 2064274 - RNA, 19 nt, Artificial Sequence
  Description of Artificial Sequence: Synthetic oligonucleotide
  Sense strand starting at position 2874 of SEQ ID NO: 1881692
ucuaaagauccagggccua

SEQ ID NO: 2064275 - RNA, 19 nt, Artificial Sequence
  Description of Artificial Sequence: Synthetic oligonucleotide
  Antisense strand to SEQ ID NO: 2064274
uaggcccuggaucuuuaga

SEQ ID NO: 2064276 - RNA, 19 nt, Artificial Sequence
  Description of Artificial Sequence: Synthetic oligonucleotide
  Sense strand starting at position 3011 of SEQ ID NO: 1881692
aagaaucagugucuuagua

SEQ ID NO: 2064277 - RNA, 19 nt, Artificial Sequence
  Description of Artificial Sequence: Synthetic oligonucleotide
  Antisense strand to SEQ ID NO: 2064276
uacuaagacacugauucuu

SEQ ID NO: 2064278 - RNA, 19 nt, Artificial Sequence
  Description of Artificial Sequence: Synthetic oligonucleotide
  Sense strand starting at position 3018 of SEQ ID NO: 1881692
agugucuuaguagaggauu

SEQ ID NO: 2064279 - RNA, 19 nt, Artificial Sequence
  Description of Artificial Sequence: Synthetic oligonucleotide
  Antisense strand to SEQ ID NO: 2064278
aauccucuacuaagacacu

SEQ ID NO: 2064280 - RNA, 19 nt, Artificial Sequence
  Description of Artificial Sequence: Synthetic oligonucleotide
  Sense strand starting at position 3024 of SEQ ID NO: 1881692
uuaguagaggauuguggaa

SEQ ID NO: 2064281 - RNA, 19 nt, Artificial Sequence
  Description of Artificial Sequence: Synthetic oligonucleotide
  Antisense strand to SEQ ID NO: 2064280
uuccacaauccucuacuaa

SEQ ID NO: 2064282 - RNA, 19 nt, Artificial Sequence
  Description of Artificial Sequence: Synthetic oligonucleotide
  Sense strand starting at position 3041 of SEQ ID NO: 1881692
aaauuugaaugagauguca

SEQ ID NO: 2064283 - RNA, 19 nt, Artificial Sequence
  Description of Artificial Sequence: Synthetic oligonucleotide
  Antisense strand to SEQ ID NO: 2064282
ugacaucucauucaaauuu

SEQ ID NO: 2064284 - RNA, 19 nt, Artificial Sequence
  Description of Artificial Sequence: Synthetic oligonucleotide
  Sense strand starting at position 3049 of SEQ ID NO: 1881692
augagaugucaggaguguu

SEQ ID NO: 2064285 - RNA, 19 nt, Artificial Sequence
  Description of Artificial Sequence: Synthetic oligonucleotide
  Antisense strand to SEQ ID NO: 2064284
aacacuccugacaucucau

SEQ ID NO: 2064286 - RNA, 19 nt, Artificial Sequence
  Description of Artificial Sequence: Synthetic oligonucleotide
  Sense strand starting at position 3120 of SEQ ID NO: 1881692
gggugaaauaugugaugca

SEQ ID NO: 2064287 - RNA, 19 nt, Artificial Sequence
  Description of Artificial Sequence: Synthetic oligonucleotide
  Antisense strand to SEQ ID NO: 2064286
ugcaucacauauuucaccc

SEQ ID NO: 2064288 - RNA, 19 nt, Artificial Sequence
  Description of Artificial Sequence: Synthetic oligonucleotide
  Sense strand starting at position 3127 of SEQ ID NO: 1881692
auaugugaugcagauauac

SEQ ID NO: 2064289 - RNA, 19 nt, Artificial Sequence
  Description of Artificial Sequence: Synthetic oligonucleotide
  Antisense strand to SEQ ID NO: 2064288
guauaucugcaucacauau

SEQ ID NO: 2064290 - RNA, 19 nt, Artificial Sequence
  Description of Artificial Sequence: Synthetic oligonucleotide
  Sense strand starting at position 3158 of SEQ ID NO: 1881692
aagggaagauuuggguuua

SEQ ID NO: 2064291 - RNA, 19 nt, Artificial Sequence
  Description of Artificial Sequence: Synthetic oligonucleotide
  Antisense strand to SEQ ID NO: 2064290
uaaacccaaaucuucccuu

SEQ ID NO: 2064292 - RNA, 19 nt, Artificial Sequence
  Description of Artificial Sequence: Synthetic oligonucleotide
  Sense strand starting at position 3182 of SEQ ID NO: 1881692
gucagugugggauaagcua

SEQ ID NO: 2064293 - RNA, 19 nt, Artificial Sequence
  Description of Artificial Sequence: Synthetic oligonucleotide
  Antisense strand to SEQ ID NO: 2064292
uagcuuaucccacacugac

SEQ ID NO: 2064294 - RNA, 19 nt, Artificial Sequence
  Description of Artificial Sequence: Synthetic oligonucleotide
  Sense strand starting at position 3190 of SEQ ID NO: 1881692
gggauaagcuaagucauaa

SEQ ID NO: 2064295 - RNA, 19 nt, Artificial Sequence
  Description of Artificial Sequence: Synthetic oligonucleotide
  Antisense strand to SEQ ID NO: 2064294
uuaugacuuagcuuauccc

SEQ ID NO: 2064296 - RNA, 19 nt, Artificial Sequence
  Description of Artificial Sequence: Synthetic oligonucleotide
  Sense strand starting at position 3281 of SEQ ID NO: 1881692
uuugccuaaguugauaaua

SEQ ID NO: 2064297 - RNA, 19 nt, Artificial Sequence
  Description of Artificial Sequence: Synthetic oligonucleotide
  Antisense strand to SEQ ID NO: 2064296
uauuaucaacuuaggcaaa

SEQ ID NO: 2064298 - RNA, 19 nt, Artificial Sequence
  Description of Artificial Sequence: Synthetic oligonucleotide
  Sense strand starting at position 3415 of SEQ ID NO: 1881692
auaggccuguucuuaauga

SEQ ID NO: 2064299 - RNA, 19 nt, Artificial Sequence
  Description of Artificial Sequence: Synthetic oligonucleotide
  Antisense strand to SEQ ID NO: 2064298
ucauuaagaacaggccuau

SEQ ID NO: 2064300 - RNA, 19 nt, Artificial Sequence
  Description of Artificial Sequence: Synthetic oligonucleotide
  Sense strand starting at position 3435 of SEQ ID NO: 1881692
guaagagguuuacuuuaau

SEQ ID NO: 2064301 - RNA, 19 nt, Artificial Sequence
  Description of Artificial Sequence: Synthetic oligonucleotide
  Antisense strand to SEQ ID NO: 2064300
auuaaaguaaaccucuuac

SEQ ID NO: 2064302 - RNA, 19 nt, Artificial Sequence
  Description of Artificial Sequence: Synthetic oligonucleotide
  Sense strand starting at position 3452 of SEQ ID NO: 1881692
auuauuaugguaugagcaa

SEQ ID NO: 2064303 - RNA, 19 nt, Artificial Sequence
  Description of Artificial Sequence: Synthetic oligonucleotide
  Antisense strand to SEQ ID NO: 2064302
uugcucauaccauaauaau

SEQ ID NO: 2064304 - RNA, 19 nt, Artificial Sequence
  Description of Artificial Sequence: Synthetic oligonucleotide
  Sense strand starting at position 3520 of SEQ ID NO: 1881692
guuugaacucccugaauca

SEQ ID NO: 2064305 - RNA, 19 nt, Artificial Sequence
  Description of Artificial Sequence: Synthetic oligonucleotide
  Antisense strand to SEQ ID NO: 2064304
ugauucagggaguucaaac

SEQ ID NO: 2064306 - RNA, 19 nt, Artificial Sequence
  Description of Artificial Sequence: Synthetic oligonucleotide
  Sense strand starting at position 3556 of SEQ ID NO: 1881692
uugugcuuugaacaauagu

SEQ ID NO: 2064307 - RNA, 19 nt, Artificial Sequence
  Description of Artificial Sequence: Synthetic oligonucleotide
  Antisense strand to SEQ ID NO: 2064306
acuauuguucaaagcacaa

SEQ ID NO: 2064308 - RNA, 19 nt, Artificial Sequence
  Description of Artificial Sequence: Synthetic oligonucleotide
  Sense strand starting at position 3573 of SEQ ID NO: 1881692
guucucuaauugguugaua

SEQ ID NO: 2064309 - RNA, 19 nt, Artificial Sequence
  Description of Artificial Sequence: Synthetic oligonucleotide
  Antisense strand to SEQ ID NO: 2064308
uaucaaccaauuagagaac

SEQ ID NO: 2064310 - RNA, 19 nt, Artificial Sequence
  Description of Artificial Sequence: Synthetic oligonucleotide
  Sense strand starting at position 3574 of SEQ ID NO: 1881692
uucucuaauugguugauau

SEQ ID NO: 2064311 - RNA, 19 nt, Artificial Sequence
  Description of Artificial Sequence: Synthetic oligonucleotide
  Antisense strand to SEQ ID NO: 2064310
auaucaaccaauuagagaa

SEQ ID NO: 2064312 - RNA, 19 nt, Artificial Sequence
  Description of Artificial Sequence: Synthetic oligonucleotide
  Sense strand starting at position 3575 of SEQ ID NO: 1881692
ucucuaauugguugauauc

SEQ ID NO: 2064313 - RNA, 19 nt, Artificial Sequence
  Description of Artificial Sequence: Synthetic oligonucleotide
  Antisense strand to SEQ ID NO: 2064312
gauaucaaccaauuagaga

SEQ ID NO: 2064314 - RNA, 19 nt, Artificial Sequence
  Description of Artificial Sequence: Synthetic oligonucleotide
  Sense strand starting at position 3576 of SEQ ID NO: 1881692
cucuaauugguugauaucu

SEQ ID NO: 2064315 - RNA, 19 nt, Artificial Sequence
  Description of Artificial Sequence: Synthetic oligonucleotide
  Antisense strand to SEQ ID NO: 2064314
agauaucaaccaauuagag

SEQ ID NO: 2064316 - RNA, 19 nt, Artificial Sequence
  Description of Artificial Sequence: Synthetic oligonucleotide
  Sense strand starting at position 3615 of SEQ ID NO: 1881692
aagguuguaugguuaauau

SEQ ID NO: 2064317 - RNA, 19 nt, Artificial Sequence
  Description of Artificial Sequence: Synthetic oligonucleotide
  Antisense strand to SEQ ID NO: 2064316
auauuaaccauacaaccuu

SEQ ID NO: 2064318 - RNA, 19 nt, Artificial Sequence
  Description of Artificial Sequence: Synthetic oligonucleotide
  Sense strand starting at position 3634 of SEQ ID NO: 1881692
ggacauugaagaugagugu

SEQ ID NO: 2064319 - RNA, 19 nt, Artificial Sequence
  Description of Artificial Sequence: Synthetic oligonucleotide
  Antisense strand to SEQ ID NO: 2064318
acacucaucuucaaugucc

SEQ ID NO: 2064320 - RNA, 19 nt, Artificial Sequence
  Description of Artificial Sequence: Synthetic oligonucleotide
  Sense strand starting at position 3640 of SEQ ID NO: 1881692
ugaagaugagugugggagu

SEQ ID NO: 2064321 - RNA, 19 nt, Artificial Sequence
  Description of Artificial Sequence: Synthetic oligonucleotide
  Antisense strand to SEQ ID NO: 2064320
acucccacacucaucuuca

SEQ ID NO: 2064322 - RNA, 19 nt, Artificial Sequence
  Description of Artificial Sequence: Synthetic oligonucleotide
  Sense strand starting at position 3653 of SEQ ID NO: 1881692
gggaguaauuaauuagcaa

SEQ ID NO: 2064323 - RNA, 19 nt, Artificial Sequence
  Description of Artificial Sequence: Synthetic oligonucleotide
  Antisense strand to SEQ ID NO: 2064322
uugcuaauuaauuacuccc

SEQ ID NO: 2064324 - RNA, 19 nt, Artificial Sequence
  Description of Artificial Sequence: Synthetic oligonucleotide
  Sense strand starting at position 3677 of SEQ ID NO: 1881692
guuguuuguaaggauugaa

SEQ ID NO: 2064325 - RNA, 19 nt, Artificial Sequence
  Description of Artificial Sequence: Synthetic oligonucleotide
  Antisense strand to SEQ ID NO: 2064324
uucaauccuuacaaacaac

SEQ ID NO: 2064326 - RNA, 19 nt, Artificial Sequence
  Description of Artificial Sequence: Synthetic oligonucleotide
  Sense strand starting at position 3856 of SEQ ID NO: 1881692
cagggugaguaguuuauua

SEQ ID NO: 2064327 - RNA, 19 nt, Artificial Sequence
  Description of Artificial Sequence: Synthetic oligonucleotide
  Antisense strand to SEQ ID NO: 2064326
uaauaaacuacucacccug

SEQ ID NO: 2064328 - RNA, 19 nt, Artificial Sequence
  Description of Artificial Sequence: Synthetic oligonucleotide
  Sense strand starting at position 3913 of SEQ ID NO: 1881692
ugacucagguuccuaagaa

SEQ ID NO: 2064329 - RNA, 19 nt, Artificial Sequence
  Description of Artificial Sequence: Synthetic oligonucleotide
  Antisense strand to SEQ ID NO: 2064328
uucuuaggaaccugaguca

SEQ ID NO: 2064330 - RNA, 19 nt, Artificial Sequence
  Description of Artificial Sequence: Synthetic oligonucleotide
  Sense strand starting at position 271 of SEQ ID NO: 1881693
guuuauuaucaucagcaug

SEQ ID NO: 2064331 - RNA, 19 nt, Artificial Sequence
  Description of Artificial Sequence: Synthetic oligonucleotide
  Antisense strand to SEQ ID NO: 2064330
caugcugaugauaauaaac

SEQ ID NO: 2064332 - RNA, 19 nt, Artificial Sequence
  Description of Artificial Sequence: Synthetic oligonucleotide
  Sense strand starting at position 366 of SEQ ID NO: 1881693
gaaagugcacuacaauguu

SEQ ID NO: 2064333 - RNA, 19 nt, Artificial Sequence
  Description of Artificial Sequence: Synthetic oligonucleotide
  Antisense strand to SEQ ID NO: 2064332
aacauuguagugcacuuuc

SEQ ID NO: 2064334 - RNA, 19 nt, Artificial Sequence
  Description of Artificial Sequence: Synthetic oligonucleotide
  Sense strand starting at position 376 of SEQ ID NO: 1881693
uacaauguuuagccaagga

SEQ ID NO: 2064335 - RNA, 19 nt, Artificial Sequence
  Description of Artificial Sequence: Synthetic oligonucleotide
  Antisense strand to SEQ ID NO: 2064334
uccuuggcuaaacauugua

SEQ ID NO: 2064336 - RNA, 19 nt, Artificial Sequence
  Description of Artificial Sequence: Synthetic oligonucleotide
  Sense strand starting at position 728 of SEQ ID NO: 1881693
guggcucugcaagagagaa

SEQ ID NO: 2064337 - RNA, 19 nt, Artificial Sequence
  Description of Artificial Sequence: Synthetic oligonucleotide
  Antisense strand to SEQ ID NO: 2064336
uucucucuugcagagccac

SEQ ID NO: 2064338 - RNA, 19 nt, Artificial Sequence
  Description of Artificial Sequence: Synthetic oligonucleotide
  Sense strand starting at position 746 of SEQ ID NO: 1881693
auagaauuaucugugggug

SEQ ID NO: 2064339 - RNA, 19 nt, Artificial Sequence
  Description of Artificial Sequence: Synthetic oligonucleotide
  Antisense strand to SEQ ID NO: 2064338
cacccacagauaauucuau

SEQ ID NO: 2064340 - RNA, 19 nt, Artificial Sequence
  Description of Artificial Sequence: Synthetic oligonucleotide
  Sense strand starting at position 861 of SEQ ID NO: 1881693
gaagcaguggcuuacauua

SEQ ID NO: 2064341 - RNA, 19 nt, Artificial Sequence
  Description of Artificial Sequence: Synthetic oligonucleotide
  Antisense strand to SEQ ID NO: 2064340
uaauguaagccacugcuuc

SEQ ID NO: 2064342 - RNA, 19 nt, Artificial Sequence
  Description of Artificial Sequence: Synthetic oligonucleotide
  Sense strand starting at position 917 of SEQ ID NO: 1881693
cuccaaauuguggauguuu

SEQ ID NO: 2064343 - RNA, 19 nt, Artificial Sequence
  Description of Artificial Sequence: Synthetic oligonucleotide
  Antisense strand to SEQ ID NO: 2064342
aaacauccacaauuuggag

SEQ ID NO: 2064344 - RNA, 19 nt, Artificial Sequence
  Description of Artificial Sequence: Synthetic oligonucleotide
  Sense strand starting at position 930 of SEQ ID NO: 1881693
auguuucugggaugaagua

SEQ ID NO: 2064345 - RNA, 19 nt, Artificial Sequence
  Description of Artificial Sequence: Synthetic oligonucleotide
  Antisense strand to SEQ ID NO: 2064344
uacuucaucccagaaacau

SEQ ID NO: 2064346 - RNA, 19 nt, Artificial Sequence
  Description of Artificial Sequence: Synthetic oligonucleotide
  Sense strand starting at position 1069 of SEQ ID NO: 1881693
guaaauugaagguaauugu

SEQ ID NO: 2064347 - RNA, 19 nt, Artificial Sequence
  Description of Artificial Sequence: Synthetic oligonucleotide
  Antisense strand to SEQ ID NO: 2064346
acaauuaccuucaauuuac

SEQ ID NO: 2064348 - RNA, 19 nt, Artificial Sequence
  Description of Artificial Sequence: Synthetic oligonucleotide
  Sense strand starting at position 1108 of SEQ ID NO: 1881693
gugaauaugaucuguaaag

SEQ ID NO: 2064349 - RNA, 19 nt, Artificial Sequence
  Description of Artificial Sequence: Synthetic oligonucleotide
  Antisense strand to SEQ ID NO: 2064348
cuuuacagaucauauucac

SEQ ID NO: 2064350 - RNA, 19 nt, Artificial Sequence
  Description of Artificial Sequence: Synthetic oligonucleotide
  Sense strand starting at position 1109 of SEQ ID NO: 1881693
ugaauaugaucuguaaagc

SEQ ID NO: 2064351 - RNA, 19 nt, Artificial Sequence
  Description of Artificial Sequence: Synthetic oligonucleotide
  Antisense strand to SEQ ID NO: 2064350
gcuuuacagaucauauuca

SEQ ID NO: 2064352 - RNA, 19 nt, Artificial Sequence
  Description of Artificial Sequence: Synthetic oligonucleotide
  Sense strand starting at position 1110 of SEQ ID NO: 1881693
gaauaugaucuguaaagcu

SEQ ID NO: 2064353 - RNA, 19 nt, Artificial Sequence
  Description of Artificial Sequence: Synthetic oligonucleotide
  Antisense strand to SEQ ID NO: 2064352
agcuuuacagaucauauuc

SEQ ID NO: 2064354 - RNA, 19 nt, Artificial Sequence
  Description of Artificial Sequence: Synthetic oligonucleotide
  Sense strand starting at position 1118 of SEQ ID NO: 1881693
ucuguaaagcuuuaguaaa

SEQ ID NO: 2064355 - RNA, 19 nt, Artificial Sequence
  Description of Artificial Sequence: Synthetic oligonucleotide
  Antisense strand to SEQ ID NO: 2064354
uuuacuaaagcuuuacaga

SEQ ID NO: 2064356 - RNA, 19 nt, Artificial Sequence
  Description of Artificial Sequence: Synthetic oligonucleotide
  Sense strand starting at position 1446 of SEQ ID NO: 1881693
aguuaaagauguuucuaga

SEQ ID NO: 2064357 - RNA, 19 nt, Artificial Sequence
  Description of Artificial Sequence: Synthetic oligonucleotide
  Antisense strand to SEQ ID NO: 2064356
ucuagaaacaucuuuaacu

SEQ ID NO: 2064358 - RNA, 19 nt, Artificial Sequence
  Description of Artificial Sequence: Synthetic oligonucleotide
  Sense strand starting at position 1457 of SEQ ID NO: 1881693
uuucuagagccugaagacu

SEQ ID NO: 2064359 - RNA, 19 nt, Artificial Sequence
  Description of Artificial Sequence: Synthetic oligonucleotide
  Antisense strand to SEQ ID NO: 2064358
agucuucaggcucuagaaa

SEQ ID NO: 2064360 - RNA, 19 nt, Artificial Sequence
  Description of Artificial Sequence: Synthetic oligonucleotide
  Sense strand starting at position 1466 of SEQ ID NO: 1881693
ccugaagacuuccucuuga

SEQ ID NO: 2064361 - RNA, 19 nt, Artificial Sequence
  Description of Artificial Sequence: Synthetic oligonucleotide
  Antisense strand to SEQ ID NO: 2064360
ucaagaggaagucuucagg

SEQ ID NO: 2064362 - RNA, 19 nt, Artificial Sequence
  Description of Artificial Sequence: Synthetic oligonucleotide
  Sense strand starting at position 1498 of SEQ ID NO: 1881693
ccuacaagucugcaguuaa

SEQ ID NO: 2064363 - RNA, 19 nt, Artificial Sequence
  Description of Artificial Sequence: Synthetic oligonucleotide
  Antisense strand to SEQ ID NO: 2064362
uuaacugcagacuuguagg

SEQ ID NO: 2064364 - RNA, 19 nt, Artificial Sequence
  Description of Artificial Sequence: Synthetic oligonucleotide
  Sense strand starting at position 1734 of SEQ ID NO: 1881693
guguaaggacucuacuuag

SEQ ID NO: 2064365 - RNA, 19 nt, Artificial Sequence
  Description of Artificial Sequence: Synthetic oligonucleotide
  Antisense strand to SEQ ID NO: 2064364
cuaaguagaguccuuacac

SEQ ID NO: 2064366 - RNA, 19 nt, Artificial Sequence
  Description of Artificial Sequence: Synthetic oligonucleotide
  Sense strand starting at position 2163 of SEQ ID NO: 1881693
ugugauaaccuacagguca

SEQ ID NO: 2064367 - RNA, 19 nt, Artificial Sequence
  Description of Artificial Sequence: Synthetic oligonucleotide
  Antisense strand to SEQ ID NO: 2064366
ugaccuguagguuaucaca

SEQ ID NO: 2064368 - RNA, 19 nt, Artificial Sequence
  Description of Artificial Sequence: Synthetic oligonucleotide
  Sense strand starting at position 2232 of SEQ ID NO: 1881693
uggaaagguuuggugacuu

SEQ ID NO: 2064369 - RNA, 19 nt, Artificial Sequence
  Description of Artificial Sequence: Synthetic oligonucleotide
  Antisense strand to SEQ ID NO: 2064368
aagucaccaaaccuuucca

SEQ ID NO: 2064370 - RNA, 19 nt, Artificial Sequence
  Description of Artificial Sequence: Synthetic oligonucleotide
  Sense strand starting at position 2262 of SEQ ID NO: 1881693
ucuaucucugaguaaagca

SEQ ID NO: 2064371 - RNA, 19 nt, Artificial Sequence
  Description of Artificial Sequence: Synthetic oligonucleotide
  Antisense strand to SEQ ID NO: 2064370
ugcuuuacucagagauaga

SEQ ID NO: 2064372 - RNA, 19 nt, Artificial Sequence
  Description of Artificial Sequence: Synthetic oligonucleotide
  Sense strand starting at position 2286 of SEQ ID NO: 1881693
uuaugaguuccucagauug

SEQ ID NO: 2064373 - RNA, 19 nt, Artificial Sequence
  Description of Artificial Sequence: Synthetic oligonucleotide
  Antisense strand to SEQ ID NO: 2064372
caaucugaggaacucauaa

SEQ ID NO: 2064374 - RNA, 19 nt, Artificial Sequence
  Description of Artificial Sequence: Synthetic oligonucleotide
  Sense strand starting at position 2402 of SEQ ID NO: 1881693
cguagacauuuagccugua

SEQ ID NO: 2064375 - RNA, 19 nt, Artificial Sequence
  Description of Artificial Sequence: Synthetic oligonucleotide
  Antisense strand to SEQ ID NO: 2064374
uacaggcuaaaugucuacg

SEQ ID NO: 2064376 - RNA, 19 nt, Artificial Sequence
  Description of Artificial Sequence: Synthetic oligonucleotide
  Sense strand starting at position 2405 of SEQ ID NO: 1881693
agacauuuagccuguaugu

SEQ ID NO: 2064377 - RNA, 19 nt, Artificial Sequence
  Description of Artificial Sequence: Synthetic oligonucleotide
  Antisense strand to SEQ ID NO: 2064376
acauacaggcuaaaugucu

SEQ ID NO: 2064378 - RNA, 19 nt, Artificial Sequence
  Description of Artificial Sequence: Synthetic oligonucleotide
  Sense strand starting at position 2425 of SEQ ID NO: 1881693
guaaucuaaugauuguaac

SEQ ID NO: 2064379 - RNA, 19 nt, Artificial Sequence
  Description of Artificial Sequence: Synthetic oligonucleotide
  Antisense strand to SEQ ID NO: 2064378
guuacaaucauuagauuac

SEQ ID NO: 2064380 - RNA, 19 nt, Artificial Sequence
  Description of Artificial Sequence: Synthetic oligonucleotide
  Sense strand starting at position 2766 of SEQ ID NO: 1881693
agaacugucuagucuuaag

SEQ ID NO: 2064381 - RNA, 19 nt, Artificial Sequence
  Description of Artificial Sequence: Synthetic oligonucleotide
  Antisense strand to SEQ ID NO: 2064380
cuuaagacuagacaguucu

SEQ ID NO: 2064382 - RNA, 19 nt, Artificial Sequence
  Description of Artificial Sequence: Synthetic oligonucleotide
  Sense strand starting at position 2822 of SEQ ID NO: 1881693
ucuucugagagcugagaua

SEQ ID NO: 2064383 - RNA, 19 nt, Artificial Sequence
  Description of Artificial Sequence: Synthetic oligonucleotide
  Antisense strand to SEQ ID NO: 2064382
uaucucagcucucagaaga

SEQ ID NO: 2064384 - RNA, 19 nt, Artificial Sequence
  Description of Artificial Sequence: Synthetic oligonucleotide
  Sense strand starting at position 2937 of SEQ ID NO: 1881693
uguuauugagauugagaua

SEQ ID NO: 2064385 - RNA, 19 nt, Artificial Sequence
  Description of Artificial Sequence: Synthetic oligonucleotide
  Antisense strand to SEQ ID NO: 2064384
uaucucaaucucaauaaca

SEQ ID NO: 2064386 - RNA, 19 nt, Artificial Sequence
  Description of Artificial Sequence: Synthetic oligonucleotide
  Sense strand starting at position 3021 of SEQ ID NO: 1881693
auauaaaggucuuuagcac

SEQ ID NO: 2064387 - RNA, 19 nt, Artificial Sequence
  Description of Artificial Sequence: Synthetic oligonucleotide
  Antisense strand to SEQ ID NO: 2064386
gugcuaaagaccuuuauau

SEQ ID NO: 2064388 - RNA, 19 nt, Artificial Sequence
  Description of Artificial Sequence: Synthetic oligonucleotide
  Sense strand starting at position 3142 of SEQ ID NO: 1881693
gcagauuucuuuccucguu

SEQ ID NO: 2064389 - RNA, 19 nt, Artificial Sequence
  Description of Artificial Sequence: Synthetic oligonucleotide
  Antisense strand to SEQ ID NO: 2064388
aacgaggaaagaaaucugc

SEQ ID NO: 2064390 - RNA, 19 nt, Artificial Sequence
  Description of Artificial Sequence: Synthetic oligonucleotide
  Sense strand starting at position 3273 of SEQ ID NO: 1881693
aucacaguaucuuugagua

SEQ ID NO: 2064391 - RNA, 19 nt, Artificial Sequence
  Description of Artificial Sequence: Synthetic oligonucleotide
  Antisense strand to SEQ ID NO: 2064390
uacucaaagauacugugau

SEQ ID NO: 2064392 - RNA, 19 nt, Artificial Sequence
  Description of Artificial Sequence: Synthetic oligonucleotide
  Sense strand starting at position 3277 of SEQ ID NO: 1881693
caguaucuuugaguaauug

SEQ ID NO: 2064393 - RNA, 19 nt, Artificial Sequence
  Description of Artificial Sequence: Synthetic oligonucleotide
  Antisense strand to SEQ ID NO: 2064392
caauuacucaaagauacug

SEQ ID NO: 2064394 - RNA, 19 nt, Artificial Sequence
  Description of Artificial Sequence: Synthetic oligonucleotide
  Sense strand starting at position 3287 of SEQ ID NO: 1881693
gaguaauugccuuaaucag

SEQ ID NO: 2064395 - RNA, 19 nt, Artificial Sequence
  Description of Artificial Sequence: Synthetic oligonucleotide
  Antisense strand to SEQ ID NO: 2064394
cugauuaaggcaauuacuc

SEQ ID NO: 2064396 - RNA, 19 nt, Artificial Sequence
  Description of Artificial Sequence: Synthetic oligonucleotide
  Sense strand starting at position 3384 of SEQ ID NO: 1881693
auuguauaagccuauuagu

SEQ ID NO: 2064397 - RNA, 19 nt, Artificial Sequence
  Description of Artificial Sequence: Synthetic oligonucleotide
  Antisense strand to SEQ ID NO: 2064396
acuaauaggcuuauacaau

SEQ ID NO: 2064398 - RNA, 19 nt, Artificial Sequence
  Description of Artificial Sequence: Synthetic oligonucleotide
  Sense strand starting at position 3501 of SEQ ID NO: 1881693
uugcaugacuuagucauuu

SEQ ID NO: 2064399 - RNA, 19 nt, Artificial Sequence
  Description of Artificial Sequence: Synthetic oligonucleotide
  Antisense strand to SEQ ID NO: 2064398
aaaugacuaagucaugcaa

SEQ ID NO: 2064400 - RNA, 19 nt, Artificial Sequence
  Description of Artificial Sequence: Synthetic oligonucleotide
  Sense strand starting at position 3562 of SEQ ID NO: 1881693
aaaguaaugggcuaugagu

SEQ ID NO: 2064401 - RNA, 19 nt, Artificial Sequence
  Description of Artificial Sequence: Synthetic oligonucleotide
  Antisense strand to SEQ ID NO: 2064400
acucauagcccauuacuuu

SEQ ID NO: 2064402 - RNA, 19 nt, Artificial Sequence
  Description of Artificial Sequence: Synthetic oligonucleotide
  Sense strand starting at position 3576 of SEQ ID NO: 1881693
ugagucauacucuacuauu

SEQ ID NO: 2064403 - RNA, 19 nt, Artificial Sequence
  Description of Artificial Sequence: Synthetic oligonucleotide
  Antisense strand to SEQ ID NO: 2064402
aauaguagaguaugacuca

SEQ ID NO: 2064404 - RNA, 19 nt, Artificial Sequence
  Description of Artificial Sequence: Synthetic oligonucleotide
  Sense strand starting at position 3854 of SEQ ID NO: 1881693
gucacuguggcuuugugua

SEQ ID NO: 2064405 - RNA, 19 nt, Artificial Sequence
  Description of Artificial Sequence: Synthetic oligonucleotide
  Antisense strand to SEQ ID NO: 2064404
uacacaaagccacagugac

SEQ ID NO: 2064406 - RNA, 19 nt, Artificial Sequence
  Description of Artificial Sequence: Synthetic oligonucleotide
  Sense strand starting at position 3877 of SEQ ID NO: 1881693
uguauauugcaggagguaa

SEQ ID NO: 2064407 - RNA, 19 nt, Artificial Sequence
  Description of Artificial Sequence: Synthetic oligonucleotide
  Antisense strand to SEQ ID NO: 2064406
uuaccuccugcaauauaca

SEQ ID NO: 2064408 - RNA, 19 nt, Artificial Sequence
  Description of Artificial Sequence: Synthetic oligonucleotide
  Sense strand starting at position 3949 of SEQ ID NO: 1881693
acaagcaaguuaucuaaga

SEQ ID NO: 2064409 - RNA, 19 nt, Artificial Sequence
  Description of Artificial Sequence: Synthetic oligonucleotide
  Antisense strand to SEQ ID NO: 2064408
ucuuagauaacuugcuugu

SEQ ID NO: 2064410 - RNA, 19 nt, Artificial Sequence
  Description of Artificial Sequence: Synthetic oligonucleotide
  Sense strand starting at position 368 of SEQ ID NO: 1881694
cugacuagaugguuaguca

SEQ ID NO: 2064411 - RNA, 19 nt, Artificial Sequence
  Description of Artificial Sequence: Synthetic oligonucleotide
  Antisense strand to SEQ ID NO: 2064410
ugacuaaccaucuagucag

SEQ ID NO: 2064412 - RNA, 19 nt, Artificial Sequence
  Description of Artificial Sequence: Synthetic oligonucleotide
  Sense strand starting at position 369 of SEQ ID NO: 1881694
ugacuagaugguuagucau

SEQ ID NO: 2064413 - RNA, 19 nt, Artificial Sequence
  Description of Artificial Sequence: Synthetic oligonucleotide
  Antisense strand to SEQ ID NO: 2064412
augacuaaccaucuaguca

SEQ ID NO: 2064414 - RNA, 19 nt, Artificial Sequence
  Description of Artificial Sequence: Synthetic oligonucleotide
  Sense strand starting at position 371 of SEQ ID NO: 1881694
acuagaugguuagucauaa

SEQ ID NO: 2064415 - RNA, 19 nt, Artificial Sequence
  Description of Artificial Sequence: Synthetic oligonucleotide
  Antisense strand to SEQ ID NO: 2064414
uuaugacuaaccaucuagu

SEQ ID NO: 2064416 - RNA, 19 nt, Artificial Sequence
  Description of Artificial Sequence: Synthetic oligonucleotide
  Sense strand starting at position 372 of SEQ ID NO: 1881694
cuagaugguuagucauaaa

SEQ ID NO: 2064417 - RNA, 19 nt, Artificial Sequence
  Description of Artificial Sequence: Synthetic oligonucleotide
  Antisense strand to SEQ ID NO: 2064416
uuuaugacuaaccaucuag

SEQ ID NO: 2064418 - RNA, 19 nt, Artificial Sequence
  Description of Artificial Sequence: Synthetic oligonucleotide
  Sense strand starting at position 412 of SEQ ID NO: 1881694
agagcaaguccauaauuau

SEQ ID NO: 2064419 - RNA, 19 nt, Artificial Sequence
  Description of Artificial Sequence: Synthetic oligonucleotide
  Antisense strand to SEQ ID NO: 2064418
auaauuauggacuugcucu

SEQ ID NO: 2064420 - RNA, 19 nt, Artificial Sequence
  Description of Artificial Sequence: Synthetic oligonucleotide
  Sense strand starting at position 623 of SEQ ID NO: 1881694
gccaaagauuauccacagu

SEQ ID NO: 2064421 - RNA, 19 nt, Artificial Sequence
  Description of Artificial Sequence: Synthetic oligonucleotide
  Antisense strand to SEQ ID NO: 2064420
acuguggauaaucuuuggc

SEQ ID NO: 2064422 - RNA, 19 nt, Artificial Sequence
  Description of Artificial Sequence: Synthetic oligonucleotide
  Sense strand starting at position 643 of SEQ ID NO: 1881694
agccaaaucgaucaacagu

SEQ ID NO: 2064423 - RNA, 19 nt, Artificial Sequence
  Description of Artificial Sequence: Synthetic oligonucleotide
  Antisense strand to SEQ ID NO: 2064422
acuguugaucgauuuggcu

SEQ ID NO: 2064424 - RNA, 19 nt, Artificial Sequence
  Description of Artificial Sequence: Synthetic oligonucleotide
  Sense strand starting at position 771 of SEQ ID NO: 1881694
agcauagaugcacagcaau

SEQ ID NO: 2064425 - RNA, 19 nt, Artificial Sequence
  Description of Artificial Sequence: Synthetic oligonucleotide
  Antisense strand to SEQ ID NO: 2064424
auugcugugcaucuaugcu

SEQ ID NO: 2064426 - RNA, 19 nt, Artificial Sequence
  Description of Artificial Sequence: Synthetic oligonucleotide
  Sense strand starting at position 912 of SEQ ID NO: 1881694
aguggugacuacuuuggaa

SEQ ID NO: 2064427 - RNA, 19 nt, Artificial Sequence
  Description of Artificial Sequence: Synthetic oligonucleotide
  Antisense strand to SEQ ID NO: 2064426
uuccaaaguagucaccacu

SEQ ID NO: 2064428 - RNA, 19 nt, Artificial Sequence
  Description of Artificial Sequence: Synthetic oligonucleotide
  Sense strand starting at position 914 of SEQ ID NO: 1881694
uggugacuacuuuggaaca

SEQ ID NO: 2064429 - RNA, 19 nt, Artificial Sequence
  Description of Artificial Sequence: Synthetic oligonucleotide
  Antisense strand to SEQ ID NO: 2064428
uguuccaaaguagucacca

SEQ ID NO: 2064430 - RNA, 19 nt, Artificial Sequence
  Description of Artificial Sequence: Synthetic oligonucleotide
  Sense strand starting at position 972 of SEQ ID NO: 1881694
uuagucaaagcuuacagau

SEQ ID NO: 2064431 - RNA, 19 nt, Artificial Sequence
  Description of Artificial Sequence: Synthetic oligonucleotide
  Antisense strand to SEQ ID NO: 2064430
aucuguaagcuuugacuaa

SEQ ID NO: 2064432 - RNA, 19 nt, Artificial Sequence
  Description of Artificial Sequence: Synthetic oligonucleotide
  Sense strand starting at position 1188 of SEQ ID NO: 1881694
ucaauuauugucuaucagu

SEQ ID NO: 2064433 - RNA, 19 nt, Artificial Sequence
  Description of Artificial Sequence: Synthetic oligonucleotide
  Antisense strand to SEQ ID NO: 2064432
acugauagacaauaauuga

SEQ ID NO: 2064434 - RNA, 19 nt, Artificial Sequence
  Description of Artificial Sequence: Synthetic oligonucleotide
  Sense strand starting at position 1308 of SEQ ID NO: 1881694
agcacauaggcugacagau

SEQ ID NO: 2064435 - RNA, 19 nt, Artificial Sequence
  Description of Artificial Sequence: Synthetic oligonucleotide
  Antisense strand to SEQ ID NO: 2064434
aucugucagccuaugugcu

SEQ ID NO: 2064436 - RNA, 19 nt, Artificial Sequence
  Description of Artificial Sequence: Synthetic oligonucleotide
  Sense strand starting at position 1363 of SEQ ID NO: 1881694
agccuugaaagugauguaa

SEQ ID NO: 2064437 - RNA, 19 nt, Artificial Sequence
  Description of Artificial Sequence: Synthetic oligonucleotide
  Antisense strand to SEQ ID NO: 2064436
uuacaucacuuucaaggcu

SEQ ID NO: 2064438 - RNA, 19 nt, Artificial Sequence
  Description of Artificial Sequence: Synthetic oligonucleotide
  Sense strand starting at position 1461 of SEQ ID NO: 1881694
uagaaagcaguuugacaau

SEQ ID NO: 2064439 - RNA, 19 nt, Artificial Sequence
  Description of Artificial Sequence: Synthetic oligonucleotide
  Antisense strand to SEQ ID NO: 2064438
auugucaaacugcuuucua

SEQ ID NO: 2064440 - RNA, 19 nt, Artificial Sequence
  Description of Artificial Sequence: Synthetic oligonucleotide
  Sense strand starting at position 1467 of SEQ ID NO: 1881694
gcaguuugacaauacauaa

SEQ ID NO: 2064441 - RNA, 19 nt, Artificial Sequence
  Description of Artificial Sequence: Synthetic oligonucleotide
  Antisense strand to SEQ ID NO: 2064440
uuauguauugucaaacugc

SEQ ID NO: 2064442 - RNA, 19 nt, Artificial Sequence
  Description of Artificial Sequence: Synthetic oligonucleotide
  Sense strand starting at position 1597 of SEQ ID NO: 1881694
aagucaauagauugugaaa

SEQ ID NO: 2064443 - RNA, 19 nt, Artificial Sequence
  Description of Artificial Sequence: Synthetic oligonucleotide
  Antisense strand to SEQ ID NO: 2064442
uuucacaaucuauugacuu

SEQ ID NO: 2064444 - RNA, 19 nt, Artificial Sequence
  Description of Artificial Sequence: Synthetic oligonucleotide
  Sense strand starting at position 1606 of SEQ ID NO: 1881694
gauugugaaauuggaugua

SEQ ID NO: 2064445 - RNA, 19 nt, Artificial Sequence
  Description of Artificial Sequence: Synthetic oligonucleotide
  Antisense strand to SEQ ID NO: 2064444
uacauccaauuucacaauc

SEQ ID NO: 2064446 - RNA, 19 nt, Artificial Sequence
  Description of Artificial Sequence: Synthetic oligonucleotide
  Sense strand starting at position 1609 of SEQ ID NO: 1881694
ugugaaauuggauguaaau

SEQ ID NO: 2064447 - RNA, 19 nt, Artificial Sequence
  Description of Artificial Sequence: Synthetic oligonucleotide
  Antisense strand to SEQ ID NO: 2064446
auuuacauccaauuucaca

SEQ ID NO: 2064448 - RNA, 19 nt, Artificial Sequence
  Description of Artificial Sequence: Synthetic oligonucleotide
  Sense strand starting at position 1642 of SEQ ID NO: 1881694
auaugaauguucuugacau

SEQ ID NO: 2064449 - RNA, 19 nt, Artificial Sequence
  Description of Artificial Sequence: Synthetic oligonucleotide
  Antisense strand to SEQ ID NO: 2064448
augucaagaacauucauau

SEQ ID NO: 2064450 - RNA, 19 nt, Artificial Sequence
  Description of Artificial Sequence: Synthetic oligonucleotide
  Sense strand starting at position 2021 of SEQ ID NO: 1881694
gguaaaguucuguauugau

SEQ ID NO: 2064451 - RNA, 19 nt, Artificial Sequence
  Description of Artificial Sequence: Synthetic oligonucleotide
  Antisense strand to SEQ ID NO: 2064450
aucaauacagaacuuuacc

SEQ ID NO: 2064452 - RNA, 19 nt, Artificial Sequence
  Description of Artificial Sequence: Synthetic oligonucleotide
  Sense strand starting at position 2056 of SEQ ID NO: 1881694
aagaaauaauaguugcagu

SEQ ID NO: 2064453 - RNA, 19 nt, Artificial Sequence
  Description of Artificial Sequence: Synthetic oligonucleotide
  Antisense strand to SEQ ID NO: 2064452
acugcaacuauuauuucuu

SEQ ID NO: 2064454 - RNA, 19 nt, Artificial Sequence
  Description of Artificial Sequence: Synthetic oligonucleotide
  Sense strand starting at position 2094 of SEQ ID NO: 1881694
ucuauagaacugugaucca

SEQ ID NO: 2064455 - RNA, 19 nt, Artificial Sequence
  Description of Artificial Sequence: Synthetic oligonucleotide
  Antisense strand to SEQ ID NO: 2064454
uggaucacaguucuauaga

SEQ ID NO: 2064456 - RNA, 19 nt, Artificial Sequence
  Description of Artificial Sequence: Synthetic oligonucleotide
  Sense strand starting at position 2097 of SEQ ID NO: 1881694
auagaacugugauccaauc

SEQ ID NO: 2064457 - RNA, 19 nt, Artificial Sequence
  Description of Artificial Sequence: Synthetic oligonucleotide
  Antisense strand to SEQ ID NO: 2064456
gauuggaucacaguucuau

SEQ ID NO: 2064458 - RNA, 19 nt, Artificial Sequence
  Description of Artificial Sequence: Synthetic oligonucleotide
  Sense strand starting at position 2717 of SEQ ID NO: 1881694
guuguuaaaggcuauagau

SEQ ID NO: 2064459 - RNA, 19 nt, Artificial Sequence
  Description of Artificial Sequence: Synthetic oligonucleotide
  Antisense strand to SEQ ID NO: 2064458
aucuauagccuuuaacaac

SEQ ID NO: 2064460 - RNA, 19 nt, Artificial Sequence
  Description of Artificial Sequence: Synthetic oligonucleotide
  Sense strand starting at position 2719 of SEQ ID NO: 1881694
uguuaaaggcuauagauac

SEQ ID NO: 2064461 - RNA, 19 nt, Artificial Sequence
  Description of Artificial Sequence: Synthetic oligonucleotide
  Antisense strand to SEQ ID NO: 2064460
guaucuauagccuuuaaca

SEQ ID NO: 2064462 - RNA, 19 nt, Artificial Sequence
  Description of Artificial Sequence: Synthetic oligonucleotide
  Sense strand starting at position 2801 of SEQ ID NO: 1881694
ugguuuauuugagaagaag

SEQ ID NO: 2064463 - RNA, 19 nt, Artificial Sequence
  Description of Artificial Sequence: Synthetic oligonucleotide
  Antisense strand to SEQ ID NO: 2064462
cuucuucucaaauaaacca

SEQ ID NO: 2064464 - RNA, 19 nt, Artificial Sequence
  Description of Artificial Sequence: Synthetic oligonucleotide
  Sense strand starting at position 2817 of SEQ ID NO: 1881694
aagcuuauuugggaagaag

SEQ ID NO: 2064465 - RNA, 19 nt, Artificial Sequence
  Description of Artificial Sequence: Synthetic oligonucleotide
  Antisense strand to SEQ ID NO: 2064464
cuucuucccaaauaagcuu

SEQ ID NO: 2064466 - RNA, 19 nt, Artificial Sequence
  Description of Artificial Sequence: Synthetic oligonucleotide
  Sense strand starting at position 2902 of SEQ ID NO: 1881694
aagauaucuagugguggga

SEQ ID NO: 2064467 - RNA, 19 nt, Artificial Sequence
  Description of Artificial Sequence: Synthetic oligonucleotide
  Antisense strand to SEQ ID NO: 2064466
ucccaccacuagauaucuu

SEQ ID NO: 2064468 - RNA, 19 nt, Artificial Sequence
  Description of Artificial Sequence: Synthetic oligonucleotide
  Sense strand starting at position 2905 of SEQ ID NO: 1881694
auaucuaguggugggagau

SEQ ID NO: 2064469 - RNA, 19 nt, Artificial Sequence
  Description of Artificial Sequence: Synthetic oligonucleotide
  Antisense strand to SEQ ID NO: 2064468
aucucccaccacuagauau

SEQ ID NO: 2064470 - RNA, 19 nt, Artificial Sequence
  Description of Artificial Sequence: Synthetic oligonucleotide
  Sense strand starting at position 2906 of SEQ ID NO: 1881694
uaucuaguggugggagaua

SEQ ID NO: 2064471 - RNA, 19 nt, Artificial Sequence
  Description of Artificial Sequence: Synthetic oligonucleotide
  Antisense strand to SEQ ID NO: 2064470
uaucucccaccacuagaua

SEQ ID NO: 2064472 - RNA, 19 nt, Artificial Sequence
  Description of Artificial Sequence: Synthetic oligonucleotide
  Sense strand starting at position 2918 of SEQ ID NO: 1881694
ggagauaauuaggaaauag

SEQ ID NO: 2064473 - RNA, 19 nt, Artificial Sequence
  Description of Artificial Sequence: Synthetic oligonucleotide
  Antisense strand to SEQ ID NO: 2064472
cuauuuccuaauuaucucc

SEQ ID NO: 2064474 - RNA, 19 nt, Artificial Sequence
  Description of Artificial Sequence: Synthetic oligonucleotide
  Sense strand starting at position 3141 of SEQ ID NO: 1881694
guguuaucccauuaucuaa

SEQ ID NO: 2064475 - RNA, 19 nt, Artificial Sequence
  Description of Artificial Sequence: Synthetic oligonucleotide
  Antisense strand to SEQ ID NO: 2064474
uuagauaaugggauaacac

SEQ ID NO: 2064476 - RNA, 19 nt, Artificial Sequence
  Description of Artificial Sequence: Synthetic oligonucleotide
  Sense strand starting at position 3179 of SEQ ID NO: 1881694
uguacacuugucuaccaaa

SEQ ID NO: 2064477 - RNA, 19 nt, Artificial Sequence
  Description of Artificial Sequence: Synthetic oligonucleotide
  Antisense strand to SEQ ID NO: 2064476
uuugguagacaaguguaca

SEQ ID NO: 2064478 - RNA, 19 nt, Artificial Sequence
  Description of Artificial Sequence: Synthetic oligonucleotide
  Sense strand starting at position 3413 of SEQ ID NO: 1881694
ugcuaaucacuuuauguag

SEQ ID NO: 2064479 - RNA, 19 nt, Artificial Sequence
  Description of Artificial Sequence: Synthetic oligonucleotide
  Antisense strand to SEQ ID NO: 2064478
cuacauaaagugauuagca

SEQ ID NO: 2064480 - RNA, 19 nt, Artificial Sequence
  Description of Artificial Sequence: Synthetic oligonucleotide
  Sense strand starting at position 3480 of SEQ ID NO: 1881694
uuaucagaucacugauuag

SEQ ID NO: 2064481 - RNA, 19 nt, Artificial Sequence
  Description of Artificial Sequence: Synthetic oligonucleotide
  Antisense strand to SEQ ID NO: 2064480
cuaaucagugaucugauaa

SEQ ID NO: 2064482 - RNA, 19 nt, Artificial Sequence
  Description of Artificial Sequence: Synthetic oligonucleotide
  Sense strand starting at position 3498 of SEQ ID NO: 1881694
gauaauaaauuagagagga

SEQ ID NO: 2064483 - RNA, 19 nt, Artificial Sequence
  Description of Artificial Sequence: Synthetic oligonucleotide
  Antisense strand to SEQ ID NO: 2064482
uccucucuaauuuauuauc

SEQ ID NO: 2064484 - RNA, 19 nt, Artificial Sequence
  Description of Artificial Sequence: Synthetic oligonucleotide
  Sense strand starting at position 3511 of SEQ ID NO: 1881694
agaggagucacguaaguug

SEQ ID NO: 2064485 - RNA, 19 nt, Artificial Sequence
  Description of Artificial Sequence: Synthetic oligonucleotide
  Antisense strand to SEQ ID NO: 2064484
caacuuacgugacuccucu

SEQ ID NO: 2064486 - RNA, 19 nt, Artificial Sequence
  Description of Artificial Sequence: Synthetic oligonucleotide
  Sense strand starting at position 3610 of SEQ ID NO: 1881694
cgcugcuuugucucucaaa

SEQ ID NO: 2064487 - RNA, 19 nt, Artificial Sequence
  Description of Artificial Sequence: Synthetic oligonucleotide
  Antisense strand to SEQ ID NO: 2064486
uuugagagacaaagcagcg

SEQ ID NO: 2064488 - RNA, 19 nt, Artificial Sequence
  Description of Artificial Sequence: Synthetic oligonucleotide
  Sense strand starting at position 3835 of SEQ ID NO: 1881694
gguguacuggguuauuaug

SEQ ID NO: 2064489 - RNA, 19 nt, Artificial Sequence
  Description of Artificial Sequence: Synthetic oligonucleotide
  Antisense strand to SEQ ID NO: 2064488
cauaauaacccaguacacc

SEQ ID NO: 2064490 - RNA, 19 nt, Artificial Sequence
  Description of Artificial Sequence: Synthetic oligonucleotide
  Sense strand starting at position 1 of SEQ ID NO: 1881696
gacagucuauguuucuaag

SEQ ID NO: 2064491 - RNA, 19 nt, Artificial Sequence
  Description of Artificial Sequence: Synthetic oligonucleotide
  Antisense strand to SEQ ID NO: 2064490
cuuagaaacauagacuguc

SEQ ID NO: 2064492 - RNA, 19 nt, Artificial Sequence
  Description of Artificial Sequence: Synthetic oligonucleotide
  Sense strand starting at position 30 of SEQ ID NO: 1881696
ucacuugugcacuggauuu

SEQ ID NO: 2064493 - RNA, 19 nt, Artificial Sequence
  Description of Artificial Sequence: Synthetic oligonucleotide
  Antisense strand to SEQ ID NO: 2064492
aaauccagugcacaaguga

SEQ ID NO: 2064494 - RNA, 19 nt, Artificial Sequence
  Description of Artificial Sequence: Synthetic oligonucleotide
  Sense strand starting at position 57 of SEQ ID NO: 1881696
uuggcuacucagggacaau

SEQ ID NO: 2064495 - RNA, 19 nt, Artificial Sequence
  Description of Artificial Sequence: Synthetic oligonucleotide
  Antisense strand to SEQ ID NO: 2064494
auugucccugaguagccaa

SEQ ID NO: 2064496 - RNA, 19 nt, Artificial Sequence
  Description of Artificial Sequence: Synthetic oligonucleotide
  Sense strand starting at position 69 of SEQ ID NO: 1881696
ggacaaugcccuuacaguu

SEQ ID NO: 2064497 - RNA, 19 nt, Artificial Sequence
  Description of Artificial Sequence: Synthetic oligonucleotide
  Antisense strand to SEQ ID NO: 2064496
aacuguaagggcauugucc

SEQ ID NO: 2064498 - RNA, 19 nt, Artificial Sequence
  Description of Artificial Sequence: Synthetic oligonucleotide
  Sense strand starting at position 526 of SEQ ID NO: 1881696
aucuuagugcuaugauaca

SEQ ID NO: 2064499 - RNA, 19 nt, Artificial Sequence
  Description of Artificial Sequence: Synthetic oligonucleotide
  Antisense strand to SEQ ID NO: 2064498
uguaucauagcacuaagau

SEQ ID NO: 2064500 - RNA, 19 nt, Artificial Sequence
  Description of Artificial Sequence: Synthetic oligonucleotide
  Sense strand starting at position 715 of SEQ ID NO: 1881696
aguucaguggagcaauguu

SEQ ID NO: 2064501 - RNA, 19 nt, Artificial Sequence
  Description of Artificial Sequence: Synthetic oligonucleotide
  Antisense strand to SEQ ID NO: 2064500
aacauugcuccacugaacu

SEQ ID NO: 2064502 - RNA, 19 nt, Artificial Sequence
  Description of Artificial Sequence: Synthetic oligonucleotide
  Sense strand starting at position 777 of SEQ ID NO: 1881696
aggccugagacuugaacuu

SEQ ID NO: 2064503 - RNA, 19 nt, Artificial Sequence
  Description of Artificial Sequence: Synthetic oligonucleotide
  Antisense strand to SEQ ID NO: 2064502
aaguucaagucucaggccu

SEQ ID NO: 2064504 - RNA, 19 nt, Artificial Sequence
  Description of Artificial Sequence: Synthetic oligonucleotide
  Sense strand starting at position 828 of SEQ ID NO: 1881696
ugacuugugaagugaaaga

SEQ ID NO: 2064505 - RNA, 19 nt, Artificial Sequence
  Description of Artificial Sequence: Synthetic oligonucleotide
  Antisense strand to SEQ ID NO: 2064504
ucuuucacuucacaaguca

SEQ ID NO: 2064506 - RNA, 19 nt, Artificial Sequence
  Description of Artificial Sequence: Synthetic oligonucleotide
  Sense strand starting at position 864 of SEQ ID NO: 1881696
ucagauugacgaugauagu

SEQ ID NO: 2064507 - RNA, 19 nt, Artificial Sequence
  Description of Artificial Sequence: Synthetic oligonucleotide
  Antisense strand to SEQ ID NO: 2064506
acuaucaucgucaaucuga

SEQ ID NO: 2064508 - RNA, 19 nt, Artificial Sequence
  Description of Artificial Sequence: Synthetic oligonucleotide
  Sense strand starting at position 883 of SEQ ID NO: 1881696
aacagucauggugguauau

SEQ ID NO: 2064509 - RNA, 19 nt, Artificial Sequence
  Description of Artificial Sequence: Synthetic oligonucleotide
  Antisense strand to SEQ ID NO: 2064508
auauaccaccaugacuguu

SEQ ID NO: 2064510 - RNA, 19 nt, Artificial Sequence
  Description of Artificial Sequence: Synthetic oligonucleotide
  Sense strand starting at position 946 of SEQ ID NO: 1881696
auacacgcccuuuaguaua

SEQ ID NO: 2064511 - RNA, 19 nt, Artificial Sequence
  Description of Artificial Sequence: Synthetic oligonucleotide
  Antisense strand to SEQ ID NO: 2064510
uauacuaaagggcguguau

SEQ ID NO: 2064512 - RNA, 19 nt, Artificial Sequence
  Description of Artificial Sequence: Synthetic oligonucleotide
  Sense strand starting at position 1262 of SEQ ID NO: 1881696
gcaauuacaugauugucuu

SEQ ID NO: 2064513 - RNA, 19 nt, Artificial Sequence
  Description of Artificial Sequence: Synthetic oligonucleotide
  Antisense strand to SEQ ID NO: 2064512
aagacaaucauguaauugc

SEQ ID NO: 2064514 - RNA, 19 nt, Artificial Sequence
  Description of Artificial Sequence: Synthetic oligonucleotide
  Sense strand starting at position 1266 of SEQ ID NO: 1881696
uuacaugauugucuucuuu

SEQ ID NO: 2064515 - RNA, 19 nt, Artificial Sequence
  Description of Artificial Sequence: Synthetic oligonucleotide
  Antisense strand to SEQ ID NO: 2064514
aaagaagacaaucauguaa

SEQ ID NO: 2064516 - RNA, 19 nt, Artificial Sequence
  Description of Artificial Sequence: Synthetic oligonucleotide
  Sense strand starting at position 1592 of SEQ ID NO: 1881696
gggcuuaucgccuugccaa

SEQ ID NO: 2064517 - RNA, 19 nt, Artificial Sequence
  Description of Artificial Sequence: Synthetic oligonucleotide
  Antisense strand to SEQ ID NO: 2064516
uuggcaaggcgauaagccc

SEQ ID NO: 2064518 - RNA, 19 nt, Artificial Sequence
  Description of Artificial Sequence: Synthetic oligonucleotide
  Sense strand starting at position 1727 of SEQ ID NO: 1881696
gacggaagcuugucaggga

SEQ ID NO: 2064519 - RNA, 19 nt, Artificial Sequence
  Description of Artificial Sequence: Synthetic oligonucleotide
  Antisense strand to SEQ ID NO: 2064518
ucccugacaagcuuccguc

SEQ ID NO: 2064520 - RNA, 19 nt, Artificial Sequence
  Description of Artificial Sequence: Synthetic oligonucleotide
  Sense strand starting at position 1732 of SEQ ID NO: 1881696
aagcuugucagggaagagu

SEQ ID NO: 2064521 - RNA, 19 nt, Artificial Sequence
  Description of Artificial Sequence: Synthetic oligonucleotide
  Antisense strand to SEQ ID NO: 2064520
acucuucccugacaagcuu

SEQ ID NO: 2064522 - RNA, 19 nt, Artificial Sequence
  Description of Artificial Sequence: Synthetic oligonucleotide
  Sense strand starting at position 1752 of SEQ ID NO: 1881696
cauagaaggcgucaccuuu

SEQ ID NO: 2064523 - RNA, 19 nt, Artificial Sequence
  Description of Artificial Sequence: Synthetic oligonucleotide
  Antisense strand to SEQ ID NO: 2064522
aaaggugacgccuucuaug

SEQ ID NO: 2064524 - RNA, 19 nt, Artificial Sequence
  Description of Artificial Sequence: Synthetic oligonucleotide
  Sense strand starting at position 1758 of SEQ ID NO: 1881696
aggcgucaccuuuaggaga

SEQ ID NO: 2064525 - RNA, 19 nt, Artificial Sequence
  Description of Artificial Sequence: Synthetic oligonucleotide
  Antisense strand to SEQ ID NO: 2064524
ucuccuaaaggugacgccu

SEQ ID NO: 2064526 - RNA, 19 nt, Artificial Sequence
  Description of Artificial Sequence: Synthetic oligonucleotide
  Sense strand starting at position 1772 of SEQ ID NO: 1881696
ggagacauccucugucaua

SEQ ID NO: 2064527 - RNA, 19 nt, Artificial Sequence
  Description of Artificial Sequence: Synthetic oligonucleotide
  Antisense strand to SEQ ID NO: 2064526
uaugacagaggaugucucc

SEQ ID NO: 2064528 - RNA, 19 nt, Artificial Sequence
  Description of Artificial Sequence: Synthetic oligonucleotide
  Sense strand starting at position 1773 of SEQ ID NO: 1881696
gagacauccucugucauag

SEQ ID NO: 2064529 - RNA, 19 nt, Artificial Sequence
  Description of Artificial Sequence: Synthetic oligonucleotide
  Antisense strand to SEQ ID NO: 2064528
cuaugacagaggaugucuc

SEQ ID NO: 2064530 - RNA, 19 nt, Artificial Sequence
  Description of Artificial Sequence: Synthetic oligonucleotide
  Sense strand starting at position 2444 of SEQ ID NO: 1881696
cagcuaaaccgugaggaca

SEQ ID NO: 2064531 - RNA, 19 nt, Artificial Sequence
  Description of Artificial Sequence: Synthetic oligonucleotide
  Antisense strand to SEQ ID NO: 2064530
uguccucacgguuuagcug

SEQ ID NO: 2064532 - RNA, 19 nt, Artificial Sequence
  Description of Artificial Sequence: Synthetic oligonucleotide
  Sense strand starting at position 2491 of SEQ ID NO: 1881696
ccaugaccucauggaacua

SEQ ID NO: 2064533 - RNA, 19 nt, Artificial Sequence
  Description of Artificial Sequence: Synthetic oligonucleotide
  Antisense strand to SEQ ID NO: 2064532
uaguuccaugaggucaugg

SEQ ID NO: 2064534 - RNA, 19 nt, Artificial Sequence
  Description of Artificial Sequence: Synthetic oligonucleotide
  Sense strand starting at position 2598 of SEQ ID NO: 1881696
guguguccugugagagcua

SEQ ID NO: 2064535 - RNA, 19 nt, Artificial Sequence
  Description of Artificial Sequence: Synthetic oligonucleotide
  Antisense strand to SEQ ID NO: 2064534
uagcucucacaggacacac

SEQ ID NO: 2064536 - RNA, 19 nt, Artificial Sequence
  Description of Artificial Sequence: Synthetic oligonucleotide
  Sense strand starting at position 2632 of SEQ ID NO: 1881696
ugacaaucugagugucagu

SEQ ID NO: 2064537 - RNA, 19 nt, Artificial Sequence
  Description of Artificial Sequence: Synthetic oligonucleotide
  Antisense strand to SEQ ID NO: 2064536
acugacacucagauuguca

SEQ ID NO: 2064538 - RNA, 19 nt, Artificial Sequence
  Description of Artificial Sequence: Synthetic oligonucleotide
  Sense strand starting at position 2639 of SEQ ID NO: 1881696
cugagugucagugagggaa

SEQ ID NO: 2064539 - RNA, 19 nt, Artificial Sequence
  Description of Artificial Sequence: Synthetic oligonucleotide
  Antisense strand to SEQ ID NO: 2064538
uucccucacugacacucag

SEQ ID NO: 2064540 - RNA, 19 nt, Artificial Sequence
  Description of Artificial Sequence: Synthetic oligonucleotide
  Sense strand starting at position 2721 of SEQ ID NO: 1881696
ggcuuuguggcacaaagaa

SEQ ID NO: 2064541 - RNA, 19 nt, Artificial Sequence
  Description of Artificial Sequence: Synthetic oligonucleotide
  Antisense strand to SEQ ID NO: 2064540
uucuuugugccacaaagcc

SEQ ID NO: 2064542 - RNA, 19 nt, Artificial Sequence
  Description of Artificial Sequence: Synthetic oligonucleotide
  Sense strand starting at position 2886 of SEQ ID NO: 1881696
agauauuugucuuuagcuu

SEQ ID NO: 2064543 - RNA, 19 nt, Artificial Sequence
  Description of Artificial Sequence: Synthetic oligonucleotide
  Antisense strand to SEQ ID NO: 2064542
aagcuaaagacaaauaucu

SEQ ID NO: 2064544 - RNA, 19 nt, Artificial Sequence
  Description of Artificial Sequence: Synthetic oligonucleotide
  Sense strand starting at position 2890 of SEQ ID NO: 1881696
auuugucuuuagcuuucua

SEQ ID NO: 2064545 - RNA, 19 nt, Artificial Sequence
  Description of Artificial Sequence: Synthetic oligonucleotide
  Antisense strand to SEQ ID NO: 2064544
uagaaagcuaaagacaaau

SEQ ID NO: 2064546 - RNA, 19 nt, Artificial Sequence
  Description of Artificial Sequence: Synthetic oligonucleotide
  Sense strand starting at position 2965 of SEQ ID NO: 1881696
uccgguuacuaacucuuaa

SEQ ID NO: 2064547 - RNA, 19 nt, Artificial Sequence
  Description of Artificial Sequence: Synthetic oligonucleotide
  Antisense strand to SEQ ID NO: 2064546
uuaagaguuaguaaccgga

SEQ ID NO: 2064548 - RNA, 19 nt, Artificial Sequence
  Description of Artificial Sequence: Synthetic oligonucleotide
  Sense strand starting at position 3123 of SEQ ID NO: 1881696
agccaaauacuuuggccau

SEQ ID NO: 2064549 - RNA, 19 nt, Artificial Sequence
  Description of Artificial Sequence: Synthetic oligonucleotide
  Antisense strand to SEQ ID NO: 2064548
auggccaaaguauuuggcu

SEQ ID NO: 2064550 - RNA, 19 nt, Artificial Sequence
  Description of Artificial Sequence: Synthetic oligonucleotide
  Sense strand starting at position 3241 of SEQ ID NO: 1881696
augugauaccuuuacaugu

SEQ ID NO: 2064551 - RNA, 19 nt, Artificial Sequence
  Description of Artificial Sequence: Synthetic oligonucleotide
  Antisense strand to SEQ ID NO: 2064550
acauguaaagguaucacau

SEQ ID NO: 2064552 - RNA, 19 nt, Artificial Sequence
  Description of Artificial Sequence: Synthetic oligonucleotide
  Sense strand starting at position 3302 of SEQ ID NO: 1881696
gauaucagagacugguuua

SEQ ID NO: 2064553 - RNA, 19 nt, Artificial Sequence
  Description of Artificial Sequence: Synthetic oligonucleotide
  Antisense strand to SEQ ID NO: 2064552
uaaaccagucucugauauc

SEQ ID NO: 2064554 - RNA, 19 nt, Artificial Sequence
  Description of Artificial Sequence: Synthetic oligonucleotide
  Sense strand starting at position 3305 of SEQ ID NO: 1881696
aucagagacugguuuacaa

SEQ ID NO: 2064555 - RNA, 19 nt, Artificial Sequence
  Description of Artificial Sequence: Synthetic oligonucleotide
  Antisense strand to SEQ ID NO: 2064554
uuguaaaccagucucugau

SEQ ID NO: 2064556 - RNA, 19 nt, Artificial Sequence
  Description of Artificial Sequence: Synthetic oligonucleotide
  Sense strand starting at position 3427 of SEQ ID NO: 1881696
ggagcuuugcucgaauaua

SEQ ID NO: 2064557 - RNA, 19 nt, Artificial Sequence
  Description of Artificial Sequence: Synthetic oligonucleotide
  Antisense strand to SEQ ID NO: 2064556
uauauucgagcaaagcucc

SEQ ID NO: 2064558 - RNA, 19 nt, Artificial Sequence
  Description of Artificial Sequence: Synthetic oligonucleotide
  Sense strand starting at position 3465 of SEQ ID NO: 1881696
guagaucaagcauagguua

SEQ ID NO: 2064559 - RNA, 19 nt, Artificial Sequence
  Description of Artificial Sequence: Synthetic oligonucleotide
  Antisense strand to SEQ ID NO: 2064558
uaaccuaugcuugaucuac

SEQ ID NO: 2064560 - RNA, 19 nt, Artificial Sequence
  Description of Artificial Sequence: Synthetic oligonucleotide
  Sense strand starting at position 3594 of SEQ ID NO: 1881696
aggaguaagugaaggagua

SEQ ID NO: 2064561 - RNA, 19 nt, Artificial Sequence
  Description of Artificial Sequence: Synthetic oligonucleotide
  Antisense strand to SEQ ID NO: 2064560
uacuccuucacuuacuccu

SEQ ID NO: 2064562 - RNA, 19 nt, Artificial Sequence
  Description of Artificial Sequence: Synthetic oligonucleotide
  Sense strand starting at position 3595 of SEQ ID NO: 1881696
ggaguaagugaaggaguaa

SEQ ID NO: 2064563 - RNA, 19 nt, Artificial Sequence
  Description of Artificial Sequence: Synthetic oligonucleotide
  Antisense strand to SEQ ID NO: 2064562
uuacuccuucacuuacucc

SEQ ID NO: 2064564 - RNA, 19 nt, Artificial Sequence
  Description of Artificial Sequence: Synthetic oligonucleotide
  Sense strand starting at position 3686 of SEQ ID NO: 1881696
agagaaagaucuccuagcu

SEQ ID NO: 2064565 - RNA, 19 nt, Artificial Sequence
  Description of Artificial Sequence: Synthetic oligonucleotide
  Antisense strand to SEQ ID NO: 2064564
agcuaggagaucuuucucu

SEQ ID NO: 2064566 - RNA, 19 nt, Artificial Sequence
  Description of Artificial Sequence: Synthetic oligonucleotide
  Sense strand starting at position 3783 of SEQ ID NO: 1881696
uugaguaagauauggcuau

SEQ ID NO: 2064567 - RNA, 19 nt, Artificial Sequence
  Description of Artificial Sequence: Synthetic oligonucleotide
  Antisense strand to SEQ ID NO: 2064566
auagccauaucuuacucaa

SEQ ID NO: 2064568 - RNA, 19 nt, Artificial Sequence
  Description of Artificial Sequence: Synthetic oligonucleotide
  Sense strand starting at position 3825 of SEQ ID NO: 1881696
agcucugaucuccagaacu

SEQ ID NO: 2064569 - RNA, 19 nt, Artificial Sequence
  Description of Artificial Sequence: Synthetic oligonucleotide
  Antisense strand to SEQ ID NO: 2064568
aguucuggagaucagagcu

SEQ ID NO: 2064570 - RNA, 19 nt, Artificial Sequence
  Description of Artificial Sequence: Synthetic oligonucleotide
  Sense strand starting at position 7 of SEQ ID NO: 1881695
gccaaugauguauguuaua

SEQ ID NO: 2064571 - RNA, 19 nt, Artificial Sequence
  Description of Artificial Sequence: Synthetic oligonucleotide
  Antisense strand to SEQ ID NO: 2064570
uauaacauacaucauuggc

SEQ ID NO: 2064572 - RNA, 19 nt, Artificial Sequence
  Description of Artificial Sequence: Synthetic oligonucleotide
  Sense strand starting at position 488 of SEQ ID NO: 1881695
uaaguaugugaccgcugaa

SEQ ID NO: 2064573 - RNA, 19 nt, Artificial Sequence
  Description of Artificial Sequence: Synthetic oligonucleotide
  Antisense strand to SEQ ID NO: 2064572
uucagcggucacauacuua

SEQ ID NO: 2064574 - RNA, 19 nt, Artificial Sequence
  Description of Artificial Sequence: Synthetic oligonucleotide
  Sense strand starting at position 491 of SEQ ID NO: 1881695
guaugugaccgcugaaaga

SEQ ID NO: 2064575 - RNA, 19 nt, Artificial Sequence
  Description of Artificial Sequence: Synthetic oligonucleotide
  Antisense strand to SEQ ID NO: 2064574
ucuuucagcggucacauac

SEQ ID NO: 2064576 - RNA, 19 nt, Artificial Sequence
  Description of Artificial Sequence: Synthetic oligonucleotide
  Sense strand starting at position 501 of SEQ ID NO: 1881695
gcugaaagacauggccuua

SEQ ID NO: 2064577 - RNA, 19 nt, Artificial Sequence
  Description of Artificial Sequence: Synthetic oligonucleotide
  Antisense strand to SEQ ID NO: 2064576
uaaggccaugucuuucagc

SEQ ID NO: 2064578 - RNA, 19 nt, Artificial Sequence
  Description of Artificial Sequence: Synthetic oligonucleotide
  Sense strand starting at position 901 of SEQ ID NO: 1881695
gggcuuugacaguauuggu

SEQ ID NO: 2064579 - RNA, 19 nt, Artificial Sequence
  Description of Artificial Sequence: Synthetic oligonucleotide
  Antisense strand to SEQ ID NO: 2064578
accaauacugucaaagccc

SEQ ID NO: 2064580 - RNA, 19 nt, Artificial Sequence
  Description of Artificial Sequence: Synthetic oligonucleotide
  Sense strand starting at position 1328 of SEQ ID NO: 1881695
uagaauggauauguucuau

SEQ ID NO: 2064581 - RNA, 19 nt, Artificial Sequence
  Description of Artificial Sequence: Synthetic oligonucleotide
  Antisense strand to SEQ ID NO: 2064580
auagaacauauccauucua

SEQ ID NO: 2064582 - RNA, 19 nt, Artificial Sequence
  Description of Artificial Sequence: Synthetic oligonucleotide
  Sense strand starting at position 1334 of SEQ ID NO: 1881695
ggauauguucuauagcuug

SEQ ID NO: 2064583 - RNA, 19 nt, Artificial Sequence
  Description of Artificial Sequence: Synthetic oligonucleotide
  Antisense strand to SEQ ID NO: 2064582
caagcuauagaacauaucc

SEQ ID NO: 2064584 - RNA, 19 nt, Artificial Sequence
  Description of Artificial Sequence: Synthetic oligonucleotide
  Sense strand starting at position 1349 of SEQ ID NO: 1881695
cuugauugugcugauagua

SEQ ID NO: 2064585 - RNA, 19 nt, Artificial Sequence
  Description of Artificial Sequence: Synthetic oligonucleotide
  Antisense strand to SEQ ID NO: 2064584
uacuaucagcacaaucaag

SEQ ID NO: 2064586 - RNA, 19 nt, Artificial Sequence
  Description of Artificial Sequence: Synthetic oligonucleotide
  Sense strand starting at position 1417 of SEQ ID NO: 1881695
gaauguaucuuaucagaug

SEQ ID NO: 2064587 - RNA, 19 nt, Artificial Sequence
  Description of Artificial Sequence: Synthetic oligonucleotide
  Antisense strand to SEQ ID NO: 2064586
caucugauaagauacauuc

SEQ ID NO: 2064588 - RNA, 19 nt, Artificial Sequence
  Description of Artificial Sequence: Synthetic oligonucleotide
  Sense strand starting at position 1626 of SEQ ID NO: 1881695
caagucuguugggccuaaa

SEQ ID NO: 2064589 - RNA, 19 nt, Artificial Sequence
  Description of Artificial Sequence: Synthetic oligonucleotide
  Antisense strand to SEQ ID NO: 2064588
uuuaggcccaacagacuug

SEQ ID NO: 2064590 - RNA, 19 nt, Artificial Sequence
  Description of Artificial Sequence: Synthetic oligonucleotide
  Sense strand starting at position 1764 of SEQ ID NO: 1881695
agauauugcuuauucuaga

SEQ ID NO: 2064591 - RNA, 19 nt, Artificial Sequence
  Description of Artificial Sequence: Synthetic oligonucleotide
  Antisense strand to SEQ ID NO: 2064590
ucuagaauaagcaauaucu

SEQ ID NO: 2064592 - RNA, 19 nt, Artificial Sequence
  Description of Artificial Sequence: Synthetic oligonucleotide
  Sense strand starting at position 1769 of SEQ ID NO: 1881695
uugcuuauucuagaaguua

SEQ ID NO: 2064593 - RNA, 19 nt, Artificial Sequence
  Description of Artificial Sequence: Synthetic oligonucleotide
  Antisense strand to SEQ ID NO: 2064592
uaacuucuagaauaagcaa

SEQ ID NO: 2064594 - RNA, 19 nt, Artificial Sequence
  Description of Artificial Sequence: Synthetic oligonucleotide
  Sense strand starting at position 1923 of SEQ ID NO: 1881695
uuuaaagcgaucuaguuga

SEQ ID NO: 2064595 - RNA, 19 nt, Artificial Sequence
  Description of Artificial Sequence: Synthetic oligonucleotide
  Antisense strand to SEQ ID NO: 2064594
ucaacuagaucgcuuuaaa

SEQ ID NO: 2064596 - RNA, 19 nt, Artificial Sequence
  Description of Artificial Sequence: Synthetic oligonucleotide
  Sense strand starting at position 2042 of SEQ ID NO: 1881695
agaaacuaagugugcaaua

SEQ ID NO: 2064597 - RNA, 19 nt, Artificial Sequence
  Description of Artificial Sequence: Synthetic oligonucleotide
  Antisense strand to SEQ ID NO: 2064596
uauugcacacuuaguuucu

SEQ ID NO: 2064598 - RNA, 19 nt, Artificial Sequence
  Description of Artificial Sequence: Synthetic oligonucleotide
  Sense strand starting at position 2111 of SEQ ID NO: 1881695
accaauagaucaguugcua

SEQ ID NO: 2064599 - RNA, 19 nt, Artificial Sequence
  Description of Artificial Sequence: Synthetic oligonucleotide
  Antisense strand to SEQ ID NO: 2064598
uagcaacugaucuauuggu

SEQ ID NO: 2064600 - RNA, 19 nt, Artificial Sequence
  Description of Artificial Sequence: Synthetic oligonucleotide
  Sense strand starting at position 2115 of SEQ ID NO: 1881695
auagaucaguugcuaaacu

SEQ ID NO: 2064601 - RNA, 19 nt, Artificial Sequence
  Description of Artificial Sequence: Synthetic oligonucleotide
  Antisense strand to SEQ ID NO: 2064600
aguuuagcaacugaucuau

SEQ ID NO: 2064602 - RNA, 19 nt, Artificial Sequence
  Description of Artificial Sequence: Synthetic oligonucleotide
  Sense strand starting at position 2154 of SEQ ID NO: 1881695
acuaguuucuuggcauauu

SEQ ID NO: 2064603 - RNA, 19 nt, Artificial Sequence
  Description of Artificial Sequence: Synthetic oligonucleotide
  Antisense strand to SEQ ID NO: 2064602
aauaugccaagaaacuagu

SEQ ID NO: 2064604 - RNA, 19 nt, Artificial Sequence
  Description of Artificial Sequence: Synthetic oligonucleotide
  Sense strand starting at position 2195 of SEQ ID NO: 1881695
caucacuacgucuguauga

SEQ ID NO: 2064605 - RNA, 19 nt, Artificial Sequence
  Description of Artificial Sequence: Synthetic oligonucleotide
  Antisense strand to SEQ ID NO: 2064604
ucauacagacguagugaug

SEQ ID NO: 2064606 - RNA, 19 nt, Artificial Sequence
  Description of Artificial Sequence: Synthetic oligonucleotide
  Sense strand starting at position 2196 of SEQ ID NO: 1881695
aucacuacgucuguaugaa

SEQ ID NO: 2064607 - RNA, 19 nt, Artificial Sequence
  Description of Artificial Sequence: Synthetic oligonucleotide
  Antisense strand to SEQ ID NO: 2064606
uucauacagacguagugau

SEQ ID NO: 2064608 - RNA, 19 nt, Artificial Sequence
  Description of Artificial Sequence: Synthetic oligonucleotide
  Sense strand starting at position 2197 of SEQ ID NO: 1881695
ucacuacgucuguaugaag

SEQ ID NO: 2064609 - RNA, 19 nt, Artificial Sequence
  Description of Artificial Sequence: Synthetic oligonucleotide
  Antisense strand to SEQ ID NO: 2064608
cuucauacagacguaguga

SEQ ID NO: 2064610 - RNA, 19 nt, Artificial Sequence
  Description of Artificial Sequence: Synthetic oligonucleotide
  Sense strand starting at position 2405 of SEQ ID NO: 1881695
cgugccauucucgugauaa

SEQ ID NO: 2064611 - RNA, 19 nt, Artificial Sequence
  Description of Artificial Sequence: Synthetic oligonucleotide
  Antisense strand to SEQ ID NO: 2064610
uuaucacgagaauggcacg

SEQ ID NO: 2064612 - RNA, 19 nt, Artificial Sequence
  Description of Artificial Sequence: Synthetic oligonucleotide
  Sense strand starting at position 2407 of SEQ ID NO: 1881695
ugccauucucgugauaaug

SEQ ID NO: 2064613 - RNA, 19 nt, Artificial Sequence
  Description of Artificial Sequence: Synthetic oligonucleotide
  Antisense strand to SEQ ID NO: 2064612
cauuaucacgagaauggca

SEQ ID NO: 2064614 - RNA, 19 nt, Artificial Sequence
  Description of Artificial Sequence: Synthetic oligonucleotide
  Sense strand starting at position 2677 of SEQ ID NO: 1881695
ggcaaccucuucuuagaca

SEQ ID NO: 2064615 - RNA, 19 nt, Artificial Sequence
  Description of Artificial Sequence: Synthetic oligonucleotide
  Antisense strand to SEQ ID NO: 2064614
ugucuaagaagagguugcc

SEQ ID NO: 2064616 - RNA, 19 nt, Artificial Sequence
  Description of Artificial Sequence: Synthetic oligonucleotide
  Sense strand starting at position 2841 of SEQ ID NO: 1881695
cugccaguuguccaccaaa

SEQ ID NO: 2064617 - RNA, 19 nt, Artificial Sequence
  Description of Artificial Sequence: Synthetic oligonucleotide
  Antisense strand to SEQ ID NO: 2064616
uuugguggacaacuggcag

SEQ ID NO: 2064618 - RNA, 19 nt, Artificial Sequence
  Description of Artificial Sequence: Synthetic oligonucleotide
  Sense strand starting at position 2950 of SEQ ID NO: 1881695
aaucucaucccuggaguga

SEQ ID NO: 2064619 - RNA, 19 nt, Artificial Sequence
  Description of Artificial Sequence: Synthetic oligonucleotide
  Antisense strand to SEQ ID NO: 2064618
ucacuccagggaugagauu

SEQ ID NO: 2064620 - RNA, 19 nt, Artificial Sequence
  Description of Artificial Sequence: Synthetic oligonucleotide
  Sense strand starting at position 3006 of SEQ ID NO: 1881695
ucgccuuggaauuguuaaa

SEQ ID NO: 2064621 - RNA, 19 nt, Artificial Sequence
  Description of Artificial Sequence: Synthetic oligonucleotide
  Antisense strand to SEQ ID NO: 2064620
uuuaacaauuccaaggcga

SEQ ID NO: 2064622 - RNA, 19 nt, Artificial Sequence
  Description of Artificial Sequence: Synthetic oligonucleotide
  Sense strand starting at position 3107 of SEQ ID NO: 1881695
ucaagagauuuccaggcca

SEQ ID NO: 2064623 - RNA, 19 nt, Artificial Sequence
  Description of Artificial Sequence: Synthetic oligonucleotide
  Antisense strand to SEQ ID NO: 2064622
uggccuggaaaucucuuga

SEQ ID NO: 2064624 - RNA, 19 nt, Artificial Sequence
  Description of Artificial Sequence: Synthetic oligonucleotide
  Sense strand starting at position 3122 of SEQ ID NO: 1881695
gccagugacuuuccaauac

SEQ ID NO: 2064625 - RNA, 19 nt, Artificial Sequence
  Description of Artificial Sequence: Synthetic oligonucleotide
  Antisense strand to SEQ ID NO: 2064624
guauuggaaagucacuggc

SEQ ID NO: 2064626 - RNA, 19 nt, Artificial Sequence
  Description of Artificial Sequence: Synthetic oligonucleotide
  Sense strand starting at position 3126 of SEQ ID NO: 1881695
gugacuuuccaauacacug

SEQ ID NO: 2064627 - RNA, 19 nt, Artificial Sequence
  Description of Artificial Sequence: Synthetic oligonucleotide
  Antisense strand to SEQ ID NO: 2064626
caguguauuggaaagucac

SEQ ID NO: 2064628 - RNA, 19 nt, Artificial Sequence
  Description of Artificial Sequence: Synthetic oligonucleotide
  Sense strand starting at position 3185 of SEQ ID NO: 1881695
cuugacuuaccauaacgua

SEQ ID NO: 2064629 - RNA, 19 nt, Artificial Sequence
  Description of Artificial Sequence: Synthetic oligonucleotide
  Antisense strand to SEQ ID NO: 2064628
uacguuaugguaagucaag

SEQ ID NO: 2064630 - RNA, 19 nt, Artificial Sequence
  Description of Artificial Sequence: Synthetic oligonucleotide
  Sense strand starting at position 3259 of SEQ ID NO: 1881695
guuccuuaacuuugucauu

SEQ ID NO: 2064631 - RNA, 19 nt, Artificial Sequence
  Description of Artificial Sequence: Synthetic oligonucleotide
  Antisense strand to SEQ ID NO: 2064630
aaugacaaaguuaaggaac

SEQ ID NO: 2064632 - RNA, 19 nt, Artificial Sequence
  Description of Artificial Sequence: Synthetic oligonucleotide
  Sense strand starting at position 3311 of SEQ ID NO: 1881695
auaguuauaccgcagaaca

SEQ ID NO: 2064633 - RNA, 19 nt, Artificial Sequence
  Description of Artificial Sequence: Synthetic oligonucleotide
  Antisense strand to SEQ ID NO: 2064632
uguucugcgguauaacuau

SEQ ID NO: 2064634 - RNA, 19 nt, Artificial Sequence
  Description of Artificial Sequence: Synthetic oligonucleotide
  Sense strand starting at position 3313 of SEQ ID NO: 1881695
aguuauaccgcagaacagu

SEQ ID NO: 2064635 - RNA, 19 nt, Artificial Sequence
  Description of Artificial Sequence: Synthetic oligonucleotide
  Antisense strand to SEQ ID NO: 2064634
acuguucugcgguauaacu

SEQ ID NO: 2064636 - RNA, 19 nt, Artificial Sequence
  Description of Artificial Sequence: Synthetic oligonucleotide
  Sense strand starting at position 3330 of SEQ ID NO: 1881695
guaguucucaaaugguuug

SEQ ID NO: 2064637 - RNA, 19 nt, Artificial Sequence
  Description of Artificial Sequence: Synthetic oligonucleotide
  Antisense strand to SEQ ID NO: 2064636
caaaccauuugagaacuac

SEQ ID NO: 2064638 - RNA, 19 nt, Artificial Sequence
  Description of Artificial Sequence: Synthetic oligonucleotide
  Sense strand starting at position 3589 of SEQ ID NO: 1881695
aacaguuguggcugaagua

SEQ ID NO: 2064639 - RNA, 19 nt, Artificial Sequence
  Description of Artificial Sequence: Synthetic oligonucleotide
  Antisense strand to SEQ ID NO: 2064638
uacuucagccacaacuguu

SEQ ID NO: 2064640 - RNA, 19 nt, Artificial Sequence
  Description of Artificial Sequence: Synthetic oligonucleotide
  Sense strand starting at position 3686 of SEQ ID NO: 1881695
uggauaucauucucugaua

SEQ ID NO: 2064641 - RNA, 19 nt, Artificial Sequence
  Description of Artificial Sequence: Synthetic oligonucleotide
  Antisense strand to SEQ ID NO: 2064640
uaucagagaaugauaucca

SEQ ID NO: 2064642 - RNA, 19 nt, Artificial Sequence
  Description of Artificial Sequence: Synthetic oligonucleotide
  Sense strand starting at position 3687 of SEQ ID NO: 1881695
ggauaucauucucugauau

SEQ ID NO: 2064643 - RNA, 19 nt, Artificial Sequence
  Description of Artificial Sequence: Synthetic oligonucleotide
  Antisense strand to SEQ ID NO: 2064642
auaucagagaaugauaucc

SEQ ID NO: 2064644 - RNA, 19 nt, Artificial Sequence
  Description of Artificial Sequence: Synthetic oligonucleotide
  Sense strand starting at position 3766 of SEQ ID NO: 1881695
gaauaugauugauaugaug

SEQ ID NO: 2064645 - RNA, 19 nt, Artificial Sequence
  Description of Artificial Sequence: Synthetic oligonucleotide
  Antisense strand to SEQ ID NO: 2064644
caucauaucaaucauauuc

SEQ ID NO: 2064646 - RNA, 19 nt, Artificial Sequence
  Description of Artificial Sequence: Synthetic oligonucleotide
  Sense strand starting at position 3790 of SEQ ID NO: 1881695
uuucuuccuugguuacauu

SEQ ID NO: 2064647 - RNA, 19 nt, Artificial Sequence
  Description of Artificial Sequence: Synthetic oligonucleotide
  Antisense strand to SEQ ID NO: 2064646
aauguaaccaaggaagaaa

SEQ ID NO: 2064648 - RNA, 19 nt, Artificial Sequence
  Description of Artificial Sequence: Synthetic oligonucleotide
  Sense strand starting at position 3847 of SEQ ID NO: 1881695
uuacucaugcauuggucau

SEQ ID NO: 2064649 - RNA, 19 nt, Artificial Sequence
  Description of Artificial Sequence: Synthetic oligonucleotide
  Antisense strand to SEQ ID NO: 2064648
augaccaaugcaugaguaa

SEQ ID NO: 2064650 - RNA, 19 nt, Artificial Sequence
  Description of Artificial Sequence: Synthetic oligonucleotide
  Sense strand starting at position 280 of SEQ ID NO: 1881697
gucacaucagaucaaguau

SEQ ID NO: 2064651 - RNA, 19 nt, Artificial Sequence
  Description of Artificial Sequence: Synthetic oligonucleotide
  Antisense strand to SEQ ID NO: 2064650
auacuugaucugaugugac

SEQ ID NO: 2064652 - RNA, 19 nt, Artificial Sequence
  Description of Artificial Sequence: Synthetic oligonucleotide
  Sense strand starting at position 372 of SEQ ID NO: 1881697
augagaguaucccucucau

SEQ ID NO: 2064653 - RNA, 19 nt, Artificial Sequence
  Description of Artificial Sequence: Synthetic oligonucleotide
  Antisense strand to SEQ ID NO: 2064652
augagagggauacucucau

SEQ ID NO: 2064654 - RNA, 19 nt, Artificial Sequence
  Description of Artificial Sequence: Synthetic oligonucleotide
  Sense strand starting at position 482 of SEQ ID NO: 1881697
agacccagacaguguuaau

SEQ ID NO: 2064655 - RNA, 19 nt, Artificial Sequence
  Description of Artificial Sequence: Synthetic oligonucleotide
  Antisense strand to SEQ ID NO: 2064654
auuaacacugucugggucu

SEQ ID NO: 2064656 - RNA, 19 nt, Artificial Sequence
  Description of Artificial Sequence: Synthetic oligonucleotide
  Sense strand starting at position 558 of SEQ ID NO: 1881697
gcuuauguggcugagaauu

SEQ ID NO: 2064657 - RNA, 19 nt, Artificial Sequence
  Description of Artificial Sequence: Synthetic oligonucleotide
  Antisense strand to SEQ ID NO: 2064656
aauucucagccacauaagc

SEQ ID NO: 2064658 - RNA, 19 nt, Artificial Sequence
  Description of Artificial Sequence: Synthetic oligonucleotide
  Sense strand starting at position 564 of SEQ ID NO: 1881697
guggcugagaauuauguau

SEQ ID NO: 2064659 - RNA, 19 nt, Artificial Sequence
  Description of Artificial Sequence: Synthetic oligonucleotide
  Antisense strand to SEQ ID NO: 2064658
auacauaauucucagccac

SEQ ID NO: 2064660 - RNA, 19 nt, Artificial Sequence
  Description of Artificial Sequence: Synthetic oligonucleotide
  Sense strand starting at position 586 of SEQ ID NO: 1881697
aaguaaugacuuuggcuga

SEQ ID NO: 2064661 - RNA, 19 nt, Artificial Sequence
  Description of Artificial Sequence: Synthetic oligonucleotide
  Antisense strand to SEQ ID NO: 2064660
ucagccaaagucauuacuu

SEQ ID NO: 2064662 - RNA, 19 nt, Artificial Sequence
  Description of Artificial Sequence: Synthetic oligonucleotide
  Sense strand starting at position 591 of SEQ ID NO: 1881697
augacuuuggcugauuaac

SEQ ID NO: 2064663 - RNA, 19 nt, Artificial Sequence
  Description of Artificial Sequence: Synthetic oligonucleotide
  Antisense strand to SEQ ID NO: 2064662
guuaaucagccaaagucau

SEQ ID NO: 2064664 - RNA, 19 nt, Artificial Sequence
  Description of Artificial Sequence: Synthetic oligonucleotide
  Sense strand starting at position 602 of SEQ ID NO: 1881697
ugauuaacugguggcagau

SEQ ID NO: 2064665 - RNA, 19 nt, Artificial Sequence
  Description of Artificial Sequence: Synthetic oligonucleotide
  Antisense strand to SEQ ID NO: 2064664
aucugccaccaguuaauca

SEQ ID NO: 2064666 - RNA, 19 nt, Artificial Sequence
  Description of Artificial Sequence: Synthetic oligonucleotide
  Sense strand starting at position 636 of SEQ ID NO: 1881697
ggacuucucuuuccaggca

SEQ ID NO: 2064667 - RNA, 19 nt, Artificial Sequence
  Description of Artificial Sequence: Synthetic oligonucleotide
  Antisense strand to SEQ ID NO: 2064666
ugccuggaaagagaagucc

SEQ ID NO: 2064668 - RNA, 19 nt, Artificial Sequence
  Description of Artificial Sequence: Synthetic oligonucleotide
  Sense strand starting at position 700 of SEQ ID NO: 1881697
gugaaugagagcuaguuau

SEQ ID NO: 2064669 - RNA, 19 nt, Artificial Sequence
  Description of Artificial Sequence: Synthetic oligonucleotide
  Antisense strand to SEQ ID NO: 2064668
auaacuagcucucauucac

SEQ ID NO: 2064670 - RNA, 19 nt, Artificial Sequence
  Description of Artificial Sequence: Synthetic oligonucleotide
  Sense strand starting at position 719 of SEQ ID NO: 1881697
aagaauguauucucuugag

SEQ ID NO: 2064671 - RNA, 19 nt, Artificial Sequence
  Description of Artificial Sequence: Synthetic oligonucleotide
  Antisense strand to SEQ ID NO: 2064670
cucaagagaauacauucuu

SEQ ID NO: 2064672 - RNA, 19 nt, Artificial Sequence
  Description of Artificial Sequence: Synthetic oligonucleotide
  Sense strand starting at position 723 of SEQ ID NO: 1881697
auguauucucuugagagcu

SEQ ID NO: 2064673 - RNA, 19 nt, Artificial Sequence
  Description of Artificial Sequence: Synthetic oligonucleotide
  Antisense strand to SEQ ID NO: 2064672
agcucucaagagaauacau

SEQ ID NO: 2064674 - RNA, 19 nt, Artificial Sequence
  Description of Artificial Sequence: Synthetic oligonucleotide
  Sense strand starting at position 729 of SEQ ID NO: 1881697
ucucuugagagcugggaua

SEQ ID NO: 2064675 - RNA, 19 nt, Artificial Sequence
  Description of Artificial Sequence: Synthetic oligonucleotide
  Antisense strand to SEQ ID NO: 2064674
uaucccagcucucaagaga

SEQ ID NO: 2064676 - RNA, 19 nt, Artificial Sequence
  Description of Artificial Sequence: Synthetic oligonucleotide
  Sense strand starting at position 731 of SEQ ID NO: 1881697
ucuugagagcugggauaug

SEQ ID NO: 2064677 - RNA, 19 nt, Artificial Sequence
  Description of Artificial Sequence: Synthetic oligonucleotide
  Antisense strand to SEQ ID NO: 2064676
cauaucccagcucucaaga

SEQ ID NO: 2064678 - RNA, 19 nt, Artificial Sequence
  Description of Artificial Sequence: Synthetic oligonucleotide
  Sense strand starting at position 740 of SEQ ID NO: 1881697
cugggauaugauuguuguu

SEQ ID NO: 2064679 - RNA, 19 nt, Artificial Sequence
  Description of Artificial Sequence: Synthetic oligonucleotide
  Antisense strand to SEQ ID NO: 2064678
aacaacaaucauaucccag

SEQ ID NO: 2064680 - RNA, 19 nt, Artificial Sequence
  Description of Artificial Sequence: Synthetic oligonucleotide
  Sense strand starting at position 808 of SEQ ID NO: 1881697
guuagugugacagagauaa

SEQ ID NO: 2064681 - RNA, 19 nt, Artificial Sequence
  Description of Artificial Sequence: Synthetic oligonucleotide
  Antisense strand to SEQ ID NO: 2064680
uuaucucugucacacuaac

SEQ ID NO: 2064682 - RNA, 19 nt, Artificial Sequence
  Description of Artificial Sequence: Synthetic oligonucleotide
  Sense strand starting at position 989 of SEQ ID NO: 1881697
guguaccacugcucaaaga

SEQ ID NO: 2064683 - RNA, 19 nt, Artificial Sequence
  Description of Artificial Sequence: Synthetic oligonucleotide
  Antisense strand to SEQ ID NO: 2064682
ucuuugagcagugguacac

SEQ ID NO: 2064684 - RNA, 19 nt, Artificial Sequence
  Description of Artificial Sequence: Synthetic oligonucleotide
  Sense strand starting at position 990 of SEQ ID NO: 1881697
uguaccacugcucaaagaa

SEQ ID NO: 2064685 - RNA, 19 nt, Artificial Sequence
  Description of Artificial Sequence: Synthetic oligonucleotide
  Antisense strand to SEQ ID NO: 2064684
uucuuugagcagugguaca

SEQ ID NO: 2064686 - RNA, 19 nt, Artificial Sequence
  Description of Artificial Sequence: Synthetic oligonucleotide
  Sense strand starting at position 1232 of SEQ ID NO: 1881697
uggagacauuacgcuacuu

SEQ ID NO: 2064687 - RNA, 19 nt, Artificial Sequence
  Description of Artificial Sequence: Synthetic oligonucleotide
  Antisense strand to SEQ ID NO: 2064686
aaguagcguaaugucucca

SEQ ID NO: 2064688 - RNA, 19 nt, Artificial Sequence
  Description of Artificial Sequence: Synthetic oligonucleotide
  Sense strand starting at position 1234 of SEQ ID NO: 1881697
gagacauuacgcuacuuga

SEQ ID NO: 2064689 - RNA, 19 nt, Artificial Sequence
  Description of Artificial Sequence: Synthetic oligonucleotide
  Antisense strand to SEQ ID NO: 2064688
ucaaguagcguaaugucuc

SEQ ID NO: 2064690 - RNA, 19 nt, Artificial Sequence
  Description of Artificial Sequence: Synthetic oligonucleotide
  Sense strand starting at position 2147 of SEQ ID NO: 1881697
cuggcaaggcucugaagaa

SEQ ID NO: 2064691 - RNA, 19 nt, Artificial Sequence
  Description of Artificial Sequence: Synthetic oligonucleotide
  Antisense strand to SEQ ID NO: 2064690
uucuucagagccuugccag

SEQ ID NO: 2064692 - RNA, 19 nt, Artificial Sequence
  Description of Artificial Sequence: Synthetic oligonucleotide
  Sense strand starting at position 2832 of SEQ ID NO: 1881697
ccagucuaacugggugaaa

SEQ ID NO: 2064693 - RNA, 19 nt, Artificial Sequence
  Description of Artificial Sequence: Synthetic oligonucleotide
  Antisense strand to SEQ ID NO: 2064692
uuucacccaguuagacugg

SEQ ID NO: 2064694 - RNA, 19 nt, Artificial Sequence
  Description of Artificial Sequence: Synthetic oligonucleotide
  Sense strand starting at position 2986 of SEQ ID NO: 1881697
ggugaacaacuaugacagu

SEQ ID NO: 2064695 - RNA, 19 nt, Artificial Sequence
  Description of Artificial Sequence: Synthetic oligonucleotide
  Antisense strand to SEQ ID NO: 2064694
acugucauaguuguucacc

SEQ ID NO: 2064696 - RNA, 19 nt, Artificial Sequence
  Description of Artificial Sequence: Synthetic oligonucleotide
  Sense strand starting at position 3054 of SEQ ID NO: 1881697
uauauuguuguugaagaca

SEQ ID NO: 2064697 - RNA, 19 nt, Artificial Sequence
  Description of Artificial Sequence: Synthetic oligonucleotide
  Antisense strand to SEQ ID NO: 2064696
ugucuucaacaacaauaua

SEQ ID NO: 2064698 - RNA, 19 nt, Artificial Sequence
  Description of Artificial Sequence: Synthetic oligonucleotide
  Sense strand starting at position 3131 of SEQ ID NO: 1881697
cuuguuaugccugugcaau

SEQ ID NO: 2064699 - RNA, 19 nt, Artificial Sequence
  Description of Artificial Sequence: Synthetic oligonucleotide
  Antisense strand to SEQ ID NO: 2064698
auugcacaggcauaacaag

SEQ ID NO: 2064700 - RNA, 19 nt, Artificial Sequence
  Description of Artificial Sequence: Synthetic oligonucleotide
  Sense strand starting at position 3327 of SEQ ID NO: 1881697
ccacuaagauuccugugga

SEQ ID NO: 2064701 - RNA, 19 nt, Artificial Sequence
  Description of Artificial Sequence: Synthetic oligonucleotide
  Antisense strand to SEQ ID NO: 2064700
uccacaggaaucuuagugg

SEQ ID NO: 2064702 - RNA, 19 nt, Artificial Sequence
  Description of Artificial Sequence: Synthetic oligonucleotide
  Sense strand starting at position 3330 of SEQ ID NO: 1881697
cuaagauuccuguggaugu

SEQ ID NO: 2064703 - RNA, 19 nt, Artificial Sequence
  Description of Artificial Sequence: Synthetic oligonucleotide
  Antisense strand to SEQ ID NO: 2064702
acauccacaggaaucuuag

SEQ ID NO: 2064704 - RNA, 19 nt, Artificial Sequence
  Description of Artificial Sequence: Synthetic oligonucleotide
  Sense strand starting at position 3497 of SEQ ID NO: 1881697
ggacacaaguaugucagau

SEQ ID NO: 2064705 - RNA, 19 nt, Artificial Sequence
  Description of Artificial Sequence: Synthetic oligonucleotide
  Antisense strand to SEQ ID NO: 2064704
aucugacauacuugugucc

SEQ ID NO: 2064706 - RNA, 19 nt, Artificial Sequence
  Description of Artificial Sequence: Synthetic oligonucleotide
  Sense strand starting at position 3553 of SEQ ID NO: 1881697
auuugucgguaagaagaga

SEQ ID NO: 2064707 - RNA, 19 nt, Artificial Sequence
  Description of Artificial Sequence: Synthetic oligonucleotide
  Antisense strand to SEQ ID NO: 2064706
ucucuucuuaccgacaaau

SEQ ID NO: 2064708 - RNA, 19 nt, Artificial Sequence
  Description of Artificial Sequence: Synthetic oligonucleotide
  Sense strand starting at position 3595 of SEQ ID NO: 1881697
ggucuagugccauaauucu

SEQ ID NO: 2064709 - RNA, 19 nt, Artificial Sequence
  Description of Artificial Sequence: Synthetic oligonucleotide
  Antisense strand to SEQ ID NO: 2064708
agaauuauggcacuagacc

SEQ ID NO: 2064710 - RNA, 19 nt, Artificial Sequence
  Description of Artificial Sequence: Synthetic oligonucleotide
  Sense strand starting at position 3604 of SEQ ID NO: 1881697
ccauaauucucugcaaggu

SEQ ID NO: 2064711 - RNA, 19 nt, Artificial Sequence
  Description of Artificial Sequence: Synthetic oligonucleotide
  Antisense strand to SEQ ID NO: 2064710
accuugcagagaauuaugg

SEQ ID NO: 2064712 - RNA, 19 nt, Artificial Sequence
  Description of Artificial Sequence: Synthetic oligonucleotide
  Sense strand starting at position 3638 of SEQ ID NO: 1881697
ucuguccguccggauuuau

SEQ ID NO: 2064713 - RNA, 19 nt, Artificial Sequence
  Description of Artificial Sequence: Synthetic oligonucleotide
  Antisense strand to SEQ ID NO: 2064712
auaaauccggacggacaga

SEQ ID NO: 2064714 - RNA, 19 nt, Artificial Sequence
  Description of Artificial Sequence: Synthetic oligonucleotide
  Sense strand starting at position 3690 of SEQ ID NO: 1881697
uuggaaauggucuggacau

SEQ ID NO: 2064715 - RNA, 19 nt, Artificial Sequence
  Description of Artificial Sequence: Synthetic oligonucleotide
  Antisense strand to SEQ ID NO: 2064714
auguccagaccauuuccaa

SEQ ID NO: 2064716 - RNA, 19 nt, Artificial Sequence
  Description of Artificial Sequence: Synthetic oligonucleotide
  Sense strand starting at position 3696 of SEQ ID NO: 1881697
auggucuggacauguaacu

SEQ ID NO: 2064717 - RNA, 19 nt, Artificial Sequence
  Description of Artificial Sequence: Synthetic oligonucleotide
  Antisense strand to SEQ ID NO: 2064716
aguuacauguccagaccau

SEQ ID NO: 2064718 - RNA, 19 nt, Artificial Sequence
  Description of Artificial Sequence: Synthetic oligonucleotide
  Sense strand starting at position 3702 of SEQ ID NO: 1881697
uggacauguaacugaagua

SEQ ID NO: 2064719 - RNA, 19 nt, Artificial Sequence
  Description of Artificial Sequence: Synthetic oligonucleotide
  Antisense strand to SEQ ID NO: 2064718
uacuucaguuacaugucca

SEQ ID NO: 2064720 - RNA, 19 nt, Artificial Sequence
  Description of Artificial Sequence: Synthetic oligonucleotide
  Sense strand starting at position 3763 of SEQ ID NO: 1881697
ucugucauucuaugauuag

SEQ ID NO: 2064721 - RNA, 19 nt, Artificial Sequence
  Description of Artificial Sequence: Synthetic oligonucleotide
  Antisense strand to SEQ ID NO: 2064720
cuaaucauagaaugacaga

SEQ ID NO: 2064722 - RNA, 19 nt, Artificial Sequence
  Description of Artificial Sequence: Synthetic oligonucleotide
  Sense strand starting at position 3766 of SEQ ID NO: 1881697
gucauucuaugauuaggag

SEQ ID NO: 2064723 - RNA, 19 nt, Artificial Sequence
  Description of Artificial Sequence: Synthetic oligonucleotide
  Antisense strand to SEQ ID NO: 2064722
cuccuaaucauagaaugac

SEQ ID NO: 2064724 - RNA, 19 nt, Artificial Sequence
  Description of Artificial Sequence: Synthetic oligonucleotide
  Sense strand starting at position 3858 of SEQ ID NO: 1881697
uccacaguuuacuuaggau

SEQ ID NO: 2064725 - RNA, 19 nt, Artificial Sequence
  Description of Artificial Sequence: Synthetic oligonucleotide
  Antisense strand to SEQ ID NO: 2064724
auccuaaguaaacugugga

SEQ ID NO: 2064726 - RNA, 19 nt, Artificial Sequence
  Description of Artificial Sequence: Synthetic oligonucleotide
  Sense strand starting at position 3894 of SEQ ID NO: 1881697
ccaucuuuagagugauauu

SEQ ID NO: 2064727 - RNA, 19 nt, Artificial Sequence
  Description of Artificial Sequence: Synthetic oligonucleotide
  Antisense strand to SEQ ID NO: 2064726
aauaucacucuaaagaugg

SEQ ID NO: 2064728 - RNA, 19 nt, Artificial Sequence
  Description of Artificial Sequence: Synthetic oligonucleotide
  Sense strand starting at position 3946 of SEQ ID NO: 1881697
gucagagacuucuuugaau

SEQ ID NO: 2064729 - RNA, 19 nt, Artificial Sequence
  Description of Artificial Sequence: Synthetic oligonucleotide
  Antisense strand to SEQ ID NO: 2064728
auucaaagaagucucugac

SEQ ID NO: 2064730 - RNA, 19 nt, Artificial Sequence
  Description of Artificial Sequence: Synthetic oligonucleotide
  Sense strand starting at position 183 of SEQ ID NO: 1881698
ucuagaaguugccuuuaga

SEQ ID NO: 2064731 - RNA, 19 nt, Artificial Sequence
  Description of Artificial Sequence: Synthetic oligonucleotide
  Antisense strand to SEQ ID NO: 2064730
ucuaaaggcaacuucuaga

SEQ ID NO: 2064732 - RNA, 19 nt, Artificial Sequence
  Description of Artificial Sequence: Synthetic oligonucleotide
  Sense strand starting at position 186 of SEQ ID NO: 1881698
agaaguugccuuuagacca

SEQ ID NO: 2064733 - RNA, 19 nt, Artificial Sequence
  Description of Artificial Sequence: Synthetic oligonucleotide
  Antisense strand to SEQ ID NO: 2064732
uggucuaaaggcaacuucu

SEQ ID NO: 2064734 - RNA, 19 nt, Artificial Sequence
  Description of Artificial Sequence: Synthetic oligonucleotide
  Sense strand starting at position 491 of SEQ ID NO: 1881698
ccugucaucggguagacuu

SEQ ID NO: 2064735 - RNA, 19 nt, Artificial Sequence
  Description of Artificial Sequence: Synthetic oligonucleotide
  Antisense strand to SEQ ID NO: 2064734
aagucuacccgaugacagg

SEQ ID NO: 2064736 - RNA, 19 nt, Artificial Sequence
  Description of Artificial Sequence: Synthetic oligonucleotide
  Sense strand starting at position 493 of SEQ ID NO: 1881698
ugucaucggguagacuuua

SEQ ID NO: 2064737 - RNA, 19 nt, Artificial Sequence
  Description of Artificial Sequence: Synthetic oligonucleotide
  Antisense strand to SEQ ID NO: 2064736
uaaagucuacccgaugaca

SEQ ID NO: 2064738 - RNA, 19 nt, Artificial Sequence
  Description of Artificial Sequence: Synthetic oligonucleotide
  Sense strand starting at position 498 of SEQ ID NO: 1881698
ucggguagacuuuaguaca

SEQ ID NO: 2064739 - RNA, 19 nt, Artificial Sequence
  Description of Artificial Sequence: Synthetic oligonucleotide
  Antisense strand to SEQ ID NO: 2064738
uguacuaaagucuacccga

SEQ ID NO: 2064740 - RNA, 19 nt, Artificial Sequence
  Description of Artificial Sequence: Synthetic oligonucleotide
  Sense strand starting at position 710 of SEQ ID NO: 1881698
cugaaagucugucuaaauu

SEQ ID NO: 2064741 - RNA, 19 nt, Artificial Sequence
  Description of Artificial Sequence: Synthetic oligonucleotide
  Antisense strand to SEQ ID NO: 2064740
aauuuagacagacuuucag

SEQ ID NO: 2064742 - RNA, 19 nt, Artificial Sequence
  Description of Artificial Sequence: Synthetic oligonucleotide
  Sense strand starting at position 997 of SEQ ID NO: 1881698
auaagaugcuaguaauuug

SEQ ID NO: 2064743 - RNA, 19 nt, Artificial Sequence
  Description of Artificial Sequence: Synthetic oligonucleotide
  Antisense strand to SEQ ID NO: 2064742
caaauuacuagcaucuuau

SEQ ID NO: 2064744 - RNA, 19 nt, Artificial Sequence
  Description of Artificial Sequence: Synthetic oligonucleotide
  Sense strand starting at position 1004 of SEQ ID NO: 1881698
gcuaguaauuuguucuuau

SEQ ID NO: 2064745 - RNA, 19 nt, Artificial Sequence
  Description of Artificial Sequence: Synthetic oligonucleotide
  Antisense strand to SEQ ID NO: 2064744
auaagaacaaauuacuagc

SEQ ID NO: 2064746 - RNA, 19 nt, Artificial Sequence
  Description of Artificial Sequence: Synthetic oligonucleotide
  Sense strand starting at position 1007 of SEQ ID NO: 1881698
aguaauuuguucuuaugug

SEQ ID NO: 2064747 - RNA, 19 nt, Artificial Sequence
  Description of Artificial Sequence: Synthetic oligonucleotide
  Antisense strand to SEQ ID NO: 2064746
cacauaagaacaaauuacu

SEQ ID NO: 2064748 - RNA, 19 nt, Artificial Sequence
  Description of Artificial Sequence: Synthetic oligonucleotide
  Sense strand starting at position 1011 of SEQ ID NO: 1881698
auuuguucuuaugugugaa

SEQ ID NO: 2064749 - RNA, 19 nt, Artificial Sequence
  Description of Artificial Sequence: Synthetic oligonucleotide
  Antisense strand to SEQ ID NO: 2064748
uucacacauaagaacaaau

SEQ ID NO: 2064750 - RNA, 19 nt, Artificial Sequence
  Description of Artificial Sequence: Synthetic oligonucleotide
  Sense strand starting at position 1043 of SEQ ID NO: 1881698
cauguauuaggguaccuga

SEQ ID NO: 2064751 - RNA, 19 nt, Artificial Sequence
  Description of Artificial Sequence: Synthetic oligonucleotide
  Antisense strand to SEQ ID NO: 2064750
ucagguacccuaauacaug

SEQ ID NO: 2064752 - RNA, 19 nt, Artificial Sequence
  Description of Artificial Sequence: Synthetic oligonucleotide
  Sense strand starting at position 1046 of SEQ ID NO: 1881698
guauuaggguaccugacau

SEQ ID NO: 2064753 - RNA, 19 nt, Artificial Sequence
  Description of Artificial Sequence: Synthetic oligonucleotide
  Antisense strand to SEQ ID NO: 2064752
augucagguacccuaauac

SEQ ID NO: 2064754 - RNA, 19 nt, Artificial Sequence
  Description of Artificial Sequence: Synthetic oligonucleotide
  Sense strand starting at position 1152 of SEQ ID NO: 1881698
ucuuccaaucaguaaugua

SEQ ID NO: 2064755 - RNA, 19 nt, Artificial Sequence
  Description of Artificial Sequence: Synthetic oligonucleotide
  Antisense strand to SEQ ID NO: 2064754
uacauuacugauuggaaga

SEQ ID NO: 2064756 - RNA, 19 nt, Artificial Sequence
  Description of Artificial Sequence: Synthetic oligonucleotide
  Sense strand starting at position 1191 of SEQ ID NO: 1881698
ugggcuuuaguaugacuua

SEQ ID NO: 2064757 - RNA, 19 nt, Artificial Sequence
  Description of Artificial Sequence: Synthetic oligonucleotide
  Antisense strand to SEQ ID NO: 2064756
uaagucauacuaaagccca

SEQ ID NO: 2064758 - RNA, 19 nt, Artificial Sequence
  Description of Artificial Sequence: Synthetic oligonucleotide
  Sense strand starting at position 1246 of SEQ ID NO: 1881698
ugcuguaagcuacagaacu

SEQ ID NO: 2064759 - RNA, 19 nt, Artificial Sequence
  Description of Artificial Sequence: Synthetic oligonucleotide
  Antisense strand to SEQ ID NO: 2064758
aguucuguagcuuacagca

SEQ ID NO: 2064760 - RNA, 19 nt, Artificial Sequence
  Description of Artificial Sequence: Synthetic oligonucleotide
  Sense strand starting at position 1256 of SEQ ID NO: 1881698
uacagaacuuagcugguau

SEQ ID NO: 2064761 - RNA, 19 nt, Artificial Sequence
  Description of Artificial Sequence: Synthetic oligonucleotide
  Antisense strand to SEQ ID NO: 2064760
auaccagcuaaguucugua

SEQ ID NO: 2064762 - RNA, 19 nt, Artificial Sequence
  Description of Artificial Sequence: Synthetic oligonucleotide
  Sense strand starting at position 1451 of SEQ ID NO: 1881698
cuagucauacuuggcuaaa

SEQ ID NO: 2064763 - RNA, 19 nt, Artificial Sequence
  Description of Artificial Sequence: Synthetic oligonucleotide
  Antisense strand to SEQ ID NO: 2064762
uuuagccaaguaugacuag

SEQ ID NO: 2064764 - RNA, 19 nt, Artificial Sequence
  Description of Artificial Sequence: Synthetic oligonucleotide
  Sense strand starting at position 1453 of SEQ ID NO: 1881698
agucauacuuggcuaaauu

SEQ ID NO: 2064765 - RNA, 19 nt, Artificial Sequence
  Description of Artificial Sequence: Synthetic oligonucleotide
  Antisense strand to SEQ ID NO: 2064764
aauuuagccaaguaugacu

SEQ ID NO: 2064766 - RNA, 19 nt, Artificial Sequence
  Description of Artificial Sequence: Synthetic oligonucleotide
  Sense strand starting at position 1454 of SEQ ID NO: 1881698
gucauacuuggcuaaauua

SEQ ID NO: 2064767 - RNA, 19 nt, Artificial Sequence
  Description of Artificial Sequence: Synthetic oligonucleotide
  Antisense strand to SEQ ID NO: 2064766
uaauuuagccaaguaugac

SEQ ID NO: 2064768 - RNA, 19 nt, Artificial Sequence
  Description of Artificial Sequence: Synthetic oligonucleotide
  Sense strand starting at position 1528 of SEQ ID NO: 1881698
cauguuaugcaaugaagua

SEQ ID NO: 2064769 - RNA, 19 nt, Artificial Sequence
  Description of Artificial Sequence: Synthetic oligonucleotide
  Antisense strand to SEQ ID NO: 2064768
uacuucauugcauaacaug

SEQ ID NO: 2064770 - RNA, 19 nt, Artificial Sequence
  Description of Artificial Sequence: Synthetic oligonucleotide
  Sense strand starting at position 1587 of SEQ ID NO: 1881698
acagcauccuugguaggau

SEQ ID NO: 2064771 - RNA, 19 nt, Artificial Sequence
  Description of Artificial Sequence: Synthetic oligonucleotide
  Antisense strand to SEQ ID NO: 2064770
auccuaccaaggaugcugu

SEQ ID NO: 2064772 - RNA, 19 nt, Artificial Sequence
  Description of Artificial Sequence: Synthetic oligonucleotide
  Sense strand starting at position 1634 of SEQ ID NO: 1881698
aaagauugccauuguagua

SEQ ID NO: 2064773 - RNA, 19 nt, Artificial Sequence
  Description of Artificial Sequence: Synthetic oligonucleotide
  Antisense strand to SEQ ID NO: 2064772
uacuacaauggcaaucuuu

SEQ ID NO: 2064774 - RNA, 19 nt, Artificial Sequence
  Description of Artificial Sequence: Synthetic oligonucleotide
  Sense strand starting at position 1752 of SEQ ID NO: 1881698
uuuggugaagcgucuguuu

SEQ ID NO: 2064775 - RNA, 19 nt, Artificial Sequence
  Description of Artificial Sequence: Synthetic oligonucleotide
  Antisense strand to SEQ ID NO: 2064774
aaacagacgcuucaccaaa

SEQ ID NO: 2064776 - RNA, 19 nt, Artificial Sequence
  Description of Artificial Sequence: Synthetic oligonucleotide
  Sense strand starting at position 1836 of SEQ ID NO: 1881698
auguauucugaauauguca

SEQ ID NO: 2064777 - RNA, 19 nt, Artificial Sequence
  Description of Artificial Sequence: Synthetic oligonucleotide
  Antisense strand to SEQ ID NO: 2064776
ugacauauucagaauacau

SEQ ID NO: 2064778 - RNA, 19 nt, Artificial Sequence
  Description of Artificial Sequence: Synthetic oligonucleotide
  Sense strand starting at position 2251 of SEQ ID NO: 1881698
uuuguauaaguugggagau

SEQ ID NO: 2064779 - RNA, 19 nt, Artificial Sequence
  Description of Artificial Sequence: Synthetic oligonucleotide
  Antisense strand to SEQ ID NO: 2064778
aucucccaacuuauacaaa

SEQ ID NO: 2064780 - RNA, 19 nt, Artificial Sequence
  Description of Artificial Sequence: Synthetic oligonucleotide
  Sense strand starting at position 2291 of SEQ ID NO: 1881698
uaauaugagugcccaaaug

SEQ ID NO: 2064781 - RNA, 19 nt, Artificial Sequence
  Description of Artificial Sequence: Synthetic oligonucleotide
  Antisense strand to SEQ ID NO: 2064780
cauuugggcacucauauua

SEQ ID NO: 2064782 - RNA, 19 nt, Artificial Sequence
  Description of Artificial Sequence: Synthetic oligonucleotide
  Sense strand starting at position 2303 of SEQ ID NO: 1881698
ccaaaugucuuaguacuau

SEQ ID NO: 2064783 - RNA, 19 nt, Artificial Sequence
  Description of Artificial Sequence: Synthetic oligonucleotide
  Antisense strand to SEQ ID NO: 2064782
auaguacuaagacauuugg

SEQ ID NO: 2064784 - RNA, 19 nt, Artificial Sequence
  Description of Artificial Sequence: Synthetic oligonucleotide
  Sense strand starting at position 2749 of SEQ ID NO: 1881698
uucuuuguuaguggaaaug

SEQ ID NO: 2064785 - RNA, 19 nt, Artificial Sequence
  Description of Artificial Sequence: Synthetic oligonucleotide
  Antisense strand to SEQ ID NO: 2064784
cauuuccacuaacaaagaa

SEQ ID NO: 2064786 - RNA, 19 nt, Artificial Sequence
  Description of Artificial Sequence: Synthetic oligonucleotide
  Sense strand starting at position 2755 of SEQ ID NO: 1881698
guuaguggaaaugguaaau

SEQ ID NO: 2064787 - RNA, 19 nt, Artificial Sequence
  Description of Artificial Sequence: Synthetic oligonucleotide
  Antisense strand to SEQ ID NO: 2064786
auuuaccauuuccacuaac

SEQ ID NO: 2064788 - RNA, 19 nt, Artificial Sequence
  Description of Artificial Sequence: Synthetic oligonucleotide
  Sense strand starting at position 2907 of SEQ ID NO: 1881698
uguauaggaauguguuaca

SEQ ID NO: 2064789 - RNA, 19 nt, Artificial Sequence
  Description of Artificial Sequence: Synthetic oligonucleotide
  Antisense strand to SEQ ID NO: 2064788
uguaacacauuccuauaca

SEQ ID NO: 2064790 - RNA, 19 nt, Artificial Sequence
  Description of Artificial Sequence: Synthetic oligonucleotide
  Sense strand starting at position 2963 of SEQ ID NO: 1881698
caagauguuguuggauuaa

SEQ ID NO: 2064791 - RNA, 19 nt, Artificial Sequence
  Description of Artificial Sequence: Synthetic oligonucleotide
  Antisense strand to SEQ ID NO: 2064790
uuaauccaacaacaucuug

SEQ ID NO: 2064792 - RNA, 19 nt, Artificial Sequence
  Description of Artificial Sequence: Synthetic oligonucleotide
  Sense strand starting at position 3248 of SEQ ID NO: 1881698
auggaauugugcuuugaga

SEQ ID NO: 2064793 - RNA, 19 nt, Artificial Sequence
  Description of Artificial Sequence: Synthetic oligonucleotide
  Antisense strand to SEQ ID NO: 2064792
ucucaaagcacaauuccau

SEQ ID NO: 2064794 - RNA, 19 nt, Artificial Sequence
  Description of Artificial Sequence: Synthetic oligonucleotide
  Sense strand starting at position 3250 of SEQ ID NO: 1881698
ggaauugugcuuugagaaa

SEQ ID NO: 2064795 - RNA, 19 nt, Artificial Sequence
  Description of Artificial Sequence: Synthetic oligonucleotide
  Antisense strand to SEQ ID NO: 2064794
uuucucaaagcacaauucc

SEQ ID NO: 2064796 - RNA, 19 nt, Artificial Sequence
  Description of Artificial Sequence: Synthetic oligonucleotide
  Sense strand starting at position 3375 of SEQ ID NO: 1881698
aggauuccagcauguaaua

SEQ ID NO: 2064797 - RNA, 19 nt, Artificial Sequence
  Description of Artificial Sequence: Synthetic oligonucleotide
  Antisense strand to SEQ ID NO: 2064796
uauuacaugcuggaauccu

SEQ ID NO: 2064798 - RNA, 19 nt, Artificial Sequence
  Description of Artificial Sequence: Synthetic oligonucleotide
  Sense strand starting at position 3452 of SEQ ID NO: 1881698
ugacauaaguaucuuugga

SEQ ID NO: 2064799 - RNA, 19 nt, Artificial Sequence
  Description of Artificial Sequence: Synthetic oligonucleotide
  Antisense strand to SEQ ID NO: 2064798
uccaaagauacuuauguca

SEQ ID NO: 2064800 - RNA, 19 nt, Artificial Sequence
  Description of Artificial Sequence: Synthetic oligonucleotide
  Sense strand starting at position 3474 of SEQ ID NO: 1881698
aguguuugacgagauacua

SEQ ID NO: 2064801 - RNA, 19 nt, Artificial Sequence
  Description of Artificial Sequence: Synthetic oligonucleotide
  Antisense strand to SEQ ID NO: 2064800
uaguaucucgucaaacacu

SEQ ID NO: 2064802 - RNA, 19 nt, Artificial Sequence
  Description of Artificial Sequence: Synthetic oligonucleotide
  Sense strand starting at position 3639 of SEQ ID NO: 1881698
cucauugucagagguagau

SEQ ID NO: 2064803 - RNA, 19 nt, Artificial Sequence
  Description of Artificial Sequence: Synthetic oligonucleotide
  Antisense strand to SEQ ID NO: 2064802
aucuaccucugacaaugag

SEQ ID NO: 2064804 - RNA, 19 nt, Artificial Sequence
  Description of Artificial Sequence: Synthetic oligonucleotide
  Sense strand starting at position 3685 of SEQ ID NO: 1881698
aggauaaacuuugugguga

SEQ ID NO: 2064805 - RNA, 19 nt, Artificial Sequence
  Description of Artificial Sequence: Synthetic oligonucleotide
  Antisense strand to SEQ ID NO: 2064804
ucaccacaaaguuuauccu

SEQ ID NO: 2064806 - RNA, 19 nt, Artificial Sequence
  Description of Artificial Sequence: Synthetic oligonucleotide
  Sense strand starting at position 3794 of SEQ ID NO: 1881698
uguauacuucuguaguaua

SEQ ID NO: 2064807 - RNA, 19 nt, Artificial Sequence
  Description of Artificial Sequence: Synthetic oligonucleotide
  Antisense strand to SEQ ID NO: 2064806
uauacuacagaaguauaca

SEQ ID NO: 2064808 - RNA, 19 nt, Artificial Sequence
  Description of Artificial Sequence: Synthetic oligonucleotide
  Sense strand starting at position 3951 of SEQ ID NO: 1881698
auagcuaauucugugaacu

SEQ ID NO: 2064809 - RNA, 19 nt, Artificial Sequence
  Description of Artificial Sequence: Synthetic oligonucleotide
  Antisense strand to SEQ ID NO: 2064808
aguucacagaauuagcuau

SEQ ID NO: 2064810 - RNA, 19 nt, Artificial Sequence
  Description of Artificial Sequence: Synthetic oligonucleotide
  Sense strand starting at position 9 of SEQ ID NO: 1881699
cuccaauauccuggagucu

SEQ ID NO: 2064811 - RNA, 19 nt, Artificial Sequence
  Description of Artificial Sequence: Synthetic oligonucleotide
  Antisense strand to SEQ ID NO: 2064810
agacuccaggauauuggag

SEQ ID NO: 2064812 - RNA, 19 nt, Artificial Sequence
  Description of Artificial Sequence: Synthetic oligonucleotide
  Sense strand starting at position 99 of SEQ ID NO: 1881699
gcaacucuggcaggaagaa

SEQ ID NO: 2064813 - RNA, 19 nt, Artificial Sequence
  Description of Artificial Sequence: Synthetic oligonucleotide
  Antisense strand to SEQ ID NO: 2064812
uucuuccugccagaguugc

SEQ ID NO: 2064814 - RNA, 19 nt, Artificial Sequence
  Description of Artificial Sequence: Synthetic oligonucleotide
  Sense strand starting at position 205 of SEQ ID NO: 1881699
ugcagcugacuacauaaau

SEQ ID NO: 2064815 - RNA, 19 nt, Artificial Sequence
  Description of Artificial Sequence: Synthetic oligonucleotide
  Antisense strand to SEQ ID NO: 2064814
auuuauguagucagcugca

SEQ ID NO: 2064816 - RNA, 19 nt, Artificial Sequence
  Description of Artificial Sequence: Synthetic oligonucleotide
  Sense strand starting at position 452 of SEQ ID NO: 1881699
acugcuguuaugggaagaa

SEQ ID NO: 2064817 - RNA, 19 nt, Artificial Sequence
  Description of Artificial Sequence: Synthetic oligonucleotide
  Antisense strand to SEQ ID NO: 2064816
uucuucccauaacagcagu

SEQ ID NO: 2064818 - RNA, 19 nt, Artificial Sequence
  Description of Artificial Sequence: Synthetic oligonucleotide
  Sense strand starting at position 481 of SEQ ID NO: 1881699
gcaggagucaaccauuaug

SEQ ID NO: 2064819 - RNA, 19 nt, Artificial Sequence
  Description of Artificial Sequence: Synthetic oligonucleotide
  Antisense strand to SEQ ID NO: 2064818
cauaaugguugacuccugc

SEQ ID NO: 2064820 - RNA, 19 nt, Artificial Sequence
  Description of Artificial Sequence: Synthetic oligonucleotide
  Sense strand starting at position 599 of SEQ ID NO: 1881699
aaaugcugaguccagacau

SEQ ID NO: 2064821 - RNA, 19 nt, Artificial Sequence
  Description of Artificial Sequence: Synthetic oligonucleotide
  Antisense strand to SEQ ID NO: 2064820
augucuggacucagcauuu

SEQ ID NO: 2064822 - RNA, 19 nt, Artificial Sequence
  Description of Artificial Sequence: Synthetic oligonucleotide
  Sense strand starting at position 680 of SEQ ID NO: 1881699
uagugagauuaguugcaca

SEQ ID NO: 2064823 - RNA, 19 nt, Artificial Sequence
  Description of Artificial Sequence: Synthetic oligonucleotide
  Antisense strand to SEQ ID NO: 2064822
ugugcaacuaaucucacua

SEQ ID NO: 2064824 - RNA, 19 nt, Artificial Sequence
  Description of Artificial Sequence: Synthetic oligonucleotide
  Sense strand starting at position 685 of SEQ ID NO: 1881699
agauuaguugcacaguuga

SEQ ID NO: 2064825 - RNA, 19 nt, Artificial Sequence
  Description of Artificial Sequence: Synthetic oligonucleotide
  Antisense strand to SEQ ID NO: 2064824
ucaacugugcaacuaaucu

SEQ ID NO: 2064826 - RNA, 19 nt, Artificial Sequence
  Description of Artificial Sequence: Synthetic oligonucleotide
  Sense strand starting at position 725 of SEQ ID NO: 1881699
ucuuuauuggauugugagu

SEQ ID NO: 2064827 - RNA, 19 nt, Artificial Sequence
  Description of Artificial Sequence: Synthetic oligonucleotide
  Antisense strand to SEQ ID NO: 2064826
acucacaauccaauaaaga

SEQ ID NO: 2064828 - RNA, 19 nt, Artificial Sequence
  Description of Artificial Sequence: Synthetic oligonucleotide
  Sense strand starting at position 730 of SEQ ID NO: 1881699
auuggauugugaguaauaa

SEQ ID NO: 2064829 - RNA, 19 nt, Artificial Sequence
  Description of Artificial Sequence: Synthetic oligonucleotide
  Antisense strand to SEQ ID NO: 2064828
uuauuacucacaauccaau

SEQ ID NO: 2064830 - RNA, 19 nt, Artificial Sequence
  Description of Artificial Sequence: Synthetic oligonucleotide
  Sense strand starting at position 1182 of SEQ ID NO: 1881699
ugcuauauguucucagaga

SEQ ID NO: 2064831 - RNA, 19 nt, Artificial Sequence
  Description of Artificial Sequence: Synthetic oligonucleotide
  Antisense strand to SEQ ID NO: 2064830
ucucugagaacauauagca

SEQ ID NO: 2064832 - RNA, 19 nt, Artificial Sequence
  Description of Artificial Sequence: Synthetic oligonucleotide
  Sense strand starting at position 1766 of SEQ ID NO: 1881699
guucuagaucccugaagga

SEQ ID NO: 2064833 - RNA, 19 nt, Artificial Sequence
  Description of Artificial Sequence: Synthetic oligonucleotide
  Antisense strand to SEQ ID NO: 2064832
uccuucagggaucuagaac

SEQ ID NO: 2064834 - RNA, 19 nt, Artificial Sequence
  Description of Artificial Sequence: Synthetic oligonucleotide
  Sense strand starting at position 1995 of SEQ ID NO: 1881699
cgagcacagcccuauacau

SEQ ID NO: 2064835 - RNA, 19 nt, Artificial Sequence
  Description of Artificial Sequence: Synthetic oligonucleotide
  Antisense strand to SEQ ID NO: 2064834
auguauagggcugugcucg

SEQ ID NO: 2064836 - RNA, 19 nt, Artificial Sequence
  Description of Artificial Sequence: Synthetic oligonucleotide
  Sense strand starting at position 2155 of SEQ ID NO: 1881699
uaaagaaucuugcuugguu

SEQ ID NO: 2064837 - RNA, 19 nt, Artificial Sequence
  Description of Artificial Sequence: Synthetic oligonucleotide
  Antisense strand to SEQ ID NO: 2064836
aaccaagcaagauucuuua

SEQ ID NO: 2064838 - RNA, 19 nt, Artificial Sequence
  Description of Artificial Sequence: Synthetic oligonucleotide
  Sense strand starting at position 2170 of SEQ ID NO: 1881699
gguugcuaaggaugaggua

SEQ ID NO: 2064839 - RNA, 19 nt, Artificial Sequence
  Description of Artificial Sequence: Synthetic oligonucleotide
  Antisense strand to SEQ ID NO: 2064838
uaccucauccuuagcaacc

SEQ ID NO: 2064840 - RNA, 19 nt, Artificial Sequence
  Description of Artificial Sequence: Synthetic oligonucleotide
  Sense strand starting at position 2276 of SEQ ID NO: 1881699
aggcuugcaucacuaugau

SEQ ID NO: 2064841 - RNA, 19 nt, Artificial Sequence
  Description of Artificial Sequence: Synthetic oligonucleotide
  Antisense strand to SEQ ID NO: 2064840
aucauagugaugcaagccu

SEQ ID NO: 2064842 - RNA, 19 nt, Artificial Sequence
  Description of Artificial Sequence: Synthetic oligonucleotide
  Sense strand starting at position 2282 of SEQ ID NO: 1881699
gcaucacuaugauugguua

SEQ ID NO: 2064843 - RNA, 19 nt, Artificial Sequence
  Description of Artificial Sequence: Synthetic oligonucleotide
  Antisense strand to SEQ ID NO: 2064842
uaaccaaucauagugaugc

SEQ ID NO: 2064844 - RNA, 19 nt, Artificial Sequence
  Description of Artificial Sequence: Synthetic oligonucleotide
  Sense strand starting at position 2285 of SEQ ID NO: 1881699
ucacuaugauugguuaguu

SEQ ID NO: 2064845 - RNA, 19 nt, Artificial Sequence
  Description of Artificial Sequence: Synthetic oligonucleotide
  Antisense strand to SEQ ID NO: 2064844
aacuaaccaaucauaguga

SEQ ID NO: 2064846 - RNA, 19 nt, Artificial Sequence
  Description of Artificial Sequence: Synthetic oligonucleotide
  Sense strand starting at position 2339 of SEQ ID NO: 1881699
ggagaacaguguuucgcua

SEQ ID NO: 2064847 - RNA, 19 nt, Artificial Sequence
  Description of Artificial Sequence: Synthetic oligonucleotide
  Antisense strand to SEQ ID NO: 2064846
uagcgaaacacuguucucc

SEQ ID NO: 2064848 - RNA, 19 nt, Artificial Sequence
  Description of Artificial Sequence: Synthetic oligonucleotide
  Sense strand starting at position 2531 of SEQ ID NO: 1881699
guuggagauuaauaaacaa

SEQ ID NO: 2064849 - RNA, 19 nt, Artificial Sequence
  Description of Artificial Sequence: Synthetic oligonucleotide
  Antisense strand to SEQ ID NO: 2064848
uuguuuauuaaucuccaac

SEQ ID NO: 2064850 - RNA, 19 nt, Artificial Sequence
  Description of Artificial Sequence: Synthetic oligonucleotide
  Sense strand starting at position 2611 of SEQ ID NO: 1881699
acauccugucauugacaua

SEQ ID NO: 2064851 - RNA, 19 nt, Artificial Sequence
  Description of Artificial Sequence: Synthetic oligonucleotide
  Antisense strand to SEQ ID NO: 2064850
uaugucaaugacaggaugu

SEQ ID NO: 2064852 - RNA, 19 nt, Artificial Sequence
  Description of Artificial Sequence: Synthetic oligonucleotide
  Sense strand starting at position 2840 of SEQ ID NO: 1881699
acaccagugccacauuauu

SEQ ID NO: 2064853 - RNA, 19 nt, Artificial Sequence
  Description of Artificial Sequence: Synthetic oligonucleotide
  Antisense strand to SEQ ID NO: 2064852
aauaauguggcacuggugu

SEQ ID NO: 2064854 - RNA, 19 nt, Artificial Sequence
  Description of Artificial Sequence: Synthetic oligonucleotide
  Sense strand starting at position 2865 of SEQ ID NO: 1881699
ccagcacaacgaugauaaa

SEQ ID NO: 2064855 - RNA, 19 nt, Artificial Sequence
  Description of Artificial Sequence: Synthetic oligonucleotide
  Antisense strand to SEQ ID NO: 2064854
uuuaucaucguugugcugg

SEQ ID NO: 2064856 - RNA, 19 nt, Artificial Sequence
  Description of Artificial Sequence: Synthetic oligonucleotide
  Sense strand starting at position 2922 of SEQ ID NO: 1881699
cucccuguugccuagaacu

SEQ ID NO: 2064857 - RNA, 19 nt, Artificial Sequence
  Description of Artificial Sequence: Synthetic oligonucleotide
  Antisense strand to SEQ ID NO: 2064856
aguucuaggcaacagggag

SEQ ID NO: 2064858 - RNA, 19 nt, Artificial Sequence
  Description of Artificial Sequence: Synthetic oligonucleotide
  Sense strand starting at position 2924 of SEQ ID NO: 1881699
cccuguugccuagaacuuu

SEQ ID NO: 2064859 - RNA, 19 nt, Artificial Sequence
  Description of Artificial Sequence: Synthetic oligonucleotide
  Antisense strand to SEQ ID NO: 2064858
aaaguucuaggcaacaggg

SEQ ID NO: 2064860 - RNA, 19 nt, Artificial Sequence
  Description of Artificial Sequence: Synthetic oligonucleotide
  Sense strand starting at position 2959 of SEQ ID NO: 1881699
gccuucgccauuugagagu

SEQ ID NO: 2064861 - RNA, 19 nt, Artificial Sequence
  Description of Artificial Sequence: Synthetic oligonucleotide
  Antisense strand to SEQ ID NO: 2064860
acucucaaauggcgaaggc

SEQ ID NO: 2064862 - RNA, 19 nt, Artificial Sequence
  Description of Artificial Sequence: Synthetic oligonucleotide
  Sense strand starting at position 2975 of SEQ ID NO: 1881699
aguauugaguaccugaaau

SEQ ID NO: 2064863 - RNA, 19 nt, Artificial Sequence
  Description of Artificial Sequence: Synthetic oligonucleotide
  Antisense strand to SEQ ID NO: 2064862
auuucagguacucaauacu

SEQ ID NO: 2064864 - RNA, 19 nt, Artificial Sequence
  Description of Artificial Sequence: Synthetic oligonucleotide
  Sense strand starting at position 3009 of SEQ ID NO: 1881699
uaagaagugcugugaguau

SEQ ID NO: 2064865 - RNA, 19 nt, Artificial Sequence
  Description of Artificial Sequence: Synthetic oligonucleotide
  Antisense strand to SEQ ID NO: 2064864
auacucacagcacuucuua

SEQ ID NO: 2064866 - RNA, 19 nt, Artificial Sequence
  Description of Artificial Sequence: Synthetic oligonucleotide
  Sense strand starting at position 3034 of SEQ ID NO: 1881699
cacauuagaguuugaagac

SEQ ID NO: 2064867 - RNA, 19 nt, Artificial Sequence
  Description of Artificial Sequence: Synthetic oligonucleotide
  Antisense strand to SEQ ID NO: 2064866
gucuucaaacucuaaugug

SEQ ID NO: 2064868 - RNA, 19 nt, Artificial Sequence
  Description of Artificial Sequence: Synthetic oligonucleotide
  Sense strand starting at position 3187 of SEQ ID NO: 1881699
uuguaaugugguuaguaga

SEQ ID NO: 2064869 - RNA, 19 nt, Artificial Sequence
  Description of Artificial Sequence: Synthetic oligonucleotide
  Antisense strand to SEQ ID NO: 2064868
ucuacuaaccacauuacaa

SEQ ID NO: 2064870 - RNA, 19 nt, Artificial Sequence
  Description of Artificial Sequence: Synthetic oligonucleotide
  Sense strand starting at position 3256 of SEQ ID NO: 1881699
agugaaaccucagugacua

SEQ ID NO: 2064871 - RNA, 19 nt, Artificial Sequence
  Description of Artificial Sequence: Synthetic oligonucleotide
  Antisense strand to SEQ ID NO: 2064870
uagucacugagguuucacu

SEQ ID NO: 2064872 - RNA, 19 nt, Artificial Sequence
  Description of Artificial Sequence: Synthetic oligonucleotide
  Sense strand starting at position 3257 of SEQ ID NO: 1881699
gugaaaccucagugacuaa

SEQ ID NO: 2064873 - RNA, 19 nt, Artificial Sequence
  Description of Artificial Sequence: Synthetic oligonucleotide
  Antisense strand to SEQ ID NO: 2064872
uuagucacugagguuucac

SEQ ID NO: 2064874 - RNA, 19 nt, Artificial Sequence
  Description of Artificial Sequence: Synthetic oligonucleotide
  Sense strand starting at position 3287 of SEQ ID NO: 1881699
uagucuuccgcagagguaa

SEQ ID NO: 2064875 - RNA, 19 nt, Artificial Sequence
  Description of Artificial Sequence: Synthetic oligonucleotide
  Antisense strand to SEQ ID NO: 2064874
uuaccucugcggaagacua

SEQ ID NO: 2064876 - RNA, 19 nt, Artificial Sequence
  Description of Artificial Sequence: Synthetic oligonucleotide
  Sense strand starting at position 3315 of SEQ ID NO: 1881699
ucuguuacaggcugaaaug

SEQ ID NO: 2064877 - RNA, 19 nt, Artificial Sequence
  Description of Artificial Sequence: Synthetic oligonucleotide
  Antisense strand to SEQ ID NO: 2064876
cauuucagccuguaacaga

SEQ ID NO: 2064878 - RNA, 19 nt, Artificial Sequence
  Description of Artificial Sequence: Synthetic oligonucleotide
  Sense strand starting at position 3316 of SEQ ID NO: 1881699
cuguuacaggcugaaaugu

SEQ ID NO: 2064879 - RNA, 19 nt, Artificial Sequence
  Description of Artificial Sequence: Synthetic oligonucleotide
  Antisense strand to SEQ ID NO: 2064878
acauuucagccuguaacag

SEQ ID NO: 2064880 - RNA, 19 nt, Artificial Sequence
  Description of Artificial Sequence: Synthetic oligonucleotide
  Sense strand starting at position 3686 of SEQ ID NO: 1881699
ggauauauuucuguugcuu

SEQ ID NO: 2064881 - RNA, 19 nt, Artificial Sequence
  Description of Artificial Sequence: Synthetic oligonucleotide
  Antisense strand to SEQ ID NO: 2064880
aagcaacagaaauauaucc

SEQ ID NO: 2064882 - RNA, 19 nt, Artificial Sequence
  Description of Artificial Sequence: Synthetic oligonucleotide
  Sense strand starting at position 3706 of SEQ ID NO: 1881699
ggccauccagucuaggaua

SEQ ID NO: 2064883 - RNA, 19 nt, Artificial Sequence
  Description of Artificial Sequence: Synthetic oligonucleotide
  Antisense strand to SEQ ID NO: 2064882
uauccuagacuggauggcc

SEQ ID NO: 2064884 - RNA, 19 nt, Artificial Sequence
  Description of Artificial Sequence: Synthetic oligonucleotide
  Sense strand starting at position 3708 of SEQ ID NO: 1881699
ccauccagucuaggauauu

SEQ ID NO: 2064885 - RNA, 19 nt, Artificial Sequence
  Description of Artificial Sequence: Synthetic oligonucleotide
  Antisense strand to SEQ ID NO: 2064884
aauauccuagacuggaugg

SEQ ID NO: 2064886 - RNA, 19 nt, Artificial Sequence
  Description of Artificial Sequence: Synthetic oligonucleotide
  Sense strand starting at position 3726 of SEQ ID NO: 1881699
uuuguuauggcauacacua

SEQ ID NO: 2064887 - RNA, 19 nt, Artificial Sequence
  Description of Artificial Sequence: Synthetic oligonucleotide
  Antisense strand to SEQ ID NO: 2064886
uaguguaugccauaacaaa

SEQ ID NO: 2064888 - RNA, 19 nt, Artificial Sequence
  Description of Artificial Sequence: Synthetic oligonucleotide
  Sense strand starting at position 3818 of SEQ ID NO: 1881699
cuuaauggcagucauguga

SEQ ID NO: 2064889 - RNA, 19 nt, Artificial Sequence
  Description of Artificial Sequence: Synthetic oligonucleotide
  Antisense strand to SEQ ID NO: 2064888
ucacaugacugccauuaag

SEQ ID NO: 2064890 - RNA, 19 nt, Artificial Sequence
  Description of Artificial Sequence: Synthetic oligonucleotide
  Sense strand starting at position 12 of SEQ ID NO: 1881700
ugcaucuaccgucaauaaa

SEQ ID NO: 2064891 - RNA, 19 nt, Artificial Sequence
  Description of Artificial Sequence: Synthetic oligonucleotide
  Antisense strand to SEQ ID NO: 2064890
uuuauugacgguagaugca

SEQ ID NO: 2064892 - RNA, 19 nt, Artificial Sequence
  Description of Artificial Sequence: Synthetic oligonucleotide
  Sense strand starting at position 589 of SEQ ID NO: 1881700
ggguauccuguagaugguu

SEQ ID NO: 2064893 - RNA, 19 nt, Artificial Sequence
  Description of Artificial Sequence: Synthetic oligonucleotide
  Antisense strand to SEQ ID NO: 2064892
aaccaucuacaggauaccc

SEQ ID NO: 2064894 - RNA, 19 nt, Artificial Sequence
  Description of Artificial Sequence: Synthetic oligonucleotide
  Sense strand starting at position 610 of SEQ ID NO: 1881700
uuuggaugcagucaguaaa

SEQ ID NO: 2064895 - RNA, 19 nt, Artificial Sequence
  Description of Artificial Sequence: Synthetic oligonucleotide
  Antisense strand to SEQ ID NO: 2064894
uuuacugacugcauccaaa

SEQ ID NO: 2064896 - RNA, 19 nt, Artificial Sequence
  Description of Artificial Sequence: Synthetic oligonucleotide
  Sense strand starting at position 613 of SEQ ID NO: 1881700
ggaugcagucaguaaacca

SEQ ID NO: 2064897 - RNA, 19 nt, Artificial Sequence
  Description of Artificial Sequence: Synthetic oligonucleotide
  Antisense strand to SEQ ID NO: 2064896
ugguuuacugacugcaucc

SEQ ID NO: 2064898 - RNA, 19 nt, Artificial Sequence
  Description of Artificial Sequence: Synthetic oligonucleotide
  Sense strand starting at position 790 of SEQ ID NO: 1881700
ccuccauuccaguggaagu

SEQ ID NO: 2064899 - RNA, 19 nt, Artificial Sequence
  Description of Artificial Sequence: Synthetic oligonucleotide
  Antisense strand to SEQ ID NO: 2064898
acuuccacuggaauggagg

SEQ ID NO: 2064900 - RNA, 19 nt, Artificial Sequence
  Description of Artificial Sequence: Synthetic oligonucleotide
  Sense strand starting at position 805 of SEQ ID NO: 1881700
aaguaaaugugagcuacau

SEQ ID NO: 2064901 - RNA, 19 nt, Artificial Sequence
  Description of Artificial Sequence: Synthetic oligonucleotide
  Antisense strand to SEQ ID NO: 2064900
auguagcucacauuuacuu

SEQ ID NO: 2064902 - RNA, 19 nt, Artificial Sequence
  Description of Artificial Sequence: Synthetic oligonucleotide
  Sense strand starting at position 807 of SEQ ID NO: 1881700
guaaaugugagcuacauga

SEQ ID NO: 2064903 - RNA, 19 nt, Artificial Sequence
  Description of Artificial Sequence: Synthetic oligonucleotide
  Antisense strand to SEQ ID NO: 2064902
ucauguagcucacauuuac

SEQ ID NO: 2064904 - RNA, 19 nt, Artificial Sequence
  Description of Artificial Sequence: Synthetic oligonucleotide
  Sense strand starting at position 809 of SEQ ID NO: 1881700
aaaugugagcuacaugacu

SEQ ID NO: 2064905 - RNA, 19 nt, Artificial Sequence
  Description of Artificial Sequence: Synthetic oligonucleotide
  Antisense strand to SEQ ID NO: 2064904
agucauguagcucacauuu

SEQ ID NO: 2064906 - RNA, 19 nt, Artificial Sequence
  Description of Artificial Sequence: Synthetic oligonucleotide
  Sense strand starting at position 811 of SEQ ID NO: 1881700
augugagcuacaugacuga

SEQ ID NO: 2064907 - RNA, 19 nt, Artificial Sequence
  Description of Artificial Sequence: Synthetic oligonucleotide
  Antisense strand to SEQ ID NO: 2064906
ucagucauguagcucacau

SEQ ID NO: 2064908 - RNA, 19 nt, Artificial Sequence
  Description of Artificial Sequence: Synthetic oligonucleotide
  Sense strand starting at position 815 of SEQ ID NO: 1881700
gagcuacaugacugauagu

SEQ ID NO: 2064909 - RNA, 19 nt, Artificial Sequence
  Description of Artificial Sequence: Synthetic oligonucleotide
  Antisense strand to SEQ ID NO: 2064908
acuaucagucauguagcuc

SEQ ID NO: 2064910 - RNA, 19 nt, Artificial Sequence
  Description of Artificial Sequence: Synthetic oligonucleotide
  Sense strand starting at position 879 of SEQ ID NO: 1881700
uauagugcucaauaugaag

SEQ ID NO: 2064911 - RNA, 19 nt, Artificial Sequence
  Description of Artificial Sequence: Synthetic oligonucleotide
  Antisense strand to SEQ ID NO: 2064910
cuucauauugagcacuaua

SEQ ID NO: 2064912 - RNA, 19 nt, Artificial Sequence
  Description of Artificial Sequence: Synthetic oligonucleotide
  Sense strand starting at position 953 of SEQ ID NO: 1881700
cuuagaguuguuuaagccu

SEQ ID NO: 2064913 - RNA, 19 nt, Artificial Sequence
  Description of Artificial Sequence: Synthetic oligonucleotide
  Antisense strand to SEQ ID NO: 2064912
aggcuuaaacaacucuaag

SEQ ID NO: 2064914 - RNA, 19 nt, Artificial Sequence
  Description of Artificial Sequence: Synthetic oligonucleotide
  Sense strand starting at position 956 of SEQ ID NO: 1881700
agaguuguuuaagccuaaa

SEQ ID NO: 2064915 - RNA, 19 nt, Artificial Sequence
  Description of Artificial Sequence: Synthetic oligonucleotide
  Antisense strand to SEQ ID NO: 2064914
uuuaggcuuaaacaacucu

SEQ ID NO: 2064916 - RNA, 19 nt, Artificial Sequence
  Description of Artificial Sequence: Synthetic oligonucleotide
  Sense strand starting at position 959 of SEQ ID NO: 1881700
guuguuuaagccuaaacaa

SEQ ID NO: 2064917 - RNA, 19 nt, Artificial Sequence
  Description of Artificial Sequence: Synthetic oligonucleotide
  Antisense strand to SEQ ID NO: 2064916
uuguuuaggcuuaaacaac

SEQ ID NO: 2064918 - RNA, 19 nt, Artificial Sequence
  Description of Artificial Sequence: Synthetic oligonucleotide
  Sense strand starting at position 989 of SEQ ID NO: 1881700
ucucauuucuaauaggagu

SEQ ID NO: 2064919 - RNA, 19 nt, Artificial Sequence
  Description of Artificial Sequence: Synthetic oligonucleotide
  Antisense strand to SEQ ID NO: 2064918
acuccuauuagaaaugaga

SEQ ID NO: 2064920 - RNA, 19 nt, Artificial Sequence
  Description of Artificial Sequence: Synthetic oligonucleotide
  Sense strand starting at position 1140 of SEQ ID NO: 1881700
gagggccuggcacauuaau

SEQ ID NO: 2064921 - RNA, 19 nt, Artificial Sequence
  Description of Artificial Sequence: Synthetic oligonucleotide
  Antisense strand to SEQ ID NO: 2064920
auuaaugugccaggcccuc

SEQ ID NO: 2064922 - RNA, 19 nt, Artificial Sequence
  Description of Artificial Sequence: Synthetic oligonucleotide
  Sense strand starting at position 1482 of SEQ ID NO: 1881700
ucggcucuuacagugcuua

SEQ ID NO: 2064923 - RNA, 19 nt, Artificial Sequence
  Description of Artificial Sequence: Synthetic oligonucleotide
  Antisense strand to SEQ ID NO: 2064922
uaagcacuguaagagccga

SEQ ID NO: 2064924 - RNA, 19 nt, Artificial Sequence
  Description of Artificial Sequence: Synthetic oligonucleotide
  Sense strand starting at position 1818 of SEQ ID NO: 1881700
aggacugcuuccuuaacuu

SEQ ID NO: 2064925 - RNA, 19 nt, Artificial Sequence
  Description of Artificial Sequence: Synthetic oligonucleotide
  Antisense strand to SEQ ID NO: 2064924
aaguuaaggaagcaguccu

SEQ ID NO: 2064926 - RNA, 19 nt, Artificial Sequence
  Description of Artificial Sequence: Synthetic oligonucleotide
  Sense strand starting at position 1871 of SEQ ID NO: 1881700
uguggauucuuagucacau

SEQ ID NO: 2064927 - RNA, 19 nt, Artificial Sequence
  Description of Artificial Sequence: Synthetic oligonucleotide
  Antisense strand to SEQ ID NO: 2064926
augugacuaagaauccaca

SEQ ID NO: 2064928 - RNA, 19 nt, Artificial Sequence
  Description of Artificial Sequence: Synthetic oligonucleotide
  Sense strand starting at position 1872 of SEQ ID NO: 1881700
guggauucuuagucacaug

SEQ ID NO: 2064929 - RNA, 19 nt, Artificial Sequence
  Description of Artificial Sequence: Synthetic oligonucleotide
  Antisense strand to SEQ ID NO: 2064928
caugugacuaagaauccac

SEQ ID NO: 2064930 - RNA, 19 nt, Artificial Sequence
  Description of Artificial Sequence: Synthetic oligonucleotide
  Sense strand starting at position 1897 of SEQ ID NO: 1881700
uucuguauggucugcauuu

SEQ ID NO: 2064931 - RNA, 19 nt, Artificial Sequence
  Description of Artificial Sequence: Synthetic oligonucleotide
  Antisense strand to SEQ ID NO: 2064930
aaaugcagaccauacagaa

SEQ ID NO: 2064932 - RNA, 19 nt, Artificial Sequence
  Description of Artificial Sequence: Synthetic oligonucleotide
  Sense strand starting at position 1944 of SEQ ID NO: 1881700
ccuuguacccgugaagaaa

SEQ ID NO: 2064933 - RNA, 19 nt, Artificial Sequence
  Description of Artificial Sequence: Synthetic oligonucleotide
  Antisense strand to SEQ ID NO: 2064932
uuucuucacggguacaagg

SEQ ID NO: 2064934 - RNA, 19 nt, Artificial Sequence
  Description of Artificial Sequence: Synthetic oligonucleotide
  Sense strand starting at position 1958 of SEQ ID NO: 1881700
agaaauaggcagugucacu

SEQ ID NO: 2064935 - RNA, 19 nt, Artificial Sequence
  Description of Artificial Sequence: Synthetic oligonucleotide
  Antisense strand to SEQ ID NO: 2064934
agugacacugccuauuucu

SEQ ID NO: 2064936 - RNA, 19 nt, Artificial Sequence
  Description of Artificial Sequence: Synthetic oligonucleotide
  Sense strand starting at position 2074 of SEQ ID NO: 1881700
gccucauugcaagaagacu

SEQ ID NO: 2064937 - RNA, 19 nt, Artificial Sequence
  Description of Artificial Sequence: Synthetic oligonucleotide
  Antisense strand to SEQ ID NO: 2064936
agucuucuugcaaugaggc

SEQ ID NO: 2064938 - RNA, 19 nt, Artificial Sequence
  Description of Artificial Sequence: Synthetic oligonucleotide
  Sense strand starting at position 2445 of SEQ ID NO: 1881700
uuauuauugcaguacaaag

SEQ ID NO: 2064939 - RNA, 19 nt, Artificial Sequence
  Description of Artificial Sequence: Synthetic oligonucleotide
  Antisense strand to SEQ ID NO: 2064938
cuuuguacugcaauaauaa

SEQ ID NO: 2064940 - RNA, 19 nt, Artificial Sequence
  Description of Artificial Sequence: Synthetic oligonucleotide
  Sense strand starting at position 2611 of SEQ ID NO: 1881700
caucauggcuuugugggaa

SEQ ID NO: 2064941 - RNA, 19 nt, Artificial Sequence
  Description of Artificial Sequence: Synthetic oligonucleotide
  Antisense strand to SEQ ID NO: 2064940
uucccacaaagccaugaug

SEQ ID NO: 2064942 - RNA, 19 nt, Artificial Sequence
  Description of Artificial Sequence: Synthetic oligonucleotide
  Sense strand starting at position 2623 of SEQ ID NO: 1881700
gugggaaagccuuagugug

SEQ ID NO: 2064943 - RNA, 19 nt, Artificial Sequence
  Description of Artificial Sequence: Synthetic oligonucleotide
  Antisense strand to SEQ ID NO: 2064942
cacacuaaggcuuucccac

SEQ ID NO: 2064944 - RNA, 19 nt, Artificial Sequence
  Description of Artificial Sequence: Synthetic oligonucleotide
  Sense strand starting at position 2698 of SEQ ID NO: 1881700
uccagucaaagguaagagu

SEQ ID NO: 2064945 - RNA, 19 nt, Artificial Sequence
  Description of Artificial Sequence: Synthetic oligonucleotide
  Antisense strand to SEQ ID NO: 2064944
acucuuaccuuugacugga

SEQ ID NO: 2064946 - RNA, 19 nt, Artificial Sequence
  Description of Artificial Sequence: Synthetic oligonucleotide
  Sense strand starting at position 2707 of SEQ ID NO: 1881700
agguaagaguguuuaaagc

SEQ ID NO: 2064947 - RNA, 19 nt, Artificial Sequence
  Description of Artificial Sequence: Synthetic oligonucleotide
  Antisense strand to SEQ ID NO: 2064946
gcuuuaaacacucuuaccu

SEQ ID NO: 2064948 - RNA, 19 nt, Artificial Sequence
  Description of Artificial Sequence: Synthetic oligonucleotide
  Sense strand starting at position 2755 of SEQ ID NO: 1881700
ugagucuucucucuuagau

SEQ ID NO: 2064949 - RNA, 19 nt, Artificial Sequence
  Description of Artificial Sequence: Synthetic oligonucleotide
  Antisense strand to SEQ ID NO: 2064948
aucuaagagagaagacuca

SEQ ID NO: 2064950 - RNA, 19 nt, Artificial Sequence
  Description of Artificial Sequence: Synthetic oligonucleotide
  Sense strand starting at position 2850 of SEQ ID NO: 1881700
cucucagugacugaagagu

SEQ ID NO: 2064951 - RNA, 19 nt, Artificial Sequence
  Description of Artificial Sequence: Synthetic oligonucleotide
  Antisense strand to SEQ ID NO: 2064950
acucuucagucacugagag

SEQ ID NO: 2064952 - RNA, 19 nt, Artificial Sequence
  Description of Artificial Sequence: Synthetic oligonucleotide
  Sense strand starting at position 2986 of SEQ ID NO: 1881700
accagagcuggccaaauua

SEQ ID NO: 2064953 - RNA, 19 nt, Artificial Sequence
  Description of Artificial Sequence: Synthetic oligonucleotide
  Antisense strand to SEQ ID NO: 2064952
uaauuuggccagcucuggu

SEQ ID NO: 2064954 - RNA, 19 nt, Artificial Sequence
  Description of Artificial Sequence: Synthetic oligonucleotide
  Sense strand starting at position 2994 of SEQ ID NO: 1881700
uggccaaauuagcuuuaca

SEQ ID NO: 2064955 - RNA, 19 nt, Artificial Sequence
  Description of Artificial Sequence: Synthetic oligonucleotide
  Antisense strand to SEQ ID NO: 2064954
uguaaagcuaauuuggcca

SEQ ID NO: 2064956 - RNA, 19 nt, Artificial Sequence
  Description of Artificial Sequence: Synthetic oligonucleotide
  Sense strand starting at position 3081 of SEQ ID NO: 1881700
uccagcuuugacuauaguu

SEQ ID NO: 2064957 - RNA, 19 nt, Artificial Sequence
  Description of Artificial Sequence: Synthetic oligonucleotide
  Antisense strand to SEQ ID NO: 2064956
aacuauagucaaagcugga

SEQ ID NO: 2064958 - RNA, 19 nt, Artificial Sequence
  Description of Artificial Sequence: Synthetic oligonucleotide
  Sense strand starting at position 3423 of SEQ ID NO: 1881700
cuuuaacuaucuguaguua

SEQ ID NO: 2064959 - RNA, 19 nt, Artificial Sequence
  Description of Artificial Sequence: Synthetic oligonucleotide
  Antisense strand to SEQ ID NO: 2064958
uaacuacagauaguuaaag

SEQ ID NO: 2064960 - RNA, 19 nt, Artificial Sequence
  Description of Artificial Sequence: Synthetic oligonucleotide
  Sense strand starting at position 3434 of SEQ ID NO: 1881700
uguaguuauuuagcaagua

SEQ ID NO: 2064961 - RNA, 19 nt, Artificial Sequence
  Description of Artificial Sequence: Synthetic oligonucleotide
  Antisense strand to SEQ ID NO: 2064960
uacuugcuaaauaacuaca

SEQ ID NO: 2064962 - RNA, 19 nt, Artificial Sequence
  Description of Artificial Sequence: Synthetic oligonucleotide
  Sense strand starting at position 3453 of SEQ ID NO: 1881700
ggacuuggucugcagcaca

SEQ ID NO: 2064963 - RNA, 19 nt, Artificial Sequence
  Description of Artificial Sequence: Synthetic oligonucleotide
  Antisense strand to SEQ ID NO: 2064962
ugugcugcagaccaagucc

SEQ ID NO: 2064964 - RNA, 19 nt, Artificial Sequence
  Description of Artificial Sequence: Synthetic oligonucleotide
  Sense strand starting at position 3473 of SEQ ID NO: 1881700
cgguaauuccacuacucuu

SEQ ID NO: 2064965 - RNA, 19 nt, Artificial Sequence
  Description of Artificial Sequence: Synthetic oligonucleotide
  Antisense strand to SEQ ID NO: 2064964
aagaguaguggaauuaccg

SEQ ID NO: 2064966 - RNA, 19 nt, Artificial Sequence
  Description of Artificial Sequence: Synthetic oligonucleotide
  Sense strand starting at position 3603 of SEQ ID NO: 1881700
cuuccaucguuauuggaaa

SEQ ID NO: 2064967 - RNA, 19 nt, Artificial Sequence
  Description of Artificial Sequence: Synthetic oligonucleotide
  Antisense strand to SEQ ID NO: 2064966
uuuccaauaacgauggaag

SEQ ID NO: 2064968 - RNA, 19 nt, Artificial Sequence
  Description of Artificial Sequence: Synthetic oligonucleotide
  Sense strand starting at position 3917 of SEQ ID NO: 1881700
uccaacaugcuggaauuau

SEQ ID NO: 2064969 - RNA, 19 nt, Artificial Sequence
  Description of Artificial Sequence: Synthetic oligonucleotide
  Antisense strand to SEQ ID NO: 2064968
auaauuccagcauguugga

SEQ ID NO: 2064970 - RNA, 19 nt, Artificial Sequence
  Description of Artificial Sequence: Synthetic oligonucleotide
  Sense strand starting at position 324 of SEQ ID NO: 1881701
ccaggcugaucuuuaacua

SEQ ID NO: 2064971 - RNA, 19 nt, Artificial Sequence
  Description of Artificial Sequence: Synthetic oligonucleotide
  Antisense strand to SEQ ID NO: 2064970
uaguuaaagaucagccugg

SEQ ID NO: 2064972 - RNA, 19 nt, Artificial Sequence
  Description of Artificial Sequence: Synthetic oligonucleotide
  Sense strand starting at position 351 of SEQ ID NO: 1881701
agugaucuuucuguaucag

SEQ ID NO: 2064973 - RNA, 19 nt, Artificial Sequence
  Description of Artificial Sequence: Synthetic oligonucleotide
  Antisense strand to SEQ ID NO: 2064972
cugauacagaaagaucacu

SEQ ID NO: 2064974 - RNA, 19 nt, Artificial Sequence
  Description of Artificial Sequence: Synthetic oligonucleotide
  Sense strand starting at position 506 of SEQ ID NO: 1881701
guauuauggaacuggguua

SEQ ID NO: 2064975 - RNA, 19 nt, Artificial Sequence
  Description of Artificial Sequence: Synthetic oligonucleotide
  Antisense strand to SEQ ID NO: 2064974
uaacccaguuccauaauac

SEQ ID NO: 2064976 - RNA, 19 nt, Artificial Sequence
  Description of Artificial Sequence: Synthetic oligonucleotide
  Sense strand starting at position 727 of SEQ ID NO: 1881701
acauuugucucucuaugca

SEQ ID NO: 2064977 - RNA, 19 nt, Artificial Sequence
  Description of Artificial Sequence: Synthetic oligonucleotide
  Antisense strand to SEQ ID NO: 2064976
ugcauagagagacaaaugu

SEQ ID NO: 2064978 - RNA, 19 nt, Artificial Sequence
  Description of Artificial Sequence: Synthetic oligonucleotide
  Sense strand starting at position 924 of SEQ ID NO: 1881701
ugaugugaggcuugauaga

SEQ ID NO: 2064979 - RNA, 19 nt, Artificial Sequence
  Description of Artificial Sequence: Synthetic oligonucleotide
  Antisense strand to SEQ ID NO: 2064978
ucuaucaagccucacauca

SEQ ID NO: 2064980 - RNA, 19 nt, Artificial Sequence
  Description of Artificial Sequence: Synthetic oligonucleotide
  Sense strand starting at position 943 of SEQ ID NO: 1881701
aucaauaggccucacaguu

SEQ ID NO: 2064981 - RNA, 19 nt, Artificial Sequence
  Description of Artificial Sequence: Synthetic oligonucleotide
  Antisense strand to SEQ ID NO: 2064980
aacugugaggccuauugau

SEQ ID NO: 2064982 - RNA, 19 nt, Artificial Sequence
  Description of Artificial Sequence: Synthetic oligonucleotide
  Sense strand starting at position 1000 of SEQ ID NO: 1881701
cuugguuugcuagauggau

SEQ ID NO: 2064983 - RNA, 19 nt, Artificial Sequence
  Description of Artificial Sequence: Synthetic oligonucleotide
  Antisense strand to SEQ ID NO: 2064982
auccaucuagcaaaccaag

SEQ ID NO: 2064984 - RNA, 19 nt, Artificial Sequence
  Description of Artificial Sequence: Synthetic oligonucleotide
  Sense strand starting at position 1002 of SEQ ID NO: 1881701
ugguuugcuagauggauua

SEQ ID NO: 2064985 - RNA, 19 nt, Artificial Sequence
  Description of Artificial Sequence: Synthetic oligonucleotide
  Antisense strand to SEQ ID NO: 2064984
uaauccaucuagcaaacca

SEQ ID NO: 2064986 - RNA, 19 nt, Artificial Sequence
  Description of Artificial Sequence: Synthetic oligonucleotide
  Sense strand starting at position 1004 of SEQ ID NO: 1881701
guuugcuagauggauuaga

SEQ ID NO: 2064987 - RNA, 19 nt, Artificial Sequence
  Description of Artificial Sequence: Synthetic oligonucleotide
  Antisense strand to SEQ ID NO: 2064986
ucuaauccaucuagcaaac

SEQ ID NO: 2064988 - RNA, 19 nt, Artificial Sequence
  Description of Artificial Sequence: Synthetic oligonucleotide
  Sense strand starting at position 1188 of SEQ ID NO: 1881701
agucucuucgagguguguu

SEQ ID NO: 2064989 - RNA, 19 nt, Artificial Sequence
  Description of Artificial Sequence: Synthetic oligonucleotide
  Antisense strand to SEQ ID NO: 2064988
aacacaccucgaagagacu

SEQ ID NO: 2064990 - RNA, 19 nt, Artificial Sequence
  Description of Artificial Sequence: Synthetic oligonucleotide
  Sense strand starting at position 1209 of SEQ ID NO: 1881701
cagggagccugaucuaaga

SEQ ID NO: 2064991 - RNA, 19 nt, Artificial Sequence
  Description of Artificial Sequence: Synthetic oligonucleotide
  Antisense strand to SEQ ID NO: 2064990
ucuuagaucaggcucccug

SEQ ID NO: 2064992 - RNA, 19 nt, Artificial Sequence
  Description of Artificial Sequence: Synthetic oligonucleotide
  Sense strand starting at position 1272 of SEQ ID NO: 1881701
ggcaaagaguucuuuacuu

SEQ ID NO: 2064993 - RNA, 19 nt, Artificial Sequence
  Description of Artificial Sequence: Synthetic oligonucleotide
  Antisense strand to SEQ ID NO: 2064992
aaguaaagaacucuuugcc

SEQ ID NO: 2064994 - RNA, 19 nt, Artificial Sequence
  Description of Artificial Sequence: Synthetic oligonucleotide
  Sense strand starting at position 1333 of SEQ ID NO: 1881701
gggacccucuucucagaaa

SEQ ID NO: 2064995 - RNA, 19 nt, Artificial Sequence
  Description of Artificial Sequence: Synthetic oligonucleotide
  Antisense strand to SEQ ID NO: 2064994
uuucugagaagaggguccc

SEQ ID NO: 2064996 - RNA, 19 nt, Artificial Sequence
  Description of Artificial Sequence: Synthetic oligonucleotide
  Sense strand starting at position 1521 of SEQ ID NO: 1881701
gccuuugaucaugacauaa

SEQ ID NO: 2064997 - RNA, 19 nt, Artificial Sequence
  Description of Artificial Sequence: Synthetic oligonucleotide
  Antisense strand to SEQ ID NO: 2064996
uuaugucaugaucaaaggc

SEQ ID NO: 2064998 - RNA, 19 nt, Artificial Sequence
  Description of Artificial Sequence: Synthetic oligonucleotide
  Sense strand starting at position 1602 of SEQ ID NO: 1881701
agcuaauaauuagcagaca

SEQ ID NO: 2064999 - RNA, 19 nt, Artificial Sequence
  Description of Artificial Sequence: Synthetic oligonucleotide
  Antisense strand to SEQ ID NO: 2064998
ugucugcuaauuauuagcu

SEQ ID NO: 2065000 - RNA, 19 nt, Artificial Sequence
  Description of Artificial Sequence: Synthetic oligonucleotide
  Sense strand starting at position 1652 of SEQ ID NO: 1881701
uugugcucugaauaaauga

SEQ ID NO: 2065001 - RNA, 19 nt, Artificial Sequence
  Description of Artificial Sequence: Synthetic oligonucleotide
  Antisense strand to SEQ ID NO: 2065000
ucauuuauucagagcacaa

SEQ ID NO: 2065002 - RNA, 19 nt, Artificial Sequence
  Description of Artificial Sequence: Synthetic oligonucleotide
  Sense strand starting at position 1659 of SEQ ID NO: 1881701
cugaauaaaugacaaggaa

SEQ ID NO: 2065003 - RNA, 19 nt, Artificial Sequence
  Description of Artificial Sequence: Synthetic oligonucleotide
  Antisense strand to SEQ ID NO: 2065002
uuccuugucauuuauucag

SEQ ID NO: 2065004 - RNA, 19 nt, Artificial Sequence
  Description of Artificial Sequence: Synthetic oligonucleotide
  Sense strand starting at position 1732 of SEQ ID NO: 1881701
gucccuuaaccauaaaugu

SEQ ID NO: 2065005 - RNA, 19 nt, Artificial Sequence
  Description of Artificial Sequence: Synthetic oligonucleotide
  Antisense strand to SEQ ID NO: 2065004
acauuuaugguuaagggac

SEQ ID NO: 2065006 - RNA, 19 nt, Artificial Sequence
  Description of Artificial Sequence: Synthetic oligonucleotide
  Sense strand starting at position 2075 of SEQ ID NO: 1881701
gcgcaauucuauuugaccu

SEQ ID NO: 2065007 - RNA, 19 nt, Artificial Sequence
  Description of Artificial Sequence: Synthetic oligonucleotide
  Antisense strand to SEQ ID NO: 2065006
aggucaaauagaauugcgc

SEQ ID NO: 2065008 - RNA, 19 nt, Artificial Sequence
  Description of Artificial Sequence: Synthetic oligonucleotide
  Sense strand starting at position 2284 of SEQ ID NO: 1881701
ugaggaaguuccuuacuuu

SEQ ID NO: 2065009 - RNA, 19 nt, Artificial Sequence
  Description of Artificial Sequence: Synthetic oligonucleotide
  Antisense strand to SEQ ID NO: 2065008
aaaguaaggaacuuccuca

SEQ ID NO: 2065010 - RNA, 19 nt, Artificial Sequence
  Description of Artificial Sequence: Synthetic oligonucleotide
  Sense strand starting at position 2287 of SEQ ID NO: 1881701
ggaaguuccuuacuuugau

SEQ ID NO: 2065011 - RNA, 19 nt, Artificial Sequence
  Description of Artificial Sequence: Synthetic oligonucleotide
  Antisense strand to SEQ ID NO: 2065010
aucaaaguaaggaacuucc

SEQ ID NO: 2065012 - RNA, 19 nt, Artificial Sequence
  Description of Artificial Sequence: Synthetic oligonucleotide
  Sense strand starting at position 2296 of SEQ ID NO: 1881701
uuacuuugaucuuuggaaa

SEQ ID NO: 2065013 - RNA, 19 nt, Artificial Sequence
  Description of Artificial Sequence: Synthetic oligonucleotide
  Antisense strand to SEQ ID NO: 2065012
uuuccaaagaucaaaguaa

SEQ ID NO: 2065014 - RNA, 19 nt, Artificial Sequence
  Description of Artificial Sequence: Synthetic oligonucleotide
  Sense strand starting at position 2308 of SEQ ID NO: 1881701
uuggaaaucccuuguuccu

SEQ ID NO: 2065015 - RNA, 19 nt, Artificial Sequence
  Description of Artificial Sequence: Synthetic oligonucleotide
  Antisense strand to SEQ ID NO: 2065014
aggaacaagggauuuccaa

SEQ ID NO: 2065016 - RNA, 19 nt, Artificial Sequence
  Description of Artificial Sequence: Synthetic oligonucleotide
  Sense strand starting at position 2369 of SEQ ID NO: 1881701
gggacuuugcugcauucca

SEQ ID NO: 2065017 - RNA, 19 nt, Artificial Sequence
  Description of Artificial Sequence: Synthetic oligonucleotide
  Antisense strand to SEQ ID NO: 2065016
uggaaugcagcaaaguccc

SEQ ID NO: 2065018 - RNA, 19 nt, Artificial Sequence
  Description of Artificial Sequence: Synthetic oligonucleotide
  Sense strand starting at position 2415 of SEQ ID NO: 1881701
gugguuuggcgguuugagu

SEQ ID NO: 2065019 - RNA, 19 nt, Artificial Sequence
  Description of Artificial Sequence: Synthetic oligonucleotide
  Antisense strand to SEQ ID NO: 2065018
acucaaaccgccaaaccac

SEQ ID NO: 2065020 - RNA, 19 nt, Artificial Sequence
  Description of Artificial Sequence: Synthetic oligonucleotide
  Sense strand starting at position 2522 of SEQ ID NO: 1881701
cggcgaguucgggugguuu

SEQ ID NO: 2065021 - RNA, 19 nt, Artificial Sequence
  Description of Artificial Sequence: Synthetic oligonucleotide
  Antisense strand to SEQ ID NO: 2065020
aaaccacccgaacucgccg

SEQ ID NO: 2065022 - RNA, 19 nt, Artificial Sequence
  Description of Artificial Sequence: Synthetic oligonucleotide
  Sense strand starting at position 2708 of SEQ ID NO: 1881701
uagugagaggcuugugaca

SEQ ID NO: 2065023 - RNA, 19 nt, Artificial Sequence
  Description of Artificial Sequence: Synthetic oligonucleotide
  Antisense strand to SEQ ID NO: 2065022
ugucacaagccucucacua

SEQ ID NO: 2065024 - RNA, 19 nt, Artificial Sequence
  Description of Artificial Sequence: Synthetic oligonucleotide
  Sense strand starting at position 2726 of SEQ ID NO: 1881701
aacaaaugaggugguuaca

SEQ ID NO: 2065025 - RNA, 19 nt, Artificial Sequence
  Description of Artificial Sequence: Synthetic oligonucleotide
  Antisense strand to SEQ ID NO: 2065024
uguaaccaccucauuuguu

SEQ ID NO: 2065026 - RNA, 19 nt, Artificial Sequence
  Description of Artificial Sequence: Synthetic oligonucleotide
  Sense strand starting at position 2827 of SEQ ID NO: 1881701
ugcauaucuguauaaccga

SEQ ID NO: 2065027 - RNA, 19 nt, Artificial Sequence
  Description of Artificial Sequence: Synthetic oligonucleotide
  Antisense strand to SEQ ID NO: 2065026
ucgguuauacagauaugca

SEQ ID NO: 2065028 - RNA, 19 nt, Artificial Sequence
  Description of Artificial Sequence: Synthetic oligonucleotide
  Sense strand starting at position 2849 of SEQ ID NO: 1881701
gcuaaauaacaucacgaug

SEQ ID NO: 2065029 - RNA, 19 nt, Artificial Sequence
  Description of Artificial Sequence: Synthetic oligonucleotide
  Antisense strand to SEQ ID NO: 2065028
caucgugauguuauuuagc

SEQ ID NO: 2065030 - RNA, 19 nt, Artificial Sequence
  Description of Artificial Sequence: Synthetic oligonucleotide
  Sense strand starting at position 2959 of SEQ ID NO: 1881701
ggugcuuuagggcaagaca

SEQ ID NO: 2065031 - RNA, 19 nt, Artificial Sequence
  Description of Artificial Sequence: Synthetic oligonucleotide
  Antisense strand to SEQ ID NO: 2065030
ugucuugcccuaaagcacc

SEQ ID NO: 2065032 - RNA, 19 nt, Artificial Sequence
  Description of Artificial Sequence: Synthetic oligonucleotide
  Sense strand starting at position 3039 of SEQ ID NO: 1881701
augacagcuguauaaagua

SEQ ID NO: 2065033 - RNA, 19 nt, Artificial Sequence
  Description of Artificial Sequence: Synthetic oligonucleotide
  Antisense strand to SEQ ID NO: 2065032
uacuuuauacagcugucau

SEQ ID NO: 2065034 - RNA, 19 nt, Artificial Sequence
  Description of Artificial Sequence: Synthetic oligonucleotide
  Sense strand starting at position 3059 of SEQ ID NO: 1881701
acagaauucccauguuaga

SEQ ID NO: 2065035 - RNA, 19 nt, Artificial Sequence
  Description of Artificial Sequence: Synthetic oligonucleotide
  Antisense strand to SEQ ID NO: 2065034
ucuaacaugggaauucugu

SEQ ID NO: 2065036 - RNA, 19 nt, Artificial Sequence
  Description of Artificial Sequence: Synthetic oligonucleotide
  Sense strand starting at position 3112 of SEQ ID NO: 1881701
caguaaauggcauagcuaa

SEQ ID NO: 2065037 - RNA, 19 nt, Artificial Sequence
  Description of Artificial Sequence: Synthetic oligonucleotide
  Antisense strand to SEQ ID NO: 2065036
uuagcuaugccauuuacug

SEQ ID NO: 2065038 - RNA, 19 nt, Artificial Sequence
  Description of Artificial Sequence: Synthetic oligonucleotide
  Sense strand starting at position 3238 of SEQ ID NO: 1881701
gaguaaggagccuggucau

SEQ ID NO: 2065039 - RNA, 19 nt, Artificial Sequence
  Description of Artificial Sequence: Synthetic oligonucleotide
  Antisense strand to SEQ ID NO: 2065038
augaccaggcuccuuacuc

SEQ ID NO: 2065040 - RNA, 19 nt, Artificial Sequence
  Description of Artificial Sequence: Synthetic oligonucleotide
  Sense strand starting at position 3250 of SEQ ID NO: 1881701
uggucaucagaacguuaag

SEQ ID NO: 2065041 - RNA, 19 nt, Artificial Sequence
  Description of Artificial Sequence: Synthetic oligonucleotide
  Antisense strand to SEQ ID NO: 2065040
cuuaacguucugaugacca

SEQ ID NO: 2065042 - RNA, 19 nt, Artificial Sequence
  Description of Artificial Sequence: Synthetic oligonucleotide
  Sense strand starting at position 3395 of SEQ ID NO: 1881701
aggauauguaugugaauga

SEQ ID NO: 2065043 - RNA, 19 nt, Artificial Sequence
  Description of Artificial Sequence: Synthetic oligonucleotide
  Antisense strand to SEQ ID NO: 2065042
ucauucacauacauauccu

SEQ ID NO: 2065044 - RNA, 19 nt, Artificial Sequence
  Description of Artificial Sequence: Synthetic oligonucleotide
  Sense strand starting at position 3458 of SEQ ID NO: 1881701
auggaaagauuugauguua

SEQ ID NO: 2065045 - RNA, 19 nt, Artificial Sequence
  Description of Artificial Sequence: Synthetic oligonucleotide
  Antisense strand to SEQ ID NO: 2065044
uaacaucaaaucuuuccau

SEQ ID NO: 2065046 - RNA, 19 nt, Artificial Sequence
  Description of Artificial Sequence: Synthetic oligonucleotide
  Sense strand starting at position 3876 of SEQ ID NO: 1881701
ccaaaucugccacgaacau

SEQ ID NO: 2065047 - RNA, 19 nt, Artificial Sequence
  Description of Artificial Sequence: Synthetic oligonucleotide
  Antisense strand to SEQ ID NO: 2065046
auguucguggcagauuugg

SEQ ID NO: 2065048 - RNA, 19 nt, Artificial Sequence
  Description of Artificial Sequence: Synthetic oligonucleotide
  Sense strand starting at position 3913 of SEQ ID NO: 1881701
ugagaaaugcagugaaaug

SEQ ID NO: 2065049 - RNA, 19 nt, Artificial Sequence
  Description of Artificial Sequence: Synthetic oligonucleotide
  Antisense strand to SEQ ID NO: 2065048
cauuucacugcauuucuca

SEQ ID NO: 2065050 - RNA, 19 nt, Artificial Sequence
  Description of Artificial Sequence: Synthetic oligonucleotide
  Sense strand starting at position 25 of SEQ ID NO: 1881702
auaccauguagcgaggaau

SEQ ID NO: 2065051 - RNA, 19 nt, Artificial Sequence
  Description of Artificial Sequence: Synthetic oligonucleotide
  Antisense strand to SEQ ID NO: 2065050
auuccucgcuacaugguau

SEQ ID NO: 2065052 - RNA, 19 nt, Artificial Sequence
  Description of Artificial Sequence: Synthetic oligonucleotide
  Sense strand starting at position 287 of SEQ ID NO: 1881702
accugaaaugacugguaac

SEQ ID NO: 2065053 - RNA, 19 nt, Artificial Sequence
  Description of Artificial Sequence: Synthetic oligonucleotide
  Antisense strand to SEQ ID NO: 2065052
guuaccagucauuucaggu

SEQ ID NO: 2065054 - RNA, 19 nt, Artificial Sequence
  Description of Artificial Sequence: Synthetic oligonucleotide
  Sense strand starting at position 466 of SEQ ID NO: 1881702
gaagcuguuggccacaaau

SEQ ID NO: 2065055 - RNA, 19 nt, Artificial Sequence
  Description of Artificial Sequence: Synthetic oligonucleotide
  Antisense strand to SEQ ID NO: 2065054
auuuguggccaacagcuuc

SEQ ID NO: 2065056 - RNA, 19 nt, Artificial Sequence
  Description of Artificial Sequence: Synthetic oligonucleotide
  Sense strand starting at position 581 of SEQ ID NO: 1881702
auaggacugucaguaauca

SEQ ID NO: 2065057 - RNA, 19 nt, Artificial Sequence
  Description of Artificial Sequence: Synthetic oligonucleotide
  Antisense strand to SEQ ID NO: 2065056
ugauuacugacaguccuau

SEQ ID NO: 2065058 - RNA, 19 nt, Artificial Sequence
  Description of Artificial Sequence: Synthetic oligonucleotide
  Sense strand starting at position 585 of SEQ ID NO: 1881702
gacugucaguaaucaagau

SEQ ID NO: 2065059 - RNA, 19 nt, Artificial Sequence
  Description of Artificial Sequence: Synthetic oligonucleotide
  Antisense strand to SEQ ID NO: 2065058
aucuugauuacugacaguc

SEQ ID NO: 2065060 - RNA, 19 nt, Artificial Sequence
  Description of Artificial Sequence: Synthetic oligonucleotide
  Sense strand starting at position 762 of SEQ ID NO: 1881702
gagagucaggauugaaagu

SEQ ID NO: 2065061 - RNA, 19 nt, Artificial Sequence
  Description of Artificial Sequence: Synthetic oligonucleotide
  Antisense strand to SEQ ID NO: 2065060
acuuucaauccugacucuc

SEQ ID NO: 2065062 - RNA, 19 nt, Artificial Sequence
  Description of Artificial Sequence: Synthetic oligonucleotide
  Sense strand starting at position 772 of SEQ ID NO: 1881702
auugaaaguuacccugaga

SEQ ID NO: 2065063 - RNA, 19 nt, Artificial Sequence
  Description of Artificial Sequence: Synthetic oligonucleotide
  Antisense strand to SEQ ID NO: 2065062
ucucaggguaacuuucaau

SEQ ID NO: 2065064 - RNA, 19 nt, Artificial Sequence
  Description of Artificial Sequence: Synthetic oligonucleotide
  Sense strand starting at position 890 of SEQ ID NO: 1881702
cccacauucccggaaucau

SEQ ID NO: 2065065 - RNA, 19 nt, Artificial Sequence
  Description of Artificial Sequence: Synthetic oligonucleotide
  Antisense strand to SEQ ID NO: 2065064
augauuccgggaauguggg

SEQ ID NO: 2065066 - RNA, 19 nt, Artificial Sequence
  Description of Artificial Sequence: Synthetic oligonucleotide
  Sense strand starting at position 1207 of SEQ ID NO: 1881702
agugauaaaccuugcuaaa

SEQ ID NO: 2065067 - RNA, 19 nt, Artificial Sequence
  Description of Artificial Sequence: Synthetic oligonucleotide
  Antisense strand to SEQ ID NO: 2065066
uuuagcaagguuuaucacu

SEQ ID NO: 2065068 - RNA, 19 nt, Artificial Sequence
  Description of Artificial Sequence: Synthetic oligonucleotide
  Sense strand starting at position 1297 of SEQ ID NO: 1881702
gcgacagagcauuacaacu

SEQ ID NO: 2065069 - RNA, 19 nt, Artificial Sequence
  Description of Artificial Sequence: Synthetic oligonucleotide
  Antisense strand to SEQ ID NO: 2065068
aguuguaaugcucugucgc

SEQ ID NO: 2065070 - RNA, 19 nt, Artificial Sequence
  Description of Artificial Sequence: Synthetic oligonucleotide
  Sense strand starting at position 1336 of SEQ ID NO: 1881702
gugagaacuuuccuaggag

SEQ ID NO: 2065071 - RNA, 19 nt, Artificial Sequence
  Description of Artificial Sequence: Synthetic oligonucleotide
  Antisense strand to SEQ ID NO: 2065070
cuccuaggaaaguucucac

SEQ ID NO: 2065072 - RNA, 19 nt, Artificial Sequence
  Description of Artificial Sequence: Synthetic oligonucleotide
  Sense strand starting at position 1668 of SEQ ID NO: 1881702
auuagauacugagcauacu

SEQ ID NO: 2065073 - RNA, 19 nt, Artificial Sequence
  Description of Artificial Sequence: Synthetic oligonucleotide
  Antisense strand to SEQ ID NO: 2065072
aguaugcucaguaucuaau

SEQ ID NO: 2065074 - RNA, 19 nt, Artificial Sequence
  Description of Artificial Sequence: Synthetic oligonucleotide
  Sense strand starting at position 2081 of SEQ ID NO: 1881702
gggcguauacgaagucuga

SEQ ID NO: 2065075 - RNA, 19 nt, Artificial Sequence
  Description of Artificial Sequence: Synthetic oligonucleotide
  Antisense strand to SEQ ID NO: 2065074
ucagacuucguauacgccc

SEQ ID NO: 2065076 - RNA, 19 nt, Artificial Sequence
  Description of Artificial Sequence: Synthetic oligonucleotide
  Sense strand starting at position 2085 of SEQ ID NO: 1881702
guauacgaagucugagaaa

SEQ ID NO: 2065077 - RNA, 19 nt, Artificial Sequence
  Description of Artificial Sequence: Synthetic oligonucleotide
  Antisense strand to SEQ ID NO: 2065076
uuucucagacuucguauac

SEQ ID NO: 2065078 - RNA, 19 nt, Artificial Sequence
  Description of Artificial Sequence: Synthetic oligonucleotide
  Sense strand starting at position 2096 of SEQ ID NO: 1881702
cugagaaaugucugaacug

SEQ ID NO: 2065079 - RNA, 19 nt, Artificial Sequence
  Description of Artificial Sequence: Synthetic oligonucleotide
  Antisense strand to SEQ ID NO: 2065078
caguucagacauuucucag

SEQ ID NO: 2065080 - RNA, 19 nt, Artificial Sequence
  Description of Artificial Sequence: Synthetic oligonucleotide
  Sense strand starting at position 2235 of SEQ ID NO: 1881702
uguggaauuaacuguggga

SEQ ID NO: 2065081 - RNA, 19 nt, Artificial Sequence
  Description of Artificial Sequence: Synthetic oligonucleotide
  Antisense strand to SEQ ID NO: 2065080
ucccacaguuaauuccaca

SEQ ID NO: 2065082 - RNA, 19 nt, Artificial Sequence
  Description of Artificial Sequence: Synthetic oligonucleotide
  Sense strand starting at position 2256 of SEQ ID NO: 1881702
gcgauuaaagucuaacuac

SEQ ID NO: 2065083 - RNA, 19 nt, Artificial Sequence
  Description of Artificial Sequence: Synthetic oligonucleotide
  Antisense strand to SEQ ID NO: 2065082
guaguuagacuuuaaucgc

SEQ ID NO: 2065084 - RNA, 19 nt, Artificial Sequence
  Description of Artificial Sequence: Synthetic oligonucleotide
  Sense strand starting at position 2273 of SEQ ID NO: 1881702
acagcaaucguuuauaaac

SEQ ID NO: 2065085 - RNA, 19 nt, Artificial Sequence
  Description of Artificial Sequence: Synthetic oligonucleotide
  Antisense strand to SEQ ID NO: 2065084
guuuauaaacgauugcugu

SEQ ID NO: 2065086 - RNA, 19 nt, Artificial Sequence
  Description of Artificial Sequence: Synthetic oligonucleotide
  Sense strand starting at position 2412 of SEQ ID NO: 1881702
guggauguccuggagcaaa

SEQ ID NO: 2065087 - RNA, 19 nt, Artificial Sequence
  Description of Artificial Sequence: Synthetic oligonucleotide
  Antisense strand to SEQ ID NO: 2065086
uuugcuccaggacauccac

SEQ ID NO: 2065088 - RNA, 19 nt, Artificial Sequence
  Description of Artificial Sequence: Synthetic oligonucleotide
  Sense strand starting at position 2462 of SEQ ID NO: 1881702
ugacuuuagaguuaugcag

SEQ ID NO: 2065089 - RNA, 19 nt, Artificial Sequence
  Description of Artificial Sequence: Synthetic oligonucleotide
  Antisense strand to SEQ ID NO: 2065088
cugcauaacucuaaaguca

SEQ ID NO: 2065090 - RNA, 19 nt, Artificial Sequence
  Description of Artificial Sequence: Synthetic oligonucleotide
  Sense strand starting at position 2584 of SEQ ID NO: 1881702
ugcauuauaggugauuacu

SEQ ID NO: 2065091 - RNA, 19 nt, Artificial Sequence
  Description of Artificial Sequence: Synthetic oligonucleotide
  Antisense strand to SEQ ID NO: 2065090
aguaaucaccuauaaugca

SEQ ID NO: 2065092 - RNA, 19 nt, Artificial Sequence
  Description of Artificial Sequence: Synthetic oligonucleotide
  Sense strand starting at position 2703 of SEQ ID NO: 1881702
cagacugggucauucuuau

SEQ ID NO: 2065093 - RNA, 19 nt, Artificial Sequence
  Description of Artificial Sequence: Synthetic oligonucleotide
  Antisense strand to SEQ ID NO: 2065092
auaagaaugacccagucug

SEQ ID NO: 2065094 - RNA, 19 nt, Artificial Sequence
  Description of Artificial Sequence: Synthetic oligonucleotide
  Sense strand starting at position 2762 of SEQ ID NO: 1881702
agcccuuugacaugaggaa

SEQ ID NO: 2065095 - RNA, 19 nt, Artificial Sequence
  Description of Artificial Sequence: Synthetic oligonucleotide
  Antisense strand to SEQ ID NO: 2065094
uuccucaugucaaagggcu

SEQ ID NO: 2065096 - RNA, 19 nt, Artificial Sequence
  Description of Artificial Sequence: Synthetic oligonucleotide
  Sense strand starting at position 2801 of SEQ ID NO: 1881702
ucccuacucguagauauac

SEQ ID NO: 2065097 - RNA, 19 nt, Artificial Sequence
  Description of Artificial Sequence: Synthetic oligonucleotide
  Antisense strand to SEQ ID NO: 2065096
guauaucuacgaguaggga

SEQ ID NO: 2065098 - RNA, 19 nt, Artificial Sequence
  Description of Artificial Sequence: Synthetic oligonucleotide
  Sense strand starting at position 2844 of SEQ ID NO: 1881702
aucuguauaucauugacuu

SEQ ID NO: 2065099 - RNA, 19 nt, Artificial Sequence
  Description of Artificial Sequence: Synthetic oligonucleotide
  Antisense strand to SEQ ID NO: 2065098
aagucaaugauauacagau

SEQ ID NO: 2065100 - RNA, 19 nt, Artificial Sequence
  Description of Artificial Sequence: Synthetic oligonucleotide
  Sense strand starting at position 2879 of SEQ ID NO: 1881702
uuucuaaaugagggcuaaa

SEQ ID NO: 2065101 - RNA, 19 nt, Artificial Sequence
  Description of Artificial Sequence: Synthetic oligonucleotide
  Antisense strand to SEQ ID NO: 2065100
uuuagcccucauuuagaaa

SEQ ID NO: 2065102 - RNA, 19 nt, Artificial Sequence
  Description of Artificial Sequence: Synthetic oligonucleotide
  Sense strand starting at position 3026 of SEQ ID NO: 1881702
gauggacaugcuuaugguu

SEQ ID NO: 2065103 - RNA, 19 nt, Artificial Sequence
  Description of Artificial Sequence: Synthetic oligonucleotide
  Antisense strand to SEQ ID NO: 2065102
aaccauaagcauguccauc

SEQ ID NO: 2065104 - RNA, 19 nt, Artificial Sequence
  Description of Artificial Sequence: Synthetic oligonucleotide
  Sense strand starting at position 3032 of SEQ ID NO: 1881702
caugcuuaugguuaacuga

SEQ ID NO: 2065105 - RNA, 19 nt, Artificial Sequence
  Description of Artificial Sequence: Synthetic oligonucleotide
  Antisense strand to SEQ ID NO: 2065104
ucaguuaaccauaagcaug

SEQ ID NO: 2065106 - RNA, 19 nt, Artificial Sequence
  Description of Artificial Sequence: Synthetic oligonucleotide
  Sense strand starting at position 3110 of SEQ ID NO: 1881702
augugagugguucauggau

SEQ ID NO: 2065107 - RNA, 19 nt, Artificial Sequence
  Description of Artificial Sequence: Synthetic oligonucleotide
  Antisense strand to SEQ ID NO: 2065106
auccaugaaccacucacau

SEQ ID NO: 2065108 - RNA, 19 nt, Artificial Sequence
  Description of Artificial Sequence: Synthetic oligonucleotide
  Sense strand starting at position 3210 of SEQ ID NO: 1881702
auaagaagcuucuuaauag

SEQ ID NO: 2065109 - RNA, 19 nt, Artificial Sequence
  Description of Artificial Sequence: Synthetic oligonucleotide
  Antisense strand to SEQ ID NO: 2065108
cuauuaagaagcuucuuau

SEQ ID NO: 2065110 - RNA, 19 nt, Artificial Sequence
  Description of Artificial Sequence: Synthetic oligonucleotide
  Sense strand starting at position 3237 of SEQ ID NO: 1881702
aaggacuugcuuugggaau

SEQ ID NO: 2065111 - RNA, 19 nt, Artificial Sequence
  Description of Artificial Sequence: Synthetic oligonucleotide
  Antisense strand to SEQ ID NO: 2065110
auucccaaagcaaguccuu

SEQ ID NO: 2065112 - RNA, 19 nt, Artificial Sequence
  Description of Artificial Sequence: Synthetic oligonucleotide
  Sense strand starting at position 3380 of SEQ ID NO: 1881702
ggaaguacucguuaacaau

SEQ ID NO: 2065113 - RNA, 19 nt, Artificial Sequence
  Description of Artificial Sequence: Synthetic oligonucleotide
  Antisense strand to SEQ ID NO: 2065112
auuguuaacgaguacuucc

SEQ ID NO: 2065114 - RNA, 19 nt, Artificial Sequence
  Description of Artificial Sequence: Synthetic oligonucleotide
  Sense strand starting at position 3386 of SEQ ID NO: 1881702
acucguuaacaauguauuu

SEQ ID NO: 2065115 - RNA, 19 nt, Artificial Sequence
  Description of Artificial Sequence: Synthetic oligonucleotide
  Antisense strand to SEQ ID NO: 2065114
aaauacauuguuaacgagu

SEQ ID NO: 2065116 - RNA, 19 nt, Artificial Sequence
  Description of Artificial Sequence: Synthetic oligonucleotide
  Sense strand starting at position 3656 of SEQ ID NO: 1881702
ucuacuaugggcuggagaa

SEQ ID NO: 2065117 - RNA, 19 nt, Artificial Sequence
  Description of Artificial Sequence: Synthetic oligonucleotide
  Antisense strand to SEQ ID NO: 2065116
uucuccagcccauaguaga

SEQ ID NO: 2065118 - RNA, 19 nt, Artificial Sequence
  Description of Artificial Sequence: Synthetic oligonucleotide
  Sense strand starting at position 3657 of SEQ ID NO: 1881702
cuacuaugggcuggagaau

SEQ ID NO: 2065119 - RNA, 19 nt, Artificial Sequence
  Description of Artificial Sequence: Synthetic oligonucleotide
  Antisense strand to SEQ ID NO: 2065118
auucuccagcccauaguag

SEQ ID NO: 2065120 - RNA, 19 nt, Artificial Sequence
  Description of Artificial Sequence: Synthetic oligonucleotide
  Sense strand starting at position 3666 of SEQ ID NO: 1881702
gcuggagaauuccuuauug

SEQ ID NO: 2065121 - RNA, 19 nt, Artificial Sequence
  Description of Artificial Sequence: Synthetic oligonucleotide
  Antisense strand to SEQ ID NO: 2065120
caauaaggaauucuccagc

SEQ ID NO: 2065122 - RNA, 19 nt, Artificial Sequence
  Description of Artificial Sequence: Synthetic oligonucleotide
  Sense strand starting at position 3670 of SEQ ID NO: 1881702
gagaauuccuuauugugag

SEQ ID NO: 2065123 - RNA, 19 nt, Artificial Sequence
  Description of Artificial Sequence: Synthetic oligonucleotide
  Antisense strand to SEQ ID NO: 2065122
cucacaauaaggaauucuc

SEQ ID NO: 2065124 - RNA, 19 nt, Artificial Sequence
  Description of Artificial Sequence: Synthetic oligonucleotide
  Sense strand starting at position 3796 of SEQ ID NO: 1881702
gcaaauguuccugaaggac

SEQ ID NO: 2065125 - RNA, 19 nt, Artificial Sequence
  Description of Artificial Sequence: Synthetic oligonucleotide
  Antisense strand to SEQ ID NO: 2065124
guccuucaggaacauuugc

SEQ ID NO: 2065126 - RNA, 19 nt, Artificial Sequence
  Description of Artificial Sequence: Synthetic oligonucleotide
  Sense strand starting at position 3830 of SEQ ID NO: 1881702
ugagaaccacugcauugua

SEQ ID NO: 2065127 - RNA, 19 nt, Artificial Sequence
  Description of Artificial Sequence: Synthetic oligonucleotide
  Antisense strand to SEQ ID NO: 2065126
uacaaugcagugguucuca

SEQ ID NO: 2065128 - RNA, 19 nt, Artificial Sequence
  Description of Artificial Sequence: Synthetic oligonucleotide
  Sense strand starting at position 3862 of SEQ ID NO: 1881702
cucaguaauguuuagguau

SEQ ID NO: 2065129 - RNA, 19 nt, Artificial Sequence
  Description of Artificial Sequence: Synthetic oligonucleotide
  Antisense strand to SEQ ID NO: 2065128
auaccuaaacauuacugag

SEQ ID NO: 2065130 - RNA, 19 nt, Artificial Sequence
  Description of Artificial Sequence: Synthetic oligonucleotide
  Sense strand starting at position 154 of SEQ ID NO: 1881703
cgucgaggucuagagucaa

SEQ ID NO: 2065131 - RNA, 19 nt, Artificial Sequence
  Description of Artificial Sequence: Synthetic oligonucleotide
  Antisense strand to SEQ ID NO: 2065130
uugacucuagaccucgacg

SEQ ID NO: 2065132 - RNA, 19 nt, Artificial Sequence
  Description of Artificial Sequence: Synthetic oligonucleotide
  Sense strand starting at position 372 of SEQ ID NO: 1881703
uagagugagcuuugucgga

SEQ ID NO: 2065133 - RNA, 19 nt, Artificial Sequence
  Description of Artificial Sequence: Synthetic oligonucleotide
  Antisense strand to SEQ ID NO: 2065132
uccgacaaagcucacucua

SEQ ID NO: 2065134 - RNA, 19 nt, Artificial Sequence
  Description of Artificial Sequence: Synthetic oligonucleotide
  Sense strand starting at position 374 of SEQ ID NO: 1881703
gagugagcuuugucggaag

SEQ ID NO: 2065135 - RNA, 19 nt, Artificial Sequence
  Description of Artificial Sequence: Synthetic oligonucleotide
  Antisense strand to SEQ ID NO: 2065134
cuuccgacaaagcucacuc

SEQ ID NO: 2065136 - RNA, 19 nt, Artificial Sequence
  Description of Artificial Sequence: Synthetic oligonucleotide
  Sense strand starting at position 377 of SEQ ID NO: 1881703
ugagcuuugucggaagccu

SEQ ID NO: 2065137 - RNA, 19 nt, Artificial Sequence
  Description of Artificial Sequence: Synthetic oligonucleotide
  Antisense strand to SEQ ID NO: 2065136
aggcuuccgacaaagcuca

SEQ ID NO: 2065138 - RNA, 19 nt, Artificial Sequence
  Description of Artificial Sequence: Synthetic oligonucleotide
  Sense strand starting at position 507 of SEQ ID NO: 1881703
agggucuccucauuaggaa

SEQ ID NO: 2065139 - RNA, 19 nt, Artificial Sequence
  Description of Artificial Sequence: Synthetic oligonucleotide
  Antisense strand to SEQ ID NO: 2065138
uuccuaaugaggagacccu

SEQ ID NO: 2065140 - RNA, 19 nt, Artificial Sequence
  Description of Artificial Sequence: Synthetic oligonucleotide
  Sense strand starting at position 510 of SEQ ID NO: 1881703
gucuccucauuaggaaauu

SEQ ID NO: 2065141 - RNA, 19 nt, Artificial Sequence
  Description of Artificial Sequence: Synthetic oligonucleotide
  Antisense strand to SEQ ID NO: 2065140
aauuuccuaaugaggagac

SEQ ID NO: 2065142 - RNA, 19 nt, Artificial Sequence
  Description of Artificial Sequence: Synthetic oligonucleotide
  Sense strand starting at position 522 of SEQ ID NO: 1881703
ggaaauuccacaggaacgu

SEQ ID NO: 2065143 - RNA, 19 nt, Artificial Sequence
  Description of Artificial Sequence: Synthetic oligonucleotide
  Antisense strand to SEQ ID NO: 2065142
acguuccuguggaauuucc

SEQ ID NO: 2065144 - RNA, 19 nt, Artificial Sequence
  Description of Artificial Sequence: Synthetic oligonucleotide
  Sense strand starting at position 738 of SEQ ID NO: 1881703
gaaauagggucauugucaa

SEQ ID NO: 2065145 - RNA, 19 nt, Artificial Sequence
  Description of Artificial Sequence: Synthetic oligonucleotide
  Antisense strand to SEQ ID NO: 2065144
uugacaaugacccuauuuc

SEQ ID NO: 2065146 - RNA, 19 nt, Artificial Sequence
  Description of Artificial Sequence: Synthetic oligonucleotide
  Sense strand starting at position 748 of SEQ ID NO: 1881703
cauugucaaugagaucugu

SEQ ID NO: 2065147 - RNA, 19 nt, Artificial Sequence
  Description of Artificial Sequence: Synthetic oligonucleotide
  Antisense strand to SEQ ID NO: 2065146
acagaucucauugacaaug

SEQ ID NO: 2065148 - RNA, 19 nt, Artificial Sequence
  Description of Artificial Sequence: Synthetic oligonucleotide
  Sense strand starting at position 752 of SEQ ID NO: 1881703
gucaaugagaucuguuaag

SEQ ID NO: 2065149 - RNA, 19 nt, Artificial Sequence
  Description of Artificial Sequence: Synthetic oligonucleotide
  Antisense strand to SEQ ID NO: 2065148
cuuaacagaucucauugac

SEQ ID NO: 2065150 - RNA, 19 nt, Artificial Sequence
  Description of Artificial Sequence: Synthetic oligonucleotide
  Sense strand starting at position 808 of SEQ ID NO: 1881703
caggaccagugcucuuaua

SEQ ID NO: 2065151 - RNA, 19 nt, Artificial Sequence
  Description of Artificial Sequence: Synthetic oligonucleotide
  Antisense strand to SEQ ID NO: 2065150
uauaagagcacugguccug

SEQ ID NO: 2065152 - RNA, 19 nt, Artificial Sequence
  Description of Artificial Sequence: Synthetic oligonucleotide
  Sense strand starting at position 845 of SEQ ID NO: 1881703
ucauguucgcagggagaau

SEQ ID NO: 2065153 - RNA, 19 nt, Artificial Sequence
  Description of Artificial Sequence: Synthetic oligonucleotide
  Antisense strand to SEQ ID NO: 2065152
auucucccugcgaacauga

SEQ ID NO: 2065154 - RNA, 19 nt, Artificial Sequence
  Description of Artificial Sequence: Synthetic oligonucleotide
  Sense strand starting at position 1005 of SEQ ID NO: 1881703
gcgucugugaggcauuguu

SEQ ID NO: 2065155 - RNA, 19 nt, Artificial Sequence
  Description of Artificial Sequence: Synthetic oligonucleotide
  Antisense strand to SEQ ID NO: 2065154
aacaaugccucacagacgc

SEQ ID NO: 2065156 - RNA, 19 nt, Artificial Sequence
  Description of Artificial Sequence: Synthetic oligonucleotide
  Sense strand starting at position 1069 of SEQ ID NO: 1881703
ggccuuuguugagagccau

SEQ ID NO: 2065157 - RNA, 19 nt, Artificial Sequence
  Description of Artificial Sequence: Synthetic oligonucleotide
  Antisense strand to SEQ ID NO: 2065156
auggcucucaacaaaggcc

SEQ ID NO: 2065158 - RNA, 19 nt, Artificial Sequence
  Description of Artificial Sequence: Synthetic oligonucleotide
  Sense strand starting at position 1408 of SEQ ID NO: 1881703
cguguauuaggucaacaaa

SEQ ID NO: 2065159 - RNA, 19 nt, Artificial Sequence
  Description of Artificial Sequence: Synthetic oligonucleotide
  Antisense strand to SEQ ID NO: 2065158
uuuguugaccuaauacacg

SEQ ID NO: 2065160 - RNA, 19 nt, Artificial Sequence
  Description of Artificial Sequence: Synthetic oligonucleotide
  Sense strand starting at position 1786 of SEQ ID NO: 1881703
agugauauauucggucaag

SEQ ID NO: 2065161 - RNA, 19 nt, Artificial Sequence
  Description of Artificial Sequence: Synthetic oligonucleotide
  Antisense strand to SEQ ID NO: 2065160
cuugaccgaauauaucacu

SEQ ID NO: 2065162 - RNA, 19 nt, Artificial Sequence
  Description of Artificial Sequence: Synthetic oligonucleotide
  Sense strand starting at position 1787 of SEQ ID NO: 1881703
gugauauauucggucaagu

SEQ ID NO: 2065163 - RNA, 19 nt, Artificial Sequence
  Description of Artificial Sequence: Synthetic oligonucleotide
  Antisense strand to SEQ ID NO: 2065162
acuugaccgaauauaucac

SEQ ID NO: 2065164 - RNA, 19 nt, Artificial Sequence
  Description of Artificial Sequence: Synthetic oligonucleotide
  Sense strand starting at position 1789 of SEQ ID NO: 1881703
gauauauucggucaagugu

SEQ ID NO: 2065165 - RNA, 19 nt, Artificial Sequence
  Description of Artificial Sequence: Synthetic oligonucleotide
  Antisense strand to SEQ ID NO: 2065164
acacuugaccgaauauauc

SEQ ID NO: 2065166 - RNA, 19 nt, Artificial Sequence
  Description of Artificial Sequence: Synthetic oligonucleotide
  Sense strand starting at position 1796 of SEQ ID NO: 1881703
ucggucaaguguuagcaau

SEQ ID NO: 2065167 - RNA, 19 nt, Artificial Sequence
  Description of Artificial Sequence: Synthetic oligonucleotide
  Antisense strand to SEQ ID NO: 2065166
auugcuaacacuugaccga

SEQ ID NO: 2065168 - RNA, 19 nt, Artificial Sequence
  Description of Artificial Sequence: Synthetic oligonucleotide
  Sense strand starting at position 1803 of SEQ ID NO: 1881703
aguguuagcaaucgcaugu

SEQ ID NO: 2065169 - RNA, 19 nt, Artificial Sequence
  Description of Artificial Sequence: Synthetic oligonucleotide
  Antisense strand to SEQ ID NO: 2065168
acaugcgauugcuaacacu

SEQ ID NO: 2065170 - RNA, 19 nt, Artificial Sequence
  Description of Artificial Sequence: Synthetic oligonucleotide
  Sense strand starting at position 1804 of SEQ ID NO: 1881703
guguuagcaaucgcauguu

SEQ ID NO: 2065171 - RNA, 19 nt, Artificial Sequence
  Description of Artificial Sequence: Synthetic oligonucleotide
  Antisense strand to SEQ ID NO: 2065170
aacaugcgauugcuaacac

SEQ ID NO: 2065172 - RNA, 19 nt, Artificial Sequence
  Description of Artificial Sequence: Synthetic oligonucleotide
  Sense strand starting at position 1807 of SEQ ID NO: 1881703
uuagcaaucgcauguuauu

SEQ ID NO: 2065173 - RNA, 19 nt, Artificial Sequence
  Description of Artificial Sequence: Synthetic oligonucleotide
  Antisense strand to SEQ ID NO: 2065172
aauaacaugcgauugcuaa

SEQ ID NO: 2065174 - RNA, 19 nt, Artificial Sequence
  Description of Artificial Sequence: Synthetic oligonucleotide
  Sense strand starting at position 1859 of SEQ ID NO: 1881703
ugaacaaguuguguuccuu

SEQ ID NO: 2065175 - RNA, 19 nt, Artificial Sequence
  Description of Artificial Sequence: Synthetic oligonucleotide
  Antisense strand to SEQ ID NO: 2065174
aaggaacacaacuuguuca

SEQ ID NO: 2065176 - RNA, 19 nt, Artificial Sequence
  Description of Artificial Sequence: Synthetic oligonucleotide
  Sense strand starting at position 1865 of SEQ ID NO: 1881703
aguuguguuccuuguugua

SEQ ID NO: 2065177 - RNA, 19 nt, Artificial Sequence
  Description of Artificial Sequence: Synthetic oligonucleotide
  Antisense strand to SEQ ID NO: 2065176
uacaacaaggaacacaacu

SEQ ID NO: 2065178 - RNA, 19 nt, Artificial Sequence
  Description of Artificial Sequence: Synthetic oligonucleotide
  Sense strand starting at position 1867 of SEQ ID NO: 1881703
uuguguuccuuguuguacu

SEQ ID NO: 2065179 - RNA, 19 nt, Artificial Sequence
  Description of Artificial Sequence: Synthetic oligonucleotide
  Antisense strand to SEQ ID NO: 2065178
aguacaacaaggaacacaa

SEQ ID NO: 2065180 - RNA, 19 nt, Artificial Sequence
  Description of Artificial Sequence: Synthetic oligonucleotide
  Sense strand starting at position 2512 of SEQ ID NO: 1881703
gacagugagcucugacuuu

SEQ ID NO: 2065181 - RNA, 19 nt, Artificial Sequence
  Description of Artificial Sequence: Synthetic oligonucleotide
  Antisense strand to SEQ ID NO: 2065180
aaagucagagcucacuguc

SEQ ID NO: 2065182 - RNA, 19 nt, Artificial Sequence
  Description of Artificial Sequence: Synthetic oligonucleotide
  Sense strand starting at position 2642 of SEQ ID NO: 1881703
cacgauguggccuagaacu

SEQ ID NO: 2065183 - RNA, 19 nt, Artificial Sequence
  Description of Artificial Sequence: Synthetic oligonucleotide
  Antisense strand to SEQ ID NO: 2065182
aguucuaggccacaucgug

SEQ ID NO: 2065184 - RNA, 19 nt, Artificial Sequence
  Description of Artificial Sequence: Synthetic oligonucleotide
  Sense strand starting at position 2644 of SEQ ID NO: 1881703
cgauguggccuagaacuga

SEQ ID NO: 2065185 - RNA, 19 nt, Artificial Sequence
  Description of Artificial Sequence: Synthetic oligonucleotide
  Antisense strand to SEQ ID NO: 2065184
ucaguucuaggccacaucg

SEQ ID NO: 2065186 - RNA, 19 nt, Artificial Sequence
  Description of Artificial Sequence: Synthetic oligonucleotide
  Sense strand starting at position 2806 of SEQ ID NO: 1881703
ccacauaaagcguaacagu

SEQ ID NO: 2065187 - RNA, 19 nt, Artificial Sequence
  Description of Artificial Sequence: Synthetic oligonucleotide
  Antisense strand to SEQ ID NO: 2065186
acuguuacgcuuuaugugg

SEQ ID NO: 2065188 - RNA, 19 nt, Artificial Sequence
  Description of Artificial Sequence: Synthetic oligonucleotide
  Sense strand starting at position 2846 of SEQ ID NO: 1881703
gugugugaacagggauaaa

SEQ ID NO: 2065189 - RNA, 19 nt, Artificial Sequence
  Description of Artificial Sequence: Synthetic oligonucleotide
  Antisense strand to SEQ ID NO: 2065188
uuuaucccuguucacacac

SEQ ID NO: 2065190 - RNA, 19 nt, Artificial Sequence
  Description of Artificial Sequence: Synthetic oligonucleotide
  Sense strand starting at position 2896 of SEQ ID NO: 1881703
aggcuucggagucacuauu

SEQ ID NO: 2065191 - RNA, 19 nt, Artificial Sequence
  Description of Artificial Sequence: Synthetic oligonucleotide
  Antisense strand to SEQ ID NO: 2065190
aauagugacuccgaagccu

SEQ ID NO: 2065192 - RNA, 19 nt, Artificial Sequence
  Description of Artificial Sequence: Synthetic oligonucleotide
  Sense strand starting at position 3039 of SEQ ID NO: 1881703
cagaaaugguaccagaaug

SEQ ID NO: 2065193 - RNA, 19 nt, Artificial Sequence
  Description of Artificial Sequence: Synthetic oligonucleotide
  Antisense strand to SEQ ID NO: 2065192
cauucugguaccauuucug

SEQ ID NO: 2065194 - RNA, 19 nt, Artificial Sequence
  Description of Artificial Sequence: Synthetic oligonucleotide
  Sense strand starting at position 3053 of SEQ ID NO: 1881703
gaaugugguucucugcaag

SEQ ID NO: 2065195 - RNA, 19 nt, Artificial Sequence
  Description of Artificial Sequence: Synthetic oligonucleotide
  Antisense strand to SEQ ID NO: 2065194
cuugcagagaaccacauuc

SEQ ID NO: 2065196 - RNA, 19 nt, Artificial Sequence
  Description of Artificial Sequence: Synthetic oligonucleotide
  Sense strand starting at position 3059 of SEQ ID NO: 1881703
gguucucugcaagaugcuu

SEQ ID NO: 2065197 - RNA, 19 nt, Artificial Sequence
  Description of Artificial Sequence: Synthetic oligonucleotide
  Antisense strand to SEQ ID NO: 2065196
aagcaucuugcagagaacc

SEQ ID NO: 2065198 - RNA, 19 nt, Artificial Sequence
  Description of Artificial Sequence: Synthetic oligonucleotide
  Sense strand starting at position 3154 of SEQ ID NO: 1881703
ugcagaugcuuugucauga

SEQ ID NO: 2065199 - RNA, 19 nt, Artificial Sequence
  Description of Artificial Sequence: Synthetic oligonucleotide
  Antisense strand to SEQ ID NO: 2065198
ucaugacaaagcaucugca

SEQ ID NO: 2065200 - RNA, 19 nt, Artificial Sequence
  Description of Artificial Sequence: Synthetic oligonucleotide
  Sense strand starting at position 3155 of SEQ ID NO: 1881703
gcagaugcuuugucaugac

SEQ ID NO: 2065201 - RNA, 19 nt, Artificial Sequence
  Description of Artificial Sequence: Synthetic oligonucleotide
  Antisense strand to SEQ ID NO: 2065200
gucaugacaaagcaucugc

SEQ ID NO: 2065202 - RNA, 19 nt, Artificial Sequence
  Description of Artificial Sequence: Synthetic oligonucleotide
  Sense strand starting at position 3443 of SEQ ID NO: 1881703
agauguucccuagauauuc

SEQ ID NO: 2065203 - RNA, 19 nt, Artificial Sequence
  Description of Artificial Sequence: Synthetic oligonucleotide
  Antisense strand to SEQ ID NO: 2065202
gaauaucuagggaacaucu

SEQ ID NO: 2065204 - RNA, 19 nt, Artificial Sequence
  Description of Artificial Sequence: Synthetic oligonucleotide
  Sense strand starting at position 3819 of SEQ ID NO: 1881703
auggaaucuuccgugcaca

SEQ ID NO: 2065205 - RNA, 19 nt, Artificial Sequence
  Description of Artificial Sequence: Synthetic oligonucleotide
  Antisense strand to SEQ ID NO: 2065204
ugugcacggaagauuccau

SEQ ID NO: 2065206 - RNA, 19 nt, Artificial Sequence
  Description of Artificial Sequence: Synthetic oligonucleotide
  Sense strand starting at position 3820 of SEQ ID NO: 1881703
uggaaucuuccgugcacaa

SEQ ID NO: 2065207 - RNA, 19 nt, Artificial Sequence
  Description of Artificial Sequence: Synthetic oligonucleotide
  Antisense strand to SEQ ID NO: 2065206
uugugcacggaagauucca

SEQ ID NO: 2065208 - RNA, 19 nt, Artificial Sequence
  Description of Artificial Sequence: Synthetic oligonucleotide
  Sense strand starting at position 3822 of SEQ ID NO: 1881703
gaaucuuccgugcacaaug

SEQ ID NO: 2065209 - RNA, 19 nt, Artificial Sequence
  Description of Artificial Sequence: Synthetic oligonucleotide
  Antisense strand to SEQ ID NO: 2065208
cauugugcacggaagauuc

SEQ ID NO: 2065210 - RNA, 19 nt, Artificial Sequence
  Description of Artificial Sequence: Synthetic oligonucleotide
  Sense strand starting at position 43 of SEQ ID NO: 1881704
uauuucugucgugguauca

SEQ ID NO: 2065211 - RNA, 19 nt, Artificial Sequence
  Description of Artificial Sequence: Synthetic oligonucleotide
  Antisense strand to SEQ ID NO: 2065210
ugauaccacgacagaaaua

SEQ ID NO: 2065212 - RNA, 19 nt, Artificial Sequence
  Description of Artificial Sequence: Synthetic oligonucleotide
  Sense strand starting at position 125 of SEQ ID NO: 1881704
ucuauaucccacgaacagu

SEQ ID NO: 2065213 - RNA, 19 nt, Artificial Sequence
  Description of Artificial Sequence: Synthetic oligonucleotide
  Antisense strand to SEQ ID NO: 2065212
acuguucgugggauauaga

SEQ ID NO: 2065214 - RNA, 19 nt, Artificial Sequence
  Description of Artificial Sequence: Synthetic oligonucleotide
  Sense strand starting at position 552 of SEQ ID NO: 1881704
gaaguucugcaauaugcua

SEQ ID NO: 2065215 - RNA, 19 nt, Artificial Sequence
  Description of Artificial Sequence: Synthetic oligonucleotide
  Antisense strand to SEQ ID NO: 2065214
uagcauauugcagaacuuc

SEQ ID NO: 2065216 - RNA, 19 nt, Artificial Sequence
  Description of Artificial Sequence: Synthetic oligonucleotide
  Sense strand starting at position 624 of SEQ ID NO: 1881704
agggcaaauucuguauuau

SEQ ID NO: 2065217 - RNA, 19 nt, Artificial Sequence
  Description of Artificial Sequence: Synthetic oligonucleotide
  Antisense strand to SEQ ID NO: 2065216
auaauacagaauuugcccu

SEQ ID NO: 2065218 - RNA, 19 nt, Artificial Sequence
  Description of Artificial Sequence: Synthetic oligonucleotide
  Sense strand starting at position 625 of SEQ ID NO: 1881704
gggcaaauucuguauuauu

SEQ ID NO: 2065219 - RNA, 19 nt, Artificial Sequence
  Description of Artificial Sequence: Synthetic oligonucleotide
  Antisense strand to SEQ ID NO: 2065218
aauaauacagaauuugccc

SEQ ID NO: 2065220 - RNA, 19 nt, Artificial Sequence
  Description of Artificial Sequence: Synthetic oligonucleotide
  Sense strand starting at position 650 of SEQ ID NO: 1881704
aggugagguaccuagagua

SEQ ID NO: 2065221 - RNA, 19 nt, Artificial Sequence
  Description of Artificial Sequence: Synthetic oligonucleotide
  Antisense strand to SEQ ID NO: 2065220
uacucuagguaccucaccu

SEQ ID NO: 2065222 - RNA, 19 nt, Artificial Sequence
  Description of Artificial Sequence: Synthetic oligonucleotide
  Sense strand starting at position 726 of SEQ ID NO: 1881704
aauggagaguugcucuuua

SEQ ID NO: 2065223 - RNA, 19 nt, Artificial Sequence
  Description of Artificial Sequence: Synthetic oligonucleotide
  Antisense strand to SEQ ID NO: 2065222
uaaagagcaacucuccauu

SEQ ID NO: 2065224 - RNA, 19 nt, Artificial Sequence
  Description of Artificial Sequence: Synthetic oligonucleotide
  Sense strand starting at position 730 of SEQ ID NO: 1881704
gagaguugcucuuuaauag

SEQ ID NO: 2065225 - RNA, 19 nt, Artificial Sequence
  Description of Artificial Sequence: Synthetic oligonucleotide
  Antisense strand to SEQ ID NO: 2065224
cuauuaaagagcaacucuc

SEQ ID NO: 2065226 - RNA, 19 nt, Artificial Sequence
  Description of Artificial Sequence: Synthetic oligonucleotide
  Sense strand starting at position 731 of SEQ ID NO: 1881704
agaguugcucuuuaauagg

SEQ ID NO: 2065227 - RNA, 19 nt, Artificial Sequence
  Description of Artificial Sequence: Synthetic oligonucleotide
  Antisense strand to SEQ ID NO: 2065226
ccuauuaaagagcaacucu

SEQ ID NO: 2065228 - RNA, 19 nt, Artificial Sequence
  Description of Artificial Sequence: Synthetic oligonucleotide
  Sense strand starting at position 737 of SEQ ID NO: 1881704
gcucuuuaauagguauaca

SEQ ID NO: 2065229 - RNA, 19 nt, Artificial Sequence
  Description of Artificial Sequence: Synthetic oligonucleotide
  Antisense strand to SEQ ID NO: 2065228
uguauaccuauuaaagagc

SEQ ID NO: 2065230 - RNA, 19 nt, Artificial Sequence
  Description of Artificial Sequence: Synthetic oligonucleotide
  Sense strand starting at position 740 of SEQ ID NO: 1881704
cuuuaauagguauacaguu

SEQ ID NO: 2065231 - RNA, 19 nt, Artificial Sequence
  Description of Artificial Sequence: Synthetic oligonucleotide
  Antisense strand to SEQ ID NO: 2065230
aacuguauaccuauuaaag

SEQ ID NO: 2065232 - RNA, 19 nt, Artificial Sequence
  Description of Artificial Sequence: Synthetic oligonucleotide
  Sense strand starting at position 790 of SEQ ID NO: 1881704
ucuggagauugguuggaga

SEQ ID NO: 2065233 - RNA, 19 nt, Artificial Sequence
  Description of Artificial Sequence: Synthetic oligonucleotide
  Antisense strand to SEQ ID NO: 2065232
ucuccaaccaaucuccaga

SEQ ID NO: 2065234 - RNA, 19 nt, Artificial Sequence
  Description of Artificial Sequence: Synthetic oligonucleotide
  Sense strand starting at position 801 of SEQ ID NO: 1881704
guuggagaacaauguggaa

SEQ ID NO: 2065235 - RNA, 19 nt, Artificial Sequence
  Description of Artificial Sequence: Synthetic oligonucleotide
  Antisense strand to SEQ ID NO: 2065234
uuccacauuguucuccaac

SEQ ID NO: 2065236 - RNA, 19 nt, Artificial Sequence
  Description of Artificial Sequence: Synthetic oligonucleotide
  Sense strand starting at position 813 of SEQ ID NO: 1881704
uguggaauguaucuuauac

SEQ ID NO: 2065237 - RNA, 19 nt, Artificial Sequence
  Description of Artificial Sequence: Synthetic oligonucleotide
  Antisense strand to SEQ ID NO: 2065236
guauaagauacauuccaca

SEQ ID NO: 2065238 - RNA, 19 nt, Artificial Sequence
  Description of Artificial Sequence: Synthetic oligonucleotide
  Sense strand starting at position 940 of SEQ ID NO: 1881704
auaguuucucuugaucuuu

SEQ ID NO: 2065239 - RNA, 19 nt, Artificial Sequence
  Description of Artificial Sequence: Synthetic oligonucleotide
  Antisense strand to SEQ ID NO: 2065238
aaagaucaagagaaacuau

SEQ ID NO: 2065240 - RNA, 19 nt, Artificial Sequence
  Description of Artificial Sequence: Synthetic oligonucleotide
  Sense strand starting at position 1296 of SEQ ID NO: 1881704
caaacugugccagaaguaa

SEQ ID NO: 2065241 - RNA, 19 nt, Artificial Sequence
  Description of Artificial Sequence: Synthetic oligonucleotide
  Antisense strand to SEQ ID NO: 2065240
uuacuucuggcacaguuug

SEQ ID NO: 2065242 - RNA, 19 nt, Artificial Sequence
  Description of Artificial Sequence: Synthetic oligonucleotide
  Sense strand starting at position 1430 of SEQ ID NO: 1881704
gcaggaugccgcuuugugu

SEQ ID NO: 2065243 - RNA, 19 nt, Artificial Sequence
  Description of Artificial Sequence: Synthetic oligonucleotide
  Antisense strand to SEQ ID NO: 2065242
acacaaagcggcauccugc

SEQ ID NO: 2065244 - RNA, 19 nt, Artificial Sequence
  Description of Artificial Sequence: Synthetic oligonucleotide
  Sense strand starting at position 1436 of SEQ ID NO: 1881704
ugccgcuuugugucaagua

SEQ ID NO: 2065245 - RNA, 19 nt, Artificial Sequence
  Description of Artificial Sequence: Synthetic oligonucleotide
  Antisense strand to SEQ ID NO: 2065244
uacuugacacaaagcggca

SEQ ID NO: 2065246 - RNA, 19 nt, Artificial Sequence
  Description of Artificial Sequence: Synthetic oligonucleotide
  Sense strand starting at position 1441 of SEQ ID NO: 1881704
cuuugugucaaguacuaga

SEQ ID NO: 2065247 - RNA, 19 nt, Artificial Sequence
  Description of Artificial Sequence: Synthetic oligonucleotide
  Antisense strand to SEQ ID NO: 2065246
ucuaguacuugacacaaag

SEQ ID NO: 2065248 - RNA, 19 nt, Artificial Sequence
  Description of Artificial Sequence: Synthetic oligonucleotide
  Sense strand starting at position 1494 of SEQ ID NO: 1881704
cuugauaccguauauguga

SEQ ID NO: 2065249 - RNA, 19 nt, Artificial Sequence
  Description of Artificial Sequence: Synthetic oligonucleotide
  Antisense strand to SEQ ID NO: 2065248
ucacauauacgguaucaag

SEQ ID NO: 2065250 - RNA, 19 nt, Artificial Sequence
  Description of Artificial Sequence: Synthetic oligonucleotide
  Sense strand starting at position 1507 of SEQ ID NO: 1881704
augugaccuugagcaagaa

SEQ ID NO: 2065251 - RNA, 19 nt, Artificial Sequence
  Description of Artificial Sequence: Synthetic oligonucleotide
  Antisense strand to SEQ ID NO: 2065250
uucuugcucaaggucacau

SEQ ID NO: 2065252 - RNA, 19 nt, Artificial Sequence
  Description of Artificial Sequence: Synthetic oligonucleotide
  Sense strand starting at position 1702 of SEQ ID NO: 1881704
ggaacauuccacuagcuca

SEQ ID NO: 2065253 - RNA, 19 nt, Artificial Sequence
  Description of Artificial Sequence: Synthetic oligonucleotide
  Antisense strand to SEQ ID NO: 2065252
ugagcuaguggaauguucc

SEQ ID NO: 2065254 - RNA, 19 nt, Artificial Sequence
  Description of Artificial Sequence: Synthetic oligonucleotide
  Sense strand starting at position 1787 of SEQ ID NO: 1881704
gacggugucgcguugacuu

SEQ ID NO: 2065255 - RNA, 19 nt, Artificial Sequence
  Description of Artificial Sequence: Synthetic oligonucleotide
  Antisense strand to SEQ ID NO: 2065254
aagucaacgcgacaccguc

SEQ ID NO: 2065256 - RNA, 19 nt, Artificial Sequence
  Description of Artificial Sequence: Synthetic oligonucleotide
  Sense strand starting at position 1928 of SEQ ID NO: 1881704
cugggauucucacuccaau

SEQ ID NO: 2065257 - RNA, 19 nt, Artificial Sequence
  Description of Artificial Sequence: Synthetic oligonucleotide
  Antisense strand to SEQ ID NO: 2065256
auuggagugagaaucccag

SEQ ID NO: 2065258 - RNA, 19 nt, Artificial Sequence
  Description of Artificial Sequence: Synthetic oligonucleotide
  Sense strand starting at position 1945 of SEQ ID NO: 1881704
auucucagguuuccugaua

SEQ ID NO: 2065259 - RNA, 19 nt, Artificial Sequence
  Description of Artificial Sequence: Synthetic oligonucleotide
  Antisense strand to SEQ ID NO: 2065258
uaucaggaaaccugagaau

SEQ ID NO: 2065260 - RNA, 19 nt, Artificial Sequence
  Description of Artificial Sequence: Synthetic oligonucleotide
  Sense strand starting at position 2051 of SEQ ID NO: 1881704
ccucaauccugauuggaug

SEQ ID NO: 2065261 - RNA, 19 nt, Artificial Sequence
  Description of Artificial Sequence: Synthetic oligonucleotide
  Antisense strand to SEQ ID NO: 2065260
cauccaaucaggauugagg

SEQ ID NO: 2065262 - RNA, 19 nt, Artificial Sequence
  Description of Artificial Sequence: Synthetic oligonucleotide
  Sense strand starting at position 2587 of SEQ ID NO: 1881704
cgcagacaucguguagcuu

SEQ ID NO: 2065263 - RNA, 19 nt, Artificial Sequence
  Description of Artificial Sequence: Synthetic oligonucleotide
  Antisense strand to SEQ ID NO: 2065262
aagcuacacgaugucugcg

SEQ ID NO: 2065264 - RNA, 19 nt, Artificial Sequence
  Description of Artificial Sequence: Synthetic oligonucleotide
  Sense strand starting at position 2724 of SEQ ID NO: 1881704
cugcgagagccugagagau

SEQ ID NO: 2065265 - RNA, 19 nt, Artificial Sequence
  Description of Artificial Sequence: Synthetic oligonucleotide
  Antisense strand to SEQ ID NO: 2065264
aucucucaggcucucgcag

SEQ ID NO: 2065266 - RNA, 19 nt, Artificial Sequence
  Description of Artificial Sequence: Synthetic oligonucleotide
  Sense strand starting at position 2944 of SEQ ID NO: 1881704
gugugucaaccucacacua

SEQ ID NO: 2065267 - RNA, 19 nt, Artificial Sequence
  Description of Artificial Sequence: Synthetic oligonucleotide
  Antisense strand to SEQ ID NO: 2065266
uagugugagguugacacac

SEQ ID NO: 2065268 - RNA, 19 nt, Artificial Sequence
  Description of Artificial Sequence: Synthetic oligonucleotide
  Sense strand starting at position 3049 of SEQ ID NO: 1881704
guaccucuauuccugauua

SEQ ID NO: 2065269 - RNA, 19 nt, Artificial Sequence
  Description of Artificial Sequence: Synthetic oligonucleotide
  Antisense strand to SEQ ID NO: 2065268
uaaucaggaauagagguac

SEQ ID NO: 2065270 - RNA, 19 nt, Artificial Sequence
  Description of Artificial Sequence: Synthetic oligonucleotide
  Sense strand starting at position 3283 of SEQ ID NO: 1881704
ggaguuugacaucaguggu

SEQ ID NO: 2065271 - RNA, 19 nt, Artificial Sequence
  Description of Artificial Sequence: Synthetic oligonucleotide
  Antisense strand to SEQ ID NO: 2065270
accacugaugucaaacucc

SEQ ID NO: 2065272 - RNA, 19 nt, Artificial Sequence
  Description of Artificial Sequence: Synthetic oligonucleotide
  Sense strand starting at position 3408 of SEQ ID NO: 1881704
uagagacauuggcugugaa

SEQ ID NO: 2065273 - RNA, 19 nt, Artificial Sequence
  Description of Artificial Sequence: Synthetic oligonucleotide
  Antisense strand to SEQ ID NO: 2065272
uucacagccaaugucucua

SEQ ID NO: 2065274 - RNA, 19 nt, Artificial Sequence
  Description of Artificial Sequence: Synthetic oligonucleotide
  Sense strand starting at position 3409 of SEQ ID NO: 1881704
agagacauuggcugugaaa

SEQ ID NO: 2065275 - RNA, 19 nt, Artificial Sequence
  Description of Artificial Sequence: Synthetic oligonucleotide
  Antisense strand to SEQ ID NO: 2065274
uuucacagccaaugucucu

SEQ ID NO: 2065276 - RNA, 19 nt, Artificial Sequence
  Description of Artificial Sequence: Synthetic oligonucleotide
  Sense strand starting at position 3420 of SEQ ID NO: 1881704
cugugaaaccucugaaaca

SEQ ID NO: 2065277 - RNA, 19 nt, Artificial Sequence
  Description of Artificial Sequence: Synthetic oligonucleotide
  Antisense strand to SEQ ID NO: 2065276
uguuucagagguuucacag

SEQ ID NO: 2065278 - RNA, 19 nt, Artificial Sequence
  Description of Artificial Sequence: Synthetic oligonucleotide
  Sense strand starting at position 3476 of SEQ ID NO: 1881704
uguccauaucuguaaauug

SEQ ID NO: 2065279 - RNA, 19 nt, Artificial Sequence
  Description of Artificial Sequence: Synthetic oligonucleotide
  Antisense strand to SEQ ID NO: 2065278
caauuuacagauauggaca

SEQ ID NO: 2065280 - RNA, 19 nt, Artificial Sequence
  Description of Artificial Sequence: Synthetic oligonucleotide
  Sense strand starting at position 3580 of SEQ ID NO: 1881704
guaguucuccaguaugaca

SEQ ID NO: 2065281 - RNA, 19 nt, Artificial Sequence
  Description of Artificial Sequence: Synthetic oligonucleotide
  Antisense strand to SEQ ID NO: 2065280
ugucauacuggagaacuac

SEQ ID NO: 2065282 - RNA, 19 nt, Artificial Sequence
  Description of Artificial Sequence: Synthetic oligonucleotide
  Sense strand starting at position 3582 of SEQ ID NO: 1881704
aguucuccaguaugacaga

SEQ ID NO: 2065283 - RNA, 19 nt, Artificial Sequence
  Description of Artificial Sequence: Synthetic oligonucleotide
  Antisense strand to SEQ ID NO: 2065282
ucugucauacuggagaacu

SEQ ID NO: 2065284 - RNA, 19 nt, Artificial Sequence
  Description of Artificial Sequence: Synthetic oligonucleotide
  Sense strand starting at position 3589 of SEQ ID NO: 1881704
caguaugacagauggugaa

SEQ ID NO: 2065285 - RNA, 19 nt, Artificial Sequence
  Description of Artificial Sequence: Synthetic oligonucleotide
  Antisense strand to SEQ ID NO: 2065284
uucaccaucugucauacug

SEQ ID NO: 2065286 - RNA, 19 nt, Artificial Sequence
  Description of Artificial Sequence: Synthetic oligonucleotide
  Sense strand starting at position 3626 of SEQ ID NO: 1881704
aaaguugaguggcugaaga

SEQ ID NO: 2065287 - RNA, 19 nt, Artificial Sequence
  Description of Artificial Sequence: Synthetic oligonucleotide
  Antisense strand to SEQ ID NO: 2065286
ucuucagccacucaacuuu

SEQ ID NO: 2065288 - RNA, 19 nt, Artificial Sequence
  Description of Artificial Sequence: Synthetic oligonucleotide
  Sense strand starting at position 3639 of SEQ ID NO: 1881704
ugaagauggacggguauua

SEQ ID NO: 2065289 - RNA, 19 nt, Artificial Sequence
  Description of Artificial Sequence: Synthetic oligonucleotide
  Antisense strand to SEQ ID NO: 2065288
uaauacccguccaucuuca

SEQ ID NO: 2065290 - RNA, 19 nt, Artificial Sequence
  Description of Artificial Sequence: Synthetic oligonucleotide
  Sense strand starting at position 33 of SEQ ID NO: 1881705
uuauaccaagcuugaugaa

SEQ ID NO: 2065291 - RNA, 19 nt, Artificial Sequence
  Description of Artificial Sequence: Synthetic oligonucleotide
  Antisense strand to SEQ ID NO: 2065290
uucaucaagcuugguauaa

SEQ ID NO: 2065292 - RNA, 19 nt, Artificial Sequence
  Description of Artificial Sequence: Synthetic oligonucleotide
  Sense strand starting at position 48 of SEQ ID NO: 1881705
ugaagaguagacuguuaug

SEQ ID NO: 2065293 - RNA, 19 nt, Artificial Sequence
  Description of Artificial Sequence: Synthetic oligonucleotide
  Antisense strand to SEQ ID NO: 2065292
cauaacagucuacucuuca

SEQ ID NO: 2065294 - RNA, 19 nt, Artificial Sequence
  Description of Artificial Sequence: Synthetic oligonucleotide
  Sense strand starting at position 392 of SEQ ID NO: 1881705
gaaggagcuuagguauuaa

SEQ ID NO: 2065295 - RNA, 19 nt, Artificial Sequence
  Description of Artificial Sequence: Synthetic oligonucleotide
  Antisense strand to SEQ ID NO: 2065294
uuaauaccuaagcuccuuc

SEQ ID NO: 2065296 - RNA, 19 nt, Artificial Sequence
  Description of Artificial Sequence: Synthetic oligonucleotide
  Sense strand starting at position 403 of SEQ ID NO: 1881705
gguauuaaagauuguggag

SEQ ID NO: 2065297 - RNA, 19 nt, Artificial Sequence
  Description of Artificial Sequence: Synthetic oligonucleotide
  Antisense strand to SEQ ID NO: 2065296
cuccacaaucuuuaauacc

SEQ ID NO: 2065298 - RNA, 19 nt, Artificial Sequence
  Description of Artificial Sequence: Synthetic oligonucleotide
  Sense strand starting at position 522 of SEQ ID NO: 1881705
cucuuauacccaggagaau

SEQ ID NO: 2065299 - RNA, 19 nt, Artificial Sequence
  Description of Artificial Sequence: Synthetic oligonucleotide
  Antisense strand to SEQ ID NO: 2065298
auucuccuggguauaagag

SEQ ID NO: 2065300 - RNA, 19 nt, Artificial Sequence
  Description of Artificial Sequence: Synthetic oligonucleotide
  Sense strand starting at position 753 of SEQ ID NO: 1881705
guauaugaacucuaaugua

SEQ ID NO: 2065301 - RNA, 19 nt, Artificial Sequence
  Description of Artificial Sequence: Synthetic oligonucleotide
  Antisense strand to SEQ ID NO: 2065300
uacauuagaguucauauac

SEQ ID NO: 2065302 - RNA, 19 nt, Artificial Sequence
  Description of Artificial Sequence: Synthetic oligonucleotide
  Sense strand starting at position 761 of SEQ ID NO: 1881705
acucuaauguaguugaaau

SEQ ID NO: 2065303 - RNA, 19 nt, Artificial Sequence
  Description of Artificial Sequence: Synthetic oligonucleotide
  Antisense strand to SEQ ID NO: 2065302
auuucaacuacauuagagu

SEQ ID NO: 2065304 - RNA, 19 nt, Artificial Sequence
  Description of Artificial Sequence: Synthetic oligonucleotide
  Sense strand starting at position 864 of SEQ ID NO: 1881705
aagggaagcuuuguauuau

SEQ ID NO: 2065305 - RNA, 19 nt, Artificial Sequence
  Description of Artificial Sequence: Synthetic oligonucleotide
  Antisense strand to SEQ ID NO: 2065304
auaauacaaagcuucccuu

SEQ ID NO: 2065306 - RNA, 19 nt, Artificial Sequence
  Description of Artificial Sequence: Synthetic oligonucleotide
  Sense strand starting at position 875 of SEQ ID NO: 1881705
uguauuauucuaggacuac

SEQ ID NO: 2065307 - RNA, 19 nt, Artificial Sequence
  Description of Artificial Sequence: Synthetic oligonucleotide
  Antisense strand to SEQ ID NO: 2065306
guaguccuagaauaauaca

SEQ ID NO: 2065308 - RNA, 19 nt, Artificial Sequence
  Description of Artificial Sequence: Synthetic oligonucleotide
  Sense strand starting at position 884 of SEQ ID NO: 1881705
cuaggacuacaaugcaauu

SEQ ID NO: 2065309 - RNA, 19 nt, Artificial Sequence
  Description of Artificial Sequence: Synthetic oligonucleotide
  Antisense strand to SEQ ID NO: 2065308
aauugcauuguaguccuag

SEQ ID NO: 2065310 - RNA, 19 nt, Artificial Sequence
  Description of Artificial Sequence: Synthetic oligonucleotide
  Sense strand starting at position 896 of SEQ ID NO: 1881705
ugcaauuuaugcuuugcau

SEQ ID NO: 2065311 - RNA, 19 nt, Artificial Sequence
  Description of Artificial Sequence: Synthetic oligonucleotide
  Antisense strand to SEQ ID NO: 2065310
augcaaagcauaaauugca

SEQ ID NO: 2065312 - RNA, 19 nt, Artificial Sequence
  Description of Artificial Sequence: Synthetic oligonucleotide
  Sense strand starting at position 928 of SEQ ID NO: 1881705
augacuuauugcuccagaa

SEQ ID NO: 2065313 - RNA, 19 nt, Artificial Sequence
  Description of Artificial Sequence: Synthetic oligonucleotide
  Antisense strand to SEQ ID NO: 2065312
uucuggagcaauaagucau

SEQ ID NO: 2065314 - RNA, 19 nt, Artificial Sequence
  Description of Artificial Sequence: Synthetic oligonucleotide
  Sense strand starting at position 1263 of SEQ ID NO: 1881705
ccuacuuuaucagugggaa

SEQ ID NO: 2065315 - RNA, 19 nt, Artificial Sequence
  Description of Artificial Sequence: Synthetic oligonucleotide
  Antisense strand to SEQ ID NO: 2065314
uucccacugauaaaguagg

SEQ ID NO: 2065316 - RNA, 19 nt, Artificial Sequence
  Description of Artificial Sequence: Synthetic oligonucleotide
  Sense strand starting at position 1264 of SEQ ID NO: 1881705
cuacuuuaucagugggaaa

SEQ ID NO: 2065317 - RNA, 19 nt, Artificial Sequence
  Description of Artificial Sequence: Synthetic oligonucleotide
  Antisense strand to SEQ ID NO: 2065316
uuucccacugauaaaguag

SEQ ID NO: 2065318 - RNA, 19 nt, Artificial Sequence
  Description of Artificial Sequence: Synthetic oligonucleotide
  Sense strand starting at position 1294 of SEQ ID NO: 1881705
augcaauucuuacugagau

SEQ ID NO: 2065319 - RNA, 19 nt, Artificial Sequence
  Description of Artificial Sequence: Synthetic oligonucleotide
  Antisense strand to SEQ ID NO: 2065318
aucucaguaagaauugcau

SEQ ID NO: 2065320 - RNA, 19 nt, Artificial Sequence
  Description of Artificial Sequence: Synthetic oligonucleotide
  Sense strand starting at position 1317 of SEQ ID NO: 1881705
guguuuaucagagaaaugu

SEQ ID NO: 2065321 - RNA, 19 nt, Artificial Sequence
  Description of Artificial Sequence: Synthetic oligonucleotide
  Antisense strand to SEQ ID NO: 2065320
acauuucucugauaaacac

SEQ ID NO: 2065322 - RNA, 19 nt, Artificial Sequence
  Description of Artificial Sequence: Synthetic oligonucleotide
  Sense strand starting at position 1326 of SEQ ID NO: 1881705
agagaaauguuuccucuuu

SEQ ID NO: 2065323 - RNA, 19 nt, Artificial Sequence
  Description of Artificial Sequence: Synthetic oligonucleotide
  Antisense strand to SEQ ID NO: 2065322
aaagaggaaacauuucucu

SEQ ID NO: 2065324 - RNA, 19 nt, Artificial Sequence
  Description of Artificial Sequence: Synthetic oligonucleotide
  Sense strand starting at position 1342 of SEQ ID NO: 1881705
uuucuuugccaaggaauua

SEQ ID NO: 2065325 - RNA, 19 nt, Artificial Sequence
  Description of Artificial Sequence: Synthetic oligonucleotide
  Antisense strand to SEQ ID NO: 2065324
uaauuccuuggcaaagaaa

SEQ ID NO: 2065326 - RNA, 19 nt, Artificial Sequence
  Description of Artificial Sequence: Synthetic oligonucleotide
  Sense strand starting at position 2710 of SEQ ID NO: 1881705
acacgcugccuugaggaaa

SEQ ID NO: 2065327 - RNA, 19 nt, Artificial Sequence
  Description of Artificial Sequence: Synthetic oligonucleotide
  Antisense strand to SEQ ID NO: 2065326
uuuccucaaggcagcgugu

SEQ ID NO: 2065328 - RNA, 19 nt, Artificial Sequence
  Description of Artificial Sequence: Synthetic oligonucleotide
  Sense strand starting at position 2722 of SEQ ID NO: 1881705
gaggaaacuuaaguuugca

SEQ ID NO: 2065329 - RNA, 19 nt, Artificial Sequence
  Description of Artificial Sequence: Synthetic oligonucleotide
  Antisense strand to SEQ ID NO: 2065328
ugcaaacuuaaguuuccuc

SEQ ID NO: 2065330 - RNA, 19 nt, Artificial Sequence
  Description of Artificial Sequence: Synthetic oligonucleotide
  Sense strand starting at position 2852 of SEQ ID NO: 1881705
uggaguuugcuuguagugu

SEQ ID NO: 2065331 - RNA, 19 nt, Artificial Sequence
  Description of Artificial Sequence: Synthetic oligonucleotide
  Antisense strand to SEQ ID NO: 2065330
acacuacaagcaaacucca

SEQ ID NO: 2065332 - RNA, 19 nt, Artificial Sequence
  Description of Artificial Sequence: Synthetic oligonucleotide
  Sense strand starting at position 3072 of SEQ ID NO: 1881705
ggauaugcauucccuaaug

SEQ ID NO: 2065333 - RNA, 19 nt, Artificial Sequence
  Description of Artificial Sequence: Synthetic oligonucleotide
  Antisense strand to SEQ ID NO: 2065332
cauuagggaaugcauaucc

SEQ ID NO: 2065334 - RNA, 19 nt, Artificial Sequence
  Description of Artificial Sequence: Synthetic oligonucleotide
  Sense strand starting at position 3140 of SEQ ID NO: 1881705
cuuacagacuucuuaguau

SEQ ID NO: 2065335 - RNA, 19 nt, Artificial Sequence
  Description of Artificial Sequence: Synthetic oligonucleotide
  Antisense strand to SEQ ID NO: 2065334
auacuaagaagucuguaag

SEQ ID NO: 2065336 - RNA, 19 nt, Artificial Sequence
  Description of Artificial Sequence: Synthetic oligonucleotide
  Sense strand starting at position 3250 of SEQ ID NO: 1881705
ccagaugauugaccuguuu

SEQ ID NO: 2065337 - RNA, 19 nt, Artificial Sequence
  Description of Artificial Sequence: Synthetic oligonucleotide
  Antisense strand to SEQ ID NO: 2065336
aaacaggucaaucaucugg

SEQ ID NO: 2065338 - RNA, 19 nt, Artificial Sequence
  Description of Artificial Sequence: Synthetic oligonucleotide
  Sense strand starting at position 3290 of SEQ ID NO: 1881705
ucugcuggacuuuaugaau

SEQ ID NO: 2065339 - RNA, 19 nt, Artificial Sequence
  Description of Artificial Sequence: Synthetic oligonucleotide
  Antisense strand to SEQ ID NO: 2065338
auucauaaaguccagcaga

SEQ ID NO: 2065340 - RNA, 19 nt, Artificial Sequence
  Description of Artificial Sequence: Synthetic oligonucleotide
  Sense strand starting at position 3365 of SEQ ID NO: 1881705
guuuguccugaggaucaga

SEQ ID NO: 2065341 - RNA, 19 nt, Artificial Sequence
  Description of Artificial Sequence: Synthetic oligonucleotide
  Antisense strand to SEQ ID NO: 2065340
ucugauccucaggacaaac

SEQ ID NO: 2065342 - RNA, 19 nt, Artificial Sequence
  Description of Artificial Sequence: Synthetic oligonucleotide
  Sense strand starting at position 3375 of SEQ ID NO: 1881705
aggaucagaaguugaguga

SEQ ID NO: 2065343 - RNA, 19 nt, Artificial Sequence
  Description of Artificial Sequence: Synthetic oligonucleotide
  Antisense strand to SEQ ID NO: 2065342
ucacucaacuucugauccu

SEQ ID NO: 2065344 - RNA, 19 nt, Artificial Sequence
  Description of Artificial Sequence: Synthetic oligonucleotide
  Sense strand starting at position 3379 of SEQ ID NO: 1881705
ucagaaguugagugauacu

SEQ ID NO: 2065345 - RNA, 19 nt, Artificial Sequence
  Description of Artificial Sequence: Synthetic oligonucleotide
  Antisense strand to SEQ ID NO: 2065344
aguaucacucaacuucuga

SEQ ID NO: 2065346 - RNA, 19 nt, Artificial Sequence
  Description of Artificial Sequence: Synthetic oligonucleotide
  Sense strand starting at position 3414 of SEQ ID NO: 1881705
uuggaucagccuuaccuau

SEQ ID NO: 2065347 - RNA, 19 nt, Artificial Sequence
  Description of Artificial Sequence: Synthetic oligonucleotide
  Antisense strand to SEQ ID NO: 2065346
auagguaaggcugauccaa

SEQ ID NO: 2065348 - RNA, 19 nt, Artificial Sequence
  Description of Artificial Sequence: Synthetic oligonucleotide
  Sense strand starting at position 3492 of SEQ ID NO: 1881705
accuguucugaacaaaugu

SEQ ID NO: 2065349 - RNA, 19 nt, Artificial Sequence
  Description of Artificial Sequence: Synthetic oligonucleotide
  Antisense strand to SEQ ID NO: 2065348
acauuuguucagaacaggu

SEQ ID NO: 2065350 - RNA, 19 nt, Artificial Sequence
  Description of Artificial Sequence: Synthetic oligonucleotide
  Sense strand starting at position 3516 of SEQ ID NO: 1881705
uacuauuugugagcagugu

SEQ ID NO: 2065351 - RNA, 19 nt, Artificial Sequence
  Description of Artificial Sequence: Synthetic oligonucleotide
  Antisense strand to SEQ ID NO: 2065350
acacugcucacaaauagua

SEQ ID NO: 2065352 - RNA, 19 nt, Artificial Sequence
  Description of Artificial Sequence: Synthetic oligonucleotide
  Sense strand starting at position 3517 of SEQ ID NO: 1881705
acuauuugugagcaguguu

SEQ ID NO: 2065353 - RNA, 19 nt, Artificial Sequence
  Description of Artificial Sequence: Synthetic oligonucleotide
  Antisense strand to SEQ ID NO: 2065352
aacacugcucacaaauagu

SEQ ID NO: 2065354 - RNA, 19 nt, Artificial Sequence
  Description of Artificial Sequence: Synthetic oligonucleotide
  Sense strand starting at position 3650 of SEQ ID NO: 1881705
gacucauguuuaccaguga

SEQ ID NO: 2065355 - RNA, 19 nt, Artificial Sequence
  Description of Artificial Sequence: Synthetic oligonucleotide
  Antisense strand to SEQ ID NO: 2065354
ucacugguaaacaugaguc

SEQ ID NO: 2065356 - RNA, 19 nt, Artificial Sequence
  Description of Artificial Sequence: Synthetic oligonucleotide
  Sense strand starting at position 3677 of SEQ ID NO: 1881705
uugugucuuuccuugauuu

SEQ ID NO: 2065357 - RNA, 19 nt, Artificial Sequence
  Description of Artificial Sequence: Synthetic oligonucleotide
  Antisense strand to SEQ ID NO: 2065356
aaaucaaggaaagacacaa

SEQ ID NO: 2065358 - RNA, 19 nt, Artificial Sequence
  Description of Artificial Sequence: Synthetic oligonucleotide
  Sense strand starting at position 3735 of SEQ ID NO: 1881705
guggcaaauguuuauuaca

SEQ ID NO: 2065359 - RNA, 19 nt, Artificial Sequence
  Description of Artificial Sequence: Synthetic oligonucleotide
  Antisense strand to SEQ ID NO: 2065358
uguaauaaacauuugccac

SEQ ID NO: 2065360 - RNA, 19 nt, Artificial Sequence
  Description of Artificial Sequence: Synthetic oligonucleotide
  Sense strand starting at position 3776 of SEQ ID NO: 1881705
ucaagaaugccaggauaug

SEQ ID NO: 2065361 - RNA, 19 nt, Artificial Sequence
  Description of Artificial Sequence: Synthetic oligonucleotide
  Antisense strand to SEQ ID NO: 2065360
cauauccuggcauucuuga

SEQ ID NO: 2065362 - RNA, 19 nt, Artificial Sequence
  Description of Artificial Sequence: Synthetic oligonucleotide
  Sense strand starting at position 3786 of SEQ ID NO: 1881705
caggauauguacucagcca

SEQ ID NO: 2065363 - RNA, 19 nt, Artificial Sequence
  Description of Artificial Sequence: Synthetic oligonucleotide
  Antisense strand to SEQ ID NO: 2065362
uggcugaguacauauccug

SEQ ID NO: 2065364 - RNA, 19 nt, Artificial Sequence
  Description of Artificial Sequence: Synthetic oligonucleotide
  Sense strand starting at position 3800 of SEQ ID NO: 1881705
agccaaguguaaucaggau

SEQ ID NO: 2065365 - RNA, 19 nt, Artificial Sequence
  Description of Artificial Sequence: Synthetic oligonucleotide
  Antisense strand to SEQ ID NO: 2065364
auccugauuacacuuggcu

SEQ ID NO: 2065366 - RNA, 19 nt, Artificial Sequence
  Description of Artificial Sequence: Synthetic oligonucleotide
  Sense strand starting at position 3806 of SEQ ID NO: 1881705
guguaaucaggauguuaaa

SEQ ID NO: 2065367 - RNA, 19 nt, Artificial Sequence
  Description of Artificial Sequence: Synthetic oligonucleotide
  Antisense strand to SEQ ID NO: 2065366
uuuaacauccugauuacac

SEQ ID NO: 2065368 - RNA, 19 nt, Artificial Sequence
  Description of Artificial Sequence: Synthetic oligonucleotide
  Sense strand starting at position 3874 of SEQ ID NO: 1881705
aguucucuuguuuauaauc

SEQ ID NO: 2065369 - RNA, 19 nt, Artificial Sequence
  Description of Artificial Sequence: Synthetic oligonucleotide
  Antisense strand to SEQ ID NO: 2065368
gauuauaaacaagagaacu

SEQ ID NO: 2065370 - RNA, 19 nt, Artificial Sequence
  Description of Artificial Sequence: Synthetic oligonucleotide
  Sense strand starting at position 42 of SEQ ID NO: 1881706
uugcaugugauugacaaag

SEQ ID NO: 2065371 - RNA, 19 nt, Artificial Sequence
  Description of Artificial Sequence: Synthetic oligonucleotide
  Antisense strand to SEQ ID NO: 2065370
cuuugucaaucacaugcaa

SEQ ID NO: 2065372 - RNA, 19 nt, Artificial Sequence
  Description of Artificial Sequence: Synthetic oligonucleotide
  Sense strand starting at position 209 of SEQ ID NO: 1881706
aguuaaaugcucuauguca

SEQ ID NO: 2065373 - RNA, 19 nt, Artificial Sequence
  Description of Artificial Sequence: Synthetic oligonucleotide
  Antisense strand to SEQ ID NO: 2065372
ugacauagagcauuuaacu

SEQ ID NO: 2065374 - RNA, 19 nt, Artificial Sequence
  Description of Artificial Sequence: Synthetic oligonucleotide
  Sense strand starting at position 268 of SEQ ID NO: 1881706
cugugcuuugaacacagau

SEQ ID NO: 2065375 - RNA, 19 nt, Artificial Sequence
  Description of Artificial Sequence: Synthetic oligonucleotide
  Antisense strand to SEQ ID NO: 2065374
aucuguguucaaagcacag

SEQ ID NO: 2065376 - RNA, 19 nt, Artificial Sequence
  Description of Artificial Sequence: Synthetic oligonucleotide
  Sense strand starting at position 395 of SEQ ID NO: 1881706
gcuggaugccaugggaaca

SEQ ID NO: 2065377 - RNA, 19 nt, Artificial Sequence
  Description of Artificial Sequence: Synthetic oligonucleotide
  Antisense strand to SEQ ID NO: 2065376
uguucccauggcauccagc

SEQ ID NO: 2065378 - RNA, 19 nt, Artificial Sequence
  Description of Artificial Sequence: Synthetic oligonucleotide
  Sense strand starting at position 477 of SEQ ID NO: 1881706
aguguaagggccugauuag

SEQ ID NO: 2065379 - RNA, 19 nt, Artificial Sequence
  Description of Artificial Sequence: Synthetic oligonucleotide
  Antisense strand to SEQ ID NO: 2065378
cuaaucaggcccuuacacu

SEQ ID NO: 2065380 - RNA, 19 nt, Artificial Sequence
  Description of Artificial Sequence: Synthetic oligonucleotide
  Sense strand starting at position 486 of SEQ ID NO: 1881706
gccugauuagcgguguuua

SEQ ID NO: 2065381 - RNA, 19 nt, Artificial Sequence
  Description of Artificial Sequence: Synthetic oligonucleotide
  Antisense strand to SEQ ID NO: 2065380
uaaacaccgcuaaucaggc

SEQ ID NO: 2065382 - RNA, 19 nt, Artificial Sequence
  Description of Artificial Sequence: Synthetic oligonucleotide
  Sense strand starting at position 567 of SEQ ID NO: 1881706
gaagaugugcaguaguaua

SEQ ID NO: 2065383 - RNA, 19 nt, Artificial Sequence
  Description of Artificial Sequence: Synthetic oligonucleotide
  Antisense strand to SEQ ID NO: 2065382
uauacuacugcacaucuuc

SEQ ID NO: 2065384 - RNA, 19 nt, Artificial Sequence
  Description of Artificial Sequence: Synthetic oligonucleotide
  Sense strand starting at position 572 of SEQ ID NO: 1881706
ugugcaguaguauaacauu

SEQ ID NO: 2065385 - RNA, 19 nt, Artificial Sequence
  Description of Artificial Sequence: Synthetic oligonucleotide
  Antisense strand to SEQ ID NO: 2065384
aauguuauacuacugcaca

SEQ ID NO: 2065386 - RNA, 19 nt, Artificial Sequence
  Description of Artificial Sequence: Synthetic oligonucleotide
  Sense strand starting at position 836 of SEQ ID NO: 1881706
gaauuacuguaggcucaca

SEQ ID NO: 2065387 - RNA, 19 nt, Artificial Sequence
  Description of Artificial Sequence: Synthetic oligonucleotide
  Antisense strand to SEQ ID NO: 2065386
ugugagccuacaguaauuc

SEQ ID NO: 2065388 - RNA, 19 nt, Artificial Sequence
  Description of Artificial Sequence: Synthetic oligonucleotide
  Sense strand starting at position 903 of SEQ ID NO: 1881706
accucuaaguuguugaacu

SEQ ID NO: 2065389 - RNA, 19 nt, Artificial Sequence
  Description of Artificial Sequence: Synthetic oligonucleotide
  Antisense strand to SEQ ID NO: 2065388
aguucaacaacuuagaggu

SEQ ID NO: 2065390 - RNA, 19 nt, Artificial Sequence
  Description of Artificial Sequence: Synthetic oligonucleotide
  Sense strand starting at position 1032 of SEQ ID NO: 1881706
caggaagaguucucaagcu

SEQ ID NO: 2065391 - RNA, 19 nt, Artificial Sequence
  Description of Artificial Sequence: Synthetic oligonucleotide
  Antisense strand to SEQ ID NO: 2065390
agcuugagaacucuuccug

SEQ ID NO: 2065392 - RNA, 19 nt, Artificial Sequence
  Description of Artificial Sequence: Synthetic oligonucleotide
  Sense strand starting at position 1167 of SEQ ID NO: 1881706
ggaugugacaauugcauuc

SEQ ID NO: 2065393 - RNA, 19 nt, Artificial Sequence
  Description of Artificial Sequence: Synthetic oligonucleotide
  Antisense strand to SEQ ID NO: 2065392
gaaugcaauugucacaucc

SEQ ID NO: 2065394 - RNA, 19 nt, Artificial Sequence
  Description of Artificial Sequence: Synthetic oligonucleotide
  Sense strand starting at position 1241 of SEQ ID NO: 1881706
guugguaugcgggaccuaa

SEQ ID NO: 2065395 - RNA, 19 nt, Artificial Sequence
  Description of Artificial Sequence: Synthetic oligonucleotide
  Antisense strand to SEQ ID NO: 2065394
uuaggucccgcauaccaac

SEQ ID NO: 2065396 - RNA, 19 nt, Artificial Sequence
  Description of Artificial Sequence: Synthetic oligonucleotide
  Sense strand starting at position 1245 of SEQ ID NO: 1881706
guaugcgggaccuaaagaa

SEQ ID NO: 2065397 - RNA, 19 nt, Artificial Sequence
  Description of Artificial Sequence: Synthetic oligonucleotide
  Antisense strand to SEQ ID NO: 2065396
uucuuuaggucccgcauac

SEQ ID NO: 2065398 - RNA, 19 nt, Artificial Sequence
  Description of Artificial Sequence: Synthetic oligonucleotide
  Sense strand starting at position 1614 of SEQ ID NO: 1881706
ugccguuagguuagagagu

SEQ ID NO: 2065399 - RNA, 19 nt, Artificial Sequence
  Description of Artificial Sequence: Synthetic oligonucleotide
  Antisense strand to SEQ ID NO: 2065398
acucucuaaccuaacggca

SEQ ID NO: 2065400 - RNA, 19 nt, Artificial Sequence
  Description of Artificial Sequence: Synthetic oligonucleotide
  Sense strand starting at position 1684 of SEQ ID NO: 1881706
gcaugucacguggugagua

SEQ ID NO: 2065401 - RNA, 19 nt, Artificial Sequence
  Description of Artificial Sequence: Synthetic oligonucleotide
  Antisense strand to SEQ ID NO: 2065400
uacucaccacgugacaugc

SEQ ID NO: 2065402 - RNA, 19 nt, Artificial Sequence
  Description of Artificial Sequence: Synthetic oligonucleotide
  Sense strand starting at position 1687 of SEQ ID NO: 1881706
ugucacguggugaguagua

SEQ ID NO: 2065403 - RNA, 19 nt, Artificial Sequence
  Description of Artificial Sequence: Synthetic oligonucleotide
  Antisense strand to SEQ ID NO: 2065402
uacuacucaccacgugaca

SEQ ID NO: 2065404 - RNA, 19 nt, Artificial Sequence
  Description of Artificial Sequence: Synthetic oligonucleotide
  Sense strand starting at position 1694 of SEQ ID NO: 1881706
uggugaguaguaagugcua

SEQ ID NO: 2065405 - RNA, 19 nt, Artificial Sequence
  Description of Artificial Sequence: Synthetic oligonucleotide
  Antisense strand to SEQ ID NO: 2065404
uagcacuuacuacucacca

SEQ ID NO: 2065406 - RNA, 19 nt, Artificial Sequence
  Description of Artificial Sequence: Synthetic oligonucleotide
  Sense strand starting at position 1778 of SEQ ID NO: 1881706
caguaauaaguguggaaau

SEQ ID NO: 2065407 - RNA, 19 nt, Artificial Sequence
  Description of Artificial Sequence: Synthetic oligonucleotide
  Antisense strand to SEQ ID NO: 2065406
auuuccacacuuauuacug

SEQ ID NO: 2065408 - RNA, 19 nt, Artificial Sequence
  Description of Artificial Sequence: Synthetic oligonucleotide
  Sense strand starting at position 1780 of SEQ ID NO: 1881706
guaauaaguguggaaaugu

SEQ ID NO: 2065409 - RNA, 19 nt, Artificial Sequence
  Description of Artificial Sequence: Synthetic oligonucleotide
  Antisense strand to SEQ ID NO: 2065408
acauuuccacacuuauuac

SEQ ID NO: 2065410 - RNA, 19 nt, Artificial Sequence
  Description of Artificial Sequence: Synthetic oligonucleotide
  Sense strand starting at position 1993 of SEQ ID NO: 1881706
gguuuaacuagacgaauca

SEQ ID NO: 2065411 - RNA, 19 nt, Artificial Sequence
  Description of Artificial Sequence: Synthetic oligonucleotide
  Antisense strand to SEQ ID NO: 2065410
ugauucgucuaguuaaacc

SEQ ID NO: 2065412 - RNA, 19 nt, Artificial Sequence
  Description of Artificial Sequence: Synthetic oligonucleotide
  Sense strand starting at position 2261 of SEQ ID NO: 1881706
gagcuagugcucccgcuua

SEQ ID NO: 2065413 - RNA, 19 nt, Artificial Sequence
  Description of Artificial Sequence: Synthetic oligonucleotide
  Antisense strand to SEQ ID NO: 2065412
uaagcgggagcacuagcuc

SEQ ID NO: 2065414 - RNA, 19 nt, Artificial Sequence
  Description of Artificial Sequence: Synthetic oligonucleotide
  Sense strand starting at position 2263 of SEQ ID NO: 1881706
gcuagugcucccgcuuauu

SEQ ID NO: 2065415 - RNA, 19 nt, Artificial Sequence
  Description of Artificial Sequence: Synthetic oligonucleotide
  Antisense strand to SEQ ID NO: 2065414
aauaagcgggagcacuagc

SEQ ID NO: 2065416 - RNA, 19 nt, Artificial Sequence
  Description of Artificial Sequence: Synthetic oligonucleotide
  Sense strand starting at position 2505 of SEQ ID NO: 1881706
agcucuucgcugcuugaga

SEQ ID NO: 2065417 - RNA, 19 nt, Artificial Sequence
  Description of Artificial Sequence: Synthetic oligonucleotide
  Antisense strand to SEQ ID NO: 2065416
ucucaagcagcgaagagcu

SEQ ID NO: 2065418 - RNA, 19 nt, Artificial Sequence
  Description of Artificial Sequence: Synthetic oligonucleotide
  Sense strand starting at position 2516 of SEQ ID NO: 1881706
gcuugagacuagucccaag

SEQ ID NO: 2065419 - RNA, 19 nt, Artificial Sequence
  Description of Artificial Sequence: Synthetic oligonucleotide
  Antisense strand to SEQ ID NO: 2065418
cuugggacuagucucaagc

SEQ ID NO: 2065420 - RNA, 19 nt, Artificial Sequence
  Description of Artificial Sequence: Synthetic oligonucleotide
  Sense strand starting at position 2773 of SEQ ID NO: 1881706
acauaaugguguuuguaga

SEQ ID NO: 2065421 - RNA, 19 nt, Artificial Sequence
  Description of Artificial Sequence: Synthetic oligonucleotide
  Antisense strand to SEQ ID NO: 2065420
ucuacaaacaccauuaugu

SEQ ID NO: 2065422 - RNA, 19 nt, Artificial Sequence
  Description of Artificial Sequence: Synthetic oligonucleotide
  Sense strand starting at position 3327 of SEQ ID NO: 1881706
cucaguaaaccucauugua

SEQ ID NO: 2065423 - RNA, 19 nt, Artificial Sequence
  Description of Artificial Sequence: Synthetic oligonucleotide
  Antisense strand to SEQ ID NO: 2065422
uacaaugagguuuacugag

SEQ ID NO: 2065424 - RNA, 19 nt, Artificial Sequence
  Description of Artificial Sequence: Synthetic oligonucleotide
  Sense strand starting at position 3406 of SEQ ID NO: 1881706
gccucuuugcggucucuau

SEQ ID NO: 2065425 - RNA, 19 nt, Artificial Sequence
  Description of Artificial Sequence: Synthetic oligonucleotide
  Antisense strand to SEQ ID NO: 2065424
auagagaccgcaaagaggc

SEQ ID NO: 2065426 - RNA, 19 nt, Artificial Sequence
  Description of Artificial Sequence: Synthetic oligonucleotide
  Sense strand starting at position 3417 of SEQ ID NO: 1881706
gucucuauacaguggugaa

SEQ ID NO: 2065427 - RNA, 19 nt, Artificial Sequence
  Description of Artificial Sequence: Synthetic oligonucleotide
  Antisense strand to SEQ ID NO: 2065426
uucaccacuguauagagac

SEQ ID NO: 2065428 - RNA, 19 nt, Artificial Sequence
  Description of Artificial Sequence: Synthetic oligonucleotide
  Sense strand starting at position 3493 of SEQ ID NO: 1881706
acuguauuccuguaguauu

SEQ ID NO: 2065429 - RNA, 19 nt, Artificial Sequence
  Description of Artificial Sequence: Synthetic oligonucleotide
  Antisense strand to SEQ ID NO: 2065428
aauacuacaggaauacagu

SEQ ID NO: 2065430 - RNA, 19 nt, Artificial Sequence
  Description of Artificial Sequence: Synthetic oligonucleotide
  Sense strand starting at position 3503 of SEQ ID NO: 1881706
uguaguauucuagagaacg

SEQ ID NO: 2065431 - RNA, 19 nt, Artificial Sequence
  Description of Artificial Sequence: Synthetic oligonucleotide
  Antisense strand to SEQ ID NO: 2065430
cguucucuagaauacuaca

SEQ ID NO: 2065432 - RNA, 19 nt, Artificial Sequence
  Description of Artificial Sequence: Synthetic oligonucleotide
  Sense strand starting at position 3505 of SEQ ID NO: 1881706
uaguauucuagagaacggu

SEQ ID NO: 2065433 - RNA, 19 nt, Artificial Sequence
  Description of Artificial Sequence: Synthetic oligonucleotide
  Antisense strand to SEQ ID NO: 2065432
accguucucuagaauacua

SEQ ID NO: 2065434 - RNA, 19 nt, Artificial Sequence
  Description of Artificial Sequence: Synthetic oligonucleotide
  Sense strand starting at position 3509 of SEQ ID NO: 1881706
auucuagagaacgguaguu

SEQ ID NO: 2065435 - RNA, 19 nt, Artificial Sequence
  Description of Artificial Sequence: Synthetic oligonucleotide
  Antisense strand to SEQ ID NO: 2065434
aacuaccguucucuagaau

SEQ ID NO: 2065436 - RNA, 19 nt, Artificial Sequence
  Description of Artificial Sequence: Synthetic oligonucleotide
  Sense strand starting at position 3564 of SEQ ID NO: 1881706
agggcaaguguccagagaa

SEQ ID NO: 2065437 - RNA, 19 nt, Artificial Sequence
  Description of Artificial Sequence: Synthetic oligonucleotide
  Antisense strand to SEQ ID NO: 2065436
uucucuggacacuugcccu

SEQ ID NO: 2065438 - RNA, 19 nt, Artificial Sequence
  Description of Artificial Sequence: Synthetic oligonucleotide
  Sense strand starting at position 3656 of SEQ ID NO: 1881706
aauuguggugugggagaaa

SEQ ID NO: 2065439 - RNA, 19 nt, Artificial Sequence
  Description of Artificial Sequence: Synthetic oligonucleotide
  Antisense strand to SEQ ID NO: 2065438
uuucucccacaccacaauu

SEQ ID NO: 2065440 - RNA, 19 nt, Artificial Sequence
  Description of Artificial Sequence: Synthetic oligonucleotide
  Sense strand starting at position 3731 of SEQ ID NO: 1881706
uuaaguaguacaggagaua

SEQ ID NO: 2065441 - RNA, 19 nt, Artificial Sequence
  Description of Artificial Sequence: Synthetic oligonucleotide
  Antisense strand to SEQ ID NO: 2065440
uaucuccuguacuacuuaa

SEQ ID NO: 2065442 - RNA, 19 nt, Artificial Sequence
  Description of Artificial Sequence: Synthetic oligonucleotide
  Sense strand starting at position 3774 of SEQ ID NO: 1881706
aaauaauggcagcaguauu

SEQ ID NO: 2065443 - RNA, 19 nt, Artificial Sequence
  Description of Artificial Sequence: Synthetic oligonucleotide
  Antisense strand to SEQ ID NO: 2065442
aauacugcugccauuauuu

SEQ ID NO: 2065444 - RNA, 19 nt, Artificial Sequence
  Description of Artificial Sequence: Synthetic oligonucleotide
  Sense strand starting at position 3839 of SEQ ID NO: 1881706
ugcucuaauggauauguaa

SEQ ID NO: 2065445 - RNA, 19 nt, Artificial Sequence
  Description of Artificial Sequence: Synthetic oligonucleotide
  Antisense strand to SEQ ID NO: 2065444
uuacauauccauuagagca

SEQ ID NO: 2065446 - RNA, 19 nt, Artificial Sequence
  Description of Artificial Sequence: Synthetic oligonucleotide
  Sense strand starting at position 3846 of SEQ ID NO: 1881706
auggauauguaagccaaau

SEQ ID NO: 2065447 - RNA, 19 nt, Artificial Sequence
  Description of Artificial Sequence: Synthetic oligonucleotide
  Antisense strand to SEQ ID NO: 2065446
auuuggcuuacauauccau

SEQ ID NO: 2065448 - RNA, 19 nt, Artificial Sequence
  Description of Artificial Sequence: Synthetic oligonucleotide
  Sense strand starting at position 3947 of SEQ ID NO: 1881706
ucagguucugggugacuaa

SEQ ID NO: 2065449 - RNA, 19 nt, Artificial Sequence
  Description of Artificial Sequence: Synthetic oligonucleotide
  Antisense strand to SEQ ID NO: 2065448
uuagucacccagaaccuga

SEQ ID NO: 2065450 - RNA, 19 nt, Artificial Sequence
  Description of Artificial Sequence: Synthetic oligonucleotide
  Sense strand starting at position 27 of SEQ ID NO: 1881707
uuacucaccugaguguuua

SEQ ID NO: 2065451 - RNA, 19 nt, Artificial Sequence
  Description of Artificial Sequence: Synthetic oligonucleotide
  Antisense strand to SEQ ID NO: 2065450
uaaacacucaggugaguaa

SEQ ID NO: 2065452 - RNA, 19 nt, Artificial Sequence
  Description of Artificial Sequence: Synthetic oligonucleotide
  Sense strand starting at position 31 of SEQ ID NO: 1881707
ucaccugaguguuuacaau

SEQ ID NO: 2065453 - RNA, 19 nt, Artificial Sequence
  Description of Artificial Sequence: Synthetic oligonucleotide
  Antisense strand to SEQ ID NO: 2065452
auuguaaacacucagguga

SEQ ID NO: 2065454 - RNA, 19 nt, Artificial Sequence
  Description of Artificial Sequence: Synthetic oligonucleotide
  Sense strand starting at position 272 of SEQ ID NO: 1881707
guguucucugcauaucuca

SEQ ID NO: 2065455 - RNA, 19 nt, Artificial Sequence
  Description of Artificial Sequence: Synthetic oligonucleotide
  Antisense strand to SEQ ID NO: 2065454
ugagauaugcagagaacac

SEQ ID NO: 2065456 - RNA, 19 nt, Artificial Sequence
  Description of Artificial Sequence: Synthetic oligonucleotide
  Sense strand starting at position 279 of SEQ ID NO: 1881707
cugcauaucucaccaguua

SEQ ID NO: 2065457 - RNA, 19 nt, Artificial Sequence
  Description of Artificial Sequence: Synthetic oligonucleotide
  Antisense strand to SEQ ID NO: 2065456
uaacuggugagauaugcag

SEQ ID NO: 2065458 - RNA, 19 nt, Artificial Sequence
  Description of Artificial Sequence: Synthetic oligonucleotide
  Sense strand starting at position 293 of SEQ ID NO: 1881707
aguuacugauucuucuacu

SEQ ID NO: 2065459 - RNA, 19 nt, Artificial Sequence
  Description of Artificial Sequence: Synthetic oligonucleotide
  Antisense strand to SEQ ID NO: 2065458
aguagaagaaucaguaacu

SEQ ID NO: 2065460 - RNA, 19 nt, Artificial Sequence
  Description of Artificial Sequence: Synthetic oligonucleotide
  Sense strand starting at position 294 of SEQ ID NO: 1881707
guuacugauucuucuacuu

SEQ ID NO: 2065461 - RNA, 19 nt, Artificial Sequence
  Description of Artificial Sequence: Synthetic oligonucleotide
  Antisense strand to SEQ ID NO: 2065460
aaguagaagaaucaguaac

SEQ ID NO: 2065462 - RNA, 19 nt, Artificial Sequence
  Description of Artificial Sequence: Synthetic oligonucleotide
  Sense strand starting at position 383 of SEQ ID NO: 1881707
ccuuccuguguccaguaua

SEQ ID NO: 2065463 - RNA, 19 nt, Artificial Sequence
  Description of Artificial Sequence: Synthetic oligonucleotide
  Antisense strand to SEQ ID NO: 2065462
uauacuggacacaggaagg

SEQ ID NO: 2065464 - RNA, 19 nt, Artificial Sequence
  Description of Artificial Sequence: Synthetic oligonucleotide
  Sense strand starting at position 386 of SEQ ID NO: 1881707
uccuguguccaguauagag

SEQ ID NO: 2065465 - RNA, 19 nt, Artificial Sequence
  Description of Artificial Sequence: Synthetic oligonucleotide
  Antisense strand to SEQ ID NO: 2065464
cucuauacuggacacagga

SEQ ID NO: 2065466 - RNA, 19 nt, Artificial Sequence
  Description of Artificial Sequence: Synthetic oligonucleotide
  Sense strand starting at position 396 of SEQ ID NO: 1881707
aguauagagugcuccuaau

SEQ ID NO: 2065467 - RNA, 19 nt, Artificial Sequence
  Description of Artificial Sequence: Synthetic oligonucleotide
  Antisense strand to SEQ ID NO: 2065466
auuaggagcacucuauacu

SEQ ID NO: 2065468 - RNA, 19 nt, Artificial Sequence
  Description of Artificial Sequence: Synthetic oligonucleotide
  Sense strand starting at position 434 of SEQ ID NO: 1881707
ugugccauuaauggaagaa

SEQ ID NO: 2065469 - RNA, 19 nt, Artificial Sequence
  Description of Artificial Sequence: Synthetic oligonucleotide
  Antisense strand to SEQ ID NO: 2065468
uucuuccauuaauggcaca

SEQ ID NO: 2065470 - RNA, 19 nt, Artificial Sequence
  Description of Artificial Sequence: Synthetic oligonucleotide
  Sense strand starting at position 574 of SEQ ID NO: 1881707
uugaaacuuccaggagcuu

SEQ ID NO: 2065471 - RNA, 19 nt, Artificial Sequence
  Description of Artificial Sequence: Synthetic oligonucleotide
  Antisense strand to SEQ ID NO: 2065470
aagcuccuggaaguuucaa

SEQ ID NO: 2065472 - RNA, 19 nt, Artificial Sequence
  Description of Artificial Sequence: Synthetic oligonucleotide
  Sense strand starting at position 580 of SEQ ID NO: 1881707
cuuccaggagcuuaauuaa

SEQ ID NO: 2065473 - RNA, 19 nt, Artificial Sequence
  Description of Artificial Sequence: Synthetic oligonucleotide
  Antisense strand to SEQ ID NO: 2065472
uuaauuaagcuccuggaag

SEQ ID NO: 2065474 - RNA, 19 nt, Artificial Sequence
  Description of Artificial Sequence: Synthetic oligonucleotide
  Sense strand starting at position 583 of SEQ ID NO: 1881707
ccaggagcuuaauuaauaa

SEQ ID NO: 2065475 - RNA, 19 nt, Artificial Sequence
  Description of Artificial Sequence: Synthetic oligonucleotide
  Antisense strand to SEQ ID NO: 2065474
uuauuaauuaagcuccugg

SEQ ID NO: 2065476 - RNA, 19 nt, Artificial Sequence
  Description of Artificial Sequence: Synthetic oligonucleotide
  Sense strand starting at position 764 of SEQ ID NO: 1881707
gguuaauguggcuacagca

SEQ ID NO: 2065477 - RNA, 19 nt, Artificial Sequence
  Description of Artificial Sequence: Synthetic oligonucleotide
  Antisense strand to SEQ ID NO: 2065476
ugcuguagccacauuaacc

SEQ ID NO: 2065478 - RNA, 19 nt, Artificial Sequence
  Description of Artificial Sequence: Synthetic oligonucleotide
  Sense strand starting at position 858 of SEQ ID NO: 1881707
acgaguuauucuucuuaug

SEQ ID NO: 2065479 - RNA, 19 nt, Artificial Sequence
  Description of Artificial Sequence: Synthetic oligonucleotide
  Antisense strand to SEQ ID NO: 2065478
cauaagaagaauaacucgu

SEQ ID NO: 2065480 - RNA, 19 nt, Artificial Sequence
  Description of Artificial Sequence: Synthetic oligonucleotide
  Sense strand starting at position 860 of SEQ ID NO: 1881707
gaguuauucuucuuaugug

SEQ ID NO: 2065481 - RNA, 19 nt, Artificial Sequence
  Description of Artificial Sequence: Synthetic oligonucleotide
  Antisense strand to SEQ ID NO: 2065480
cacauaagaagaauaacuc

SEQ ID NO: 2065482 - RNA, 19 nt, Artificial Sequence
  Description of Artificial Sequence: Synthetic oligonucleotide
  Sense strand starting at position 868 of SEQ ID NO: 1881707
cuucuuaugugagcaauua

SEQ ID NO: 2065483 - RNA, 19 nt, Artificial Sequence
  Description of Artificial Sequence: Synthetic oligonucleotide
  Antisense strand to SEQ ID NO: 2065482
uaauugcucacauaagaag

SEQ ID NO: 2065484 - RNA, 19 nt, Artificial Sequence
  Description of Artificial Sequence: Synthetic oligonucleotide
  Sense strand starting at position 1413 of SEQ ID NO: 1881707
aggaaugagucuuuaguac

SEQ ID NO: 2065485 - RNA, 19 nt, Artificial Sequence
  Description of Artificial Sequence: Synthetic oligonucleotide
  Antisense strand to SEQ ID NO: 2065484
guacuaaagacucauuccu

SEQ ID NO: 2065486 - RNA, 19 nt, Artificial Sequence
  Description of Artificial Sequence: Synthetic oligonucleotide
  Sense strand starting at position 1532 of SEQ ID NO: 1881707
uacugaaucguacaucuag

SEQ ID NO: 2065487 - RNA, 19 nt, Artificial Sequence
  Description of Artificial Sequence: Synthetic oligonucleotide
  Antisense strand to SEQ ID NO: 2065486
cuagauguacgauucagua

SEQ ID NO: 2065488 - RNA, 19 nt, Artificial Sequence
  Description of Artificial Sequence: Synthetic oligonucleotide
  Sense strand starting at position 1560 of SEQ ID NO: 1881707
gcaugaccuaauugucgaa

SEQ ID NO: 2065489 - RNA, 19 nt, Artificial Sequence
  Description of Artificial Sequence: Synthetic oligonucleotide
  Antisense strand to SEQ ID NO: 2065488
uucgacaauuaggucaugc

SEQ ID NO: 2065490 - RNA, 19 nt, Artificial Sequence
  Description of Artificial Sequence: Synthetic oligonucleotide
  Sense strand starting at position 1567 of SEQ ID NO: 1881707
cuaauugucgaacagguau

SEQ ID NO: 2065491 - RNA, 19 nt, Artificial Sequence
  Description of Artificial Sequence: Synthetic oligonucleotide
  Antisense strand to SEQ ID NO: 2065490
auaccuguucgacaauuag

SEQ ID NO: 2065492 - RNA, 19 nt, Artificial Sequence
  Description of Artificial Sequence: Synthetic oligonucleotide
  Sense strand starting at position 1586 of SEQ ID NO: 1881707
ugagguacuugcuuuccau

SEQ ID NO: 2065493 - RNA, 19 nt, Artificial Sequence
  Description of Artificial Sequence: Synthetic oligonucleotide
  Antisense strand to SEQ ID NO: 2065492
auggaaagcaaguaccuca

SEQ ID NO: 2065494 - RNA, 19 nt, Artificial Sequence
  Description of Artificial Sequence: Synthetic oligonucleotide
  Sense strand starting at position 1599 of SEQ ID NO: 1881707
uuccaucgaucccuguaau

SEQ ID NO: 2065495 - RNA, 19 nt, Artificial Sequence
  Description of Artificial Sequence: Synthetic oligonucleotide
  Antisense strand to SEQ ID NO: 2065494
auuacagggaucgauggaa

SEQ ID NO: 2065496 - RNA, 19 nt, Artificial Sequence
  Description of Artificial Sequence: Synthetic oligonucleotide
  Sense strand starting at position 1600 of SEQ ID NO: 1881707
uccaucgaucccuguaaug

SEQ ID NO: 2065497 - RNA, 19 nt, Artificial Sequence
  Description of Artificial Sequence: Synthetic oligonucleotide
  Antisense strand to SEQ ID NO: 2065496
cauuacagggaucgaugga

SEQ ID NO: 2065498 - RNA, 19 nt, Artificial Sequence
  Description of Artificial Sequence: Synthetic oligonucleotide
  Sense strand starting at position 1611 of SEQ ID NO: 1881707
cuguaaugccauugacacu

SEQ ID NO: 2065499 - RNA, 19 nt, Artificial Sequence
  Description of Artificial Sequence: Synthetic oligonucleotide
  Antisense strand to SEQ ID NO: 2065498
agugucaauggcauuacag

SEQ ID NO: 2065500 - RNA, 19 nt, Artificial Sequence
  Description of Artificial Sequence: Synthetic oligonucleotide
  Sense strand starting at position 1617 of SEQ ID NO: 1881707
ugccauugacacugacuua

SEQ ID NO: 2065501 - RNA, 19 nt, Artificial Sequence
  Description of Artificial Sequence: Synthetic oligonucleotide
  Antisense strand to SEQ ID NO: 2065500
uaagucagugucaauggca

SEQ ID NO: 2065502 - RNA, 19 nt, Artificial Sequence
  Description of Artificial Sequence: Synthetic oligonucleotide
  Sense strand starting at position 1671 of SEQ ID NO: 1881707
uggguuagacucugaaaua

SEQ ID NO: 2065503 - RNA, 19 nt, Artificial Sequence
  Description of Artificial Sequence: Synthetic oligonucleotide
  Antisense strand to SEQ ID NO: 2065502
uauuucagagucuaaccca

SEQ ID NO: 2065504 - RNA, 19 nt, Artificial Sequence
  Description of Artificial Sequence: Synthetic oligonucleotide
  Sense strand starting at position 1682 of SEQ ID NO: 1881707
cugaaauaaucuuugagua

SEQ ID NO: 2065505 - RNA, 19 nt, Artificial Sequence
  Description of Artificial Sequence: Synthetic oligonucleotide
  Antisense strand to SEQ ID NO: 2065504
uacucaaagauuauuucag

SEQ ID NO: 2065506 - RNA, 19 nt, Artificial Sequence
  Description of Artificial Sequence: Synthetic oligonucleotide
  Sense strand starting at position 3027 of SEQ ID NO: 1881707
gagagugugccuuaagagc

SEQ ID NO: 2065507 - RNA, 19 nt, Artificial Sequence
  Description of Artificial Sequence: Synthetic oligonucleotide
  Antisense strand to SEQ ID NO: 2065506
gcucuuaaggcacacucuc

SEQ ID NO: 2065508 - RNA, 19 nt, Artificial Sequence
  Description of Artificial Sequence: Synthetic oligonucleotide
  Sense strand starting at position 3210 of SEQ ID NO: 1881707
auucuugaagccggugaga

SEQ ID NO: 2065509 - RNA, 19 nt, Artificial Sequence
  Description of Artificial Sequence: Synthetic oligonucleotide
  Antisense strand to SEQ ID NO: 2065508
ucucaccggcuucaagaau

SEQ ID NO: 2065510 - RNA, 19 nt, Artificial Sequence
  Description of Artificial Sequence: Synthetic oligonucleotide
  Sense strand starting at position 3252 of SEQ ID NO: 1881707
acacuaucgaaguguaguu

SEQ ID NO: 2065511 - RNA, 19 nt, Artificial Sequence
  Description of Artificial Sequence: Synthetic oligonucleotide
  Antisense strand to SEQ ID NO: 2065510
aacuacacuucgauagugu

SEQ ID NO: 2065512 - RNA, 19 nt, Artificial Sequence
  Description of Artificial Sequence: Synthetic oligonucleotide
  Sense strand starting at position 3257 of SEQ ID NO: 1881707
aucgaaguguaguuauuau

SEQ ID NO: 2065513 - RNA, 19 nt, Artificial Sequence
  Description of Artificial Sequence: Synthetic oligonucleotide
  Antisense strand to SEQ ID NO: 2065512
auaauaacuacacuucgau

SEQ ID NO: 2065514 - RNA, 19 nt, Artificial Sequence
  Description of Artificial Sequence: Synthetic oligonucleotide
  Sense strand starting at position 3385 of SEQ ID NO: 1881707
ggcucagauuacucaucca

SEQ ID NO: 2065515 - RNA, 19 nt, Artificial Sequence
  Description of Artificial Sequence: Synthetic oligonucleotide
  Antisense strand to SEQ ID NO: 2065514
uggaugaguaaucugagcc

SEQ ID NO: 2065516 - RNA, 19 nt, Artificial Sequence
  Description of Artificial Sequence: Synthetic oligonucleotide
  Sense strand starting at position 3417 of SEQ ID NO: 1881707
cugaguugauuccugagca

SEQ ID NO: 2065517 - RNA, 19 nt, Artificial Sequence
  Description of Artificial Sequence: Synthetic oligonucleotide
  Antisense strand to SEQ ID NO: 2065516
ugcucaggaaucaacucag

SEQ ID NO: 2065518 - RNA, 19 nt, Artificial Sequence
  Description of Artificial Sequence: Synthetic oligonucleotide
  Sense strand starting at position 3421 of SEQ ID NO: 1881707
guugauuccugagcaacau

SEQ ID NO: 2065519 - RNA, 19 nt, Artificial Sequence
  Description of Artificial Sequence: Synthetic oligonucleotide
  Antisense strand to SEQ ID NO: 2065518
auguugcucaggaaucaac

SEQ ID NO: 2065520 - RNA, 19 nt, Artificial Sequence
  Description of Artificial Sequence: Synthetic oligonucleotide
  Sense strand starting at position 3422 of SEQ ID NO: 1881707
uugauuccugagcaacauu

SEQ ID NO: 2065521 - RNA, 19 nt, Artificial Sequence
  Description of Artificial Sequence: Synthetic oligonucleotide
  Antisense strand to SEQ ID NO: 2065520
aauguugcucaggaaucaa

SEQ ID NO: 2065522 - RNA, 19 nt, Artificial Sequence
  Description of Artificial Sequence: Synthetic oligonucleotide
  Sense strand starting at position 3506 of SEQ ID NO: 1881707
gggauuaagugaguauaua

SEQ ID NO: 2065523 - RNA, 19 nt, Artificial Sequence
  Description of Artificial Sequence: Synthetic oligonucleotide
  Antisense strand to SEQ ID NO: 2065522
uauauacucacuuaauccc

SEQ ID NO: 2065524 - RNA, 19 nt, Artificial Sequence
  Description of Artificial Sequence: Synthetic oligonucleotide
  Sense strand starting at position 3721 of SEQ ID NO: 1881707
auaaauccucccgaggcaa

SEQ ID NO: 2065525 - RNA, 19 nt, Artificial Sequence
  Description of Artificial Sequence: Synthetic oligonucleotide
  Antisense strand to SEQ ID NO: 2065524
uugccucgggaggauuuau

SEQ ID NO: 2065526 - RNA, 19 nt, Artificial Sequence
  Description of Artificial Sequence: Synthetic oligonucleotide
  Sense strand starting at position 3757 of SEQ ID NO: 1881707
acauauggcaguuggaaga

SEQ ID NO: 2065527 - RNA, 19 nt, Artificial Sequence
  Description of Artificial Sequence: Synthetic oligonucleotide
  Antisense strand to SEQ ID NO: 2065526
ucuuccaacugccauaugu

SEQ ID NO: 2065528 - RNA, 19 nt, Artificial Sequence
  Description of Artificial Sequence: Synthetic oligonucleotide
  Sense strand starting at position 3846 of SEQ ID NO: 1881707
aucacauggcccugagauc

SEQ ID NO: 2065529 - RNA, 19 nt, Artificial Sequence
  Description of Artificial Sequence: Synthetic oligonucleotide
  Antisense strand to SEQ ID NO: 2065528
gaucucagggccaugugau

SEQ ID NO: 2065530 - RNA, 19 nt, Artificial Sequence
  Description of Artificial Sequence: Synthetic oligonucleotide
  Sense strand starting at position 7 of SEQ ID NO: 1881708
gcucauauaguuuaccuau

SEQ ID NO: 2065531 - RNA, 19 nt, Artificial Sequence
  Description of Artificial Sequence: Synthetic oligonucleotide
  Antisense strand to SEQ ID NO: 2065530
auagguaaacuauaugagc

SEQ ID NO: 2065532 - RNA, 19 nt, Artificial Sequence
  Description of Artificial Sequence: Synthetic oligonucleotide
  Sense strand starting at position 57 of SEQ ID NO: 1881708
ucauaagaacagcgaucuu

SEQ ID NO: 2065533 - RNA, 19 nt, Artificial Sequence
  Description of Artificial Sequence: Synthetic oligonucleotide
  Antisense strand to SEQ ID NO: 2065532
aagaucgcuguucuuauga

SEQ ID NO: 2065534 - RNA, 19 nt, Artificial Sequence
  Description of Artificial Sequence: Synthetic oligonucleotide
  Sense strand starting at position 404 of SEQ ID NO: 1881708
guguuuaaacaggaugagu

SEQ ID NO: 2065535 - RNA, 19 nt, Artificial Sequence
  Description of Artificial Sequence: Synthetic oligonucleotide
  Antisense strand to SEQ ID NO: 2065534
acucauccuguuuaaacac

SEQ ID NO: 2065536 - RNA, 19 nt, Artificial Sequence
  Description of Artificial Sequence: Synthetic oligonucleotide
  Sense strand starting at position 494 of SEQ ID NO: 1881708
auuuccuugugucuaguaa

SEQ ID NO: 2065537 - RNA, 19 nt, Artificial Sequence
  Description of Artificial Sequence: Synthetic oligonucleotide
  Antisense strand to SEQ ID NO: 2065536
uuacuagacacaaggaaau

SEQ ID NO: 2065538 - RNA, 19 nt, Artificial Sequence
  Description of Artificial Sequence: Synthetic oligonucleotide
  Sense strand starting at position 495 of SEQ ID NO: 1881708
uuuccuugugucuaguaau

SEQ ID NO: 2065539 - RNA, 19 nt, Artificial Sequence
  Description of Artificial Sequence: Synthetic oligonucleotide
  Antisense strand to SEQ ID NO: 2065538
auuacuagacacaaggaaa

SEQ ID NO: 2065540 - RNA, 19 nt, Artificial Sequence
  Description of Artificial Sequence: Synthetic oligonucleotide
  Sense strand starting at position 507 of SEQ ID NO: 1881708
uaguaauuggcaggaccuu

SEQ ID NO: 2065541 - RNA, 19 nt, Artificial Sequence
  Description of Artificial Sequence: Synthetic oligonucleotide
  Antisense strand to SEQ ID NO: 2065540
aagguccugccaauuacua

SEQ ID NO: 2065542 - RNA, 19 nt, Artificial Sequence
  Description of Artificial Sequence: Synthetic oligonucleotide
  Sense strand starting at position 688 of SEQ ID NO: 1881708
ggacaauaccuaugaaugc

SEQ ID NO: 2065543 - RNA, 19 nt, Artificial Sequence
  Description of Artificial Sequence: Synthetic oligonucleotide
  Antisense strand to SEQ ID NO: 2065542
gcauucauagguauugucc

SEQ ID NO: 2065544 - RNA, 19 nt, Artificial Sequence
  Description of Artificial Sequence: Synthetic oligonucleotide
  Sense strand starting at position 761 of SEQ ID NO: 1881708
ugacaauaauaagugucau

SEQ ID NO: 2065545 - RNA, 19 nt, Artificial Sequence
  Description of Artificial Sequence: Synthetic oligonucleotide
  Antisense strand to SEQ ID NO: 2065544
augacacuuauuauuguca

SEQ ID NO: 2065546 - RNA, 19 nt, Artificial Sequence
  Description of Artificial Sequence: Synthetic oligonucleotide
  Sense strand starting at position 787 of SEQ ID NO: 1881708
gcuucuguugcacacauaa

SEQ ID NO: 2065547 - RNA, 19 nt, Artificial Sequence
  Description of Artificial Sequence: Synthetic oligonucleotide
  Antisense strand to SEQ ID NO: 2065546
uuaugugugcaacagaagc

SEQ ID NO: 2065548 - RNA, 19 nt, Artificial Sequence
  Description of Artificial Sequence: Synthetic oligonucleotide
  Sense strand starting at position 1126 of SEQ ID NO: 1881708
agaggauuaugccugagcu

SEQ ID NO: 2065549 - RNA, 19 nt, Artificial Sequence
  Description of Artificial Sequence: Synthetic oligonucleotide
  Antisense strand to SEQ ID NO: 2065548
agcucaggcauaauccucu

SEQ ID NO: 2065550 - RNA, 19 nt, Artificial Sequence
  Description of Artificial Sequence: Synthetic oligonucleotide
  Sense strand starting at position 1127 of SEQ ID NO: 1881708
gaggauuaugccugagcuc

SEQ ID NO: 2065551 - RNA, 19 nt, Artificial Sequence
  Description of Artificial Sequence: Synthetic oligonucleotide
  Antisense strand to SEQ ID NO: 2065550
gagcucaggcauaauccuc

SEQ ID NO: 2065552 - RNA, 19 nt, Artificial Sequence
  Description of Artificial Sequence: Synthetic oligonucleotide
  Sense strand starting at position 1161 of SEQ ID NO: 1881708
gagcaaaggcauuagauuc

SEQ ID NO: 2065553 - RNA, 19 nt, Artificial Sequence
  Description of Artificial Sequence: Synthetic oligonucleotide
  Antisense strand to SEQ ID NO: 2065552
gaaucuaaugccuuugcuc

SEQ ID NO: 2065554 - RNA, 19 nt, Artificial Sequence
  Description of Artificial Sequence: Synthetic oligonucleotide
  Sense strand starting at position 1185 of SEQ ID NO: 1881708
ggagcacagaccugauuau

SEQ ID NO: 2065555 - RNA, 19 nt, Artificial Sequence
  Description of Artificial Sequence: Synthetic oligonucleotide
  Antisense strand to SEQ ID NO: 2065554
auaaucaggucugugcucc

SEQ ID NO: 2065556 - RNA, 19 nt, Artificial Sequence
  Description of Artificial Sequence: Synthetic oligonucleotide
  Sense strand starting at position 1231 of SEQ ID NO: 1881708
gcgccuucucaagagaauc

SEQ ID NO: 2065557 - RNA, 19 nt, Artificial Sequence
  Description of Artificial Sequence: Synthetic oligonucleotide
  Antisense strand to SEQ ID NO: 2065556
gauucucuugagaaggcgc

SEQ ID NO: 2065558 - RNA, 19 nt, Artificial Sequence
  Description of Artificial Sequence: Synthetic oligonucleotide
  Sense strand starting at position 1266 of SEQ ID NO: 1881708
gagauagaagagugucauc

SEQ ID NO: 2065559 - RNA, 19 nt, Artificial Sequence
  Description of Artificial Sequence: Synthetic oligonucleotide
  Antisense strand to SEQ ID NO: 2065558
gaugacacucuucuaucuc

SEQ ID NO: 2065560 - RNA, 19 nt, Artificial Sequence
  Description of Artificial Sequence: Synthetic oligonucleotide
  Sense strand starting at position 1271 of SEQ ID NO: 1881708
agaagagugucaucccauc

SEQ ID NO: 2065561 - RNA, 19 nt, Artificial Sequence
  Description of Artificial Sequence: Synthetic oligonucleotide
  Antisense strand to SEQ ID NO: 2065560
gaugggaugacacucuucu

SEQ ID NO: 2065562 - RNA, 19 nt, Artificial Sequence
  Description of Artificial Sequence: Synthetic oligonucleotide
  Sense strand starting at position 1494 of SEQ ID NO: 1881708
aagguuuauuugcagggau

SEQ ID NO: 2065563 - RNA, 19 nt, Artificial Sequence
  Description of Artificial Sequence: Synthetic oligonucleotide
  Antisense strand to SEQ ID NO: 2065562
aucccugcaaauaaaccuu

SEQ ID NO: 2065564 - RNA, 19 nt, Artificial Sequence
  Description of Artificial Sequence: Synthetic oligonucleotide
  Sense strand starting at position 1527 of SEQ ID NO: 1881708
auaguacacgcuuaauaaa

SEQ ID NO: 2065565 - RNA, 19 nt, Artificial Sequence
  Description of Artificial Sequence: Synthetic oligonucleotide
  Antisense strand to SEQ ID NO: 2065564
uuuauuaagcguguacuau

SEQ ID NO: 2065566 - RNA, 19 nt, Artificial Sequence
  Description of Artificial Sequence: Synthetic oligonucleotide
  Sense strand starting at position 1590 of SEQ ID NO: 1881708
acuggcgaguauuuguaaa

SEQ ID NO: 2065567 - RNA, 19 nt, Artificial Sequence
  Description of Artificial Sequence: Synthetic oligonucleotide
  Antisense strand to SEQ ID NO: 2065566
uuuacaaauacucgccagu

SEQ ID NO: 2065568 - RNA, 19 nt, Artificial Sequence
  Description of Artificial Sequence: Synthetic oligonucleotide
  Sense strand starting at position 2120 of SEQ ID NO: 1881708
gucucuucugaauauugac

SEQ ID NO: 2065569 - RNA, 19 nt, Artificial Sequence
  Description of Artificial Sequence: Synthetic oligonucleotide
  Antisense strand to SEQ ID NO: 2065568
gucaauauucagaagagac

SEQ ID NO: 2065570 - RNA, 19 nt, Artificial Sequence
  Description of Artificial Sequence: Synthetic oligonucleotide
  Sense strand starting at position 2130 of SEQ ID NO: 1881708
aauauugacucaucggguu

SEQ ID NO: 2065571 - RNA, 19 nt, Artificial Sequence
  Description of Artificial Sequence: Synthetic oligonucleotide
  Antisense strand to SEQ ID NO: 2065570
aacccgaugagucaauauu

SEQ ID NO: 2065572 - RNA, 19 nt, Artificial Sequence
  Description of Artificial Sequence: Synthetic oligonucleotide
  Sense strand starting at position 2136 of SEQ ID NO: 1881708
gacucaucggguuguagaa

SEQ ID NO: 2065573 - RNA, 19 nt, Artificial Sequence
  Description of Artificial Sequence: Synthetic oligonucleotide
  Antisense strand to SEQ ID NO: 2065572
uucuacaacccgaugaguc

SEQ ID NO: 2065574 - RNA, 19 nt, Artificial Sequence
  Description of Artificial Sequence: Synthetic oligonucleotide
  Sense strand starting at position 2211 of SEQ ID NO: 1881708
cugcaugugccagaaguaa

SEQ ID NO: 2065575 - RNA, 19 nt, Artificial Sequence
  Description of Artificial Sequence: Synthetic oligonucleotide
  Antisense strand to SEQ ID NO: 2065574
uuacuucuggcacaugcag

SEQ ID NO: 2065576 - RNA, 19 nt, Artificial Sequence
  Description of Artificial Sequence: Synthetic oligonucleotide
  Sense strand starting at position 2268 of SEQ ID NO: 1881708
cuuaaagugcaaugguaga

SEQ ID NO: 2065577 - RNA, 19 nt, Artificial Sequence
  Description of Artificial Sequence: Synthetic oligonucleotide
  Antisense strand to SEQ ID NO: 2065576
ucuaccauugcacuuuaag

SEQ ID NO: 2065578 - RNA, 19 nt, Artificial Sequence
  Description of Artificial Sequence: Synthetic oligonucleotide
  Sense strand starting at position 2436 of SEQ ID NO: 1881708
auggcaagugucuggaaca

SEQ ID NO: 2065579 - RNA, 19 nt, Artificial Sequence
  Description of Artificial Sequence: Synthetic oligonucleotide
  Antisense strand to SEQ ID NO: 2065578
uguuccagacacuugccau

SEQ ID NO: 2065580 - RNA, 19 nt, Artificial Sequence
  Description of Artificial Sequence: Synthetic oligonucleotide
  Sense strand starting at position 2546 of SEQ ID NO: 1881708
uggaaaguuguaugugaaa

SEQ ID NO: 2065581 - RNA, 19 nt, Artificial Sequence
  Description of Artificial Sequence: Synthetic oligonucleotide
  Antisense strand to SEQ ID NO: 2065580
uuucacauacaacuuucca

SEQ ID NO: 2065582 - RNA, 19 nt, Artificial Sequence
  Description of Artificial Sequence: Synthetic oligonucleotide
  Sense strand starting at position 2548 of SEQ ID NO: 1881708
gaaaguuguaugugaaaga

SEQ ID NO: 2065583 - RNA, 19 nt, Artificial Sequence
  Description of Artificial Sequence: Synthetic oligonucleotide
  Antisense strand to SEQ ID NO: 2065582
ucuuucacauacaacuuuc

SEQ ID NO: 2065584 - RNA, 19 nt, Artificial Sequence
  Description of Artificial Sequence: Synthetic oligonucleotide
  Sense strand starting at position 2617 of SEQ ID NO: 1881708
gucccaaaguuuccaguaa

SEQ ID NO: 2065585 - RNA, 19 nt, Artificial Sequence
  Description of Artificial Sequence: Synthetic oligonucleotide
  Antisense strand to SEQ ID NO: 2065584
uuacuggaaacuuugggac

SEQ ID NO: 2065586 - RNA, 19 nt, Artificial Sequence
  Description of Artificial Sequence: Synthetic oligonucleotide
  Sense strand starting at position 2684 of SEQ ID NO: 1881708
aguguaaacuucuuagaaa

SEQ ID NO: 2065587 - RNA, 19 nt, Artificial Sequence
  Description of Artificial Sequence: Synthetic oligonucleotide
  Antisense strand to SEQ ID NO: 2065586
uuucuaagaaguuuacacu

SEQ ID NO: 2065588 - RNA, 19 nt, Artificial Sequence
  Description of Artificial Sequence: Synthetic oligonucleotide
  Sense strand starting at position 2775 of SEQ ID NO: 1881708
ugccucagugcguucugua

SEQ ID NO: 2065589 - RNA, 19 nt, Artificial Sequence
  Description of Artificial Sequence: Synthetic oligonucleotide
  Antisense strand to SEQ ID NO: 2065588
uacagaacgcacugaggca

SEQ ID NO: 2065590 - RNA, 19 nt, Artificial Sequence
  Description of Artificial Sequence: Synthetic oligonucleotide
  Sense strand starting at position 2776 of SEQ ID NO: 1881708
gccucagugcguucuguaa

SEQ ID NO: 2065591 - RNA, 19 nt, Artificial Sequence
  Description of Artificial Sequence: Synthetic oligonucleotide
  Antisense strand to SEQ ID NO: 2065590
uuacagaacgcacugaggc

SEQ ID NO: 2065592 - RNA, 19 nt, Artificial Sequence
  Description of Artificial Sequence: Synthetic oligonucleotide
  Sense strand starting at position 2795 of SEQ ID NO: 1881708
aguuaauuccucuaccgga

SEQ ID NO: 2065593 - RNA, 19 nt, Artificial Sequence
  Description of Artificial Sequence: Synthetic oligonucleotide
  Antisense strand to SEQ ID NO: 2065592
uccgguagaggaauuaacu

SEQ ID NO: 2065594 - RNA, 19 nt, Artificial Sequence
  Description of Artificial Sequence: Synthetic oligonucleotide
  Sense strand starting at position 2860 of SEQ ID NO: 1881708
uuccuucuuggguaacuua

SEQ ID NO: 2065595 - RNA, 19 nt, Artificial Sequence
  Description of Artificial Sequence: Synthetic oligonucleotide
  Antisense strand to SEQ ID NO: 2065594
uaaguuacccaagaaggaa

SEQ ID NO: 2065596 - RNA, 19 nt, Artificial Sequence
  Description of Artificial Sequence: Synthetic oligonucleotide
  Sense strand starting at position 2863 of SEQ ID NO: 1881708
cuucuuggguaacuuaaau

SEQ ID NO: 2065597 - RNA, 19 nt, Artificial Sequence
  Description of Artificial Sequence: Synthetic oligonucleotide
  Antisense strand to SEQ ID NO: 2065596
auuuaaguuacccaagaag

SEQ ID NO: 2065598 - RNA, 19 nt, Artificial Sequence
  Description of Artificial Sequence: Synthetic oligonucleotide
  Sense strand starting at position 3262 of SEQ ID NO: 1881708
cucguuucaggagaguaga

SEQ ID NO: 2065599 - RNA, 19 nt, Artificial Sequence
  Description of Artificial Sequence: Synthetic oligonucleotide
  Antisense strand to SEQ ID NO: 2065598
ucuacucuccugaaacgag

SEQ ID NO: 2065600 - RNA, 19 nt, Artificial Sequence
  Description of Artificial Sequence: Synthetic oligonucleotide
  Sense strand starting at position 3356 of SEQ ID NO: 1881708
gcagguagaucccuaaaga

SEQ ID NO: 2065601 - RNA, 19 nt, Artificial Sequence
  Description of Artificial Sequence: Synthetic oligonucleotide
  Antisense strand to SEQ ID NO: 2065600
ucuuuagggaucuaccugc

SEQ ID NO: 2065602 - RNA, 19 nt, Artificial Sequence
  Description of Artificial Sequence: Synthetic oligonucleotide
  Sense strand starting at position 3478 of SEQ ID NO: 1881708
uggagagguaagugcuuua

SEQ ID NO: 2065603 - RNA, 19 nt, Artificial Sequence
  Description of Artificial Sequence: Synthetic oligonucleotide
  Antisense strand to SEQ ID NO: 2065602
uaaagcacuuaccucucca

SEQ ID NO: 2065604 - RNA, 19 nt, Artificial Sequence
  Description of Artificial Sequence: Synthetic oligonucleotide
  Sense strand starting at position 3542 of SEQ ID NO: 1881708
uggaauucucaccaggcca

SEQ ID NO: 2065605 - RNA, 19 nt, Artificial Sequence
  Description of Artificial Sequence: Synthetic oligonucleotide
  Antisense strand to SEQ ID NO: 2065604
uggccuggugagaauucca

SEQ ID NO: 2065606 - RNA, 19 nt, Artificial Sequence
  Description of Artificial Sequence: Synthetic oligonucleotide
  Sense strand starting at position 3637 of SEQ ID NO: 1881708
ccacuuguuacagagaggu

SEQ ID NO: 2065607 - RNA, 19 nt, Artificial Sequence
  Description of Artificial Sequence: Synthetic oligonucleotide
  Antisense strand to SEQ ID NO: 2065606
accucucuguaacaagugg

SEQ ID NO: 2065608 - RNA, 19 nt, Artificial Sequence
  Description of Artificial Sequence: Synthetic oligonucleotide
  Sense strand starting at position 3641 of SEQ ID NO: 1881708
uuguuacagagagguacau

SEQ ID NO: 2065609 - RNA, 19 nt, Artificial Sequence
  Description of Artificial Sequence: Synthetic oligonucleotide
  Antisense strand to SEQ ID NO: 2065608
auguaccucucuguaacaa

SEQ ID NO: 2065610 - RNA, 19 nt, Artificial Sequence
  Description of Artificial Sequence: Synthetic oligonucleotide
  Sense strand starting at position 37 of SEQ ID NO: 1881709
ggcaguuuccacuaaggcu

SEQ ID NO: 2065611 - RNA, 19 nt, Artificial Sequence
  Description of Artificial Sequence: Synthetic oligonucleotide
  Antisense strand to SEQ ID NO: 2065610
agccuuaguggaaacugcc

SEQ ID NO: 2065612 - RNA, 19 nt, Artificial Sequence
  Description of Artificial Sequence: Synthetic oligonucleotide
  Sense strand starting at position 49 of SEQ ID NO: 1881709
uaaggcuugucucuaaaug

SEQ ID NO: 2065613 - RNA, 19 nt, Artificial Sequence
  Description of Artificial Sequence: Synthetic oligonucleotide
  Antisense strand to SEQ ID NO: 2065612
cauuuagagacaagccuua

SEQ ID NO: 2065614 - RNA, 19 nt, Artificial Sequence
  Description of Artificial Sequence: Synthetic oligonucleotide
  Sense strand starting at position 50 of SEQ ID NO: 1881709
aaggcuugucucuaaaugu

SEQ ID NO: 2065615 - RNA, 19 nt, Artificial Sequence
  Description of Artificial Sequence: Synthetic oligonucleotide
  Antisense strand to SEQ ID NO: 2065614
acauuuagagacaagccuu

SEQ ID NO: 2065616 - RNA, 19 nt, Artificial Sequence
  Description of Artificial Sequence: Synthetic oligonucleotide
  Sense strand starting at position 85 of SEQ ID NO: 1881709
uguaauccugcccagauca

SEQ ID NO: 2065617 - RNA, 19 nt, Artificial Sequence
  Description of Artificial Sequence: Synthetic oligonucleotide
  Antisense strand to SEQ ID NO: 2065616
ugaucugggcaggauuaca

SEQ ID NO: 2065618 - RNA, 19 nt, Artificial Sequence
  Description of Artificial Sequence: Synthetic oligonucleotide
  Sense strand starting at position 321 of SEQ ID NO: 1881709
acaugugugaaguaugguu

SEQ ID NO: 2065619 - RNA, 19 nt, Artificial Sequence
  Description of Artificial Sequence: Synthetic oligonucleotide
  Antisense strand to SEQ ID NO: 2065618
aaccauacuucacacaugu

SEQ ID NO: 2065620 - RNA, 19 nt, Artificial Sequence
  Description of Artificial Sequence: Synthetic oligonucleotide
  Sense strand starting at position 330 of SEQ ID NO: 1881709
aaguaugguuacguggaaa

SEQ ID NO: 2065621 - RNA, 19 nt, Artificial Sequence
  Description of Artificial Sequence: Synthetic oligonucleotide
  Antisense strand to SEQ ID NO: 2065620
uuuccacguaaccauacuu

SEQ ID NO: 2065622 - RNA, 19 nt, Artificial Sequence
  Description of Artificial Sequence: Synthetic oligonucleotide
  Sense strand starting at position 333 of SEQ ID NO: 1881709
uaugguuacguggaaauga

SEQ ID NO: 2065623 - RNA, 19 nt, Artificial Sequence
  Description of Artificial Sequence: Synthetic oligonucleotide
  Antisense strand to SEQ ID NO: 2065622
ucauuuccacguaaccaua

SEQ ID NO: 2065624 - RNA, 19 nt, Artificial Sequence
  Description of Artificial Sequence: Synthetic oligonucleotide
  Sense strand starting at position 372 of SEQ ID NO: 1881709
gggaaauccuacuugguaa

SEQ ID NO: 2065625 - RNA, 19 nt, Artificial Sequence
  Description of Artificial Sequence: Synthetic oligonucleotide
  Antisense strand to SEQ ID NO: 2065624
uuaccaaguaggauuuccc

SEQ ID NO: 2065626 - RNA, 19 nt, Artificial Sequence
  Description of Artificial Sequence: Synthetic oligonucleotide
  Sense strand starting at position 384 of SEQ ID NO: 1881709
uugguaauaugcuccauau

SEQ ID NO: 2065627 - RNA, 19 nt, Artificial Sequence
  Description of Artificial Sequence: Synthetic oligonucleotide
  Antisense strand to SEQ ID NO: 2065626
auauggagcauauuaccaa

SEQ ID NO: 2065628 - RNA, 19 nt, Artificial Sequence
  Description of Artificial Sequence: Synthetic oligonucleotide
  Sense strand starting at position 386 of SEQ ID NO: 1881709
gguaauaugcuccauauac

SEQ ID NO: 2065629 - RNA, 19 nt, Artificial Sequence
  Description of Artificial Sequence: Synthetic oligonucleotide
  Antisense strand to SEQ ID NO: 2065628
guauauggagcauauuacc

SEQ ID NO: 2065630 - RNA, 19 nt, Artificial Sequence
  Description of Artificial Sequence: Synthetic oligonucleotide
  Sense strand starting at position 800 of SEQ ID NO: 1881709
caaguccuugcugagugaa

SEQ ID NO: 2065631 - RNA, 19 nt, Artificial Sequence
  Description of Artificial Sequence: Synthetic oligonucleotide
  Antisense strand to SEQ ID NO: 2065630
uucacucagcaaggacuug

SEQ ID NO: 2065632 - RNA, 19 nt, Artificial Sequence
  Description of Artificial Sequence: Synthetic oligonucleotide
  Sense strand starting at position 827 of SEQ ID NO: 1881709
ugauaacuauucucuguga

SEQ ID NO: 2065633 - RNA, 19 nt, Artificial Sequence
  Description of Artificial Sequence: Synthetic oligonucleotide
  Antisense strand to SEQ ID NO: 2065632
ucacagagaauaguuauca

SEQ ID NO: 2065634 - RNA, 19 nt, Artificial Sequence
  Description of Artificial Sequence: Synthetic oligonucleotide
  Sense strand starting at position 840 of SEQ ID NO: 1881709
cugugacuuguggagaaug

SEQ ID NO: 2065635 - RNA, 19 nt, Artificial Sequence
  Description of Artificial Sequence: Synthetic oligonucleotide
  Antisense strand to SEQ ID NO: 2065634
cauucuccacaagucacag

SEQ ID NO: 2065636 - RNA, 19 nt, Artificial Sequence
  Description of Artificial Sequence: Synthetic oligonucleotide
  Sense strand starting at position 888 of SEQ ID NO: 1881709
ggcuuuaugaagcauagga

SEQ ID NO: 2065637 - RNA, 19 nt, Artificial Sequence
  Description of Artificial Sequence: Synthetic oligonucleotide
  Antisense strand to SEQ ID NO: 2065636
uccuaugcuucauaaagcc

SEQ ID NO: 2065638 - RNA, 19 nt, Artificial Sequence
  Description of Artificial Sequence: Synthetic oligonucleotide
  Sense strand starting at position 996 of SEQ ID NO: 1881709
gcaugugaccuggagguca

SEQ ID NO: 2065639 - RNA, 19 nt, Artificial Sequence
  Description of Artificial Sequence: Synthetic oligonucleotide
  Antisense strand to SEQ ID NO: 2065638
ugaccuccaggucacaugc

SEQ ID NO: 2065640 - RNA, 19 nt, Artificial Sequence
  Description of Artificial Sequence: Synthetic oligonucleotide
  Sense strand starting at position 1139 of SEQ ID NO: 1881709
aacagugaaucugugauag

SEQ ID NO: 2065641 - RNA, 19 nt, Artificial Sequence
  Description of Artificial Sequence: Synthetic oligonucleotide
  Antisense strand to SEQ ID NO: 2065640
cuaucacagauucacuguu

SEQ ID NO: 2065642 - RNA, 19 nt, Artificial Sequence
  Description of Artificial Sequence: Synthetic oligonucleotide
  Sense strand starting at position 1163 of SEQ ID NO: 1881709
cuggguuagucaccagaag

SEQ ID NO: 2065643 - RNA, 19 nt, Artificial Sequence
  Description of Artificial Sequence: Synthetic oligonucleotide
  Antisense strand to SEQ ID NO: 2065642
cuucuggugacuaacccag

SEQ ID NO: 2065644 - RNA, 19 nt, Artificial Sequence
  Description of Artificial Sequence: Synthetic oligonucleotide
  Sense strand starting at position 1164 of SEQ ID NO: 1881709
uggguuagucaccagaagu

SEQ ID NO: 2065645 - RNA, 19 nt, Artificial Sequence
  Description of Artificial Sequence: Synthetic oligonucleotide
  Antisense strand to SEQ ID NO: 2065644
acuucuggugacuaaccca

SEQ ID NO: 2065646 - RNA, 19 nt, Artificial Sequence
  Description of Artificial Sequence: Synthetic oligonucleotide
  Sense strand starting at position 1195 of SEQ ID NO: 1881709
agguucugauauucuuaaa

SEQ ID NO: 2065647 - RNA, 19 nt, Artificial Sequence
  Description of Artificial Sequence: Synthetic oligonucleotide
  Antisense strand to SEQ ID NO: 2065646
uuuaagaauaucagaaccu

SEQ ID NO: 2065648 - RNA, 19 nt, Artificial Sequence
  Description of Artificial Sequence: Synthetic oligonucleotide
  Sense strand starting at position 1327 of SEQ ID NO: 1881709
aguacauuaugaucuugua

SEQ ID NO: 2065649 - RNA, 19 nt, Artificial Sequence
  Description of Artificial Sequence: Synthetic oligonucleotide
  Antisense strand to SEQ ID NO: 2065648
uacaagaucauaauguacu

SEQ ID NO: 2065650 - RNA, 19 nt, Artificial Sequence
  Description of Artificial Sequence: Synthetic oligonucleotide
  Sense strand starting at position 1378 of SEQ ID NO: 1881709
acaagucagucaucucaau

SEQ ID NO: 2065651 - RNA, 19 nt, Artificial Sequence
  Description of Artificial Sequence: Synthetic oligonucleotide
  Antisense strand to SEQ ID NO: 2065650
auugagaugacugacuugu

SEQ ID NO: 2065652 - RNA, 19 nt, Artificial Sequence
  Description of Artificial Sequence: Synthetic oligonucleotide
  Sense strand starting at position 1642 of SEQ ID NO: 1881709
ccuugaggaugccuccaau

SEQ ID NO: 2065653 - RNA, 19 nt, Artificial Sequence
  Description of Artificial Sequence: Synthetic oligonucleotide
  Antisense strand to SEQ ID NO: 2065652
auuggaggcauccucaagg

SEQ ID NO: 2065654 - RNA, 19 nt, Artificial Sequence
  Description of Artificial Sequence: Synthetic oligonucleotide
  Sense strand starting at position 1645 of SEQ ID NO: 1881709
ugaggaugccuccaaucca

SEQ ID NO: 2065655 - RNA, 19 nt, Artificial Sequence
  Description of Artificial Sequence: Synthetic oligonucleotide
  Antisense strand to SEQ ID NO: 2065654
uggauuggaggcauccuca

SEQ ID NO: 2065656 - RNA, 19 nt, Artificial Sequence
  Description of Artificial Sequence: Synthetic oligonucleotide
  Sense strand starting at position 1699 of SEQ ID NO: 1881709
gauugugaucacuggaggu

SEQ ID NO: 2065657 - RNA, 19 nt, Artificial Sequence
  Description of Artificial Sequence: Synthetic oligonucleotide
  Antisense strand to SEQ ID NO: 2065656
accuccagugaucacaauc

SEQ ID NO: 2065658 - RNA, 19 nt, Artificial Sequence
  Description of Artificial Sequence: Synthetic oligonucleotide
  Sense strand starting at position 1701 of SEQ ID NO: 1881709
uugugaucacuggaggugu

SEQ ID NO: 2065659 - RNA, 19 nt, Artificial Sequence
  Description of Artificial Sequence: Synthetic oligonucleotide
  Antisense strand to SEQ ID NO: 2065658
acaccuccagugaucacaa

SEQ ID NO: 2065660 - RNA, 19 nt, Artificial Sequence
  Description of Artificial Sequence: Synthetic oligonucleotide
  Sense strand starting at position 1763 of SEQ ID NO: 1881709
uucugaacuucugugaaug

SEQ ID NO: 2065661 - RNA, 19 nt, Artificial Sequence
  Description of Artificial Sequence: Synthetic oligonucleotide
  Antisense strand to SEQ ID NO: 2065660
cauucacagaaguucagaa

SEQ ID NO: 2065662 - RNA, 19 nt, Artificial Sequence
  Description of Artificial Sequence: Synthetic oligonucleotide
  Sense strand starting at position 1956 of SEQ ID NO: 1881709
ugauuccaucuaugucuga

SEQ ID NO: 2065663 - RNA, 19 nt, Artificial Sequence
  Description of Artificial Sequence: Synthetic oligonucleotide
  Antisense strand to SEQ ID NO: 2065662
ucagacauagauggaauca

SEQ ID NO: 2065664 - RNA, 19 nt, Artificial Sequence
  Description of Artificial Sequence: Synthetic oligonucleotide
  Sense strand starting at position 2694 of SEQ ID NO: 1881709
ucuggaguuagaggugaga

SEQ ID NO: 2065665 - RNA, 19 nt, Artificial Sequence
  Description of Artificial Sequence: Synthetic oligonucleotide
  Antisense strand to SEQ ID NO: 2065664
ucucaccucuaacuccaga

SEQ ID NO: 2065666 - RNA, 19 nt, Artificial Sequence
  Description of Artificial Sequence: Synthetic oligonucleotide
  Sense strand starting at position 3102 of SEQ ID NO: 1881709
ccaagcagacauugcauaa

SEQ ID NO: 2065667 - RNA, 19 nt, Artificial Sequence
  Description of Artificial Sequence: Synthetic oligonucleotide
  Antisense strand to SEQ ID NO: 2065666
uuaugcaaugucugcuugg

SEQ ID NO: 2065668 - RNA, 19 nt, Artificial Sequence
  Description of Artificial Sequence: Synthetic oligonucleotide
  Sense strand starting at position 3106 of SEQ ID NO: 1881709
gcagacauugcauaacucu

SEQ ID NO: 2065669 - RNA, 19 nt, Artificial Sequence
  Description of Artificial Sequence: Synthetic oligonucleotide
  Antisense strand to SEQ ID NO: 2065668
agaguuaugcaaugucugc

SEQ ID NO: 2065670 - RNA, 19 nt, Artificial Sequence
  Description of Artificial Sequence: Synthetic oligonucleotide
  Sense strand starting at position 3208 of SEQ ID NO: 1881709
ggugaacuugcccaagguu

SEQ ID NO: 2065671 - RNA, 19 nt, Artificial Sequence
  Description of Artificial Sequence: Synthetic oligonucleotide
  Antisense strand to SEQ ID NO: 2065670
aaccuugggcaaguucacc

SEQ ID NO: 2065672 - RNA, 19 nt, Artificial Sequence
  Description of Artificial Sequence: Synthetic oligonucleotide
  Sense strand starting at position 3365 of SEQ ID NO: 1881709
cagucacuccagugaagau

SEQ ID NO: 2065673 - RNA, 19 nt, Artificial Sequence
  Description of Artificial Sequence: Synthetic oligonucleotide
  Antisense strand to SEQ ID NO: 2065672
aucuucacuggagugacug

SEQ ID NO: 2065674 - RNA, 19 nt, Artificial Sequence
  Description of Artificial Sequence: Synthetic oligonucleotide
  Sense strand starting at position 3485 of SEQ ID NO: 1881709
aucugugacagugauguaa

SEQ ID NO: 2065675 - RNA, 19 nt, Artificial Sequence
  Description of Artificial Sequence: Synthetic oligonucleotide
  Antisense strand to SEQ ID NO: 2065674
uuacaucacugucacagau

SEQ ID NO: 2065676 - RNA, 19 nt, Artificial Sequence
  Description of Artificial Sequence: Synthetic oligonucleotide
  Sense strand starting at position 3606 of SEQ ID NO: 1881709
gggcaucacaguuaugacu

SEQ ID NO: 2065677 - RNA, 19 nt, Artificial Sequence
  Description of Artificial Sequence: Synthetic oligonucleotide
  Antisense strand to SEQ ID NO: 2065676
agucauaacugugaugccc

SEQ ID NO: 2065678 - RNA, 19 nt, Artificial Sequence
  Description of Artificial Sequence: Synthetic oligonucleotide
  Sense strand starting at position 3708 of SEQ ID NO: 1881709
uuuggauucuguuccuaac

SEQ ID NO: 2065679 - RNA, 19 nt, Artificial Sequence
  Description of Artificial Sequence: Synthetic oligonucleotide
  Antisense strand to SEQ ID NO: 2065678
guuaggaacagaauccaaa

SEQ ID NO: 2065680 - RNA, 19 nt, Artificial Sequence
  Description of Artificial Sequence: Synthetic oligonucleotide
  Sense strand starting at position 3736 of SEQ ID NO: 1881709
cuguccuguucucuaauuu

SEQ ID NO: 2065681 - RNA, 19 nt, Artificial Sequence
  Description of Artificial Sequence: Synthetic oligonucleotide
  Antisense strand to SEQ ID NO: 2065680
aaauuagagaacaggacag

SEQ ID NO: 2065682 - RNA, 19 nt, Artificial Sequence
  Description of Artificial Sequence: Synthetic oligonucleotide
  Sense strand starting at position 3740 of SEQ ID NO: 1881709
ccuguucucuaauuuaggu

SEQ ID NO: 2065683 - RNA, 19 nt, Artificial Sequence
  Description of Artificial Sequence: Synthetic oligonucleotide
  Antisense strand to SEQ ID NO: 2065682
accuaaauuagagaacagg

SEQ ID NO: 2065684 - RNA, 19 nt, Artificial Sequence
  Description of Artificial Sequence: Synthetic oligonucleotide
  Sense strand starting at position 3766 of SEQ ID NO: 1881709
agaggugaccagcaugagu

SEQ ID NO: 2065685 - RNA, 19 nt, Artificial Sequence
  Description of Artificial Sequence: Synthetic oligonucleotide
  Antisense strand to SEQ ID NO: 2065684
acucaugcuggucaccucu

SEQ ID NO: 2065686 - RNA, 19 nt, Artificial Sequence
  Description of Artificial Sequence: Synthetic oligonucleotide
  Sense strand starting at position 3771 of SEQ ID NO: 1881709
ugaccagcaugaguguuaa

SEQ ID NO: 2065687 - RNA, 19 nt, Artificial Sequence
  Description of Artificial Sequence: Synthetic oligonucleotide
  Antisense strand to SEQ ID NO: 2065686
uuaacacucaugcugguca

SEQ ID NO: 2065688 - RNA, 19 nt, Artificial Sequence
  Description of Artificial Sequence: Synthetic oligonucleotide
  Sense strand starting at position 3904 of SEQ ID NO: 1881709
ucaaaugauucguccacuu

SEQ ID NO: 2065689 - RNA, 19 nt, Artificial Sequence
  Description of Artificial Sequence: Synthetic oligonucleotide
  Antisense strand to SEQ ID NO: 2065688
aaguggacgaaucauuuga

SEQ ID NO: 2065690 - RNA, 19 nt, Artificial Sequence
  Description of Artificial Sequence: Synthetic oligonucleotide
  Sense strand starting at position 56 of SEQ ID NO: 1881710
uagucaaaugauggagguu

SEQ ID NO: 2065691 - RNA, 19 nt, Artificial Sequence
  Description of Artificial Sequence: Synthetic oligonucleotide
  Antisense strand to SEQ ID NO: 2065690
aaccuccaucauuugacua

SEQ ID NO: 2065692 - RNA, 19 nt, Artificial Sequence
  Description of Artificial Sequence: Synthetic oligonucleotide
  Sense strand starting at position 233 of SEQ ID NO: 1881710
acaggacgugauugauuca

SEQ ID NO: 2065693 - RNA, 19 nt, Artificial Sequence
  Description of Artificial Sequence: Synthetic oligonucleotide
  Antisense strand to SEQ ID NO: 2065692
ugaaucaaucacguccugu

SEQ ID NO: 2065694 - RNA, 19 nt, Artificial Sequence
  Description of Artificial Sequence: Synthetic oligonucleotide
  Sense strand starting at position 287 of SEQ ID NO: 1881710
agucucugugaucaccaau

SEQ ID NO: 2065695 - RNA, 19 nt, Artificial Sequence
  Description of Artificial Sequence: Synthetic oligonucleotide
  Antisense strand to SEQ ID NO: 2065694
auuggugaucacagagacu

SEQ ID NO: 2065696 - RNA, 19 nt, Artificial Sequence
  Description of Artificial Sequence: Synthetic oligonucleotide
  Sense strand starting at position 380 of SEQ ID NO: 1881710
cagugaugagcauaagcuu

SEQ ID NO: 2065697 - RNA, 19 nt, Artificial Sequence
  Description of Artificial Sequence: Synthetic oligonucleotide
  Antisense strand to SEQ ID NO: 2065696
aagcuuaugcucaucacug

SEQ ID NO: 2065698 - RNA, 19 nt, Artificial Sequence
  Description of Artificial Sequence: Synthetic oligonucleotide
  Sense strand starting at position 499 of SEQ ID NO: 1881710
gaauuauagugucuggaaa

SEQ ID NO: 2065699 - RNA, 19 nt, Artificial Sequence
  Description of Artificial Sequence: Synthetic oligonucleotide
  Antisense strand to SEQ ID NO: 2065698
uuuccagacacuauaauuc

SEQ ID NO: 2065700 - RNA, 19 nt, Artificial Sequence
  Description of Artificial Sequence: Synthetic oligonucleotide
  Sense strand starting at position 500 of SEQ ID NO: 1881710
aauuauagugucuggaaag

SEQ ID NO: 2065701 - RNA, 19 nt, Artificial Sequence
  Description of Artificial Sequence: Synthetic oligonucleotide
  Antisense strand to SEQ ID NO: 2065700
cuuuccagacacuauaauu

SEQ ID NO: 2065702 - RNA, 19 nt, Artificial Sequence
  Description of Artificial Sequence: Synthetic oligonucleotide
  Sense strand starting at position 861 of SEQ ID NO: 1881710
acagaaauguaauuaggcu

SEQ ID NO: 2065703 - RNA, 19 nt, Artificial Sequence
  Description of Artificial Sequence: Synthetic oligonucleotide
  Antisense strand to SEQ ID NO: 2065702
agccuaauuacauuucugu

SEQ ID NO: 2065704 - RNA, 19 nt, Artificial Sequence
  Description of Artificial Sequence: Synthetic oligonucleotide
  Sense strand starting at position 934 of SEQ ID NO: 1881710
cgguaucagcaagaaaguu

SEQ ID NO: 2065705 - RNA, 19 nt, Artificial Sequence
  Description of Artificial Sequence: Synthetic oligonucleotide
  Antisense strand to SEQ ID NO: 2065704
aacuuucuugcugauaccg

SEQ ID NO: 2065706 - RNA, 19 nt, Artificial Sequence
  Description of Artificial Sequence: Synthetic oligonucleotide
  Sense strand starting at position 942 of SEQ ID NO: 1881710
gcaagaaaguucucauaug

SEQ ID NO: 2065707 - RNA, 19 nt, Artificial Sequence
  Description of Artificial Sequence: Synthetic oligonucleotide
  Antisense strand to SEQ ID NO: 2065706
cauaugagaacuuucuugc

SEQ ID NO: 2065708 - RNA, 19 nt, Artificial Sequence
  Description of Artificial Sequence: Synthetic oligonucleotide
  Sense strand starting at position 994 of SEQ ID NO: 1881710
aaagacgucucagucaaua

SEQ ID NO: 2065709 - RNA, 19 nt, Artificial Sequence
  Description of Artificial Sequence: Synthetic oligonucleotide
  Antisense strand to SEQ ID NO: 2065708
uauugacugagacgucuuu

SEQ ID NO: 2065710 - RNA, 19 nt, Artificial Sequence
  Description of Artificial Sequence: Synthetic oligonucleotide
  Sense strand starting at position 999 of SEQ ID NO: 1881710
cgucucagucaauaaugga

SEQ ID NO: 2065711 - RNA, 19 nt, Artificial Sequence
  Description of Artificial Sequence: Synthetic oligonucleotide
  Antisense strand to SEQ ID NO: 2065710
uccauuauugacugagacg

SEQ ID NO: 2065712 - RNA, 19 nt, Artificial Sequence
  Description of Artificial Sequence: Synthetic oligonucleotide
  Sense strand starting at position 1007 of SEQ ID NO: 1881710
ucaauaauggaucgcauau

SEQ ID NO: 2065713 - RNA, 19 nt, Artificial Sequence
  Description of Artificial Sequence: Synthetic oligonucleotide
  Antisense strand to SEQ ID NO: 2065712
auaugcgauccauuauuga

SEQ ID NO: 2065714 - RNA, 19 nt, Artificial Sequence
  Description of Artificial Sequence: Synthetic oligonucleotide
  Sense strand starting at position 1076 of SEQ ID NO: 1881710
ccgugaugugguagucauu

SEQ ID NO: 2065715 - RNA, 19 nt, Artificial Sequence
  Description of Artificial Sequence: Synthetic oligonucleotide
  Antisense strand to SEQ ID NO: 2065714
aaugacuaccacaucacgg

SEQ ID NO: 2065716 - RNA, 19 nt, Artificial Sequence
  Description of Artificial Sequence: Synthetic oligonucleotide
  Sense strand starting at position 1083 of SEQ ID NO: 1881710
gugguagucauugugacgu

SEQ ID NO: 2065717 - RNA, 19 nt, Artificial Sequence
  Description of Artificial Sequence: Synthetic oligonucleotide
  Antisense strand to SEQ ID NO: 2065716
acgucacaaugacuaccac

SEQ ID NO: 2065718 - RNA, 19 nt, Artificial Sequence
  Description of Artificial Sequence: Synthetic oligonucleotide
  Sense strand starting at position 1210 of SEQ ID NO: 1881710
cgguguauguauuuacuau

SEQ ID NO: 2065719 - RNA, 19 nt, Artificial Sequence
  Description of Artificial Sequence: Synthetic oligonucleotide
  Antisense strand to SEQ ID NO: 2065718
auaguaaauacauacaccg

SEQ ID NO: 2065720 - RNA, 19 nt, Artificial Sequence
  Description of Artificial Sequence: Synthetic oligonucleotide
  Sense strand starting at position 1359 of SEQ ID NO: 1881710
guguguuaucgcuucugaa

SEQ ID NO: 2065721 - RNA, 19 nt, Artificial Sequence
  Description of Artificial Sequence: Synthetic oligonucleotide
  Antisense strand to SEQ ID NO: 2065720
uucagaagcgauaacacac

SEQ ID NO: 2065722 - RNA, 19 nt, Artificial Sequence
  Description of Artificial Sequence: Synthetic oligonucleotide
  Sense strand starting at position 1453 of SEQ ID NO: 1881710
uguguuuguguucuaguuu

SEQ ID NO: 2065723 - RNA, 19 nt, Artificial Sequence
  Description of Artificial Sequence: Synthetic oligonucleotide
  Antisense strand to SEQ ID NO: 2065722
aaacuagaacacaaacaca

SEQ ID NO: 2065724 - RNA, 19 nt, Artificial Sequence
  Description of Artificial Sequence: Synthetic oligonucleotide
  Sense strand starting at position 1639 of SEQ ID NO: 1881710
uacaguaugcuagaguuaa

SEQ ID NO: 2065725 - RNA, 19 nt, Artificial Sequence
  Description of Artificial Sequence: Synthetic oligonucleotide
  Antisense strand to SEQ ID NO: 2065724
uuaacucuagcauacugua

SEQ ID NO: 2065726 - RNA, 19 nt, Artificial Sequence
  Description of Artificial Sequence: Synthetic oligonucleotide
  Sense strand starting at position 1696 of SEQ ID NO: 1881710
guagccuaaguauauaaua

SEQ ID NO: 2065727 - RNA, 19 nt, Artificial Sequence
  Description of Artificial Sequence: Synthetic oligonucleotide
  Antisense strand to SEQ ID NO: 2065726
uauuauauacuuaggcuac

SEQ ID NO: 2065728 - RNA, 19 nt, Artificial Sequence
  Description of Artificial Sequence: Synthetic oligonucleotide
  Sense strand starting at position 2128 of SEQ ID NO: 1881710
gucauauuaccguauauaa

SEQ ID NO: 2065729 - RNA, 19 nt, Artificial Sequence
  Description of Artificial Sequence: Synthetic oligonucleotide
  Antisense strand to SEQ ID NO: 2065728
uuauauacgguaauaugac

SEQ ID NO: 2065730 - RNA, 19 nt, Artificial Sequence
  Description of Artificial Sequence: Synthetic oligonucleotide
  Sense strand starting at position 2185 of SEQ ID NO: 1881710
uccugaagagcauagguau

SEQ ID NO: 2065731 - RNA, 19 nt, Artificial Sequence
  Description of Artificial Sequence: Synthetic oligonucleotide
  Antisense strand to SEQ ID NO: 2065730
auaccuaugcucuucagga

SEQ ID NO: 2065732 - RNA, 19 nt, Artificial Sequence
  Description of Artificial Sequence: Synthetic oligonucleotide
  Sense strand starting at position 2233 of SEQ ID NO: 1881710
ucugguaucguugagaauc

SEQ ID NO: 2065733 - RNA, 19 nt, Artificial Sequence
  Description of Artificial Sequence: Synthetic oligonucleotide
  Antisense strand to SEQ ID NO: 2065732
gauucucaacgauaccaga

SEQ ID NO: 2065734 - RNA, 19 nt, Artificial Sequence
  Description of Artificial Sequence: Synthetic oligonucleotide
  Sense strand starting at position 2278 of SEQ ID NO: 1881710
gguuucuuccucuagaaga

SEQ ID NO: 2065735 - RNA, 19 nt, Artificial Sequence
  Description of Artificial Sequence: Synthetic oligonucleotide
  Antisense strand to SEQ ID NO: 2065734
ucuucuagaggaagaaacc

SEQ ID NO: 2065736 - RNA, 19 nt, Artificial Sequence
  Description of Artificial Sequence: Synthetic oligonucleotide
  Sense strand starting at position 2530 of SEQ ID NO: 1881710
uccaccauccaguauugua

SEQ ID NO: 2065737 - RNA, 19 nt, Artificial Sequence
  Description of Artificial Sequence: Synthetic oligonucleotide
  Antisense strand to SEQ ID NO: 2065736
uacaauacuggauggugga

SEQ ID NO: 2065738 - RNA, 19 nt, Artificial Sequence
  Description of Artificial Sequence: Synthetic oligonucleotide
  Sense strand starting at position 2663 of SEQ ID NO: 1881710
gucuaaauggaucagccau

SEQ ID NO: 2065739 - RNA, 19 nt, Artificial Sequence
  Description of Artificial Sequence: Synthetic oligonucleotide
  Antisense strand to SEQ ID NO: 2065738
auggcugauccauuuagac

SEQ ID NO: 2065740 - RNA, 19 nt, Artificial Sequence
  Description of Artificial Sequence: Synthetic oligonucleotide
  Sense strand starting at position 2665 of SEQ ID NO: 1881710
cuaaauggaucagccauaa

SEQ ID NO: 2065741 - RNA, 19 nt, Artificial Sequence
  Description of Artificial Sequence: Synthetic oligonucleotide
  Antisense strand to SEQ ID NO: 2065740
uuauggcugauccauuuag

SEQ ID NO: 2065742 - RNA, 19 nt, Artificial Sequence
  Description of Artificial Sequence: Synthetic oligonucleotide
  Sense strand starting at position 2683 of SEQ ID NO: 1881710
aaggcaaauuaucuguuga

SEQ ID NO: 2065743 - RNA, 19 nt, Artificial Sequence
  Description of Artificial Sequence: Synthetic oligonucleotide
  Antisense strand to SEQ ID NO: 2065742
ucaacagauaauuugccuu

SEQ ID NO: 2065744 - RNA, 19 nt, Artificial Sequence
  Description of Artificial Sequence: Synthetic oligonucleotide
  Sense strand starting at position 2685 of SEQ ID NO: 1881710
ggcaaauuaucuguugaac

SEQ ID NO: 2065745 - RNA, 19 nt, Artificial Sequence
  Description of Artificial Sequence: Synthetic oligonucleotide
  Antisense strand to SEQ ID NO: 2065744
guucaacagauaauuugcc

SEQ ID NO: 2065746 - RNA, 19 nt, Artificial Sequence
  Description of Artificial Sequence: Synthetic oligonucleotide
  Sense strand starting at position 2699 of SEQ ID NO: 1881710
ugaacaauauagucagcuu

SEQ ID NO: 2065747 - RNA, 19 nt, Artificial Sequence
  Description of Artificial Sequence: Synthetic oligonucleotide
  Antisense strand to SEQ ID NO: 2065746
aagcugacuauauuguuca

SEQ ID NO: 2065748 - RNA, 19 nt, Artificial Sequence
  Description of Artificial Sequence: Synthetic oligonucleotide
  Sense strand starting at position 2747 of SEQ ID NO: 1881710
augaucuuuccacaguuga

SEQ ID NO: 2065749 - RNA, 19 nt, Artificial Sequence
  Description of Artificial Sequence: Synthetic oligonucleotide
  Antisense strand to SEQ ID NO: 2065748
ucaacuguggaaagaucau

SEQ ID NO: 2065750 - RNA, 19 nt, Artificial Sequence
  Description of Artificial Sequence: Synthetic oligonucleotide
  Sense strand starting at position 2809 of SEQ ID NO: 1881710
guuucuguucguguguauu

SEQ ID NO: 2065751 - RNA, 19 nt, Artificial Sequence
  Description of Artificial Sequence: Synthetic oligonucleotide
  Antisense strand to SEQ ID NO: 2065750
aauacacacgaacagaaac

SEQ ID NO: 2065752 - RNA, 19 nt, Artificial Sequence
  Description of Artificial Sequence: Synthetic oligonucleotide
  Sense strand starting at position 2819 of SEQ ID NO: 1881710
guguguauuucccugacug

SEQ ID NO: 2065753 - RNA, 19 nt, Artificial Sequence
  Description of Artificial Sequence: Synthetic oligonucleotide
  Antisense strand to SEQ ID NO: 2065752
cagucagggaaauacacac

SEQ ID NO: 2065754 - RNA, 19 nt, Artificial Sequence
  Description of Artificial Sequence: Synthetic oligonucleotide
  Sense strand starting at position 2820 of SEQ ID NO: 1881710
uguguauuucccugacugu

SEQ ID NO: 2065755 - RNA, 19 nt, Artificial Sequence
  Description of Artificial Sequence: Synthetic oligonucleotide
  Antisense strand to SEQ ID NO: 2065754
acagucagggaaauacaca

SEQ ID NO: 2065756 - RNA, 19 nt, Artificial Sequence
  Description of Artificial Sequence: Synthetic oligonucleotide
  Sense strand starting at position 2821 of SEQ ID NO: 1881710
guguauuucccugacuguu

SEQ ID NO: 2065757 - RNA, 19 nt, Artificial Sequence
  Description of Artificial Sequence: Synthetic oligonucleotide
  Antisense strand to SEQ ID NO: 2065756
aacagucagggaaauacac

SEQ ID NO: 2065758 - RNA, 19 nt, Artificial Sequence
  Description of Artificial Sequence: Synthetic oligonucleotide
  Sense strand starting at position 3083 of SEQ ID NO: 1881710
ggccuuuagagucaaauag

SEQ ID NO: 2065759 - RNA, 19 nt, Artificial Sequence
  Description of Artificial Sequence: Synthetic oligonucleotide
  Antisense strand to SEQ ID NO: 2065758
cuauuugacucuaaaggcc

SEQ ID NO: 2065760 - RNA, 19 nt, Artificial Sequence
  Description of Artificial Sequence: Synthetic oligonucleotide
  Sense strand starting at position 3155 of SEQ ID NO: 1881710
uuccaucuuuaaguggauu

SEQ ID NO: 2065761 - RNA, 19 nt, Artificial Sequence
  Description of Artificial Sequence: Synthetic oligonucleotide
  Antisense strand to SEQ ID NO: 2065760
aauccacuuaaagauggaa

SEQ ID NO: 2065762 - RNA, 19 nt, Artificial Sequence
  Description of Artificial Sequence: Synthetic oligonucleotide
  Sense strand starting at position 3307 of SEQ ID NO: 1881710
gcauacaauuaaguaauga

SEQ ID NO: 2065763 - RNA, 19 nt, Artificial Sequence
  Description of Artificial Sequence: Synthetic oligonucleotide
  Antisense strand to SEQ ID NO: 2065762
ucauuacuuaauuguaugc

SEQ ID NO: 2065764 - RNA, 19 nt, Artificial Sequence
  Description of Artificial Sequence: Synthetic oligonucleotide
  Sense strand starting at position 3823 of SEQ ID NO: 1881710
gccucacgcauguuuguaa

SEQ ID NO: 2065765 - RNA, 19 nt, Artificial Sequence
  Description of Artificial Sequence: Synthetic oligonucleotide
  Antisense strand to SEQ ID NO: 2065764
uuacaaacaugcgugaggc

SEQ ID NO: 2065766 - RNA, 19 nt, Artificial Sequence
  Description of Artificial Sequence: Synthetic oligonucleotide
  Sense strand starting at position 3826 of SEQ ID NO: 1881710
ucacgcauguuuguaauuu

SEQ ID NO: 2065767 - RNA, 19 nt, Artificial Sequence
  Description of Artificial Sequence: Synthetic oligonucleotide
  Antisense strand to SEQ ID NO: 2065766
aaauuacaaacaugcguga

SEQ ID NO: 2065768 - RNA, 19 nt, Artificial Sequence
  Description of Artificial Sequence: Synthetic oligonucleotide
  Sense strand starting at position 3855 of SEQ ID NO: 1881710
augcuuauuggugaagcaa

SEQ ID NO: 2065769 - RNA, 19 nt, Artificial Sequence
  Description of Artificial Sequence: Synthetic oligonucleotide
  Antisense strand to SEQ ID NO: 2065768
uugcuucaccaauaagcau

SEQ ID NO: 2065770 - RNA, 19 nt, Artificial Sequence
  Description of Artificial Sequence: Synthetic oligonucleotide
  Sense strand starting at position 35 of SEQ ID NO: 1881711
cuuagucaucucuaguuaa

SEQ ID NO: 2065771 - RNA, 19 nt, Artificial Sequence
  Description of Artificial Sequence: Synthetic oligonucleotide
  Antisense strand to SEQ ID NO: 2065770
uuaacuagagaugacuaag

SEQ ID NO: 2065772 - RNA, 19 nt, Artificial Sequence
  Description of Artificial Sequence: Synthetic oligonucleotide
  Sense strand starting at position 50 of SEQ ID NO: 1881711
uuaacauuaugucuuggga

SEQ ID NO: 2065773 - RNA, 19 nt, Artificial Sequence
  Description of Artificial Sequence: Synthetic oligonucleotide
  Antisense strand to SEQ ID NO: 2065772
ucccaagacauaauguuaa

SEQ ID NO: 2065774 - RNA, 19 nt, Artificial Sequence
  Description of Artificial Sequence: Synthetic oligonucleotide
  Sense strand starting at position 189 of SEQ ID NO: 1881711
uaugaauuguauucuaagg

SEQ ID NO: 2065775 - RNA, 19 nt, Artificial Sequence
  Description of Artificial Sequence: Synthetic oligonucleotide
  Antisense strand to SEQ ID NO: 2065774
ccuuagaauacaauucaua

SEQ ID NO: 2065776 - RNA, 19 nt, Artificial Sequence
  Description of Artificial Sequence: Synthetic oligonucleotide
  Sense strand starting at position 239 of SEQ ID NO: 1881711
ugucuauaugcuuaaggga

SEQ ID NO: 2065777 - RNA, 19 nt, Artificial Sequence
  Description of Artificial Sequence: Synthetic oligonucleotide
  Antisense strand to SEQ ID NO: 2065776
ucccuuaagcauauagaca

SEQ ID NO: 2065778 - RNA, 19 nt, Artificial Sequence
  Description of Artificial Sequence: Synthetic oligonucleotide
  Sense strand starting at position 344 of SEQ ID NO: 1881711
guggcauauuuccuauggu

SEQ ID NO: 2065779 - RNA, 19 nt, Artificial Sequence
  Description of Artificial Sequence: Synthetic oligonucleotide
  Antisense strand to SEQ ID NO: 2065778
accauaggaaauaugccac

SEQ ID NO: 2065780 - RNA, 19 nt, Artificial Sequence
  Description of Artificial Sequence: Synthetic oligonucleotide
  Sense strand starting at position 372 of SEQ ID NO: 1881711
ggaauuauauccuucuaug

SEQ ID NO: 2065781 - RNA, 19 nt, Artificial Sequence
  Description of Artificial Sequence: Synthetic oligonucleotide
  Antisense strand to SEQ ID NO: 2065780
cauagaaggauauaauucc

SEQ ID NO: 2065782 - RNA, 19 nt, Artificial Sequence
  Description of Artificial Sequence: Synthetic oligonucleotide
  Sense strand starting at position 454 of SEQ ID NO: 1881711
ggguaugguaaaggauaua

SEQ ID NO: 2065783 - RNA, 19 nt, Artificial Sequence
  Description of Artificial Sequence: Synthetic oligonucleotide
  Antisense strand to SEQ ID NO: 2065782
uauauccuuuaccauaccc

SEQ ID NO: 2065784 - RNA, 19 nt, Artificial Sequence
  Description of Artificial Sequence: Synthetic oligonucleotide
  Sense strand starting at position 514 of SEQ ID NO: 1881711
auucuagagaguuggauca

SEQ ID NO: 2065785 - RNA, 19 nt, Artificial Sequence
  Description of Artificial Sequence: Synthetic oligonucleotide
  Antisense strand to SEQ ID NO: 2065784
ugauccaacucucuagaau

SEQ ID NO: 2065786 - RNA, 19 nt, Artificial Sequence
  Description of Artificial Sequence: Synthetic oligonucleotide
  Sense strand starting at position 611 of SEQ ID NO: 1881711
aauaguuccuggguuacua

SEQ ID NO: 2065787 - RNA, 19 nt, Artificial Sequence
  Description of Artificial Sequence: Synthetic oligonucleotide
  Antisense strand to SEQ ID NO: 2065786
uaguaacccaggaacuauu

SEQ ID NO: 2065788 - RNA, 19 nt, Artificial Sequence
  Description of Artificial Sequence: Synthetic oligonucleotide
  Sense strand starting at position 624 of SEQ ID NO: 1881711
uuacuaaggcuguauauua

SEQ ID NO: 2065789 - RNA, 19 nt, Artificial Sequence
  Description of Artificial Sequence: Synthetic oligonucleotide
  Antisense strand to SEQ ID NO: 2065788
uaauauacagccuuaguaa

SEQ ID NO: 2065790 - RNA, 19 nt, Artificial Sequence
  Description of Artificial Sequence: Synthetic oligonucleotide
  Sense strand starting at position 737 of SEQ ID NO: 1881711
uuggauugguguuuaggaa

SEQ ID NO: 2065791 - RNA, 19 nt, Artificial Sequence
  Description of Artificial Sequence: Synthetic oligonucleotide
  Antisense strand to SEQ ID NO: 2065790
uuccuaaacaccaauccaa

SEQ ID NO: 2065792 - RNA, 19 nt, Artificial Sequence
  Description of Artificial Sequence: Synthetic oligonucleotide
  Sense strand starting at position 738 of SEQ ID NO: 1881711
uggauugguguuuaggaau

SEQ ID NO: 2065793 - RNA, 19 nt, Artificial Sequence
  Description of Artificial Sequence: Synthetic oligonucleotide
  Antisense strand to SEQ ID NO: 2065792
auuccuaaacaccaaucca

SEQ ID NO: 2065794 - RNA, 19 nt, Artificial Sequence
  Description of Artificial Sequence: Synthetic oligonucleotide
  Sense strand starting at position 904 of SEQ ID NO: 1881711
aaagauuacguguaaacug

SEQ ID NO: 2065795 - RNA, 19 nt, Artificial Sequence
  Description of Artificial Sequence: Synthetic oligonucleotide
  Antisense strand to SEQ ID NO: 2065794
caguuuacacguaaucuuu

SEQ ID NO: 2065796 - RNA, 19 nt, Artificial Sequence
  Description of Artificial Sequence: Synthetic oligonucleotide
  Sense strand starting at position 1023 of SEQ ID NO: 1881711
uauguaugaguccaugaca

SEQ ID NO: 2065797 - RNA, 19 nt, Artificial Sequence
  Description of Artificial Sequence: Synthetic oligonucleotide
  Antisense strand to SEQ ID NO: 2065796
ugucauggacucauacaua

SEQ ID NO: 2065798 - RNA, 19 nt, Artificial Sequence
  Description of Artificial Sequence: Synthetic oligonucleotide
  Sense strand starting at position 1085 of SEQ ID NO: 1881711
aguuucuuuguacaacuua

SEQ ID NO: 2065799 - RNA, 19 nt, Artificial Sequence
  Description of Artificial Sequence: Synthetic oligonucleotide
  Antisense strand to SEQ ID NO: 2065798
uaaguuguacaaagaaacu

SEQ ID NO: 2065800 - RNA, 19 nt, Artificial Sequence
  Description of Artificial Sequence: Synthetic oligonucleotide
  Sense strand starting at position 1150 of SEQ ID NO: 1881711
aggauuaccuuguuaaguc

SEQ ID NO: 2065801 - RNA, 19 nt, Artificial Sequence
  Description of Artificial Sequence: Synthetic oligonucleotide
  Antisense strand to SEQ ID NO: 2065800
gacuuaacaagguaauccu

SEQ ID NO: 2065802 - RNA, 19 nt, Artificial Sequence
  Description of Artificial Sequence: Synthetic oligonucleotide
  Sense strand starting at position 1219 of SEQ ID NO: 1881711
ggaagauuggccuacugug

SEQ ID NO: 2065803 - RNA, 19 nt, Artificial Sequence
  Description of Artificial Sequence: Synthetic oligonucleotide
  Antisense strand to SEQ ID NO: 2065802
cacaguaggccaaucuucc

SEQ ID NO: 2065804 - RNA, 19 nt, Artificial Sequence
  Description of Artificial Sequence: Synthetic oligonucleotide
  Sense strand starting at position 1236 of SEQ ID NO: 1881711
ugcucuugagcauaauauu

SEQ ID NO: 2065805 - RNA, 19 nt, Artificial Sequence
  Description of Artificial Sequence: Synthetic oligonucleotide
  Antisense strand to SEQ ID NO: 2065804
aauauuaugcucaagagca

SEQ ID NO: 2065806 - RNA, 19 nt, Artificial Sequence
  Description of Artificial Sequence: Synthetic oligonucleotide
  Sense strand starting at position 1360 of SEQ ID NO: 1881711
guugcucuugguuaagaga

SEQ ID NO: 2065807 - RNA, 19 nt, Artificial Sequence
  Description of Artificial Sequence: Synthetic oligonucleotide
  Antisense strand to SEQ ID NO: 2065806
ucucuuaaccaagagcaac

SEQ ID NO: 2065808 - RNA, 19 nt, Artificial Sequence
  Description of Artificial Sequence: Synthetic oligonucleotide
  Sense strand starting at position 1413 of SEQ ID NO: 1881711
uccuuaccaguuuggauau

SEQ ID NO: 2065809 - RNA, 19 nt, Artificial Sequence
  Description of Artificial Sequence: Synthetic oligonucleotide
  Antisense strand to SEQ ID NO: 2065808
auauccaaacugguaagga

SEQ ID NO: 2065810 - RNA, 19 nt, Artificial Sequence
  Description of Artificial Sequence: Synthetic oligonucleotide
  Sense strand starting at position 1435 of SEQ ID NO: 1881711
cguucuuuacugcuuguua

SEQ ID NO: 2065811 - RNA, 19 nt, Artificial Sequence
  Description of Artificial Sequence: Synthetic oligonucleotide
  Antisense strand to SEQ ID NO: 2065810
uaacaagcaguaaagaacg

SEQ ID NO: 2065812 - RNA, 19 nt, Artificial Sequence
  Description of Artificial Sequence: Synthetic oligonucleotide
  Sense strand starting at position 1728 of SEQ ID NO: 1881711
agaggcauuugacaugaaa

SEQ ID NO: 2065813 - RNA, 19 nt, Artificial Sequence
  Description of Artificial Sequence: Synthetic oligonucleotide
  Antisense strand to SEQ ID NO: 2065812
uuucaugucaaaugccucu

SEQ ID NO: 2065814 - RNA, 19 nt, Artificial Sequence
  Description of Artificial Sequence: Synthetic oligonucleotide
  Sense strand starting at position 1877 of SEQ ID NO: 1881711
guccauugucuacagaaag

SEQ ID NO: 2065815 - RNA, 19 nt, Artificial Sequence
  Description of Artificial Sequence: Synthetic oligonucleotide
  Antisense strand to SEQ ID NO: 2065814
cuuucuguagacaauggac

SEQ ID NO: 2065816 - RNA, 19 nt, Artificial Sequence
  Description of Artificial Sequence: Synthetic oligonucleotide
  Sense strand starting at position 1939 of SEQ ID NO: 1881711
uucccuacucuugagaagu

SEQ ID NO: 2065817 - RNA, 19 nt, Artificial Sequence
  Description of Artificial Sequence: Synthetic oligonucleotide
  Antisense strand to SEQ ID NO: 2065816
acuucucaagaguagggaa

SEQ ID NO: 2065818 - RNA, 19 nt, Artificial Sequence
  Description of Artificial Sequence: Synthetic oligonucleotide
  Sense strand starting at position 2021 of SEQ ID NO: 1881711
augcuuugugugcuugagu

SEQ ID NO: 2065819 - RNA, 19 nt, Artificial Sequence
  Description of Artificial Sequence: Synthetic oligonucleotide
  Antisense strand to SEQ ID NO: 2065818
acucaagcacacaaagcau

SEQ ID NO: 2065820 - RNA, 19 nt, Artificial Sequence
  Description of Artificial Sequence: Synthetic oligonucleotide
  Sense strand starting at position 2131 of SEQ ID NO: 1881711
gcacauggucauuacuuaa

SEQ ID NO: 2065821 - RNA, 19 nt, Artificial Sequence
  Description of Artificial Sequence: Synthetic oligonucleotide
  Antisense strand to SEQ ID NO: 2065820
uuaaguaaugaccaugugc

SEQ ID NO: 2065822 - RNA, 19 nt, Artificial Sequence
  Description of Artificial Sequence: Synthetic oligonucleotide
  Sense strand starting at position 2155 of SEQ ID NO: 1881711
uaaguaauugugugaugga

SEQ ID NO: 2065823 - RNA, 19 nt, Artificial Sequence
  Description of Artificial Sequence: Synthetic oligonucleotide
  Antisense strand to SEQ ID NO: 2065822
uccaucacacaauuacuua

SEQ ID NO: 2065824 - RNA, 19 nt, Artificial Sequence
  Description of Artificial Sequence: Synthetic oligonucleotide
  Sense strand starting at position 2173 of SEQ ID NO: 1881711
aggucaguuucauugggaa

SEQ ID NO: 2065825 - RNA, 19 nt, Artificial Sequence
  Description of Artificial Sequence: Synthetic oligonucleotide
  Antisense strand to SEQ ID NO: 2065824
uucccaaugaaacugaccu

SEQ ID NO: 2065826 - RNA, 19 nt, Artificial Sequence
  Description of Artificial Sequence: Synthetic oligonucleotide
  Sense strand starting at position 2186 of SEQ ID NO: 1881711
ugggaaaccuuucuugaua

SEQ ID NO: 2065827 - RNA, 19 nt, Artificial Sequence
  Description of Artificial Sequence: Synthetic oligonucleotide
  Antisense strand to SEQ ID NO: 2065826
uaucaagaaagguuuccca

SEQ ID NO: 2065828 - RNA, 19 nt, Artificial Sequence
  Description of Artificial Sequence: Synthetic oligonucleotide
  Sense strand starting at position 2187 of SEQ ID NO: 1881711
gggaaaccuuucuugauac

SEQ ID NO: 2065829 - RNA, 19 nt, Artificial Sequence
  Description of Artificial Sequence: Synthetic oligonucleotide
  Antisense strand to SEQ ID NO: 2065828
guaucaagaaagguuuccc

SEQ ID NO: 2065830 - RNA, 19 nt, Artificial Sequence
  Description of Artificial Sequence: Synthetic oligonucleotide
  Sense strand starting at position 2316 of SEQ ID NO: 1881711
uggucuucucugcaagaua

SEQ ID NO: 2065831 - RNA, 19 nt, Artificial Sequence
  Description of Artificial Sequence: Synthetic oligonucleotide
  Antisense strand to SEQ ID NO: 2065830
uaucuugcagagaagacca

SEQ ID NO: 2065832 - RNA, 19 nt, Artificial Sequence
  Description of Artificial Sequence: Synthetic oligonucleotide
  Sense strand starting at position 2319 of SEQ ID NO: 1881711
ucuucucugcaagauagua

SEQ ID NO: 2065833 - RNA, 19 nt, Artificial Sequence
  Description of Artificial Sequence: Synthetic oligonucleotide
  Antisense strand to SEQ ID NO: 2065832
uacuaucuugcagagaaga

SEQ ID NO: 2065834 - RNA, 19 nt, Artificial Sequence
  Description of Artificial Sequence: Synthetic oligonucleotide
  Sense strand starting at position 2356 of SEQ ID NO: 1881711
cagggacuauguguauaau

SEQ ID NO: 2065835 - RNA, 19 nt, Artificial Sequence
  Description of Artificial Sequence: Synthetic oligonucleotide
  Antisense strand to SEQ ID NO: 2065834
auuauacacauagucccug

SEQ ID NO: 2065836 - RNA, 19 nt, Artificial Sequence
  Description of Artificial Sequence: Synthetic oligonucleotide
  Sense strand starting at position 2819 of SEQ ID NO: 1881711
aagugacugaugugggaau

SEQ ID NO: 2065837 - RNA, 19 nt, Artificial Sequence
  Description of Artificial Sequence: Synthetic oligonucleotide
  Antisense strand to SEQ ID NO: 2065836
auucccacaucagucacuu

SEQ ID NO: 2065838 - RNA, 19 nt, Artificial Sequence
  Description of Artificial Sequence: Synthetic oligonucleotide
  Sense strand starting at position 3023 of SEQ ID NO: 1881711
ugaucaugccuguaaauag

SEQ ID NO: 2065839 - RNA, 19 nt, Artificial Sequence
  Description of Artificial Sequence: Synthetic oligonucleotide
  Antisense strand to SEQ ID NO: 2065838
cuauuuacaggcaugauca

SEQ ID NO: 2065840 - RNA, 19 nt, Artificial Sequence
  Description of Artificial Sequence: Synthetic oligonucleotide
  Sense strand starting at position 3372 of SEQ ID NO: 1881711
cagaguacaccuggguauu

SEQ ID NO: 2065841 - RNA, 19 nt, Artificial Sequence
  Description of Artificial Sequence: Synthetic oligonucleotide
  Antisense strand to SEQ ID NO: 2065840
aauacccagguguacucug

SEQ ID NO: 2065842 - RNA, 19 nt, Artificial Sequence
  Description of Artificial Sequence: Synthetic oligonucleotide
  Sense strand starting at position 3481 of SEQ ID NO: 1881711
uuuacuucugaugaaguau

SEQ ID NO: 2065843 - RNA, 19 nt, Artificial Sequence
  Description of Artificial Sequence: Synthetic oligonucleotide
  Antisense strand to SEQ ID NO: 2065842
auacuucaucagaaguaaa

SEQ ID NO: 2065844 - RNA, 19 nt, Artificial Sequence
  Description of Artificial Sequence: Synthetic oligonucleotide
  Sense strand starting at position 3510 of SEQ ID NO: 1881711
aguuuagcaguuuaacaua

SEQ ID NO: 2065845 - RNA, 19 nt, Artificial Sequence
  Description of Artificial Sequence: Synthetic oligonucleotide
  Antisense strand to SEQ ID NO: 2065844
uauguuaaacugcuaaacu

SEQ ID NO: 2065846 - RNA, 19 nt, Artificial Sequence
  Description of Artificial Sequence: Synthetic oligonucleotide
  Sense strand starting at position 3802 of SEQ ID NO: 1881711
ucccauguguauuugcuua

SEQ ID NO: 2065847 - RNA, 19 nt, Artificial Sequence
  Description of Artificial Sequence: Synthetic oligonucleotide
  Antisense strand to SEQ ID NO: 2065846
uaagcaaauacacauggga

SEQ ID NO: 2065848 - RNA, 19 nt, Artificial Sequence
  Description of Artificial Sequence: Synthetic oligonucleotide
  Sense strand starting at position 3804 of SEQ ID NO: 1881711
ccauguguauuugcuuauu

SEQ ID NO: 2065849 - RNA, 19 nt, Artificial Sequence
  Description of Artificial Sequence: Synthetic oligonucleotide
  Antisense strand to SEQ ID NO: 2065848
aauaagcaaauacacaugg

SEQ ID NO: 2065850 - RNA, 19 nt, Artificial Sequence
  Description of Artificial Sequence: Synthetic oligonucleotide
  Sense strand starting at position 430 of SEQ ID NO: 1881712
gccugugaugaauauggau

SEQ ID NO: 2065851 - RNA, 19 nt, Artificial Sequence
  Description of Artificial Sequence: Synthetic oligonucleotide
  Antisense strand to SEQ ID NO: 2065850
auccauauucaucacaggc

SEQ ID NO: 2065852 - RNA, 19 nt, Artificial Sequence
  Description of Artificial Sequence: Synthetic oligonucleotide
  Sense strand starting at position 432 of SEQ ID NO: 1881712
cugugaugaauauggaugu

SEQ ID NO: 2065853 - RNA, 19 nt, Artificial Sequence
  Description of Artificial Sequence: Synthetic oligonucleotide
  Antisense strand to SEQ ID NO: 2065852
acauccauauucaucacag

SEQ ID NO: 2065854 - RNA, 19 nt, Artificial Sequence
  Description of Artificial Sequence: Synthetic oligonucleotide
  Sense strand starting at position 436 of SEQ ID NO: 1881712
gaugaauauggauguguuu

SEQ ID NO: 2065855 - RNA, 19 nt, Artificial Sequence
  Description of Artificial Sequence: Synthetic oligonucleotide
  Antisense strand to SEQ ID NO: 2065854
aaacacauccauauucauc

SEQ ID NO: 2065856 - RNA, 19 nt, Artificial Sequence
  Description of Artificial Sequence: Synthetic oligonucleotide
  Sense strand starting at position 506 of SEQ ID NO: 1881712
aucuaaauauaggaagaga

SEQ ID NO: 2065857 - RNA, 19 nt, Artificial Sequence
  Description of Artificial Sequence: Synthetic oligonucleotide
  Antisense strand to SEQ ID NO: 2065856
ucucuuccuauauuuagau

SEQ ID NO: 2065858 - RNA, 19 nt, Artificial Sequence
  Description of Artificial Sequence: Synthetic oligonucleotide
  Sense strand starting at position 829 of SEQ ID NO: 1881712
uggagaaaguuacuuuaac

SEQ ID NO: 2065859 - RNA, 19 nt, Artificial Sequence
  Description of Artificial Sequence: Synthetic oligonucleotide
  Antisense strand to SEQ ID NO: 2065858
guuaaaguaacuuucucca

SEQ ID NO: 2065860 - RNA, 19 nt, Artificial Sequence
  Description of Artificial Sequence: Synthetic oligonucleotide
  Sense strand starting at position 830 of SEQ ID NO: 1881712
ggagaaaguuacuuuaacc

SEQ ID NO: 2065861 - RNA, 19 nt, Artificial Sequence
  Description of Artificial Sequence: Synthetic oligonucleotide
  Antisense strand to SEQ ID NO: 2065860
gguuaaaguaacuuucucc

SEQ ID NO: 2065862 - RNA, 19 nt, Artificial Sequence
  Description of Artificial Sequence: Synthetic oligonucleotide
  Sense strand starting at position 897 of SEQ ID NO: 1881712
gaagcauuggugugaggag

SEQ ID NO: 2065863 - RNA, 19 nt, Artificial Sequence
  Description of Artificial Sequence: Synthetic oligonucleotide
  Antisense strand to SEQ ID NO: 2065862
cuccucacaccaaugcuuc

SEQ ID NO: 2065864 - RNA, 19 nt, Artificial Sequence
  Description of Artificial Sequence: Synthetic oligonucleotide
  Sense strand starting at position 1024 of SEQ ID NO: 1881712
acggaaaucuaccacauuu

SEQ ID NO: 2065865 - RNA, 19 nt, Artificial Sequence
  Description of Artificial Sequence: Synthetic oligonucleotide
  Antisense strand to SEQ ID NO: 2065864
aaaugugguagauuuccgu

SEQ ID NO: 2065866 - RNA, 19 nt, Artificial Sequence
  Description of Artificial Sequence: Synthetic oligonucleotide
  Sense strand starting at position 1118 of SEQ ID NO: 1881712
cauagacuuucuccuggga

SEQ ID NO: 2065867 - RNA, 19 nt, Artificial Sequence
  Description of Artificial Sequence: Synthetic oligonucleotide
  Antisense strand to SEQ ID NO: 2065866
ucccaggagaaagucuaug

SEQ ID NO: 2065868 - RNA, 19 nt, Artificial Sequence
  Description of Artificial Sequence: Synthetic oligonucleotide
  Sense strand starting at position 1121 of SEQ ID NO: 1881712
agacuuucuccugggauag

SEQ ID NO: 2065869 - RNA, 19 nt, Artificial Sequence
  Description of Artificial Sequence: Synthetic oligonucleotide
  Antisense strand to SEQ ID NO: 2065868
cuaucccaggagaaagucu

SEQ ID NO: 2065870 - RNA, 19 nt, Artificial Sequence
  Description of Artificial Sequence: Synthetic oligonucleotide
  Sense strand starting at position 1122 of SEQ ID NO: 1881712
gacuuucuccugggauagu

SEQ ID NO: 2065871 - RNA, 19 nt, Artificial Sequence
  Description of Artificial Sequence: Synthetic oligonucleotide
  Antisense strand to SEQ ID NO: 2065870
acuaucccaggagaaaguc

SEQ ID NO: 2065872 - RNA, 19 nt, Artificial Sequence
  Description of Artificial Sequence: Synthetic oligonucleotide
  Sense strand starting at position 1226 of SEQ ID NO: 1881712
aguguuugaguugacauga

SEQ ID NO: 2065873 - RNA, 19 nt, Artificial Sequence
  Description of Artificial Sequence: Synthetic oligonucleotide
  Antisense strand to SEQ ID NO: 2065872
ucaugucaacucaaacacu

SEQ ID NO: 2065874 - RNA, 19 nt, Artificial Sequence
  Description of Artificial Sequence: Synthetic oligonucleotide
  Sense strand starting at position 1234 of SEQ ID NO: 1881712
aguugacaugaaugugaau

SEQ ID NO: 2065875 - RNA, 19 nt, Artificial Sequence
  Description of Artificial Sequence: Synthetic oligonucleotide
  Antisense strand to SEQ ID NO: 2065874
auucacauucaugucaacu

SEQ ID NO: 2065876 - RNA, 19 nt, Artificial Sequence
  Description of Artificial Sequence: Synthetic oligonucleotide
  Sense strand starting at position 1243 of SEQ ID NO: 1881712
gaaugugaauggccuuuau

SEQ ID NO: 2065877 - RNA, 19 nt, Artificial Sequence
  Description of Artificial Sequence: Synthetic oligonucleotide
  Antisense strand to SEQ ID NO: 2065876
auaaaggccauucacauuc

SEQ ID NO: 2065878 - RNA, 19 nt, Artificial Sequence
  Description of Artificial Sequence: Synthetic oligonucleotide
  Sense strand starting at position 1255 of SEQ ID NO: 1881712
ccuuuaucaggaugagcuu

SEQ ID NO: 2065879 - RNA, 19 nt, Artificial Sequence
  Description of Artificial Sequence: Synthetic oligonucleotide
  Antisense strand to SEQ ID NO: 2065878
aagcucauccugauaaagg

SEQ ID NO: 2065880 - RNA, 19 nt, Artificial Sequence
  Description of Artificial Sequence: Synthetic oligonucleotide
  Sense strand starting at position 1360 of SEQ ID NO: 1881712
gggauuaaggaauguugua

SEQ ID NO: 2065881 - RNA, 19 nt, Artificial Sequence
  Description of Artificial Sequence: Synthetic oligonucleotide
  Antisense strand to SEQ ID NO: 2065880
uacaacauuccuuaauccc

SEQ ID NO: 2065882 - RNA, 19 nt, Artificial Sequence
  Description of Artificial Sequence: Synthetic oligonucleotide
  Sense strand starting at position 1367 of SEQ ID NO: 1881712
aggaauguuguacaacuuu

SEQ ID NO: 2065883 - RNA, 19 nt, Artificial Sequence
  Description of Artificial Sequence: Synthetic oligonucleotide
  Antisense strand to SEQ ID NO: 2065882
aaaguuguacaacauuccu

SEQ ID NO: 2065884 - RNA, 19 nt, Artificial Sequence
  Description of Artificial Sequence: Synthetic oligonucleotide
  Sense strand starting at position 1522 of SEQ ID NO: 1881712
uagggaaucucugugauua

SEQ ID NO: 2065885 - RNA, 19 nt, Artificial Sequence
  Description of Artificial Sequence: Synthetic oligonucleotide
  Antisense strand to SEQ ID NO: 2065884
uaaucacagagauucccua

SEQ ID NO: 2065886 - RNA, 19 nt, Artificial Sequence
  Description of Artificial Sequence: Synthetic oligonucleotide
  Sense strand starting at position 1523 of SEQ ID NO: 1881712
agggaaucucugugauuaa

SEQ ID NO: 2065887 - RNA, 19 nt, Artificial Sequence
  Description of Artificial Sequence: Synthetic oligonucleotide
  Antisense strand to SEQ ID NO: 2065886
uuaaucacagagauucccu

SEQ ID NO: 2065888 - RNA, 19 nt, Artificial Sequence
  Description of Artificial Sequence: Synthetic oligonucleotide
  Sense strand starting at position 1699 of SEQ ID NO: 1881712
acaguuauauccuuagaga

SEQ ID NO: 2065889 - RNA, 19 nt, Artificial Sequence
  Description of Artificial Sequence: Synthetic oligonucleotide
  Antisense strand to SEQ ID NO: 2065888
ucucuaaggauauaacugu

SEQ ID NO: 2065890 - RNA, 19 nt, Artificial Sequence
  Description of Artificial Sequence: Synthetic oligonucleotide
  Sense strand starting at position 1779 of SEQ ID NO: 1881712
ugaaauuguuuggcugaaa

SEQ ID NO: 2065891 - RNA, 19 nt, Artificial Sequence
  Description of Artificial Sequence: Synthetic oligonucleotide
  Antisense strand to SEQ ID NO: 2065890
uuucagccaaacaauuuca

SEQ ID NO: 2065892 - RNA, 19 nt, Artificial Sequence
  Description of Artificial Sequence: Synthetic oligonucleotide
  Sense strand starting at position 1780 of SEQ ID NO: 1881712
gaaauuguuuggcugaaau

SEQ ID NO: 2065893 - RNA, 19 nt, Artificial Sequence
  Description of Artificial Sequence: Synthetic oligonucleotide
  Antisense strand to SEQ ID NO: 2065892
auuucagccaaacaauuuc

SEQ ID NO: 2065894 - RNA, 19 nt, Artificial Sequence
  Description of Artificial Sequence: Synthetic oligonucleotide
  Sense strand starting at position 1812 of SEQ ID NO: 1881712
ugaacuuacaagugguaag

SEQ ID NO: 2065895 - RNA, 19 nt, Artificial Sequence
  Description of Artificial Sequence: Synthetic oligonucleotide
  Antisense strand to SEQ ID NO: 2065894
cuuaccacuuguaaguuca

SEQ ID NO: 2065896 - RNA, 19 nt, Artificial Sequence
  Description of Artificial Sequence: Synthetic oligonucleotide
  Sense strand starting at position 1977 of SEQ ID NO: 1881712
cagugucugcgcuuuaaac

SEQ ID NO: 2065897 - RNA, 19 nt, Artificial Sequence
  Description of Artificial Sequence: Synthetic oligonucleotide
  Antisense strand to SEQ ID NO: 2065896
guuuaaagcgcagacacug

SEQ ID NO: 2065898 - RNA, 19 nt, Artificial Sequence
  Description of Artificial Sequence: Synthetic oligonucleotide
  Sense strand starting at position 1999 of SEQ ID NO: 1881712
cagugucugcgcuuuaaag

SEQ ID NO: 2065899 - RNA, 19 nt, Artificial Sequence
  Description of Artificial Sequence: Synthetic oligonucleotide
  Antisense strand to SEQ ID NO: 2065898
cuuuaaagcgcagacacug

SEQ ID NO: 2065900 - RNA, 19 nt, Artificial Sequence
  Description of Artificial Sequence: Synthetic oligonucleotide
  Sense strand starting at position 2215 of SEQ ID NO: 1881712
guaagaggcucaguaagau

SEQ ID NO: 2065901 - RNA, 19 nt, Artificial Sequence
  Description of Artificial Sequence: Synthetic oligonucleotide
  Antisense strand to SEQ ID NO: 2065900
aucuuacugagccucuuac

SEQ ID NO: 2065902 - RNA, 19 nt, Artificial Sequence
  Description of Artificial Sequence: Synthetic oligonucleotide
  Sense strand starting at position 2221 of SEQ ID NO: 1881712
ggcucaguaagauggaacu

SEQ ID NO: 2065903 - RNA, 19 nt, Artificial Sequence
  Description of Artificial Sequence: Synthetic oligonucleotide
  Antisense strand to SEQ ID NO: 2065902
aguuccaucuuacugagcc

SEQ ID NO: 2065904 - RNA, 19 nt, Artificial Sequence
  Description of Artificial Sequence: Synthetic oligonucleotide
  Sense strand starting at position 2374 of SEQ ID NO: 1881712
acuaaagcgaaauagaguu

SEQ ID NO: 2065905 - RNA, 19 nt, Artificial Sequence
  Description of Artificial Sequence: Synthetic oligonucleotide
  Antisense strand to SEQ ID NO: 2065904
aacucuauuucgcuuuagu

SEQ ID NO: 2065906 - RNA, 19 nt, Artificial Sequence
  Description of Artificial Sequence: Synthetic oligonucleotide
  Sense strand starting at position 2415 of SEQ ID NO: 1881712
aaguuaagcgcuguacuuu

SEQ ID NO: 2065907 - RNA, 19 nt, Artificial Sequence
  Description of Artificial Sequence: Synthetic oligonucleotide
  Antisense strand to SEQ ID NO: 2065906
aaaguacagcgcuuaacuu

SEQ ID NO: 2065908 - RNA, 19 nt, Artificial Sequence
  Description of Artificial Sequence: Synthetic oligonucleotide
  Sense strand starting at position 2551 of SEQ ID NO: 1881712
ugacucauuugagauugag

SEQ ID NO: 2065909 - RNA, 19 nt, Artificial Sequence
  Description of Artificial Sequence: Synthetic oligonucleotide
  Antisense strand to SEQ ID NO: 2065908
cucaaucucaaaugaguca

SEQ ID NO: 2065910 - RNA, 19 nt, Artificial Sequence
  Description of Artificial Sequence: Synthetic oligonucleotide
  Sense strand starting at position 2976 of SEQ ID NO: 1881712
gcgacccugaauuggaaua

SEQ ID NO: 2065911 - RNA, 19 nt, Artificial Sequence
  Description of Artificial Sequence: Synthetic oligonucleotide
  Antisense strand to SEQ ID NO: 2065910
uauuccaauucagggucgc

SEQ ID NO: 2065912 - RNA, 19 nt, Artificial Sequence
  Description of Artificial Sequence: Synthetic oligonucleotide
  Sense strand starting at position 3201 of SEQ ID NO: 1881712
gagccacaguuuccaagaa

SEQ ID NO: 2065913 - RNA, 19 nt, Artificial Sequence
  Description of Artificial Sequence: Synthetic oligonucleotide
  Antisense strand to SEQ ID NO: 2065912
uucuuggaaacuguggcuc

SEQ ID NO: 2065914 - RNA, 19 nt, Artificial Sequence
  Description of Artificial Sequence: Synthetic oligonucleotide
  Sense strand starting at position 3221 of SEQ ID NO: 1881712
ccguaaggacuuuacugua

SEQ ID NO: 2065915 - RNA, 19 nt, Artificial Sequence
  Description of Artificial Sequence: Synthetic oligonucleotide
  Antisense strand to SEQ ID NO: 2065914
uacaguaaaguccuuacgg

SEQ ID NO: 2065916 - RNA, 19 nt, Artificial Sequence
  Description of Artificial Sequence: Synthetic oligonucleotide
  Sense strand starting at position 3263 of SEQ ID NO: 1881712
acuggaguaacuggguuaa

SEQ ID NO: 2065917 - RNA, 19 nt, Artificial Sequence
  Description of Artificial Sequence: Synthetic oligonucleotide
  Antisense strand to SEQ ID NO: 2065916
uuaacccaguuacuccagu

SEQ ID NO: 2065918 - RNA, 19 nt, Artificial Sequence
  Description of Artificial Sequence: Synthetic oligonucleotide
  Sense strand starting at position 3265 of SEQ ID NO: 1881712
uggaguaacuggguuaaag

SEQ ID NO: 2065919 - RNA, 19 nt, Artificial Sequence
  Description of Artificial Sequence: Synthetic oligonucleotide
  Antisense strand to SEQ ID NO: 2065918
cuuuaacccaguuacucca

SEQ ID NO: 2065920 - RNA, 19 nt, Artificial Sequence
  Description of Artificial Sequence: Synthetic oligonucleotide
  Sense strand starting at position 3396 of SEQ ID NO: 1881712
auuggacuuguauagcaaa

SEQ ID NO: 2065921 - RNA, 19 nt, Artificial Sequence
  Description of Artificial Sequence: Synthetic oligonucleotide
  Antisense strand to SEQ ID NO: 2065920
uuugcuauacaaguccaau

SEQ ID NO: 2065922 - RNA, 19 nt, Artificial Sequence
  Description of Artificial Sequence: Synthetic oligonucleotide
  Sense strand starting at position 3478 of SEQ ID NO: 1881712
ggagcuguacaauaaucuu

SEQ ID NO: 2065923 - RNA, 19 nt, Artificial Sequence
  Description of Artificial Sequence: Synthetic oligonucleotide
  Antisense strand to SEQ ID NO: 2065922
aagauuauuguacagcucc

SEQ ID NO: 2065924 - RNA, 19 nt, Artificial Sequence
  Description of Artificial Sequence: Synthetic oligonucleotide
  Sense strand starting at position 3539 of SEQ ID NO: 1881712
cuacuuaucguuguguucu

SEQ ID NO: 2065925 - RNA, 19 nt, Artificial Sequence
  Description of Artificial Sequence: Synthetic oligonucleotide
  Antisense strand to SEQ ID NO: 2065924
agaacacaacgauaaguag

SEQ ID NO: 2065926 - RNA, 19 nt, Artificial Sequence
  Description of Artificial Sequence: Synthetic oligonucleotide
  Sense strand starting at position 3615 of SEQ ID NO: 1881712
ggguacuauuucucuguuu

SEQ ID NO: 2065927 - RNA, 19 nt, Artificial Sequence
  Description of Artificial Sequence: Synthetic oligonucleotide
  Antisense strand to SEQ ID NO: 2065926
aaacagagaaauaguaccc

SEQ ID NO: 2065928 - RNA, 19 nt, Artificial Sequence
  Description of Artificial Sequence: Synthetic oligonucleotide
  Sense strand starting at position 3767 of SEQ ID NO: 1881712
cuggacuucugauuaauuc

SEQ ID NO: 2065929 - RNA, 19 nt, Artificial Sequence
  Description of Artificial Sequence: Synthetic oligonucleotide
  Antisense strand to SEQ ID NO: 2065928
gaauuaaucagaaguccag

SEQ ID NO: 2065930 - RNA, 19 nt, Artificial Sequence
  Description of Artificial Sequence: Synthetic oligonucleotide
  Sense strand starting at position 11 of SEQ ID NO: 1881713
ccauauauugauuauucgu

SEQ ID NO: 2065931 - RNA, 19 nt, Artificial Sequence
  Description of Artificial Sequence: Synthetic oligonucleotide
  Antisense strand to SEQ ID NO: 2065930
acgaauaaucaauauaugg

SEQ ID NO: 2065932 - RNA, 19 nt, Artificial Sequence
  Description of Artificial Sequence: Synthetic oligonucleotide
  Sense strand starting at position 43 of SEQ ID NO: 1881713
augguagugugcacguuau

SEQ ID NO: 2065933 - RNA, 19 nt, Artificial Sequence
  Description of Artificial Sequence: Synthetic oligonucleotide
  Antisense strand to SEQ ID NO: 2065932
auaacgugcacacuaccau

SEQ ID NO: 2065934 - RNA, 19 nt, Artificial Sequence
  Description of Artificial Sequence: Synthetic oligonucleotide
  Sense strand starting at position 53 of SEQ ID NO: 1881713
gcacguuauuugcuuaacu

SEQ ID NO: 2065935 - RNA, 19 nt, Artificial Sequence
  Description of Artificial Sequence: Synthetic oligonucleotide
  Antisense strand to SEQ ID NO: 2065934
aguuaagcaaauaacgugc

SEQ ID NO: 2065936 - RNA, 19 nt, Artificial Sequence
  Description of Artificial Sequence: Synthetic oligonucleotide
  Sense strand starting at position 55 of SEQ ID NO: 1881713
acguuauuugcuuaacuuu

SEQ ID NO: 2065937 - RNA, 19 nt, Artificial Sequence
  Description of Artificial Sequence: Synthetic oligonucleotide
  Antisense strand to SEQ ID NO: 2065936
aaaguuaagcaaauaacgu

SEQ ID NO: 2065938 - RNA, 19 nt, Artificial Sequence
  Description of Artificial Sequence: Synthetic oligonucleotide
  Sense strand starting at position 290 of SEQ ID NO: 1881713
agcggauacggcagaaguu

SEQ ID NO: 2065939 - RNA, 19 nt, Artificial Sequence
  Description of Artificial Sequence: Synthetic oligonucleotide
  Antisense strand to SEQ ID NO: 2065938
aacuucugccguauccgcu

SEQ ID NO: 2065940 - RNA, 19 nt, Artificial Sequence
  Description of Artificial Sequence: Synthetic oligonucleotide
  Sense strand starting at position 532 of SEQ ID NO: 1881713
cggcuagagaucuggaaga

SEQ ID NO: 2065941 - RNA, 19 nt, Artificial Sequence
  Description of Artificial Sequence: Synthetic oligonucleotide
  Antisense strand to SEQ ID NO: 2065940
ucuuccagaucucuagccg

SEQ ID NO: 2065942 - RNA, 19 nt, Artificial Sequence
  Description of Artificial Sequence: Synthetic oligonucleotide
  Sense strand starting at position 598 of SEQ ID NO: 1881713
cccagucagugagccaaua

SEQ ID NO: 2065943 - RNA, 19 nt, Artificial Sequence
  Description of Artificial Sequence: Synthetic oligonucleotide
  Antisense strand to SEQ ID NO: 2065942
uauuggcucacugacuggg

SEQ ID NO: 2065944 - RNA, 19 nt, Artificial Sequence
  Description of Artificial Sequence: Synthetic oligonucleotide
  Sense strand starting at position 617 of SEQ ID NO: 1881713
aggaaucucgcgaguguug

SEQ ID NO: 2065945 - RNA, 19 nt, Artificial Sequence
  Description of Artificial Sequence: Synthetic oligonucleotide
  Antisense strand to SEQ ID NO: 2065944
caacacucgcgagauuccu

SEQ ID NO: 2065946 - RNA, 19 nt, Artificial Sequence
  Description of Artificial Sequence: Synthetic oligonucleotide
  Sense strand starting at position 1397 of SEQ ID NO: 1881713
acgaaaugaugcucucacu

SEQ ID NO: 2065947 - RNA, 19 nt, Artificial Sequence
  Description of Artificial Sequence: Synthetic oligonucleotide
  Antisense strand to SEQ ID NO: 2065946
agugagagcaucauuucgu

SEQ ID NO: 2065948 - RNA, 19 nt, Artificial Sequence
  Description of Artificial Sequence: Synthetic oligonucleotide
  Sense strand starting at position 1425 of SEQ ID NO: 1881713
uuguucuuacccuauucga

SEQ ID NO: 2065949 - RNA, 19 nt, Artificial Sequence
  Description of Artificial Sequence: Synthetic oligonucleotide
  Antisense strand to SEQ ID NO: 2065948
ucgaauaggguaagaacaa

SEQ ID NO: 2065950 - RNA, 19 nt, Artificial Sequence
  Description of Artificial Sequence: Synthetic oligonucleotide
  Sense strand starting at position 1481 of SEQ ID NO: 1881713
uuauuugucucuuucguga

SEQ ID NO: 2065951 - RNA, 19 nt, Artificial Sequence
  Description of Artificial Sequence: Synthetic oligonucleotide
  Antisense strand to SEQ ID NO: 2065950
ucacgaaagagacaaauaa

SEQ ID NO: 2065952 - RNA, 19 nt, Artificial Sequence
  Description of Artificial Sequence: Synthetic oligonucleotide
  Sense strand starting at position 1871 of SEQ ID NO: 1881713
gcacuauuccacuggaagg

SEQ ID NO: 2065953 - RNA, 19 nt, Artificial Sequence
  Description of Artificial Sequence: Synthetic oligonucleotide
  Antisense strand to SEQ ID NO: 2065952
ccuuccaguggaauagugc

SEQ ID NO: 2065954 - RNA, 19 nt, Artificial Sequence
  Description of Artificial Sequence: Synthetic oligonucleotide
  Sense strand starting at position 2018 of SEQ ID NO: 1881713
ggccucuggccuuaagaaa

SEQ ID NO: 2065955 - RNA, 19 nt, Artificial Sequence
  Description of Artificial Sequence: Synthetic oligonucleotide
  Antisense strand to SEQ ID NO: 2065954
uuucuuaaggccagaggcc

SEQ ID NO: 2065956 - RNA, 19 nt, Artificial Sequence
  Description of Artificial Sequence: Synthetic oligonucleotide
  Sense strand starting at position 2140 of SEQ ID NO: 1881713
ggguaaauuggauaugcuu

SEQ ID NO: 2065957 - RNA, 19 nt, Artificial Sequence
  Description of Artificial Sequence: Synthetic oligonucleotide
  Antisense strand to SEQ ID NO: 2065956
aagcauauccaauuuaccc

SEQ ID NO: 2065958 - RNA, 19 nt, Artificial Sequence
  Description of Artificial Sequence: Synthetic oligonucleotide
  Sense strand starting at position 2161 of SEQ ID NO: 1881713
aggcuuugcaucugggaac

SEQ ID NO: 2065959 - RNA, 19 nt, Artificial Sequence
  Description of Artificial Sequence: Synthetic oligonucleotide
  Antisense strand to SEQ ID NO: 2065958
guucccagaugcaaagccu

SEQ ID NO: 2065960 - RNA, 19 nt, Artificial Sequence
  Description of Artificial Sequence: Synthetic oligonucleotide
  Sense strand starting at position 2251 of SEQ ID NO: 1881713
cccaaagauuucugggauu

SEQ ID NO: 2065961 - RNA, 19 nt, Artificial Sequence
  Description of Artificial Sequence: Synthetic oligonucleotide
  Antisense strand to SEQ ID NO: 2065960
aaucccagaaaucuuuggg

SEQ ID NO: 2065962 - RNA, 19 nt, Artificial Sequence
  Description of Artificial Sequence: Synthetic oligonucleotide
  Sense strand starting at position 2292 of SEQ ID NO: 1881713
aaguaauacugcuccgaag

SEQ ID NO: 2065963 - RNA, 19 nt, Artificial Sequence
  Description of Artificial Sequence: Synthetic oligonucleotide
  Antisense strand to SEQ ID NO: 2065962
cuucggagcaguauuacuu

SEQ ID NO: 2065964 - RNA, 19 nt, Artificial Sequence
  Description of Artificial Sequence: Synthetic oligonucleotide
  Sense strand starting at position 2294 of SEQ ID NO: 1881713
guaauacugcuccgaagau

SEQ ID NO: 2065965 - RNA, 19 nt, Artificial Sequence
  Description of Artificial Sequence: Synthetic oligonucleotide
  Antisense strand to SEQ ID NO: 2065964
aucuucggagcaguauuac

SEQ ID NO: 2065966 - RNA, 19 nt, Artificial Sequence
  Description of Artificial Sequence: Synthetic oligonucleotide
  Sense strand starting at position 2312 of SEQ ID NO: 1881713
ugagucuugaugcagaauc

SEQ ID NO: 2065967 - RNA, 19 nt, Artificial Sequence
  Description of Artificial Sequence: Synthetic oligonucleotide
  Antisense strand to SEQ ID NO: 2065966
gauucugcaucaagacuca

SEQ ID NO: 2065968 - RNA, 19 nt, Artificial Sequence
  Description of Artificial Sequence: Synthetic oligonucleotide
  Sense strand starting at position 2314 of SEQ ID NO: 1881713
agucuugaugcagaaucau

SEQ ID NO: 2065969 - RNA, 19 nt, Artificial Sequence
  Description of Artificial Sequence: Synthetic oligonucleotide
  Antisense strand to SEQ ID NO: 2065968
augauucugcaucaagacu

SEQ ID NO: 2065970 - RNA, 19 nt, Artificial Sequence
  Description of Artificial Sequence: Synthetic oligonucleotide
  Sense strand starting at position 2454 of SEQ ID NO: 1881713
aggguagguuuagugacau

SEQ ID NO: 2065971 - RNA, 19 nt, Artificial Sequence
  Description of Artificial Sequence: Synthetic oligonucleotide
  Antisense strand to SEQ ID NO: 2065970
augucacuaaaccuacccu

SEQ ID NO: 2065972 - RNA, 19 nt, Artificial Sequence
  Description of Artificial Sequence: Synthetic oligonucleotide
  Sense strand starting at position 2637 of SEQ ID NO: 1881713
aagcaauuauguguaaaug

SEQ ID NO: 2065973 - RNA, 19 nt, Artificial Sequence
  Description of Artificial Sequence: Synthetic oligonucleotide
  Antisense strand to SEQ ID NO: 2065972
cauuuacacauaauugcuu

SEQ ID NO: 2065974 - RNA, 19 nt, Artificial Sequence
  Description of Artificial Sequence: Synthetic oligonucleotide
  Sense strand starting at position 2638 of SEQ ID NO: 1881713
agcaauuauguguaaaugu

SEQ ID NO: 2065975 - RNA, 19 nt, Artificial Sequence
  Description of Artificial Sequence: Synthetic oligonucleotide
  Antisense strand to SEQ ID NO: 2065974
acauuuacacauaauugcu

SEQ ID NO: 2065976 - RNA, 19 nt, Artificial Sequence
  Description of Artificial Sequence: Synthetic oligonucleotide
  Sense strand starting at position 2755 of SEQ ID NO: 1881713
uuaauaucugaaugcagag

SEQ ID NO: 2065977 - RNA, 19 nt, Artificial Sequence
  Description of Artificial Sequence: Synthetic oligonucleotide
  Antisense strand to SEQ ID NO: 2065976
cucugcauucagauauuaa

SEQ ID NO: 2065978 - RNA, 19 nt, Artificial Sequence
  Description of Artificial Sequence: Synthetic oligonucleotide
  Sense strand starting at position 2844 of SEQ ID NO: 1881713
guucaaacgugaguauaga

SEQ ID NO: 2065979 - RNA, 19 nt, Artificial Sequence
  Description of Artificial Sequence: Synthetic oligonucleotide
  Antisense strand to SEQ ID NO: 2065978
ucuauacucacguuugaac

SEQ ID NO: 2065980 - RNA, 19 nt, Artificial Sequence
  Description of Artificial Sequence: Synthetic oligonucleotide
  Sense strand starting at position 2860 of SEQ ID NO: 1881713
agauguuaucacuaccgua

SEQ ID NO: 2065981 - RNA, 19 nt, Artificial Sequence
  Description of Artificial Sequence: Synthetic oligonucleotide
  Antisense strand to SEQ ID NO: 2065980
uacgguagugauaacaucu

SEQ ID NO: 2065982 - RNA, 19 nt, Artificial Sequence
  Description of Artificial Sequence: Synthetic oligonucleotide
  Sense strand starting at position 2917 of SEQ ID NO: 1881713
ugaguucuacuagguagaa

SEQ ID NO: 2065983 - RNA, 19 nt, Artificial Sequence
  Description of Artificial Sequence: Synthetic oligonucleotide
  Antisense strand to SEQ ID NO: 2065982
uucuaccuaguagaacuca

SEQ ID NO: 2065984 - RNA, 19 nt, Artificial Sequence
  Description of Artificial Sequence: Synthetic oligonucleotide
  Sense strand starting at position 2918 of SEQ ID NO: 1881713
gaguucuacuagguagaac

SEQ ID NO: 2065985 - RNA, 19 nt, Artificial Sequence
  Description of Artificial Sequence: Synthetic oligonucleotide
  Antisense strand to SEQ ID NO: 2065984
guucuaccuaguagaacuc

SEQ ID NO: 2065986 - RNA, 19 nt, Artificial Sequence
  Description of Artificial Sequence: Synthetic oligonucleotide
  Sense strand starting at position 3172 of SEQ ID NO: 1881713
ucaguuuccuguuuaacaa

SEQ ID NO: 2065987 - RNA, 19 nt, Artificial Sequence
  Description of Artificial Sequence: Synthetic oligonucleotide
  Antisense strand to SEQ ID NO: 2065986
uuguuaaacaggaaacuga

SEQ ID NO: 2065988 - RNA, 19 nt, Artificial Sequence
  Description of Artificial Sequence: Synthetic oligonucleotide
  Sense strand starting at position 3253 of SEQ ID NO: 1881713
gucacaacuuaaucuguuu

SEQ ID NO: 2065989 - RNA, 19 nt, Artificial Sequence
  Description of Artificial Sequence: Synthetic oligonucleotide
  Antisense strand to SEQ ID NO: 2065988
aaacagauuaaguugugac

SEQ ID NO: 2065990 - RNA, 19 nt, Artificial Sequence
  Description of Artificial Sequence: Synthetic oligonucleotide
  Sense strand starting at position 3309 of SEQ ID NO: 1881713
cuuguuuggaaguaugauc

SEQ ID NO: 2065991 - RNA, 19 nt, Artificial Sequence
  Description of Artificial Sequence: Synthetic oligonucleotide
  Antisense strand to SEQ ID NO: 2065990
gaucauacuuccaaacaag

SEQ ID NO: 2065992 - RNA, 19 nt, Artificial Sequence
  Description of Artificial Sequence: Synthetic oligonucleotide
  Sense strand starting at position 3552 of SEQ ID NO: 1881713
auuaaauagucaccuguau

SEQ ID NO: 2065993 - RNA, 19 nt, Artificial Sequence
  Description of Artificial Sequence: Synthetic oligonucleotide
  Antisense strand to SEQ ID NO: 2065992
auacaggugacuauuuaau

SEQ ID NO: 2065994 - RNA, 19 nt, Artificial Sequence
  Description of Artificial Sequence: Synthetic oligonucleotide
  Sense strand starting at position 3564 of SEQ ID NO: 1881713
ccuguauaccaauaaugug

SEQ ID NO: 2065995 - RNA, 19 nt, Artificial Sequence
  Description of Artificial Sequence: Synthetic oligonucleotide
  Antisense strand to SEQ ID NO: 2065994
cacauuauugguauacagg

SEQ ID NO: 2065996 - RNA, 19 nt, Artificial Sequence
  Description of Artificial Sequence: Synthetic oligonucleotide
  Sense strand starting at position 3578 of SEQ ID NO: 1881713
augugaugucaagaugccu

SEQ ID NO: 2065997 - RNA, 19 nt, Artificial Sequence
  Description of Artificial Sequence: Synthetic oligonucleotide
  Antisense strand to SEQ ID NO: 2065996
aggcaucuugacaucacau

SEQ ID NO: 2065998 - RNA, 19 nt, Artificial Sequence
  Description of Artificial Sequence: Synthetic oligonucleotide
  Sense strand starting at position 3690 of SEQ ID NO: 1881713
accagagauuuaugaugaa

SEQ ID NO: 2065999 - RNA, 19 nt, Artificial Sequence
  Description of Artificial Sequence: Synthetic oligonucleotide
  Antisense strand to SEQ ID NO: 2065998
uucaucauaaaucucuggu

SEQ ID NO: 2066000 - RNA, 19 nt, Artificial Sequence
  Description of Artificial Sequence: Synthetic oligonucleotide
  Sense strand starting at position 3693 of SEQ ID NO: 1881713
agagauuuaugaugaacau

SEQ ID NO: 2066001 - RNA, 19 nt, Artificial Sequence
  Description of Artificial Sequence: Synthetic oligonucleotide
  Antisense strand to SEQ ID NO: 2066000
auguucaucauaaaucucu

SEQ ID NO: 2066002 - RNA, 19 nt, Artificial Sequence
  Description of Artificial Sequence: Synthetic oligonucleotide
  Sense strand starting at position 3731 of SEQ ID NO: 1881713
gggucuuaacaaugaaguu

SEQ ID NO: 2066003 - RNA, 19 nt, Artificial Sequence
  Description of Artificial Sequence: Synthetic oligonucleotide
  Antisense strand to SEQ ID NO: 2066002
aacuucauuguuaagaccc

SEQ ID NO: 2066004 - RNA, 19 nt, Artificial Sequence
  Description of Artificial Sequence: Synthetic oligonucleotide
  Sense strand starting at position 3774 of SEQ ID NO: 1881713
cuucuauuccaguaccgua

SEQ ID NO: 2066005 - RNA, 19 nt, Artificial Sequence
  Description of Artificial Sequence: Synthetic oligonucleotide
  Antisense strand to SEQ ID NO: 2066004
uacgguacuggaauagaag

SEQ ID NO: 2066006 - RNA, 19 nt, Artificial Sequence
  Description of Artificial Sequence: Synthetic oligonucleotide
  Sense strand starting at position 3840 of SEQ ID NO: 1881713
gcauauauugccuagcaua

SEQ ID NO: 2066007 - RNA, 19 nt, Artificial Sequence
  Description of Artificial Sequence: Synthetic oligonucleotide
  Antisense strand to SEQ ID NO: 2066006
uaugcuaggcaauauaugc

SEQ ID NO: 2066008 - RNA, 19 nt, Artificial Sequence
  Description of Artificial Sequence: Synthetic oligonucleotide
  Sense strand starting at position 3914 of SEQ ID NO: 1881713
agaacuuugcaguguagaa

SEQ ID NO: 2066009 - RNA, 19 nt, Artificial Sequence
  Description of Artificial Sequence: Synthetic oligonucleotide
  Antisense strand to SEQ ID NO: 2066008
uucuacacugcaaaguucu

SEQ ID NO: 2066010 - RNA, 19 nt, Artificial Sequence
  Description of Artificial Sequence: Synthetic oligonucleotide
  Sense strand starting at position 79 of SEQ ID NO: 1881714
aaguguggaucacagauuu

SEQ ID NO: 2066011 - RNA, 19 nt, Artificial Sequence
  Description of Artificial Sequence: Synthetic oligonucleotide
  Antisense strand to SEQ ID NO: 2066010
aaaucugugauccacacuu

SEQ ID NO: 2066012 - RNA, 19 nt, Artificial Sequence
  Description of Artificial Sequence: Synthetic oligonucleotide
  Sense strand starting at position 97 of SEQ ID NO: 1881714
ucaaaugacuugucuaaug

SEQ ID NO: 2066013 - RNA, 19 nt, Artificial Sequence
  Description of Artificial Sequence: Synthetic oligonucleotide
  Antisense strand to SEQ ID NO: 2066012
cauuagacaagucauuuga

SEQ ID NO: 2066014 - RNA, 19 nt, Artificial Sequence
  Description of Artificial Sequence: Synthetic oligonucleotide
  Sense strand starting at position 179 of SEQ ID NO: 1881714
cuuggcuuuccugaacuau

SEQ ID NO: 2066015 - RNA, 19 nt, Artificial Sequence
  Description of Artificial Sequence: Synthetic oligonucleotide
  Antisense strand to SEQ ID NO: 2066014
auaguucaggaaagccaag

SEQ ID NO: 2066016 - RNA, 19 nt, Artificial Sequence
  Description of Artificial Sequence: Synthetic oligonucleotide
  Sense strand starting at position 352 of SEQ ID NO: 1881714
agacaaagccuuuguaaau

SEQ ID NO: 2066017 - RNA, 19 nt, Artificial Sequence
  Description of Artificial Sequence: Synthetic oligonucleotide
  Antisense strand to SEQ ID NO: 2066016
auuuacaaaggcuuugucu

SEQ ID NO: 2066018 - RNA, 19 nt, Artificial Sequence
  Description of Artificial Sequence: Synthetic oligonucleotide
  Sense strand starting at position 460 of SEQ ID NO: 1881714
aggaucugccaucauuauu

SEQ ID NO: 2066019 - RNA, 19 nt, Artificial Sequence
  Description of Artificial Sequence: Synthetic oligonucleotide
  Antisense strand to SEQ ID NO: 2066018
aauaaugauggcagauccu

SEQ ID NO: 2066020 - RNA, 19 nt, Artificial Sequence
  Description of Artificial Sequence: Synthetic oligonucleotide
  Sense strand starting at position 516 of SEQ ID NO: 1881714
aggauaaacauguguguua

SEQ ID NO: 2066021 - RNA, 19 nt, Artificial Sequence
  Description of Artificial Sequence: Synthetic oligonucleotide
  Antisense strand to SEQ ID NO: 2066020
uaacacacauguuuauccu

SEQ ID NO: 2066022 - RNA, 19 nt, Artificial Sequence
  Description of Artificial Sequence: Synthetic oligonucleotide
  Sense strand starting at position 517 of SEQ ID NO: 1881714
ggauaaacauguguguuac

SEQ ID NO: 2066023 - RNA, 19 nt, Artificial Sequence
  Description of Artificial Sequence: Synthetic oligonucleotide
  Antisense strand to SEQ ID NO: 2066022
guaacacacauguuuaucc

SEQ ID NO: 2066024 - RNA, 19 nt, Artificial Sequence
  Description of Artificial Sequence: Synthetic oligonucleotide
  Sense strand starting at position 565 of SEQ ID NO: 1881714
cuguuuacgaaacagaguu

SEQ ID NO: 2066025 - RNA, 19 nt, Artificial Sequence
  Description of Artificial Sequence: Synthetic oligonucleotide
  Antisense strand to SEQ ID NO: 2066024
aacucuguuucguaaacag

SEQ ID NO: 2066026 - RNA, 19 nt, Artificial Sequence
  Description of Artificial Sequence: Synthetic oligonucleotide
  Sense strand starting at position 666 of SEQ ID NO: 1881714
auuaguuuaugcucaggaa

SEQ ID NO: 2066027 - RNA, 19 nt, Artificial Sequence
  Description of Artificial Sequence: Synthetic oligonucleotide
  Antisense strand to SEQ ID NO: 2066026
uuccugagcauaaacuaau

SEQ ID NO: 2066028 - RNA, 19 nt, Artificial Sequence
  Description of Artificial Sequence: Synthetic oligonucleotide
  Sense strand starting at position 667 of SEQ ID NO: 1881714
uuaguuuaugcucaggaau

SEQ ID NO: 2066029 - RNA, 19 nt, Artificial Sequence
  Description of Artificial Sequence: Synthetic oligonucleotide
  Antisense strand to SEQ ID NO: 2066028
auuccugagcauaaacuaa

SEQ ID NO: 2066030 - RNA, 19 nt, Artificial Sequence
  Description of Artificial Sequence: Synthetic oligonucleotide
  Sense strand starting at position 670 of SEQ ID NO: 1881714
guuuaugcucaggaaucau

SEQ ID NO: 2066031 - RNA, 19 nt, Artificial Sequence
  Description of Artificial Sequence: Synthetic oligonucleotide
  Antisense strand to SEQ ID NO: 2066030
augauuccugagcauaaac

SEQ ID NO: 2066032 - RNA, 19 nt, Artificial Sequence
  Description of Artificial Sequence: Synthetic oligonucleotide
  Sense strand starting at position 756 of SEQ ID NO: 1881714
accucuaugucaguaauau

SEQ ID NO: 2066033 - RNA, 19 nt, Artificial Sequence
  Description of Artificial Sequence: Synthetic oligonucleotide
  Antisense strand to SEQ ID NO: 2066032
auauuacugacauagaggu

SEQ ID NO: 2066034 - RNA, 19 nt, Artificial Sequence
  Description of Artificial Sequence: Synthetic oligonucleotide
  Sense strand starting at position 757 of SEQ ID NO: 1881714
ccucuaugucaguaauauc

SEQ ID NO: 2066035 - RNA, 19 nt, Artificial Sequence
  Description of Artificial Sequence: Synthetic oligonucleotide
  Antisense strand to SEQ ID NO: 2066034
gauauuacugacauagagg

SEQ ID NO: 2066036 - RNA, 19 nt, Artificial Sequence
  Description of Artificial Sequence: Synthetic oligonucleotide
  Sense strand starting at position 767 of SEQ ID NO: 1881714
aguaauaucuaccuuguag

SEQ ID NO: 2066037 - RNA, 19 nt, Artificial Sequence
  Description of Artificial Sequence: Synthetic oligonucleotide
  Antisense strand to SEQ ID NO: 2066036
cuacaagguagauauuacu

SEQ ID NO: 2066038 - RNA, 19 nt, Artificial Sequence
  Description of Artificial Sequence: Synthetic oligonucleotide
  Sense strand starting at position 783 of SEQ ID NO: 1881714
uaggauuauugugcaaauu

SEQ ID NO: 2066039 - RNA, 19 nt, Artificial Sequence
  Description of Artificial Sequence: Synthetic oligonucleotide
  Antisense strand to SEQ ID NO: 2066038
aauuugcacaauaauccua

SEQ ID NO: 2066040 - RNA, 19 nt, Artificial Sequence
  Description of Artificial Sequence: Synthetic oligonucleotide
  Sense strand starting at position 784 of SEQ ID NO: 1881714
aggauuauugugcaaauua

SEQ ID NO: 2066041 - RNA, 19 nt, Artificial Sequence
  Description of Artificial Sequence: Synthetic oligonucleotide
  Antisense strand to SEQ ID NO: 2066040
uaauuugcacaauaauccu

SEQ ID NO: 2066042 - RNA, 19 nt, Artificial Sequence
  Description of Artificial Sequence: Synthetic oligonucleotide
  Sense strand starting at position 890 of SEQ ID NO: 1881714
cauagauucgaguggaaau

SEQ ID NO: 2066043 - RNA, 19 nt, Artificial Sequence
  Description of Artificial Sequence: Synthetic oligonucleotide
  Antisense strand to SEQ ID NO: 2066042
auuuccacucgaaucuaug

SEQ ID NO: 2066044 - RNA, 19 nt, Artificial Sequence
  Description of Artificial Sequence: Synthetic oligonucleotide
  Sense strand starting at position 891 of SEQ ID NO: 1881714
auagauucgaguggaaauc

SEQ ID NO: 2066045 - RNA, 19 nt, Artificial Sequence
  Description of Artificial Sequence: Synthetic oligonucleotide
  Antisense strand to SEQ ID NO: 2066044
gauuuccacucgaaucuau

SEQ ID NO: 2066046 - RNA, 19 nt, Artificial Sequence
  Description of Artificial Sequence: Synthetic oligonucleotide
  Sense strand starting at position 1227 of SEQ ID NO: 1881714
accguucugaccuauggau

SEQ ID NO: 2066047 - RNA, 19 nt, Artificial Sequence
  Description of Artificial Sequence: Synthetic oligonucleotide
  Antisense strand to SEQ ID NO: 2066046
auccauaggucagaacggu

SEQ ID NO: 2066048 - RNA, 19 nt, Artificial Sequence
  Description of Artificial Sequence: Synthetic oligonucleotide
  Sense strand starting at position 1236 of SEQ ID NO: 1881714
accuauggaugcccuaaau

SEQ ID NO: 2066049 - RNA, 19 nt, Artificial Sequence
  Description of Artificial Sequence: Synthetic oligonucleotide
  Antisense strand to SEQ ID NO: 2066048
auuuagggcauccauaggu

SEQ ID NO: 2066050 - RNA, 19 nt, Artificial Sequence
  Description of Artificial Sequence: Synthetic oligonucleotide
  Sense strand starting at position 1279 of SEQ ID NO: 1881714
gccauauucgaagaacuca

SEQ ID NO: 2066051 - RNA, 19 nt, Artificial Sequence
  Description of Artificial Sequence: Synthetic oligonucleotide
  Antisense strand to SEQ ID NO: 2066050
ugaguucuucgaauauggc

SEQ ID NO: 2066052 - RNA, 19 nt, Artificial Sequence
  Description of Artificial Sequence: Synthetic oligonucleotide
  Sense strand starting at position 1806 of SEQ ID NO: 1881714
guuuauucccaaggcaaua

SEQ ID NO: 2066053 - RNA, 19 nt, Artificial Sequence
  Description of Artificial Sequence: Synthetic oligonucleotide
  Antisense strand to SEQ ID NO: 2066052
uauugccuugggaauaaac

SEQ ID NO: 2066054 - RNA, 19 nt, Artificial Sequence
  Description of Artificial Sequence: Synthetic oligonucleotide
  Sense strand starting at position 2310 of SEQ ID NO: 1881714
guucaaucgcucgcuuguu

SEQ ID NO: 2066055 - RNA, 19 nt, Artificial Sequence
  Description of Artificial Sequence: Synthetic oligonucleotide
  Antisense strand to SEQ ID NO: 2066054
aacaagcgagcgauugaac

SEQ ID NO: 2066056 - RNA, 19 nt, Artificial Sequence
  Description of Artificial Sequence: Synthetic oligonucleotide
  Sense strand starting at position 2581 of SEQ ID NO: 1881714
uuguaagggccagauuguu

SEQ ID NO: 2066057 - RNA, 19 nt, Artificial Sequence
  Description of Artificial Sequence: Synthetic oligonucleotide
  Antisense strand to SEQ ID NO: 2066056
aacaaucuggcccuuacaa

SEQ ID NO: 2066058 - RNA, 19 nt, Artificial Sequence
  Description of Artificial Sequence: Synthetic oligonucleotide
  Sense strand starting at position 2612 of SEQ ID NO: 1881714
ccuguuaaauuaucuagag

SEQ ID NO: 2066059 - RNA, 19 nt, Artificial Sequence
  Description of Artificial Sequence: Synthetic oligonucleotide
  Antisense strand to SEQ ID NO: 2066058
cucuagauaauuuaacagg

SEQ ID NO: 2066060 - RNA, 19 nt, Artificial Sequence
  Description of Artificial Sequence: Synthetic oligonucleotide
  Sense strand starting at position 2613 of SEQ ID NO: 1881714
cuguuaaauuaucuagaga

SEQ ID NO: 2066061 - RNA, 19 nt, Artificial Sequence
  Description of Artificial Sequence: Synthetic oligonucleotide
  Antisense strand to SEQ ID NO: 2066060
ucucuagauaauuuaacag

SEQ ID NO: 2066062 - RNA, 19 nt, Artificial Sequence
  Description of Artificial Sequence: Synthetic oligonucleotide
  Sense strand starting at position 2759 of SEQ ID NO: 1881714
guaauaauacugugcuaag

SEQ ID NO: 2066063 - RNA, 19 nt, Artificial Sequence
  Description of Artificial Sequence: Synthetic oligonucleotide
  Antisense strand to SEQ ID NO: 2066062
cuuagcacaguauuauuac

SEQ ID NO: 2066064 - RNA, 19 nt, Artificial Sequence
  Description of Artificial Sequence: Synthetic oligonucleotide
  Sense strand starting at position 2803 of SEQ ID NO: 1881714
uuacaagaagccuauguuu

SEQ ID NO: 2066065 - RNA, 19 nt, Artificial Sequence
  Description of Artificial Sequence: Synthetic oligonucleotide
  Antisense strand to SEQ ID NO: 2066064
aaacauaggcuucuuguaa

SEQ ID NO: 2066066 - RNA, 19 nt, Artificial Sequence
  Description of Artificial Sequence: Synthetic oligonucleotide
  Sense strand starting at position 2805 of SEQ ID NO: 1881714
acaagaagccuauguuuac

SEQ ID NO: 2066067 - RNA, 19 nt, Artificial Sequence
  Description of Artificial Sequence: Synthetic oligonucleotide
  Antisense strand to SEQ ID NO: 2066066
guaaacauaggcuucuugu

SEQ ID NO: 2066068 - RNA, 19 nt, Artificial Sequence
  Description of Artificial Sequence: Synthetic oligonucleotide
  Sense strand starting at position 2808 of SEQ ID NO: 1881714
agaagccuauguuuacaaa

SEQ ID NO: 2066069 - RNA, 19 nt, Artificial Sequence
  Description of Artificial Sequence: Synthetic oligonucleotide
  Antisense strand to SEQ ID NO: 2066068
uuuguaaacauaggcuucu

SEQ ID NO: 2066070 - RNA, 19 nt, Artificial Sequence
  Description of Artificial Sequence: Synthetic oligonucleotide
  Sense strand starting at position 2834 of SEQ ID NO: 1881714
aacugagaccugcaaaugu

SEQ ID NO: 2066071 - RNA, 19 nt, Artificial Sequence
  Description of Artificial Sequence: Synthetic oligonucleotide
  Antisense strand to SEQ ID NO: 2066070
acauuugcaggucucaguu

SEQ ID NO: 2066072 - RNA, 19 nt, Artificial Sequence
  Description of Artificial Sequence: Synthetic oligonucleotide
  Sense strand starting at position 2842 of SEQ ID NO: 1881714
ccugcaaauguauagguaa

SEQ ID NO: 2066073 - RNA, 19 nt, Artificial Sequence
  Description of Artificial Sequence: Synthetic oligonucleotide
  Antisense strand to SEQ ID NO: 2066072
uuaccuauacauuugcagg

SEQ ID NO: 2066074 - RNA, 19 nt, Artificial Sequence
  Description of Artificial Sequence: Synthetic oligonucleotide
  Sense strand starting at position 2845 of SEQ ID NO: 1881714
gcaaauguauagguaauua

SEQ ID NO: 2066075 - RNA, 19 nt, Artificial Sequence
  Description of Artificial Sequence: Synthetic oligonucleotide
  Antisense strand to SEQ ID NO: 2066074
uaauuaccuauacauuugc

SEQ ID NO: 2066076 - RNA, 19 nt, Artificial Sequence
  Description of Artificial Sequence: Synthetic oligonucleotide
  Sense strand starting at position 2849 of SEQ ID NO: 1881714
auguauagguaauuaguga

SEQ ID NO: 2066077 - RNA, 19 nt, Artificial Sequence
  Description of Artificial Sequence: Synthetic oligonucleotide
  Antisense strand to SEQ ID NO: 2066076
ucacuaauuaccuauacau

SEQ ID NO: 2066078 - RNA, 19 nt, Artificial Sequence
  Description of Artificial Sequence: Synthetic oligonucleotide
  Sense strand starting at position 2854 of SEQ ID NO: 1881714
uagguaauuagugacggau

SEQ ID NO: 2066079 - RNA, 19 nt, Artificial Sequence
  Description of Artificial Sequence: Synthetic oligonucleotide
  Antisense strand to SEQ ID NO: 2066078
auccgucacuaauuaccua

SEQ ID NO: 2066080 - RNA, 19 nt, Artificial Sequence
  Description of Artificial Sequence: Synthetic oligonucleotide
  Sense strand starting at position 2857 of SEQ ID NO: 1881714
guaauuagugacggauaag

SEQ ID NO: 2066081 - RNA, 19 nt, Artificial Sequence
  Description of Artificial Sequence: Synthetic oligonucleotide
  Antisense strand to SEQ ID NO: 2066080
cuuauccgucacuaauuac

SEQ ID NO: 2066082 - RNA, 19 nt, Artificial Sequence
  Description of Artificial Sequence: Synthetic oligonucleotide
  Sense strand starting at position 2932 of SEQ ID NO: 1881714
uuguucuuagaauggaauu

SEQ ID NO: 2066083 - RNA, 19 nt, Artificial Sequence
  Description of Artificial Sequence: Synthetic oligonucleotide
  Antisense strand to SEQ ID NO: 2066082
aauuccauucuaagaacaa

SEQ ID NO: 2066084 - RNA, 19 nt, Artificial Sequence
  Description of Artificial Sequence: Synthetic oligonucleotide
  Sense strand starting at position 3901 of SEQ ID NO: 1881714
agauaucauuucgauacac

SEQ ID NO: 2066085 - RNA, 19 nt, Artificial Sequence
  Description of Artificial Sequence: Synthetic oligonucleotide
  Antisense strand to SEQ ID NO: 2066084
guguaucgaaaugauaucu

SEQ ID NO: 2066086 - RNA, 19 nt, Artificial Sequence
  Description of Artificial Sequence: Synthetic oligonucleotide
  Sense strand starting at position 3957 of SEQ ID NO: 1881714
auggaaauguuagcuuaag

SEQ ID NO: 2066087 - RNA, 19 nt, Artificial Sequence
  Description of Artificial Sequence: Synthetic oligonucleotide
  Antisense strand to SEQ ID NO: 2066086
cuuaagcuaacauuuccau

SEQ ID NO: 2066088 - RNA, 19 nt, Artificial Sequence
  Description of Artificial Sequence: Synthetic oligonucleotide
  Sense strand starting at position 3958 of SEQ ID NO: 1881714
uggaaauguuagcuuaaga

SEQ ID NO: 2066089 - RNA, 19 nt, Artificial Sequence
  Description of Artificial Sequence: Synthetic oligonucleotide
  Antisense strand to SEQ ID NO: 2066088
ucuuaagcuaacauuucca

SEQ ID NO: 2066090 - RNA, 19 nt, Artificial Sequence
  Description of Artificial Sequence: Synthetic oligonucleotide
  Sense strand starting at position 138 of SEQ ID NO: 1881715
agcucugaaagaggugaaa

SEQ ID NO: 2066091 - RNA, 19 nt, Artificial Sequence
  Description of Artificial Sequence: Synthetic oligonucleotide
  Antisense strand to SEQ ID NO: 2066090
uuucaccucuuucagagcu

SEQ ID NO: 2066092 - RNA, 19 nt, Artificial Sequence
  Description of Artificial Sequence: Synthetic oligonucleotide
  Sense strand starting at position 182 of SEQ ID NO: 1881715
cuugaaguucgcgugugua

SEQ ID NO: 2066093 - RNA, 19 nt, Artificial Sequence
  Description of Artificial Sequence: Synthetic oligonucleotide
  Antisense strand to SEQ ID NO: 2066092
uacacacgcgaacuucaag

SEQ ID NO: 2066094 - RNA, 19 nt, Artificial Sequence
  Description of Artificial Sequence: Synthetic oligonucleotide
  Sense strand starting at position 355 of SEQ ID NO: 1881715
gcuaaaucacgcuggauuu

SEQ ID NO: 2066095 - RNA, 19 nt, Artificial Sequence
  Description of Artificial Sequence: Synthetic oligonucleotide
  Antisense strand to SEQ ID NO: 2066094
aaauccagcgugauuuagc

SEQ ID NO: 2066096 - RNA, 19 nt, Artificial Sequence
  Description of Artificial Sequence: Synthetic oligonucleotide
  Sense strand starting at position 368 of SEQ ID NO: 1881715
ggauuugucucccagauaa

SEQ ID NO: 2066097 - RNA, 19 nt, Artificial Sequence
  Description of Artificial Sequence: Synthetic oligonucleotide
  Antisense strand to SEQ ID NO: 2066096
uuaucugggagacaaaucc

SEQ ID NO: 2066098 - RNA, 19 nt, Artificial Sequence
  Description of Artificial Sequence: Synthetic oligonucleotide
  Sense strand starting at position 386 of SEQ ID NO: 1881715
aagggaggucugcaaagua

SEQ ID NO: 2066099 - RNA, 19 nt, Artificial Sequence
  Description of Artificial Sequence: Synthetic oligonucleotide
  Antisense strand to SEQ ID NO: 2066098
uacuuugcagaccucccuu

SEQ ID NO: 2066100 - RNA, 19 nt, Artificial Sequence
  Description of Artificial Sequence: Synthetic oligonucleotide
  Sense strand starting at position 469 of SEQ ID NO: 1881715
ccuuguuccacugauggga

SEQ ID NO: 2066101 - RNA, 19 nt, Artificial Sequence
  Description of Artificial Sequence: Synthetic oligonucleotide
  Antisense strand to SEQ ID NO: 2066100
ucccaucaguggaacaagg

SEQ ID NO: 2066102 - RNA, 19 nt, Artificial Sequence
  Description of Artificial Sequence: Synthetic oligonucleotide
  Sense strand starting at position 506 of SEQ ID NO: 1881715
cgcugauugguggaaagga

SEQ ID NO: 2066103 - RNA, 19 nt, Artificial Sequence
  Description of Artificial Sequence: Synthetic oligonucleotide
  Antisense strand to SEQ ID NO: 2066102
uccuuuccaccaaucagcg

SEQ ID NO: 2066104 - RNA, 19 nt, Artificial Sequence
  Description of Artificial Sequence: Synthetic oligonucleotide
  Sense strand starting at position 629 of SEQ ID NO: 1881715
cggcucuuccuagauuaag

SEQ ID NO: 2066105 - RNA, 19 nt, Artificial Sequence
  Description of Artificial Sequence: Synthetic oligonucleotide
  Antisense strand to SEQ ID NO: 2066104
cuuaaucuaggaagagccg

SEQ ID NO: 2066106 - RNA, 19 nt, Artificial Sequence
  Description of Artificial Sequence: Synthetic oligonucleotide
  Sense strand starting at position 700 of SEQ ID NO: 1881715
accugugaccgugauuaaa

SEQ ID NO: 2066107 - RNA, 19 nt, Artificial Sequence
  Description of Artificial Sequence: Synthetic oligonucleotide
  Antisense strand to SEQ ID NO: 2066106
uuuaaucacggucacaggu

SEQ ID NO: 2066108 - RNA, 19 nt, Artificial Sequence
  Description of Artificial Sequence: Synthetic oligonucleotide
  Sense strand starting at position 969 of SEQ ID NO: 1881715
ucccgaucuccacaagagu

SEQ ID NO: 2066109 - RNA, 19 nt, Artificial Sequence
  Description of Artificial Sequence: Synthetic oligonucleotide
  Antisense strand to SEQ ID NO: 2066108
acucuuguggagaucggga

SEQ ID NO: 2066110 - RNA, 19 nt, Artificial Sequence
  Description of Artificial Sequence: Synthetic oligonucleotide
  Sense strand starting at position 1162 of SEQ ID NO: 1881715
ggcagaagcgcugacaaau

SEQ ID NO: 2066111 - RNA, 19 nt, Artificial Sequence
  Description of Artificial Sequence: Synthetic oligonucleotide
  Antisense strand to SEQ ID NO: 2066110
auuugucagcgcuucugcc

SEQ ID NO: 2066112 - RNA, 19 nt, Artificial Sequence
  Description of Artificial Sequence: Synthetic oligonucleotide
  Sense strand starting at position 1657 of SEQ ID NO: 1881715
cagguaaguaccuguggau

SEQ ID NO: 2066113 - RNA, 19 nt, Artificial Sequence
  Description of Artificial Sequence: Synthetic oligonucleotide
  Antisense strand to SEQ ID NO: 2066112
auccacagguacuuaccug

SEQ ID NO: 2066114 - RNA, 19 nt, Artificial Sequence
  Description of Artificial Sequence: Synthetic oligonucleotide
  Sense strand starting at position 2018 of SEQ ID NO: 1881715
gcguuuggcaaauaaugaa

SEQ ID NO: 2066115 - RNA, 19 nt, Artificial Sequence
  Description of Artificial Sequence: Synthetic oligonucleotide
  Antisense strand to SEQ ID NO: 2066114
uucauuauuugccaaacgc

SEQ ID NO: 2066116 - RNA, 19 nt, Artificial Sequence
  Description of Artificial Sequence: Synthetic oligonucleotide
  Sense strand starting at position 2206 of SEQ ID NO: 1881715
guggauguuggauggauua

SEQ ID NO: 2066117 - RNA, 19 nt, Artificial Sequence
  Description of Artificial Sequence: Synthetic oligonucleotide
  Antisense strand to SEQ ID NO: 2066116
uaauccauccaacauccac

SEQ ID NO: 2066118 - RNA, 19 nt, Artificial Sequence
  Description of Artificial Sequence: Synthetic oligonucleotide
  Sense strand starting at position 2456 of SEQ ID NO: 1881715
ucugaaaugcaguaauaac

SEQ ID NO: 2066119 - RNA, 19 nt, Artificial Sequence
  Description of Artificial Sequence: Synthetic oligonucleotide
  Antisense strand to SEQ ID NO: 2066118
guuauuacugcauuucaga

SEQ ID NO: 2066120 - RNA, 19 nt, Artificial Sequence
  Description of Artificial Sequence: Synthetic oligonucleotide
  Sense strand starting at position 2500 of SEQ ID NO: 1881715
ugguuagguggcuagacuu

SEQ ID NO: 2066121 - RNA, 19 nt, Artificial Sequence
  Description of Artificial Sequence: Synthetic oligonucleotide
  Antisense strand to SEQ ID NO: 2066120
aagucuagccaccuaacca

SEQ ID NO: 2066122 - RNA, 19 nt, Artificial Sequence
  Description of Artificial Sequence: Synthetic oligonucleotide
  Sense strand starting at position 2580 of SEQ ID NO: 1881715
uuguccaaugguuaaauga

SEQ ID NO: 2066123 - RNA, 19 nt, Artificial Sequence
  Description of Artificial Sequence: Synthetic oligonucleotide
  Antisense strand to SEQ ID NO: 2066122
ucauuuaaccauuggacaa

SEQ ID NO: 2066124 - RNA, 19 nt, Artificial Sequence
  Description of Artificial Sequence: Synthetic oligonucleotide
  Sense strand starting at position 2587 of SEQ ID NO: 1881715
augguuaaaugaguguaca

SEQ ID NO: 2066125 - RNA, 19 nt, Artificial Sequence
  Description of Artificial Sequence: Synthetic oligonucleotide
  Antisense strand to SEQ ID NO: 2066124
uguacacucauuuaaccau

SEQ ID NO: 2066126 - RNA, 19 nt, Artificial Sequence
  Description of Artificial Sequence: Synthetic oligonucleotide
  Sense strand starting at position 2588 of SEQ ID NO: 1881715
ugguuaaaugaguguacac

SEQ ID NO: 2066127 - RNA, 19 nt, Artificial Sequence
  Description of Artificial Sequence: Synthetic oligonucleotide
  Antisense strand to SEQ ID NO: 2066126
guguacacucauuuaacca

SEQ ID NO: 2066128 - RNA, 19 nt, Artificial Sequence
  Description of Artificial Sequence: Synthetic oligonucleotide
  Sense strand starting at position 2590 of SEQ ID NO: 1881715
guuaaaugaguguacacuu

SEQ ID NO: 2066129 - RNA, 19 nt, Artificial Sequence
  Description of Artificial Sequence: Synthetic oligonucleotide
  Antisense strand to SEQ ID NO: 2066128
aaguguacacucauuuaac

SEQ ID NO: 2066130 - RNA, 19 nt, Artificial Sequence
  Description of Artificial Sequence: Synthetic oligonucleotide
  Sense strand starting at position 2624 of SEQ ID NO: 1881715
uuuggaggguuucucauga

SEQ ID NO: 2066131 - RNA, 19 nt, Artificial Sequence
  Description of Artificial Sequence: Synthetic oligonucleotide
  Antisense strand to SEQ ID NO: 2066130
ucaugagaaacccuccaaa

SEQ ID NO: 2066132 - RNA, 19 nt, Artificial Sequence
  Description of Artificial Sequence: Synthetic oligonucleotide
  Sense strand starting at position 2705 of SEQ ID NO: 1881715
uccagugugguguaaagga

SEQ ID NO: 2066133 - RNA, 19 nt, Artificial Sequence
  Description of Artificial Sequence: Synthetic oligonucleotide
  Antisense strand to SEQ ID NO: 2066132
uccuuuacaccacacugga

SEQ ID NO: 2066134 - RNA, 19 nt, Artificial Sequence
  Description of Artificial Sequence: Synthetic oligonucleotide
  Sense strand starting at position 2837 of SEQ ID NO: 1881715
gaggguguucucuauguag

SEQ ID NO: 2066135 - RNA, 19 nt, Artificial Sequence
  Description of Artificial Sequence: Synthetic oligonucleotide
  Antisense strand to SEQ ID NO: 2066134
cuacauagagaacacccuc

SEQ ID NO: 2066136 - RNA, 19 nt, Artificial Sequence
  Description of Artificial Sequence: Synthetic oligonucleotide
  Sense strand starting at position 2845 of SEQ ID NO: 1881715
ucucuauguagguagguaa

SEQ ID NO: 2066137 - RNA, 19 nt, Artificial Sequence
  Description of Artificial Sequence: Synthetic oligonucleotide
  Antisense strand to SEQ ID NO: 2066136
uuaccuaccuacauagaga

SEQ ID NO: 2066138 - RNA, 19 nt, Artificial Sequence
  Description of Artificial Sequence: Synthetic oligonucleotide
  Sense strand starting at position 2981 of SEQ ID NO: 1881715
gacugagucagagguaugu

SEQ ID NO: 2066139 - RNA, 19 nt, Artificial Sequence
  Description of Artificial Sequence: Synthetic oligonucleotide
  Antisense strand to SEQ ID NO: 2066138
acauaccucugacucaguc

SEQ ID NO: 2066140 - RNA, 19 nt, Artificial Sequence
  Description of Artificial Sequence: Synthetic oligonucleotide
  Sense strand starting at position 2983 of SEQ ID NO: 1881715
cugagucagagguaugugu

SEQ ID NO: 2066141 - RNA, 19 nt, Artificial Sequence
  Description of Artificial Sequence: Synthetic oligonucleotide
  Antisense strand to SEQ ID NO: 2066140
acacauaccucugacucag

SEQ ID NO: 2066142 - RNA, 19 nt, Artificial Sequence
  Description of Artificial Sequence: Synthetic oligonucleotide
  Sense strand starting at position 3013 of SEQ ID NO: 1881715
ugugaacguguguauuuga

SEQ ID NO: 2066143 - RNA, 19 nt, Artificial Sequence
  Description of Artificial Sequence: Synthetic oligonucleotide
  Antisense strand to SEQ ID NO: 2066142
ucaaauacacacguucaca

SEQ ID NO: 2066144 - RNA, 19 nt, Artificial Sequence
  Description of Artificial Sequence: Synthetic oligonucleotide
  Sense strand starting at position 3016 of SEQ ID NO: 1881715
gaacguguguauuugagcu

SEQ ID NO: 2066145 - RNA, 19 nt, Artificial Sequence
  Description of Artificial Sequence: Synthetic oligonucleotide
  Antisense strand to SEQ ID NO: 2066144
agcucaaauacacacguuc

SEQ ID NO: 2066146 - RNA, 19 nt, Artificial Sequence
  Description of Artificial Sequence: Synthetic oligonucleotide
  Sense strand starting at position 3020 of SEQ ID NO: 1881715
guguguauuugagcuaaua

SEQ ID NO: 2066147 - RNA, 19 nt, Artificial Sequence
  Description of Artificial Sequence: Synthetic oligonucleotide
  Antisense strand to SEQ ID NO: 2066146
uauuagcucaaauacacac

SEQ ID NO: 2066148 - RNA, 19 nt, Artificial Sequence
  Description of Artificial Sequence: Synthetic oligonucleotide
  Sense strand starting at position 3106 of SEQ ID NO: 1881715
augaauguuucuguaccua

SEQ ID NO: 2066149 - RNA, 19 nt, Artificial Sequence
  Description of Artificial Sequence: Synthetic oligonucleotide
  Antisense strand to SEQ ID NO: 2066148
uagguacagaaacauucau

SEQ ID NO: 2066150 - RNA, 19 nt, Artificial Sequence
  Description of Artificial Sequence: Synthetic oligonucleotide
  Sense strand starting at position 3295 of SEQ ID NO: 1881715
cccugugauguguauaaag

SEQ ID NO: 2066151 - RNA, 19 nt, Artificial Sequence
  Description of Artificial Sequence: Synthetic oligonucleotide
  Antisense strand to SEQ ID NO: 2066150
cuuuauacacaucacaggg

SEQ ID NO: 2066152 - RNA, 19 nt, Artificial Sequence
  Description of Artificial Sequence: Synthetic oligonucleotide
  Sense strand starting at position 3297 of SEQ ID NO: 1881715
cugugauguguauaaagag

SEQ ID NO: 2066153 - RNA, 19 nt, Artificial Sequence
  Description of Artificial Sequence: Synthetic oligonucleotide
  Antisense strand to SEQ ID NO: 2066152
cucuuuauacacaucacag

SEQ ID NO: 2066154 - RNA, 19 nt, Artificial Sequence
  Description of Artificial Sequence: Synthetic oligonucleotide
  Sense strand starting at position 3341 of SEQ ID NO: 1881715
agaacagauuagucuuuga

SEQ ID NO: 2066155 - RNA, 19 nt, Artificial Sequence
  Description of Artificial Sequence: Synthetic oligonucleotide
  Antisense strand to SEQ ID NO: 2066154
ucaaagacuaaucuguucu

SEQ ID NO: 2066156 - RNA, 19 nt, Artificial Sequence
  Description of Artificial Sequence: Synthetic oligonucleotide
  Sense strand starting at position 3345 of SEQ ID NO: 1881715
cagauuagucuuugauaga

SEQ ID NO: 2066157 - RNA, 19 nt, Artificial Sequence
  Description of Artificial Sequence: Synthetic oligonucleotide
  Antisense strand to SEQ ID NO: 2066156
ucuaucaaagacuaaucug

SEQ ID NO: 2066158 - RNA, 19 nt, Artificial Sequence
  Description of Artificial Sequence: Synthetic oligonucleotide
  Sense strand starting at position 3374 of SEQ ID NO: 1881715
gugaucauuuggucucugu

SEQ ID NO: 2066159 - RNA, 19 nt, Artificial Sequence
  Description of Artificial Sequence: Synthetic oligonucleotide
  Antisense strand to SEQ ID NO: 2066158
acagagaccaaaugaucac

SEQ ID NO: 2066160 - RNA, 19 nt, Artificial Sequence
  Description of Artificial Sequence: Synthetic oligonucleotide
  Sense strand starting at position 3493 of SEQ ID NO: 1881715
agaaauugaugcuuauuac

SEQ ID NO: 2066161 - RNA, 19 nt, Artificial Sequence
  Description of Artificial Sequence: Synthetic oligonucleotide
  Antisense strand to SEQ ID NO: 2066160
guaauaagcaucaauuucu

SEQ ID NO: 2066162 - RNA, 19 nt, Artificial Sequence
  Description of Artificial Sequence: Synthetic oligonucleotide
  Sense strand starting at position 3742 of SEQ ID NO: 1881715
caacuauagcaguaagagu

SEQ ID NO: 2066163 - RNA, 19 nt, Artificial Sequence
  Description of Artificial Sequence: Synthetic oligonucleotide
  Antisense strand to SEQ ID NO: 2066162
acucuuacugcuauaguug

SEQ ID NO: 2066164 - RNA, 19 nt, Artificial Sequence
  Description of Artificial Sequence: Synthetic oligonucleotide
  Sense strand starting at position 3813 of SEQ ID NO: 1881715
acaugugcuccgucuaugu

SEQ ID NO: 2066165 - RNA, 19 nt, Artificial Sequence
  Description of Artificial Sequence: Synthetic oligonucleotide
  Antisense strand to SEQ ID NO: 2066164
acauagacggagcacaugu

SEQ ID NO: 2066166 - RNA, 19 nt, Artificial Sequence
  Description of Artificial Sequence: Synthetic oligonucleotide
  Sense strand starting at position 3828 of SEQ ID NO: 1881715
augucugcaaagugaaaga

SEQ ID NO: 2066167 - RNA, 19 nt, Artificial Sequence
  Description of Artificial Sequence: Synthetic oligonucleotide
  Antisense strand to SEQ ID NO: 2066166
ucuuucacuuugcagacau

SEQ ID NO: 2066168 - RNA, 19 nt, Artificial Sequence
  Description of Artificial Sequence: Synthetic oligonucleotide
  Sense strand starting at position 3895 of SEQ ID NO: 1881715
ugggaugauuuauaugaau

SEQ ID NO: 2066169 - RNA, 19 nt, Artificial Sequence
  Description of Artificial Sequence: Synthetic oligonucleotide
  Antisense strand to SEQ ID NO: 2066168
auucauauaaaucauccca

SEQ ID NO: 2066170 - RNA, 19 nt, Artificial Sequence
  Description of Artificial Sequence: Synthetic oligonucleotide
  Sense strand starting at position 27 of SEQ ID NO: 1881716
agggauagcugcuuaacua

SEQ ID NO: 2066171 - RNA, 19 nt, Artificial Sequence
  Description of Artificial Sequence: Synthetic oligonucleotide
  Antisense strand to SEQ ID NO: 2066170
uaguuaagcagcuaucccu

SEQ ID NO: 2066172 - RNA, 19 nt, Artificial Sequence
  Description of Artificial Sequence: Synthetic oligonucleotide
  Sense strand starting at position 28 of SEQ ID NO: 1881716
gggauagcugcuuaacuau

SEQ ID NO: 2066173 - RNA, 19 nt, Artificial Sequence
  Description of Artificial Sequence: Synthetic oligonucleotide
  Antisense strand to SEQ ID NO: 2066172
auaguuaagcagcuauccc

SEQ ID NO: 2066174 - RNA, 19 nt, Artificial Sequence
  Description of Artificial Sequence: Synthetic oligonucleotide
  Sense strand starting at position 57 of SEQ ID NO: 1881716
agaacauucuuagcaguaa

SEQ ID NO: 2066175 - RNA, 19 nt, Artificial Sequence
  Description of Artificial Sequence: Synthetic oligonucleotide
  Antisense strand to SEQ ID NO: 2066174
uuacugcuaagaauguucu

SEQ ID NO: 2066176 - RNA, 19 nt, Artificial Sequence
  Description of Artificial Sequence: Synthetic oligonucleotide
  Sense strand starting at position 132 of SEQ ID NO: 1881716
gucccaguaguauaaauau

SEQ ID NO: 2066177 - RNA, 19 nt, Artificial Sequence
  Description of Artificial Sequence: Synthetic oligonucleotide
  Antisense strand to SEQ ID NO: 2066176
auauuuauacuacugggac

SEQ ID NO: 2066178 - RNA, 19 nt, Artificial Sequence
  Description of Artificial Sequence: Synthetic oligonucleotide
  Sense strand starting at position 315 of SEQ ID NO: 1881716
gcagauuugcaaugcugca

SEQ ID NO: 2066179 - RNA, 19 nt, Artificial Sequence
  Description of Artificial Sequence: Synthetic oligonucleotide
  Antisense strand to SEQ ID NO: 2066178
ugcagcauugcaaaucugc

SEQ ID NO: 2066180 - RNA, 19 nt, Artificial Sequence
  Description of Artificial Sequence: Synthetic oligonucleotide
  Sense strand starting at position 320 of SEQ ID NO: 1881716
uuugcaaugcugcauauaa

SEQ ID NO: 2066181 - RNA, 19 nt, Artificial Sequence
  Description of Artificial Sequence: Synthetic oligonucleotide
  Antisense strand to SEQ ID NO: 2066180
uuauaugcagcauugcaaa

SEQ ID NO: 2066182 - RNA, 19 nt, Artificial Sequence
  Description of Artificial Sequence: Synthetic oligonucleotide
  Sense strand starting at position 397 of SEQ ID NO: 1881716
agcguuuauauguaaauag

SEQ ID NO: 2066183 - RNA, 19 nt, Artificial Sequence
  Description of Artificial Sequence: Synthetic oligonucleotide
  Antisense strand to SEQ ID NO: 2066182
cuauuuacauauaaacgcu

SEQ ID NO: 2066184 - RNA, 19 nt, Artificial Sequence
  Description of Artificial Sequence: Synthetic oligonucleotide
  Sense strand starting at position 458 of SEQ ID NO: 1881716
acgugcaauauaggugaga

SEQ ID NO: 2066185 - RNA, 19 nt, Artificial Sequence
  Description of Artificial Sequence: Synthetic oligonucleotide
  Antisense strand to SEQ ID NO: 2066184
ucucaccuauauugcacgu

SEQ ID NO: 2066186 - RNA, 19 nt, Artificial Sequence
  Description of Artificial Sequence: Synthetic oligonucleotide
  Sense strand starting at position 459 of SEQ ID NO: 1881716
cgugcaauauaggugagaa

SEQ ID NO: 2066187 - RNA, 19 nt, Artificial Sequence
  Description of Artificial Sequence: Synthetic oligonucleotide
  Antisense strand to SEQ ID NO: 2066186
uucucaccuauauugcacg

SEQ ID NO: 2066188 - RNA, 19 nt, Artificial Sequence
  Description of Artificial Sequence: Synthetic oligonucleotide
  Sense strand starting at position 460 of SEQ ID NO: 1881716
gugcaauauaggugagaaa

SEQ ID NO: 2066189 - RNA, 19 nt, Artificial Sequence
  Description of Artificial Sequence: Synthetic oligonucleotide
  Antisense strand to SEQ ID NO: 2066188
uuucucaccuauauugcac

SEQ ID NO: 2066190 - RNA, 19 nt, Artificial Sequence
  Description of Artificial Sequence: Synthetic oligonucleotide
  Sense strand starting at position 500 of SEQ ID NO: 1881716
acaggcugcccuuauaauu

SEQ ID NO: 2066191 - RNA, 19 nt, Artificial Sequence
  Description of Artificial Sequence: Synthetic oligonucleotide
  Antisense strand to SEQ ID NO: 2066190
aauuauaagggcagccugu

SEQ ID NO: 2066192 - RNA, 19 nt, Artificial Sequence
  Description of Artificial Sequence: Synthetic oligonucleotide
  Sense strand starting at position 675 of SEQ ID NO: 1881716
aaguguucugugcauauuu

SEQ ID NO: 2066193 - RNA, 19 nt, Artificial Sequence
  Description of Artificial Sequence: Synthetic oligonucleotide
  Antisense strand to SEQ ID NO: 2066192
aaauaugcacagaacacuu

SEQ ID NO: 2066194 - RNA, 19 nt, Artificial Sequence
  Description of Artificial Sequence: Synthetic oligonucleotide
  Sense strand starting at position 682 of SEQ ID NO: 1881716
cugugcauauuuguguaaa

SEQ ID NO: 2066195 - RNA, 19 nt, Artificial Sequence
  Description of Artificial Sequence: Synthetic oligonucleotide
  Antisense strand to SEQ ID NO: 2066194
uuuacacaaauaugcacag

SEQ ID NO: 2066196 - RNA, 19 nt, Artificial Sequence
  Description of Artificial Sequence: Synthetic oligonucleotide
  Sense strand starting at position 818 of SEQ ID NO: 1881716
ggcugcaauuaccuuagaa

SEQ ID NO: 2066197 - RNA, 19 nt, Artificial Sequence
  Description of Artificial Sequence: Synthetic oligonucleotide
  Antisense strand to SEQ ID NO: 2066196
uucuaagguaauugcagcc

SEQ ID NO: 2066198 - RNA, 19 nt, Artificial Sequence
  Description of Artificial Sequence: Synthetic oligonucleotide
  Sense strand starting at position 1130 of SEQ ID NO: 1881716
ucuugauagucugcaagag

SEQ ID NO: 2066199 - RNA, 19 nt, Artificial Sequence
  Description of Artificial Sequence: Synthetic oligonucleotide
  Antisense strand to SEQ ID NO: 2066198
cucuugcagacuaucaaga

SEQ ID NO: 2066200 - RNA, 19 nt, Artificial Sequence
  Description of Artificial Sequence: Synthetic oligonucleotide
  Sense strand starting at position 1131 of SEQ ID NO: 1881716
cuugauagucugcaagaga

SEQ ID NO: 2066201 - RNA, 19 nt, Artificial Sequence
  Description of Artificial Sequence: Synthetic oligonucleotide
  Antisense strand to SEQ ID NO: 2066200
ucucuugcagacuaucaag

SEQ ID NO: 2066202 - RNA, 19 nt, Artificial Sequence
  Description of Artificial Sequence: Synthetic oligonucleotide
  Sense strand starting at position 1282 of SEQ ID NO: 1881716
gccgcuaaggcguuucaga

SEQ ID NO: 2066203 - RNA, 19 nt, Artificial Sequence
  Description of Artificial Sequence: Synthetic oligonucleotide
  Antisense strand to SEQ ID NO: 2066202
ucugaaacgccuuagcggc

SEQ ID NO: 2066204 - RNA, 19 nt, Artificial Sequence
  Description of Artificial Sequence: Synthetic oligonucleotide
  Sense strand starting at position 1283 of SEQ ID NO: 1881716
ccgcuaaggcguuucagau

SEQ ID NO: 2066205 - RNA, 19 nt, Artificial Sequence
  Description of Artificial Sequence: Synthetic oligonucleotide
  Antisense strand to SEQ ID NO: 2066204
aucugaaacgccuuagcgg

SEQ ID NO: 2066206 - RNA, 19 nt, Artificial Sequence
  Description of Artificial Sequence: Synthetic oligonucleotide
  Sense strand starting at position 1284 of SEQ ID NO: 1881716
cgcuaaggcguuucagauu

SEQ ID NO: 2066207 - RNA, 19 nt, Artificial Sequence
  Description of Artificial Sequence: Synthetic oligonucleotide
  Antisense strand to SEQ ID NO: 2066206
aaucugaaacgccuuagcg

SEQ ID NO: 2066208 - RNA, 19 nt, Artificial Sequence
  Description of Artificial Sequence: Synthetic oligonucleotide
  Sense strand starting at position 1322 of SEQ ID NO: 1881716
agaaauguaccuuauguuu

SEQ ID NO: 2066209 - RNA, 19 nt, Artificial Sequence
  Description of Artificial Sequence: Synthetic oligonucleotide
  Antisense strand to SEQ ID NO: 2066208
aaacauaagguacauuucu

SEQ ID NO: 2066210 - RNA, 19 nt, Artificial Sequence
  Description of Artificial Sequence: Synthetic oligonucleotide
  Sense strand starting at position 1610 of SEQ ID NO: 1881716
acagguuauuacucaccau

SEQ ID NO: 2066211 - RNA, 19 nt, Artificial Sequence
  Description of Artificial Sequence: Synthetic oligonucleotide
  Antisense strand to SEQ ID NO: 2066210
auggugaguaauaaccugu

SEQ ID NO: 2066212 - RNA, 19 nt, Artificial Sequence
  Description of Artificial Sequence: Synthetic oligonucleotide
  Sense strand starting at position 1613 of SEQ ID NO: 1881716
gguuauuacucaccaucug

SEQ ID NO: 2066213 - RNA, 19 nt, Artificial Sequence
  Description of Artificial Sequence: Synthetic oligonucleotide
  Antisense strand to SEQ ID NO: 2066212
cagauggugaguaauaacc

SEQ ID NO: 2066214 - RNA, 19 nt, Artificial Sequence
  Description of Artificial Sequence: Synthetic oligonucleotide
  Sense strand starting at position 1984 of SEQ ID NO: 1881716
cgacgcuucccgaauguga

SEQ ID NO: 2066215 - RNA, 19 nt, Artificial Sequence
  Description of Artificial Sequence: Synthetic oligonucleotide
  Antisense strand to SEQ ID NO: 2066214
ucacauucgggaagcgucg

SEQ ID NO: 2066216 - RNA, 19 nt, Artificial Sequence
  Description of Artificial Sequence: Synthetic oligonucleotide
  Sense strand starting at position 2318 of SEQ ID NO: 1881716
uccuguuuaggauacuuau

SEQ ID NO: 2066217 - RNA, 19 nt, Artificial Sequence
  Description of Artificial Sequence: Synthetic oligonucleotide
  Antisense strand to SEQ ID NO: 2066216
auaaguauccuaaacagga

SEQ ID NO: 2066218 - RNA, 19 nt, Artificial Sequence
  Description of Artificial Sequence: Synthetic oligonucleotide
  Sense strand starting at position 2793 of SEQ ID NO: 1881716
ccgauuucuuuauugugac

SEQ ID NO: 2066219 - RNA, 19 nt, Artificial Sequence
  Description of Artificial Sequence: Synthetic oligonucleotide
  Antisense strand to SEQ ID NO: 2066218
gucacaauaaagaaaucgg

SEQ ID NO: 2066220 - RNA, 19 nt, Artificial Sequence
  Description of Artificial Sequence: Synthetic oligonucleotide
  Sense strand starting at position 2810 of SEQ ID NO: 1881716
acagauauaccaugguauu

SEQ ID NO: 2066221 - RNA, 19 nt, Artificial Sequence
  Description of Artificial Sequence: Synthetic oligonucleotide
  Antisense strand to SEQ ID NO: 2066220
aauaccaugguauaucugu

SEQ ID NO: 2066222 - RNA, 19 nt, Artificial Sequence
  Description of Artificial Sequence: Synthetic oligonucleotide
  Sense strand starting at position 2811 of SEQ ID NO: 1881716
cagauauaccaugguauug

SEQ ID NO: 2066223 - RNA, 19 nt, Artificial Sequence
  Description of Artificial Sequence: Synthetic oligonucleotide
  Antisense strand to SEQ ID NO: 2066222
caauaccaugguauaucug

SEQ ID NO: 2066224 - RNA, 19 nt, Artificial Sequence
  Description of Artificial Sequence: Synthetic oligonucleotide
  Sense strand starting at position 2964 of SEQ ID NO: 1881716
aagacaaaguagugauuua

SEQ ID NO: 2066225 - RNA, 19 nt, Artificial Sequence
  Description of Artificial Sequence: Synthetic oligonucleotide
  Antisense strand to SEQ ID NO: 2066224
uaaaucacuacuuugucuu

SEQ ID NO: 2066226 - RNA, 19 nt, Artificial Sequence
  Description of Artificial Sequence: Synthetic oligonucleotide
  Sense strand starting at position 2993 of SEQ ID NO: 1881716
cuaucuacuuuagugugaa

SEQ ID NO: 2066227 - RNA, 19 nt, Artificial Sequence
  Description of Artificial Sequence: Synthetic oligonucleotide
  Antisense strand to SEQ ID NO: 2066226
uucacacuaaaguagauag

SEQ ID NO: 2066228 - RNA, 19 nt, Artificial Sequence
  Description of Artificial Sequence: Synthetic oligonucleotide
  Sense strand starting at position 2996 of SEQ ID NO: 1881716
ucuacuuuagugugaaauu

SEQ ID NO: 2066229 - RNA, 19 nt, Artificial Sequence
  Description of Artificial Sequence: Synthetic oligonucleotide
  Antisense strand to SEQ ID NO: 2066228
aauuucacacuaaaguaga

SEQ ID NO: 2066230 - RNA, 19 nt, Artificial Sequence
  Description of Artificial Sequence: Synthetic oligonucleotide
  Sense strand starting at position 3035 of SEQ ID NO: 1881716
uucuaaguuugacuugaga

SEQ ID NO: 2066231 - RNA, 19 nt, Artificial Sequence
  Description of Artificial Sequence: Synthetic oligonucleotide
  Antisense strand to SEQ ID NO: 2066230
ucucaagucaaacuuagaa

SEQ ID NO: 2066232 - RNA, 19 nt, Artificial Sequence
  Description of Artificial Sequence: Synthetic oligonucleotide
  Sense strand starting at position 3148 of SEQ ID NO: 1881716
uugguugguaaaugaagau

SEQ ID NO: 2066233 - RNA, 19 nt, Artificial Sequence
  Description of Artificial Sequence: Synthetic oligonucleotide
  Antisense strand to SEQ ID NO: 2066232
aucuucauuuaccaaccaa

SEQ ID NO: 2066234 - RNA, 19 nt, Artificial Sequence
  Description of Artificial Sequence: Synthetic oligonucleotide
  Sense strand starting at position 3155 of SEQ ID NO: 1881716
guaaaugaagauuggcuua

SEQ ID NO: 2066235 - RNA, 19 nt, Artificial Sequence
  Description of Artificial Sequence: Synthetic oligonucleotide
  Antisense strand to SEQ ID NO: 2066234
uaagccaaucuucauuuac

SEQ ID NO: 2066236 - RNA, 19 nt, Artificial Sequence
  Description of Artificial Sequence: Synthetic oligonucleotide
  Sense strand starting at position 3514 of SEQ ID NO: 1881716
aucaaaugauggcuaggua

SEQ ID NO: 2066237 - RNA, 19 nt, Artificial Sequence
  Description of Artificial Sequence: Synthetic oligonucleotide
  Antisense strand to SEQ ID NO: 2066236
uaccuagccaucauuugau

SEQ ID NO: 2066238 - RNA, 19 nt, Artificial Sequence
  Description of Artificial Sequence: Synthetic oligonucleotide
  Sense strand starting at position 3517 of SEQ ID NO: 1881716
aaaugauggcuagguaaca

SEQ ID NO: 2066239 - RNA, 19 nt, Artificial Sequence
  Description of Artificial Sequence: Synthetic oligonucleotide
  Antisense strand to SEQ ID NO: 2066238
uguuaccuagccaucauuu

SEQ ID NO: 2066240 - RNA, 19 nt, Artificial Sequence
  Description of Artificial Sequence: Synthetic oligonucleotide
  Sense strand starting at position 3518 of SEQ ID NO: 1881716
aaugauggcuagguaacau

SEQ ID NO: 2066241 - RNA, 19 nt, Artificial Sequence
  Description of Artificial Sequence: Synthetic oligonucleotide
  Antisense strand to SEQ ID NO: 2066240
auguuaccuagccaucauu

SEQ ID NO: 2066242 - RNA, 19 nt, Artificial Sequence
  Description of Artificial Sequence: Synthetic oligonucleotide
  Sense strand starting at position 3730 of SEQ ID NO: 1881716
ggaaauaaccuguggacuu

SEQ ID NO: 2066243 - RNA, 19 nt, Artificial Sequence
  Description of Artificial Sequence: Synthetic oligonucleotide
  Antisense strand to SEQ ID NO: 2066242
aaguccacagguuauuucc

SEQ ID NO: 2066244 - RNA, 19 nt, Artificial Sequence
  Description of Artificial Sequence: Synthetic oligonucleotide
  Sense strand starting at position 3776 of SEQ ID NO: 1881716
cuaaacuuccaguguauac

SEQ ID NO: 2066245 - RNA, 19 nt, Artificial Sequence
  Description of Artificial Sequence: Synthetic oligonucleotide
  Antisense strand to SEQ ID NO: 2066244
guauacacuggaaguuuag

SEQ ID NO: 2066246 - RNA, 19 nt, Artificial Sequence
  Description of Artificial Sequence: Synthetic oligonucleotide
  Sense strand starting at position 3850 of SEQ ID NO: 1881716
aguguauugcaguaugauc

SEQ ID NO: 2066247 - RNA, 19 nt, Artificial Sequence
  Description of Artificial Sequence: Synthetic oligonucleotide
  Antisense strand to SEQ ID NO: 2066246
gaucauacugcaauacacu

SEQ ID NO: 2066248 - RNA, 19 nt, Artificial Sequence
  Description of Artificial Sequence: Synthetic oligonucleotide
  Sense strand starting at position 3981 of SEQ ID NO: 1881716
acuagacuccagcaaaugu

SEQ ID NO: 2066249 - RNA, 19 nt, Artificial Sequence
  Description of Artificial Sequence: Synthetic oligonucleotide
  Antisense strand to SEQ ID NO: 2066248
acauuugcuggagucuagu

SEQ ID NO: 2066250 - RNA, 19 nt, Artificial Sequence
  Description of Artificial Sequence: Synthetic oligonucleotide
  Sense strand starting at position 60 of SEQ ID NO: 1881717
ccgaccaugauguaagagu

SEQ ID NO: 2066251 - RNA, 19 nt, Artificial Sequence
  Description of Artificial Sequence: Synthetic oligonucleotide
  Antisense strand to SEQ ID NO: 2066250
acucuuacaucauggucgg

SEQ ID NO: 2066252 - RNA, 19 nt, Artificial Sequence
  Description of Artificial Sequence: Synthetic oligonucleotide
  Sense strand starting at position 106 of SEQ ID NO: 1881717
gacuuauaccugcagguuu

SEQ ID NO: 2066253 - RNA, 19 nt, Artificial Sequence
  Description of Artificial Sequence: Synthetic oligonucleotide
  Antisense strand to SEQ ID NO: 2066252
aaaccugcagguauaaguc

SEQ ID NO: 2066254 - RNA, 19 nt, Artificial Sequence
  Description of Artificial Sequence: Synthetic oligonucleotide
  Sense strand starting at position 342 of SEQ ID NO: 1881717
gugagaccaguuggugaaa

SEQ ID NO: 2066255 - RNA, 19 nt, Artificial Sequence
  Description of Artificial Sequence: Synthetic oligonucleotide
  Antisense strand to SEQ ID NO: 2066254
uuucaccaacuggucucac

SEQ ID NO: 2066256 - RNA, 19 nt, Artificial Sequence
  Description of Artificial Sequence: Synthetic oligonucleotide
  Sense strand starting at position 410 of SEQ ID NO: 1881717
cuaccuaaaugauugguuu

SEQ ID NO: 2066257 - RNA, 19 nt, Artificial Sequence
  Description of Artificial Sequence: Synthetic oligonucleotide
  Antisense strand to SEQ ID NO: 2066256
aaaccaaucauuuagguag

SEQ ID NO: 2066258 - RNA, 19 nt, Artificial Sequence
  Description of Artificial Sequence: Synthetic oligonucleotide
  Sense strand starting at position 455 of SEQ ID NO: 1881717
agggauagcugcuuaacua

SEQ ID NO: 2066259 - RNA, 19 nt, Artificial Sequence
  Description of Artificial Sequence: Synthetic oligonucleotide
  Antisense strand to SEQ ID NO: 2066258
uaguuaagcagcuaucccu

SEQ ID NO: 2066260 - RNA, 19 nt, Artificial Sequence
  Description of Artificial Sequence: Synthetic oligonucleotide
  Sense strand starting at position 456 of SEQ ID NO: 1881717
gggauagcugcuuaacuau

SEQ ID NO: 2066261 - RNA, 19 nt, Artificial Sequence
  Description of Artificial Sequence: Synthetic oligonucleotide
  Antisense strand to SEQ ID NO: 2066260
auaguuaagcagcuauccc

SEQ ID NO: 2066262 - RNA, 19 nt, Artificial Sequence
  Description of Artificial Sequence: Synthetic oligonucleotide
  Sense strand starting at position 485 of SEQ ID NO: 1881717
agaacauucuuagcaguaa

SEQ ID NO: 2066263 - RNA, 19 nt, Artificial Sequence
  Description of Artificial Sequence: Synthetic oligonucleotide
  Antisense strand to SEQ ID NO: 2066262
uuacugcuaagaauguucu

SEQ ID NO: 2066264 - RNA, 19 nt, Artificial Sequence
  Description of Artificial Sequence: Synthetic oligonucleotide
  Sense strand starting at position 560 of SEQ ID NO: 1881717
gucccaguaguauaaauau

SEQ ID NO: 2066265 - RNA, 19 nt, Artificial Sequence
  Description of Artificial Sequence: Synthetic oligonucleotide
  Antisense strand to SEQ ID NO: 2066264
auauuuauacuacugggac

SEQ ID NO: 2066266 - RNA, 19 nt, Artificial Sequence
  Description of Artificial Sequence: Synthetic oligonucleotide
  Sense strand starting at position 743 of SEQ ID NO: 1881717
gcagauuugcaaugcugca

SEQ ID NO: 2066267 - RNA, 19 nt, Artificial Sequence
  Description of Artificial Sequence: Synthetic oligonucleotide
  Antisense strand to SEQ ID NO: 2066266
ugcagcauugcaaaucugc

SEQ ID NO: 2066268 - RNA, 19 nt, Artificial Sequence
  Description of Artificial Sequence: Synthetic oligonucleotide
  Sense strand starting at position 748 of SEQ ID NO: 1881717
uuugcaaugcugcauauaa

SEQ ID NO: 2066269 - RNA, 19 nt, Artificial Sequence
  Description of Artificial Sequence: Synthetic oligonucleotide
  Antisense strand to SEQ ID NO: 2066268
uuauaugcagcauugcaaa

SEQ ID NO: 2066270 - RNA, 19 nt, Artificial Sequence
  Description of Artificial Sequence: Synthetic oligonucleotide
  Sense strand starting at position 825 of SEQ ID NO: 1881717
agcguuuauauguaaauag

SEQ ID NO: 2066271 - RNA, 19 nt, Artificial Sequence
  Description of Artificial Sequence: Synthetic oligonucleotide
  Antisense strand to SEQ ID NO: 2066270
cuauuuacauauaaacgcu

SEQ ID NO: 2066272 - RNA, 19 nt, Artificial Sequence
  Description of Artificial Sequence: Synthetic oligonucleotide
  Sense strand starting at position 886 of SEQ ID NO: 1881717
acgugcaauauaggugaga

SEQ ID NO: 2066273 - RNA, 19 nt, Artificial Sequence
  Description of Artificial Sequence: Synthetic oligonucleotide
  Antisense strand to SEQ ID NO: 2066272
ucucaccuauauugcacgu

SEQ ID NO: 2066274 - RNA, 19 nt, Artificial Sequence
  Description of Artificial Sequence: Synthetic oligonucleotide
  Sense strand starting at position 887 of SEQ ID NO: 1881717
cgugcaauauaggugagaa

SEQ ID NO: 2066275 - RNA, 19 nt, Artificial Sequence
  Description of Artificial Sequence: Synthetic oligonucleotide
  Antisense strand to SEQ ID NO: 2066274
uucucaccuauauugcacg

SEQ ID NO: 2066276 - RNA, 19 nt, Artificial Sequence
  Description of Artificial Sequence: Synthetic oligonucleotide
  Sense strand starting at position 888 of SEQ ID NO: 1881717
gugcaauauaggugagaaa

SEQ ID NO: 2066277 - RNA, 19 nt, Artificial Sequence
  Description of Artificial Sequence: Synthetic oligonucleotide
  Antisense strand to SEQ ID NO: 2066276
uuucucaccuauauugcac

SEQ ID NO: 2066278 - RNA, 19 nt, Artificial Sequence
  Description of Artificial Sequence: Synthetic oligonucleotide
  Sense strand starting at position 928 of SEQ ID NO: 1881717
acaggcugcccuuauaauu

SEQ ID NO: 2066279 - RNA, 19 nt, Artificial Sequence
  Description of Artificial Sequence: Synthetic oligonucleotide
  Antisense strand to SEQ ID NO: 2066278
aauuauaagggcagccugu

SEQ ID NO: 2066280 - RNA, 19 nt, Artificial Sequence
  Description of Artificial Sequence: Synthetic oligonucleotide
  Sense strand starting at position 1103 of SEQ ID NO: 1881717
aaguguucugugcauauuu

SEQ ID NO: 2066281 - RNA, 19 nt, Artificial Sequence
  Description of Artificial Sequence: Synthetic oligonucleotide
  Antisense strand to SEQ ID NO: 2066280
aaauaugcacagaacacuu

SEQ ID NO: 2066282 - RNA, 19 nt, Artificial Sequence
  Description of Artificial Sequence: Synthetic oligonucleotide
  Sense strand starting at position 1110 of SEQ ID NO: 1881717
cugugcauauuuguguaaa

SEQ ID NO: 2066283 - RNA, 19 nt, Artificial Sequence
  Description of Artificial Sequence: Synthetic oligonucleotide
  Antisense strand to SEQ ID NO: 2066282
uuuacacaaauaugcacag

SEQ ID NO: 2066284 - RNA, 19 nt, Artificial Sequence
  Description of Artificial Sequence: Synthetic oligonucleotide
  Sense strand starting at position 1246 of SEQ ID NO: 1881717
ggcugcaauuaccuuagaa

SEQ ID NO: 2066285 - RNA, 19 nt, Artificial Sequence
  Description of Artificial Sequence: Synthetic oligonucleotide
  Antisense strand to SEQ ID NO: 2066284
uucuaagguaauugcagcc

SEQ ID NO: 2066286 - RNA, 19 nt, Artificial Sequence
  Description of Artificial Sequence: Synthetic oligonucleotide
  Sense strand starting at position 1558 of SEQ ID NO: 1881717
ucuugauagucugcaagag

SEQ ID NO: 2066287 - RNA, 19 nt, Artificial Sequence
  Description of Artificial Sequence: Synthetic oligonucleotide
  Antisense strand to SEQ ID NO: 2066286
cucuugcagacuaucaaga

SEQ ID NO: 2066288 - RNA, 19 nt, Artificial Sequence
  Description of Artificial Sequence: Synthetic oligonucleotide
  Sense strand starting at position 1559 of SEQ ID NO: 1881717
cuugauagucugcaagaga

SEQ ID NO: 2066289 - RNA, 19 nt, Artificial Sequence
  Description of Artificial Sequence: Synthetic oligonucleotide
  Antisense strand to SEQ ID NO: 2066288
ucucuugcagacuaucaag

SEQ ID NO: 2066290 - RNA, 19 nt, Artificial Sequence
  Description of Artificial Sequence: Synthetic oligonucleotide
  Sense strand starting at position 1710 of SEQ ID NO: 1881717
gccgcuaaggcguuucaga

SEQ ID NO: 2066291 - RNA, 19 nt, Artificial Sequence
  Description of Artificial Sequence: Synthetic oligonucleotide
  Antisense strand to SEQ ID NO: 2066290
ucugaaacgccuuagcggc

SEQ ID NO: 2066292 - RNA, 19 nt, Artificial Sequence
  Description of Artificial Sequence: Synthetic oligonucleotide
  Sense strand starting at position 1711 of SEQ ID NO: 1881717
ccgcuaaggcguuucagau

SEQ ID NO: 2066293 - RNA, 19 nt, Artificial Sequence
  Description of Artificial Sequence: Synthetic oligonucleotide
  Antisense strand to SEQ ID NO: 2066292
aucugaaacgccuuagcgg

SEQ ID NO: 2066294 - RNA, 19 nt, Artificial Sequence
  Description of Artificial Sequence: Synthetic oligonucleotide
  Sense strand starting at position 1712 of SEQ ID NO: 1881717
cgcuaaggcguuucagauu

SEQ ID NO: 2066295 - RNA, 19 nt, Artificial Sequence
  Description of Artificial Sequence: Synthetic oligonucleotide
  Antisense strand to SEQ ID NO: 2066294
aaucugaaacgccuuagcg

SEQ ID NO: 2066296 - RNA, 19 nt, Artificial Sequence
  Description of Artificial Sequence: Synthetic oligonucleotide
  Sense strand starting at position 1750 of SEQ ID NO: 1881717
agaaauguaccuuauguuu

SEQ ID NO: 2066297 - RNA, 19 nt, Artificial Sequence
  Description of Artificial Sequence: Synthetic oligonucleotide
  Antisense strand to SEQ ID NO: 2066296
aaacauaagguacauuucu

SEQ ID NO: 2066298 - RNA, 19 nt, Artificial Sequence
  Description of Artificial Sequence: Synthetic oligonucleotide
  Sense strand starting at position 2038 of SEQ ID NO: 1881717
acagguuauuacucaccau

SEQ ID NO: 2066299 - RNA, 19 nt, Artificial Sequence
  Description of Artificial Sequence: Synthetic oligonucleotide
  Antisense strand to SEQ ID NO: 2066298
auggugaguaauaaccugu

SEQ ID NO: 2066300 - RNA, 19 nt, Artificial Sequence
  Description of Artificial Sequence: Synthetic oligonucleotide
  Sense strand starting at position 2041 of SEQ ID NO: 1881717
gguuauuacucaccaucug

SEQ ID NO: 2066301 - RNA, 19 nt, Artificial Sequence
  Description of Artificial Sequence: Synthetic oligonucleotide
  Antisense strand to SEQ ID NO: 2066300
cagauggugaguaauaacc

SEQ ID NO: 2066302 - RNA, 19 nt, Artificial Sequence
  Description of Artificial Sequence: Synthetic oligonucleotide
  Sense strand starting at position 2412 of SEQ ID NO: 1881717
cgacgcuucccgaauguga

SEQ ID NO: 2066303 - RNA, 19 nt, Artificial Sequence
  Description of Artificial Sequence: Synthetic oligonucleotide
  Antisense strand to SEQ ID NO: 2066302
ucacauucgggaagcgucg

SEQ ID NO: 2066304 - RNA, 19 nt, Artificial Sequence
  Description of Artificial Sequence: Synthetic oligonucleotide
  Sense strand starting at position 2746 of SEQ ID NO: 1881717
uccuguuuaggauacuuau

SEQ ID NO: 2066305 - RNA, 19 nt, Artificial Sequence
  Description of Artificial Sequence: Synthetic oligonucleotide
  Antisense strand to SEQ ID NO: 2066304
auaaguauccuaaacagga

SEQ ID NO: 2066306 - RNA, 19 nt, Artificial Sequence
  Description of Artificial Sequence: Synthetic oligonucleotide
  Sense strand starting at position 3221 of SEQ ID NO: 1881717
ccgauuucuuuauugugac

SEQ ID NO: 2066307 - RNA, 19 nt, Artificial Sequence
  Description of Artificial Sequence: Synthetic oligonucleotide
  Antisense strand to SEQ ID NO: 2066306
gucacaauaaagaaaucgg

SEQ ID NO: 2066308 - RNA, 19 nt, Artificial Sequence
  Description of Artificial Sequence: Synthetic oligonucleotide
  Sense strand starting at position 3238 of SEQ ID NO: 1881717
acagauauaccaugguauu

SEQ ID NO: 2066309 - RNA, 19 nt, Artificial Sequence
  Description of Artificial Sequence: Synthetic oligonucleotide
  Antisense strand to SEQ ID NO: 2066308
aauaccaugguauaucugu

SEQ ID NO: 2066310 - RNA, 19 nt, Artificial Sequence
  Description of Artificial Sequence: Synthetic oligonucleotide
  Sense strand starting at position 3239 of SEQ ID NO: 1881717
cagauauaccaugguauug

SEQ ID NO: 2066311 - RNA, 19 nt, Artificial Sequence
  Description of Artificial Sequence: Synthetic oligonucleotide
  Antisense strand to SEQ ID NO: 2066310
caauaccaugguauaucug

SEQ ID NO: 2066312 - RNA, 19 nt, Artificial Sequence
  Description of Artificial Sequence: Synthetic oligonucleotide
  Sense strand starting at position 3392 of SEQ ID NO: 1881717
aagacaaaguagugauuua

SEQ ID NO: 2066313 - RNA, 19 nt, Artificial Sequence
  Description of Artificial Sequence: Synthetic oligonucleotide
  Antisense strand to SEQ ID NO: 2066312
uaaaucacuacuuugucuu

SEQ ID NO: 2066314 - RNA, 19 nt, Artificial Sequence
  Description of Artificial Sequence: Synthetic oligonucleotide
  Sense strand starting at position 3421 of SEQ ID NO: 1881717
cuaucuacuuuagugugaa

SEQ ID NO: 2066315 - RNA, 19 nt, Artificial Sequence
  Description of Artificial Sequence: Synthetic oligonucleotide
  Antisense strand to SEQ ID NO: 2066314
uucacacuaaaguagauag

SEQ ID NO: 2066316 - RNA, 19 nt, Artificial Sequence
  Description of Artificial Sequence: Synthetic oligonucleotide
  Sense strand starting at position 3424 of SEQ ID NO: 1881717
ucuacuuuagugugaaauu

SEQ ID NO: 2066317 - RNA, 19 nt, Artificial Sequence
  Description of Artificial Sequence: Synthetic oligonucleotide
  Antisense strand to SEQ ID NO: 2066316
aauuucacacuaaaguaga

SEQ ID NO: 2066318 - RNA, 19 nt, Artificial Sequence
  Description of Artificial Sequence: Synthetic oligonucleotide
  Sense strand starting at position 3463 of SEQ ID NO: 1881717
uucuaaguuugacuugaga

SEQ ID NO: 2066319 - RNA, 19 nt, Artificial Sequence
  Description of Artificial Sequence: Synthetic oligonucleotide
  Antisense strand to SEQ ID NO: 2066318
ucucaagucaaacuuagaa

SEQ ID NO: 2066320 - RNA, 19 nt, Artificial Sequence
  Description of Artificial Sequence: Synthetic oligonucleotide
  Sense strand starting at position 3576 of SEQ ID NO: 1881717
uugguugguaaaugaagau

SEQ ID NO: 2066321 - RNA, 19 nt, Artificial Sequence
  Description of Artificial Sequence: Synthetic oligonucleotide
  Antisense strand to SEQ ID NO: 2066320
aucuucauuuaccaaccaa

SEQ ID NO: 2066322 - RNA, 19 nt, Artificial Sequence
  Description of Artificial Sequence: Synthetic oligonucleotide
  Sense strand starting at position 3583 of SEQ ID NO: 1881717
guaaaugaagauuggcuua

SEQ ID NO: 2066323 - RNA, 19 nt, Artificial Sequence
  Description of Artificial Sequence: Synthetic oligonucleotide
  Antisense strand to SEQ ID NO: 2066322
uaagccaaucuucauuuac

SEQ ID NO: 2066324 - RNA, 19 nt, Artificial Sequence
  Description of Artificial Sequence: Synthetic oligonucleotide
  Sense strand starting at position 3942 of SEQ ID NO: 1881717
aucaaaugauggcuaggua

SEQ ID NO: 2066325 - RNA, 19 nt, Artificial Sequence
  Description of Artificial Sequence: Synthetic oligonucleotide
  Antisense strand to SEQ ID NO: 2066324
uaccuagccaucauuugau

SEQ ID NO: 2066326 - RNA, 19 nt, Artificial Sequence
  Description of Artificial Sequence: Synthetic oligonucleotide
  Sense strand starting at position 3945 of SEQ ID NO: 1881717
aaaugauggcuagguaaca

SEQ ID NO: 2066327 - RNA, 19 nt, Artificial Sequence
  Description of Artificial Sequence: Synthetic oligonucleotide
  Antisense strand to SEQ ID NO: 2066326
uguuaccuagccaucauuu

SEQ ID NO: 2066328 - RNA, 19 nt, Artificial Sequence
  Description of Artificial Sequence: Synthetic oligonucleotide
  Sense strand starting at position 3946 of SEQ ID NO: 1881717
aaugauggcuagguaacau

SEQ ID NO: 2066329 - RNA, 19 nt, Artificial Sequence
  Description of Artificial Sequence: Synthetic oligonucleotide
  Antisense strand to SEQ ID NO: 2066328
auguuaccuagccaucauu

SEQ ID NO: 2066330 - RNA, 19 nt, Artificial Sequence
  Description of Artificial Sequence: Synthetic oligonucleotide
  Sense strand starting at position 220 of SEQ ID NO: 1881718
cugccucugccuugagaua

SEQ ID NO: 2066331 - RNA, 19 nt, Artificial Sequence
  Description of Artificial Sequence: Synthetic oligonucleotide
  Antisense strand to SEQ ID NO: 2066330
uaucucaaggcagaggcag

SEQ ID NO: 2066332 - RNA, 19 nt, Artificial Sequence
  Description of Artificial Sequence: Synthetic oligonucleotide
  Sense strand starting at position 221 of SEQ ID NO: 1881718
ugccucugccuugagauaa

SEQ ID NO: 2066333 - RNA, 19 nt, Artificial Sequence
  Description of Artificial Sequence: Synthetic oligonucleotide
  Antisense strand to SEQ ID NO: 2066332
uuaucucaaggcagaggca

SEQ ID NO: 2066334 - RNA, 19 nt, Artificial Sequence
  Description of Artificial Sequence: Synthetic oligonucleotide
  Sense strand starting at position 233 of SEQ ID NO: 1881718
gagauaacaugugcacaau

SEQ ID NO: 2066335 - RNA, 19 nt, Artificial Sequence
  Description of Artificial Sequence: Synthetic oligonucleotide
  Antisense strand to SEQ ID NO: 2066334
auugugcacauguuaucuc

SEQ ID NO: 2066336 - RNA, 19 nt, Artificial Sequence
  Description of Artificial Sequence: Synthetic oligonucleotide
  Sense strand starting at position 234 of SEQ ID NO: 1881718
agauaacaugugcacaauu

SEQ ID NO: 2066337 - RNA, 19 nt, Artificial Sequence
  Description of Artificial Sequence: Synthetic oligonucleotide
  Antisense strand to SEQ ID NO: 2066336
aauugugcacauguuaucu

SEQ ID NO: 2066338 - RNA, 19 nt, Artificial Sequence
  Description of Artificial Sequence: Synthetic oligonucleotide
  Sense strand starting at position 390 of SEQ ID NO: 1881718
ugcccaagauagucuuaac

SEQ ID NO: 2066339 - RNA, 19 nt, Artificial Sequence
  Description of Artificial Sequence: Synthetic oligonucleotide
  Antisense strand to SEQ ID NO: 2066338
guuaagacuaucuugggca

SEQ ID NO: 2066340 - RNA, 19 nt, Artificial Sequence
  Description of Artificial Sequence: Synthetic oligonucleotide
  Sense strand starting at position 586 of SEQ ID NO: 1881718
cuccucuaacaucgggauu

SEQ ID NO: 2066341 - RNA, 19 nt, Artificial Sequence
  Description of Artificial Sequence: Synthetic oligonucleotide
  Antisense strand to SEQ ID NO: 2066340
aaucccgauguuagaggag

SEQ ID NO: 2066342 - RNA, 19 nt, Artificial Sequence
  Description of Artificial Sequence: Synthetic oligonucleotide
  Sense strand starting at position 620 of SEQ ID NO: 1881718
ccaaacuugugagcaauua

SEQ ID NO: 2066343 - RNA, 19 nt, Artificial Sequence
  Description of Artificial Sequence: Synthetic oligonucleotide
  Antisense strand to SEQ ID NO: 2066342
uaauugcucacaaguuugg

SEQ ID NO: 2066344 - RNA, 19 nt, Artificial Sequence
  Description of Artificial Sequence: Synthetic oligonucleotide
  Sense strand starting at position 628 of SEQ ID NO: 1881718
gugagcaauuaccuaaauu

SEQ ID NO: 2066345 - RNA, 19 nt, Artificial Sequence
  Description of Artificial Sequence: Synthetic oligonucleotide
  Antisense strand to SEQ ID NO: 2066344
aauuuagguaauugcucac

SEQ ID NO: 2066346 - RNA, 19 nt, Artificial Sequence
  Description of Artificial Sequence: Synthetic oligonucleotide
  Sense strand starting at position 638 of SEQ ID NO: 1881718
accuaaauuuaugaggcua

SEQ ID NO: 2066347 - RNA, 19 nt, Artificial Sequence
  Description of Artificial Sequence: Synthetic oligonucleotide
  Antisense strand to SEQ ID NO: 2066346
uagccucauaaauuuaggu

SEQ ID NO: 2066348 - RNA, 19 nt, Artificial Sequence
  Description of Artificial Sequence: Synthetic oligonucleotide
  Sense strand starting at position 640 of SEQ ID NO: 1881718
cuaaauuuaugaggcuaga

SEQ ID NO: 2066349 - RNA, 19 nt, Artificial Sequence
  Description of Artificial Sequence: Synthetic oligonucleotide
  Antisense strand to SEQ ID NO: 2066348
ucuagccucauaaauuuag

SEQ ID NO: 2066350 - RNA, 19 nt, Artificial Sequence
  Description of Artificial Sequence: Synthetic oligonucleotide
  Sense strand starting at position 693 of SEQ ID NO: 1881718
agguaagaacaaugcuaug

SEQ ID NO: 2066351 - RNA, 19 nt, Artificial Sequence
  Description of Artificial Sequence: Synthetic oligonucleotide
  Antisense strand to SEQ ID NO: 2066350
cauagcauuguucuuaccu

SEQ ID NO: 2066352 - RNA, 19 nt, Artificial Sequence
  Description of Artificial Sequence: Synthetic oligonucleotide
  Sense strand starting at position 782 of SEQ ID NO: 1881718
gacagauacuccuucugug

SEQ ID NO: 2066353 - RNA, 19 nt, Artificial Sequence
  Description of Artificial Sequence: Synthetic oligonucleotide
  Antisense strand to SEQ ID NO: 2066352
cacagaaggaguaucuguc

SEQ ID NO: 2066354 - RNA, 19 nt, Artificial Sequence
  Description of Artificial Sequence: Synthetic oligonucleotide
  Sense strand starting at position 808 of SEQ ID NO: 1881718
uugugaaccuucuuaggcu

SEQ ID NO: 2066355 - RNA, 19 nt, Artificial Sequence
  Description of Artificial Sequence: Synthetic oligonucleotide
  Antisense strand to SEQ ID NO: 2066354
agccuaagaagguucacaa

SEQ ID NO: 2066356 - RNA, 19 nt, Artificial Sequence
  Description of Artificial Sequence: Synthetic oligonucleotide
  Sense strand starting at position 823 of SEQ ID NO: 1881718
ggcucaaugcaaugaaaua

SEQ ID NO: 2066357 - RNA, 19 nt, Artificial Sequence
  Description of Artificial Sequence: Synthetic oligonucleotide
  Antisense strand to SEQ ID NO: 2066356
uauuucauugcauugagcc

SEQ ID NO: 2066358 - RNA, 19 nt, Artificial Sequence
  Description of Artificial Sequence: Synthetic oligonucleotide
  Sense strand starting at position 882 of SEQ ID NO: 1881718
uuuccuaguuugguugaaa

SEQ ID NO: 2066359 - RNA, 19 nt, Artificial Sequence
  Description of Artificial Sequence: Synthetic oligonucleotide
  Antisense strand to SEQ ID NO: 2066358
uuucaaccaaacuaggaaa

SEQ ID NO: 2066360 - RNA, 19 nt, Artificial Sequence
  Description of Artificial Sequence: Synthetic oligonucleotide
  Sense strand starting at position 883 of SEQ ID NO: 1881718
uuccuaguuugguugaaau

SEQ ID NO: 2066361 - RNA, 19 nt, Artificial Sequence
  Description of Artificial Sequence: Synthetic oligonucleotide
  Antisense strand to SEQ ID NO: 2066360
auuucaaccaaacuaggaa

SEQ ID NO: 2066362 - RNA, 19 nt, Artificial Sequence
  Description of Artificial Sequence: Synthetic oligonucleotide
  Sense strand starting at position 885 of SEQ ID NO: 1881718
ccuaguuugguugaaauaa

SEQ ID NO: 2066363 - RNA, 19 nt, Artificial Sequence
  Description of Artificial Sequence: Synthetic oligonucleotide
  Antisense strand to SEQ ID NO: 2066362
uuauuucaaccaaacuagg

SEQ ID NO: 2066364 - RNA, 19 nt, Artificial Sequence
  Description of Artificial Sequence: Synthetic oligonucleotide
  Sense strand starting at position 941 of SEQ ID NO: 1881718
acaagugacuuuccagaag

SEQ ID NO: 2066365 - RNA, 19 nt, Artificial Sequence
  Description of Artificial Sequence: Synthetic oligonucleotide
  Antisense strand to SEQ ID NO: 2066364
cuucuggaaagucacuugu

SEQ ID NO: 2066366 - RNA, 19 nt, Artificial Sequence
  Description of Artificial Sequence: Synthetic oligonucleotide
  Sense strand starting at position 999 of SEQ ID NO: 1881718
cagagauacucacagguga

SEQ ID NO: 2066367 - RNA, 19 nt, Artificial Sequence
  Description of Artificial Sequence: Synthetic oligonucleotide
  Antisense strand to SEQ ID NO: 2066366
ucaccugugaguaucucug

SEQ ID NO: 2066368 - RNA, 19 nt, Artificial Sequence
  Description of Artificial Sequence: Synthetic oligonucleotide
  Sense strand starting at position 1013 of SEQ ID NO: 1881718
ggugaugaaacuugaguua

SEQ ID NO: 2066369 - RNA, 19 nt, Artificial Sequence
  Description of Artificial Sequence: Synthetic oligonucleotide
  Antisense strand to SEQ ID NO: 2066368
uaacucaaguuucaucacc

SEQ ID NO: 2066370 - RNA, 19 nt, Artificial Sequence
  Description of Artificial Sequence: Synthetic oligonucleotide
  Sense strand starting at position 1016 of SEQ ID NO: 1881718
gaugaaacuugaguuauca

SEQ ID NO: 2066371 - RNA, 19 nt, Artificial Sequence
  Description of Artificial Sequence: Synthetic oligonucleotide
  Antisense strand to SEQ ID NO: 2066370
ugauaacucaaguuucauc

SEQ ID NO: 2066372 - RNA, 19 nt, Artificial Sequence
  Description of Artificial Sequence: Synthetic oligonucleotide
  Sense strand starting at position 1064 of SEQ ID NO: 1881718
agaauagaaucuguaaggu

SEQ ID NO: 2066373 - RNA, 19 nt, Artificial Sequence
  Description of Artificial Sequence: Synthetic oligonucleotide
  Antisense strand to SEQ ID NO: 2066372
accuuacagauucuauucu

SEQ ID NO: 2066374 - RNA, 19 nt, Artificial Sequence
  Description of Artificial Sequence: Synthetic oligonucleotide
  Sense strand starting at position 1811 of SEQ ID NO: 1881718
uugcuuguucuauaaacug

SEQ ID NO: 2066375 - RNA, 19 nt, Artificial Sequence
  Description of Artificial Sequence: Synthetic oligonucleotide
  Antisense strand to SEQ ID NO: 2066374
caguuuauagaacaagcaa

SEQ ID NO: 2066376 - RNA, 19 nt, Artificial Sequence
  Description of Artificial Sequence: Synthetic oligonucleotide
  Sense strand starting at position 2002 of SEQ ID NO: 1881718
aggaaagggugcuuuguga

SEQ ID NO: 2066377 - RNA, 19 nt, Artificial Sequence
  Description of Artificial Sequence: Synthetic oligonucleotide
  Antisense strand to SEQ ID NO: 2066376
ucacaaagcacccuuuccu

SEQ ID NO: 2066378 - RNA, 19 nt, Artificial Sequence
  Description of Artificial Sequence: Synthetic oligonucleotide
  Sense strand starting at position 2058 of SEQ ID NO: 1881718
uuccgcguugcucucaaua

SEQ ID NO: 2066379 - RNA, 19 nt, Artificial Sequence
  Description of Artificial Sequence: Synthetic oligonucleotide
  Antisense strand to SEQ ID NO: 2066378
uauugagagcaacgcggaa

SEQ ID NO: 2066380 - RNA, 19 nt, Artificial Sequence
  Description of Artificial Sequence: Synthetic oligonucleotide
  Sense strand starting at position 2068 of SEQ ID NO: 1881718
cucucaauaccucguggau

SEQ ID NO: 2066381 - RNA, 19 nt, Artificial Sequence
  Description of Artificial Sequence: Synthetic oligonucleotide
  Antisense strand to SEQ ID NO: 2066380
auccacgagguauugagag

SEQ ID NO: 2066382 - RNA, 19 nt, Artificial Sequence
  Description of Artificial Sequence: Synthetic oligonucleotide
  Sense strand starting at position 2081 of SEQ ID NO: 1881718
guggaucucugcuucucua

SEQ ID NO: 2066383 - RNA, 19 nt, Artificial Sequence
  Description of Artificial Sequence: Synthetic oligonucleotide
  Antisense strand to SEQ ID NO: 2066382
uagagaagcagagauccac

SEQ ID NO: 2066384 - RNA, 19 nt, Artificial Sequence
  Description of Artificial Sequence: Synthetic oligonucleotide
  Sense strand starting at position 2089 of SEQ ID NO: 1881718
cugcuucucuaagucugaa

SEQ ID NO: 2066385 - RNA, 19 nt, Artificial Sequence
  Description of Artificial Sequence: Synthetic oligonucleotide
  Antisense strand to SEQ ID NO: 2066384
uucagacuuagagaagcag

SEQ ID NO: 2066386 - RNA, 19 nt, Artificial Sequence
  Description of Artificial Sequence: Synthetic oligonucleotide
  Sense strand starting at position 2150 of SEQ ID NO: 1881718
auggauguuuccuuccagu

SEQ ID NO: 2066387 - RNA, 19 nt, Artificial Sequence
  Description of Artificial Sequence: Synthetic oligonucleotide
  Antisense strand to SEQ ID NO: 2066386
acuggaaggaaacauccau

SEQ ID NO: 2066388 - RNA, 19 nt, Artificial Sequence
  Description of Artificial Sequence: Synthetic oligonucleotide
  Sense strand starting at position 2283 of SEQ ID NO: 1881718
gaacauaccugcgcuaaga

SEQ ID NO: 2066389 - RNA, 19 nt, Artificial Sequence
  Description of Artificial Sequence: Synthetic oligonucleotide
  Antisense strand to SEQ ID NO: 2066388
ucuuagcgcagguauguuc

SEQ ID NO: 2066390 - RNA, 19 nt, Artificial Sequence
  Description of Artificial Sequence: Synthetic oligonucleotide
  Sense strand starting at position 2826 of SEQ ID NO: 1881718
agccaaucccgggaagacu

SEQ ID NO: 2066391 - RNA, 19 nt, Artificial Sequence
  Description of Artificial Sequence: Synthetic oligonucleotide
  Antisense strand to SEQ ID NO: 2066390
agucuucccgggauuggcu

SEQ ID NO: 2066392 - RNA, 19 nt, Artificial Sequence
  Description of Artificial Sequence: Synthetic oligonucleotide
  Sense strand starting at position 2834 of SEQ ID NO: 1881718
ccgggaagacucugggcaa

SEQ ID NO: 2066393 - RNA, 19 nt, Artificial Sequence
  Description of Artificial Sequence: Synthetic oligonucleotide
  Antisense strand to SEQ ID NO: 2066392
uugcccagagucuucccgg

SEQ ID NO: 2066394 - RNA, 19 nt, Artificial Sequence
  Description of Artificial Sequence: Synthetic oligonucleotide
  Sense strand starting at position 3058 of SEQ ID NO: 1881718
ggagcauccuucucugaau

SEQ ID NO: 2066395 - RNA, 19 nt, Artificial Sequence
  Description of Artificial Sequence: Synthetic oligonucleotide
  Antisense strand to SEQ ID NO: 2066394
auucagagaaggaugcucc

SEQ ID NO: 2066396 - RNA, 19 nt, Artificial Sequence
  Description of Artificial Sequence: Synthetic oligonucleotide
  Sense strand starting at position 3190 of SEQ ID NO: 1881718
ggccuaaggcccugggauu

SEQ ID NO: 2066397 - RNA, 19 nt, Artificial Sequence
  Description of Artificial Sequence: Synthetic oligonucleotide
  Antisense strand to SEQ ID NO: 2066396
aaucccagggccuuaggcc

SEQ ID NO: 2066398 - RNA, 19 nt, Artificial Sequence
  Description of Artificial Sequence: Synthetic oligonucleotide
  Sense strand starting at position 3203 of SEQ ID NO: 1881718
gggauucccuuucuuaaag

SEQ ID NO: 2066399 - RNA, 19 nt, Artificial Sequence
  Description of Artificial Sequence: Synthetic oligonucleotide
  Antisense strand to SEQ ID NO: 2066398
cuuuaagaaagggaauccc

SEQ ID NO: 2066400 - RNA, 19 nt, Artificial Sequence
  Description of Artificial Sequence: Synthetic oligonucleotide
  Sense strand starting at position 3457 of SEQ ID NO: 1881718
agguaacaggcucaaacuu

SEQ ID NO: 2066401 - RNA, 19 nt, Artificial Sequence
  Description of Artificial Sequence: Synthetic oligonucleotide
  Antisense strand to SEQ ID NO: 2066400
aaguuugagccuguuaccu

SEQ ID NO: 2066402 - RNA, 19 nt, Artificial Sequence
  Description of Artificial Sequence: Synthetic oligonucleotide
  Sense strand starting at position 3465 of SEQ ID NO: 1881718
ggcucaaacuuggcaaaca

SEQ ID NO: 2066403 - RNA, 19 nt, Artificial Sequence
  Description of Artificial Sequence: Synthetic oligonucleotide
  Antisense strand to SEQ ID NO: 2066402
uguuugccaaguuugagcc

SEQ ID NO: 2066404 - RNA, 19 nt, Artificial Sequence
  Description of Artificial Sequence: Synthetic oligonucleotide
  Sense strand starting at position 3772 of SEQ ID NO: 1881718
agccuacacuugguuaaca

SEQ ID NO: 2066405 - RNA, 19 nt, Artificial Sequence
  Description of Artificial Sequence: Synthetic oligonucleotide
  Antisense strand to SEQ ID NO: 2066404
uguuaaccaaguguaggcu

SEQ ID NO: 2066406 - RNA, 19 nt, Artificial Sequence
  Description of Artificial Sequence: Synthetic oligonucleotide
  Sense strand starting at position 3814 of SEQ ID NO: 1881718
ggguguggcuuuguaaaca

SEQ ID NO: 2066407 - RNA, 19 nt, Artificial Sequence
  Description of Artificial Sequence: Synthetic oligonucleotide
  Antisense strand to SEQ ID NO: 2066406
uguuuacaaagccacaccc

SEQ ID NO: 2066408 - RNA, 19 nt, Artificial Sequence
  Description of Artificial Sequence: Synthetic oligonucleotide
  Sense strand starting at position 3875 of SEQ ID NO: 1881718
ggcuuuaccuguuuaagga

SEQ ID NO: 2066409 - RNA, 19 nt, Artificial Sequence
  Description of Artificial Sequence: Synthetic oligonucleotide
  Antisense strand to SEQ ID NO: 2066408
uccuuaaacagguaaagcc

SEQ ID NO: 2066410 - RNA, 19 nt, Artificial Sequence
  Description of Artificial Sequence: Synthetic oligonucleotide
  Sense strand starting at position 65 of SEQ ID NO: 1881719
ccaagaucgcacuaacaca

SEQ ID NO: 2066411 - RNA, 19 nt, Artificial Sequence
  Description of Artificial Sequence: Synthetic oligonucleotide
  Antisense strand to SEQ ID NO: 2066410
uguguuagugcgaucuugg

SEQ ID NO: 2066412 - RNA, 19 nt, Artificial Sequence
  Description of Artificial Sequence: Synthetic oligonucleotide
  Sense strand starting at position 259 of SEQ ID NO: 1881719
guaagaucaugucucucaa

SEQ ID NO: 2066413 - RNA, 19 nt, Artificial Sequence
  Description of Artificial Sequence: Synthetic oligonucleotide
  Antisense strand to SEQ ID NO: 2066412
uugagagacaugaucuuac

SEQ ID NO: 2066414 - RNA, 19 nt, Artificial Sequence
  Description of Artificial Sequence: Synthetic oligonucleotide
  Sense strand starting at position 657 of SEQ ID NO: 1881719
uuaguaaggugcucuggga

SEQ ID NO: 2066415 - RNA, 19 nt, Artificial Sequence
  Description of Artificial Sequence: Synthetic oligonucleotide
  Antisense strand to SEQ ID NO: 2066414
ucccagagcaccuuacuaa

SEQ ID NO: 2066416 - RNA, 19 nt, Artificial Sequence
  Description of Artificial Sequence: Synthetic oligonucleotide
  Sense strand starting at position 664 of SEQ ID NO: 1881719
ggugcucugggaggguaua

SEQ ID NO: 2066417 - RNA, 19 nt, Artificial Sequence
  Description of Artificial Sequence: Synthetic oligonucleotide
  Antisense strand to SEQ ID NO: 2066416
uauacccucccagagcacc

SEQ ID NO: 2066418 - RNA, 19 nt, Artificial Sequence
  Description of Artificial Sequence: Synthetic oligonucleotide
  Sense strand starting at position 675 of SEQ ID NO: 1881719
aggguauacuaguauuugu

SEQ ID NO: 2066419 - RNA, 19 nt, Artificial Sequence
  Description of Artificial Sequence: Synthetic oligonucleotide
  Antisense strand to SEQ ID NO: 2066418
acaaauacuaguauacccu

SEQ ID NO: 2066420 - RNA, 19 nt, Artificial Sequence
  Description of Artificial Sequence: Synthetic oligonucleotide
  Sense strand starting at position 718 of SEQ ID NO: 1881719
ggaauugauaaagguguga

SEQ ID NO: 2066421 - RNA, 19 nt, Artificial Sequence
  Description of Artificial Sequence: Synthetic oligonucleotide
  Antisense strand to SEQ ID NO: 2066420
ucacaccuuuaucaauucc

SEQ ID NO: 2066422 - RNA, 19 nt, Artificial Sequence
  Description of Artificial Sequence: Synthetic oligonucleotide
  Sense strand starting at position 722 of SEQ ID NO: 1881719
uugauaaaggugugaauug

SEQ ID NO: 2066423 - RNA, 19 nt, Artificial Sequence
  Description of Artificial Sequence: Synthetic oligonucleotide
  Antisense strand to SEQ ID NO: 2066422
caauucacaccuuuaucaa

SEQ ID NO: 2066424 - RNA, 19 nt, Artificial Sequence
  Description of Artificial Sequence: Synthetic oligonucleotide
  Sense strand starting at position 731 of SEQ ID NO: 1881719
gugugaauugcugaagcca

SEQ ID NO: 2066425 - RNA, 19 nt, Artificial Sequence
  Description of Artificial Sequence: Synthetic oligonucleotide
  Antisense strand to SEQ ID NO: 2066424
uggcuucagcaauucacac

SEQ ID NO: 2066426 - RNA, 19 nt, Artificial Sequence
  Description of Artificial Sequence: Synthetic oligonucleotide
  Sense strand starting at position 802 of SEQ ID NO: 1881719
cauccagugguaugacaga

SEQ ID NO: 2066427 - RNA, 19 nt, Artificial Sequence
  Description of Artificial Sequence: Synthetic oligonucleotide
  Antisense strand to SEQ ID NO: 2066426
ucugucauaccacuggaug

SEQ ID NO: 2066428 - RNA, 19 nt, Artificial Sequence
  Description of Artificial Sequence: Synthetic oligonucleotide
  Sense strand starting at position 820 of SEQ ID NO: 1881719
aagguaguaugauuaacac

SEQ ID NO: 2066429 - RNA, 19 nt, Artificial Sequence
  Description of Artificial Sequence: Synthetic oligonucleotide
  Antisense strand to SEQ ID NO: 2066428
guguuaaucauacuaccuu

SEQ ID NO: 2066430 - RNA, 19 nt, Artificial Sequence
  Description of Artificial Sequence: Synthetic oligonucleotide
  Sense strand starting at position 917 of SEQ ID NO: 1881719
gaagcaagguuaucagcua

SEQ ID NO: 2066431 - RNA, 19 nt, Artificial Sequence
  Description of Artificial Sequence: Synthetic oligonucleotide
  Antisense strand to SEQ ID NO: 2066430
uagcugauaaccuugcuuc

SEQ ID NO: 2066432 - RNA, 19 nt, Artificial Sequence
  Description of Artificial Sequence: Synthetic oligonucleotide
  Sense strand starting at position 925 of SEQ ID NO: 1881719
guuaucagcuaagcaagaa

SEQ ID NO: 2066433 - RNA, 19 nt, Artificial Sequence
  Description of Artificial Sequence: Synthetic oligonucleotide
  Antisense strand to SEQ ID NO: 2066432
uucuugcuuagcugauaac

SEQ ID NO: 2066434 - RNA, 19 nt, Artificial Sequence
  Description of Artificial Sequence: Synthetic oligonucleotide
  Sense strand starting at position 990 of SEQ ID NO: 1881719
gagugacuauagguggaua

SEQ ID NO: 2066435 - RNA, 19 nt, Artificial Sequence
  Description of Artificial Sequence: Synthetic oligonucleotide
  Antisense strand to SEQ ID NO: 2066434
uauccaccuauagucacuc

SEQ ID NO: 2066436 - RNA, 19 nt, Artificial Sequence
  Description of Artificial Sequence: Synthetic oligonucleotide
  Sense strand starting at position 1057 of SEQ ID NO: 1881719
acaguaaaggugcauagua

SEQ ID NO: 2066437 - RNA, 19 nt, Artificial Sequence
  Description of Artificial Sequence: Synthetic oligonucleotide
  Antisense strand to SEQ ID NO: 2066436
uacuaugcaccuuuacugu

SEQ ID NO: 2066438 - RNA, 19 nt, Artificial Sequence
  Description of Artificial Sequence: Synthetic oligonucleotide
  Sense strand starting at position 1059 of SEQ ID NO: 1881719
aguaaaggugcauaguagu
